United States Patent Application Publication US 2005/0255487 A1 - sequence listing, part 3

SEQ ID NO: 53902 - RNA, 19 nt, Homo sapiens
  misc_RNA (1)...(19): siRNA sense strand
agacagaaaggaaguguuc

SEQ ID NO: 53903 - RNA, 19 nt, Homo sapiens
  misc_RNA (1)...(19): siRNA sense strand
gccgagagcccaccuucuu

SEQ ID NO: 53904 - RNA, 19 nt, Homo sapiens
  misc_RNA (1)...(19): siRNA sense strand
caugauuccugccaagaca

SEQ ID NO: 53905 - RNA, 19 nt, Homo sapiens
  misc_RNA (1)...(19): siRNA sense strand
ucuucgagauuacaugauu

SEQ ID NO: 53906 - RNA, 19 nt, Homo sapiens
  misc_RNA (1)...(19): siRNA sense strand
caucaaggagacacuaaga

SEQ ID NO: 53907 - RNA, 19 nt, Homo sapiens
  misc_RNA (1)...(19): siRNA sense strand
uggcuaaaccuguaccauu

SEQ ID NO: 53908 - RNA, 19 nt, Homo sapiens
  misc_RNA (1)...(19): siRNA sense strand
caaggagacacuaagacuu

SEQ ID NO: 53909 - RNA, 19 nt, Homo sapiens
  misc_RNA (1)...(19): siRNA sense strand
cccgauggcugagcaaaga

SEQ ID NO: 53910 - RNA, 19 nt, Homo sapiens
  misc_RNA (1)...(19): siRNA sense strand
guccagaauuuccagaagu

SEQ ID NO: 53911 - RNA, 19 nt, Homo sapiens
  misc_RNA (1)...(19): siRNA sense strand
ccucaaagccagcaucaag

SEQ ID NO: 53912 - RNA, 19 nt, Homo sapiens
  misc_RNA (1)...(19): siRNA sense strand
caucaaggccaacgucaca

SEQ ID NO: 53913 - RNA, 19 nt, Homo sapiens
  misc_RNA (1)...(19): siRNA sense strand
gcacaggcgcaucaagaag

SEQ ID NO: 53914 - RNA, 19 nt, Homo sapiens
  misc_RNA (1)...(19): siRNA sense strand
caacguggagucgguuuau

SEQ ID NO: 53915 - RNA, 19 nt, Homo sapiens
  misc_RNA (1)...(19): siRNA sense strand
ggaauugagacagaaagga

SEQ ID NO: 53916 - RNA, 19 nt, Homo sapiens
  misc_RNA (1)...(19): siRNA sense strand
gcaaagacaagaacaucac

SEQ ID NO: 53917 - RNA, 19 nt, Homo sapiens
  misc_RNA (1)...(19): siRNA sense strand
gcaaguggccaucuaugcu

SEQ ID NO: 53918 - RNA, 19 nt, Homo sapiens
  misc_RNA (1)...(19): siRNA sense strand
ggaaguguucaccacgauu

SEQ ID NO: 53919 - RNA, 19 nt, Homo sapiens
  misc_RNA (1)...(19): siRNA sense strand
ucuuguaaaugacuugguu

SEQ ID NO: 53920 - RNA, 19 nt, Homo sapiens
  misc_RNA (1)...(19): siRNA sense strand
gaaaagcccaucuccuuca

SEQ ID NO: 53921 - RNA, 19 nt, Homo sapiens
  misc_RNA (1)...(19): siRNA sense strand
ucaaagccagcaucaagga

SEQ ID NO: 53922 - RNA, 19 nt, Homo sapiens
  misc_RNA (1)...(19): siRNA sense strand
acauucaaccucauucuga

SEQ ID NO: 53923 - RNA, 19 nt, Homo sapiens
  misc_RNA (1)...(19): siRNA sense strand
gaccaucuuccucaucaau

SEQ ID NO: 53924 - RNA, 19 nt, Homo sapiens
  misc_RNA (1)...(19): siRNA sense strand
gccuuugaguccaucacua

SEQ ID NO: 53925 - RNA, 19 nt, Homo sapiens
  misc_RNA (1)...(19): siRNA sense strand
caagaacaucaccuacuuc

SEQ ID NO: 53926 - RNA, 19 nt, Homo sapiens
  misc_RNA (1)...(19): siRNA sense strand
gacaagaacaucaccuacu

SEQ ID NO: 53927 - RNA, 19 nt, Homo sapiens
  misc_RNA (1)...(19): siRNA sense strand
agacauggccacgaugcua

SEQ ID NO: 53928 - RNA, 19 nt, Homo sapiens
  misc_RNA (1)...(19): siRNA sense strand
acauauacacccagaacuu

SEQ ID NO: 53929 - RNA, 19 nt, Homo sapiens
  misc_RNA (1)...(19): siRNA sense strand
ccuuugaguccaucacuaa

SEQ ID NO: 53930 - RNA, 19 nt, Homo sapiens
  misc_RNA (1)...(19): siRNA sense strand
cauucaaccucauucugau

SEQ ID NO: 53931 - RNA, 19 nt, Homo sapiens
  misc_RNA (1)...(19): siRNA sense strand
gcaccacauucaaccucau

SEQ ID NO: 53932 - RNA, 19 nt, Homo sapiens
  misc_RNA (1)...(19): siRNA sense strand
guucuucgagauuacauga

SEQ ID NO: 53933 - RNA, 19 nt, Homo sapiens
  misc_RNA (1)...(19): siRNA sense strand
caaaguccaccuucaccau

SEQ ID NO: 53934 - RNA, 19 nt, Homo sapiens
  misc_RNA (1)...(19): siRNA sense strand
cacacaaaguccaccuuca

SEQ ID NO: 53935 - RNA, 19 nt, Homo sapiens
  misc_RNA (1)...(19): siRNA sense strand
cauauacacccagaacuuc

SEQ ID NO: 53936 - RNA, 19 nt, Homo sapiens
  misc_RNA (1)...(19): siRNA sense strand
gagacgggcacacacaaag

SEQ ID NO: 53937 - RNA, 19 nt, Homo sapiens
  misc_RNA (1)...(19): siRNA sense strand
gcuaaaccuguaccauuuc

SEQ ID NO: 53938 - RNA, 19 nt, Homo sapiens
  misc_RNA (1)...(19): siRNA sense strand
aaggagacacuaagacuuc

SEQ ID NO: 53939 - RNA, 19 nt, Homo sapiens
  misc_RNA (1)...(19): siRNA sense strand
cuccagaggccaccaagaa

SEQ ID NO: 53940 - RNA, 19 nt, Homo sapiens
  misc_RNA (1)...(19): siRNA sense strand
cuaaaccuguaccauuucu

SEQ ID NO: 53941 - RNA, 19 nt, Homo sapiens
  misc_RNA (1)...(19): siRNA sense strand
ugucaucgacccugaagau

SEQ ID NO: 53942 - RNA, 19 nt, Homo sapiens
  misc_RNA (1)...(19): siRNA sense strand
ucaccuacuuccggaacuu

SEQ ID NO: 53943 - RNA, 19 nt, Homo sapiens
  misc_RNA (1)...(19): siRNA sense strand
gagauaucuuguaaaugac

SEQ ID NO: 53944 - RNA, 19 nt, Homo sapiens
  misc_RNA (1)...(19): siRNA sense strand
uucaccauguccagaauuu

SEQ ID NO: 53945 - RNA, 19 nt, Homo sapiens
  misc_RNA (1)...(19): siRNA sense strand
ccuguuggaugcagugucu

SEQ ID NO: 53946 - RNA, 19 nt, Homo sapiens
  misc_RNA (1)...(19): siRNA sense strand
ucgcugagcuagagaugac

SEQ ID NO: 53947 - RNA, 19 nt, Homo sapiens
  misc_RNA (1)...(19): siRNA sense strand
aagacaagaacaucaccua

SEQ ID NO: 53948 - RNA, 19 nt, Homo sapiens
  misc_RNA (1)...(19): siRNA sense strand
gaaguauggcccgauuuac

SEQ ID NO: 53949 - RNA, 19 nt, Homo sapiens
  misc_RNA (1)...(19): siRNA sense strand
ugacauauacacccagaac

SEQ ID NO: 53950 - RNA, 19 nt, Homo sapiens
  misc_RNA (1)...(19): siRNA sense strand
cagaggccaccaagaacuu

SEQ ID NO: 53951 - RNA, 19 nt, Homo sapiens
  misc_RNA (1)...(19): siRNA sense strand
ucaaggagacacuaagacu

SEQ ID NO: 53952 - RNA, 19 nt, Homo sapiens
  misc_RNA (1)...(19): siRNA sense strand
auguggcccuucucuuuaa

SEQ ID NO: 53953 - RNA, 19 nt, Homo sapiens
  misc_RNA (1)...(19): siRNA sense strand
cagaauuuccagaaguaug

SEQ ID NO: 53954 - RNA, 19 nt, Homo sapiens
  misc_RNA (1)...(19): siRNA sense strand
ggugacaauggcuggcuaa

SEQ ID NO: 53955 - RNA, 19 nt, Homo sapiens
  misc_RNA (1)...(19): siRNA sense strand
acuugguucuucgagauua

SEQ ID NO: 53956 - RNA, 19 nt, Homo sapiens
  misc_RNA (1)...(19): siRNA sense strand
guaaagcugacauauacac

SEQ ID NO: 53957 - RNA, 19 nt, Homo sapiens
  misc_RNA (1)...(19): siRNA sense strand
gaugcuggaggaaguagug

SEQ ID NO: 53958 - RNA, 19 nt, Homo sapiens
  misc_RNA (1)...(19): siRNA sense strand
gagagcccaccuucuucuu

SEQ ID NO: 53959 - RNA, 19 nt, Homo sapiens
  misc_RNA (1)...(19): siRNA sense strand
cugcacaggcgcaucaaga

SEQ ID NO: 53960 - RNA, 19 nt, Homo sapiens
  misc_RNA (1)...(19): siRNA sense strand
uccaacaccucagcgaugu

SEQ ID NO: 53961 - RNA, 19 nt, Homo sapiens
  misc_RNA (1)...(19): siRNA sense strand
gggagacgggcacacacaa

SEQ ID NO: 53962 - RNA, 19 nt, Homo sapiens
  misc_RNA (1)...(19): siRNA sense strand
gaccuguuccgucuguuca

SEQ ID NO: 53963 - RNA, 19 nt, Homo sapiens
  misc_RNA (1)...(19): siRNA sense strand
gaacagugcucaugcuaaa

SEQ ID NO: 53964 - RNA, 19 nt, Homo sapiens
  misc_RNA (1)...(19): siRNA sense strand
caacaguucugggugaaua

SEQ ID NO: 53965 - RNA, 19 nt, Homo sapiens
  misc_RNA (1)...(19): siRNA sense strand
caagaaguauggcaagauu

SEQ ID NO: 53966 - RNA, 19 nt, Homo sapiens
  misc_RNA (1)...(19): siRNA sense strand
gaggaagauuugaggaaua

SEQ ID NO: 53967 - RNA, 19 nt, Homo sapiens
  misc_RNA (1)...(19): siRNA sense strand
caaaguguauuaccugaga

SEQ ID NO: 53968 - RNA, 19 nt, Homo sapiens
  misc_RNA (1)...(19): siRNA sense strand
gaugagcucugugaugaaa

SEQ ID NO: 53969 - RNA, 19 nt, Homo sapiens
  misc_RNA (1)...(19): siRNA sense strand
gugcauuggucgccgauua

SEQ ID NO: 53970 - RNA, 19 nt, Homo sapiens
  misc_RNA (1)...(19): siRNA sense strand
ugaauaugcuuuacccaaa

SEQ ID NO: 53971 - RNA, 19 nt, Homo sapiens
  misc_RNA (1)...(19): siRNA sense strand
uagaugagcucugugauga

SEQ ID NO: 53972 - RNA, 19 nt, Homo sapiens
  misc_RNA (1)...(19): siRNA sense strand
gaagauucaagucaguuua

SEQ ID NO: 53973 - RNA, 19 nt, Homo sapiens
  misc_RNA (1)...(19): siRNA sense strand
ugaugaagcuggacaacaa

SEQ ID NO: 53974 - RNA, 19 nt, Homo sapiens
  misc_RNA (1)...(19): siRNA sense strand
gaaguuggguuccuuugag

SEQ ID NO: 53975 - RNA, 19 nt, Homo sapiens
  misc_RNA (1)...(19): siRNA sense strand
gaauagaugagcucuguga

SEQ ID NO: 53976 - RNA, 19 nt, Homo sapiens
  misc_RNA (1)...(19): siRNA sense strand
gugcagauuuccuuuguga

SEQ ID NO: 53977 - RNA, 19 nt, Homo sapiens
  misc_RNA (1)...(19): siRNA sense strand
ggaggaagauuugaggaau

SEQ ID NO: 53978 - RNA, 19 nt, Homo sapiens
  misc_RNA (1)...(19): siRNA sense strand
uaauguggauucucuacaa

SEQ ID NO: 53979 - RNA, 19 nt, Homo sapiens
  misc_RNA (1)...(19): siRNA sense strand
caaugagccuguugagaug

SEQ ID NO: 53980 - RNA, 19 nt, Homo sapiens
  misc_RNA (1)...(19): siRNA sense strand
caacugcauuuggcucuuu

SEQ ID NO: 53981 - RNA, 19 nt, Homo sapiens
  misc_RNA (1)...(19): siRNA sense strand
ugaaagaggccacgucgaa

SEQ ID NO: 53982 - RNA, 19 nt, Homo sapiens
  misc_RNA (1)...(19): siRNA sense strand
acagcgaacugaacaaaug

SEQ ID NO: 53983 - RNA, 19 nt, Homo sapiens
  misc_RNA (1)...(19): siRNA sense strand
guaucugccucguguugua

SEQ ID NO: 53984 - RNA, 19 nt, Homo sapiens
  misc_RNA (1)...(19): siRNA sense strand
caaacagucuaauguggau

SEQ ID NO: 53985 - RNA, 19 nt, Homo sapiens
  misc_RNA (1)...(19): siRNA sense strand
ugacauuuaucaccagaau

SEQ ID NO: 53986 - RNA, 19 nt, Homo sapiens
  misc_RNA (1)...(19): siRNA sense strand
ggaacagugcucaugcuaa

SEQ ID NO: 53987 - RNA, 19 nt, Homo sapiens
  misc_RNA (1)...(19): siRNA sense strand
uguggauucucuacaauuu

SEQ ID NO: 53988 - RNA, 19 nt, Homo sapiens
  misc_RNA (1)...(19): siRNA sense strand
aaacaaugaugagcacguu

SEQ ID NO: 53989 - RNA, 19 nt, Homo sapiens
  misc_RNA (1)...(19): siRNA sense strand
acaagagccucaacaccaa

SEQ ID NO: 53990 - RNA, 19 nt, Homo sapiens
  misc_RNA (1)...(19): siRNA sense strand
acagugcucaugcuaaaua

SEQ ID NO: 53991 - RNA, 19 nt, Homo sapiens
  misc_RNA (1)...(19): siRNA sense strand
acaaugagccuguugagau

SEQ ID NO: 53992 - RNA, 19 nt, Homo sapiens
  misc_RNA (1)...(19): siRNA sense strand
gcagauuuccuuugugaca

SEQ ID NO: 53993 - RNA, 19 nt, Homo sapiens
  misc_RNA (1)...(19): siRNA sense strand
gaaggccuaucgcgacuac

SEQ ID NO: 53994 - RNA, 19 nt, Homo sapiens
  misc_RNA (1)...(19): siRNA sense strand
guacagcgaacugaacaaa

SEQ ID NO: 53995 - RNA, 19 nt, Homo sapiens
  misc_RNA (1)...(19): siRNA sense strand
uggaguaccacaagaagua

SEQ ID NO: 53996 - RNA, 19 nt, Homo sapiens
  misc_RNA (1)...(19): siRNA sense strand
gggaugaagcugugaacuu

SEQ ID NO: 53997 - RNA, 19 nt, Homo sapiens
  misc_RNA (1)...(19): siRNA sense strand
caaaggaacagugcucaug

SEQ ID NO: 53998 - RNA, 19 nt, Homo sapiens
  misc_RNA (1)...(19): siRNA sense strand
ggaaacgacagcaaacagu

SEQ ID NO: 53999 - RNA, 19 nt, Homo sapiens
  misc_RNA (1)...(19): siRNA sense strand
gcaugaaguuggguuccuu

SEQ ID NO: 54000 - RNA, 19 nt, Homo sapiens
  misc_RNA (1)...(19): siRNA sense strand
caaaaucaaugaggucuug

SEQ ID NO: 54001 - RNA, 19 nt, Homo sapiens
  misc_RNA (1)...(19): siRNA sense strand
aacaaaagcuucuuaagga

SEQ ID NO: 54002 - RNA, 19 nt, Homo sapiens
  misc_RNA (1)...(19): siRNA sense strand
ugagcucugugaugaaaga

SEQ ID NO: 54003 - RNA, 19 nt, Homo sapiens
  misc_RNA (1)...(19): siRNA sense strand
gggauccagugaagacaau

SEQ ID NO: 54004 - RNA, 19 nt, Homo sapiens
  misc_RNA (1)...(19): siRNA sense strand
aggaagauuugaggaauau

SEQ ID NO: 54005 - RNA, 19 nt, Homo sapiens
  misc_RNA (1)...(19): siRNA sense strand
gauccagugaagacaauuu

SEQ ID NO: 54006 - RNA, 19 nt, Homo sapiens
  misc_RNA (1)...(19): siRNA sense strand
caacucggacucuugacaa

SEQ ID NO: 54007 - RNA, 19 nt, Homo sapiens
  misc_RNA (1)...(19): siRNA sense strand
aauggucguuugaaaguau

SEQ ID NO: 54008 - RNA, 19 nt, Homo sapiens
  misc_RNA (1)...(19): siRNA sense strand
gggaggaagauuugaggaa

SEQ ID NO: 54009 - RNA, 19 nt, Homo sapiens
  misc_RNA (1)...(19): siRNA sense strand
aacguuggcuucaggagaa

SEQ ID NO: 54010 - RNA, 19 nt, Homo sapiens
  misc_RNA (1)...(19): siRNA sense strand
gaugaagcuggacaacaaa

SEQ ID NO: 54011 - RNA, 19 nt, Homo sapiens
  misc_RNA (1)...(19): siRNA sense strand
gaagauuugaggaauaugc

SEQ ID NO: 54012 - RNA, 19 nt, Homo sapiens
  misc_RNA (1)...(19): siRNA sense strand
caaagaaagaauuguaugc

SEQ ID NO: 54013 - RNA, 19 nt, Homo sapiens
  misc_RNA (1)...(19): siRNA sense strand
cacaagaaguauggcaaga

SEQ ID NO: 54014 - RNA, 19 nt, Homo sapiens
  misc_RNA (1)...(19): siRNA sense strand
guuggauuguccgcaaaua

SEQ ID NO: 54015 - RNA, 19 nt, Homo sapiens
  misc_RNA (1)...(19): siRNA sense strand
gcuaaauacccagguguug

SEQ ID NO: 54016 - RNA, 19 nt, Homo sapiens
  misc_RNA (1)...(19): siRNA sense strand
uuacaacucggacucuuga

SEQ ID NO: 54017 - RNA, 19 nt, Homo sapiens
  misc_RNA (1)...(19): siRNA sense strand
guggauucucuacaauuua

SEQ ID NO: 54018 - RNA, 19 nt, Homo sapiens
  misc_RNA (1)...(19): siRNA sense strand
gacaaccgguuagagaagu

SEQ ID NO: 54019 - RNA, 19 nt, Homo sapiens
  misc_RNA (1)...(19): siRNA sense strand
aaauggucguuugaaagua

SEQ ID NO: 54020 - RNA, 19 nt, Homo sapiens
  misc_RNA (1)...(19): siRNA sense strand
uacaauuuaucccguaauc

SEQ ID NO: 54021 - RNA, 19 nt, Homo sapiens
  misc_RNA (1)...(19): siRNA sense strand
cagcaaacagucuaaugug

SEQ ID NO: 54022 - RNA, 19 nt, Homo sapiens
  misc_RNA (1)...(19): siRNA sense strand
acaaccgguuagagaagua

SEQ ID NO: 54023 - RNA, 19 nt, Homo sapiens
  misc_RNA (1)...(19): siRNA sense strand
aaagaggccacgucgaaga

SEQ ID NO: 54024 - RNA, 19 nt, Homo sapiens
  misc_RNA (1)...(19): siRNA sense strand
gagcuucaacugcauuugg

SEQ ID NO: 54025 - RNA, 19 nt, Homo sapiens
  misc_RNA (1)...(19): siRNA sense strand
gauuuccuuugugacauuu

SEQ ID NO: 54026 - RNA, 19 nt, Homo sapiens
  misc_RNA (1)...(19): siRNA sense strand
uagugcagauuuccuuugu

SEQ ID NO: 54027 - RNA, 19 nt, Homo sapiens
  misc_RNA (1)...(19): siRNA sense strand
cagucgagcugcacaagag

SEQ ID NO: 54028 - RNA, 19 nt, Homo sapiens
  misc_RNA (1)...(19): siRNA sense strand
caaaucagucaaagcuugu

SEQ ID NO: 54029 - RNA, 19 nt, Homo sapiens
  misc_RNA (1)...(19): siRNA sense strand
gacagcaaacagucuaaug

SEQ ID NO: 54030 - RNA, 19 nt, Homo sapiens
  misc_RNA (1)...(19): siRNA sense strand
agauuuccuuugugacauu

SEQ ID NO: 54031 - RNA, 19 nt, Homo sapiens
  misc_RNA (1)...(19): siRNA sense strand
aaugaggucuuggccgauu

SEQ ID NO: 54032 - RNA, 19 nt, Homo sapiens
  misc_RNA (1)...(19): siRNA sense strand
aagccugucugaaagaauc

SEQ ID NO: 54033 - RNA, 19 nt, Homo sapiens
  misc_RNA (1)...(19): siRNA sense strand
cgagacuggugacaucuac

SEQ ID NO: 54034 - RNA, 19 nt, Homo sapiens
  misc_RNA (1)...(19): siRNA sense strand
gguccggagugccuuucaa

SEQ ID NO: 54035 - RNA, 19 nt, Homo sapiens
  misc_RNA (1)...(19): siRNA sense strand
ggcaagauuuuccgcauga

SEQ ID NO: 54036 - RNA, 19 nt, Homo sapiens
  misc_RNA (1)...(19): siRNA sense strand
gaggccacgucgaagacuu

SEQ ID NO: 54037 - RNA, 19 nt, Homo sapiens
  misc_RNA (1)...(19): siRNA sense strand
ugaaguuggguuccuuuga

SEQ ID NO: 54038 - RNA, 19 nt, Homo sapiens
  misc_RNA (1)...(19): siRNA sense strand
aaagaaucuaugaggcuua

SEQ ID NO: 54039 - RNA, 19 nt, Homo sapiens
  misc_RNA (1)...(19): siRNA sense strand
ggccacgggaggaagauuu

SEQ ID NO: 54040 - RNA, 19 nt, Homo sapiens
  misc_RNA (1)...(19): siRNA sense strand
caacaaaagcuucuuaagg

SEQ ID NO: 54041 - RNA, 19 nt, Homo sapiens
  misc_RNA (1)...(19): siRNA sense strand
ucuacaauuuaucccguaa

SEQ ID NO: 54042 - RNA, 19 nt, Homo sapiens
  misc_RNA (1)...(19): siRNA sense strand
agucuaauguggauucucu

SEQ ID NO: 54043 - RNA, 19 nt, Homo sapiens
  misc_RNA (1)...(19): siRNA sense strand
acaaugaugagcacguuug

SEQ ID NO: 54044 - RNA, 19 nt, Homo sapiens
  misc_RNA (1)...(19): siRNA sense strand
ggcaacaguucugggugaa

SEQ ID NO: 54045 - RNA, 19 nt, Homo sapiens
  misc_RNA (1)...(19): siRNA sense strand
gcagccuagugcagauuuc

SEQ ID NO: 54046 - RNA, 19 nt, Homo sapiens
  misc_RNA (1)...(19): siRNA sense strand
gacaaugagccuguugaga

SEQ ID NO: 54047 - RNA, 19 nt, Homo sapiens
  misc_RNA (1)...(19): siRNA sense strand
ugucugaaagaaucuauga

SEQ ID NO: 54048 - RNA, 19 nt, Homo sapiens
  misc_RNA (1)...(19): siRNA sense strand
acagcaaacagucuaaugu

SEQ ID NO: 54049 - RNA, 19 nt, Homo sapiens
  misc_RNA (1)...(19): siRNA sense strand
ggaguaccacaagaaguau

SEQ ID NO: 54050 - RNA, 19 nt, Homo sapiens
  misc_RNA (1)...(19): siRNA sense strand
uuuaaaagccugucugaaa

SEQ ID NO: 54051 - RNA, 19 nt, Homo sapiens
  misc_RNA (1)...(19): siRNA sense strand
ugacaaggcaacaguucug

SEQ ID NO: 54052 - RNA, 19 nt, Homo sapiens
  misc_RNA (1)...(19): siRNA sense strand
ccacgucgaagacuuguac

SEQ ID NO: 54053 - RNA, 19 nt, Homo sapiens
  misc_RNA (1)...(19): siRNA sense strand
caaaagcuucuuaaggaaa

SEQ ID NO: 54054 - RNA, 19 nt, Homo sapiens
  misc_RNA (1)...(19): siRNA sense strand
cgacaaccgguuagagaag

SEQ ID NO: 54055 - RNA, 19 nt, Homo sapiens
  misc_RNA (1)...(19): siRNA sense strand
ucaccagaaucggcuuuca

SEQ ID NO: 54056 - RNA, 19 nt, Homo sapiens
  misc_RNA (1)...(19): siRNA sense strand
uuaaaagccugucugaaag

SEQ ID NO: 54057 - RNA, 19 nt, Homo sapiens
  misc_RNA (1)...(19): siRNA sense strand
guguauuaccugagaauca

SEQ ID NO: 54058 - RNA, 19 nt, Homo sapiens
  misc_RNA (1)...(19): siRNA sense strand
ggucuuggccgauuuuaug

SEQ ID NO: 54059 - RNA, 19 nt, Homo sapiens
  misc_RNA (1)...(19): siRNA sense strand
acaaaagcuucuuaaggaa

SEQ ID NO: 54060 - RNA, 19 nt, Homo sapiens
  misc_RNA (1)...(19): siRNA sense strand
aaaguguauuaccugagaa

SEQ ID NO: 54061 - RNA, 19 nt, Homo sapiens
  misc_RNA (1)...(19): siRNA sense strand
uugcgcaucuuccauuugg

SEQ ID NO: 54062 - RNA, 19 nt, Homo sapiens
  misc_RNA (1)...(19): siRNA sense strand
gcuacgggcugcugauccu

SEQ ID NO: 54063 - RNA, 19 nt, Homo sapiens
  misc_RNA (1)...(19): siRNA sense strand
gagaagagcugaagaguaa

SEQ ID NO: 54064 - RNA, 19 nt, Homo sapiens
  misc_RNA (1)...(19): siRNA sense strand
ccacaucucugaucacuua

SEQ ID NO: 54065 - RNA, 19 nt, Homo sapiens
  misc_RNA (1)...(19): siRNA sense strand
gcagagaucuucaccaaca

SEQ ID NO: 54066 - RNA, 19 nt, Homo sapiens
  misc_RNA (1)...(19): siRNA sense strand
cccaagggcuggaauguua

SEQ ID NO: 54067 - RNA, 19 nt, Homo sapiens
  misc_RNA (1)...(19): siRNA sense strand
ggaauguuaucuacaguau

SEQ ID NO: 54068 - RNA, 19 nt, Homo sapiens
  misc_RNA (1)...(19): siRNA sense strand
gaaaugacccgcaaucucu

SEQ ID NO: 54069 - RNA, 19 nt, Homo sapiens
  misc_RNA (1)...(19): siRNA sense strand
ggaaauacggcuucaucua

SEQ ID NO: 54070 - RNA, 19 nt, Homo sapiens
  misc_RNA (1)...(19): siRNA sense strand
gaaauacggcuucaucuac

SEQ ID NO: 54071 - RNA, 19 nt, Homo sapiens
  misc_RNA (1)...(19): siRNA sense strand
caaccgaacuccucuuugg

SEQ ID NO: 54072 - RNA, 19 nt, Homo sapiens
  misc_RNA (1)...(19): siRNA sense strand
ggguugcucugaagacuuu

SEQ ID NO: 54073 - RNA, 19 nt, Homo sapiens
  misc_RNA (1)...(19): siRNA sense strand
aaauggaccuccuacaaug

SEQ ID NO: 54074 - RNA, 19 nt, Homo sapiens
  misc_RNA (1)...(19): siRNA sense strand
gcaaucaagacaacaaguu

SEQ ID NO: 54075 - RNA, 19 nt, Homo sapiens
  misc_RNA (1)...(19): siRNA sense strand
aaauacaucggguguguua

SEQ ID NO: 54076 - RNA, 19 nt, Homo sapiens
  misc_RNA (1)...(19): siRNA sense strand
ggaucuggcugccucucua

SEQ ID NO: 54077 - RNA, 19 nt, Homo sapiens
  misc_RNA (1)...(19): siRNA sense strand
uuaaauggauaccagauuc

SEQ ID NO: 54078 - RNA, 19 nt, Homo sapiens
  misc_RNA (1)...(19): siRNA sense strand
ggaacaacuuaaauacauc

SEQ ID NO: 54079 - RNA, 19 nt, Homo sapiens
  misc_RNA (1)...(19): siRNA sense strand
uggcagagaucuucaccaa

SEQ ID NO: 54080 - RNA, 19 nt, Homo sapiens
  misc_RNA (1)...(19): siRNA sense strand
gcacuaaagcaaucuucaa

SEQ ID NO: 54081 - RNA, 19 nt, Homo sapiens
  misc_RNA (1)...(19): siRNA sense strand
uaaauggaccuccuacaau

SEQ ID NO: 54082 - RNA, 19 nt, Homo sapiens
  misc_RNA (1)...(19): siRNA sense strand
caagagcaaucaagacaac

SEQ ID NO: 54083 - RNA, 19 nt, Homo sapiens
  misc_RNA (1)...(19): siRNA sense strand
uacaucggguguguuauua

SEQ ID NO: 54084 - RNA, 19 nt, Homo sapiens
  misc_RNA (1)...(19): siRNA sense strand
gcagccacaucucugauca

SEQ ID NO: 54085 - RNA, 19 nt, Homo sapiens
  misc_RNA (1)...(19): siRNA sense strand
ccaacaaggaagaauuuaa

SEQ ID NO: 54086 - RNA, 19 nt, Homo sapiens
  misc_RNA (1)...(19): siRNA sense strand
gcugaagaguaaggguuua

SEQ ID NO: 54087 - RNA, 19 nt, Homo sapiens
  misc_RNA (1)...(19): siRNA sense strand
cgagaagagcugaagagua

SEQ ID NO: 54088 - RNA, 19 nt, Homo sapiens
  misc_RNA (1)...(19): siRNA sense strand
ggaaaugacccgcaaucuc

SEQ ID NO: 54089 - RNA, 19 nt, Homo sapiens
  misc_RNA (1)...(19): siRNA sense strand
gaucuucaccaacaaggaa

SEQ ID NO: 54090 - RNA, 19 nt, Homo sapiens
  misc_RNA (1)...(19): siRNA sense strand
gagagcggcuggacaugca

SEQ ID NO: 54091 - RNA, 19 nt, Homo sapiens
  misc_RNA (1)...(19): siRNA sense strand
gaacauucgcgccaagauc

SEQ ID NO: 54092 - RNA, 19 nt, Homo sapiens
  misc_RNA (1)...(19): siRNA sense strand
cuaaauggaccuccuacaa

SEQ ID NO: 54093 - RNA, 19 nt, Homo sapiens
  misc_RNA (1)...(19): siRNA sense strand
ggacaugcaggcacuaaag

SEQ ID NO: 54094 - RNA, 19 nt, Homo sapiens
  misc_RNA (1)...(19): siRNA sense strand
ggagacccuucgacugaau

SEQ ID NO: 54095 - RNA, 19 nt, Homo sapiens
  misc_RNA (1)...(19): siRNA sense strand
uuaaauacaucgggugugu

SEQ ID NO: 54096 - RNA, 19 nt, Homo sapiens
  misc_RNA (1)...(19): siRNA sense strand
gggcuggaauguuaucuac

SEQ ID NO: 54097 - RNA, 19 nt, Homo sapiens
  misc_RNA (1)...(19): siRNA sense strand
aaauacggcuucaucuaca

SEQ ID NO: 54098 - RNA, 19 nt, Homo sapiens
  misc_RNA (1)...(19): siRNA sense strand
cugcaagauucacccauuu

SEQ ID NO: 54099 - RNA, 19 nt, Homo sapiens
  misc_RNA (1)...(19): siRNA sense strand
caccaacaaggaagaauuu

SEQ ID NO: 54100 - RNA, 19 nt, Homo sapiens
  misc_RNA (1)...(19): siRNA sense strand
gcagaugaagcgcaggaaa

SEQ ID NO: 54101 - RNA, 19 nt, Homo sapiens
  misc_RNA (1)...(19): siRNA sense strand
gcuggaauguuaucuacag

SEQ ID NO: 54102 - RNA, 19 nt, Homo sapiens
  misc_RNA (1)...(19): siRNA sense strand
gcauccagguucagcuuca

SEQ ID NO: 54103 - RNA, 19 nt, Homo sapiens
  misc_RNA (1)...(19): siRNA sense strand
gcaagagcaaucaagacaa

SEQ ID NO: 54104 - RNA, 19 nt, Homo sapiens
  misc_RNA (1)...(19): siRNA sense strand
uaggagcuguguaggcaaa

SEQ ID NO: 54105 - RNA, 19 nt, Homo sapiens
  misc_RNA (1)...(19): siRNA sense strand
agaugaagcgcaggaaaua

SEQ ID NO: 54106 - RNA, 19 nt, Homo sapiens
  misc_RNA (1)...(19): siRNA sense strand
caaguuggacauggaaauu

SEQ ID NO: 54107 - RNA, 19 nt, Homo sapiens
  misc_RNA (1)...(19): siRNA sense strand
ccugcaagauucacccauu

SEQ ID NO: 54108 - RNA, 19 nt, Homo sapiens
  misc_RNA (1)...(19): siRNA sense strand
caucggguguguuauuaag

SEQ ID NO: 54109 - RNA, 19 nt, Homo sapiens
  misc_RNA (1)...(19): siRNA sense strand
cuacaagacgcaucuguuc

SEQ ID NO: 54110 - RNA, 19 nt, Homo sapiens
  misc_RNA (1)...(19): siRNA sense strand
ggacaaucucccugcaaga

SEQ ID NO: 54111 - RNA, 19 nt, Homo sapiens
  misc_RNA (1)...(19): siRNA sense strand
gaucuggcugccucucuaa

SEQ ID NO: 54112 - RNA, 19 nt, Homo sapiens
  misc_RNA (1)...(19): siRNA sense strand
gcacaagcagcgcaagaag

SEQ ID NO: 54113 - RNA, 19 nt, Homo sapiens
  misc_RNA (1)...(19): siRNA sense strand
guggaggccuucgaggaaa

SEQ ID NO: 54114 - RNA, 19 nt, Homo sapiens
  misc_RNA (1)...(19): siRNA sense strand
aaaccagucccaccgugua

SEQ ID NO: 54115 - RNA, 19 nt, Homo sapiens
  misc_RNA (1)...(19): siRNA sense strand
acuggcagcuucuaaaugg

SEQ ID NO: 54116 - RNA, 19 nt, Homo sapiens
  misc_RNA (1)...(19): siRNA sense strand
gaggaaaugacccgcaauc

SEQ ID NO: 54117 - RNA, 19 nt, Homo sapiens
  misc_RNA (1)...(19): siRNA sense strand
ggagcuguguaggcaaaga

SEQ ID NO: 54118 - RNA, 19 nt, Homo sapiens
  misc_RNA (1)...(19): siRNA sense strand
ucaccaacaaggaagaauu

SEQ ID NO: 54119 - RNA, 19 nt, Homo sapiens
  misc_RNA (1)...(19): siRNA sense strand
cagaugaagcgcaggaaau

SEQ ID NO: 54120 - RNA, 19 nt, Homo sapiens
  misc_RNA (1)...(19): siRNA sense strand
auacaucggguguguuauu

SEQ ID NO: 54121 - RNA, 19 nt, Homo sapiens
  misc_RNA (1)...(19): siRNA sense strand
gcgcaucgagcagaacauu

SEQ ID NO: 54122 - RNA, 19 nt, Homo sapiens
  misc_RNA (1)...(19): siRNA sense strand
gaagagcugaagaguaagg

SEQ ID NO: 54123 - RNA, 19 nt, Homo sapiens
  misc_RNA (1)...(19): siRNA sense strand
guucagcuucauuccauuu

SEQ ID NO: 54124 - RNA, 19 nt, Homo sapiens
  misc_RNA (1)...(19): siRNA sense strand
aagacgcgcugcagcuguu

SEQ ID NO: 54125 - RNA, 19 nt, Homo sapiens
  misc_RNA (1)...(19): siRNA sense strand
caggaaauacggcuucauc

SEQ ID NO: 54126 - RNA, 19 nt, Homo sapiens
  misc_RNA (1)...(19): siRNA sense strand
gcacgacuccucgcacaag

SEQ ID NO: 54127 - RNA, 19 nt, Homo sapiens
  misc_RNA (1)...(19): siRNA sense strand
cagagaucuucaccaacaa

SEQ ID NO: 54128 - RNA, 19 nt, Homo sapiens
  misc_RNA (1)...(19): siRNA sense strand
gagcuggccaggcauugug

SEQ ID NO: 54129 - RNA, 19 nt, Homo sapiens
  misc_RNA (1)...(19): siRNA sense strand
gagcuguguaggcaaagaa

SEQ ID NO: 54130 - RNA, 19 nt, Homo sapiens
  misc_RNA (1)...(19): siRNA sense strand
ggugaagcgccucauguuc

SEQ ID NO: 54131 - RNA, 19 nt, Homo sapiens
  misc_RNA (1)...(19): siRNA sense strand
ggacauggaaauuuuggaa

SEQ ID NO: 54132 - RNA, 19 nt, Homo sapiens
  misc_RNA (1)...(19): siRNA sense strand
ugacuggcagcuucuaaau

SEQ ID NO: 54133 - RNA, 19 nt, Homo sapiens
  misc_RNA (1)...(19): siRNA sense strand
ucggguguguuauuaagga

SEQ ID NO: 54134 - RNA, 19 nt, Homo sapiens
  misc_RNA (1)...(19): siRNA sense strand
ccagaaagugcgagaagag

SEQ ID NO: 54135 - RNA, 19 nt, Homo sapiens
  misc_RNA (1)...(19): siRNA sense strand
gguuucggguugcucugaa

SEQ ID NO: 54136 - RNA, 19 nt, Homo sapiens
  misc_RNA (1)...(19): siRNA sense strand
cuguguaggcaaagaauuu

SEQ ID NO: 54137 - RNA, 19 nt, Homo sapiens
  misc_RNA (1)...(19): siRNA sense strand
gugacuggcagcuucuaaa

SEQ ID NO: 54138 - RNA, 19 nt, Homo sapiens
  misc_RNA (1)...(19): siRNA sense strand
gcaucgagcagaacauucg

SEQ ID NO: 54139 - RNA, 19 nt, Homo sapiens
  misc_RNA (1)...(19): siRNA sense strand
acaagcagcgcaagaaggu

SEQ ID NO: 54140 - RNA, 19 nt, Homo sapiens
  misc_RNA (1)...(19): siRNA sense strand
gagcaaucaagacaacaag

SEQ ID NO: 54141 - RNA, 19 nt, Homo sapiens
  misc_RNA (1)...(19): siRNA sense strand
uggaauguuaucuacagua

SEQ ID NO: 54142 - RNA, 19 nt, Homo sapiens
  misc_RNA (1)...(19): siRNA sense strand
ucacuuaccuggggcucua

SEQ ID NO: 54143 - RNA, 19 nt, Homo sapiens
  misc_RNA (1)...(19): siRNA sense strand
gacuggcagcuucuaaaug

SEQ ID NO: 54144 - RNA, 19 nt, Homo sapiens
  misc_RNA (1)...(19): siRNA sense strand
aauacggcuucaucuacaa

SEQ ID NO: 54145 - RNA, 19 nt, Homo sapiens
  misc_RNA (1)...(19): siRNA sense strand
gagaagagcugaagaguaa

SEQ ID NO: 54146 - RNA, 19 nt, Homo sapiens
  misc_RNA (1)...(19): siRNA sense strand
ccacaucucugaucacuua

SEQ ID NO: 54147 - RNA, 19 nt, Homo sapiens
  misc_RNA (1)...(19): siRNA sense strand
gcagagaucuucaccaaca

SEQ ID NO: 54148 - RNA, 19 nt, Homo sapiens
  misc_RNA (1)...(19): siRNA sense strand
cccaagggcuggaauguua

SEQ ID NO: 54149 - RNA, 19 nt, Homo sapiens
  misc_RNA (1)...(19): siRNA sense strand
ggaauguuaucuacaguau

SEQ ID NO: 54150 - RNA, 19 nt, Homo sapiens
  misc_RNA (1)...(19): siRNA sense strand
gaaaugacccgcaaucucu

SEQ ID NO: 54151 - RNA, 19 nt, Homo sapiens
  misc_RNA (1)...(19): siRNA sense strand
ggaaauacggcuucaucua

SEQ ID NO: 54152 - RNA, 19 nt, Homo sapiens
  misc_RNA (1)...(19): siRNA sense strand
gaaauacggcuucaucuac

SEQ ID NO: 54153 - RNA, 19 nt, Homo sapiens
  misc_RNA (1)...(19): siRNA sense strand
caaccgaacuccucuuugg

SEQ ID NO: 54154 - RNA, 19 nt, Homo sapiens
  misc_RNA (1)...(19): siRNA sense strand
ggguugcucugaagacuuu

SEQ ID NO: 54155 - RNA, 19 nt, Homo sapiens
  misc_RNA (1)...(19): siRNA sense strand
aaauggaccuccuacaaug

SEQ ID NO: 54156 - RNA, 19 nt, Homo sapiens
  misc_RNA (1)...(19): siRNA sense strand
gcaaucaagacaacaaguu

SEQ ID NO: 54157 - RNA, 19 nt, Homo sapiens
  misc_RNA (1)...(19): siRNA sense strand
aaauacaucggguguguua

SEQ ID NO: 54158 - RNA, 19 nt, Homo sapiens
  misc_RNA (1)...(19): siRNA sense strand
ggaucuggcugccucucua

SEQ ID NO: 54159 - RNA, 19 nt, Homo sapiens
  misc_RNA (1)...(19): siRNA sense strand
uuaaauggauaccagauuc

SEQ ID NO: 54160 - RNA, 19 nt, Homo sapiens
  misc_RNA (1)...(19): siRNA sense strand
ggaacaacuuaaauacauc

SEQ ID NO: 54161 - RNA, 19 nt, Homo sapiens
  misc_RNA (1)...(19): siRNA sense strand
uggcagagaucuucaccaa

SEQ ID NO: 54162 - RNA, 19 nt, Homo sapiens
  misc_RNA (1)...(19): siRNA sense strand
gcacuaaagcaaucuucaa

SEQ ID NO: 54163 - RNA, 19 nt, Homo sapiens
  misc_RNA (1)...(19): siRNA sense strand
uaaauggaccuccuacaau

SEQ ID NO: 54164 - RNA, 19 nt, Homo sapiens
  misc_RNA (1)...(19): siRNA sense strand
caagagcaaucaagacaac

SEQ ID NO: 54165 - RNA, 19 nt, Homo sapiens
  misc_RNA (1)...(19): siRNA sense strand
uacaucggguguguuauua

SEQ ID NO: 54166 - RNA, 19 nt, Homo sapiens
  misc_RNA (1)...(19): siRNA sense strand
gcagccacaucucugauca

SEQ ID NO: 54167 - RNA, 19 nt, Homo sapiens
  misc_RNA (1)...(19): siRNA sense strand
ccaacaaggaagaauuuaa

SEQ ID NO: 54168 - RNA, 19 nt, Homo sapiens
  misc_RNA (1)...(19): siRNA sense strand
gcugaagaguaaggguuua

SEQ ID NO: 54169 - RNA, 19 nt, Homo sapiens
  misc_RNA (1)...(19): siRNA sense strand
cgagaagagcugaagagua

SEQ ID NO: 54170 - RNA, 19 nt, Homo sapiens
  misc_RNA (1)...(19): siRNA sense strand
ggaaaugacccgcaaucuc

SEQ ID NO: 54171 - RNA, 19 nt, Homo sapiens
  misc_RNA (1)...(19): siRNA sense strand
gaucuucaccaacaaggaa

SEQ ID NO: 54172 - RNA, 19 nt, Homo sapiens
  misc_RNA (1)...(19): siRNA sense strand
gagagcggcuggacaugca

SEQ ID NO: 54173 - RNA, 19 nt, Homo sapiens
  misc_RNA (1)...(19): siRNA sense strand
gaacauucgcgccaagauc

SEQ ID NO: 54174 - RNA, 19 nt, Homo sapiens
  misc_RNA (1)...(19): siRNA sense strand
cuaaauggaccuccuacaa

SEQ ID NO: 54175 - RNA, 19 nt, Homo sapiens
  misc_RNA (1)...(19): siRNA sense strand
ggacaugcaggcacuaaag

SEQ ID NO: 54176 - RNA, 19 nt, Homo sapiens
  misc_RNA (1)...(19): siRNA sense strand
ggagacccuucgacugaau

SEQ ID NO: 54177 - RNA, 19 nt, Homo sapiens
  misc_RNA (1)...(19): siRNA sense strand
uuaaauacaucgggugugu

SEQ ID NO: 54178 - RNA, 19 nt, Homo sapiens
  misc_RNA (1)...(19): siRNA sense strand
gggcuggaauguuaucuac

SEQ ID NO: 54179 - RNA, 19 nt, Homo sapiens
  misc_RNA (1)...(19): siRNA sense strand
aaauacggcuucaucuaca

SEQ ID NO: 54180 - RNA, 19 nt, Homo sapiens
  misc_RNA (1)...(19): siRNA sense strand
cugcaagauucacccauuu

SEQ ID NO: 54181 - RNA, 19 nt, Homo sapiens
  misc_RNA (1)...(19): siRNA sense strand
caccaacaaggaagaauuu

SEQ ID NO: 54182 - RNA, 19 nt, Homo sapiens
  misc_RNA (1)...(19): siRNA sense strand
gcuggaauguuaucuacag

SEQ ID NO: 54183 - RNA, 19 nt, Homo sapiens
  misc_RNA (1)...(19): siRNA sense strand
gcauccagguucagcuuca

SEQ ID NO: 54184 - RNA, 19 nt, Homo sapiens
  misc_RNA (1)...(19): siRNA sense strand
gcaagagcaaucaagacaa

SEQ ID NO: 54185 - RNA, 19 nt, Homo sapiens
  misc_RNA (1)...(19): siRNA sense strand
uaggagcuguguaggcaaa

SEQ ID NO: 54186 - RNA, 19 nt, Homo sapiens
  misc_RNA (1)...(19): siRNA sense strand
caaguuggacauggaaauu

SEQ ID NO: 54187 - RNA, 19 nt, Homo sapiens
  misc_RNA (1)...(19): siRNA sense strand
ccugcaagauucacccauu

SEQ ID NO: 54188 - RNA, 19 nt, Homo sapiens
  misc_RNA (1)...(19): siRNA sense strand
caucggguguguuauuaag

SEQ ID NO: 54189 - RNA, 19 nt, Homo sapiens
  misc_RNA (1)...(19): siRNA sense strand
cuacaagacgcaucuguuc

SEQ ID NO: 54190 - RNA, 19 nt, Homo sapiens
  misc_RNA (1)...(19): siRNA sense strand
ggacaaucucccugcaaga

SEQ ID NO: 54191 - RNA, 19 nt, Homo sapiens
  misc_RNA (1)...(19): siRNA sense strand
gcacaagcagcgcaagaag

SEQ ID NO: 54192 - RNA, 19 nt, Homo sapiens
  misc_RNA (1)...(19): siRNA sense strand
gaucuggcugccucucuaa

SEQ ID NO: 54193 - RNA, 19 nt, Homo sapiens
  misc_RNA (1)...(19): siRNA sense strand
guggaggccuucgaggaaa

SEQ ID NO: 54194 - RNA, 19 nt, Homo sapiens
  misc_RNA (1)...(19): siRNA sense strand
aaaccagucccaccgugua

SEQ ID NO: 54195 - RNA, 19 nt, Homo sapiens
  misc_RNA (1)...(19): siRNA sense strand
acuggcagcuucuaaaugg

SEQ ID NO: 54196 - RNA, 19 nt, Homo sapiens
  misc_RNA (1)...(19): siRNA sense strand
gaggaaaugacccgcaauc

SEQ ID NO: 54197 - RNA, 19 nt, Homo sapiens
  misc_RNA (1)...(19): siRNA sense strand
ggagcuguguaggcaaaga

SEQ ID NO: 54198 - RNA, 19 nt, Homo sapiens
  misc_RNA (1)...(19): siRNA sense strand
ucaccaacaaggaagaauu

SEQ ID NO: 54199 - RNA, 19 nt, Homo sapiens
  misc_RNA (1)...(19): siRNA sense strand
auacaucggguguguuauu

SEQ ID NO: 54200 - RNA, 19 nt, Homo sapiens
  misc_RNA (1)...(19): siRNA sense strand
gcgcaucgagcagaacauu

SEQ ID NO: 54201 - RNA, 19 nt, Homo sapiens
  misc_RNA (1)...(19): siRNA sense strand
gaagagcugaagaguaagg

SEQ ID NO: 54202 - RNA, 19 nt, Homo sapiens
  misc_RNA (1)...(19): siRNA sense strand
guucagcuucauuccauuu

SEQ ID NO: 54203 - RNA, 19 nt, Homo sapiens
  misc_RNA (1)...(19): siRNA sense strand
aagacgcgcugcagcuguu

SEQ ID NO: 54204 - RNA, 19 nt, Homo sapiens
  misc_RNA (1)...(19): siRNA sense strand
gcacgacuccucgcacaag

SEQ ID NO: 54205 - RNA, 19 nt, Homo sapiens
  misc_RNA (1)...(19): siRNA sense strand
caggaaauacggcuucauc

SEQ ID NO: 54206 - RNA, 19 nt, Homo sapiens
  misc_RNA (1)...(19): siRNA sense strand
ggugaagcgccucauguuc

SEQ ID NO: 54207 - RNA, 19 nt, Homo sapiens
  misc_RNA (1)...(19): siRNA sense strand
gagcuggccaggcauugug

SEQ ID NO: 54208 - RNA, 19 nt, Homo sapiens
  misc_RNA (1)...(19): siRNA sense strand
gagcuguguaggcaaagaa

SEQ ID NO: 54209 - RNA, 19 nt, Homo sapiens
  misc_RNA (1)...(19): siRNA sense strand
cagagaucuucaccaacaa

SEQ ID NO: 54210 - RNA, 19 nt, Homo sapiens
  misc_RNA (1)...(19): siRNA sense strand
ggacauggaaauuuuggaa

SEQ ID NO: 54211 - RNA, 19 nt, Homo sapiens
  misc_RNA (1)...(19): siRNA sense strand
ugacuggcagcuucuaaau

SEQ ID NO: 54212 - RNA, 19 nt, Homo sapiens
  misc_RNA (1)...(19): siRNA sense strand
ucggguguguuauuaagga

SEQ ID NO: 54213 - RNA, 19 nt, Homo sapiens
  misc_RNA (1)...(19): siRNA sense strand
ccagaaagugcgagaagag

SEQ ID NO: 54214 - RNA, 19 nt, Homo sapiens
  misc_RNA (1)...(19): siRNA sense strand
gguuucggguugcucugaa

SEQ ID NO: 54215 - RNA, 19 nt, Homo sapiens
  misc_RNA (1)...(19): siRNA sense strand
cuguguaggcaaagaauuu

SEQ ID NO: 54216 - RNA, 19 nt, Homo sapiens
  misc_RNA (1)...(19): siRNA sense strand
gugacuggcagcuucuaaa

SEQ ID NO: 54217 - RNA, 19 nt, Homo sapiens
  misc_RNA (1)...(19): siRNA sense strand
gcaucgagcagaacauucg

SEQ ID NO: 54218 - RNA, 19 nt, Homo sapiens
  misc_RNA (1)...(19): siRNA sense strand
acaagcagcgcaagaaggu

SEQ ID NO: 54219 - RNA, 19 nt, Homo sapiens
  misc_RNA (1)...(19): siRNA sense strand
gagcaaucaagacaacaag

SEQ ID NO: 54220 - RNA, 19 nt, Homo sapiens
  misc_RNA (1)...(19): siRNA sense strand
uggaauguuaucuacagua

SEQ ID NO: 54221 - RNA, 19 nt, Homo sapiens
  misc_RNA (1)...(19): siRNA sense strand
aauacggcuucaucuacaa

SEQ ID NO: 54222 - RNA, 19 nt, Homo sapiens
  misc_RNA (1)...(19): siRNA sense strand
gacuggcagcuucuaaaug

SEQ ID NO: 54223 - RNA, 19 nt, Homo sapiens
  misc_RNA (1)...(19): siRNA sense strand
ucacuuaccuggggcucua

SEQ ID NO: 54224 - RNA, 19 nt, Homo sapiens
  misc_RNA (1)...(19): siRNA sense strand
ggaagaagcugauugauga

SEQ ID NO: 54225 - RNA, 19 nt, Homo sapiens
  misc_RNA (1)...(19): siRNA sense strand
ggacauggcucaacucuuc

SEQ ID NO: 54226 - RNA, 19 nt, Homo sapiens
  misc_RNA (1)...(19): siRNA sense strand
ggaacgacauggagcuaug

SEQ ID NO: 54227 - RNA, 19 nt, Homo sapiens
  misc_RNA (1)...(19): siRNA sense strand
caaggcugauccagaagua

SEQ ID NO: 54228 - RNA, 19 nt, Homo sapiens
  misc_RNA (1)...(19): siRNA sense strand
gaugagaagcucgaagaua

SEQ ID NO: 54229 - RNA, 19 nt, Homo sapiens
  misc_RNA (1)...(19): siRNA sense strand
caauguggauguccuacuu

SEQ ID NO: 54230 - RNA, 19 nt, Homo sapiens
  misc_RNA (1)...(19): siRNA sense strand
ucgcaaggcugauccagaa

SEQ ID NO: 54231 - RNA, 19 nt, Homo sapiens
  misc_RNA (1)...(19): siRNA sense strand
cagcugcgcuucuucuuuc

SEQ ID NO: 54232 - RNA, 19 nt, Homo sapiens
  misc_RNA (1)...(19): siRNA sense strand
ggugauugaugacuuuaug

SEQ ID NO: 54233 - RNA, 19 nt, Homo sapiens
  misc_RNA (1)...(19): siRNA sense strand
uggcucaacucuucuacua

SEQ ID NO: 54234 - RNA, 19 nt, Homo sapiens
  misc_RNA (1)...(19): siRNA sense strand
cgucagauccaucggguua

SEQ ID NO: 54235 - RNA, 19 nt, Homo sapiens
  misc_RNA (1)...(19): siRNA sense strand
augagaagcucgaagauau

SEQ ID NO: 54236 - RNA, 19 nt, Homo sapiens
  misc_RNA (1)...(19): siRNA sense strand
gggaagaagcugauugaug

SEQ ID NO: 54237 - RNA, 19 nt, Homo sapiens
  misc_RNA (1)...(19): siRNA sense strand
ugaggugauugaugacuuu

SEQ ID NO: 54238 - RNA, 19 nt, Homo sapiens
  misc_RNA (1)...(19): siRNA sense strand
gcucaacucuucuacuacu

SEQ ID NO: 54239 - RNA, 19 nt, Homo sapiens
  misc_RNA (1)...(19): siRNA sense strand
gaaagugggccugcaguuc

SEQ ID NO: 54240 - RNA, 19 nt, Homo sapiens
  misc_RNA (1)...(19): siRNA sense strand
caacucuucuacuacuuug

SEQ ID NO: 54241 - RNA, 19 nt, Homo sapiens
  misc_RNA (1)...(19): siRNA sense strand
gaagcugauugaugagaag

SEQ ID NO: 54242 - RNA, 19 nt, Homo sapiens
  misc_RNA (1)...(19): siRNA sense strand
caaggacuuugcccacaug

SEQ ID NO: 54243 - RNA, 19 nt, Homo sapiens
  misc_RNA (1)...(19): siRNA sense strand
gcuacauccuguucgagaa

SEQ ID NO: 54244 - RNA, 19 nt, Homo sapiens
  misc_RNA (1)...(19): siRNA sense strand
agaaacagccagccugcua

SEQ ID NO: 54245 - RNA, 19 nt, Homo sapiens
  misc_RNA (1)...(19): siRNA sense strand
ccaagaacacccaguuugu

SEQ ID NO: 54246 - RNA, 19 nt, Homo sapiens
  misc_RNA (1)...(19): siRNA sense strand
gcuguucguucaaggcuau

SEQ ID NO: 54247 - RNA, 19 nt, Homo sapiens
  misc_RNA (1)...(19): siRNA sense strand
caaaggacccugagaucca

SEQ ID NO: 54248 - RNA, 19 nt, Homo sapiens
  misc_RNA (1)...(19): siRNA sense strand
ucaaggcuaugcccugcaa

SEQ ID NO: 54249 - RNA, 19 nt, Homo sapiens
  misc_RNA (1)...(19): siRNA sense strand
cuacuacuuugccuuggaa

SEQ ID NO: 54250 - RNA, 19 nt, Homo sapiens
  misc_RNA (1)...(19): siRNA sense strand
ggagauuccacgucuagga

SEQ ID NO: 54251 - RNA, 19 nt, Homo sapiens
  misc_RNA (1)...(19): siRNA sense strand
ggccucagaugcacgugaa

SEQ ID NO: 54252 - RNA, 19 nt, Homo sapiens
  misc_RNA (1)...(19): siRNA sense strand
cacaaacucccggaucaua

SEQ ID NO: 54253 - RNA, 19 nt, Homo sapiens
  misc_RNA (1)...(19): siRNA sense strand
ccacaugccguugcucaaa

SEQ ID NO: 54254 - RNA, 19 nt, Homo sapiens
  misc_RNA (1)...(19): siRNA sense strand
caaacucccggaucauaga

SEQ ID NO: 54255 - RNA, 19 nt, Homo sapiens
  misc_RNA (1)...(19): siRNA sense strand
gaggagauuccacgucuag

SEQ ID NO: 54256 - RNA, 19 nt, Homo sapiens
  misc_RNA (1)...(19): siRNA sense strand
agaagcugauugaugagaa

SEQ ID NO: 54257 - RNA, 19 nt, Homo sapiens
  misc_RNA (1)...(19): siRNA sense strand
ggaagcuauuugcuacauc

SEQ ID NO: 54258 - RNA, 19 nt, Homo sapiens
  misc_RNA (1)...(19): siRNA sense strand
ggacagcugcgcuucuucu

SEQ ID NO: 54259 - RNA, 19 nt, Homo sapiens
  misc_RNA (1)...(19): siRNA sense strand
ucucugagccugaaagcuu

SEQ ID NO: 54260 - RNA, 19 nt, Homo sapiens
  misc_RNA (1)...(19): siRNA sense strand
caagaacacccaguuugug

SEQ ID NO: 54261 - RNA, 19 nt, Homo sapiens
  misc_RNA (1)...(19): siRNA sense strand
uuccagaacucacucuaug

SEQ ID NO: 54262 - RNA, 19 nt, Homo sapiens
  misc_RNA (1)...(19): siRNA sense strand
cuacuuagggccucagaug

SEQ ID NO: 54263 - RNA, 19 nt, Homo sapiens
  misc_RNA (1)...(19): siRNA sense strand
uaggacagcugcgcuucuu

SEQ ID NO: 54264 - RNA, 19 nt, Homo sapiens
  misc_RNA (1)...(19): siRNA sense strand
ucaacucuucuacuacuuu

SEQ ID NO: 54265 - RNA, 19 nt, Homo sapiens
  misc_RNA (1)...(19): siRNA sense strand
uguaccaccucucaaagga

SEQ ID NO: 54266 - RNA, 19 nt, Homo sapiens
  misc_RNA (1)...(19): siRNA sense strand
ucagauccaucggguuaau

SEQ ID NO: 54267 - RNA, 19 nt, Homo sapiens
  misc_RNA (1)...(19): siRNA sense strand
acauggagcuauggaagga

SEQ ID NO: 54268 - RNA, 19 nt, Homo sapiens
  misc_RNA (1)...(19): siRNA sense strand
cccacaaacucccggauca

SEQ ID NO: 54269 - RNA, 19 nt, Homo sapiens
  misc_RNA (1)...(19): siRNA sense strand
gaaaaggaaauugaaguug

SEQ ID NO: 54270 - RNA, 19 nt, Homo sapiens
  misc_RNA (1)...(19): siRNA sense strand
gcggaagcagcgcucuaua

SEQ ID NO: 54271 - RNA, 19 nt, Homo sapiens
  misc_RNA (1)...(19): siRNA sense strand
gcaaggcugauccagaagu

SEQ ID NO: 54272 - RNA, 19 nt, Homo sapiens
  misc_RNA (1)...(19): siRNA sense strand
aguuacaggugcuuuacaa

SEQ ID NO: 54273 - RNA, 19 nt, Homo sapiens
  misc_RNA (1)...(19): siRNA sense strand
ccaaguacgguccaaugug

SEQ ID NO: 54274 - RNA, 19 nt, Homo sapiens
  misc_RNA (1)...(19): siRNA sense strand
caggauccagcacccauuu

SEQ ID NO: 54275 - RNA, 19 nt, Homo sapiens
  misc_RNA (1)...(19): siRNA sense strand
ugguuggaaugccaucuuu

SEQ ID NO: 54276 - RNA, 19 nt, Homo sapiens
  misc_RNA (1)...(19): siRNA sense strand
ucuuucagcuguucguuca

SEQ ID NO: 54277 - RNA, 19 nt, Homo sapiens
  misc_RNA (1)...(19): siRNA sense strand
cuacauccuguucgagaaa

SEQ ID NO: 54278 - RNA, 19 nt, Homo sapiens
  misc_RNA (1)...(19): siRNA sense strand
acaaggacuuugcccacau

SEQ ID NO: 54279 - RNA, 19 nt, Homo sapiens
  misc_RNA (1)...(19): siRNA sense strand
gaggugauugaugacuuua

SEQ ID NO: 54280 - RNA, 19 nt, Homo sapiens
  misc_RNA (1)...(19): siRNA sense strand
cccaagaacacccaguuug

SEQ ID NO: 54281 - RNA, 19 nt, Homo sapiens
  misc_RNA (1)...(19): siRNA sense strand
ugacaugggcccuguacca

SEQ ID NO: 54282 - RNA, 19 nt, Homo sapiens
  misc_RNA (1)...(19): siRNA sense strand
gagaagcucgaagauaugg

SEQ ID NO: 54283 - RNA, 19 nt, Homo sapiens
  misc_RNA (1)...(19): siRNA sense strand
ggccaaguacgguccaaug

SEQ ID NO: 54284 - RNA, 19 nt, Homo sapiens
  misc_RNA (1)...(19): siRNA sense strand
auaccuggaugguuggaau

SEQ ID NO: 54285 - RNA, 19 nt, Homo sapiens
  misc_RNA (1)...(19): siRNA sense strand
cauccaacacgcugacaug

SEQ ID NO: 54286 - RNA, 19 nt, Homo sapiens
  misc_RNA (1)...(19): siRNA sense strand
cagcacgaccugaccuaug

SEQ ID NO: 54287 - RNA, 19 nt, Homo sapiens
  misc_RNA (1)...(19): siRNA sense strand
gccaaguacgguccaaugu

SEQ ID NO: 54288 - RNA, 19 nt, Homo sapiens
  misc_RNA (1)...(19): siRNA sense strand
gaacgacauggagcuaugg

SEQ ID NO: 54289 - RNA, 19 nt, Homo sapiens
  misc_RNA (1)...(19): siRNA sense strand
cacaugccguugcucaaag

SEQ ID NO: 54290 - RNA, 19 nt, Homo sapiens
  misc_RNA (1)...(19): siRNA sense strand
ugagaagcucgaagauaug

SEQ ID NO: 54291 - RNA, 19 nt, Homo sapiens
  misc_RNA (1)...(19): siRNA sense strand
agaggagauuccacgucua

SEQ ID NO: 54292 - RNA, 19 nt, Homo sapiens
  misc_RNA (1)...(19): siRNA sense strand
uggaagcuauuugcuacau

SEQ ID NO: 54293 - RNA, 19 nt, Homo sapiens
  misc_RNA (1)...(19): siRNA sense strand
gagcaucaaccuacaguuu

SEQ ID NO: 54294 - RNA, 19 nt, Homo sapiens
  misc_RNA (1)...(19): siRNA sense strand
gaccagauguuugcauuug

SEQ ID NO: 54295 - RNA, 19 nt, Homo sapiens
  misc_RNA (1)...(19): siRNA sense strand
gagcuugaauugcaaaugg

SEQ ID NO: 54296 - RNA, 19 nt, Homo sapiens
  misc_RNA (1)...(19): siRNA sense strand
agacagcacuccacucaga

SEQ ID NO: 54297 - RNA, 19 nt, Homo sapiens
  misc_RNA (1)...(19): siRNA sense strand
gcccagauccuaacacauu

SEQ ID NO: 54298 - RNA, 19 nt, Homo sapiens
  misc_RNA (1)...(19): siRNA sense strand
ggacagugcgcaccgugua

SEQ ID NO: 54299 - RNA, 19 nt, Homo sapiens
  misc_RNA (1)...(19): siRNA sense strand
gaggacagcccgagaagga

SEQ ID NO: 54300 - RNA, 19 nt, Homo sapiens
  misc_RNA (1)...(19): siRNA sense strand
uggcagagcuugaauugca

SEQ ID NO: 54301 - RNA, 19 nt, Homo sapiens
  misc_RNA (1)...(19): siRNA sense strand
gcacuccacucagagauca

SEQ ID NO: 54302 - RNA, 19 nt, Homo sapiens
  misc_RNA (1)...(19): siRNA sense strand
gggaccagauguuugcauu

SEQ ID NO: 54303 - RNA, 19 nt, Homo sapiens
  misc_RNA (1)...(19): siRNA sense strand
ucaugugggugacuauauu

SEQ ID NO: 54304 - RNA, 19 nt, Homo sapiens
  misc_RNA (1)...(19): siRNA sense strand
ucccagagccaaauucuuu

SEQ ID NO: 54305 - RNA, 19 nt, Homo sapiens
  misc_RNA (1)...(19): siRNA sense strand
caacguagucugcgaccuu

SEQ ID NO: 54306 - RNA, 19 nt, Homo sapiens
  misc_RNA (1)...(19): siRNA sense strand
ugggaaaugugacagaguu

SEQ ID NO: 54307 - RNA, 19 nt, Homo sapiens
  misc_RNA (1)...(19): siRNA sense strand
gcugugggcucgguguuug

SEQ ID NO: 54308 - RNA, 19 nt, Homo sapiens
  misc_RNA (1)...(19): siRNA sense strand
ggaccagauguuugcauuu

SEQ ID NO: 54309 - RNA, 19 nt, Homo sapiens
  misc_RNA (1)...(19): siRNA sense strand
ccagacagcacuccacuca

SEQ ID NO: 54310 - RNA, 19 nt, Homo sapiens
  misc_RNA (1)...(19): siRNA sense strand
caugugggugacuauauua

SEQ ID NO: 54311 - RNA, 19 nt, Homo sapiens
  misc_RNA (1)...(19): siRNA sense strand
ggcaaaggcuccgcagucu

SEQ ID NO: 54312 - RNA, 19 nt, Homo sapiens
  misc_RNA (1)...(19): siRNA sense strand
ucucuugggcucuguauga

SEQ ID NO: 54313 - RNA, 19 nt, Homo sapiens
  misc_RNA (1)...(19): siRNA sense strand
ugaaaggagcaucaaccua

SEQ ID NO: 54314 - RNA, 19 nt, Homo sapiens
  misc_RNA (1)...(19): siRNA sense strand
ugugguaccuggaaauucu

SEQ ID NO: 54315 - RNA, 19 nt, Homo sapiens
  misc_RNA (1)...(19): siRNA sense strand
cccagauccuaacacauuu

SEQ ID NO: 54316 - RNA, 19 nt, Homo sapiens
  misc_RNA (1)...(19): siRNA sense strand
aaaauacgcuggucacucu

SEQ ID NO: 54317 - RNA, 19 nt, Homo sapiens
  misc_RNA (1)...(19): siRNA sense strand
gaccuugugcggcgucuga

SEQ ID NO: 54318 - RNA, 19 nt, Homo sapiens
  misc_RNA (1)...(19): siRNA sense strand
aaaggagcaucaaccuaca

SEQ ID NO: 54319 - RNA, 19 nt, Homo sapiens
  misc_RNA (1)...(19): siRNA sense strand
ggcaagcgcagcuguaugg

SEQ ID NO: 54320 - RNA, 19 nt, Homo sapiens
  misc_RNA (1)...(19): siRNA sense strand
uugcaucucuucccuuugg

SEQ ID NO: 54321 - RNA, 19 nt, Homo sapiens
  misc_RNA (1)...(19): siRNA sense strand
gcagagcuugaauugcaaa

SEQ ID NO: 54322 - RNA, 19 nt, Homo sapiens
  misc_RNA (1)...(19): siRNA sense strand
ucucuucccuuuggcuuug

SEQ ID NO: 54323 - RNA, 19 nt, Homo sapiens
  misc_RNA (1)...(19): siRNA sense strand
ggcagagcuugaauugcaa

SEQ ID NO: 54324 - RNA, 19 nt, Homo sapiens
  misc_RNA (1)...(19): siRNA sense strand
ucaaguacgccuccagagu

SEQ ID NO: 54325 - RNA, 19 nt, Homo sapiens
  misc_RNA (1)...(19): siRNA sense strand
ccggaacccugaacaacgu

SEQ ID NO: 54326 - RNA, 19 nt, Homo sapiens
  misc_RNA (1)...(19): siRNA sense strand
guacgccuccagaguguuc

SEQ ID NO: 54327 - RNA, 19 nt, Homo sapiens
  misc_RNA (1)...(19): siRNA sense strand
gaaggcgaagaauggcaaa

SEQ ID NO: 54328 - RNA, 19 nt, Homo sapiens
  misc_RNA (1)...(19): siRNA sense strand
ccagauguuugcauuugcu

SEQ ID NO: 54329 - RNA, 19 nt, Homo sapiens
  misc_RNA (1)...(19): siRNA sense strand
aggaagugcuaagacugua

SEQ ID NO: 54330 - RNA, 19 nt, Homo sapiens
  misc_RNA (1)...(19): siRNA sense strand
gaaaugugacagaguugcu

SEQ ID NO: 54331 - RNA, 19 nt, Homo sapiens
  misc_RNA (1)...(19): siRNA sense strand
ccacccauuugcaucucuu

SEQ ID NO: 54332 - RNA, 19 nt, Homo sapiens
  misc_RNA (1)...(19): siRNA sense strand
uuacaaguucggacuggaa

SEQ ID NO: 54333 - RNA, 19 nt, Homo sapiens
  misc_RNA (1)...(19): siRNA sense strand
gcuuuggcccagauccuaa

SEQ ID NO: 54334 - RNA, 19 nt, Homo sapiens
  misc_RNA (1)...(19): siRNA sense strand
ccuggcagagcuugaauug

SEQ ID NO: 54335 - RNA, 19 nt, Homo sapiens
  misc_RNA (1)...(19): siRNA sense strand
ccagacaaagacauucaug

SEQ ID NO: 54336 - RNA, 19 nt, Homo sapiens
  misc_RNA (1)...(19): siRNA sense strand
gugacagaguugcuauugg

SEQ ID NO: 54337 - RNA, 19 nt, Homo sapiens
  misc_RNA (1)...(19): siRNA sense strand
cagaggcagccaugaggaa

SEQ ID NO: 54338 - RNA, 19 nt, Homo sapiens
  misc_RNA (1)...(19): siRNA sense strand
uguccacgcuguugaccau

SEQ ID NO: 54339 - RNA, 19 nt, Homo sapiens
  misc_RNA (1)...(19): siRNA sense strand
guaccugaaaggagcauca

SEQ ID NO: 54340 - RNA, 19 nt, Homo sapiens
  misc_RNA (1)...(19): siRNA sense strand
auuugcaucucuucccuuu

SEQ ID NO: 54341 - RNA, 19 nt, Homo sapiens
  misc_RNA (1)...(19): siRNA sense strand
gaauggagcucuuucucuu

SEQ ID NO: 54342 - RNA, 19 nt, Homo sapiens
  misc_RNA (1)...(19): siRNA sense strand
ccacgaaacuacaccauga

SEQ ID NO: 54343 - RNA, 19 nt, Homo sapiens
  misc_RNA (1)...(19): siRNA sense strand
caaaggcuauggcguggua

SEQ ID NO: 54344 - RNA, 19 nt, Homo sapiens
  misc_RNA (1)...(19): siRNA sense strand
ggacuucauugacuccuuu

SEQ ID NO: 54345 - RNA, 19 nt, Homo sapiens
  misc_RNA (1)...(19): siRNA sense strand
ccaagaagguggagcacaa

SEQ ID NO: 54346 - RNA, 19 nt, Homo sapiens
  misc_RNA (1)...(19): siRNA sense strand
gcaccgaaguguucccuau

SEQ ID NO: 54347 - RNA, 19 nt, Homo sapiens
  misc_RNA (1)...(19): siRNA sense strand
gaagaucagugagcgcuau

SEQ ID NO: 54348 - RNA, 19 nt, Homo sapiens
  misc_RNA (1)...(19): siRNA sense strand
ggaccaggcugaggaguuc

SEQ ID NO: 54349 - RNA, 19 nt, Homo sapiens
  misc_RNA (1)...(19): siRNA sense strand
acacagagcagauguacaa

SEQ ID NO: 54350 - RNA, 19 nt, Homo sapiens
  misc_RNA (1)...(19): siRNA sense strand
gaaacuacaccaugagcuu

SEQ ID NO: 54351 - RNA, 19 nt, Homo sapiens
  misc_RNA (1)...(19): siRNA sense strand
acacggaguucuacuugaa

SEQ ID NO: 54352 - RNA, 19 nt, Homo sapiens
  misc_RNA (1)...(19): siRNA sense strand
caucagcuccauugucuuu

SEQ ID NO: 54353 - RNA, 19 nt, Homo sapiens
  misc_RNA (1)...(19): siRNA sense strand
caacacggaguucuacuug

SEQ ID NO: 54354 - RNA, 19 nt, Homo sapiens
  misc_RNA (1)...(19): siRNA sense strand
gcggaacuguuucggagaa

SEQ ID NO: 54355 - RNA, 19 nt, Homo sapiens
  misc_RNA (1)...(19): siRNA sense strand
ccauugcccuucauuggaa

SEQ ID NO: 54356 - RNA, 19 nt, Homo sapiens
  misc_RNA (1)...(19): siRNA sense strand
gauguucucuucggugaug

SEQ ID NO: 54357 - RNA, 19 nt, Homo sapiens
  misc_RNA (1)...(19): siRNA sense strand
guacaacucccucaugaag

SEQ ID NO: 54358 - RNA, 19 nt, Homo sapiens
  misc_RNA (1)...(19): siRNA sense strand
gaaccggcagcccaaguuu

SEQ ID NO: 54359 - RNA, 19 nt, Homo sapiens
  misc_RNA (1)...(19): siRNA sense strand
caagguccaugaggagauu

SEQ ID NO: 54360 - RNA, 19 nt, Homo sapiens
  misc_RNA (1)...(19): siRNA sense strand
gaacacagagcagauguac

SEQ ID NO: 54361 - RNA, 19 nt, Homo sapiens
  misc_RNA (1)...(19): siRNA sense strand
acaccaaguuucgggauuu

SEQ ID NO: 54362 - RNA, 19 nt, Homo sapiens
  misc_RNA (1)...(19): siRNA sense strand
ccacgggacuucauugacu

SEQ ID NO: 54363 - RNA, 19 nt, Homo sapiens
  misc_RNA (1)...(19): siRNA sense strand
acaaagaguuccugucacu

SEQ ID NO: 54364 - RNA, 19 nt, Homo sapiens
  misc_RNA (1)...(19): siRNA sense strand
gggaccgcuuugacuauaa

SEQ ID NO: 54365 - RNA, 19 nt, Homo sapiens
  misc_RNA (1)...(19): siRNA sense strand
ggagcucuuucucuucuuc

SEQ ID NO: 54366 - RNA, 19 nt, Homo sapiens
  misc_RNA (1)...(19): siRNA sense strand
ccacgagauccaaagauuu

SEQ ID NO: 54367 - RNA, 19 nt, Homo sapiens
  misc_RNA (1)...(19): siRNA sense strand
acaacucccucaugaagau

SEQ ID NO: 54368 - RNA, 19 nt, Homo sapiens
  misc_RNA (1)...(19): siRNA sense strand
gggcagcucuaugagaugu

SEQ ID NO: 54369 - RNA, 19 nt, Homo sapiens
  misc_RNA (1)...(19): siRNA sense strand
cagagcagauguacaacuc

SEQ ID NO: 54370 - RNA, 19 nt, Homo sapiens
  misc_RNA (1)...(19): siRNA sense strand
gacaccaaguuucgggauu

SEQ ID NO: 54371 - RNA, 19 nt, Homo sapiens
  misc_RNA (1)...(19): siRNA sense strand
ucucuucggugaugaaaca

SEQ ID NO: 54372 - RNA, 19 nt, Homo sapiens
  misc_RNA (1)...(19): siRNA sense strand
ggaccgcuuugacuauaag

SEQ ID NO: 54373 - RNA, 19 nt, Homo sapiens
  misc_RNA (1)...(19): siRNA sense strand
gucaucagcuccauugucu

SEQ ID NO: 54374 - RNA, 19 nt, Homo sapiens
  misc_RNA (1)...(19): siRNA sense strand
gcagcucuaugagauguuc

SEQ ID NO: 54375 - RNA, 19 nt, Homo sapiens
  misc_RNA (1)...(19): siRNA sense strand
uccacgagauccaaagauu

SEQ ID NO: 54376 - RNA, 19 nt, Homo sapiens
  misc_RNA (1)...(19): siRNA sense strand
uaagggcaccgaaguguuc

SEQ ID NO: 54377 - RNA, 19 nt, Homo sapiens
  misc_RNA (1)...(19): siRNA sense strand
ucaccaccgucaugcagaa

SEQ ID NO: 54378 - RNA, 19 nt, Homo sapiens
  misc_RNA (1)...(19): siRNA sense strand
ugcaagggcuggaggacuu

SEQ ID NO: 54379 - RNA, 19 nt, Homo sapiens
  misc_RNA (1)...(19): siRNA sense strand
ccaagaugcccuacaugga

SEQ ID NO: 54380 - RNA, 19 nt, Homo sapiens
  misc_RNA (1)...(19): siRNA sense strand
gcugggcucugugcugaga

SEQ ID NO: 54381 - RNA, 19 nt, Homo sapiens
  misc_RNA (1)...(19): siRNA sense strand
gauguacaacucccucaug

SEQ ID NO: 54382 - RNA, 19 nt, Homo sapiens
  misc_RNA (1)...(19): siRNA sense strand
gcuucuugcugcucaugaa

SEQ ID NO: 54383 - RNA, 19 nt, Homo sapiens
  misc_RNA (1)...(19): siRNA sense strand
acagagugaucggcaagaa

SEQ ID NO: 54384 - RNA, 19 nt, Homo sapiens
  misc_RNA (1)...(19): siRNA sense strand
gaggagauugacagaguga

SEQ ID NO: 54385 - RNA, 19 nt, Homo sapiens
  misc_RNA (1)...(19): siRNA sense strand
ggagauugacagagugauc

SEQ ID NO: 54386 - RNA, 19 nt, Homo sapiens
  misc_RNA (1)...(19): siRNA sense strand
aaagaguuccugucacugu

SEQ ID NO: 54387 - RNA, 19 nt, Homo sapiens
  misc_RNA (1)...(19): siRNA sense strand
ccucaaguccucccaguca

SEQ ID NO: 54388 - RNA, 19 nt, Homo sapiens
  misc_RNA (1)...(19): siRNA sense strand
gcacgcuggaucccaauuc

SEQ ID NO: 54389 - RNA, 19 nt, Homo sapiens
  misc_RNA (1)...(19): siRNA sense strand
ccaccgucaugcagaacuu

SEQ ID NO: 54390 - RNA, 19 nt, Homo sapiens
  misc_RNA (1)...(19): siRNA sense strand
gcaugcaggaggaggagaa

SEQ ID NO: 54391 - RNA, 19 nt, Homo sapiens
  misc_RNA (1)...(19): siRNA sense strand
aagaguuccugucacuguu

SEQ ID NO: 54392 - RNA, 19 nt, Homo sapiens
  misc_RNA (1)...(19): siRNA sense strand
gcagaacuuccgccucaag

SEQ ID NO: 54393 - RNA, 19 nt, Homo sapiens
  misc_RNA (1)...(19): siRNA sense strand
gcuauggcgugguauucag

SEQ ID NO: 54394 - RNA, 19 nt, Homo sapiens
  misc_RNA (1)...(19): siRNA sense strand
auguacaacucccucauga

SEQ ID NO: 54395 - RNA, 19 nt, Homo sapiens
  misc_RNA (1)...(19): siRNA sense strand
augaggagauugacagagu

SEQ ID NO: 54396 - RNA, 19 nt, Homo sapiens
  misc_RNA (1)...(19): siRNA sense strand
ccaacacggaguucuacuu

SEQ ID NO: 54397 - RNA, 19 nt, Homo sapiens
  misc_RNA (1)...(19): siRNA sense strand
uucauugacuccuuucuca

SEQ ID NO: 54398 - RNA, 19 nt, Homo sapiens
  misc_RNA (1)...(19): siRNA sense strand
ggggaccgcuuugacuaua

SEQ ID NO: 54399 - RNA, 19 nt, Homo sapiens
  misc_RNA (1)...(19): siRNA sense strand
cgcacagucuccaauguca

SEQ ID NO: 54400 - RNA, 19 nt, Homo sapiens
  misc_RNA (1)...(19): siRNA sense strand
cuacauggaggcagugauc

SEQ ID NO: 54401 - RNA, 19 nt, Homo sapiens
  misc_RNA (1)...(19): siRNA sense strand
ugaccacguugaaccucuu

SEQ ID NO: 54402 - RNA, 19 nt, Homo sapiens
  misc_RNA (1)...(19): siRNA sense strand
acuauaaggacaaagaguu

SEQ ID NO: 54403 - RNA, 19 nt, Homo sapiens
  misc_RNA (1)...(19): siRNA sense strand
gcccuucauuggaaacuac

SEQ ID NO: 54404 - RNA, 19 nt, Homo sapiens
  misc_RNA (1)...(19): siRNA sense strand
ugaacacagagcagaugua

SEQ ID NO: 54405 - RNA, 19 nt, Homo sapiens
  misc_RNA (1)...(19): siRNA sense strand
gggacuucauugacuccuu

SEQ ID NO: 54406 - RNA, 19 nt, Homo sapiens
  misc_RNA (1)...(19): siRNA sense strand
ccacggggcagcucuauga

SEQ ID NO: 54407 - RNA, 19 nt, Homo sapiens
  misc_RNA (1)...(19): siRNA sense strand
ccaaguuucgggauuucuu

SEQ ID NO: 54408 - RNA, 19 nt, Homo sapiens
  misc_RNA (1)...(19): siRNA sense strand
gccgcacagucuccaaugu

SEQ ID NO: 54409 - RNA, 19 nt, Homo sapiens
  misc_RNA (1)...(19): siRNA sense strand
ucagcuccauugucuuugg

SEQ ID NO: 54410 - RNA, 19 nt, Homo sapiens
  misc_RNA (1)...(19): siRNA sense strand
ggccagaauggagcucuuu

SEQ ID NO: 54411 - RNA, 19 nt, Homo sapiens
  misc_RNA (1)...(19): siRNA sense strand
ggugcuguguggacaugau

SEQ ID NO: 54412 - RNA, 19 nt, Homo sapiens
  misc_RNA (1)...(19): siRNA sense strand
ccugcgcuauggcuucuug

SEQ ID NO: 54413 - RNA, 19 nt, Homo sapiens
  misc_RNA (1)...(19): siRNA sense strand
cuauaaggacaaagaguuc

SEQ ID NO: 54414 - RNA, 19 nt, Homo sapiens
  misc_RNA (1)...(19): siRNA sense strand
caccaaguuucgggauuuc

SEQ ID NO: 54415 - RNA, 19 nt, Homo sapiens
  misc_RNA (1)...(19): siRNA sense strand
caaguuucgggauuucuuc

SEQ ID NO: 54416 - RNA, 19 nt, Homo sapiens
  misc_RNA (1)...(19): siRNA sense strand
gaaacuaccuccagcugaa

SEQ ID NO: 54417 - RNA, 19 nt, Homo sapiens
  misc_RNA (1)...(19): siRNA sense strand
gaauggagcucuuucucuu

SEQ ID NO: 54418 - RNA, 19 nt, Homo sapiens
  misc_RNA (1)...(19): siRNA sense strand
gaacacagagcacauaugu

SEQ ID NO: 54419 - RNA, 19 nt, Homo sapiens
  misc_RNA (1)...(19): siRNA sense strand
ccacgaaacuacaccauga

SEQ ID NO: 54420 - RNA, 19 nt, Homo sapiens
  misc_RNA (1)...(19): siRNA sense strand
ccaagaagguggagcacaa

SEQ ID NO: 54421 - RNA, 19 nt, Homo sapiens
  misc_RNA (1)...(19): siRNA sense strand
ggaccaagaugcccuacau

SEQ ID NO: 54422 - RNA, 19 nt, Homo sapiens
  misc_RNA (1)...(19): siRNA sense strand
ccacugcccuucauuggaa

SEQ ID NO: 54423 - RNA, 19 nt, Homo sapiens
  misc_RNA (1)...(19): siRNA sense strand
gcaccgaaguguucccuau

SEQ ID NO: 54424 - RNA, 19 nt, Homo sapiens
  misc_RNA (1)...(19): siRNA sense strand
acacggaguucuacuugaa

SEQ ID NO: 54425 - RNA, 19 nt, Homo sapiens
  misc_RNA (1)...(19): siRNA sense strand
gaaacuacaccaugagcuu

SEQ ID NO: 54426 - RNA, 19 nt, Homo sapiens
  misc_RNA (1)...(19): siRNA sense strand
ugaagaaccugaugaugag

SEQ ID NO: 54427 - RNA, 19 nt, Homo sapiens
  misc_RNA (1)...(19): siRNA sense strand
caucagcuccauugucuuu

SEQ ID NO: 54428 - RNA, 19 nt, Homo sapiens
  misc_RNA (1)...(19): siRNA sense strand
caacacggaguucuacuug

SEQ ID NO: 54429 - RNA, 19 nt, Homo sapiens
  misc_RNA (1)...(19): siRNA sense strand
gcggaacuguuucggagaa

SEQ ID NO: 54430 - RNA, 19 nt, Homo sapiens
  misc_RNA (1)...(19): siRNA sense strand
gauguucucuucggugaug

SEQ ID NO: 54431 - RNA, 19 nt, Homo sapiens
  misc_RNA (1)...(19): siRNA sense strand
ggacuucaucgacuccuuu

SEQ ID NO: 54432 - RNA, 19 nt, Homo sapiens
  misc_RNA (1)...(19): siRNA sense strand
gaaccggcagcccaaguuu

SEQ ID NO: 54433 - RNA, 19 nt, Homo sapiens
  misc_RNA (1)...(19): siRNA sense strand
caagguccaugaggagauu

SEQ ID NO: 54434 - RNA, 19 nt, Homo sapiens
  misc_RNA (1)...(19): siRNA sense strand
acaaagaguuccugucacu

SEQ ID NO: 54435 - RNA, 19 nt, Homo sapiens
  misc_RNA (1)...(19): siRNA sense strand
acaccaaguuucgggauuu

SEQ ID NO: 54436 - RNA, 19 nt, Homo sapiens
  misc_RNA (1)...(19): siRNA sense strand
uugaagaaccugaugauga

SEQ ID NO: 54437 - RNA, 19 nt, Homo sapiens
  misc_RNA (1)...(19): siRNA sense strand
ggagcucuuucucuucuuc

SEQ ID NO: 54438 - RNA, 19 nt, Homo sapiens
  misc_RNA (1)...(19): siRNA sense strand
ccacgagauccaaagauuu

SEQ ID NO: 54439 - RNA, 19 nt, Homo sapiens
  misc_RNA (1)...(19): siRNA sense strand
gggcagcucuaugagaugu

SEQ ID NO: 54440 - RNA, 19 nt, Homo sapiens
  misc_RNA (1)...(19): siRNA sense strand
ucucuucggugaugaaaca

SEQ ID NO: 54441 - RNA, 19 nt, Homo sapiens
  misc_RNA (1)...(19): siRNA sense strand
gacaccaaguuucgggauu

SEQ ID NO: 54442 - RNA, 19 nt, Homo sapiens
  misc_RNA (1)...(19): siRNA sense strand
gucaucagcuccauugucu

SEQ ID NO: 54443 - RNA, 19 nt, Homo sapiens
  misc_RNA (1)...(19): siRNA sense strand
gcugaacacagagcacaua

SEQ ID NO: 54444 - RNA, 19 nt, Homo sapiens
  misc_RNA (1)...(19): siRNA sense strand
uccacgagauccaaagauu

SEQ ID NO: 54445 - RNA, 19 nt, Homo sapiens
  misc_RNA (1)...(19): siRNA sense strand
gcagcucuaugagauguuc

SEQ ID NO: 54446 - RNA, 19 nt, Homo sapiens
  misc_RNA (1)...(19): siRNA sense strand
auaugugacuccaucauga

SEQ ID NO: 54447 - RNA, 19 nt, Homo sapiens
  misc_RNA (1)...(19): siRNA sense strand
ugacugugauggucuugau

SEQ ID NO: 54448 - RNA, 19 nt, Homo sapiens
  misc_RNA (1)...(19): siRNA sense strand
uaagggcaccgaaguguuc

SEQ ID NO: 54449 - RNA, 19 nt, Homo sapiens
  misc_RNA (1)...(19): siRNA sense strand
ucaccaccgucaugcagaa

SEQ ID NO: 54450 - RNA, 19 nt, Homo sapiens
  misc_RNA (1)...(19): siRNA sense strand
ugcaagggcuggaggacuu

SEQ ID NO: 54451 - RNA, 19 nt, Homo sapiens
  misc_RNA (1)...(19): siRNA sense strand
ccaagaugcccuacaugga

SEQ ID NO: 54452 - RNA, 19 nt, Homo sapiens
  misc_RNA (1)...(19): siRNA sense strand
gggaccgcuuugacuauga

SEQ ID NO: 54453 - RNA, 19 nt, Homo sapiens
  misc_RNA (1)...(19): siRNA sense strand
ccacagcaacaggccuuua

SEQ ID NO: 54454 - RNA, 19 nt, Homo sapiens
  misc_RNA (1)...(19): siRNA sense strand
gcuucuugcugcucaugaa

SEQ ID NO: 54455 - RNA, 19 nt, Homo sapiens
  misc_RNA (1)...(19): siRNA sense strand
acagagugaucggcaagaa

SEQ ID NO: 54456 - RNA, 19 nt, Homo sapiens
  misc_RNA (1)...(19): siRNA sense strand
gaggagauugacagaguga

SEQ ID NO: 54457 - RNA, 19 nt, Homo sapiens
  misc_RNA (1)...(19): siRNA sense strand
ggaccgcuuugacuaugag

SEQ ID NO: 54458 - RNA, 19 nt, Homo sapiens
  misc_RNA (1)...(19): siRNA sense strand
ggagauugacagagugauc

SEQ ID NO: 54459 - RNA, 19 nt, Homo sapiens
  misc_RNA (1)...(19): siRNA sense strand
cacagcaacaggccuuuaa

SEQ ID NO: 54460 - RNA, 19 nt, Homo sapiens
  misc_RNA (1)...(19): siRNA sense strand
caucgacuccuuucucauc

SEQ ID NO: 54461 - RNA, 19 nt, Homo sapiens
  misc_RNA (1)...(19): siRNA sense strand
ccucaaguccucccaguca

SEQ ID NO: 54462 - RNA, 19 nt, Homo sapiens
  misc_RNA (1)...(19): siRNA sense strand
gcacgcuggaucccaauuc

SEQ ID NO: 54463 - RNA, 19 nt, Homo sapiens
  misc_RNA (1)...(19): siRNA sense strand
ccaccgucaugcagaacuu

SEQ ID NO: 54464 - RNA, 19 nt, Homo sapiens
  misc_RNA (1)...(19): siRNA sense strand
cauaugugacuccaucaug

SEQ ID NO: 54465 - RNA, 19 nt, Homo sapiens
  misc_RNA (1)...(19): siRNA sense strand
gcagaacuuccgccucaag

SEQ ID NO: 54466 - RNA, 19 nt, Homo sapiens
  misc_RNA (1)...(19): siRNA sense strand
ggagucgggcuuccucauc

SEQ ID NO: 54467 - RNA, 19 nt, Homo sapiens
  misc_RNA (1)...(19): siRNA sense strand
ccaacacggaguucuacuu

SEQ ID NO: 54468 - RNA, 19 nt, Homo sapiens
  misc_RNA (1)...(19): siRNA sense strand
augaggagauugacagagu

SEQ ID NO: 54469 - RNA, 19 nt, Homo sapiens
  misc_RNA (1)...(19): siRNA sense strand
cgcacagucuccaauguca

SEQ ID NO: 54470 - RNA, 19 nt, Homo sapiens
  misc_RNA (1)...(19): siRNA sense strand
cuacauggaggcagugauc

SEQ ID NO: 54471 - RNA, 19 nt, Homo sapiens
  misc_RNA (1)...(19): siRNA sense strand
gcccuucauuggaaacuac

SEQ ID NO: 54472 - RNA, 19 nt, Homo sapiens
  misc_RNA (1)...(19): siRNA sense strand
ccacggggcagcucuauga

SEQ ID NO: 54473 - RNA, 19 nt, Homo sapiens
  misc_RNA (1)...(19): siRNA sense strand
cagcaacaggccuuuaagu

SEQ ID NO: 54474 - RNA, 19 nt, Homo sapiens
  misc_RNA (1)...(19): siRNA sense strand
gccgcacagucuccaaugu

SEQ ID NO: 54475 - RNA, 19 nt, Homo sapiens
  misc_RNA (1)...(19): siRNA sense strand
agcaacaggccuuuaaguu

SEQ ID NO: 54476 - RNA, 19 nt, Homo sapiens
  misc_RNA (1)...(19): siRNA sense strand
acuaugaggacaaagaguu

SEQ ID NO: 54477 - RNA, 19 nt, Homo sapiens
  misc_RNA (1)...(19): siRNA sense strand
ucagcuccauugucuuugg

SEQ ID NO: 54478 - RNA, 19 nt, Homo sapiens
  misc_RNA (1)...(19): siRNA sense strand
ggccagaauggagcucuuu

SEQ ID NO: 54479 - RNA, 19 nt, Homo sapiens
  misc_RNA (1)...(19): siRNA sense strand
gaugacaaggggcaguuua

SEQ ID NO: 54480 - RNA, 19 nt, Homo sapiens
  misc_RNA (1)...(19): siRNA sense strand
ggacuucaauccccagcau

SEQ ID NO: 54481 - RNA, 19 nt, Homo sapiens
  misc_RNA (1)...(19): siRNA sense strand
ccugcgcuauggcuucuug

SEQ ID NO: 54482 - RNA, 19 nt, Homo sapiens
  misc_RNA (1)...(19): siRNA sense strand
gaccaagaugcccuacaug

SEQ ID NO: 54483 - RNA, 19 nt, Homo sapiens
  misc_RNA (1)...(19): siRNA sense strand
gaaacuaccuccagcugaa

SEQ ID NO: 54484 - RNA, 19 nt, Homo sapiens
  misc_RNA (1)...(19): siRNA sense strand
gaauggagcucuuucucuu

SEQ ID NO: 54485 - RNA, 19 nt, Homo sapiens
  misc_RNA (1)...(19): siRNA sense strand
gaacacagagcacauaugu

SEQ ID NO: 54486 - RNA, 19 nt, Homo sapiens
  misc_RNA (1)...(19): siRNA sense strand
ccacgaaacuacaccauga

SEQ ID NO: 54487 - RNA, 19 nt, Homo sapiens
  misc_RNA (1)...(19): siRNA sense strand
ccaagaagguggagcacaa

SEQ ID NO: 54488 - RNA, 19 nt, Homo sapiens
  misc_RNA (1)...(19): siRNA sense strand
ggaccaagaugcccuacau

SEQ ID NO: 54489 - RNA, 19 nt, Homo sapiens
  misc_RNA (1)...(19): siRNA sense strand
ccacugcccuucauuggaa

SEQ ID NO: 54490 - RNA, 19 nt, Homo sapiens
  misc_RNA (1)...(19): siRNA sense strand
gcaccgaaguguucccuau

SEQ ID NO: 54491 - RNA, 19 nt, Homo sapiens
  misc_RNA (1)...(19): siRNA sense strand
acacggaguucuacuugaa

SEQ ID NO: 54492 - RNA, 19 nt, Homo sapiens
  misc_RNA (1)...(19): siRNA sense strand
gaaacuacaccaugagcuu

SEQ ID NO: 54493 - RNA, 19 nt, Homo sapiens
  misc_RNA (1)...(19): siRNA sense strand
ugaagaaccugaugaugag

SEQ ID NO: 54494 - RNA, 19 nt, Homo sapiens
  misc_RNA (1)...(19): siRNA sense strand
caucagcuccauugucuuu

SEQ ID NO: 54495 - RNA, 19 nt, Homo sapiens
  misc_RNA (1)...(19): siRNA sense strand
caacacggaguucuacuug

SEQ ID NO: 54496 - RNA, 19 nt, Homo sapiens
  misc_RNA (1)...(19): siRNA sense strand
gcggaacuguuucggagaa

SEQ ID NO: 54497 - RNA, 19 nt, Homo sapiens
  misc_RNA (1)...(19): siRNA sense strand
gauguucucuucggugaug

SEQ ID NO: 54498 - RNA, 19 nt, Homo sapiens
  misc_RNA (1)...(19): siRNA sense strand
ggacuucaucgacuccuuu

SEQ ID NO: 54499 - RNA, 19 nt, Homo sapiens
  misc_RNA (1)...(19): siRNA sense strand
gaaccggcagcccaaguuu

SEQ ID NO: 54500 - RNA, 19 nt, Homo sapiens
  misc_RNA (1)...(19): siRNA sense strand
caagguccaugaggagauu

SEQ ID NO: 54501 - RNA, 19 nt, Homo sapiens
  misc_RNA (1)...(19): siRNA sense strand
acaaagaguuccugucacu

SEQ ID NO: 54502 - RNA, 19 nt, Homo sapiens
  misc_RNA (1)...(19): siRNA sense strand
acaccaaguuucgggauuu

SEQ ID NO: 54503 - RNA, 19 nt, Homo sapiens
  misc_RNA (1)...(19): siRNA sense strand
uugaagaaccugaugauga

SEQ ID NO: 54504 - RNA, 19 nt, Homo sapiens
  misc_RNA (1)...(19): siRNA sense strand
ggagcucuuucucuucuuc

SEQ ID NO: 54505 - RNA, 19 nt, Homo sapiens
  misc_RNA (1)...(19): siRNA sense strand
ccacgagauccaaagauuu

SEQ ID NO: 54506 - RNA, 19 nt, Homo sapiens
  misc_RNA (1)...(19): siRNA sense strand
gggcagcucuaugagaugu

SEQ ID NO: 54507 - RNA, 19 nt, Homo sapiens
  misc_RNA (1)...(19): siRNA sense strand
ucucuucggugaugaaaca

SEQ ID NO: 54508 - RNA, 19 nt, Homo sapiens
  misc_RNA (1)...(19): siRNA sense strand
gacaccaaguuucgggauu

SEQ ID NO: 54509 - RNA, 19 nt, Homo sapiens
  misc_RNA (1)...(19): siRNA sense strand
gucaucagcuccauugucu

SEQ ID NO: 54510 - RNA, 19 nt, Homo sapiens
  misc_RNA (1)...(19): siRNA sense strand
gcugaacacagagcacaua

SEQ ID NO: 54511 - RNA, 19 nt, Homo sapiens
  misc_RNA (1)...(19): siRNA sense strand
uccacgagauccaaagauu

SEQ ID NO: 54512 - RNA, 19 nt, Homo sapiens
  misc_RNA (1)...(19): siRNA sense strand
gcagcucuaugagauguuc

SEQ ID NO: 54513 - RNA, 19 nt, Homo sapiens
  misc_RNA (1)...(19): siRNA sense strand
auaugugacuccaucauga

SEQ ID NO: 54514 - RNA, 19 nt, Homo sapiens
  misc_RNA (1)...(19): siRNA sense strand
ugacugugauggucuugau

SEQ ID NO: 54515 - RNA, 19 nt, Homo sapiens
  misc_RNA (1)...(19): siRNA sense strand
uaagggcaccgaaguguuc

SEQ ID NO: 54516 - RNA, 19 nt, Homo sapiens
  misc_RNA (1)...(19): siRNA sense strand
ucaccaccgucaugcagaa

SEQ ID NO: 54517 - RNA, 19 nt, Homo sapiens
  misc_RNA (1)...(19): siRNA sense strand
ugcaagggcuggaggacuu

SEQ ID NO: 54518 - RNA, 19 nt, Homo sapiens
  misc_RNA (1)...(19): siRNA sense strand
ccaagaugcccuacaugga

SEQ ID NO: 54519 - RNA, 19 nt, Homo sapiens
  misc_RNA (1)...(19): siRNA sense strand
gggaccgcuuugacuauga

SEQ ID NO: 54520 - RNA, 19 nt, Homo sapiens
  misc_RNA (1)...(19): siRNA sense strand
ccacagcaacaggccuuua

SEQ ID NO: 54521 - RNA, 19 nt, Homo sapiens
  misc_RNA (1)...(19): siRNA sense strand
gcuucuugcugcucaugaa

SEQ ID NO: 54522 - RNA, 19 nt, Homo sapiens
  misc_RNA (1)...(19): siRNA sense strand
acagagugaucggcaagaa

SEQ ID NO: 54523 - RNA, 19 nt, Homo sapiens
  misc_RNA (1)...(19): siRNA sense strand
gaggagauugacagaguga

SEQ ID NO: 54524 - RNA, 19 nt, Homo sapiens
  misc_RNA (1)...(19): siRNA sense strand
ggaccgcuuugacuaugag

SEQ ID NO: 54525 - RNA, 19 nt, Homo sapiens
  misc_RNA (1)...(19): siRNA sense strand
ggagauugacagagugauc

SEQ ID NO: 54526 - RNA, 19 nt, Homo sapiens
  misc_RNA (1)...(19): siRNA sense strand
cacagcaacaggccuuuaa

SEQ ID NO: 54527 - RNA, 19 nt, Homo sapiens
  misc_RNA (1)...(19): siRNA sense strand
caucgacuccuuucucauc

SEQ ID NO: 54528 - RNA, 19 nt, Homo sapiens
  misc_RNA (1)...(19): siRNA sense strand
ccucaaguccucccaguca

SEQ ID NO: 54529 - RNA, 19 nt, Homo sapiens
  misc_RNA (1)...(19): siRNA sense strand
gcacgcuggaucccaauuc

SEQ ID NO: 54530 - RNA, 19 nt, Homo sapiens
  misc_RNA (1)...(19): siRNA sense strand
ccaccgucaugcagaacuu

SEQ ID NO: 54531 - RNA, 19 nt, Homo sapiens
  misc_RNA (1)...(19): siRNA sense strand
cauaugugacuccaucaug

SEQ ID NO: 54532 - RNA, 19 nt, Homo sapiens
  misc_RNA (1)...(19): siRNA sense strand
gcagaacuuccgccucaag

SEQ ID NO: 54533 - RNA, 19 nt, Homo sapiens
  misc_RNA (1)...(19): siRNA sense strand
ggagucgggcuuccucauc

SEQ ID NO: 54534 - RNA, 19 nt, Homo sapiens
  misc_RNA (1)...(19): siRNA sense strand
ccaacacggaguucuacuu

SEQ ID NO: 54535 - RNA, 19 nt, Homo sapiens
  misc_RNA (1)...(19): siRNA sense strand
augaggagauugacagagu

SEQ ID NO: 54536 - RNA, 19 nt, Homo sapiens
  misc_RNA (1)...(19): siRNA sense strand
cgcacagucuccaauguca

SEQ ID NO: 54537 - RNA, 19 nt, Homo sapiens
  misc_RNA (1)...(19): siRNA sense strand
cuacauggaggcagugauc

SEQ ID NO: 54538 - RNA, 19 nt, Homo sapiens
  misc_RNA (1)...(19): siRNA sense strand
gcccuucauuggaaacuac

SEQ ID NO: 54539 - RNA, 19 nt, Homo sapiens
  misc_RNA (1)...(19): siRNA sense strand
ccacggggcagcucuauga

SEQ ID NO: 54540 - RNA, 19 nt, Homo sapiens
  misc_RNA (1)...(19): siRNA sense strand
cagcaacaggccuuuaagu

SEQ ID NO: 54541 - RNA, 19 nt, Homo sapiens
  misc_RNA (1)...(19): siRNA sense strand
gccgcacagucuccaaugu

SEQ ID NO: 54542 - RNA, 19 nt, Homo sapiens
  misc_RNA (1)...(19): siRNA sense strand
agcaacaggccuuuaaguu

SEQ ID NO: 54543 - RNA, 19 nt, Homo sapiens
  misc_RNA (1)...(19): siRNA sense strand
acuaugaggacaaagaguu

SEQ ID NO: 54544 - RNA, 19 nt, Homo sapiens
  misc_RNA (1)...(19): siRNA sense strand
ucagcuccauugucuuugg

SEQ ID NO: 54545 - RNA, 19 nt, Homo sapiens
  misc_RNA (1)...(19): siRNA sense strand
ggccagaauggagcucuuu

SEQ ID NO: 54546 - RNA, 19 nt, Homo sapiens
  misc_RNA (1)...(19): siRNA sense strand
gaugacaaggggcaguuua

SEQ ID NO: 54547 - RNA, 19 nt, Homo sapiens
  misc_RNA (1)...(19): siRNA sense strand
ggacuucaauccccagcau

SEQ ID NO: 54548 - RNA, 19 nt, Homo sapiens
  misc_RNA (1)...(19): siRNA sense strand
ccugcgcuauggcuucuug

SEQ ID NO: 54549 - RNA, 19 nt, Homo sapiens
  misc_RNA (1)...(19): siRNA sense strand
gaccaagaugcccuacaug

SEQ ID NO: 54550 - RNA, 19 nt, Homo sapiens
  misc_RNA (1)...(19): siRNA sense strand
gaagaggccuacucaaauc

SEQ ID NO: 54551 - RNA, 19 nt, Homo sapiens
  misc_RNA (1)...(19): siRNA sense strand
gaucaagaguuccugaaga

SEQ ID NO: 54552 - RNA, 19 nt, Homo sapiens
  misc_RNA (1)...(19): siRNA sense strand
gcucuucucuggcuucuug

SEQ ID NO: 54553 - RNA, 19 nt, Homo sapiens
  misc_RNA (1)...(19): siRNA sense strand
ucuaugagauucagagauu

SEQ ID NO: 54554 - RNA, 19 nt, Homo sapiens
  misc_RNA (1)...(19): siRNA sense strand
caaggacacagaaguauuu

SEQ ID NO: 54555 - RNA, 19 nt, Homo sapiens
  misc_RNA (1)...(19): siRNA sense strand
caaauacccucauguugca

SEQ ID NO: 54556 - RNA, 19 nt, Homo sapiens
  misc_RNA (1)...(19): siRNA sense strand
ugaagaugcugaacuuguu

SEQ ID NO: 54557 - RNA, 19 nt, Homo sapiens
  misc_RNA (1)...(19): siRNA sense strand
cuacucaaauccuuucuga

SEQ ID NO: 54558 - RNA, 19 nt, Homo sapiens
  misc_RNA (1)...(19): siRNA sense strand
uagaagaggccuacucaaa

SEQ ID NO: 54559 - RNA, 19 nt, Homo sapiens
  misc_RNA (1)...(19): siRNA sense strand
cuaccaagaucaagaguuc

SEQ ID NO: 54560 - RNA, 19 nt, Homo sapiens
  misc_RNA (1)...(19): siRNA sense strand
ugcaggaaaucaaugcuua

SEQ ID NO: 54561 - RNA, 19 nt, Homo sapiens
  misc_RNA (1)...(19): siRNA sense strand
ucaaauccuuucugagguu

SEQ ID NO: 54562 - RNA, 19 nt, Homo sapiens
  misc_RNA (1)...(19): siRNA sense strand
gcucaaauacccucauguu

SEQ ID NO: 54563 - RNA, 19 nt, Homo sapiens
  misc_RNA (1)...(19): siRNA sense strand
uagaggagcuucggaaauc

SEQ ID NO: 54564 - RNA, 19 nt, Homo sapiens
  misc_RNA (1)...(19): siRNA sense strand
gaaaccuucugcagaugga

SEQ ID NO: 54565 - RNA, 19 nt, Homo sapiens
  misc_RNA (1)...(19): siRNA sense strand
gacccacacuacuuugaaa

SEQ ID NO: 54566 - RNA, 19 nt, Homo sapiens
  misc_RNA (1)...(19): siRNA sense strand
ggugugaucuuugccaaug

SEQ ID NO: 54567 - RNA, 19 nt, Homo sapiens
  misc_RNA (1)...(19): siRNA sense strand
gggauauggugugaucuuu

SEQ ID NO: 54568 - RNA, 19 nt, Homo sapiens
  misc_RNA (1)...(19): siRNA sense strand
gauagaagaggccuacuca

SEQ ID NO: 54569 - RNA, 19 nt, Homo sapiens
  misc_RNA (1)...(19): siRNA sense strand
ucucuggcuucuugaaaua

SEQ ID NO: 54570 - RNA, 19 nt, Homo sapiens
  misc_RNA (1)...(19): siRNA sense strand
cuucaauccugaccacuuu

SEQ ID NO: 54571 - RNA, 19 nt, Homo sapiens
  misc_RNA (1)...(19): siRNA sense strand
gggcacacaggcaaguuua

SEQ ID NO: 54572 - RNA, 19 nt, Homo sapiens
  misc_RNA (1)...(19): siRNA sense strand
gauauggugugaucuuugc

SEQ ID NO: 54573 - RNA, 19 nt, Homo sapiens
  misc_RNA (1)...(19): siRNA sense strand
gggaagcggauuugucuug

SEQ ID NO: 54574 - RNA, 19 nt, Homo sapiens
  misc_RNA (1)...(19): siRNA sense strand
gauagaggagcuucggaaa

SEQ ID NO: 54575 - RNA, 19 nt, Homo sapiens
  misc_RNA (1)...(19): siRNA sense strand
acacagaggcagucaucua

SEQ ID NO: 54576 - RNA, 19 nt, Homo sapiens
  misc_RNA (1)...(19): siRNA sense strand
agaagaggccuacucaaau

SEQ ID NO: 54577 - RNA, 19 nt, Homo sapiens
  misc_RNA (1)...(19): siRNA sense strand
ucacaggacucuugcuacu

SEQ ID NO: 54578 - RNA, 19 nt, Homo sapiens
  misc_RNA (1)...(19): siRNA sense strand
ucaacacgcucucgcucuu

SEQ ID NO: 54579 - RNA, 19 nt, Homo sapiens
  misc_RNA (1)...(19): siRNA sense strand
ugggaaaccuucugcagau

SEQ ID NO: 54580 - RNA, 19 nt, Homo sapiens
  misc_RNA (1)...(19): siRNA sense strand
cuucggcgauucucuguga

SEQ ID NO: 54581 - RNA, 19 nt, Homo sapiens
  misc_RNA (1)...(19): siRNA sense strand
ggaguguggugugggcaaa

SEQ ID NO: 54582 - RNA, 19 nt, Homo sapiens
  misc_RNA (1)...(19): siRNA sense strand
ccaccauccuccagaacuu

SEQ ID NO: 54583 - RNA, 19 nt, Homo sapiens
  misc_RNA (1)...(19): siRNA sense strand
caacgcacacagugaauuc

SEQ ID NO: 54584 - RNA, 19 nt, Homo sapiens
  misc_RNA (1)...(19): siRNA sense strand
caucugcuccaucgucuuu

SEQ ID NO: 54585 - RNA, 19 nt, Homo sapiens
  misc_RNA (1)...(19): siRNA sense strand
uuucugagguuccgagaga

SEQ ID NO: 54586 - RNA, 19 nt, Homo sapiens
  misc_RNA (1)...(19): siRNA sense strand
gaaauccaacgcacacagu

SEQ ID NO: 54587 - RNA, 19 nt, Homo sapiens
  misc_RNA (1)...(19): siRNA sense strand
ccaaggacacagaaguauu

SEQ ID NO: 54588 - RNA, 19 nt, Homo sapiens
  misc_RNA (1)...(19): siRNA sense strand
gaauuguuccucuucuuca

SEQ ID NO: 54589 - RNA, 19 nt, Homo sapiens
  misc_RNA (1)...(19): siRNA sense strand
ucacucaucagcucuguau

SEQ ID NO: 54590 - RNA, 19 nt, Homo sapiens
  misc_RNA (1)...(19): siRNA sense strand
ggauauggugugaucuuug

SEQ ID NO: 54591 - RNA, 19 nt, Homo sapiens
  misc_RNA (1)...(19): siRNA sense strand
ucaccaccauccuccagaa

SEQ ID NO: 54592 - RNA, 19 nt, Homo sapiens
  misc_RNA (1)...(19): siRNA sense strand
gcacacaggcaaguuuaca

SEQ ID NO: 54593 - RNA, 19 nt, Homo sapiens
  misc_RNA (1)...(19): siRNA sense strand
acacaggcaaguuuacaaa

SEQ ID NO: 54594 - RNA, 19 nt, Homo sapiens
  misc_RNA (1)...(19): siRNA sense strand
gggaaaccuucugcagaug

SEQ ID NO: 54595 - RNA, 19 nt, Homo sapiens
  misc_RNA (1)...(19): siRNA sense strand
gcggauuugucuuggugaa

SEQ ID NO: 54596 - RNA, 19 nt, Homo sapiens
  misc_RNA (1)...(19): siRNA sense strand
gaagcggauuugucuuggu

SEQ ID NO: 54597 - RNA, 19 nt, Homo sapiens
  misc_RNA (1)...(19): siRNA sense strand
ggagauugaacaggugauu

SEQ ID NO: 54598 - RNA, 19 nt, Homo sapiens
  misc_RNA (1)...(19): siRNA sense strand
acaccuaccugcuccacau

SEQ ID NO: 54599 - RNA, 19 nt, Homo sapiens
  misc_RNA (1)...(19): siRNA sense strand
ggucaugcuguguggagua

SEQ ID NO: 54600 - RNA, 19 nt, Homo sapiens
  misc_RNA (1)...(19): siRNA sense strand
cacagaggcagucaucuau

SEQ ID NO: 54601 - RNA, 19 nt, Homo sapiens
  misc_RNA (1)...(19): siRNA sense strand
ugagguuccgagagaaaua

SEQ ID NO: 54602 - RNA, 19 nt, Homo sapiens
  misc_RNA (1)...(19): siRNA sense strand
ccucacaggacucuugcua

SEQ ID NO: 54603 - RNA, 19 nt, Homo sapiens
  misc_RNA (1)...(19): siRNA sense strand
gagauugaacaggugauug

SEQ ID NO: 54604 - RNA, 19 nt, Homo sapiens
  misc_RNA (1)...(19): siRNA sense strand
guggagaagcaccgugaaa

SEQ ID NO: 54605 - RNA, 19 nt, Homo sapiens
  misc_RNA (1)...(19): siRNA sense strand
gaucuuugccaauggaaac

SEQ ID NO: 54606 - RNA, 19 nt, Homo sapiens
  misc_RNA (1)...(19): siRNA sense strand
ggauagaagaggccuacuc

SEQ ID NO: 54607 - RNA, 19 nt, Homo sapiens
  misc_RNA (1)...(19): siRNA sense strand
cuaugagauucagagauuu

SEQ ID NO: 54608 - RNA, 19 nt, Homo sapiens
  misc_RNA (1)...(19): siRNA sense strand
gaaaacgauuccacuacca

SEQ ID NO: 54609 - RNA, 19 nt, Homo sapiens
  misc_RNA (1)...(19): siRNA sense strand
gaggccuacucaaauccuu

SEQ ID NO: 54610 - RNA, 19 nt, Homo sapiens
  misc_RNA (1)...(19): siRNA sense strand
aucaagaguuccugaagau

SEQ ID NO: 54611 - RNA, 19 nt, Homo sapiens
  misc_RNA (1)...(19): siRNA sense strand
gagagucuacagggagauu

SEQ ID NO: 54612 - RNA, 19 nt, Homo sapiens
  misc_RNA (1)...(19): siRNA sense strand
uccugaagaugcugaacuu

SEQ ID NO: 54613 - RNA, 19 nt, Homo sapiens
  misc_RNA (1)...(19): siRNA sense strand
acucaucagcucuguauuc

SEQ ID NO: 54614 - RNA, 19 nt, Homo sapiens
  misc_RNA (1)...(19): siRNA sense strand
ugacccacacuacuuugaa

SEQ ID NO: 54615 - RNA, 19 nt, Homo sapiens
  misc_RNA (1)...(19): siRNA sense strand
gagguuccgagagaaauau

SEQ ID NO: 54616 - RNA, 19 nt, Homo sapiens
  misc_RNA (1)...(19): siRNA sense strand
gagucuacagggagauuga

SEQ ID NO: 54617 - RNA, 19 nt, Homo sapiens
  misc_RNA (1)...(19): siRNA sense strand
accagaaccucaaccucaa

SEQ ID NO: 54618 - RNA, 19 nt, Homo sapiens
  misc_RNA (1)...(19): siRNA sense strand
cgauuccacuaccaagauc

SEQ ID NO: 54619 - RNA, 19 nt, Homo sapiens
  misc_RNA (1)...(19): siRNA sense strand
uagggaagcggauuugucu

SEQ ID NO: 54620 - RNA, 19 nt, Homo sapiens
  misc_RNA (1)...(19): siRNA sense strand
gcaggaaaucaaugcuuac

SEQ ID NO: 54621 - RNA, 19 nt, Homo sapiens
  misc_RNA (1)...(19): siRNA sense strand
ccaacgcacacagugaauu

SEQ ID NO: 54622 - RNA, 19 nt, Homo sapiens
  misc_RNA (1)...(19): siRNA sense strand
uguauucggccagcuguuu

SEQ ID NO: 54623 - RNA, 19 nt, Homo sapiens
  misc_RNA (1)...(19): siRNA sense strand
ggagaagcaccgugaaacc

SEQ ID NO: 54624 - RNA, 19 nt, Homo sapiens
  misc_RNA (1)...(19): siRNA sense strand
guauucggccagcuguuug

SEQ ID NO: 54625 - RNA, 19 nt, Homo sapiens
  misc_RNA (1)...(19): siRNA sense strand
gcagugaccugugauguua

SEQ ID NO: 54626 - RNA, 19 nt, Homo sapiens
  misc_RNA (1)...(19): siRNA sense strand
gaacagugcucgggacuuu

SEQ ID NO: 54627 - RNA, 19 nt, Homo sapiens
  misc_RNA (1)...(19): siRNA sense strand
gaaauauccugcaguuaga

SEQ ID NO: 54628 - RNA, 19 nt, Homo sapiens
  misc_RNA (1)...(19): siRNA sense strand
gaucagagguuucuuaacu

SEQ ID NO: 54629 - RNA, 19 nt, Homo sapiens
  misc_RNA (1)...(19): siRNA sense strand
ggaaggagauccggcguuu

SEQ ID NO: 54630 - RNA, 19 nt, Homo sapiens
  misc_RNA (1)...(19): siRNA sense strand
ggauaagaguggcaacuuu

SEQ ID NO: 54631 - RNA, 19 nt, Homo sapiens
  misc_RNA (1)...(19): siRNA sense strand
aaugugaucugcucuguua

SEQ ID NO: 54632 - RNA, 19 nt, Homo sapiens
  misc_RNA (1)...(19): siRNA sense strand
uaacaucccugacuucugu

SEQ ID NO: 54633 - RNA, 19 nt, Homo sapiens
  misc_RNA (1)...(19): siRNA sense strand
gauaagaguggcaacuuua

SEQ ID NO: 54634 - RNA, 19 nt, Homo sapiens
  misc_RNA (1)...(19): siRNA sense strand
ggaaauauccugcaguuag

SEQ ID NO: 54635 - RNA, 19 nt, Homo sapiens
  misc_RNA (1)...(19): siRNA sense strand
gcucgggacuuuauugauu

SEQ ID NO: 54636 - RNA, 19 nt, Homo sapiens
  misc_RNA (1)...(19): siRNA sense strand
ggaagagauugaaugugua

SEQ ID NO: 54637 - RNA, 19 nt, Homo sapiens
  misc_RNA (1)...(19): siRNA sense strand
ggacaugagcaaauccuua

SEQ ID NO: 54638 - RNA, 19 nt, Homo sapiens
  misc_RNA (1)...(19): siRNA sense strand
gagcaaauccuuaaccaau

SEQ ID NO: 54639 - RNA, 19 nt, Homo sapiens
  misc_RNA (1)...(19): siRNA sense strand
gcagaacuuuaaccugaaa

SEQ ID NO: 54640 - RNA, 19 nt, Homo sapiens
  misc_RNA (1)...(19): siRNA sense strand
cacuguaacugauauguuu

SEQ ID NO: 54641 - RNA, 19 nt, Homo sapiens
  misc_RNA (1)...(19): siRNA sense strand
gagauugaauguguaguug

SEQ ID NO: 54642 - RNA, 19 nt, Homo sapiens
  misc_RNA (1)...(19): siRNA sense strand
gaccugugauguuaaauuc

SEQ ID NO: 54643 - RNA, 19 nt, Homo sapiens
  misc_RNA (1)...(19): siRNA sense strand
gagcaccacucugagauau

SEQ ID NO: 54644 - RNA, 19 nt, Homo sapiens
  misc_RNA (1)...(19): siRNA sense strand
gcacaaugacaaagaauuc

SEQ ID NO: 54645 - RNA, 19 nt, Homo sapiens
  misc_RNA (1)...(19): siRNA sense strand
ggauccaggucugcaauaa

SEQ ID NO: 54646 - RNA, 19 nt, Homo sapiens
  misc_RNA (1)...(19): siRNA sense strand
cagcuaaaguccaggaaga

SEQ ID NO: 54647 - RNA, 19 nt, Homo sapiens
  misc_RNA (1)...(19): siRNA sense strand
gacaugagcaaauccuuaa

SEQ ID NO: 54648 - RNA, 19 nt, Homo sapiens
  misc_RNA (1)...(19): siRNA sense strand
ccacuccucucccgauuau

SEQ ID NO: 54649 - RNA, 19 nt, Homo sapiens
  misc_RNA (1)...(19): siRNA sense strand
ucccugcucucaucgauua

SEQ ID NO: 54650 - RNA, 19 nt, Homo sapiens
  misc_RNA (1)...(19): siRNA sense strand
uaacaaaggacuuggaauc

SEQ ID NO: 54651 - RNA, 19 nt, Homo sapiens
  misc_RNA (1)...(19): siRNA sense strand
aggaagagauugaaugugu

SEQ ID NO: 54652 - RNA, 19 nt, Homo sapiens
  misc_RNA (1)...(19): siRNA sense strand
aagaaucccuggacaugaa

SEQ ID NO: 54653 - RNA, 19 nt, Homo sapiens
  misc_RNA (1)...(19): siRNA sense strand
ugaaggaggcccugauuga

SEQ ID NO: 54654 - RNA, 19 nt, Homo sapiens
  misc_RNA (1)...(19): siRNA sense strand
gggacuuuauugauuguuu

SEQ ID NO: 54655 - RNA, 19 nt, Homo sapiens
  misc_RNA (1)...(19): siRNA sense strand
ucagagguuucuuaacuug

SEQ ID NO: 54656 - RNA, 19 nt, Homo sapiens
  misc_RNA (1)...(19): siRNA sense strand
ggacuuuauugauuguuuc

SEQ ID NO: 54657 - RNA, 19 nt, Homo sapiens
  misc_RNA (1)...(19): siRNA sense strand
gcaccacucugagauaugg

SEQ ID NO: 54658 - RNA, 19 nt, Homo sapiens
  misc_RNA (1)...(19): siRNA sense strand
gcaaugugaucugcucugu

SEQ ID NO: 54659 - RNA, 19 nt, Homo sapiens
  misc_RNA (1)...(19): siRNA sense strand
gugaucugcucuguuauuu

SEQ ID NO: 54660 - RNA, 19 nt, Homo sapiens
  misc_RNA (1)...(19): siRNA sense strand
ucaugacucugcggaauuu

SEQ ID NO: 54661 - RNA, 19 nt, Homo sapiens
  misc_RNA (1)...(19): siRNA sense strand
cccaggaagucauaauaaa

SEQ ID NO: 54662 - RNA, 19 nt, Homo sapiens
  misc_RNA (1)...(19): siRNA sense strand
caaaggauauugacaucac

SEQ ID NO: 54663 - RNA, 19 nt, Homo sapiens
  misc_RNA (1)...(19): siRNA sense strand
gguguugcauggauaugaa

SEQ ID NO: 54664 - RNA, 19 nt, Homo sapiens
  misc_RNA (1)...(19): siRNA sense strand
uaccagcucugcuucauuc

SEQ ID NO: 54665 - RNA, 19 nt, Homo sapiens
  misc_RNA (1)...(19): siRNA sense strand
gauagccacuguaacugau

SEQ ID NO: 54666 - RNA, 19 nt, Homo sapiens
  misc_RNA (1)...(19): siRNA sense strand
ggaccguguucaagaggaa

SEQ ID NO: 54667 - RNA, 19 nt, Homo sapiens
  misc_RNA (1)...(19): siRNA sense strand
ugcacgagauccagagaua

SEQ ID NO: 54668 - RNA, 19 nt, Homo sapiens
  misc_RNA (1)...(19): siRNA sense strand
acccagaggucacagcuaa

SEQ ID NO: 54669 - RNA, 19 nt, Homo sapiens
  misc_RNA (1)...(19): siRNA sense strand
caaucaacagucugaauuu

SEQ ID NO: 54670 - RNA, 19 nt, Homo sapiens
  misc_RNA (1)...(19): siRNA sense strand
gaucugcucuguuauuuuc

SEQ ID NO: 54671 - RNA, 19 nt, Homo sapiens
  misc_RNA (1)...(19): siRNA sense strand
gauaugaagcagugaagga

SEQ ID NO: 54672 - RNA, 19 nt, Homo sapiens
  misc_RNA (1)...(19): siRNA sense strand
aaucucagguugacccaaa

SEQ ID NO: 54673 - RNA, 19 nt, Homo sapiens
  misc_RNA (1)...(19): siRNA sense strand
gaagagauugaauguguag

SEQ ID NO: 54674 - RNA, 19 nt, Homo sapiens
  misc_RNA (1)...(19): siRNA sense strand
uaauuucccugcucucauc

SEQ ID NO: 54675 - RNA, 19 nt, Homo sapiens
  misc_RNA (1)...(19): siRNA sense strand
gcugcacaaugacaaagaa

SEQ ID NO: 54676 - RNA, 19 nt, Homo sapiens
  misc_RNA (1)...(19): siRNA sense strand
guuugacccuggccacuuu

SEQ ID NO: 54677 - RNA, 19 nt, Homo sapiens
  misc_RNA (1)...(19): siRNA sense strand
gaaggaggcccugauugau

SEQ ID NO: 54678 - RNA, 19 nt, Homo sapiens
  misc_RNA (1)...(19): siRNA sense strand
auaauaacaucccugacuu

SEQ ID NO: 54679 - RNA, 19 nt, Homo sapiens
  misc_RNA (1)...(19): siRNA sense strand
gugacuacuucaugccuuu

SEQ ID NO: 54680 - RNA, 19 nt, Homo sapiens
  misc_RNA (1)...(19): siRNA sense strand
ggagaggaguuuucuggaa

SEQ ID NO: 54681 - RNA, 19 nt, Homo sapiens
  misc_RNA (1)...(19): siRNA sense strand
ccugugauguuaaauucaa

SEQ ID NO: 54682 - RNA, 19 nt, Homo sapiens
  misc_RNA (1)...(19): siRNA sense strand
uaaaguccaggaagagauu

SEQ ID NO: 54683 - RNA, 19 nt, Homo sapiens
  misc_RNA (1)...(19): siRNA sense strand
gggcugugcucccugcaau

SEQ ID NO: 54684 - RNA, 19 nt, Homo sapiens
  misc_RNA (1)...(19): siRNA sense strand
auccaggucugcaauaauu

SEQ ID NO: 54685 - RNA, 19 nt, Homo sapiens
  misc_RNA (1)...(19): siRNA sense strand
cagguugacccaaaggaua

SEQ ID NO: 54686 - RNA, 19 nt, Homo sapiens
  misc_RNA (1)...(19): siRNA sense strand
acaaucaacagucugaauu

SEQ ID NO: 54687 - RNA, 19 nt, Homo sapiens
  misc_RNA (1)...(19): siRNA sense strand
ugaauuuacuguugaaagc

SEQ ID NO: 54688 - RNA, 19 nt, Homo sapiens
  misc_RNA (1)...(19): siRNA sense strand
acaacgagcaccacucuga

SEQ ID NO: 54689 - RNA, 19 nt, Homo sapiens
  misc_RNA (1)...(19): siRNA sense strand
cggcguuucugccucauga

SEQ ID NO: 54690 - RNA, 19 nt, Homo sapiens
  misc_RNA (1)...(19): siRNA sense strand
ccuggccacuuucuggaua

SEQ ID NO: 54691 - RNA, 19 nt, Homo sapiens
  misc_RNA (1)...(19): siRNA sense strand
ucacaugcccuacacagau

SEQ ID NO: 54692 - RNA, 19 nt, Homo sapiens
  misc_RNA (1)...(19): siRNA sense strand
ucaacagucugaauuuacu

SEQ ID NO: 54693 - RNA, 19 nt, Homo sapiens
  misc_RNA (1)...(19): siRNA sense strand
uuaaggacaugagcaaauc

SEQ ID NO: 54694 - RNA, 19 nt, Homo sapiens
  misc_RNA (1)...(19): siRNA sense strand
gagcaucgaggaccguguu

SEQ ID NO: 54695 - RNA, 19 nt, Homo sapiens
  misc_RNA (1)...(19): siRNA sense strand
caagaaucccuggacauga

SEQ ID NO: 54696 - RNA, 19 nt, Homo sapiens
  misc_RNA (1)...(19): siRNA sense strand
auucugagcucuccaugga

SEQ ID NO: 54697 - RNA, 19 nt, Homo sapiens
  misc_RNA (1)...(19): siRNA sense strand
uccaugaucgauuugauua

SEQ ID NO: 54698 - RNA, 19 nt, Homo sapiens
  misc_RNA (1)...(19): siRNA sense strand
agcaaauccuuaaccaauu

SEQ ID NO: 54699 - RNA, 19 nt, Homo sapiens
  misc_RNA (1)...(19): siRNA sense strand
gaacuuuaaccugaaaucu

SEQ ID NO: 54700 - RNA, 19 nt, Homo sapiens
  misc_RNA (1)...(19): siRNA sense strand
gaguggcaacuuuaagaaa

SEQ ID NO: 54701 - RNA, 19 nt, Homo sapiens
  misc_RNA (1)...(19): siRNA sense strand
ucaagaaucccuggacaug

SEQ ID NO: 54702 - RNA, 19 nt, Homo sapiens
  misc_RNA (1)...(19): siRNA sense strand
gaaagagauggaaggagau

SEQ ID NO: 54703 - RNA, 19 nt, Homo sapiens
  misc_RNA (1)...(19): siRNA sense strand
acuuuaaccugaaaucuca

SEQ ID NO: 54704 - RNA, 19 nt, Homo sapiens
  misc_RNA (1)...(19): siRNA sense strand
ccaggaagagauugaaugu

SEQ ID NO: 54705 - RNA, 19 nt, Homo sapiens
  misc_RNA (1)...(19): siRNA sense strand
agucugaauuuacuguuga

SEQ ID NO: 54706 - RNA, 19 nt, Homo sapiens
  misc_RNA (1)...(19): siRNA sense strand
uuggaaauauccugcaguu

SEQ ID NO: 54707 - RNA, 19 nt, Homo sapiens
  misc_RNA (1)...(19): siRNA sense strand
guuaaggacaugagcaaau

SEQ ID NO: 54708 - RNA, 19 nt, Homo sapiens
  misc_RNA (1)...(19): siRNA sense strand
cacaugcccuacacagaug

SEQ ID NO: 54709 - RNA, 19 nt, Homo sapiens
  misc_RNA (1)...(19): siRNA sense strand
cauaauaacaucccugacu

SEQ ID NO: 54710 - RNA, 19 nt, Homo sapiens
  misc_RNA (1)...(19): siRNA sense strand
gcaauggaaagagauggaa

SEQ ID NO: 54711 - RNA, 19 nt, Homo sapiens
  misc_RNA (1)...(19): siRNA sense strand
gagauccagagauacauug

SEQ ID NO: 54712 - RNA, 19 nt, Homo sapiens
  misc_RNA (1)...(19): siRNA sense strand
ggagucacaugcccuacac

SEQ ID NO: 54713 - RNA, 19 nt, Homo sapiens
  misc_RNA (1)...(19): siRNA sense strand
cgagcaccacucugagaua

SEQ ID NO: 54714 - RNA, 19 nt, Homo sapiens
  misc_RNA (1)...(19): siRNA sense strand
cgaggaccguguucaagag

SEQ ID NO: 54715 - RNA, 19 nt, Homo sapiens
  misc_RNA (1)...(19): siRNA sense strand
ugaagcccauugugguguu

SEQ ID NO: 54716 - RNA, 19 nt, Homo sapiens
  misc_RNA (1)...(19): siRNA sense strand
ugaccugugauguuaaauu

SEQ ID NO: 54717 - RNA, 19 nt, Homo sapiens
  misc_RNA (1)...(19): siRNA sense strand
gaagcccauugugguguug

SEQ ID NO: 54718 - RNA, 19 nt, Homo sapiens
  misc_RNA (1)...(19): siRNA sense strand
gcccuguguucacugugua

SEQ ID NO: 54719 - RNA, 19 nt, Homo sapiens
  misc_RNA (1)...(19): siRNA sense strand
agagguuucuuaacuugau

SEQ ID NO: 54720 - RNA, 19 nt, Homo sapiens
  misc_RNA (1)...(19): siRNA sense strand
ugauagccacuguaacuga

SEQ ID NO: 54721 - RNA, 19 nt, Homo sapiens
  misc_RNA (1)...(19): siRNA sense strand
cccaaaggauauugacauc

SEQ ID NO: 54722 - RNA, 19 nt, Homo sapiens
  misc_RNA (1)...(19): siRNA sense strand
ccacuguaacugauauguu

SEQ ID NO: 54723 - RNA, 19 nt, Homo sapiens
  misc_RNA (1)...(19): siRNA sense strand
cccaugcagugaccuguga

SEQ ID NO: 54724 - RNA, 19 nt, Homo sapiens
  misc_RNA (1)...(19): siRNA sense strand
gcuaaaguccaggaagaga

SEQ ID NO: 54725 - RNA, 19 nt, Homo sapiens
  misc_RNA (1)...(19): siRNA sense strand
gaaauacccugagaucgaa

SEQ ID NO: 54726 - RNA, 19 nt, Homo sapiens
  misc_RNA (1)...(19): siRNA sense strand
gaagcuccaugaagaaauu

SEQ ID NO: 54727 - RNA, 19 nt, Homo sapiens
  misc_RNA (1)...(19): siRNA sense strand
gcacaacucugagauaugg

SEQ ID NO: 54728 - RNA, 19 nt, Homo sapiens
  misc_RNA (1)...(19): siRNA sense strand
gaacacuuccugaaugaaa

SEQ ID NO: 54729 - RNA, 19 nt, Homo sapiens
  misc_RNA (1)...(19): siRNA sense strand
gaccucagcccuauacaua

SEQ ID NO: 54730 - RNA, 19 nt, Homo sapiens
  misc_RNA (1)...(19): siRNA sense strand
gauaugggcuccugauucu

SEQ ID NO: 54731 - RNA, 19 nt, Homo sapiens
  misc_RNA (1)...(19): siRNA sense strand
aagagaagcuccaugaaga

SEQ ID NO: 54732 - RNA, 19 nt, Homo sapiens
  misc_RNA (1)...(19): siRNA sense strand
ccagaacacuuccugaaug

SEQ ID NO: 54733 - RNA, 19 nt, Homo sapiens
  misc_RNA (1)...(19): siRNA sense strand
cagaacacuuccugaauga

SEQ ID NO: 54734 - RNA, 19 nt, Homo sapiens
  misc_RNA (1)...(19): siRNA sense strand
caaguacagugacuauuuc

SEQ ID NO: 54735 - RNA, 19 nt, Homo sapiens
  misc_RNA (1)...(19): siRNA sense strand
gaagagaagcuccaugaag

SEQ ID NO: 54736 - RNA, 19 nt, Homo sapiens
  misc_RNA (1)...(19): siRNA sense strand
ucaaguacagugacuauuu

SEQ ID NO: 54737 - RNA, 19 nt, Homo sapiens
  misc_RNA (1)...(19): siRNA sense strand
cuacaaugaugagaaguuu

SEQ ID NO: 54738 - RNA, 19 nt, Homo sapiens
  misc_RNA (1)...(19): siRNA sense strand
gaaauugacagggugauug

SEQ ID NO: 54739 - RNA, 19 nt, Homo sapiens
  misc_RNA (1)...(19): siRNA sense strand
ugaagaauauucccaaguc

SEQ ID NO: 54740 - RNA, 19 nt, Homo sapiens
  misc_RNA (1)...(19): siRNA sense strand
ggcuccagcuuuacaauaa

SEQ ID NO: 54741 - RNA, 19 nt, Homo sapiens
  misc_RNA (1)...(19): siRNA sense strand
cagcacaacucugagauau

SEQ ID NO: 54742 - RNA, 19 nt, Homo sapiens
  misc_RNA (1)...(19): siRNA sense strand
ccucagcccuauacauauu

SEQ ID NO: 54743 - RNA, 19 nt, Homo sapiens
  misc_RNA (1)...(19): siRNA sense strand
caguuggaauugaagaaua

SEQ ID NO: 54744 - RNA, 19 nt, Homo sapiens
  misc_RNA (1)...(19): siRNA sense strand
gaaaguucaaguacaguga

SEQ ID NO: 54745 - RNA, 19 nt, Homo sapiens
  misc_RNA (1)...(19): siRNA sense strand
aggaagcgcugcuggacua

SEQ ID NO: 54746 - RNA, 19 nt, Homo sapiens
  misc_RNA (1)...(19): siRNA sense strand
guaugacaaccaagaauuu

SEQ ID NO: 54747 - RNA, 19 nt, Homo sapiens
  misc_RNA (1)...(19): siRNA sense strand
aggcugauguauuuguuua

SEQ ID NO: 54748 - RNA, 19 nt, Homo sapiens
  misc_RNA (1)...(19): siRNA sense strand
gaaugaaaauggaaaguuc

SEQ ID NO: 54749 - RNA, 19 nt, Homo sapiens
  misc_RNA (1)...(19): siRNA sense strand
ugaaauacccugagaucga

SEQ ID NO: 54750 - RNA, 19 nt, Homo sapiens
  misc_RNA (1)...(19): siRNA sense strand
agaauuuccugauccagaa

SEQ ID NO: 54751 - RNA, 19 nt, Homo sapiens
  misc_RNA (1)...(19): siRNA sense strand
uucuaaggcugauguauuu

SEQ ID NO: 54752 - RNA, 19 nt, Homo sapiens
  misc_RNA (1)...(19): siRNA sense strand
cauauuggguuuggcugua

SEQ ID NO: 54753 - RNA, 19 nt, Homo sapiens
  misc_RNA (1)...(19): siRNA sense strand
gagaagcuccaugaagaaa

SEQ ID NO: 54754 - RNA, 19 nt, Homo sapiens
  misc_RNA (1)...(19): siRNA sense strand
gaaggagcaccaucaaucu

SEQ ID NO: 54755 - RNA, 19 nt, Homo sapiens
  misc_RNA (1)...(19): siRNA sense strand
ugacuacaaugaugagaag

SEQ ID NO: 54756 - RNA, 19 nt, Homo sapiens
  misc_RNA (1)...(19): siRNA sense strand
gcauggaguuguuucuuuu

SEQ ID NO: 54757 - RNA, 19 nt, Homo sapiens
  misc_RNA (1)...(19): siRNA sense strand
aaauguggcugaaguaaaa

SEQ ID NO: 54758 - RNA, 19 nt, Homo sapiens
  misc_RNA (1)...(19): siRNA sense strand
uaaggcugauguauuuguu

SEQ ID NO: 54759 - RNA, 19 nt, Homo sapiens
  misc_RNA (1)...(19): siRNA sense strand
cgcauggaguuguuucuuu

SEQ ID NO: 54760 - RNA, 19 nt, Homo sapiens
  misc_RNA (1)...(19): siRNA sense strand
gcuccugauucucaugaaa

SEQ ID NO: 54761 - RNA, 19 nt, Homo sapiens
  misc_RNA (1)...(19): siRNA sense strand
ugaaggagcaccaucaauc

SEQ ID NO: 54762 - RNA, 19 nt, Homo sapiens
  misc_RNA (1)...(19): siRNA sense strand
cuacacuacuugccuggaa

SEQ ID NO: 54763 - RNA, 19 nt, Homo sapiens
  misc_RNA (1)...(19): siRNA sense strand
uuacaaacucugugucauu

SEQ ID NO: 54764 - RNA, 19 nt, Homo sapiens
  misc_RNA (1)...(19): siRNA sense strand
guacagugacuauuucaag

SEQ ID NO: 54765 - RNA, 19 nt, Homo sapiens
  misc_RNA (1)...(19): siRNA sense strand
ggacuacaaggacgaguuc

SEQ ID NO: 54766 - RNA, 19 nt, Homo sapiens
  misc_RNA (1)...(19): siRNA sense strand
gagauucagcgguucauca

SEQ ID NO: 54767 - RNA, 19 nt, Homo sapiens
  misc_RNA (1)...(19): siRNA sense strand
ccgaaucccugccaucaag

SEQ ID NO: 54768 - RNA, 19 nt, Homo sapiens
  misc_RNA (1)...(19): siRNA sense strand
ugaccacccuccggaacua

SEQ ID NO: 54769 - RNA, 19 nt, Homo sapiens
  misc_RNA (1)...(19): siRNA sense strand
uacaaacucugugucauuc

SEQ ID NO: 54770 - RNA, 19 nt, Homo sapiens
  misc_RNA (1)...(19): siRNA sense strand
aagaguaugugucugaaag

SEQ ID NO: 54771 - RNA, 19 nt, Homo sapiens
  misc_RNA (1)...(19): siRNA sense strand
gugacuauuucaagccauu

SEQ ID NO: 54772 - RNA, 19 nt, Homo sapiens
  misc_RNA (1)...(19): siRNA sense strand
gcaagcauuuugacuacaa

SEQ ID NO: 54773 - RNA, 19 nt, Homo sapiens
  misc_RNA (1)...(19): siRNA sense strand
ccaagaauuuccugaucca

SEQ ID NO: 54774 - RNA, 19 nt, Homo sapiens
  misc_RNA (1)...(19): siRNA sense strand
ucgaagagaagcuccauga

SEQ ID NO: 54775 - RNA, 19 nt, Homo sapiens
  misc_RNA (1)...(19): siRNA sense strand
gcuacaaggcggugaagga

SEQ ID NO: 54776 - RNA, 19 nt, Homo sapiens
  misc_RNA (1)...(19): siRNA sense strand
ccacagaaaagucauaaaa

SEQ ID NO: 54777 - RNA, 19 nt, Homo sapiens
  misc_RNA (1)...(19): siRNA sense strand
gagauaugggcuccugauu

SEQ ID NO: 54778 - RNA, 19 nt, Homo sapiens
  misc_RNA (1)...(19): siRNA sense strand
ggaguuguuucuuuuguug

SEQ ID NO: 54779 - RNA, 19 nt, Homo sapiens
  misc_RNA (1)...(19): siRNA sense strand
ccagcacaacucugagaua

SEQ ID NO: 54780 - RNA, 19 nt, Homo sapiens
  misc_RNA (1)...(19): siRNA sense strand
gcuccagcuuuacaauaau

SEQ ID NO: 54781 - RNA, 19 nt, Homo sapiens
  misc_RNA (1)...(19): siRNA sense strand
acccugagaucgaagagaa

SEQ ID NO: 54782 - RNA, 19 nt, Homo sapiens
  misc_RNA (1)...(19): siRNA sense strand
uaaaagaguaugugucuga

SEQ ID NO: 54783 - RNA, 19 nt, Homo sapiens
  misc_RNA (1)...(19): siRNA sense strand
caaccaagaauuuccugau

SEQ ID NO: 54784 - RNA, 19 nt, Homo sapiens
  misc_RNA (1)...(19): siRNA sense strand
ugccaacucuggacucugu

SEQ ID NO: 54785 - RNA, 19 nt, Homo sapiens
  misc_RNA (1)...(19): siRNA sense strand
uccugauucucaugaaaua

SEQ ID NO: 54786 - RNA, 19 nt, Homo sapiens
  misc_RNA (1)...(19): siRNA sense strand
caugaaauacccugagauc

SEQ ID NO: 54787 - RNA, 19 nt, Homo sapiens
  misc_RNA (1)...(19): siRNA sense strand
caagggcacagucguagug

SEQ ID NO: 54788 - RNA, 19 nt, Homo sapiens
  misc_RNA (1)...(19): siRNA sense strand
gcaacccgagacaccauuu

SEQ ID NO: 54789 - RNA, 19 nt, Homo sapiens
  misc_RNA (1)...(19): siRNA sense strand
gcaagagaugcccuacaug

SEQ ID NO: 54790 - RNA, 19 nt, Homo sapiens
  misc_RNA (1)...(19): siRNA sense strand
gggaaacagggcaaugaga

SEQ ID NO: 54791 - RNA, 19 nt, Homo sapiens
  misc_RNA (1)...(19): siRNA sense strand
cccuauacauauuggguuu

SEQ ID NO: 54792 - RNA, 19 nt, Homo sapiens
  misc_RNA (1)...(19): siRNA sense strand
uaaugagaacuuccaccua

SEQ ID NO: 54793 - RNA, 19 nt, Homo sapiens
  misc_RNA (1)...(19): siRNA sense strand
gcuguaucccaccacguua

SEQ ID NO: 54794 - RNA, 19 nt, Homo sapiens
  misc_RNA (1)...(19): siRNA sense strand
cuacaaggcggugaaggaa

SEQ ID NO: 54795 - RNA, 19 nt, Homo sapiens
  misc_RNA (1)...(19): siRNA sense strand
guucaaguacagugacuau

SEQ ID NO: 54796 - RNA, 19 nt, Homo sapiens
  misc_RNA (1)...(19): siRNA sense strand
gccagaacacuuccugaau

SEQ ID NO: 54797 - RNA, 19 nt, Homo sapiens
  misc_RNA (1)...(19): siRNA sense strand
aaccaagaauuuccugauc

SEQ ID NO: 54798 - RNA, 19 nt, Homo sapiens
  misc_RNA (1)...(19): siRNA sense strand
ccagcuuucuacacuacuu

SEQ ID NO: 54799 - RNA, 19 nt, Homo sapiens
  misc_RNA (1)...(19): siRNA sense strand
aauggaaaguucaaguaca

SEQ ID NO: 54800 - RNA, 19 nt, Homo sapiens
  misc_RNA (1)...(19): siRNA sense strand
caucaaggauaggcaagag

SEQ ID NO: 54801 - RNA, 19 nt, Homo sapiens
  misc_RNA (1)...(19): siRNA sense strand
cgaagagaagcuccaugaa

SEQ ID NO: 54802 - RNA, 19 nt, Homo sapiens
  misc_RNA (1)...(19): siRNA sense strand
uuucuaaggcugauguauu

SEQ ID NO: 54803 - RNA, 19 nt, Homo sapiens
  misc_RNA (1)...(19): siRNA sense strand
aagcgcugcuggacuacaa

SEQ ID NO: 54804 - RNA, 19 nt, Homo sapiens
  misc_RNA (1)...(19): siRNA sense strand
auaauggaccuaccuggaa

SEQ ID NO: 54805 - RNA, 19 nt, Homo sapiens
  misc_RNA (1)...(19): siRNA sense strand
uguaugacaaccaagaauu

SEQ ID NO: 54806 - RNA, 19 nt, Homo sapiens
  misc_RNA (1)...(19): siRNA sense strand
gagaacuuccaccuacuca

SEQ ID NO: 54807 - RNA, 19 nt, Homo sapiens
  misc_RNA (1)...(19): siRNA sense strand
cuccagcuuuacaauaauu

SEQ ID NO: 54808 - RNA, 19 nt, Homo sapiens
  misc_RNA (1)...(19): siRNA sense strand
gaaaauggaaaguucaagu

SEQ ID NO: 54809 - RNA, 19 nt, Homo sapiens
  misc_RNA (1)...(19): siRNA sense strand
acagagaccaccagcacaa

SEQ ID NO: 54810 - RNA, 19 nt, Homo sapiens
  misc_RNA (1)...(19): siRNA sense strand
ggccgguguucacgcugua

SEQ ID NO: 54811 - RNA, 19 nt, Homo sapiens
  misc_RNA (1)...(19): siRNA sense strand
gacuguggccgaccuguuc

SEQ ID NO: 54812 - RNA, 19 nt, Homo sapiens
  misc_RNA (1)...(19): siRNA sense strand
agagaugcccuacauggau

SEQ ID NO: 54813 - RNA, 19 nt, Homo sapiens
  misc_RNA (1)...(19): siRNA sense strand
ucaaggauaggcaagagau

SEQ ID NO: 54814 - RNA, 19 nt, Homo sapiens
  misc_RNA (1)...(19): siRNA sense strand
agagaagcuccaugaagaa

SEQ ID NO: 54815 - RNA, 19 nt, Homo sapiens
  misc_RNA (1)...(19): siRNA sense strand
ucguggaaauggagaagga

SEQ ID NO: 54816 - RNA, 19 nt, Homo sapiens
  misc_RNA (1)...(19): siRNA sense strand
ccaccacguuacaaacucu

SEQ ID NO: 54817 - RNA, 19 nt, Homo sapiens
  misc_RNA (1)...(19): siRNA sense strand
gugcagagcgcuuguacac

SEQ ID NO: 54818 - RNA, 19 nt, Homo sapiens
  misc_RNA (1)...(19): siRNA sense strand
acgagugugugcuggagaa

SEQ ID NO: 54819 - RNA, 19 nt, Homo sapiens
  misc_RNA (1)...(19): siRNA sense strand
caucaucgggaaccucuuc

SEQ ID NO: 54820 - RNA, 19 nt, Homo sapiens
  misc_RNA (1)...(19): siRNA sense strand
agauaugggcuccugauuc

SEQ ID NO: 54821 - RNA, 19 nt, Homo sapiens
  misc_RNA (1)...(19): siRNA sense strand
uaugggcuccugauucuca

SEQ ID NO: 54822 - RNA, 19 nt, Homo sapiens
  misc_RNA (1)...(19): siRNA sense strand
uaucccaccacguuacaaa

SEQ ID NO: 54823 - RNA, 19 nt, Homo sapiens
  misc_RNA (1)...(19): siRNA sense strand
ccaacucuggacucuguuu

SEQ ID NO: 54824 - RNA, 19 nt, Homo sapiens
  misc_RNA (1)...(19): siRNA sense strand
agaauauucccaaguccuu

SEQ ID NO: 54825 - RNA, 19 nt, Homo sapiens
  misc_RNA (1)...(19): siRNA sense strand
gcauggagcucuuucugua

SEQ ID NO: 54826 - RNA, 19 nt, Homo sapiens
  misc_RNA (1)...(19): siRNA sense strand
gcucaggucuuggcaauuu

SEQ ID NO: 54827 - RNA, 19 nt, Homo sapiens
  misc_RNA (1)...(19): siRNA sense strand
ucacuaagcugagcaagga

SEQ ID NO: 54828 - RNA, 19 nt, Homo sapiens
  misc_RNA (1)...(19): siRNA sense strand
acccuaagcucaagagaua

SEQ ID NO: 54829 - RNA, 19 nt, Homo sapiens
  misc_RNA (1)...(19): siRNA sense strand
gaaaccugcugcugcuuug

SEQ ID NO: 54830 - RNA, 19 nt, Homo sapiens
  misc_RNA (1)...(19): siRNA sense strand
ccacucagcucaggucuug

SEQ ID NO: 54831 - RNA, 19 nt, Homo sapiens
  misc_RNA (1)...(19): siRNA sense strand
gauggaagguccugagaca

SEQ ID NO: 54832 - RNA, 19 nt, Homo sapiens
  misc_RNA (1)...(19): siRNA sense strand
aaugacaacuuccaaauca

SEQ ID NO: 54833 - RNA, 19 nt, Homo sapiens
  misc_RNA (1)...(19): siRNA sense strand
caacgcaucuuccagaacu

SEQ ID NO: 54834 - RNA, 19 nt, Homo sapiens
  misc_RNA (1)...(19): siRNA sense strand
acacauaaccugcucuuug

SEQ ID NO: 54835 - RNA, 19 nt, Homo sapiens
  misc_RNA (1)...(19): siRNA sense strand
ggaaaccugcugcugcuuu

SEQ ID NO: 54836 - RNA, 19 nt, Homo sapiens
  misc_RNA (1)...(19): siRNA sense strand
ggaagguccugagacaguu

SEQ ID NO: 54837 - RNA, 19 nt, Homo sapiens
  misc_RNA (1)...(19): siRNA sense strand
gccaaucaguccuucaaga

SEQ ID NO: 54838 - RNA, 19 nt, Homo sapiens
  misc_RNA (1)...(19): siRNA sense strand
gcuccuggcucucgucugu

SEQ ID NO: 54839 - RNA, 19 nt, Homo sapiens
  misc_RNA (1)...(19): siRNA sense strand
acaguucucuauccagauu

SEQ ID NO: 54840 - RNA, 19 nt, Homo sapiens
  misc_RNA (1)...(19): siRNA sense strand
cacauaaccugcucuuugg

SEQ ID NO: 54841 - RNA, 19 nt, Homo sapiens
  misc_RNA (1)...(19): siRNA sense strand
ccaaucaguccuucaagaa

SEQ ID NO: 54842 - RNA, 19 nt, Homo sapiens
  misc_RNA (1)...(19): siRNA sense strand
ugacuucucucacuaagcu

SEQ ID NO: 54843 - RNA, 19 nt, Homo sapiens
  misc_RNA (1)...(19): siRNA sense strand
gcaauggcaucgccuucuc

SEQ ID NO: 54844 - RNA, 19 nt, Homo sapiens
  misc_RNA (1)...(19): siRNA sense strand
cccaagacaugcugacuuc

SEQ ID NO: 54845 - RNA, 19 nt, Homo sapiens
  misc_RNA (1)...(19): siRNA sense strand
gcagccgcuucgacuauga

SEQ ID NO: 54846 - RNA, 19 nt, Homo sapiens
  misc_RNA (1)...(19): siRNA sense strand
cagcucaggucuuggcaau

SEQ ID NO: 54847 - RNA, 19 nt, Homo sapiens
  misc_RNA (1)...(19): siRNA sense strand
gcucaagagauaagggaaa

SEQ ID NO: 54848 - RNA, 19 nt, Homo sapiens
  misc_RNA (1)...(19): siRNA sense strand
ucaaugacaacuuccaaau

SEQ ID NO: 54849 - RNA, 19 nt, Homo sapiens
  misc_RNA (1)...(19): siRNA sense strand
ggaccagggagaggaguuu

SEQ ID NO: 54850 - RNA, 19 nt, Homo sapiens
  misc_RNA (1)...(19): siRNA sense strand
ugacaacuuccaaaucaug

SEQ ID NO: 54851 - RNA, 19 nt, Homo sapiens
  misc_RNA (1)...(19): siRNA sense strand
ccuuaucaaugacaacuuc

SEQ ID NO: 54852 - RNA, 19 nt, Homo sapiens
  misc_RNA (1)...(19): siRNA sense strand
gagaaggaggacccacuga

SEQ ID NO: 54853 - RNA, 19 nt, Homo sapiens
  misc_RNA (1)...(19): siRNA sense strand
gacaacuuccaaaucauga

SEQ ID NO: 54854 - RNA, 19 nt, Homo sapiens
  misc_RNA (1)...(19): siRNA sense strand
caaugacaacuuccaaauc

SEQ ID NO: 54855 - RNA, 19 nt, Homo sapiens
  misc_RNA (1)...(19): siRNA sense strand
gaccagggagaggaguuua

SEQ ID NO: 54856 - RNA, 19 nt, Homo sapiens
  misc_RNA (1)...(19): siRNA sense strand
gcagcgcuuugcagacauc

SEQ ID NO: 54857 - RNA, 19 nt, Homo sapiens
  misc_RNA (1)...(19): siRNA sense strand
uccuggcacucaugaagua

SEQ ID NO: 54858 - RNA, 19 nt, Homo sapiens
  misc_RNA (1)...(19): siRNA sense strand
uuauccgccuuaucaauga

SEQ ID NO: 54859 - RNA, 19 nt, Homo sapiens
  misc_RNA (1)...(19): siRNA sense strand
cgaguuguacgacaucuuc

SEQ ID NO: 54860 - RNA, 19 nt, Homo sapiens
  misc_RNA (1)...(19): siRNA sense strand
caagauggcagaggagaag

SEQ ID NO: 54861 - RNA, 19 nt, Homo sapiens
  misc_RNA (1)...(19): siRNA sense strand
ugucugcuccugacccuaa

SEQ ID NO: 54862 - RNA, 19 nt, Homo sapiens
  misc_RNA (1)...(19): siRNA sense strand
cugcugaugaccacacaua

SEQ ID NO: 54863 - RNA, 19 nt, Homo sapiens
  misc_RNA (1)...(19): siRNA sense strand
gcugacuucucucacuaag

SEQ ID NO: 54864 - RNA, 19 nt, Homo sapiens
  misc_RNA (1)...(19): siRNA sense strand
accauuauccgccuuauca

SEQ ID NO: 54865 - RNA, 19 nt, Homo sapiens
  misc_RNA (1)...(19): siRNA sense strand
caagacaugcugacuucuc

SEQ ID NO: 54866 - RNA, 19 nt, Homo sapiens
  misc_RNA (1)...(19): siRNA sense strand
auggauacccugcugauga

SEQ ID NO: 54867 - RNA, 19 nt, Homo sapiens
  misc_RNA (1)...(19): siRNA sense strand
gcuuugcucccaagacaug

SEQ ID NO: 54868 - RNA, 19 nt, Homo sapiens
  misc_RNA (1)...(19): siRNA sense strand
cugcuuugcucccaagaca

SEQ ID NO: 54869 - RNA, 19 nt, Homo sapiens
  misc_RNA (1)...(19): siRNA sense strand
ggcagccgcuucgacuaug

SEQ ID NO: 54870 - RNA, 19 nt, Homo sapiens
  misc_RNA (1)...(19): siRNA sense strand
gcgcauggagcucuuucug

SEQ ID NO: 54871 - RNA, 19 nt, Homo sapiens
  misc_RNA (1)...(19): siRNA sense strand
gcgcuuugcagacaucauc

SEQ ID NO: 54872 - RNA, 19 nt, Homo sapiens
  misc_RNA (1)...(19): siRNA sense strand
gguaccaagcugugaagga

SEQ ID NO: 54873 - RNA, 19 nt, Homo sapiens
  misc_RNA (1)...(19): siRNA sense strand
uuaacaccguccacuacga

SEQ ID NO: 54874 - RNA, 19 nt, Homo sapiens
  misc_RNA (1)...(19): siRNA sense strand
gucaucacccuccuuaaca

SEQ ID NO: 54875 - RNA, 19 nt, Homo sapiens
  misc_RNA (1)...(19): siRNA sense strand
augcugacuucucucacua

SEQ ID NO: 54876 - RNA, 19 nt, Homo sapiens
  misc_RNA (1)...(19): siRNA sense strand
aagacaugcugacuucucu

SEQ ID NO: 54877 - RNA, 19 nt, Homo sapiens
  misc_RNA (1)...(19): siRNA sense strand
ccacacauaaccugcucuu

SEQ ID NO: 54878 - RNA, 19 nt, Homo sapiens
  misc_RNA (1)...(19): siRNA sense strand
ccaagauggcagaggagaa

SEQ ID NO: 54879 - RNA, 19 nt, Homo sapiens
  misc_RNA (1)...(19): siRNA sense strand
gacaugcugacuucucuca

SEQ ID NO: 54880 - RNA, 19 nt, Homo sapiens
  misc_RNA (1)...(19): siRNA sense strand
gaagguccugagacaguuc

SEQ ID NO: 54881 - RNA, 19 nt, Homo sapiens
  misc_RNA (1)...(19): siRNA sense strand
gacccuaagcucaagagau

SEQ ID NO: 54882 - RNA, 19 nt, Homo sapiens
  misc_RNA (1)...(19): siRNA sense strand
gggacuucauccagugcuu

SEQ ID NO: 54883 - RNA, 19 nt, Homo sapiens
  misc_RNA (1)...(19): siRNA sense strand
caugcugacuucucucacu

SEQ ID NO: 54884 - RNA, 19 nt, Homo sapiens
  misc_RNA (1)...(19): siRNA sense strand
caaagaagguucacucuga

SEQ ID NO: 54885 - RNA, 19 nt, Homo sapiens
  misc_RNA (1)...(19): siRNA sense strand
ggacugagcuguuuauuuu

SEQ ID NO: 54886 - RNA, 19 nt, Homo sapiens
  misc_RNA (1)...(19): siRNA sense strand
ugacauaucugcaguucuu

SEQ ID NO: 54887 - RNA, 19 nt, Homo sapiens
  misc_RNA (1)...(19): siRNA sense strand
gaugggcucugcuuuauau

SEQ ID NO: 54888 - RNA, 19 nt, Homo sapiens
  misc_RNA (1)...(19): siRNA sense strand
gaagaaauaugggaaccuu

SEQ ID NO: 54889 - RNA, 19 nt, Homo sapiens
  misc_RNA (1)...(19): siRNA sense strand
gaaacaagagacuuuauug

SEQ ID NO: 54890 - RNA, 19 nt, Homo sapiens
  misc_RNA (1)...(19): siRNA sense strand
gagacuuuauugaugcuua

SEQ ID NO: 54891 - RNA, 19 nt, Homo sapiens
  misc_RNA (1)...(19): siRNA sense strand
acaccucacugaagcaaua

SEQ ID NO: 54892 - RNA, 19 nt, Homo sapiens
  misc_RNA (1)...(19): siRNA sense strand
aagcugagccugaaguuua

SEQ ID NO: 54893 - RNA, 19 nt, Homo sapiens
  misc_RNA (1)...(19): siRNA sense strand
acaagagacuuuauugaug

SEQ ID NO: 54894 - RNA, 19 nt, Homo sapiens
  misc_RNA (1)...(19): siRNA sense strand
gcagaaacaagagacuuua

SEQ ID NO: 54895 - RNA, 19 nt, Homo sapiens
  misc_RNA (1)...(19): siRNA sense strand
gagaauggacaguuuaaga

SEQ ID NO: 54896 - RNA, 19 nt, Homo sapiens
  misc_RNA (1)...(19): siRNA sense strand
acaaugcaguuuccaauau

SEQ ID NO: 54897 - RNA, 19 nt, Homo sapiens
  misc_RNA (1)...(19): siRNA sense strand
gaauggacaguuuaagaaa

SEQ ID NO: 54898 - RNA, 19 nt, Homo sapiens
  misc_RNA (1)...(19): siRNA sense strand
ccaugauccugaccaauuu

SEQ ID NO: 54899 - RNA, 19 nt, Homo sapiens
  misc_RNA (1)...(19): siRNA sense strand
gggaagccuuuaugccuuu

SEQ ID NO: 54900 - RNA, 19 nt, Homo sapiens
  misc_RNA (1)...(19): siRNA sense strand
ccagggaagugacaguuga

SEQ ID NO: 54901 - RNA, 19 nt, Homo sapiens
  misc_RNA (1)...(19): siRNA sense strand
gcacuaaggaacuuugguu

SEQ ID NO: 54902 - RNA, 19 nt, Homo sapiens
  misc_RNA (1)...(19): siRNA sense strand
ggccaggacugagcuguuu

SEQ ID NO: 54903 - RNA, 19 nt, Homo sapiens
  misc_RNA (1)...(19): siRNA sense strand
caaugucuuuccauggaua

SEQ ID NO: 54904 - RNA, 19 nt, Homo sapiens
  misc_RNA (1)...(19): siRNA sense strand
cuuuaugccuuucucaaua

SEQ ID NO: 54905 - RNA, 19 nt, Homo sapiens
  misc_RNA (1)...(19): siRNA sense strand
gagcuuagaggaacgcauu

SEQ ID NO: 54906 - RNA, 19 nt, Homo sapiens
  misc_RNA (1)...(19): siRNA sense strand
caugccagcucuacaaugu

SEQ ID NO: 54907 - RNA, 19 nt, Homo sapiens
  misc_RNA (1)...(19): siRNA sense strand
ggaaggagcaaagaagguu

SEQ ID NO: 54908 - RNA, 19 nt, Homo sapiens
  misc_RNA (1)...(19): siRNA sense strand
caaacucucuucagcaacu

SEQ ID NO: 54909 - RNA, 19 nt, Homo sapiens
  misc_RNA (1)...(19): siRNA sense strand
guuacuagaugaagucaca

SEQ ID NO: 54910 - RNA, 19 nt, Homo sapiens
  misc_RNA (1)...(19): siRNA sense strand
gcgagaacauaucuuuaag

SEQ ID NO: 54911 - RNA, 19 nt, Homo sapiens
  misc_RNA (1)...(19): siRNA sense strand
cgagacaacuuccacaacu

SEQ ID NO: 54912 - RNA, 19 nt, Homo sapiens
  misc_RNA (1)...(19): siRNA sense strand
gacaaacacagaaaggauu

SEQ ID NO: 54913 - RNA, 19 nt, Homo sapiens
  misc_RNA (1)...(19): siRNA sense strand
uacaaugucuuuccaugga

SEQ ID NO: 54914 - RNA, 19 nt, Homo sapiens
  misc_RNA (1)...(19): siRNA sense strand
caacaaugcaguuuccaau

SEQ ID NO: 54915 - RNA, 19 nt, Homo sapiens
  misc_RNA (1)...(19): siRNA sense strand
ugacagcacuaaggaacuu

SEQ ID NO: 54916 - RNA, 19 nt, Homo sapiens
  misc_RNA (1)...(19): siRNA sense strand
gcaguuuccaauaucauuu

SEQ ID NO: 54917 - RNA, 19 nt, Homo sapiens
  misc_RNA (1)...(19): siRNA sense strand
gaucaacaaugcaguuucc

SEQ ID NO: 54918 - RNA, 19 nt, Homo sapiens
  misc_RNA (1)...(19): siRNA sense strand
aagcugagauugacagagu

SEQ ID NO: 54919 - RNA, 19 nt, Homo sapiens
  misc_RNA (1)...(19): siRNA sense strand
ggagcuuggugacauaucu

SEQ ID NO: 54920 - RNA, 19 nt, Homo sapiens
  misc_RNA (1)...(19): siRNA sense strand
caaugcaguuuccaauauc

SEQ ID NO: 54921 - RNA, 19 nt, Homo sapiens
  misc_RNA (1)...(19): siRNA sense strand
ucugcucgcugcugacuuu

SEQ ID NO: 54922 - RNA, 19 nt, Homo sapiens
  misc_RNA (1)...(19): siRNA sense strand
ucacuucccuuaugcaaaa

SEQ ID NO: 54923 - RNA, 19 nt, Homo sapiens
  misc_RNA (1)...(19): siRNA sense strand
gaaguuacuagaugaaguc

SEQ ID NO: 54924 - RNA, 19 nt, Homo sapiens
  misc_RNA (1)...(19): siRNA sense strand
gagguucagcuguuuguga

SEQ ID NO: 54925 - RNA, 19 nt, Homo sapiens
  misc_RNA (1)...(19): siRNA sense strand
agaauggacaguuuaagaa

SEQ ID NO: 54926 - RNA, 19 nt, Homo sapiens
  misc_RNA (1)...(19): siRNA sense strand
gagaaugggcaacaucauc

SEQ ID NO: 54927 - RNA, 19 nt, Homo sapiens
  misc_RNA (1)...(19): siRNA sense strand
caagaucaacaaugcaguu

SEQ ID NO: 54928 - RNA, 19 nt, Homo sapiens
  misc_RNA (1)...(19): siRNA sense strand
gaagcugagccugaaguuu

SEQ ID NO: 54929 - RNA, 19 nt, Homo sapiens
  misc_RNA (1)...(19): siRNA sense strand
gggcaugccucggagaaca

SEQ ID NO: 54930 - RNA, 19 nt, Homo sapiens
  misc_RNA (1)...(19): siRNA sense strand
guaccaugauccugaccaa

SEQ ID NO: 54931 - RNA, 19 nt, Homo sapiens
  misc_RNA (1)...(19): siRNA sense strand
gacaguugauaccacuuug

SEQ ID NO: 54932 - RNA, 19 nt, Homo sapiens
  misc_RNA (1)...(19): siRNA sense strand
gcagcacccuggaccucuu

SEQ ID NO: 54933 - RNA, 19 nt, Homo sapiens
  misc_RNA (1)...(19): siRNA sense strand
acuaaggaacuuugguuua

SEQ ID NO: 54934 - RNA, 19 nt, Homo sapiens
  misc_RNA (1)...(19): siRNA sense strand
gagauugacagagugauug

SEQ ID NO: 54935 - RNA, 19 nt, Homo sapiens
  misc_RNA (1)...(19): siRNA sense strand
cugcugaaguuacuagaug

SEQ ID NO: 54936 - RNA, 19 nt, Homo sapiens
  misc_RNA (1)...(19): siRNA sense strand
ggugacauaucugcaguuc

SEQ ID NO: 54937 - RNA, 19 nt, Homo sapiens
  misc_RNA (1)...(19): siRNA sense strand
ucuggagaauggacaguuu

SEQ ID NO: 54938 - RNA, 19 nt, Homo sapiens
  misc_RNA (1)...(19): siRNA sense strand
gaugcuuaccuuaaagaaa

SEQ ID NO: 54939 - RNA, 19 nt, Homo sapiens
  misc_RNA (1)...(19): siRNA sense strand
aaagaagagcuuagaggaa

SEQ ID NO: 54940 - RNA, 19 nt, Homo sapiens
  misc_RNA (1)...(19): siRNA sense strand
gagacaacuuccacaacuc

SEQ ID NO: 54941 - RNA, 19 nt, Homo sapiens
  misc_RNA (1)...(19): siRNA sense strand
ugaaguuacuagaugaagu

SEQ ID NO: 54942 - RNA, 19 nt, Homo sapiens
  misc_RNA (1)...(19): siRNA sense strand
gcccaaggguaccaugauc

SEQ ID NO: 54943 - RNA, 19 nt, Homo sapiens
  misc_RNA (1)...(19): siRNA sense strand
uaucugcaguucuuauuac

SEQ ID NO: 54944 - RNA, 19 nt, Homo sapiens
  misc_RNA (1)...(19): siRNA sense strand
ugcgagaacauaucuuuaa

SEQ ID NO: 54945 - RNA, 19 nt, Homo sapiens
  misc_RNA (1)...(19): siRNA sense strand
uuucuucacuucccuuaug

SEQ ID NO: 54946 - RNA, 19 nt, Homo sapiens
  misc_RNA (1)...(19): siRNA sense strand
cauucaauccggaccauuu

SEQ ID NO: 54947 - RNA, 19 nt, Homo sapiens
  misc_RNA (1)...(19): siRNA sense strand
ugacaguugauaccacuuu

SEQ ID NO: 54948 - RNA, 19 nt, Homo sapiens
  misc_RNA (1)...(19): siRNA sense strand
uccaugaggugcagagaau

SEQ ID NO: 54949 - RNA, 19 nt, Homo sapiens
  misc_RNA (1)...(19): siRNA sense strand
cuacaccaaugcugucauc

SEQ ID NO: 54950 - RNA, 19 nt, Homo sapiens
  misc_RNA (1)...(19): siRNA sense strand
ucggagaacgcuuugagua

SEQ ID NO: 54951 - RNA, 19 nt, Homo sapiens
  misc_RNA (1)...(19): siRNA sense strand
gagaacgcuuugaguacca

SEQ ID NO: 54952 - RNA, 19 nt, Homo sapiens
  misc_RNA (1)...(19): siRNA sense strand
gcagagaaugggcaacauc

SEQ ID NO: 54953 - RNA, 19 nt, Homo sapiens
  misc_RNA (1)...(19): siRNA sense strand
caccaaugcugucauccau

SEQ ID NO: 54954 - RNA, 19 nt, Homo sapiens
  misc_RNA (1)...(19): siRNA sense strand
caaguggccaggcauggaa

SEQ ID NO: 54955 - RNA, 19 nt, Homo sapiens
  misc_RNA (1)...(19): siRNA sense strand
auuacuggcuugcccuuaa

SEQ ID NO: 54956 - RNA, 19 nt, Homo sapiens
  misc_RNA (1)...(19): siRNA sense strand
ugacaaacacagaaaggau

SEQ ID NO: 54957 - RNA, 19 nt, Homo sapiens
  misc_RNA (1)...(19): siRNA sense strand
gucuuuccauggauaauga

SEQ ID NO: 54958 - RNA, 19 nt, Homo sapiens
  misc_RNA (1)...(19): siRNA sense strand
gcucuacaaugucuuucca

SEQ ID NO: 54959 - RNA, 19 nt, Homo sapiens
  misc_RNA (1)...(19): siRNA sense strand
agacaugccagcucuacaa

SEQ ID NO: 54960 - RNA, 19 nt, Homo sapiens
  misc_RNA (1)...(19): siRNA sense strand
gacccucauuucaagauca

SEQ ID NO: 54961 - RNA, 19 nt, Homo sapiens
  misc_RNA (1)...(19): siRNA sense strand
gcauggaaggagcaaagaa

SEQ ID NO: 54962 - RNA, 19 nt, Homo sapiens
  misc_RNA (1)...(19): siRNA sense strand
uggcuugcccuuaaucaaa

SEQ ID NO: 54963 - RNA, 19 nt, Homo sapiens
  misc_RNA (1)...(19): siRNA sense strand
aauaucauuugcuccauca

SEQ ID NO: 54964 - RNA, 19 nt, Homo sapiens
  misc_RNA (1)...(19): siRNA sense strand
aaggaacuuugguuuagga

SEQ ID NO: 54965 - RNA, 19 nt, Homo sapiens
  misc_RNA (1)...(19): siRNA sense strand
gcuuggagcuuggugacau

SEQ ID NO: 54966 - RNA, 19 nt, Homo sapiens
  misc_RNA (1)...(19): siRNA sense strand
accaaacucucuucagcaa

SEQ ID NO: 54967 - RNA, 19 nt, Homo sapiens
  misc_RNA (1)...(19): siRNA sense strand
cuuggaggcuucaaagaca

SEQ ID NO: 54968 - RNA, 19 nt, Homo sapiens
  misc_RNA (1)...(19): siRNA sense strand
aacaaugcaguuuccaaua

SEQ ID NO: 54969 - RNA, 19 nt, Homo sapiens
  misc_RNA (1)...(19): siRNA sense strand
cauaucugcaguucuuauu

SEQ ID NO: 54970 - RNA, 19 nt, Homo sapiens
  misc_RNA (1)...(19): siRNA sense strand
gcacacaggcaauccuacu

SEQ ID NO: 54971 - RNA, 19 nt, Homo sapiens
  misc_RNA (1)...(19): siRNA sense strand
acacagaaaggauuggaau

SEQ ID NO: 54972 - RNA, 19 nt, Homo sapiens
  misc_RNA (1)...(19): siRNA sense strand
aaucaaagaagcccuuauc

SEQ ID NO: 54973 - RNA, 19 nt, Homo sapiens
  misc_RNA (1)...(19): siRNA sense strand
ggaacuuugguuuaggaaa

SEQ ID NO: 54974 - RNA, 19 nt, Homo sapiens
  misc_RNA (1)...(19): siRNA sense strand
ugagauugacagagugauu

SEQ ID NO: 54975 - RNA, 19 nt, Homo sapiens
  misc_RNA (1)...(19): siRNA sense strand
acugggcacugucgccuuu

SEQ ID NO: 54976 - RNA, 19 nt, Homo sapiens
  misc_RNA (1)...(19): siRNA sense strand
ucaaagaagcccuuaucca

SEQ ID NO: 54977 - RNA, 19 nt, Homo sapiens
  misc_RNA (1)...(19): siRNA sense strand
gcccuuccuuggcaacuuc

SEQ ID NO: 54978 - RNA, 19 nt, Homo sapiens
  misc_RNA (1)...(19): siRNA sense strand
gagaagcugagccugaagu

SEQ ID NO: 54979 - RNA, 19 nt, Homo sapiens
  misc_RNA (1)...(19): siRNA sense strand
gaagugacaguugauacca

SEQ ID NO: 54980 - RNA, 19 nt, Homo sapiens
  misc_RNA (1)...(19): siRNA sense strand
cagagaaugggcaacauca

SEQ ID NO: 54981 - RNA, 19 nt, Homo sapiens
  misc_RNA (1)...(19): siRNA sense strand
cacaggcaauccuacuuca

SEQ ID NO: 54982 - RNA, 19 nt, Homo sapiens
  misc_RNA (1)...(19): siRNA sense strand
cagaaacaagagacuuuau

SEQ ID NO: 54983 - RNA, 19 nt, Homo sapiens
  misc_RNA (1)...(19): siRNA sense strand
gagccugaaguuuagaaug

SEQ ID NO: 54984 - RNA, 19 nt, Homo sapiens
  misc_RNA (1)...(19): siRNA sense strand
cagcauagauccuuacaua

SEQ ID NO: 54985 - RNA, 19 nt, Homo sapiens
  misc_RNA (1)...(19): siRNA sense strand
gaacagugcuagugaaaga

SEQ ID NO: 54986 - RNA, 19 nt, Homo sapiens
  misc_RNA (1)...(19): siRNA sense strand
caagaaagauguugaaauc

SEQ ID NO: 54987 - RNA, 19 nt, Homo sapiens
  misc_RNA (1)...(19): siRNA sense strand
gcauagauccuuacauaua

SEQ ID NO: 54988 - RNA, 19 nt, Homo sapiens
  misc_RNA (1)...(19): siRNA sense strand
gaaugaaacacucagauua

SEQ ID NO: 54989 - RNA, 19 nt, Homo sapiens
  misc_RNA (1)...(19): siRNA sense strand
ggacagagccugaggaguu

SEQ ID NO: 54990 - RNA, 19 nt, Homo sapiens
  misc_RNA (1)...(19): siRNA sense strand
gaaacuugcucuaaucaga

SEQ ID NO: 54991 - RNA, 19 nt, Homo sapiens
  misc_RNA (1)...(19): siRNA sense strand
cuucaaaccuuguaaagaa

SEQ ID NO: 54992 - RNA, 19 nt, Homo sapiens
  misc_RNA (1)...(19): siRNA sense strand
ugagaggacuugcaagaaa

SEQ ID NO: 54993 - RNA, 19 nt, Homo sapiens
  misc_RNA (1)...(19): siRNA sense strand
gaugaagaauggaagagaa

SEQ ID NO: 54994 - RNA, 19 nt, Homo sapiens
  misc_RNA (1)...(19): siRNA sense strand
gcacuaagaaguuccuaaa

SEQ ID NO: 54995 - RNA, 19 nt, Homo sapiens
  misc_RNA (1)...(19): siRNA sense strand
ccacaaagcucugucugau

SEQ ID NO: 54996 - RNA, 19 nt, Homo sapiens
  misc_RNA (1)...(19): siRNA sense strand
uauaugaacuggccacuca

SEQ ID NO: 54997 - RNA, 19 nt, Homo sapiens
  misc_RNA (1)...(19): siRNA sense strand
gaacaugaaacuugcucua

SEQ ID NO: 54998 - RNA, 19 nt, Homo sapiens
  misc_RNA (1)...(19): siRNA sense strand
ccacaccucugccuuuguu

SEQ ID NO: 54999 - RNA, 19 nt, Homo sapiens
  misc_RNA (1)...(19): siRNA sense strand
ggagauguauuggugagaa

SEQ ID NO: 55000 - RNA, 19 nt, Homo sapiens
  misc_RNA (1)...(19): siRNA sense strand
uuaaaugucucucuguuuc

SEQ ID NO: 55001 - RNA, 19 nt, Homo sapiens
  misc_RNA (1)...(19): siRNA sense strand
gaaauuagacacgcaagga

SEQ ID NO: 55002 - RNA, 19 nt, Homo sapiens
  misc_RNA (1)...(19): siRNA sense strand
gaaacugagucccacaaag

SEQ ID NO: 55003 - RNA, 19 nt, Homo sapiens
  misc_RNA (1)...(19): siRNA sense strand
guuauucugucuucacaaa

SEQ ID NO: 55004 - RNA, 19 nt, Homo sapiens
  misc_RNA (1)...(19): siRNA sense strand
gaagaaggacagcauagau

SEQ ID NO: 55005 - RNA, 19 nt, Homo sapiens
  misc_RNA (1)...(19): siRNA sense strand
gcaagaaagauguugaaau

SEQ ID NO: 55006 - RNA, 19 nt, Homo sapiens
  misc_RNA (1)...(19): siRNA sense strand
ggagagcacuaagaaguuc

SEQ ID NO: 55007 - RNA, 19 nt, Homo sapiens
  misc_RNA (1)...(19): siRNA sense strand
gaaagguucaguaagaaga

SEQ ID NO: 55008 - RNA, 19 nt, Homo sapiens
  misc_RNA (1)...(19): siRNA sense strand
gcaaggacuucuucaacca

SEQ ID NO: 55009 - RNA, 19 nt, Homo sapiens
  misc_RNA (1)...(19): siRNA sense strand
ggaagagaauacggucauu

SEQ ID NO: 55010 - RNA, 19 nt, Homo sapiens
  misc_RNA (1)...(19): siRNA sense strand
cagggucucuggaaauuug

SEQ ID NO: 55011 - RNA, 19 nt, Homo sapiens
  misc_RNA (1)...(19): siRNA sense strand
gagauguauuggugagaaa

SEQ ID NO: 55012 - RNA, 19 nt, Homo sapiens
  misc_RNA (1)...(19): siRNA sense strand
acaaagcucugucugaucu

SEQ ID NO: 55013 - RNA, 19 nt, Homo sapiens
  misc_RNA (1)...(19): siRNA sense strand
guucuuuccuucacuuuau

SEQ ID NO: 55014 - RNA, 19 nt, Homo sapiens
  misc_RNA (1)...(19): siRNA sense strand
caugaaacuugcucuaauc

SEQ ID NO: 55015 - RNA, 19 nt, Homo sapiens
  misc_RNA (1)...(19): siRNA sense strand
gagaggacuugcaagaaag

SEQ ID NO: 55016 - RNA, 19 nt, Homo sapiens
  misc_RNA (1)...(19): siRNA sense strand
ugacacagagugcuauaaa

SEQ ID NO: 55017 - RNA, 19 nt, Homo sapiens
  misc_RNA (1)...(19): siRNA sense strand
gcucgcagcccagucaaua

SEQ ID NO: 55018 - RNA, 19 nt, Homo sapiens
  misc_RNA (1)...(19): siRNA sense strand
cauagauccuuacauauac

SEQ ID NO: 55019 - RNA, 19 nt, Homo sapiens
  misc_RNA (1)...(19): siRNA sense strand
ucagaguccuucagaacuu

SEQ ID NO: 55020 - RNA, 19 nt, Homo sapiens
  misc_RNA (1)...(19): siRNA sense strand
gaaaccaccagcaguguuc

SEQ ID NO: 55021 - RNA, 19 nt, Homo sapiens
  misc_RNA (1)...(19): siRNA sense strand
cuuaugcucuucaccauga

SEQ ID NO: 55022 - RNA, 19 nt, Homo sapiens
  misc_RNA (1)...(19): siRNA sense strand
gaucagaacagugcuagug

SEQ ID NO: 55023 - RNA, 19 nt, Homo sapiens
  misc_RNA (1)...(19): siRNA sense strand
aaagguggauucaagagau

SEQ ID NO: 55024 - RNA, 19 nt, Homo sapiens
  misc_RNA (1)...(19): siRNA sense strand
gaacuucuccuucaaaccu

SEQ ID NO: 55025 - RNA, 19 nt, Homo sapiens
  misc_RNA (1)...(19): siRNA sense strand
gaagagaauacggucauug

SEQ ID NO: 55026 - RNA, 19 nt, Homo sapiens
  misc_RNA (1)...(19): siRNA sense strand
ggagauugaugcaguuuug

SEQ ID NO: 55027 - RNA, 19 nt, Homo sapiens
  misc_RNA (1)...(19): siRNA sense strand
uaagaagaaggacagcaua

SEQ ID NO: 55028 - RNA, 19 nt, Homo sapiens
  misc_RNA (1)...(19): siRNA sense strand
ucagaacagugcuagugaa

SEQ ID NO: 55029 - RNA, 19 nt, Homo sapiens
  misc_RNA (1)...(19): siRNA sense strand
ucacaaaucgaaggucuuu

SEQ ID NO: 55030 - RNA, 19 nt, Homo sapiens
  misc_RNA (1)...(19): siRNA sense strand
ugaaugaaacacucagauu

SEQ ID NO: 55031 - RNA, 19 nt, Homo sapiens
  misc_RNA (1)...(19): siRNA sense strand
gagguuugcucucaugaac

SEQ ID NO: 55032 - RNA, 19 nt, Homo sapiens
  misc_RNA (1)...(19): siRNA sense strand
acaugaaacuugcucuaau

SEQ ID NO: 55033 - RNA, 19 nt, Homo sapiens
  misc_RNA (1)...(19): siRNA sense strand
caaaagcaccgacuagauu

SEQ ID NO: 55034 - RNA, 19 nt, Homo sapiens
  misc_RNA (1)...(19): siRNA sense strand
uuacauauacacacccuuu

SEQ ID NO: 55035 - RNA, 19 nt, Homo sapiens
  misc_RNA (1)...(19): siRNA sense strand
ggacuugcaagaaagaugu

SEQ ID NO: 55036 - RNA, 19 nt, Homo sapiens
  misc_RNA (1)...(19): siRNA sense strand
ucccagaauucgaaagaaa

SEQ ID NO: 55037 - RNA, 19 nt, Homo sapiens
  misc_RNA (1)...(19): siRNA sense strand
gaagaaaagucgccucaac

SEQ ID NO: 55038 - RNA, 19 nt, Homo sapiens
  misc_RNA (1)...(19): siRNA sense strand
gaggaguuccgcccugaaa

SEQ ID NO: 55039 - RNA, 19 nt, Homo sapiens
  misc_RNA (1)...(19): siRNA sense strand
gacagagccugaggaguuc

SEQ ID NO: 55040 - RNA, 19 nt, Homo sapiens
  misc_RNA (1)...(19): siRNA sense strand
gucagggucucuggaaauu

SEQ ID NO: 55041 - RNA, 19 nt, Homo sapiens
  misc_RNA (1)...(19): siRNA sense strand
aaacacagauccccuugaa

SEQ ID NO: 55042 - RNA, 19 nt, Homo sapiens
  misc_RNA (1)...(19): siRNA sense strand
ccagugggauuuaugaaaa

SEQ ID NO: 55043 - RNA, 19 nt, Homo sapiens
  misc_RNA (1)...(19): siRNA sense strand
aacccuaaguggagaauga

SEQ ID NO: 55044 - RNA, 19 nt, Homo sapiens
  misc_RNA (1)...(19): siRNA sense strand
aaaggagauugaugcaguu

SEQ ID NO: 55045 - RNA, 19 nt, Homo sapiens
  misc_RNA (1)...(19): siRNA sense strand
gaagaauggaagagaauac

SEQ ID NO: 55046 - RNA, 19 nt, Homo sapiens
  misc_RNA (1)...(19): siRNA sense strand
gcccacaccucugccuuug

SEQ ID NO: 55047 - RNA, 19 nt, Homo sapiens
  misc_RNA (1)...(19): siRNA sense strand
ggaccucaucccaaauuug

SEQ ID NO: 55048 - RNA, 19 nt, Homo sapiens
  misc_RNA (1)...(19): siRNA sense strand
gggaacguaugaaggucaa

SEQ ID NO: 55049 - RNA, 19 nt, Homo sapiens
  misc_RNA (1)...(19): siRNA sense strand
gguuugcucucaugaacau

SEQ ID NO: 55050 - RNA, 19 nt, Homo sapiens
  misc_RNA (1)...(19): siRNA sense strand
gaaacugcauuggcaugag

SEQ ID NO: 55051 - RNA, 19 nt, Homo sapiens
  misc_RNA (1)...(19): siRNA sense strand
gaugauugacucccagaau

SEQ ID NO: 55052 - RNA, 19 nt, Homo sapiens
  misc_RNA (1)...(19): siRNA sense strand
cagaacagugcuagugaaa

SEQ ID NO: 55053 - RNA, 19 nt, Homo sapiens
  misc_RNA (1)...(19): siRNA sense strand
guaagaagaaggacagcau

SEQ ID NO: 55054 - RNA, 19 nt, Homo sapiens
  misc_RNA (1)...(19): siRNA sense strand
ugguggugauuccaacuua

SEQ ID NO: 55055 - RNA, 19 nt, Homo sapiens
  misc_RNA (1)...(19): siRNA sense strand
gcagcccagucaauaaucu

SEQ ID NO: 55056 - RNA, 19 nt, Homo sapiens
  misc_RNA (1)...(19): siRNA sense strand
augauugacucccagaauu

SEQ ID NO: 55057 - RNA, 19 nt, Homo sapiens
  misc_RNA (1)...(19): siRNA sense strand
gauuccaacuuaugcucuu

SEQ ID NO: 55058 - RNA, 19 nt, Homo sapiens
  misc_RNA (1)...(19): siRNA sense strand
uaaucagaguccuucagaa

SEQ ID NO: 55059 - RNA, 19 nt, Homo sapiens
  misc_RNA (1)...(19): siRNA sense strand
ggacccagaaacugcauug

SEQ ID NO: 55060 - RNA, 19 nt, Homo sapiens
  misc_RNA (1)...(19): siRNA sense strand
gauccauuauuucucucaa

SEQ ID NO: 55061 - RNA, 19 nt, Homo sapiens
  misc_RNA (1)...(19): siRNA sense strand
gguggugauuccaacuuau

SEQ ID NO: 55062 - RNA, 19 nt, Homo sapiens
  misc_RNA (1)...(19): siRNA sense strand
uggaguaccuugacauggu

SEQ ID NO: 55063 - RNA, 19 nt, Homo sapiens
  misc_RNA (1)...(19): siRNA sense strand
gugcuccucuaucuauaug

SEQ ID NO: 55064 - RNA, 19 nt, Homo sapiens
  misc_RNA (1)...(19): siRNA sense strand
acaaaucgaaggucuuuag

SEQ ID NO: 55065 - RNA, 19 nt, Homo sapiens
  misc_RNA (1)...(19): siRNA sense strand
ugaaacacucagauuauuc

SEQ ID NO: 55066 - RNA, 19 nt, Homo sapiens
  misc_RNA (1)...(19): siRNA sense strand
gacaugguggugaaugaaa

SEQ ID NO: 55067 - RNA, 19 nt, Homo sapiens
  misc_RNA (1)...(19): siRNA sense strand
gauggaguaccuugacaug

SEQ ID NO: 55068 - RNA, 19 nt, Homo sapiens
  misc_RNA (1)...(19): siRNA sense strand
guggagagcacuaagaagu

SEQ ID NO: 55069 - RNA, 19 nt, Homo sapiens
  misc_RNA (1)...(19): siRNA sense strand
gcggaaaacucaaggagau

SEQ ID NO: 55070 - RNA, 19 nt, Homo sapiens
  misc_RNA (1)...(19): siRNA sense strand
ugaagaauggaagagaaua

SEQ ID NO: 55071 - RNA, 19 nt, Homo sapiens
  misc_RNA (1)...(19): siRNA sense strand
ggaugaagaauggaagaga

SEQ ID NO: 55072 - RNA, 19 nt, Homo sapiens
  misc_RNA (1)...(19): siRNA sense strand
uagcugaggaugaagaaug

SEQ ID NO: 55073 - RNA, 19 nt, Homo sapiens
  misc_RNA (1)...(19): siRNA sense strand
uaaagguggauucaagaga

SEQ ID NO: 55074 - RNA, 19 nt, Homo sapiens
  misc_RNA (1)...(19): siRNA sense strand
uccuucagcugaugauuga

SEQ ID NO: 55075 - RNA, 19 nt, Homo sapiens
  misc_RNA (1)...(19): siRNA sense strand
ccaguauggagauguauug

SEQ ID NO: 55076 - RNA, 19 nt, Homo sapiens
  misc_RNA (1)...(19): siRNA sense strand
cagcauggaugugauuacu

SEQ ID NO: 55077 - RNA, 19 nt, Homo sapiens
  misc_RNA (1)...(19): siRNA sense strand
ggaaauguuuuguccuauc

SEQ ID NO: 55078 - RNA, 19 nt, Homo sapiens
  misc_RNA (1)...(19): siRNA sense strand
gaaacacucagauuauucc

SEQ ID NO: 55079 - RNA, 19 nt, Homo sapiens
  misc_RNA (1)...(19): siRNA sense strand
agaauucgaaagaaacuga

SEQ ID NO: 55080 - RNA, 19 nt, Homo sapiens
  misc_RNA (1)...(19): siRNA sense strand
cuaaucagaguccuucaga

SEQ ID NO: 55081 - RNA, 19 nt, Homo sapiens
  misc_RNA (1)...(19): siRNA sense strand
gcaguguucuuuccuucac

SEQ ID NO: 55082 - RNA, 19 nt, Homo sapiens
  misc_RNA (1)...(19): siRNA sense strand
ccagcaguguucuuuccuu

SEQ ID NO: 55083 - RNA, 19 nt, Homo sapiens
  misc_RNA (1)...(19): siRNA sense strand
gacacagagugcuauaaaa

SEQ ID NO: 55084 - RNA, 19 nt, Homo sapiens
  misc_RNA (1)...(19): siRNA sense strand
caacauagauccuuacaua

SEQ ID NO: 55085 - RNA, 19 nt, Homo sapiens
  misc_RNA (1)...(19): siRNA sense strand
ggacagagccugagaaguu

SEQ ID NO: 55086 - RNA, 19 nt, Homo sapiens
  misc_RNA (1)...(19): siRNA sense strand
gaaugaaacacucagauua

SEQ ID NO: 55087 - RNA, 19 nt, Homo sapiens
  misc_RNA (1)...(19): siRNA sense strand
gaaggaaauugauacaguu

SEQ ID NO: 55088 - RNA, 19 nt, Homo sapiens
  misc_RNA (1)...(19): siRNA sense strand
gaaacuugcucuagucaga

SEQ ID NO: 55089 - RNA, 19 nt, Homo sapiens
  misc_RNA (1)...(19): siRNA sense strand
cuucaaaccuuguaaagaa

SEQ ID NO: 55090 - RNA, 19 nt, Homo sapiens
  misc_RNA (1)...(19): siRNA sense strand
ccaagaagcuuuuaagauu

SEQ ID NO: 55091 - RNA, 19 nt, Homo sapiens
  misc_RNA (1)...(19): siRNA sense strand
aaacagugcuagugaaaga

SEQ ID NO: 55092 - RNA, 19 nt, Homo sapiens
  misc_RNA (1)...(19): siRNA sense strand
gaaggucgccucaaagaga

SEQ ID NO: 55093 - RNA, 19 nt, Homo sapiens
  misc_RNA (1)...(19): siRNA sense strand
gaaaucaaugggauguuua

SEQ ID NO: 55094 - RNA, 19 nt, Homo sapiens
  misc_RNA (1)...(19): siRNA sense strand
gaacaaggacaacauagau

SEQ ID NO: 55095 - RNA, 19 nt, Homo sapiens
  misc_RNA (1)...(19): siRNA sense strand
gaugaagaauggaagagaa

SEQ ID NO: 55096 - RNA, 19 nt, Homo sapiens
  misc_RNA (1)...(19): siRNA sense strand
gcucauggcccaaucaauu

SEQ ID NO: 55097 - RNA, 19 nt, Homo sapiens
  misc_RNA (1)...(19): siRNA sense strand
gaagagaauacgaucauug

SEQ ID NO: 55098 - RNA, 19 nt, Homo sapiens
  misc_RNA (1)...(19): siRNA sense strand
ugaaaucaaugggauguuu

SEQ ID NO: 55099 - RNA, 19 nt, Homo sapiens
  misc_RNA (1)...(19): siRNA sense strand
ucaaggagauggucccuau

SEQ ID NO: 55100 - RNA, 19 nt, Homo sapiens
  misc_RNA (1)...(19): siRNA sense strand
ccacaaagcucugucugau

SEQ ID NO: 55101 - RNA, 19 nt, Homo sapiens
  misc_RNA (1)...(19): siRNA sense strand
gaacaugaaacuugcucua

SEQ ID NO: 55102 - RNA, 19 nt, Homo sapiens
  misc_RNA (1)...(19): siRNA sense strand
caagcuauguucuucauca

SEQ ID NO: 55103 - RNA, 19 nt, Homo sapiens
  misc_RNA (1)...(19): siRNA sense strand
gagauggucccuaucauug

SEQ ID NO: 55104 - RNA, 19 nt, Homo sapiens
  misc_RNA (1)...(19): siRNA sense strand
gcauggaugugaucacuag

SEQ ID NO: 55105 - RNA, 19 nt, Homo sapiens
  misc_RNA (1)...(19): siRNA sense strand
ggaagagaauacgaucauu

SEQ ID NO: 55106 - RNA, 19 nt, Homo sapiens
  misc_RNA (1)...(19): siRNA sense strand
gagauguguuggugagaaa

SEQ ID NO: 55107 - RNA, 19 nt, Homo sapiens
  misc_RNA (1)...(19): siRNA sense strand
guuauucugucuucacaaa

SEQ ID NO: 55108 - RNA, 19 nt, Homo sapiens
  misc_RNA (1)...(19): siRNA sense strand
gcaccacccaccuaugaua

SEQ ID NO: 55109 - RNA, 19 nt, Homo sapiens
  misc_RNA (1)...(19): siRNA sense strand
aguguucucuccuucauua

SEQ ID NO: 55110 - RNA, 19 nt, Homo sapiens
  misc_RNA (1)...(19): siRNA sense strand
ggagauguguuggugagaa

SEQ ID NO: 55111 - RNA, 19 nt, Homo sapiens
  misc_RNA (1)...(19): siRNA sense strand
ggagauggucccuaucauu

SEQ ID NO: 55112 - RNA, 19 nt, Homo sapiens
  misc_RNA (1)...(19): siRNA sense strand
uaucacagaucccgacaug

SEQ ID NO: 55113 - RNA, 19 nt, Homo sapiens
  misc_RNA (1)...(19): siRNA sense strand
gagaaguuccucccugaaa

SEQ ID NO: 55114 - RNA, 19 nt, Homo sapiens
  misc_RNA (1)...(19): siRNA sense strand
gaggacuucuucuaacaga

SEQ ID NO: 55115 - RNA, 19 nt, Homo sapiens
  misc_RNA (1)...(19): siRNA sense strand
acaaagcucugucugaucu

SEQ ID NO: 55116 - RNA, 19 nt, Homo sapiens
  misc_RNA (1)...(19): siRNA sense strand
agaaggaaauugauacagu

SEQ ID NO: 55117 - RNA, 19 nt, Homo sapiens
  misc_RNA (1)...(19): siRNA sense strand
aaaagaaggucgccucaaa

SEQ ID NO: 55118 - RNA, 19 nt, Homo sapiens
  misc_RNA (1)...(19): siRNA sense strand
ucagaguccuucagaacuu

SEQ ID NO: 55119 - RNA, 19 nt, Homo sapiens
  misc_RNA (1)...(19): siRNA sense strand
cauagauccuuacauauac

SEQ ID NO: 55120 - RNA, 19 nt, Homo sapiens
  misc_RNA (1)...(19): siRNA sense strand
aaagaacaaggacaacaua

SEQ ID NO: 55121 - RNA, 19 nt, Homo sapiens
  misc_RNA (1)...(19): siRNA sense strand
ucacagaucccgacaugau

SEQ ID NO: 55122 - RNA, 19 nt, Homo sapiens
  misc_RNA (1)...(19): siRNA sense strand
gaacuucuccuucaaaccu

SEQ ID NO: 55123 - RNA, 19 nt, Homo sapiens
  misc_RNA (1)...(19): siRNA sense strand
uccauuagauccauucguu

SEQ ID NO: 55124 - RNA, 19 nt, Homo sapiens
  misc_RNA (1)...(19): siRNA sense strand
gugcagaaggaaauugaua

SEQ ID NO: 55125 - RNA, 19 nt, Homo sapiens
  misc_RNA (1)...(19): siRNA sense strand
gaaagugcagaaggaaauu

SEQ ID NO: 55126 - RNA, 19 nt, Homo sapiens
  misc_RNA (1)...(19): siRNA sense strand
cccaauucuugaagcauua

SEQ ID NO: 55127 - RNA, 19 nt, Homo sapiens
  misc_RNA (1)...(19): siRNA sense strand
ggaaguggacccagaaacu

SEQ ID NO: 55128 - RNA, 19 nt, Homo sapiens
  misc_RNA (1)...(19): siRNA sense strand
gacagagccugagaaguuc

SEQ ID NO: 55129 - RNA, 19 nt, Homo sapiens
  misc_RNA (1)...(19): siRNA sense strand
ugaaugaaacacucagauu

SEQ ID NO: 55130 - RNA, 19 nt, Homo sapiens
  misc_RNA (1)...(19): siRNA sense strand
uaagggcuauuggacguuu

SEQ ID NO: 55131 - RNA, 19 nt, Homo sapiens
  misc_RNA (1)...(19): siRNA sense strand
uccauucguucucucaaua

SEQ ID NO: 55132 - RNA, 19 nt, Homo sapiens
  misc_RNA (1)...(19): siRNA sense strand
ggugaugauuccaagcuau

SEQ ID NO: 55133 - RNA, 19 nt, Homo sapiens
  misc_RNA (1)...(19): siRNA sense strand
gcaguguucucuccuucau

SEQ ID NO: 55134 - RNA, 19 nt, Homo sapiens
  misc_RNA (1)...(19): siRNA sense strand
gauugacucucagaauuca

SEQ ID NO: 55135 - RNA, 19 nt, Homo sapiens
  misc_RNA (1)...(19): siRNA sense strand
gaaaacaccaagaagcuuu

SEQ ID NO: 55136 - RNA, 19 nt, Homo sapiens
  misc_RNA (1)...(19): siRNA sense strand
caugaaacuugcucuaguc

SEQ ID NO: 55137 - RNA, 19 nt, Homo sapiens
  misc_RNA (1)...(19): siRNA sense strand
uuacauauacacacccuuu

SEQ ID NO: 55138 - RNA, 19 nt, Homo sapiens
  misc_RNA (1)...(19): siRNA sense strand
agaaaagucugggguauuu

SEQ ID NO: 55139 - RNA, 19 nt, Homo sapiens
  misc_RNA (1)...(19): siRNA sense strand
ucacaaaccggaggccuuu

SEQ ID NO: 55140 - RNA, 19 nt, Homo sapiens
  misc_RNA (1)...(19): siRNA sense strand
gagguuugcucucgugaac

SEQ ID NO: 55141 - RNA, 19 nt, Homo sapiens
  misc_RNA (1)...(19): siRNA sense strand
gcagaaagugcagaaggaa

SEQ ID NO: 55142 - RNA, 19 nt, Homo sapiens
  misc_RNA (1)...(19): siRNA sense strand
gaugauugacucucagaau

SEQ ID NO: 55143 - RNA, 19 nt, Homo sapiens
  misc_RNA (1)...(19): siRNA sense strand
ccagugggauuuaugaaaa

SEQ ID NO: 55144 - RNA, 19 nt, Homo sapiens
  misc_RNA (1)...(19): siRNA sense strand
augauugacucucagaauu

SEQ ID NO: 55145 - RNA, 19 nt, Homo sapiens
  misc_RNA (1)...(19): siRNA sense strand
gaagaauggaagagaauac

SEQ ID NO: 55146 - RNA, 19 nt, Homo sapiens
  misc_RNA (1)...(19): siRNA sense strand
gaauggaagagaauacgau

SEQ ID NO: 55147 - RNA, 19 nt, Homo sapiens
  misc_RNA (1)...(19): siRNA sense strand
gaaguggacccagaaacug

SEQ ID NO: 55148 - RNA, 19 nt, Homo sapiens
  misc_RNA (1)...(19): siRNA sense strand
gcagaaggaaauugauaca

SEQ ID NO: 55149 - RNA, 19 nt, Homo sapiens
  misc_RNA (1)...(19): siRNA sense strand
gaaaccacgagcaguguuc

SEQ ID NO: 55150 - RNA, 19 nt, Homo sapiens
  misc_RNA (1)...(19): siRNA sense strand
gaaacugcauuggcaugag

SEQ ID NO: 55151 - RNA, 19 nt, Homo sapiens
  misc_RNA (1)...(19): siRNA sense strand
ucaaugggauguuuauucc

SEQ ID NO: 55152 - RNA, 19 nt, Homo sapiens
  misc_RNA (1)...(19): siRNA sense strand
uggaguaucuugacauggu

SEQ ID NO: 55153 - RNA, 19 nt, Homo sapiens
  misc_RNA (1)...(19): siRNA sense strand
gauacaguuuuacccaaua

SEQ ID NO: 55154 - RNA, 19 nt, Homo sapiens
  misc_RNA (1)...(19): siRNA sense strand
gcccaaucaauuaucuuua

SEQ ID NO: 55155 - RNA, 19 nt, Homo sapiens
  misc_RNA (1)...(19): siRNA sense strand
guuggaguaucuugacaug

SEQ ID NO: 55156 - RNA, 19 nt, Homo sapiens
  misc_RNA (1)...(19): siRNA sense strand
ggacccagaaacugcauug

SEQ ID NO: 55157 - RNA, 19 nt, Homo sapiens
  misc_RNA (1)...(19): siRNA sense strand
ggcccaaucaauuaucuuu

SEQ ID NO: 55158 - RNA, 19 nt, Homo sapiens
  misc_RNA (1)...(19): siRNA sense strand
acaugaaacuugcucuagu

SEQ ID NO: 55159 - RNA, 19 nt, Homo sapiens
  misc_RNA (1)...(19): siRNA sense strand
gguuugcucucgugaacau

SEQ ID NO: 55160 - RNA, 19 nt, Homo sapiens
  misc_RNA (1)...(19): siRNA sense strand
gccagugggauuuaugaaa

SEQ ID NO: 55161 - RNA, 19 nt, Homo sapiens
  misc_RNA (1)...(19): siRNA sense strand
ggauguuuauucccaaagg

SEQ ID NO: 55162 - RNA, 19 nt, Homo sapiens
  misc_RNA (1)...(19): siRNA sense strand
ugaaacacucagauuauuc

SEQ ID NO: 55163 - RNA, 19 nt, Homo sapiens
  misc_RNA (1)...(19): siRNA sense strand
gacaugguggugaaugaaa

SEQ ID NO: 55164 - RNA, 19 nt, Homo sapiens
  misc_RNA (1)...(19): siRNA sense strand
gcaccgaguggauuuccuu

SEQ ID NO: 55165 - RNA, 19 nt, Homo sapiens
  misc_RNA (1)...(19): siRNA sense strand
uuaagaagcuuggaauucc

SEQ ID NO: 55166 - RNA, 19 nt, Homo sapiens
  misc_RNA (1)...(19): siRNA sense strand
gcggaaaacucaaggagau

SEQ ID NO: 55167 - RNA, 19 nt, Homo sapiens
  misc_RNA (1)...(19): siRNA sense strand
ugaagaauggaagagaaua

SEQ ID NO: 55168 - RNA, 19 nt, Homo sapiens
  misc_RNA (1)...(19): siRNA sense strand
ggaugaagaauggaagaga

SEQ ID NO: 55169 - RNA, 19 nt, Homo sapiens
  misc_RNA (1)...(19): siRNA sense strand
uagcugaggaugaagaaug

SEQ ID NO: 55170 - RNA, 19 nt, Homo sapiens
  misc_RNA (1)...(19): siRNA sense strand
uggaggacuucuucuaaca

SEQ ID NO: 55171 - RNA, 19 nt, Homo sapiens
  misc_RNA (1)...(19): siRNA sense strand
agaaagugcagaaggaaau

SEQ ID NO: 55172 - RNA, 19 nt, Homo sapiens
  misc_RNA (1)...(19): siRNA sense strand
uccuucagcugaugauuga

SEQ ID NO: 55173 - RNA, 19 nt, Homo sapiens
  misc_RNA (1)...(19): siRNA sense strand
uauggaacccguacacaug

SEQ ID NO: 55174 - RNA, 19 nt, Homo sapiens
  misc_RNA (1)...(19): siRNA sense strand
cauucguucucucaauaaa

SEQ ID NO: 55175 - RNA, 19 nt, Homo sapiens
  misc_RNA (1)...(19): siRNA sense strand
agaaguuccucccugaaag

SEQ ID NO: 55176 - RNA, 19 nt, Homo sapiens
  misc_RNA (1)...(19): siRNA sense strand
gaaacacucagauuauucc

SEQ ID NO: 55177 - RNA, 19 nt, Homo sapiens
  misc_RNA (1)...(19): siRNA sense strand
cucauggcccaaucaauua

SEQ ID NO: 55178 - RNA, 19 nt, Homo sapiens
  misc_RNA (1)...(19): siRNA sense strand
aagaaggucgccucaaaga

SEQ ID NO: 55179 - RNA, 19 nt, Homo sapiens
  misc_RNA (1)...(19): siRNA sense strand
gcauuaaauaucacugugu

SEQ ID NO: 55180 - RNA, 19 nt, Homo sapiens
  misc_RNA (1)...(19): siRNA sense strand
ggacguuugacauggaaug

SEQ ID NO: 55181 - RNA, 19 nt, Homo sapiens
  misc_RNA (1)...(19): siRNA sense strand
auacuccucuaucuauaug

SEQ ID NO: 55182 - RNA, 19 nt, Homo sapiens
  misc_RNA (1)...(19): siRNA sense strand
gaaguuccucccugaaagg

SEQ ID NO: 55183 - RNA, 19 nt, Homo sapiens
  misc_RNA (1)...(19): siRNA sense strand
agaacaaggacaacauaga

SEQ ID NO: 55184 - RNA, 19 nt, Homo sapiens
  misc_RNA (1)...(19): siRNA sense strand
ggaagaggcauuuggauuu

SEQ ID NO: 55185 - RNA, 19 nt, Homo sapiens
  misc_RNA (1)...(19): siRNA sense strand
ggaaacaauuugccaugaa

SEQ ID NO: 55186 - RNA, 19 nt, Homo sapiens
  misc_RNA (1)...(19): siRNA sense strand
ccaagugccuguccucauu

SEQ ID NO: 55187 - RNA, 19 nt, Homo sapiens
  misc_RNA (1)...(19): siRNA sense strand
ucaaagcccuccagcaguu

SEQ ID NO: 55188 - RNA, 19 nt, Homo sapiens
  misc_RNA (1)...(19): siRNA sense strand
ggaaugccuuucaccagaa

SEQ ID NO: 55189 - RNA, 19 nt, Homo sapiens
  misc_RNA (1)...(19): siRNA sense strand
gaggaaggcucaacuacag

SEQ ID NO: 55190 - RNA, 19 nt, Homo sapiens
  misc_RNA (1)...(19): siRNA sense strand
cagcacgucuccuugauga

SEQ ID NO: 55191 - RNA, 19 nt, Homo sapiens
  misc_RNA (1)...(19): siRNA sense strand
gcacacagaccaagugauc

SEQ ID NO: 55192 - RNA, 19 nt, Homo sapiens
  misc_RNA (1)...(19): siRNA sense strand
gaaacaauuugccaugaac

SEQ ID NO: 55193 - RNA, 19 nt, Homo sapiens
  misc_RNA (1)...(19): siRNA sense strand
gggaaacaauuugccauga

SEQ ID NO: 55194 - RNA, 19 nt, Homo sapiens
  misc_RNA (1)...(19): siRNA sense strand
gagugaugcuggacaaaug

SEQ ID NO: 55195 - RNA, 19 nt, Homo sapiens
  misc_RNA (1)...(19): siRNA sense strand
gagaagaucaagaggaaga

SEQ ID NO: 55196 - RNA, 19 nt, Homo sapiens
  misc_RNA (1)...(19): siRNA sense strand
gugcugagguggacacguu

SEQ ID NO: 55197 - RNA, 19 nt, Homo sapiens
  misc_RNA (1)...(19): siRNA sense strand
uggagaagaucaagaggaa

SEQ ID NO: 55198 - RNA, 19 nt, Homo sapiens
  misc_RNA (1)...(19): siRNA sense strand
gaagaggcauuuggauuuu

SEQ ID NO: 55199 - RNA, 19 nt, Homo sapiens
  misc_RNA (1)...(19): siRNA sense strand
guggagacauucccaagug

SEQ ID NO: 55200 - RNA, 19 nt, Homo sapiens
  misc_RNA (1)...(19): siRNA sense strand
gaagacaaggaccagcuuu

SEQ ID NO: 55201 - RNA, 19 nt, Homo sapiens
  misc_RNA (1)...(19): siRNA sense strand
uacaacggauucagaaaug

SEQ ID NO: 55202 - RNA, 19 nt, Homo sapiens
  misc_RNA (1)...(19): siRNA sense strand
gacccgaaaucccaugguu

SEQ ID NO: 55203 - RNA, 19 nt, Homo sapiens
  misc_RNA (1)...(19): siRNA sense strand
ucuaugacccugacuauau

SEQ ID NO: 55204 - RNA, 19 nt, Homo sapiens
  misc_RNA (1)...(19): siRNA sense strand
ucaaggcaguucagcucua

SEQ ID NO: 55205 - RNA, 19 nt, Homo sapiens
  misc_RNA (1)...(19): siRNA sense strand
ggaauccaccugcgucuca

SEQ ID NO: 55206 - RNA, 19 nt, Homo sapiens
  misc_RNA (1)...(19): siRNA sense strand
ggaauucucaguccuacau

SEQ ID NO: 55207 - RNA, 19 nt, Homo sapiens
  misc_RNA (1)...(19): siRNA sense strand
ggaaggcucaacuacagaa

SEQ ID NO: 55208 - RNA, 19 nt, Homo sapiens
  misc_RNA (1)...(19): siRNA sense strand
gagcuacaacggauucaga

SEQ ID NO: 55209 - RNA, 19 nt, Homo sapiens
  misc_RNA (1)...(19): siRNA sense strand
gguggacacguucauguuu

SEQ ID NO: 55210 - RNA, 19 nt, Homo sapiens
  misc_RNA (1)...(19): siRNA sense strand
guggacacguucauguuug

SEQ ID NO: 55211 - RNA, 19 nt, Homo sapiens
  misc_RNA (1)...(19): siRNA sense strand
ugaaugggcagacaugguu

SEQ ID NO: 55212 - RNA, 19 nt, Homo sapiens
  misc_RNA (1)...(19): siRNA sense strand
gaaugccuuucaccagaau

SEQ ID NO: 55213 - RNA, 19 nt, Homo sapiens
  misc_RNA (1)...(19): siRNA sense strand
cuaugacccugacuauaug

SEQ ID NO: 55214 - RNA, 19 nt, Homo sapiens
  misc_RNA (1)...(19): siRNA sense strand
gagaaugggagcaucuugu

SEQ ID NO: 55215 - RNA, 19 nt, Homo sapiens
  misc_RNA (1)...(19): siRNA sense strand
ggagaucagacccgaaauc

SEQ ID NO: 55216 - RNA, 19 nt, Homo sapiens
  misc_RNA (1)...(19): siRNA sense strand
gaccaagugauccaacuga

SEQ ID NO: 55217 - RNA, 19 nt, Homo sapiens
  misc_RNA (1)...(19): siRNA sense strand
gcagacuccugggugaugu

SEQ ID NO: 55218 - RNA, 19 nt, Homo sapiens
  misc_RNA (1)...(19): siRNA sense strand
cgacuuguguugaaaucca

SEQ ID NO: 55219 - RNA, 19 nt, Homo sapiens
  misc_RNA (1)...(19): siRNA sense strand
cgaaaucccaugguuccua

SEQ ID NO: 55220 - RNA, 19 nt, Homo sapiens
  misc_RNA (1)...(19): siRNA sense strand
cuacaacggauucagaaau

SEQ ID NO: 55221 - RNA, 19 nt, Homo sapiens
  misc_RNA (1)...(19): siRNA sense strand
gaauucucaguccuacaua

SEQ ID NO: 55222 - RNA, 19 nt, Homo sapiens
  misc_RNA (1)...(19): siRNA sense strand
acaccaccaugugcauuaa

SEQ ID NO: 55223 - RNA, 19 nt, Homo sapiens
  misc_RNA (1)...(19): siRNA sense strand
ggagaaugggagcaucuug

SEQ ID NO: 55224 - RNA, 19 nt, Homo sapiens
  misc_RNA (1)...(19): siRNA sense strand
gcucuaugacccugacuau

SEQ ID NO: 55225 - RNA, 19 nt, Homo sapiens
  misc_RNA (1)...(19): siRNA sense strand
agacaaggaccagcuuuga

SEQ ID NO: 55226 - RNA, 19 nt, Homo sapiens
  misc_RNA (1)...(19): siRNA sense strand
gcacgacuuguguugaaau

SEQ ID NO: 55227 - RNA, 19 nt, Homo sapiens
  misc_RNA (1)...(19): siRNA sense strand
acauacaggccauuaguga

SEQ ID NO: 55228 - RNA, 19 nt, Homo sapiens
  misc_RNA (1)...(19): siRNA sense strand
ucaagaggaagaggcauuu

SEQ ID NO: 55229 - RNA, 19 nt, Homo sapiens
  misc_RNA (1)...(19): siRNA sense strand
uugcacgacuuguguugaa

SEQ ID NO: 55230 - RNA, 19 nt, Homo sapiens
  misc_RNA (1)...(19): siRNA sense strand
guccuccucuccauuuaug

SEQ ID NO: 55231 - RNA, 19 nt, Homo sapiens
  misc_RNA (1)...(19): siRNA sense strand
gaaugggagcaucuuguca

SEQ ID NO: 55232 - RNA, 19 nt, Homo sapiens
  misc_RNA (1)...(19): siRNA sense strand
ucaggaggaucaaggaacu

SEQ ID NO: 55233 - RNA, 19 nt, Homo sapiens
  misc_RNA (1)...(19): siRNA sense strand
ucuaugcucuggccacaca

SEQ ID NO: 55234 - RNA, 19 nt, Homo sapiens
  misc_RNA (1)...(19): siRNA sense strand
uggacacguucauguuuga

SEQ ID NO: 55235 - RNA, 19 nt, Homo sapiens
  misc_RNA (1)...(19): siRNA sense strand
gagguggacacguucaugu

SEQ ID NO: 55236 - RNA, 19 nt, Homo sapiens
  misc_RNA (1)...(19): siRNA sense strand
uacaccaccaugugcauua

SEQ ID NO: 55237 - RNA, 19 nt, Homo sapiens
  misc_RNA (1)...(19): siRNA sense strand
caaggcaguucagcucuac

SEQ ID NO: 55238 - RNA, 19 nt, Homo sapiens
  misc_RNA (1)...(19): siRNA sense strand
cuacauacaggccauuagu

SEQ ID NO: 55239 - RNA, 19 nt, Homo sapiens
  misc_RNA (1)...(19): siRNA sense strand
gaggcucccuaacccuugu

SEQ ID NO: 55240 - RNA, 19 nt, Homo sapiens
  misc_RNA (1)...(19): siRNA sense strand
uuuauggccuucaccacaa

SEQ ID NO: 55241 - RNA, 19 nt, Homo sapiens
  misc_RNA (1)...(19): siRNA sense strand
gcauuuggauuuucuggau

SEQ ID NO: 55242 - RNA, 19 nt, Homo sapiens
  misc_RNA (1)...(19): siRNA sense strand
ggugaugucucuggaaucc

SEQ ID NO: 55243 - RNA, 19 nt, Homo sapiens
  misc_RNA (1)...(19): siRNA sense strand
uuagugaccugaacaaccu

SEQ ID NO: 55244 - RNA, 19 nt, Homo sapiens
  misc_RNA (1)...(19): siRNA sense strand
aggcucaacuacagaagga

SEQ ID NO: 55245 - RNA, 19 nt, Homo sapiens
  misc_RNA (1)...(19): siRNA sense strand
gcccaacccagagguguuu

SEQ ID NO: 55246 - RNA, 19 nt, Homo sapiens
  misc_RNA (1)...(19): siRNA sense strand
gcuacaacggauucagaaa

SEQ ID NO: 55247 - RNA, 19 nt, Homo sapiens
  misc_RNA (1)...(19): siRNA sense strand
gcacauccaggagcuccaa

SEQ ID NO: 55248 - RNA, 19 nt, Homo sapiens
  misc_RNA (1)...(19): siRNA sense strand
aggaagaggcauuuggauu

SEQ ID NO: 55249 - RNA, 19 nt, Homo sapiens
  misc_RNA (1)...(19): siRNA sense strand
guacggcuugcuccuguug

SEQ ID NO: 55250 - RNA, 19 nt, Homo sapiens
  misc_RNA (1)...(19): siRNA sense strand
cagaaugacaccaucuaca

SEQ ID NO: 55251 - RNA, 19 nt, Homo sapiens
  misc_RNA (1)...(19): siRNA sense strand
auuccuggcuccauggauu

SEQ ID NO: 55252 - RNA, 19 nt, Homo sapiens
  misc_RNA (1)...(19): siRNA sense strand
ugacccugcuccgcuuuga

SEQ ID NO: 55253 - RNA, 19 nt, Homo sapiens
  misc_RNA (1)...(19): siRNA sense strand
caagugccuguccucauug

SEQ ID NO: 55254 - RNA, 19 nt, Homo sapiens
  misc_RNA (1)...(19): siRNA sense strand
gaggaagaggcauuuggau

SEQ ID NO: 55255 - RNA, 19 nt, Homo sapiens
  misc_RNA (1)...(19): siRNA sense strand
gagcuggagaagaucaaga

SEQ ID NO: 55256 - RNA, 19 nt, Homo sapiens
  misc_RNA (1)...(19): siRNA sense strand
caaaugggaagagcuccuu

SEQ ID NO: 55257 - RNA, 19 nt, Homo sapiens
  misc_RNA (1)...(19): siRNA sense strand
gcagacaugguuccagcau

SEQ ID NO: 55258 - RNA, 19 nt, Homo sapiens
  misc_RNA (1)...(19): siRNA sense strand
ugggugaugucucuggaau

SEQ ID NO: 55259 - RNA, 19 nt, Homo sapiens
  misc_RNA (1)...(19): siRNA sense strand
ugaugacccuggacaccau

SEQ ID NO: 55260 - RNA, 19 nt, Homo sapiens
  misc_RNA (1)...(19): siRNA sense strand
cccgucaccuucccugaug

SEQ ID NO: 55261 - RNA, 19 nt, Homo sapiens
  misc_RNA (1)...(19): siRNA sense strand
cagcacacagaccaaguga

SEQ ID NO: 55262 - RNA, 19 nt, Homo sapiens
  misc_RNA (1)...(19): siRNA sense strand
gguacggcuugcuccuguu

SEQ ID NO: 55263 - RNA, 19 nt, Homo sapiens
  misc_RNA (1)...(19): siRNA sense strand
gacuuguguugaaauccaa

SEQ ID NO: 55264 - RNA, 19 nt, Homo sapiens
  misc_RNA (1)...(19): siRNA sense strand
gcaccggguucugcucaac

SEQ ID NO: 55265 - RNA, 19 nt, Homo sapiens
  misc_RNA (1)...(19): siRNA sense strand
agaggaagaggcauuugga

SEQ ID NO: 55266 - RNA, 19 nt, Homo sapiens
  misc_RNA (1)...(19): siRNA sense strand
uggacaccaucaugaagug

SEQ ID NO: 55267 - RNA, 19 nt, Homo sapiens
  misc_RNA (1)...(19): siRNA sense strand
cgagugaugcuggacaaau

SEQ ID NO: 55268 - RNA, 19 nt, Homo sapiens
  misc_RNA (1)...(19): siRNA sense strand
uacgagugaugcuggacaa

SEQ ID NO: 55269 - RNA, 19 nt, Homo sapiens
  misc_RNA (1)...(19): siRNA sense strand
ccaacaggaccaggagcua

SEQ ID NO: 55270 - RNA, 19 nt, Homo sapiens
  misc_RNA (1)...(19): siRNA sense strand
agaaugacaccaucuacag

SEQ ID NO: 55271 - RNA, 19 nt, Homo sapiens
  misc_RNA (1)...(19): siRNA sense strand
cagcaagccugucaccuuu

SEQ ID NO: 55272 - RNA, 19 nt, Homo sapiens
  misc_RNA (1)...(19): siRNA sense strand
gggcugaaguggacacauu

SEQ ID NO: 55273 - RNA, 19 nt, Homo sapiens
  misc_RNA (1)...(19): siRNA sense strand
ugacuuaucugaccaugug

SEQ ID NO: 55274 - RNA, 19 nt, Homo sapiens
  misc_RNA (1)...(19): siRNA sense strand
gaagugcaccuuuggaaga

SEQ ID NO: 55275 - RNA, 19 nt, Homo sapiens
  misc_RNA (1)...(19): siRNA sense strand
cuaaggcuauggacaaauu

SEQ ID NO: 55276 - RNA, 19 nt, Homo sapiens
  misc_RNA (1)...(19): siRNA sense strand
ggacaagugggaagagaaa

SEQ ID NO: 55277 - RNA, 19 nt, Homo sapiens
  misc_RNA (1)...(19): siRNA sense strand
acaccuggcuuucauuaug

SEQ ID NO: 55278 - RNA, 19 nt, Homo sapiens
  misc_RNA (1)...(19): siRNA sense strand
gaggguaaguccuuugaca

SEQ ID NO: 55279 - RNA, 19 nt, Homo sapiens
  misc_RNA (1)...(19): siRNA sense strand
gaacguuggcuaaggcuau

SEQ ID NO: 55280 - RNA, 19 nt, Homo sapiens
  misc_RNA (1)...(19): siRNA sense strand
gcaagccugucaccuuugu

SEQ ID NO: 55281 - RNA, 19 nt, Homo sapiens
  misc_RNA (1)...(19): siRNA sense strand
ggagaggccugcugguucu

SEQ ID NO: 55282 - RNA, 19 nt, Homo sapiens
  misc_RNA (1)...(19): siRNA sense strand
gaucuuggucuuaggcuuu

SEQ ID NO: 55283 - RNA, 19 nt, Homo sapiens
  misc_RNA (1)...(19): siRNA sense strand
gcucacaccuggcuuucau

SEQ ID NO: 55284 - RNA, 19 nt, Homo sapiens
  misc_RNA (1)...(19): siRNA sense strand
gcgcugaacacacucauga

SEQ ID NO: 55285 - RNA, 19 nt, Homo sapiens
  misc_RNA (1)...(19): siRNA sense strand
ggacagcagcuacuaccuu

SEQ ID NO: 55286 - RNA, 19 nt, Homo sapiens
  misc_RNA (1)...(19): siRNA sense strand
agccugaucucuaugcaua

SEQ ID NO: 55287 - RNA, 19 nt, Homo sapiens
  misc_RNA (1)...(19): siRNA sense strand
guaaguccuuugacaucuu

SEQ ID NO: 55288 - RNA, 19 nt, Homo sapiens
  misc_RNA (1)...(19): siRNA sense strand
gagaaggugcggaagaaga

SEQ ID NO: 55289 - RNA, 19 nt, Homo sapiens
  misc_RNA (1)...(19): siRNA sense strand
ucacaccuggcuuucauua

SEQ ID NO: 55290 - RNA, 19 nt, Homo sapiens
  misc_RNA (1)...(19): siRNA sense strand
cgccaucccuuugccuuua

SEQ ID NO: 55291 - RNA, 19 nt, Homo sapiens
  misc_RNA (1)...(19): siRNA sense strand
gggcugaucuuggucuuag

SEQ ID NO: 55292 - RNA, 19 nt, Homo sapiens
  misc_RNA (1)...(19): siRNA sense strand
gagaggagguccgcgagau

SEQ ID NO: 55293 - RNA, 19 nt, Homo sapiens
  misc_RNA (1)...(19): siRNA sense strand
guccugcgcuccaagaaug

SEQ ID NO: 55294 - RNA, 19 nt, Homo sapiens
  misc_RNA (1)...(19): siRNA sense strand
ucagcgaucucacucuguu

SEQ ID NO: 55295 - RNA, 19 nt, Homo sapiens
  misc_RNA (1)...(19): siRNA sense strand
ggucuuaggcuuucucaag

SEQ ID NO: 55296 - RNA, 19 nt, Homo sapiens
  misc_RNA (1)...(19): siRNA sense strand
gaugagaaggugcggaaga

SEQ ID NO: 55297 - RNA, 19 nt, Homo sapiens
  misc_RNA (1)...(19): siRNA sense strand
ccaguaccauaaugacuuc

SEQ ID NO: 55298 - RNA, 19 nt, Homo sapiens
  misc_RNA (1)...(19): siRNA sense strand
ccacugagaaugcauccaa

SEQ ID NO: 55299 - RNA, 19 nt, Homo sapiens
  misc_RNA (1)...(19): siRNA sense strand
ucacugagucuacacguau

SEQ ID NO: 55300 - RNA, 19 nt, Homo sapiens
  misc_RNA (1)...(19): siRNA sense strand
ccucacggcugcccaucaa

SEQ ID NO: 55301 - RNA, 19 nt, Homo sapiens
  misc_RNA (1)...(19): siRNA sense strand
agaaagcucgggaggguaa

SEQ ID NO: 55302 - RNA, 19 nt, Homo sapiens
  misc_RNA (1)...(19): siRNA sense strand
guaucaugcuggacaagug

SEQ ID NO: 55303 - RNA, 19 nt, Homo sapiens
  misc_RNA (1)...(19): siRNA sense strand
ugauguguaugacuucuuc

SEQ ID NO: 55304 - RNA, 19 nt, Homo sapiens
  misc_RNA (1)...(19): siRNA sense strand
gguaaguccuuugacaucu

SEQ ID NO: 55305 - RNA, 19 nt, Homo sapiens
  misc_RNA (1)...(19): siRNA sense strand
gaggccugcugguucuuga

SEQ ID NO: 55306 - RNA, 19 nt, Homo sapiens
  misc_RNA (1)...(19): siRNA sense strand
ggaggcgaacguuggcuaa

SEQ ID NO: 55307 - RNA, 19 nt, Homo sapiens
  misc_RNA (1)...(19): siRNA sense strand
uaaguccuuugacaucuuc

SEQ ID NO: 55308 - RNA, 19 nt, Homo sapiens
  misc_RNA (1)...(19): siRNA sense strand
ggcuaaggcuauggacaaa

SEQ ID NO: 55309 - RNA, 19 nt, Homo sapiens
  misc_RNA (1)...(19): siRNA sense strand
gacaugcccucgagaucca

SEQ ID NO: 55310 - RNA, 19 nt, Homo sapiens
  misc_RNA (1)...(19): siRNA sense strand
uaucugaccaugugcauca

SEQ ID NO: 55311 - RNA, 19 nt, Homo sapiens
  misc_RNA (1)...(19): siRNA sense strand
gaagccugaucucuaugca

SEQ ID NO: 55312 - RNA, 19 nt, Homo sapiens
  misc_RNA (1)...(19): siRNA sense strand
ugaucucuaugcauaucua

SEQ ID NO: 55313 - RNA, 19 nt, Homo sapiens
  misc_RNA (1)...(19): siRNA sense strand
ucuaugagccugacuaugc

SEQ ID NO: 55314 - RNA, 19 nt, Homo sapiens
  misc_RNA (1)...(19): siRNA sense strand
ucagcaagccugucaccuu

SEQ ID NO: 55315 - RNA, 19 nt, Homo sapiens
  misc_RNA (1)...(19): siRNA sense strand
gggaugaucugggcaaaau

SEQ ID NO: 55316 - RNA, 19 nt, Homo sapiens
  misc_RNA (1)...(19): siRNA sense strand
ggaggcaccuggacuuccu

SEQ ID NO: 55317 - RNA, 19 nt, Homo sapiens
  misc_RNA (1)...(19): siRNA sense strand
agugguaucuccugguuuc

SEQ ID NO: 55318 - RNA, 19 nt, Homo sapiens
  misc_RNA (1)...(19): siRNA sense strand
gcagcaguuugccaugagu

SEQ ID NO: 55319 - RNA, 19 nt, Homo sapiens
  misc_RNA (1)...(19): siRNA sense strand
gguaucuccugguuucucu

SEQ ID NO: 55320 - RNA, 19 nt, Homo sapiens
  misc_RNA (1)...(19): siRNA sense strand
gggaggguaaguccuuuga

SEQ ID NO: 55321 - RNA, 19 nt, Homo sapiens
  misc_RNA (1)...(19): siRNA sense strand
ggguaaguccuuugacauc

SEQ ID NO: 55322 - RNA, 19 nt, Homo sapiens
  misc_RNA (1)...(19): siRNA sense strand
cuucugggcugaucuuggu

SEQ ID NO: 55323 - RNA, 19 nt, Homo sapiens
  misc_RNA (1)...(19): siRNA sense strand
cucaugaagugcaccuuug

SEQ ID NO: 55324 - RNA, 19 nt, Homo sapiens
  misc_RNA (1)...(19): siRNA sense strand
gcugaacacacucaugaag

SEQ ID NO: 55325 - RNA, 19 nt, Homo sapiens
  misc_RNA (1)...(19): siRNA sense strand
gccaucccuuugccuuuau

SEQ ID NO: 55326 - RNA, 19 nt, Homo sapiens
  misc_RNA (1)...(19): siRNA sense strand
augagaaggugcggaagaa

SEQ ID NO: 55327 - RNA, 19 nt, Homo sapiens
  misc_RNA (1)...(19): siRNA sense strand
gagccugacuaugccaaag

SEQ ID NO: 55328 - RNA, 19 nt, Homo sapiens
  misc_RNA (1)...(19): siRNA sense strand
ucacggcugcccaucaaga

SEQ ID NO: 55329 - RNA, 19 nt, Homo sapiens
  misc_RNA (1)...(19): siRNA sense strand
ggagguccgcgagauccua

SEQ ID NO: 55330 - RNA, 19 nt, Homo sapiens
  misc_RNA (1)...(19): siRNA sense strand
gcccaccaguucccguaug

SEQ ID NO: 55331 - RNA, 19 nt, Homo sapiens
  misc_RNA (1)...(19): siRNA sense strand
cgaucucacucuguugaug

SEQ ID NO: 55332 - RNA, 19 nt, Homo sapiens
  misc_RNA (1)...(19): siRNA sense strand
ucacauggcgcugaacaca

SEQ ID NO: 55333 - RNA, 19 nt, Homo sapiens
  misc_RNA (1)...(19): siRNA sense strand
uggcuaaggcuauggacaa

SEQ ID NO: 55334 - RNA, 19 nt, Homo sapiens
  misc_RNA (1)...(19): siRNA sense strand
guggauggccggucucuac

SEQ ID NO: 55335 - RNA, 19 nt, Homo sapiens
  misc_RNA (1)...(19): siRNA sense strand
uaaggccccugauguguau

SEQ ID NO: 55336 - RNA, 19 nt, Homo sapiens
  misc_RNA (1)...(19): siRNA sense strand
ccagguggcccaugaccau

SEQ ID NO: 55337 - RNA, 19 nt, Homo sapiens
  misc_RNA (1)...(19): siRNA sense strand
acauggcgcugaacacacu

SEQ ID NO: 55338 - RNA, 19 nt, Homo sapiens
  misc_RNA (1)...(19): siRNA sense strand
caucuaugagccugacuau

SEQ ID NO: 55339 - RNA, 19 nt, Homo sapiens
  misc_RNA (1)...(19): siRNA sense strand
gcauugggcagcaguuugc

SEQ ID NO: 55340 - RNA, 19 nt, Homo sapiens
  misc_RNA (1)...(19): siRNA sense strand
cacugagaaugcauccaaa

SEQ ID NO: 55341 - RNA, 19 nt, Homo sapiens
  misc_RNA (1)...(19): siRNA sense strand
ucuacugcauggcccugua

SEQ ID NO: 55342 - RNA, 19 nt, Homo sapiens
  misc_RNA (1)...(19): siRNA sense strand
gaugaucugggcaaaauga

SEQ ID NO: 55343 - RNA, 19 nt, Homo sapiens
  misc_RNA (1)...(19): siRNA sense strand
cagcucagcaagccuguca

SEQ ID NO: 55344 - RNA, 19 nt, Homo sapiens
  misc_RNA (1)...(19): siRNA sense strand
ggucacauggcgcugaaca

SEQ ID NO: 55345 - RNA, 19 nt, Homo sapiens
  misc_RNA (1)...(19): siRNA sense strand
ccugaucucuaugcauauc

SEQ ID NO: 55346 - RNA, 19 nt, Homo sapiens
  misc_RNA (1)...(19): siRNA sense strand
ggaagccugaucucuaugc

SEQ ID NO: 55347 - RNA, 19 nt, Homo sapiens
  misc_RNA (1)...(19): siRNA sense strand
agaaggugcggaagaagau

SEQ ID NO: 55348 - RNA, 19 nt, Homo sapiens
  misc_RNA (1)...(19): siRNA sense strand
gguggcccaugaccauaca

SEQ ID NO: 55349 - RNA, 19 nt, Homo sapiens
  misc_RNA (1)...(19): siRNA sense strand
ggaagaaguuaucugauga

SEQ ID NO: 55350 - RNA, 19 nt, Homo sapiens
  misc_RNA (1)...(19): siRNA sense strand
gguagugccuguuuggaua

SEQ ID NO: 55351 - RNA, 19 nt, Homo sapiens
  misc_RNA (1)...(19): siRNA sense strand
ggagaaacccagugaauau

SEQ ID NO: 55352 - RNA, 19 nt, Homo sapiens
  misc_RNA (1)...(19): siRNA sense strand
gggaagaaguuaucugaug

SEQ ID NO: 55353 - RNA, 19 nt, Homo sapiens
  misc_RNA (1)...(19): siRNA sense strand
gaaacccagugaauauauu

SEQ ID NO: 55354 - RNA, 19 nt, Homo sapiens
  misc_RNA (1)...(19): siRNA sense strand
gggacgaccuggcccauuu

SEQ ID NO: 55355 - RNA, 19 nt, Homo sapiens
  misc_RNA (1)...(19): siRNA sense strand
gcugacaccuuuauguuug

SEQ ID NO: 55356 - RNA, 19 nt, Homo sapiens
  misc_RNA (1)...(19): siRNA sense strand
cauauugacuuccuguauu

SEQ ID NO: 55357 - RNA, 19 nt, Homo sapiens
  misc_RNA (1)...(19): siRNA sense strand
ggaccuacgccuucuauga

SEQ ID NO: 55358 - RNA, 19 nt, Homo sapiens
  misc_RNA (1)...(19): siRNA sense strand
ucagugcccuuguaucaaa

SEQ ID NO: 55359 - RNA, 19 nt, Homo sapiens
  misc_RNA (1)...(19): siRNA sense strand
gaaaugugucuucagcuuu

SEQ ID NO: 55360 - RNA, 19 nt, Homo sapiens
  misc_RNA (1)...(19): siRNA sense strand
gagaaacccagugaauaua

SEQ ID NO: 55361 - RNA, 19 nt, Homo sapiens
  misc_RNA (1)...(19): siRNA sense strand
caugagauccuccugcaua

SEQ ID NO: 55362 - RNA, 19 nt, Homo sapiens
  misc_RNA (1)...(19): siRNA sense strand
gagcacaucagccucauga

SEQ ID NO: 55363 - RNA, 19 nt, Homo sapiens
  misc_RNA (1)...(19): siRNA sense strand
ggagcucagugcccuugua

SEQ ID NO: 55364 - RNA, 19 nt, Homo sapiens
  misc_RNA (1)...(19): siRNA sense strand
gagauccuccugcauauug

SEQ ID NO: 55365 - RNA, 19 nt, Homo sapiens
  misc_RNA (1)...(19): siRNA sense strand
caaaggacaaguucuucua

SEQ ID NO: 55366 - RNA, 19 nt, Homo sapiens
  misc_RNA (1)...(19): siRNA sense strand
gaaggaccgugagccuaaa

SEQ ID NO: 55367 - RNA, 19 nt, Homo sapiens
  misc_RNA (1)...(19): siRNA sense strand
gcucagugcccuuguauca

SEQ ID NO: 55368 - RNA, 19 nt, Homo sapiens
  misc_RNA (1)...(19): siRNA sense strand
agcagaagcugacaccuuu

SEQ ID NO: 55369 - RNA, 19 nt, Homo sapiens
  misc_RNA (1)...(19): siRNA sense strand
ggacuucauugauguacuc

SEQ ID NO: 55370 - RNA, 19 nt, Homo sapiens
  misc_RNA (1)...(19): siRNA sense strand
agaaaugugucuucagcuu

SEQ ID NO: 55371 - RNA, 19 nt, Homo sapiens
  misc_RNA (1)...(19): siRNA sense strand
uugcaaagcacccagaaua

SEQ ID NO: 55372 - RNA, 19 nt, Homo sapiens
  misc_RNA (1)...(19): siRNA sense strand
gaagcugacaccuuuaugu

SEQ ID NO: 55373 - RNA, 19 nt, Homo sapiens
  misc_RNA (1)...(19): siRNA sense strand
gagcagaagcugacaccuu

SEQ ID NO: 55374 - RNA, 19 nt, Homo sapiens
  misc_RNA (1)...(19): siRNA sense strand
aaaugugucuucagcuuug

SEQ ID NO: 55375 - RNA, 19 nt, Homo sapiens
  misc_RNA (1)...(19): siRNA sense strand
gcauauugacuuccuguau

SEQ ID NO: 55376 - RNA, 19 nt, Homo sapiens
  misc_RNA (1)...(19): siRNA sense strand
ugaaggaccgugagccuaa

SEQ ID NO: 55377 - RNA, 19 nt, Homo sapiens
  misc_RNA (1)...(19): siRNA sense strand
gugcacgacuucacagaug

SEQ ID NO: 55378 - RNA, 19 nt, Homo sapiens
  misc_RNA (1)...(19): siRNA sense strand
cuacagaaaugugucuuca

SEQ ID NO: 55379 - RNA, 19 nt, Homo sapiens
  misc_RNA (1)...(19): siRNA sense strand
gaggagggcaugagaguuc

SEQ ID NO: 55380 - RNA, 19 nt, Homo sapiens
  misc_RNA (1)...(19): siRNA sense strand
gcugagugcuggugacaag

SEQ ID NO: 55381 - RNA, 19 nt, Homo sapiens
  misc_RNA (1)...(19): siRNA sense strand
cagcugccauugcaccaaa

SEQ ID NO: 55382 - RNA, 19 nt, Homo sapiens
  misc_RNA (1)...(19): siRNA sense strand
ggacauaagagcagaagcu

SEQ ID NO: 55383 - RNA, 19 nt, Homo sapiens
  misc_RNA (1)...(19): siRNA sense strand
gcagaagcugacaccuuua

SEQ ID NO: 55384 - RNA, 19 nt, Homo sapiens
  misc_RNA (1)...(19): siRNA sense strand
cugaagcccuauaugaaga

SEQ ID NO: 55385 - RNA, 19 nt, Homo sapiens
  misc_RNA (1)...(19): siRNA sense strand
gaagcccuauaugaagauu

SEQ ID NO: 55386 - RNA, 19 nt, Homo sapiens
  misc_RNA (1)...(19): siRNA sense strand
gaagacgggaagaaguuau

SEQ ID NO: 55387 - RNA, 19 nt, Homo sapiens
  misc_RNA (1)...(19): siRNA sense strand
guuaucugaugaggacaua

SEQ ID NO: 55388 - RNA, 19 nt, Homo sapiens
  misc_RNA (1)...(19): siRNA sense strand
ggcaggaggugcaagaacu

SEQ ID NO: 55389 - RNA, 19 nt, Homo sapiens
  misc_RNA (1)...(19): siRNA sense strand
ucaaugagagugugaacau

SEQ ID NO: 55390 - RNA, 19 nt, Homo sapiens
  misc_RNA (1)...(19): siRNA sense strand
gaugaagacgggaagaagu

SEQ ID NO: 55391 - RNA, 19 nt, Homo sapiens
  misc_RNA (1)...(19): siRNA sense strand
gagcucagugcccuuguau

SEQ ID NO: 55392 - RNA, 19 nt, Homo sapiens
  misc_RNA (1)...(19): siRNA sense strand
ggucaccucuggcuuuuau

SEQ ID NO: 55393 - RNA, 19 nt, Homo sapiens
  misc_RNA (1)...(19): siRNA sense strand
ugaagacgggaagaaguua

SEQ ID NO: 55394 - RNA, 19 nt, Homo sapiens
  misc_RNA (1)...(19): siRNA sense strand
caggagaaacccagugaau

SEQ ID NO: 55395 - RNA, 19 nt, Homo sapiens
  misc_RNA (1)...(19): siRNA sense strand
ccaggguguugaugacuuc

SEQ ID NO: 55396 - RNA, 19 nt, Homo sapiens
  misc_RNA (1)...(19): siRNA sense strand
gccaggguguugaugacuu

SEQ ID NO: 55397 - RNA, 19 nt, Homo sapiens
  misc_RNA (1)...(19): siRNA sense strand
aggagaaacccagugaaua

SEQ ID NO: 55398 - RNA, 19 nt, Homo sapiens
  misc_RNA (1)...(19): siRNA sense strand
agaaacccagugaauauau

SEQ ID NO: 55399 - RNA, 19 nt, Homo sapiens
  misc_RNA (1)...(19): siRNA sense strand
ggacgaccuggcccauuug

SEQ ID NO: 55400 - RNA, 19 nt, Homo sapiens
  misc_RNA (1)...(19): siRNA sense strand
gcaggaggugcaagaacuu

SEQ ID NO: 55401 - RNA, 19 nt, Homo sapiens
  misc_RNA (1)...(19): siRNA sense strand
uggacagucuacagaaaug

SEQ ID NO: 55402 - RNA, 19 nt, Homo sapiens
  misc_RNA (1)...(19): siRNA sense strand
caaagcacccagaauacca

SEQ ID NO: 55403 - RNA, 19 nt, Homo sapiens
  misc_RNA (1)...(19): siRNA sense strand
cagaagcugacaccuuuau

SEQ ID NO: 55404 - RNA, 19 nt, Homo sapiens
  misc_RNA (1)...(19): siRNA sense strand
gaagaaguuaucugaugag

SEQ ID NO: 55405 - RNA, 19 nt, Homo sapiens
  misc_RNA (1)...(19): siRNA sense strand
caacgccucagcugccauu

SEQ ID NO: 55406 - RNA, 19 nt, Homo sapiens
  misc_RNA (1)...(19): siRNA sense strand
ugacgccugccuuccauuu

SEQ ID NO: 55407 - RNA, 19 nt, Homo sapiens
  misc_RNA (1)...(19): siRNA sense strand
ggucaucucccgccauguc

SEQ ID NO: 55408 - RNA, 19 nt, Homo sapiens
  misc_RNA (1)...(19): siRNA sense strand
gaccgugagccuaaagaga

SEQ ID NO: 55409 - RNA, 19 nt, Homo sapiens
  misc_RNA (1)...(19): siRNA sense strand
caccaaaggacaaguucuu

SEQ ID NO: 55410 - RNA, 19 nt, Homo sapiens
  misc_RNA (1)...(19): siRNA sense strand
cagaggguagugccuguuu

SEQ ID NO: 55411 - RNA, 19 nt, Homo sapiens
  misc_RNA (1)...(19): siRNA sense strand
aagcugacaccuuuauguu

SEQ ID NO: 55412 - RNA, 19 nt, Homo sapiens
  misc_RNA (1)...(19): siRNA sense strand
cuuggacagucuacagaaa

SEQ ID NO: 55413 - RNA, 19 nt, Homo sapiens
  misc_RNA (1)...(19): siRNA sense strand
gcugacgccugccuuccau

SEQ ID NO: 55414 - RNA, 19 nt, Homo sapiens
  misc_RNA (1)...(19): siRNA sense strand
caaugagagugugaacauc

SEQ ID NO: 55415 - RNA, 19 nt, Homo sapiens
  misc_RNA (1)...(19): siRNA sense strand
cauccggucugucaucaac

SEQ ID NO: 55416 - RNA, 19 nt, Homo sapiens
  misc_RNA (1)...(19): siRNA sense strand
ccgugagccuaaagagauu

SEQ ID NO: 55417 - RNA, 19 nt, Homo sapiens
  misc_RNA (1)...(19): siRNA sense strand
aaacccagugaauauauug

SEQ ID NO: 55418 - RNA, 19 nt, Homo sapiens
  misc_RNA (1)...(19): siRNA sense strand
gagccuaaagagauugaau

SEQ ID NO: 55419 - RNA, 19 nt, Homo sapiens
  misc_RNA (1)...(19): siRNA sense strand
ggaugaagacgggaagaag

SEQ ID NO: 55420 - RNA, 19 nt, Homo sapiens
  misc_RNA (1)...(19): siRNA sense strand
gugccuguuuggauauguu

SEQ ID NO: 55421 - RNA, 19 nt, Homo sapiens
  misc_RNA (1)...(19): siRNA sense strand
gaccuacgccuucuaugac

SEQ ID NO: 55422 - RNA, 19 nt, Homo sapiens
  misc_RNA (1)...(19): siRNA sense strand
agacuuuggacuucauuga

SEQ ID NO: 55423 - RNA, 19 nt, Homo sapiens
  misc_RNA (1)...(19): siRNA sense strand
cgccucagcugccauugca

SEQ ID NO: 55424 - RNA, 19 nt, Homo sapiens
  misc_RNA (1)...(19): siRNA sense strand
aaggacaaguucuucuaca

SEQ ID NO: 55425 - RNA, 19 nt, Homo sapiens
  misc_RNA (1)...(19): siRNA sense strand
acuuuggacuucauugaug

SEQ ID NO: 55426 - RNA, 19 nt, Homo sapiens
  misc_RNA (1)...(19): siRNA sense strand
guagugccuguuuggauau

SEQ ID NO: 55427 - RNA, 19 nt, Homo sapiens
  misc_RNA (1)...(19): siRNA sense strand
cagaggagggcaugagagu

SEQ ID NO: 55428 - RNA, 19 nt, Homo sapiens
  misc_RNA (1)...(19): siRNA sense strand
gccaaggccaaauccaaga

SEQ ID NO: 55429 - RNA, 19 nt, Homo sapiens
  misc_RNA (1)...(19): siRNA sense strand
ggacagucuacagaaaugu

SEQ ID NO: 55430 - RNA, 19 nt, Homo sapiens
  misc_RNA (1)...(19): siRNA sense strand
aaugagagugugaacauca

SEQ ID NO: 55431 - RNA, 19 nt, Homo sapiens
  misc_RNA (1)...(19): siRNA sense strand
uuaucugccucaucagugu

SEQ ID NO: 55432 - RNA, 19 nt, Homo sapiens
  misc_RNA (1)...(19): siRNA sense strand
ccaaaggacaaguucuucu

SEQ ID NO: 55433 - RNA, 19 nt, Homo sapiens
  misc_RNA (1)...(19): siRNA sense strand
gcaaagcacccagaauacc

SEQ ID NO: 55434 - RNA, 19 nt, Homo sapiens
  misc_RNA (1)...(19): siRNA sense strand
cugacaccuuuauguuuga

SEQ ID NO: 55435 - RNA, 19 nt, Homo sapiens
  misc_RNA (1)...(19): siRNA sense strand
acgccugccuuccauuuca

SEQ ID NO: 55436 - RNA, 19 nt, Homo sapiens
  misc_RNA (1)...(19): siRNA sense strand
auauauugccgccaucuug

SEQ ID NO: 55437 - RNA, 19 nt, Homo sapiens
  misc_RNA (1)...(19): siRNA sense strand
acaaguucuucuacagcuu

SEQ ID NO: 55438 - RNA, 19 nt, Homo sapiens
  misc_RNA (1)...(19): siRNA sense strand
agaggguagugccuguuug

SEQ ID NO: 55439 - RNA, 19 nt, Homo sapiens
  misc_RNA (1)...(19): siRNA sense strand
gaauauauugccgccaucu

SEQ ID NO: 55440 - RNA, 19 nt, Homo sapiens
  misc_RNA (1)...(19): siRNA sense strand
ccugaagcccuauaugaag

SEQ ID NO: 55441 - RNA, 19 nt, Homo sapiens
  misc_RNA (1)...(19): siRNA sense strand
gaggguagugccuguuugg

SEQ ID NO: 55442 - RNA, 19 nt, Homo sapiens
  misc_RNA (1)...(19): siRNA sense strand
ggaagaaguuguccgauga

SEQ ID NO: 55443 - RNA, 19 nt, Homo sapiens
  misc_RNA (1)...(19): siRNA sense strand
acauagacuuccuguauua

SEQ ID NO: 55444 - RNA, 19 nt, Homo sapiens
  misc_RNA (1)...(19): siRNA sense strand
ggaccuauaccuucuauga

SEQ ID NO: 55445 - RNA, 19 nt, Homo sapiens
  misc_RNA (1)...(19): siRNA sense strand
gcugacaccuuuauguuug

SEQ ID NO: 55446 - RNA, 19 nt, Homo sapiens
  misc_RNA (1)...(19): siRNA sense strand
gaaacggaauugguucuug

SEQ ID NO: 55447 - RNA, 19 nt, Homo sapiens
  misc_RNA (1)...(19): siRNA sense strand
caucaagccugugcucuuu

SEQ ID NO: 55448 - RNA, 19 nt, Homo sapiens
  misc_RNA (1)...(19): siRNA sense strand
ggagaagcccagugaauau

SEQ ID NO: 55449 - RNA, 19 nt, Homo sapiens
  misc_RNA (1)...(19): siRNA sense strand
gaagcccagugaauauauu

SEQ ID NO: 55450 - RNA, 19 nt, Homo sapiens
  misc_RNA (1)...(19): siRNA sense strand
gaaaugugucuucagcuuu

SEQ ID NO: 55451 - RNA, 19 nt, Homo sapiens
  misc_RNA (1)...(19): siRNA sense strand
gagcacaucagccucauga

SEQ ID NO: 55452 - RNA, 19 nt, Homo sapiens
  misc_RNA (1)...(19): siRNA sense strand
gagaagcccagugaauaua

SEQ ID NO: 55453 - RNA, 19 nt, Homo sapiens
  misc_RNA (1)...(19): siRNA sense strand
gaaggaccgugagccuaaa

SEQ ID NO: 55454 - RNA, 19 nt, Homo sapiens
  misc_RNA (1)...(19): siRNA sense strand
caaaggacaaggucuucua

SEQ ID NO: 55455 - RNA, 19 nt, Homo sapiens
  misc_RNA (1)...(19): siRNA sense strand
agcagaagcugacaccuuu

SEQ ID NO: 55456 - RNA, 19 nt, Homo sapiens
  misc_RNA (1)...(19): siRNA sense strand
ggacuucauugauguacuc

SEQ ID NO: 55457 - RNA, 19 nt, Homo sapiens
  misc_RNA (1)...(19): siRNA sense strand
agaaaugugucuucagcuu

SEQ ID NO: 55458 - RNA, 19 nt, Homo sapiens
  misc_RNA (1)...(19): siRNA sense strand
gaagcugacaccuuuaugu

SEQ ID NO: 55459 - RNA, 19 nt, Homo sapiens
  misc_RNA (1)...(19): siRNA sense strand
gagcagaagcugacaccuu

SEQ ID NO: 55460 - RNA, 19 nt, Homo sapiens
  misc_RNA (1)...(19): siRNA sense strand
aaaugugucuucagcuuug

SEQ ID NO: 55461 - RNA, 19 nt, Homo sapiens
  misc_RNA (1)...(19): siRNA sense strand
gugcacgacuucacagaug

SEQ ID NO: 55462 - RNA, 19 nt, Homo sapiens
  misc_RNA (1)...(19): siRNA sense strand
ugaaggaccgugagccuaa

SEQ ID NO: 55463 - RNA, 19 nt, Homo sapiens
  misc_RNA (1)...(19): siRNA sense strand
ggaugaagaugggaagaag

SEQ ID NO: 55464 - RNA, 19 nt, Homo sapiens
  misc_RNA (1)...(19): siRNA sense strand
cagcugccauuguaccaaa

SEQ ID NO: 55465 - RNA, 19 nt, Homo sapiens
  misc_RNA (1)...(19): siRNA sense strand
uugcaaagcacccggaaua

SEQ ID NO: 55466 - RNA, 19 nt, Homo sapiens
  misc_RNA (1)...(19): siRNA sense strand
gcagauccuccuguacaua

SEQ ID NO: 55467 - RNA, 19 nt, Homo sapiens
  misc_RNA (1)...(19): siRNA sense strand
ggucuccuauacacacaaa

SEQ ID NO: 55468 - RNA, 19 nt, Homo sapiens
  misc_RNA (1)...(19): siRNA sense strand
gaagaugggaagaaguugu

SEQ ID NO: 55469 - RNA, 19 nt, Homo sapiens
  misc_RNA (1)...(19): siRNA sense strand
ggacauaagagcagaagcu

SEQ ID NO: 55470 - RNA, 19 nt, Homo sapiens
  misc_RNA (1)...(19): siRNA sense strand
gcagaagcugacaccuuua

SEQ ID NO: 55471 - RNA, 19 nt, Homo sapiens
  misc_RNA (1)...(19): siRNA sense strand
cugaagcccuauaugaaga

SEQ ID NO: 55472 - RNA, 19 nt, Homo sapiens
  misc_RNA (1)...(19): siRNA sense strand
gaagcccuauaugaagauu

SEQ ID NO: 55473 - RNA, 19 nt, Homo sapiens
  misc_RNA (1)...(19): siRNA sense strand
aggagaagcccagugaaua

SEQ ID NO: 55474 - RNA, 19 nt, Homo sapiens
  misc_RNA (1)...(19): siRNA sense strand
cagcagauccuccuguaca

SEQ ID NO: 55475 - RNA, 19 nt, Homo sapiens
  misc_RNA (1)...(19): siRNA sense strand
caaagcacccggaauacca

SEQ ID NO: 55476 - RNA, 19 nt, Homo sapiens
  misc_RNA (1)...(19): siRNA sense strand
ggagcucagugcccuugug

SEQ ID NO: 55477 - RNA, 19 nt, Homo sapiens
  misc_RNA (1)...(19): siRNA sense strand
ucaaugagagugugaacau

SEQ ID NO: 55478 - RNA, 19 nt, Homo sapiens
  misc_RNA (1)...(19): siRNA sense strand
gcucagugcccuugugaca

SEQ ID NO: 55479 - RNA, 19 nt, Homo sapiens
  misc_RNA (1)...(19): siRNA sense strand
gagcucagugcccuuguga

SEQ ID NO: 55480 - RNA, 19 nt, Homo sapiens
  misc_RNA (1)...(19): siRNA sense strand
ggucaccucuggcuuuuau

SEQ ID NO: 55481 - RNA, 19 nt, Homo sapiens
  misc_RNA (1)...(19): siRNA sense strand
gccaggagaagcccaguga

SEQ ID NO: 55482 - RNA, 19 nt, Homo sapiens
  misc_RNA (1)...(19): siRNA sense strand
ccaggguguugaugacuuc

SEQ ID NO: 55483 - RNA, 19 nt, Homo sapiens
  misc_RNA (1)...(19): siRNA sense strand
gccaggguguugaugacuu

SEQ ID NO: 55484 - RNA, 19 nt, Homo sapiens
  misc_RNA (1)...(19): siRNA sense strand
uagacuuccuguauuaucu

SEQ ID NO: 55485 - RNA, 19 nt, Homo sapiens
  misc_RNA (1)...(19): siRNA sense strand
cagaagcugacaccuuuau

SEQ ID NO: 55486 - RNA, 19 nt, Homo sapiens
  misc_RNA (1)...(19): siRNA sense strand
ugacgccugccuuccauuu

SEQ ID NO: 55487 - RNA, 19 nt, Homo sapiens
  misc_RNA (1)...(19): siRNA sense strand
uuccugaccaugugcauua

SEQ ID NO: 55488 - RNA, 19 nt, Homo sapiens
  misc_RNA (1)...(19): siRNA sense strand
gaccgugagccuaaagaga

SEQ ID NO: 55489 - RNA, 19 nt, Homo sapiens
  misc_RNA (1)...(19): siRNA sense strand
acacaaagccuggcaugca

SEQ ID NO: 55490 - RNA, 19 nt, Homo sapiens
  misc_RNA (1)...(19): siRNA sense strand
caggagaagcccagugaau

SEQ ID NO: 55491 - RNA, 19 nt, Homo sapiens
  misc_RNA (1)...(19): siRNA sense strand
ccuauaccuucuaugacaa

SEQ ID NO: 55492 - RNA, 19 nt, Homo sapiens
  misc_RNA (1)...(19): siRNA sense strand
aagcugacaccuuuauguu

SEQ ID NO: 55493 - RNA, 19 nt, Homo sapiens
  misc_RNA (1)...(19): siRNA sense strand
gcugacgccugccuuccau

SEQ ID NO: 55494 - RNA, 19 nt, Homo sapiens
  misc_RNA (1)...(19): siRNA sense strand
caaugagagugugaacauc

SEQ ID NO: 55495 - RNA, 19 nt, Homo sapiens
  misc_RNA (1)...(19): siRNA sense strand
ccgugagccuaaagagauu

SEQ ID NO: 55496 - RNA, 19 nt, Homo sapiens
  misc_RNA (1)...(19): siRNA sense strand
gugcccgucuggacauguu

SEQ ID NO: 55497 - RNA, 19 nt, Homo sapiens
  misc_RNA (1)...(19): siRNA sense strand
gagccuaaagagauugaau

SEQ ID NO: 55498 - RNA, 19 nt, Homo sapiens
  misc_RNA (1)...(19): siRNA sense strand
gaagaaguuguccgaugag

SEQ ID NO: 55499 - RNA, 19 nt, Homo sapiens
  misc_RNA (1)...(19): siRNA sense strand
accagcagauccuccugua

SEQ ID NO: 55500 - RNA, 19 nt, Homo sapiens
  misc_RNA (1)...(19): siRNA sense strand
agacuuuggacuucauuga

SEQ ID NO: 55501 - RNA, 19 nt, Homo sapiens
  misc_RNA (1)...(19): siRNA sense strand
cagauccuccuguacauag

SEQ ID NO: 55502 - RNA, 19 nt, Homo sapiens
  misc_RNA (1)...(19): siRNA sense strand
gcugagugcuggugaaaag

SEQ ID NO: 55503 - RNA, 19 nt, Homo sapiens
  misc_RNA (1)...(19): siRNA sense strand
uguaccaccuugcaaagca

SEQ ID NO: 55504 - RNA, 19 nt, Homo sapiens
  misc_RNA (1)...(19): siRNA sense strand
accuauaccuucuaugaca

SEQ ID NO: 55505 - RNA, 19 nt, Homo sapiens
  misc_RNA (1)...(19): siRNA sense strand
acuuuggacuucauugaug

SEQ ID NO: 55506 - RNA, 19 nt, Homo sapiens
  misc_RNA (1)...(19): siRNA sense strand
caccugggccugauucaca

SEQ ID NO: 55507 - RNA, 19 nt, Homo sapiens
  misc_RNA (1)...(19): siRNA sense strand
ggaaggucuccuauacaca

SEQ ID NO: 55508 - RNA, 19 nt, Homo sapiens
  misc_RNA (1)...(19): siRNA sense strand
gccaaggccaaauccaaga

SEQ ID NO: 55509 - RNA, 19 nt, Homo sapiens
  misc_RNA (1)...(19): siRNA sense strand
cugcugcacccaagacauu

SEQ ID NO: 55510 - RNA, 19 nt, Homo sapiens
  misc_RNA (1)...(19): siRNA sense strand
auccuggccuggaccuaua

SEQ ID NO: 55511 - RNA, 19 nt, Homo sapiens
  misc_RNA (1)...(19): siRNA sense strand
gcugagcaaggaugaagau

SEQ ID NO: 55512 - RNA, 19 nt, Homo sapiens
  misc_RNA (1)...(19): siRNA sense strand
acgccugccuuccauuuca

SEQ ID NO: 55513 - RNA, 19 nt, Homo sapiens
  misc_RNA (1)...(19): siRNA sense strand
uuaucugccucaucagugu

SEQ ID NO: 55514 - RNA, 19 nt, Homo sapiens
  misc_RNA (1)...(19): siRNA sense strand
cugacaccuuuauguuuga

SEQ ID NO: 55515 - RNA, 19 nt, Homo sapiens
  misc_RNA (1)...(19): siRNA sense strand
auauauugccgccaucuug

SEQ ID NO: 55516 - RNA, 19 nt, Homo sapiens
  misc_RNA (1)...(19): siRNA sense strand
agaagcccagugaauauau

SEQ ID NO: 55517 - RNA, 19 nt, Homo sapiens
  misc_RNA (1)...(19): siRNA sense strand
aaugagagugugaacauca

SEQ ID NO: 55518 - RNA, 19 nt, Homo sapiens
  misc_RNA (1)...(19): siRNA sense strand
ccugaagcccuauaugaag

SEQ ID NO: 55519 - RNA, 19 nt, Homo sapiens
  misc_RNA (1)...(19): siRNA sense strand
ugcuccagcugccauugua

SEQ ID NO: 55520 - RNA, 19 nt, Homo sapiens
  misc_RNA (1)...(19): siRNA sense strand
gaauauauugccgccaucu

SEQ ID NO: 55521 - RNA, 19 nt, Homo sapiens
  misc_RNA (1)...(19): siRNA sense strand
gcucaaggaucuaaauuua

SEQ ID NO: 55522 - RNA, 19 nt, Homo sapiens
  misc_RNA (1)...(19): siRNA sense strand
uaacauagcccacuuuaaa

SEQ ID NO: 55523 - RNA, 19 nt, Homo sapiens
  misc_RNA (1)...(19): siRNA sense strand
gagagaaucugccuccuuu

SEQ ID NO: 55524 - RNA, 19 nt, Homo sapiens
  misc_RNA (1)...(19): siRNA sense strand
gaaaggaaaucagaaguca

SEQ ID NO: 55525 - RNA, 19 nt, Homo sapiens
  misc_RNA (1)...(19): siRNA sense strand
cagcauacauccucaacua

SEQ ID NO: 55526 - RNA, 19 nt, Homo sapiens
  misc_RNA (1)...(19): siRNA sense strand
ccacuaugcuucguuuaua

SEQ ID NO: 55527 - RNA, 19 nt, Homo sapiens
  misc_RNA (1)...(19): siRNA sense strand
gaagggaguugcauacgau

SEQ ID NO: 55528 - RNA, 19 nt, Homo sapiens
  misc_RNA (1)...(19): siRNA sense strand
agacuuagaccuccuauaa

SEQ ID NO: 55529 - RNA, 19 nt, Homo sapiens
  misc_RNA (1)...(19): siRNA sense strand
gaaaaguccuccauacauu

SEQ ID NO: 55530 - RNA, 19 nt, Homo sapiens
  misc_RNA (1)...(19): siRNA sense strand
gaagucaacucaaugaaaa

SEQ ID NO: 55531 - RNA, 19 nt, Homo sapiens
  misc_RNA (1)...(19): siRNA sense strand
cagcauguuucuauaauug

SEQ ID NO: 55532 - RNA, 19 nt, Homo sapiens
  misc_RNA (1)...(19): siRNA sense strand
gagaaucugccuccuuuaa

SEQ ID NO: 55533 - RNA, 19 nt, Homo sapiens
  misc_RNA (1)...(19): siRNA sense strand
gaaguauggaccuguauuu

SEQ ID NO: 55534 - RNA, 19 nt, Homo sapiens
  misc_RNA (1)...(19): siRNA sense strand
ggacaucagguguguguuu

SEQ ID NO: 55535 - RNA, 19 nt, Homo sapiens
  misc_RNA (1)...(19): siRNA sense strand
gaaaucagaagucaacuca

SEQ ID NO: 55536 - RNA, 19 nt, Homo sapiens
  misc_RNA (1)...(19): siRNA sense strand
guagaacgccuggacuuua

SEQ ID NO: 55537 - RNA, 19 nt, Homo sapiens
  misc_RNA (1)...(19): siRNA sense strand
gaucgcuacuuacaggaua

SEQ ID NO: 55538 - RNA, 19 nt, Homo sapiens
  misc_RNA (1)...(19): siRNA sense strand
uagaacgccuggacuuuaa

SEQ ID NO: 55539 - RNA, 19 nt, Homo sapiens
  misc_RNA (1)...(19): siRNA sense strand
ggaccuguauuuaguuuua

SEQ ID NO: 55540 - RNA, 19 nt, Homo sapiens
  misc_RNA (1)...(19): siRNA sense strand
ggaagggaguugcauacga

SEQ ID NO: 55541 - RNA, 19 nt, Homo sapiens
  misc_RNA (1)...(19): siRNA sense strand
gcacagcuguaugcagauu

SEQ ID NO: 55542 - RNA, 19 nt, Homo sapiens
  misc_RNA (1)...(19): siRNA sense strand
guauggaccuguauuuagu

SEQ ID NO: 55543 - RNA, 19 nt, Homo sapiens
  misc_RNA (1)...(19): siRNA sense strand
ucucauugauggauacuuu

SEQ ID NO: 55544 - RNA, 19 nt, Homo sapiens
  misc_RNA (1)...(19): siRNA sense strand
ugagaaguauggaccugua

SEQ ID NO: 55545 - RNA, 19 nt, Homo sapiens
  misc_RNA (1)...(19): siRNA sense strand
ucaaagacuuaaagacuca

SEQ ID NO: 55546 - RNA, 19 nt, Homo sapiens
  misc_RNA (1)...(19): siRNA sense strand
aaucagaagucaacucaau

SEQ ID NO: 55547 - RNA, 19 nt, Homo sapiens
  misc_RNA (1)...(19): siRNA sense strand
gaaucugccuccuuuaacu

SEQ ID NO: 55548 - RNA, 19 nt, Homo sapiens
  misc_RNA (1)...(19): siRNA sense strand
cauacauccucaacuacua

SEQ ID NO: 55549 - RNA, 19 nt, Homo sapiens
  misc_RNA (1)...(19): siRNA sense strand
gguccacuaugcuucguuu

SEQ ID NO: 55550 - RNA, 19 nt, Homo sapiens
  misc_RNA (1)...(19): siRNA sense strand
cagggaugcuuauuggauu

SEQ ID NO: 55551 - RNA, 19 nt, Homo sapiens
  misc_RNA (1)...(19): siRNA sense strand
acuuagaccuccuauaaug

SEQ ID NO: 55552 - RNA, 19 nt, Homo sapiens
  misc_RNA (1)...(19): siRNA sense strand
aggaauacuuugagaguug

SEQ ID NO: 55553 - RNA, 19 nt, Homo sapiens
  misc_RNA (1)...(19): siRNA sense strand
gggaaaaguuugccuaugu

SEQ ID NO: 55554 - RNA, 19 nt, Homo sapiens
  misc_RNA (1)...(19): siRNA sense strand
ggccagaacuccucagacu

SEQ ID NO: 55555 - RNA, 19 nt, Homo sapiens
  misc_RNA (1)...(19): siRNA sense strand
ucuccaaacuuuacuagau

SEQ ID NO: 55556 - RNA, 19 nt, Homo sapiens
  misc_RNA (1)...(19): siRNA sense strand
ggaaaggaaaucagaaguc

SEQ ID NO: 55557 - RNA, 19 nt, Homo sapiens
  misc_RNA (1)...(19): siRNA sense strand
uaauccugaucgcuacuua

SEQ ID NO: 55558 - RNA, 19 nt, Homo sapiens
  misc_RNA (1)...(19): siRNA sense strand
gcagggaugcuuauuggau

SEQ ID NO: 55559 - RNA, 19 nt, Homo sapiens
  misc_RNA (1)...(19): siRNA sense strand
agaacccaguuauccguua

SEQ ID NO: 55560 - RNA, 19 nt, Homo sapiens
  misc_RNA (1)...(19): siRNA sense strand
ugacauucuccaaacuuua

SEQ ID NO: 55561 - RNA, 19 nt, Homo sapiens
  misc_RNA (1)...(19): siRNA sense strand
gacauuuacuuaccuucug

SEQ ID NO: 55562 - RNA, 19 nt, Homo sapiens
  misc_RNA (1)...(19): siRNA sense strand
gaacccaguuauccguuac

SEQ ID NO: 55563 - RNA, 19 nt, Homo sapiens
  misc_RNA (1)...(19): siRNA sense strand
gaauuugaucucauugaug

SEQ ID NO: 55564 - RNA, 19 nt, Homo sapiens
  misc_RNA (1)...(19): siRNA sense strand
ccagaacuccucagacugu

SEQ ID NO: 55565 - RNA, 19 nt, Homo sapiens
  misc_RNA (1)...(19): siRNA sense strand
ucagaagucaacucaauga

SEQ ID NO: 55566 - RNA, 19 nt, Homo sapiens
  misc_RNA (1)...(19): siRNA sense strand
gggaaaauuuugccuaugu

SEQ ID NO: 55567 - RNA, 19 nt, Homo sapiens
  misc_RNA (1)...(19): siRNA sense strand
uuuaacagcuagccauugu

SEQ ID NO: 55568 - RNA, 19 nt, Homo sapiens
  misc_RNA (1)...(19): siRNA sense strand
gguagaacgccuggacuuu

SEQ ID NO: 55569 - RNA, 19 nt, Homo sapiens
  misc_RNA (1)...(19): siRNA sense strand
agaagucaacucaaugaaa

SEQ ID NO: 55570 - RNA, 19 nt, Homo sapiens
  misc_RNA (1)...(19): siRNA sense strand
gcauggaaaggaaaucaga

SEQ ID NO: 55571 - RNA, 19 nt, Homo sapiens
  misc_RNA (1)...(19): siRNA sense strand
cgaugugccuaauccaguu

SEQ ID NO: 55572 - RNA, 19 nt, Homo sapiens
  misc_RNA (1)...(19): siRNA sense strand
uaaagacucauggguagaa

SEQ ID NO: 55573 - RNA, 19 nt, Homo sapiens
  misc_RNA (1)...(19): siRNA sense strand
gacaucagguguguguuuc

SEQ ID NO: 55574 - RNA, 19 nt, Homo sapiens
  misc_RNA (1)...(19): siRNA sense strand
uuacuugaucgcuguauaa

SEQ ID NO: 55575 - RNA, 19 nt, Homo sapiens
  misc_RNA (1)...(19): siRNA sense strand
gagcucaucgggaaaucaa

SEQ ID NO: 55576 - RNA, 19 nt, Homo sapiens
  misc_RNA (1)...(19): siRNA sense strand
gggcguccuuugacugaug

SEQ ID NO: 55577 - RNA, 19 nt, Homo sapiens
  misc_RNA (1)...(19): siRNA sense strand
gaugacauucuccaaacuu

SEQ ID NO: 55578 - RNA, 19 nt, Homo sapiens
  misc_RNA (1)...(19): siRNA sense strand
aaagguagcacagcuguau

SEQ ID NO: 55579 - RNA, 19 nt, Homo sapiens
  misc_RNA (1)...(19): siRNA sense strand
agggaugcuuauuggauua

SEQ ID NO: 55580 - RNA, 19 nt, Homo sapiens
  misc_RNA (1)...(19): siRNA sense strand
ccaguuauccguuacaaac

SEQ ID NO: 55581 - RNA, 19 nt, Homo sapiens
  misc_RNA (1)...(19): siRNA sense strand
ggaaaauuuugccuauguu

SEQ ID NO: 55582 - RNA, 19 nt, Homo sapiens
  misc_RNA (1)...(19): siRNA sense strand
ggaaaaguuugccuaugug

SEQ ID NO: 55583 - RNA, 19 nt, Homo sapiens
  misc_RNA (1)...(19): siRNA sense strand
gaaugcagaagaugucuac

SEQ ID NO: 55584 - RNA, 19 nt, Homo sapiens
  misc_RNA (1)...(19): siRNA sense strand
cacuaugcuucguuuauau

SEQ ID NO: 55585 - RNA, 19 nt, Homo sapiens
  misc_RNA (1)...(19): siRNA sense strand
gggcgucaucguuguauug

SEQ ID NO: 55586 - RNA, 19 nt, Homo sapiens
  misc_RNA (1)...(19): siRNA sense strand
ugccauagcauuugggaaa

SEQ ID NO: 55587 - RNA, 19 nt, Homo sapiens
  misc_RNA (1)...(19): siRNA sense strand
acagcuguaugcagauuug

SEQ ID NO: 55588 - RNA, 19 nt, Homo sapiens
  misc_RNA (1)...(19): siRNA sense strand
aagacaauuugguccacua

SEQ ID NO: 55589 - RNA, 19 nt, Homo sapiens
  misc_RNA (1)...(19): siRNA sense strand
ggagcugggcgucaucguu

SEQ ID NO: 55590 - RNA, 19 nt, Homo sapiens
  misc_RNA (1)...(19): siRNA sense strand
guaugcagauuuggaugga

SEQ ID NO: 55591 - RNA, 19 nt, Homo sapiens
  misc_RNA (1)...(19): siRNA sense strand
ugcagaagaugucuacagu

SEQ ID NO: 55592 - RNA, 19 nt, Homo sapiens
  misc_RNA (1)...(19): siRNA sense strand
acaauuugguccacuaugc

SEQ ID NO: 55593 - RNA, 19 nt, Homo sapiens
  misc_RNA (1)...(19): siRNA sense strand
gccaggcgauggagaaggu

SEQ ID NO: 55594 - RNA, 19 nt, Homo sapiens
  misc_RNA (1)...(19): siRNA sense strand
uuugacugaugaugaagua

SEQ ID NO: 55595 - RNA, 19 nt, Homo sapiens
  misc_RNA (1)...(19): siRNA sense strand
gcggcaaccucuuguccau

SEQ ID NO: 55596 - RNA, 19 nt, Homo sapiens
  misc_RNA (1)...(19): siRNA sense strand
aaaguggccuuaacauagc

SEQ ID NO: 55597 - RNA, 19 nt, Homo sapiens
  misc_RNA (1)...(19): siRNA sense strand
agaccugaaugcagaagau

SEQ ID NO: 55598 - RNA, 19 nt, Homo sapiens
  misc_RNA (1)...(19): siRNA sense strand
gaccagcucaaggaucuaa

SEQ ID NO: 55599 - RNA, 19 nt, Homo sapiens
  misc_RNA (1)...(19): siRNA sense strand
uaacuuaugaccagcucaa

SEQ ID NO: 55600 - RNA, 19 nt, Homo sapiens
  misc_RNA (1)...(19): siRNA sense strand
cuccaaacuuuacuagaug

SEQ ID NO: 55601 - RNA, 19 nt, Homo sapiens
  misc_RNA (1)...(19): siRNA sense strand
caucgggaaaucaaggaua

SEQ ID NO: 55602 - RNA, 19 nt, Homo sapiens
  misc_RNA (1)...(19): siRNA sense strand
gaaaaugcauaugagaagu

SEQ ID NO: 55603 - RNA, 19 nt, Homo sapiens
  misc_RNA (1)...(19): siRNA sense strand
cuuaacauagcccacuuua

SEQ ID NO: 55604 - RNA, 19 nt, Homo sapiens
  misc_RNA (1)...(19): siRNA sense strand
aaguauggaccuguauuua

SEQ ID NO: 55605 - RNA, 19 nt, Homo sapiens
  misc_RNA (1)...(19): siRNA sense strand
gaacgccuggacuuuaauc

SEQ ID NO: 55606 - RNA, 19 nt, Homo sapiens
  misc_RNA (1)...(19): siRNA sense strand
ggaaaucagaagucaacuc

SEQ ID NO: 55607 - RNA, 19 nt, Homo sapiens
  misc_RNA (1)...(19): siRNA sense strand
gcauacauccucaacuacu

SEQ ID NO: 55608 - RNA, 19 nt, Homo sapiens
  misc_RNA (1)...(19): siRNA sense strand
cuauaaggcaauccagaaa

SEQ ID NO: 55609 - RNA, 19 nt, Homo sapiens
  misc_RNA (1)...(19): siRNA sense strand
agauuuggauggagguuuc

SEQ ID NO: 55610 - RNA, 19 nt, Homo sapiens
  misc_RNA (1)...(19): siRNA sense strand
ucaacucaaugaaaaggua

SEQ ID NO: 55611 - RNA, 19 nt, Homo sapiens
  misc_RNA (1)...(19): siRNA sense strand
caaacgaagaucaaaauga

SEQ ID NO: 55612 - RNA, 19 nt, Homo sapiens
  misc_RNA (1)...(19): siRNA sense strand
gacaggcggcaaccucuug

SEQ ID NO: 55613 - RNA, 19 nt, Homo sapiens
  misc_RNA (1)...(19): siRNA sense strand
ucuauaaggcaauccagaa

SEQ ID NO: 55614 - RNA, 19 nt, Homo sapiens
  misc_RNA (1)...(19): siRNA sense strand
gauacuuucccacugugaa

SEQ ID NO: 55615 - RNA, 19 nt, Homo sapiens
  misc_RNA (1)...(19): siRNA sense strand
ggaugggcguccuuugacu

SEQ ID NO: 55616 - RNA, 19 nt, Homo sapiens
  misc_RNA (1)...(19): siRNA sense strand
uuuacuagaugcuacauac

SEQ ID NO: 55617 - RNA, 19 nt, Homo sapiens
  misc_RNA (1)...(19): siRNA sense strand
gacauucuccaaacuuuac

SEQ ID NO: 55618 - RNA, 19 nt, Homo sapiens
  misc_RNA (1)...(19): siRNA sense strand
gccuuugccuaguuucaga

SEQ ID NO: 55619 - RNA, 19 nt, Homo sapiens
  misc_RNA (1)...(19): siRNA sense strand
gagaaguauggaccuguau

SEQ ID NO: 55620 - RNA, 19 nt, Homo sapiens
  misc_RNA (1)...(19): siRNA sense strand
cagcucaaggaucuaaauu

SEQ ID NO: 55621 - RNA, 19 nt, Homo sapiens
  misc_RNA (1)...(19): siRNA sense strand
gaaagcagcuacugaagaa

SEQ ID NO: 55622 - RNA, 19 nt, Homo sapiens
  misc_RNA (1)...(19): siRNA sense strand
gcacuuagauccagaaauc

SEQ ID NO: 55623 - RNA, 19 nt, Homo sapiens
  misc_RNA (1)...(19): siRNA sense strand
guaauggacucaaguuaaa

SEQ ID NO: 55624 - RNA, 19 nt, Homo sapiens
  misc_RNA (1)...(19): siRNA sense strand
ggacucaaguuaaaguauu

SEQ ID NO: 55625 - RNA, 19 nt, Homo sapiens
  misc_RNA (1)...(19): siRNA sense strand
aaacgacacuuucaucaaa

SEQ ID NO: 55626 - RNA, 19 nt, Homo sapiens
  misc_RNA (1)...(19): siRNA sense strand
gaagcuggguauuuaacua

SEQ ID NO: 55627 - RNA, 19 nt, Homo sapiens
  misc_RNA (1)...(19): siRNA sense strand
ugaaugaccugccaguauu

SEQ ID NO: 55628 - RNA, 19 nt, Homo sapiens
  misc_RNA (1)...(19): siRNA sense strand
ggaaggcaauccuauuugu

SEQ ID NO: 55629 - RNA, 19 nt, Homo sapiens
  misc_RNA (1)...(19): siRNA sense strand
guuugaagcuggguauuua

SEQ ID NO: 55630 - RNA, 19 nt, Homo sapiens
  misc_RNA (1)...(19): siRNA sense strand
gacaaagacuaccuucuau

SEQ ID NO: 55631 - RNA, 19 nt, Homo sapiens
  misc_RNA (1)...(19): siRNA sense strand
gaaagcacauauucuaaac

SEQ ID NO: 55632 - RNA, 19 nt, Homo sapiens
  misc_RNA (1)...(19): siRNA sense strand
ggaauuaggagaaggcaaa

SEQ ID NO: 55633 - RNA, 19 nt, Homo sapiens
  misc_RNA (1)...(19): siRNA sense strand
gaagggauguauucuuucu

SEQ ID NO: 55634 - RNA, 19 nt, Homo sapiens
  misc_RNA (1)...(19): siRNA sense strand
caaagacuaccuucuauug

SEQ ID NO: 55635 - RNA, 19 nt, Homo sapiens
  misc_RNA (1)...(19): siRNA sense strand
uaaggaggauuucacuuug

SEQ ID NO: 55636 - RNA, 19 nt, Homo sapiens
  misc_RNA (1)...(19): siRNA sense strand
ggacagcuaaggaggauuu

SEQ ID NO: 55637 - RNA, 19 nt, Homo sapiens
  misc_RNA (1)...(19): siRNA sense strand
gggcugugcucugcaauuu

SEQ ID NO: 55638 - RNA, 19 nt, Homo sapiens
  misc_RNA (1)...(19): siRNA sense strand
aagacuaccuucuauugua

SEQ ID NO: 55639 - RNA, 19 nt, Homo sapiens
  misc_RNA (1)...(19): siRNA sense strand
gcacauauucuaaacaauc

SEQ ID NO: 55640 - RNA, 19 nt, Homo sapiens
  misc_RNA (1)...(19): siRNA sense strand
gaacccagaagcaaugaaa

SEQ ID NO: 55641 - RNA, 19 nt, Homo sapiens
  misc_RNA (1)...(19): siRNA sense strand
agacaaagacuaccuucua

SEQ ID NO: 55642 - RNA, 19 nt, Homo sapiens
  misc_RNA (1)...(19): siRNA sense strand
gaaugaccugccaguauua

SEQ ID NO: 55643 - RNA, 19 nt, Homo sapiens
  misc_RNA (1)...(19): siRNA sense strand
gcaaaucaaaggaaacaug

SEQ ID NO: 55644 - RNA, 19 nt, Homo sapiens
  misc_RNA (1)...(19): siRNA sense strand
gcuacaauauguccuggaa

SEQ ID NO: 55645 - RNA, 19 nt, Homo sapiens
  misc_RNA (1)...(19): siRNA sense strand
agacuaccuucuauuguaa

SEQ ID NO: 55646 - RNA, 19 nt, Homo sapiens
  misc_RNA (1)...(19): siRNA sense strand
cuaaggaggauuucacuuu

SEQ ID NO: 55647 - RNA, 19 nt, Homo sapiens
  misc_RNA (1)...(19): siRNA sense strand
uacaauauguccuggaaga

SEQ ID NO: 55648 - RNA, 19 nt, Homo sapiens
  misc_RNA (1)...(19): siRNA sense strand
cagagcaaaucaaaggaaa

SEQ ID NO: 55649 - RNA, 19 nt, Homo sapiens
  misc_RNA (1)...(19): siRNA sense strand
gcagggccaugccuugaau

SEQ ID NO: 55650 - RNA, 19 nt, Homo sapiens
  misc_RNA (1)...(19): siRNA sense strand
aaacauaaacgacacuuuc

SEQ ID NO: 55651 - RNA, 19 nt, Homo sapiens
  misc_RNA (1)...(19): siRNA sense strand
caagcuaaauguccaccuu

SEQ ID NO: 55652 - RNA, 19 nt, Homo sapiens
  misc_RNA (1)...(19): siRNA sense strand
gaccuccagucuccucuaa

SEQ ID NO: 55653 - RNA, 19 nt, Homo sapiens
  misc_RNA (1)...(19): siRNA sense strand
ugauucugaugcuuucuua

SEQ ID NO: 55654 - RNA, 19 nt, Homo sapiens
  misc_RNA (1)...(19): siRNA sense strand
ggauggaaauaccacugaa

SEQ ID NO: 55655 - RNA, 19 nt, Homo sapiens
  misc_RNA (1)...(19): siRNA sense strand
ugacagaagggauguauuc

SEQ ID NO: 55656 - RNA, 19 nt, Homo sapiens
  misc_RNA (1)...(19): siRNA sense strand
gaccacaucuuugauuugg

SEQ ID NO: 55657 - RNA, 19 nt, Homo sapiens
  misc_RNA (1)...(19): siRNA sense strand
gauagcaucauagcucuuu

SEQ ID NO: 55658 - RNA, 19 nt, Homo sapiens
  misc_RNA (1)...(19): siRNA sense strand
ugaaccaccucuagagaau

SEQ ID NO: 55659 - RNA, 19 nt, Homo sapiens
  misc_RNA (1)...(19): siRNA sense strand
gaaggcaauccuauuuguu

SEQ ID NO: 55660 - RNA, 19 nt, Homo sapiens
  misc_RNA (1)...(19): siRNA sense strand
gaagauuguucgcuaucca

SEQ ID NO: 55661 - RNA, 19 nt, Homo sapiens
  misc_RNA (1)...(19): siRNA sense strand
ccgaaaagauagcaucaua

SEQ ID NO: 55662 - RNA, 19 nt, Homo sapiens
  misc_RNA (1)...(19): siRNA sense strand
aaacaaucuugacaacuuc

SEQ ID NO: 55663 - RNA, 19 nt, Homo sapiens
  misc_RNA (1)...(19): siRNA sense strand
gcgacuuucuggaguuuau

SEQ ID NO: 55664 - RNA, 19 nt, Homo sapiens
  misc_RNA (1)...(19): siRNA sense strand
gaaggcauuugggcacaga

SEQ ID NO: 55665 - RNA, 19 nt, Homo sapiens
  misc_RNA (1)...(19): siRNA sense strand
ggauuucacuuugcaccuu

SEQ ID NO: 55666 - RNA, 19 nt, Homo sapiens
  misc_RNA (1)...(19): siRNA sense strand
acacagaaagcacauauuc

SEQ ID NO: 55667 - RNA, 19 nt, Homo sapiens
  misc_RNA (1)...(19): siRNA sense strand
gcaaacuaaugggaaaaua

SEQ ID NO: 55668 - RNA, 19 nt, Homo sapiens
  misc_RNA (1)...(19): siRNA sense strand
aauauguccuggaagauug

SEQ ID NO: 55669 - RNA, 19 nt, Homo sapiens
  misc_RNA (1)...(19): siRNA sense strand
uguaauggacucaaguuaa

SEQ ID NO: 55670 - RNA, 19 nt, Homo sapiens
  misc_RNA (1)...(19): siRNA sense strand
ggauguauucuuucugcua

SEQ ID NO: 55671 - RNA, 19 nt, Homo sapiens
  misc_RNA (1)...(19): siRNA sense strand
ggaaagcaucucagaacug

SEQ ID NO: 55672 - RNA, 19 nt, Homo sapiens
  misc_RNA (1)...(19): siRNA sense strand
caauauguccuggaagauu

SEQ ID NO: 55673 - RNA, 19 nt, Homo sapiens
  misc_RNA (1)...(19): siRNA sense strand
gaucagccugcgcauguuu

SEQ ID NO: 55674 - RNA, 19 nt, Homo sapiens
  misc_RNA (1)...(19): siRNA sense strand
gcugugcucugcaauuugg

SEQ ID NO: 55675 - RNA, 19 nt, Homo sapiens
  misc_RNA (1)...(19): siRNA sense strand
gcucuuuacccacaguuaa

SEQ ID NO: 55676 - RNA, 19 nt, Homo sapiens
  misc_RNA (1)...(19): siRNA sense strand
ucaagcaauucgacaaagu

SEQ ID NO: 55677 - RNA, 19 nt, Homo sapiens
  misc_RNA (1)...(19): siRNA sense strand
ugaaagcagcuacugaaga

SEQ ID NO: 55678 - RNA, 19 nt, Homo sapiens
  misc_RNA (1)...(19): siRNA sense strand
gagcaaaucaaaggaaaca

SEQ ID NO: 55679 - RNA, 19 nt, Homo sapiens
  misc_RNA (1)...(19): siRNA sense strand
gggaaagcaucucagaacu

SEQ ID NO: 55680 - RNA, 19 nt, Homo sapiens
  misc_RNA (1)...(19): siRNA sense strand
ggacgguuccuacaacauc

SEQ ID NO: 55681 - RNA, 19 nt, Homo sapiens
  misc_RNA (1)...(19): siRNA sense strand
gaucgggagcuacaauaug

SEQ ID NO: 55682 - RNA, 19 nt, Homo sapiens
  misc_RNA (1)...(19): siRNA sense strand
uaaacgacacuuucaucaa

SEQ ID NO: 55683 - RNA, 19 nt, Homo sapiens
  misc_RNA (1)...(19): siRNA sense strand
gcuaccgagugauguuuga

SEQ ID NO: 55684 - RNA, 19 nt, Homo sapiens
  misc_RNA (1)...(19): siRNA sense strand
gauggaaauaccacugaaa

SEQ ID NO: 55685 - RNA, 19 nt, Homo sapiens
  misc_RNA (1)...(19): siRNA sense strand
ggaagacaaagacuaccuu

SEQ ID NO: 55686 - RNA, 19 nt, Homo sapiens
  misc_RNA (1)...(19): siRNA sense strand
aaggcaauccuauuuguuu

SEQ ID NO: 55687 - RNA, 19 nt, Homo sapiens
  misc_RNA (1)...(19): siRNA sense strand
caaugaaagcagcuacuga

SEQ ID NO: 55688 - RNA, 19 nt, Homo sapiens
  misc_RNA (1)...(19): siRNA sense strand
acccagacccuuugacuuu

SEQ ID NO: 55689 - RNA, 19 nt, Homo sapiens
  misc_RNA (1)...(19): siRNA sense strand
gaaaaccuccaacguauca

SEQ ID NO: 55690 - RNA, 19 nt, Homo sapiens
  misc_RNA (1)...(19): siRNA sense strand
cagcgacuuucuggaguuu

SEQ ID NO: 55691 - RNA, 19 nt, Homo sapiens
  misc_RNA (1)...(19): siRNA sense strand
gcaauccuauuuguuugag

SEQ ID NO: 55692 - RNA, 19 nt, Homo sapiens
  misc_RNA (1)...(19): siRNA sense strand
ccugcaaacuaaugggaaa

SEQ ID NO: 55693 - RNA, 19 nt, Homo sapiens
  misc_RNA (1)...(19): siRNA sense strand
aaugaaagcagcuacugaa

SEQ ID NO: 55694 - RNA, 19 nt, Homo sapiens
  misc_RNA (1)...(19): siRNA sense strand
gagggaaagcaucucagaa

SEQ ID NO: 55695 - RNA, 19 nt, Homo sapiens
  misc_RNA (1)...(19): siRNA sense strand
gagucaagcagaacugaau

SEQ ID NO: 55696 - RNA, 19 nt, Homo sapiens
  misc_RNA (1)...(19): siRNA sense strand
gugccaauccucuugaguu

SEQ ID NO: 55697 - RNA, 19 nt, Homo sapiens
  misc_RNA (1)...(19): siRNA sense strand
ggaucgggagcuacaauau

SEQ ID NO: 55698 - RNA, 19 nt, Homo sapiens
  misc_RNA (1)...(19): siRNA sense strand
cauaaacgacacuuucauc

SEQ ID NO: 55699 - RNA, 19 nt, Homo sapiens
  misc_RNA (1)...(19): siRNA sense strand
uccacgaaaucaagcaauu

SEQ ID NO: 55700 - RNA, 19 nt, Homo sapiens
  misc_RNA (1)...(19): siRNA sense strand
gugaaccaccucuagagaa

SEQ ID NO: 55701 - RNA, 19 nt, Homo sapiens
  misc_RNA (1)...(19): siRNA sense strand
ccagacccuuugacuuuua

SEQ ID NO: 55702 - RNA, 19 nt, Homo sapiens
  misc_RNA (1)...(19): siRNA sense strand
caaaucccuugucauacca

SEQ ID NO: 55703 - RNA, 19 nt, Homo sapiens
  misc_RNA (1)...(19): siRNA sense strand
gcaaugaaagcagcuacug

SEQ ID NO: 55704 - RNA, 19 nt, Homo sapiens
  misc_RNA (1)...(19): siRNA sense strand
ggaaauaccacugaaaaca

SEQ ID NO: 55705 - RNA, 19 nt, Homo sapiens
  misc_RNA (1)...(19): siRNA sense strand
uauagagggccaagcuaaa

SEQ ID NO: 55706 - RNA, 19 nt, Homo sapiens
  misc_RNA (1)...(19): siRNA sense strand
uaccuucuauuguaaugga

SEQ ID NO: 55707 - RNA, 19 nt, Homo sapiens
  misc_RNA (1)...(19): siRNA sense strand
acaaagacuaccuucuauu

SEQ ID NO: 55708 - RNA, 19 nt, Homo sapiens
  misc_RNA (1)...(19): siRNA sense strand
acggaaagcaugauggaaa

SEQ ID NO: 55709 - RNA, 19 nt, Homo sapiens
  misc_RNA (1)...(19): siRNA sense strand
uuauagagggccaagcuaa

SEQ ID NO: 55710 - RNA, 19 nt, Homo sapiens
  misc_RNA (1)...(19): siRNA sense strand
ugucauaccauaagguguu

SEQ ID NO: 55711 - RNA, 19 nt, Homo sapiens
  misc_RNA (1)...(19): siRNA sense strand
ucuaaacaaucuugacaac

SEQ ID NO: 55712 - RNA, 19 nt, Homo sapiens
  misc_RNA (1)...(19): siRNA sense strand
acacacagaaagcacauau

SEQ ID NO: 55713 - RNA, 19 nt, Homo sapiens
  misc_RNA (1)...(19): siRNA sense strand
gcuguugucuauggcuuau

SEQ ID NO: 55714 - RNA, 19 nt, Homo sapiens
  misc_RNA (1)...(19): siRNA sense strand
cugaaugaccugccaguau

SEQ ID NO: 55715 - RNA, 19 nt, Homo sapiens
  misc_RNA (1)...(19): siRNA sense strand
cgggcaggcuugggcauuu

SEQ ID NO: 55716 - RNA, 19 nt, Homo sapiens
  misc_RNA (1)...(19): siRNA sense strand
cacaguuaaugcacuuaga

SEQ ID NO: 55717 - RNA, 19 nt, Homo sapiens
  misc_RNA (1)...(19): siRNA sense strand
ugaccugccaguauuaaau

SEQ ID NO: 55718 - RNA, 19 nt, Homo sapiens
  misc_RNA (1)...(19): siRNA sense strand
ccuccaacguaucaugaga

SEQ ID NO: 55719 - RNA, 19 nt, Homo sapiens
  misc_RNA (1)...(19): siRNA sense strand
aggaaucgcugaggcuuuc

SEQ ID NO: 55720 - RNA, 19 nt, Homo sapiens
  misc_RNA (1)...(19): siRNA sense strand
uaacuaucuuuggcagaga

SEQ ID NO: 55721 - RNA, 19 nt, Homo sapiens
  misc_RNA (1)...(19): siRNA sense strand
ggagaaagguggucacagu

SEQ ID NO: 55722 - RNA, 19 nt, Homo sapiens
  misc_RNA (1)...(19): siRNA sense strand
gcacagcaguggccaucuu

SEQ ID NO: 55723 - RNA, 19 nt, Homo sapiens
  misc_RNA (1)...(19): siRNA sense strand
gguccaagcucccaauauc

SEQ ID NO: 55724 - RNA, 19 nt, Homo sapiens
  misc_RNA (1)...(19): siRNA sense strand
ucaacuacgugcacuacua

SEQ ID NO: 55725 - RNA, 19 nt, Homo sapiens
  misc_RNA (1)...(19): siRNA sense strand
ggagaugugugucaacuac

SEQ ID NO: 55726 - RNA, 19 nt, Homo sapiens
  misc_RNA (1)...(19): siRNA sense strand
gcacguacaacacggaaga

SEQ ID NO: 55727 - RNA, 19 nt, Homo sapiens
  misc_RNA (1)...(19): siRNA sense strand
ugaaggcccuguacagcuu

SEQ ID NO: 55728 - RNA, 19 nt, Homo sapiens
  misc_RNA (1)...(19): siRNA sense strand
ccacaacccacuggugaua

SEQ ID NO: 55729 - RNA, 19 nt, Homo sapiens
  misc_RNA (1)...(19): siRNA sense strand
caggagauccgcauguuga

SEQ ID NO: 55730 - RNA, 19 nt, Homo sapiens
  misc_RNA (1)...(19): siRNA sense strand
ccucucagcuccacacaca

SEQ ID NO: 55731 - RNA, 19 nt, Homo sapiens
  misc_RNA (1)...(19): siRNA sense strand
gagauccgcauguugaaga

SEQ ID NO: 55732 - RNA, 19 nt, Homo sapiens
  misc_RNA (1)...(19): siRNA sense strand
ccaaggauuaccucauuga

SEQ ID NO: 55733 - RNA, 19 nt, Homo sapiens
  misc_RNA (1)...(19): siRNA sense strand
gaaccaggacaaucacuac

SEQ ID NO: 55734 - RNA, 19 nt, Homo sapiens
  misc_RNA (1)...(19): siRNA sense strand
gagcucucauggaauguca

SEQ ID NO: 55735 - RNA, 19 nt, Homo sapiens
  misc_RNA (1)...(19): siRNA sense strand
gaggagaugugugucaacu

SEQ ID NO: 55736 - RNA, 19 nt, Homo sapiens
  misc_RNA (1)...(19): siRNA sense strand
gcacuguccacuuggucua

SEQ ID NO: 55737 - RNA, 19 nt, Homo sapiens
  misc_RNA (1)...(19): siRNA sense strand
ucaacagguucaacaacga

SEQ ID NO: 55738 - RNA, 19 nt, Homo sapiens
  misc_RNA (1)...(19): siRNA sense strand
ccucaggcauccgcuugua

SEQ ID NO: 55739 - RNA, 19 nt, Homo sapiens
  misc_RNA (1)...(19): siRNA sense strand
cccaggaggccauccauuu

SEQ ID NO: 55740 - RNA, 19 nt, Homo sapiens
  misc_RNA (1)...(19): siRNA sense strand
cccuggagcucucauggaa

SEQ ID NO: 55741 - RNA, 19 nt, Homo sapiens
  misc_RNA (1)...(19): siRNA sense strand
cuggagcucucauggaaug

SEQ ID NO: 55742 - RNA, 19 nt, Homo sapiens
  misc_RNA (1)...(19): siRNA sense strand
gaaggccugacccugcuuu

SEQ ID NO: 55743 - RNA, 19 nt, Homo sapiens
  misc_RNA (1)...(19): siRNA sense strand
acaacccacuggugauaga

SEQ ID NO: 55744 - RNA, 19 nt, Homo sapiens
  misc_RNA (1)...(19): siRNA sense strand
guacuggugcuacauuaag

SEQ ID NO: 55745 - RNA, 19 nt, Homo sapiens
  misc_RNA (1)...(19): siRNA sense strand
ccaggguccuccagauauc

SEQ ID NO: 55746 - RNA, 19 nt, Homo sapiens
  misc_RNA (1)...(19): siRNA sense strand
gguccaggguccuccagau

SEQ ID NO: 55747 - RNA, 19 nt, Homo sapiens
  misc_RNA (1)...(19): siRNA sense strand
guccaggguccuccagaua

SEQ ID NO: 55748 - RNA, 19 nt, Homo sapiens
  misc_RNA (1)...(19): siRNA sense strand
ccaggaggccauccauuuc

SEQ ID NO: 55749 - RNA, 19 nt, Homo sapiens
  misc_RNA (1)...(19): siRNA sense strand
caaggcuggcguccuguuu

SEQ ID NO: 55750 - RNA, 19 nt, Homo sapiens
  misc_RNA (1)...(19): siRNA sense strand
gagguccaagcucccaaua

SEQ ID NO: 55751 - RNA, 19 nt, Homo sapiens
  misc_RNA (1)...(19): siRNA sense strand
acguacuggugcuacauua

SEQ ID NO: 55752 - RNA, 19 nt, Homo sapiens
  misc_RNA (1)...(19): siRNA sense strand
aaccggaguugcccucaga

SEQ ID NO: 55753 - RNA, 19 nt, Homo sapiens
  misc_RNA (1)...(19): siRNA sense strand
gccaggagaccacguacug

SEQ ID NO: 55754 - RNA, 19 nt, Homo sapiens
  misc_RNA (1)...(19): siRNA sense strand
caacuacgugcacuacuac

SEQ ID NO: 55755 - RNA, 19 nt, Homo sapiens
  misc_RNA (1)...(19): siRNA sense strand
ucacuacagcccucacuuc

SEQ ID NO: 55756 - RNA, 19 nt, Homo sapiens
  misc_RNA (1)...(19): siRNA sense strand
ugaaccaggacaaucacua

SEQ ID NO: 55757 - RNA, 19 nt, Homo sapiens
  misc_RNA (1)...(19): siRNA sense strand
ucucauggaaugucagcua

SEQ ID NO: 55758 - RNA, 19 nt, Homo sapiens
  misc_RNA (1)...(19): siRNA sense strand
ggugauagaaggacgaaac

SEQ ID NO: 55759 - RNA, 19 nt, Homo sapiens
  misc_RNA (1)...(19): siRNA sense strand
gaccguggcgagcuugaga

SEQ ID NO: 55760 - RNA, 19 nt, Homo sapiens
  misc_RNA (1)...(19): siRNA sense strand
cccaaggauuaccucauug

SEQ ID NO: 55761 - RNA, 19 nt, Homo sapiens
  misc_RNA (1)...(19): siRNA sense strand
guacuuccaccucaucaac

SEQ ID NO: 55762 - RNA, 19 nt, Homo sapiens
  misc_RNA (1)...(19): siRNA sense strand
gaucgugaaccaggacaau

SEQ ID NO: 55763 - RNA, 19 nt, Homo sapiens
  misc_RNA (1)...(19): siRNA sense strand
gcccugcgacuccaagaug

SEQ ID NO: 55764 - RNA, 19 nt, Homo sapiens
  misc_RNA (1)...(19): siRNA sense strand
acauuaaggagcuuccaaa

SEQ ID NO: 55765 - RNA, 19 nt, Homo sapiens
  misc_RNA (1)...(19): siRNA sense strand
guccgugucucagcaguuc

SEQ ID NO: 55766 - RNA, 19 nt, Homo sapiens
  misc_RNA (1)...(19): siRNA sense strand
uggaggagaugugugucaa

SEQ ID NO: 55767 - RNA, 19 nt, Homo sapiens
  misc_RNA (1)...(19): siRNA sense strand
ccuccgggauccacaucuu

SEQ ID NO: 55768 - RNA, 19 nt, Homo sapiens
  misc_RNA (1)...(19): siRNA sense strand
gguguacacgccagugaug

SEQ ID NO: 55769 - RNA, 19 nt, Homo sapiens
  misc_RNA (1)...(19): siRNA sense strand
ggaaguucacuaccacaac

SEQ ID NO: 55770 - RNA, 19 nt, Homo sapiens
  misc_RNA (1)...(19): siRNA sense strand
gggagugggagaucgugaa

SEQ ID NO: 55771 - RNA, 19 nt, Homo sapiens
  misc_RNA (1)...(19): siRNA sense strand
ccaaggucaucuccacacu

SEQ ID NO: 55772 - RNA, 19 nt, Homo sapiens
  misc_RNA (1)...(19): siRNA sense strand
cagcaguucaccucuguuc

SEQ ID NO: 55773 - RNA, 19 nt, Homo sapiens
  misc_RNA (1)...(19): siRNA sense strand
uccaggagauccgcauguu

SEQ ID NO: 55774 - RNA, 19 nt, Homo sapiens
  misc_RNA (1)...(19): siRNA sense strand
ccccaaggauuaccucauu

SEQ ID NO: 55775 - RNA, 19 nt, Homo sapiens
  misc_RNA (1)...(19): siRNA sense strand
ccaggagauccgcauguug

SEQ ID NO: 55776 - RNA, 19 nt, Homo sapiens
  misc_RNA (1)...(19): siRNA sense strand
ccagccaggagaccacgua

SEQ ID NO: 55777 - RNA, 19 nt, Homo sapiens
  misc_RNA (1)...(19): siRNA sense strand
gcucaaagaugcagagaaa

SEQ ID NO: 55778 - RNA, 19 nt, Homo sapiens
  misc_RNA (1)...(19): siRNA sense strand
ccagagacaugcuuacaua

SEQ ID NO: 55779 - RNA, 19 nt, Homo sapiens
  misc_RNA (1)...(19): siRNA sense strand
gcagggaagucaacauuug

SEQ ID NO: 55780 - RNA, 19 nt, Homo sapiens
  misc_RNA (1)...(19): siRNA sense strand
caacuucgauuaucuucaa

SEQ ID NO: 55781 - RNA, 19 nt, Homo sapiens
  misc_RNA (1)...(19): siRNA sense strand
gagacagaguggacaauuu

SEQ ID NO: 55782 - RNA, 19 nt, Homo sapiens
  misc_RNA (1)...(19): siRNA sense strand
ugaauuggauggaaucauu

SEQ ID NO: 55783 - RNA, 19 nt, Homo sapiens
  misc_RNA (1)...(19): siRNA sense strand
gagacaugcuuacauagaa

SEQ ID NO: 55784 - RNA, 19 nt, Homo sapiens
  misc_RNA (1)...(19): siRNA sense strand
uggcaugacuggaugaaua

SEQ ID NO: 55785 - RNA, 19 nt, Homo sapiens
  misc_RNA (1)...(19): siRNA sense strand
gaacuuacaaugucucaga

SEQ ID NO: 55786 - RNA, 19 nt, Homo sapiens
  misc_RNA (1)...(19): siRNA sense strand
gggaagaaaugaagagcaa

SEQ ID NO: 55787 - RNA, 19 nt, Homo sapiens
  misc_RNA (1)...(19): siRNA sense strand
ucaaaguacucaagaugaa

SEQ ID NO: 55788 - RNA, 19 nt, Homo sapiens
  misc_RNA (1)...(19): siRNA sense strand
ggaauguucuucagaugau

SEQ ID NO: 55789 - RNA, 19 nt, Homo sapiens
  misc_RNA (1)...(19): siRNA sense strand
agacagaguggacaauuua

SEQ ID NO: 55790 - RNA, 19 nt, Homo sapiens
  misc_RNA (1)...(19): siRNA sense strand
ggauguuaaugaagacuuu

SEQ ID NO: 55791 - RNA, 19 nt, Homo sapiens
  misc_RNA (1)...(19): siRNA sense strand
cagagaaaccuguauuauu

SEQ ID NO: 55792 - RNA, 19 nt, Homo sapiens
  misc_RNA (1)...(19): siRNA sense strand
gaagucaacauuugugaau

SEQ ID NO: 55793 - RNA, 19 nt, Homo sapiens
  misc_RNA (1)...(19): siRNA sense strand
gaaucugaaugcaugaaug

SEQ ID NO: 55794 - RNA, 19 nt, Homo sapiens
  misc_RNA (1)...(19): siRNA sense strand
gcagagaaaccuguauuau

SEQ ID NO: 55795 - RNA, 19 nt, Homo sapiens
  misc_RNA (1)...(19): siRNA sense strand
gauggaaucauuuaucuuc

SEQ ID NO: 55796 - RNA, 19 nt, Homo sapiens
  misc_RNA (1)...(19): siRNA sense strand
gaaagcuggcuccugcaua

SEQ ID NO: 55797 - RNA, 19 nt, Homo sapiens
  misc_RNA (1)...(19): siRNA sense strand
cagcuugccucucugaaug

SEQ ID NO: 55798 - RNA, 19 nt, Homo sapiens
  misc_RNA (1)...(19): siRNA sense strand
ggaaucauuuaucuucaag

SEQ ID NO: 55799 - RNA, 19 nt, Homo sapiens
  misc_RNA (1)...(19): siRNA sense strand
gaauuggauggaaucauuu

SEQ ID NO: 55800 - RNA, 19 nt, Homo sapiens
  misc_RNA (1)...(19): siRNA sense strand
aaagcuggcuccugcauag

SEQ ID NO: 55801 - RNA, 19 nt, Homo sapiens
  misc_RNA (1)...(19): siRNA sense strand
cuggaugaauaaccaauuu

SEQ ID NO: 55802 - RNA, 19 nt, Homo sapiens
  misc_RNA (1)...(19): siRNA sense strand
aaaccaacuucgauuaucu

SEQ ID NO: 55803 - RNA, 19 nt, Homo sapiens
  misc_RNA (1)...(19): siRNA sense strand
gggaauguucuucagauga

SEQ ID NO: 55804 - RNA, 19 nt, Homo sapiens
  misc_RNA (1)...(19): siRNA sense strand
ccugaacgauggucuuuua

SEQ ID NO: 55805 - RNA, 19 nt, Homo sapiens
  misc_RNA (1)...(19): siRNA sense strand
ggaagucaacauuugugaa

SEQ ID NO: 55806 - RNA, 19 nt, Homo sapiens
  misc_RNA (1)...(19): siRNA sense strand
uaucaagacuggcaugacu

SEQ ID NO: 55807 - RNA, 19 nt, Homo sapiens
  misc_RNA (1)...(19): siRNA sense strand
ugaacgaucuguguauagu

SEQ ID NO: 55808 - RNA, 19 nt, Homo sapiens
  misc_RNA (1)...(19): siRNA sense strand
ggcaugacuggaugaauaa

SEQ ID NO: 55809 - RNA, 19 nt, Homo sapiens
  misc_RNA (1)...(19): siRNA sense strand
gacaugcuuacauagaaua

SEQ ID NO: 55810 - RNA, 19 nt, Homo sapiens
  misc_RNA (1)...(19): siRNA sense strand
ucaagccacuccagagaca

SEQ ID NO: 55811 - RNA, 19 nt, Homo sapiens
  misc_RNA (1)...(19): siRNA sense strand
gaaaaccaacuucgauuau

SEQ ID NO: 55812 - RNA, 19 nt, Homo sapiens
  misc_RNA (1)...(19): siRNA sense strand
ggugcaauguucaaaguac

SEQ ID NO: 55813 - RNA, 19 nt, Homo sapiens
  misc_RNA (1)...(19): siRNA sense strand
guucaaaguacucaagaug

SEQ ID NO: 55814 - RNA, 19 nt, Homo sapiens
  misc_RNA (1)...(19): siRNA sense strand
gccagauggugcaauguuc

SEQ ID NO: 55815 - RNA, 19 nt, Homo sapiens
  misc_RNA (1)...(19): siRNA sense strand
agaggugccuaucuuaaca

SEQ ID NO: 55816 - RNA, 19 nt, Homo sapiens
  misc_RNA (1)...(19): siRNA sense strand
agacaugcuuacauagaau

SEQ ID NO: 55817 - RNA, 19 nt, Homo sapiens
  misc_RNA (1)...(19): siRNA sense strand
cagaguggacaauuuauca

SEQ ID NO: 55818 - RNA, 19 nt, Homo sapiens
  misc_RNA (1)...(19): siRNA sense strand
aacgaucuguguauaguga

SEQ ID NO: 55819 - RNA, 19 nt, Homo sapiens
  misc_RNA (1)...(19): siRNA sense strand
gugggaauguucuucagau

SEQ ID NO: 55820 - RNA, 19 nt, Homo sapiens
  misc_RNA (1)...(19): siRNA sense strand
caacauuugugaauauccu

SEQ ID NO: 55821 - RNA, 19 nt, Homo sapiens
  misc_RNA (1)...(19): siRNA sense strand
cacuggauguuaaugaaga

SEQ ID NO: 55822 - RNA, 19 nt, Homo sapiens
  misc_RNA (1)...(19): siRNA sense strand
cuuaaacaauugugugaag

SEQ ID NO: 55823 - RNA, 19 nt, Homo sapiens
  misc_RNA (1)...(19): siRNA sense strand
uggauggaaucauuuaucu

SEQ ID NO: 55824 - RNA, 19 nt, Homo sapiens
  misc_RNA (1)...(19): siRNA sense strand
gaacgaucuguguauagug

SEQ ID NO: 55825 - RNA, 19 nt, Homo sapiens
  misc_RNA (1)...(19): siRNA sense strand
uuugaacgaucuguguaua

SEQ ID NO: 55826 - RNA, 19 nt, Homo sapiens
  misc_RNA (1)...(19): siRNA sense strand
gaauuugaggaacuuacaa

SEQ ID NO: 55827 - RNA, 19 nt, Homo sapiens
  misc_RNA (1)...(19): siRNA sense strand
gaauggcaagcucaaagau

SEQ ID NO: 55828 - RNA, 19 nt, Homo sapiens
  misc_RNA (1)...(19): siRNA sense strand
uugaggaacuuacaauguc

SEQ ID NO: 55829 - RNA, 19 nt, Homo sapiens
  misc_RNA (1)...(19): siRNA sense strand
gaauguucuucagaugaug

SEQ ID NO: 55830 - RNA, 19 nt, Homo sapiens
  misc_RNA (1)...(19): siRNA sense strand
uaugaaagucugguugaaa

SEQ ID NO: 55831 - RNA, 19 nt, Homo sapiens
  misc_RNA (1)...(19): siRNA sense strand
caaauaugaaagucugguu

SEQ ID NO: 55832 - RNA, 19 nt, Homo sapiens
  misc_RNA (1)...(19): siRNA sense strand
gggaagucaacauuuguga

SEQ ID NO: 55833 - RNA, 19 nt, Homo sapiens
  misc_RNA (1)...(19): siRNA sense strand
ugaaaaccaacuucgauua

SEQ ID NO: 55834 - RNA, 19 nt, Homo sapiens
  misc_RNA (1)...(19): siRNA sense strand
ugaauggcaagcucaaaga

SEQ ID NO: 55835 - RNA, 19 nt, Homo sapiens
  misc_RNA (1)...(19): siRNA sense strand
aaucugaaugcaugaauga

SEQ ID NO: 55836 - RNA, 19 nt, Homo sapiens
  misc_RNA (1)...(19): siRNA sense strand
agagacaugcuuacauaga

SEQ ID NO: 55837 - RNA, 19 nt, Homo sapiens
  misc_RNA (1)...(19): siRNA sense strand
ucagaugauguaugagaaa

SEQ ID NO: 55838 - RNA, 19 nt, Homo sapiens
  misc_RNA (1)...(19): siRNA sense strand
gagaagcuucauuauaaac

SEQ ID NO: 55839 - RNA, 19 nt, Homo sapiens
  misc_RNA (1)...(19): siRNA sense strand
gugugaagauugggaagug

SEQ ID NO: 55840 - RNA, 19 nt, Homo sapiens
  misc_RNA (1)...(19): siRNA sense strand
ugcagagaaaccuguauua

SEQ ID NO: 55841 - RNA, 19 nt, Homo sapiens
  misc_RNA (1)...(19): siRNA sense strand
gccugucucagucgaauaa

SEQ ID NO: 55842 - RNA, 19 nt, Homo sapiens
  misc_RNA (1)...(19): siRNA sense strand
caaaguacucaagaugaau

SEQ ID NO: 55843 - RNA, 19 nt, Homo sapiens
  misc_RNA (1)...(19): siRNA sense strand
aguggacaauuuaucaaga

SEQ ID NO: 55844 - RNA, 19 nt, Homo sapiens
  misc_RNA (1)...(19): siRNA sense strand
gaugauguaugagaaaccu

SEQ ID NO: 55845 - RNA, 19 nt, Homo sapiens
  misc_RNA (1)...(19): siRNA sense strand
ugaggaacuuacaaugucu

SEQ ID NO: 55846 - RNA, 19 nt, Homo sapiens
  misc_RNA (1)...(19): siRNA sense strand
aauaugaaagucugguuga

SEQ ID NO: 55847 - RNA, 19 nt, Homo sapiens
  misc_RNA (1)...(19): siRNA sense strand
ggauggaaucauuuaucuu

SEQ ID NO: 55848 - RNA, 19 nt, Homo sapiens
  misc_RNA (1)...(19): siRNA sense strand
ugagacagaguggacaauu

SEQ ID NO: 55849 - RNA, 19 nt, Homo sapiens
  misc_RNA (1)...(19): siRNA sense strand
gaagcugcccgucuuucuc

SEQ ID NO: 55850 - RNA, 19 nt, Homo sapiens
  misc_RNA (1)...(19): siRNA sense strand
uggccaaagccuugaauug

SEQ ID NO: 55851 - RNA, 19 nt, Homo sapiens
  misc_RNA (1)...(19): siRNA sense strand
uucuucagaugauguauga

SEQ ID NO: 55852 - RNA, 19 nt, Homo sapiens
  misc_RNA (1)...(19): siRNA sense strand
aagaugaauuugaggaacu

SEQ ID NO: 55853 - RNA, 19 nt, Homo sapiens
  misc_RNA (1)...(19): siRNA sense strand
cuucagaugauguaugaga

SEQ ID NO: 55854 - RNA, 19 nt, Homo sapiens
  misc_RNA (1)...(19): siRNA sense strand
ggacccgcaucaagaaaau

SEQ ID NO: 55855 - RNA, 19 nt, Homo sapiens
  misc_RNA (1)...(19): siRNA sense strand
gagaagcugcccgucuuuc

SEQ ID NO: 55856 - RNA, 19 nt, Homo sapiens
  misc_RNA (1)...(19): siRNA sense strand
gcaauguucaaaguacuca

SEQ ID NO: 55857 - RNA, 19 nt, Homo sapiens
  misc_RNA (1)...(19): siRNA sense strand
caagaaaaucuccaucgaa

SEQ ID NO: 55858 - RNA, 19 nt, Homo sapiens
  misc_RNA (1)...(19): siRNA sense strand
gaacgauggucuuuuaccu

SEQ ID NO: 55859 - RNA, 19 nt, Homo sapiens
  misc_RNA (1)...(19): siRNA sense strand
ugggaauguucuucagaug

SEQ ID NO: 55860 - RNA, 19 nt, Homo sapiens
  misc_RNA (1)...(19): siRNA sense strand
cugcagggaagucaacauu

SEQ ID NO: 55861 - RNA, 19 nt, Homo sapiens
  misc_RNA (1)...(19): siRNA sense strand
guggacaauuuaucaagac

SEQ ID NO: 55862 - RNA, 19 nt, Homo sapiens
  misc_RNA (1)...(19): siRNA sense strand
gacagaguggacaauuuau

SEQ ID NO: 55863 - RNA, 19 nt, Homo sapiens
  misc_RNA (1)...(19): siRNA sense strand
ucaagaaaaucuccaucga

SEQ ID NO: 55864 - RNA, 19 nt, Homo sapiens
  misc_RNA (1)...(19): siRNA sense strand
cugaaccuguugccagaug

SEQ ID NO: 55865 - RNA, 19 nt, Homo sapiens
  misc_RNA (1)...(19): siRNA sense strand
gaugaauuugaggaacuua

SEQ ID NO: 55866 - RNA, 19 nt, Homo sapiens
  misc_RNA (1)...(19): siRNA sense strand
cagaugauguaugagaaac

SEQ ID NO: 55867 - RNA, 19 nt, Homo sapiens
  misc_RNA (1)...(19): siRNA sense strand
ccagauggugcaauguuca

SEQ ID NO: 55868 - RNA, 19 nt, Homo sapiens
  misc_RNA (1)...(19): siRNA sense strand
gaguggacaauuuaucaag

SEQ ID NO: 55869 - RNA, 19 nt, Homo sapiens
  misc_RNA (1)...(19): siRNA sense strand
agaugaauuugaggaacuu

SEQ ID NO: 55870 - RNA, 19 nt, Homo sapiens
  misc_RNA (1)...(19): siRNA sense strand
ugaaaaggucaaagaguuu

SEQ ID NO: 55871 - RNA, 19 nt, Homo sapiens
  misc_RNA (1)...(19): siRNA sense strand
ggugggaauguucuucaga

SEQ ID NO: 55872 - RNA, 19 nt, Homo sapiens
  misc_RNA (1)...(19): siRNA sense strand
gaaauaugaagaccuguua

SEQ ID NO: 55873 - RNA, 19 nt, Homo sapiens
  misc_RNA (1)...(19): siRNA sense strand
gcaaguuuguggaggaaua

SEQ ID NO: 55874 - RNA, 19 nt, Homo sapiens
  misc_RNA (1)...(19): siRNA sense strand
uaaggaggcugaugauuuc

SEQ ID NO: 55875 - RNA, 19 nt, Homo sapiens
  misc_RNA (1)...(19): siRNA sense strand
ccacagaggcuaugcuaaa

SEQ ID NO: 55876 - RNA, 19 nt, Homo sapiens
  misc_RNA (1)...(19): siRNA sense strand
ucaagcggaucauaaagaa

SEQ ID NO: 55877 - RNA, 19 nt, Homo sapiens
  misc_RNA (1)...(19): siRNA sense strand
ccaggaggauguuuaagga

SEQ ID NO: 55878 - RNA, 19 nt, Homo sapiens
  misc_RNA (1)...(19): siRNA sense strand
gcagaagaacaugcaaaua

SEQ ID NO: 55879 - RNA, 19 nt, Homo sapiens
  misc_RNA (1)...(19): siRNA sense strand
uuaaggaggcugaugauuu

SEQ ID NO: 55880 - RNA, 19 nt, Homo sapiens
  misc_RNA (1)...(19): siRNA sense strand
cagaagaacaugcaaauag

SEQ ID NO: 55881 - RNA, 19 nt, Homo sapiens
  misc_RNA (1)...(19): siRNA sense strand
ucaccaaggagaacuauaa

SEQ ID NO: 55882 - RNA, 19 nt, Homo sapiens
  misc_RNA (1)...(19): siRNA sense strand
ccaggaaguuugaugugaa

SEQ ID NO: 55883 - RNA, 19 nt, Homo sapiens
  misc_RNA (1)...(19): siRNA sense strand
ggcaaggacuuccggauca

SEQ ID NO: 55884 - RNA, 19 nt, Homo sapiens
  misc_RNA (1)...(19): siRNA sense strand
cgaaauacguggaacucau

SEQ ID NO: 55885 - RNA, 19 nt, Homo sapiens
  misc_RNA (1)...(19): siRNA sense strand
acaagucgaugcuggagaa

SEQ ID NO: 55886 - RNA, 19 nt, Homo sapiens
  misc_RNA (1)...(19): siRNA sense strand
ugaugaagauggcccuuga

SEQ ID NO: 55887 - RNA, 19 nt, Homo sapiens
  misc_RNA (1)...(19): siRNA sense strand
ggaaauaugaagaccuguu

SEQ ID NO: 55888 - RNA, 19 nt, Homo sapiens
  misc_RNA (1)...(19): siRNA sense strand
ggaggcugaugauuucuuc

SEQ ID NO: 55889 - RNA, 19 nt, Homo sapiens
  misc_RNA (1)...(19): siRNA sense strand
caccaucccuggagcaaga

SEQ ID NO: 55890 - RNA, 19 nt, Homo sapiens
  misc_RNA (1)...(19): siRNA sense strand
gguccaacaucuaugacuu

SEQ ID NO: 55891 - RNA, 19 nt, Homo sapiens
  misc_RNA (1)...(19): siRNA sense strand
ccaagcaccugcacagucu

SEQ ID NO: 55892 - RNA, 19 nt, Homo sapiens
  misc_RNA (1)...(19): siRNA sense strand
gcaccaccgugaacuugga

SEQ ID NO: 55893 - RNA, 19 nt, Homo sapiens
  misc_RNA (1)...(19): siRNA sense strand
gaaauacguggaacucauc

SEQ ID NO: 55894 - RNA, 19 nt, Homo sapiens
  misc_RNA (1)...(19): siRNA sense strand
ucagcuaccucgucgauca

SEQ ID NO: 55895 - RNA, 19 nt, Homo sapiens
  misc_RNA (1)...(19): siRNA sense strand
gcaaggacuuccggaucaa

SEQ ID NO: 55896 - RNA, 19 nt, Homo sapiens
  misc_RNA (1)...(19): siRNA sense strand
gccaggaaguuugauguga

SEQ ID NO: 55897 - RNA, 19 nt, Homo sapiens
  misc_RNA (1)...(19): siRNA sense strand
agccagaucugacgaaugu

SEQ ID NO: 55898 - RNA, 19 nt, Homo sapiens
  misc_RNA (1)...(19): siRNA sense strand
gaacuacaacaccaacauc

SEQ ID NO: 55899 - RNA, 19 nt, Homo sapiens
  misc_RNA (1)...(19): siRNA sense strand
acaccaacaucaccacaga

SEQ ID NO: 55900 - RNA, 19 nt, Homo sapiens
  misc_RNA (1)...(19): siRNA sense strand
ccacagagaccagcaagau

SEQ ID NO: 55901 - RNA, 19 nt, Homo sapiens
  misc_RNA (1)...(19): siRNA sense strand
gagccauccuccaguuuua

SEQ ID NO: 55902 - RNA, 19 nt, Homo sapiens
  misc_RNA (1)...(19): siRNA sense strand
gcagaacaccacuaucaag

SEQ ID NO: 55903 - RNA, 19 nt, Homo sapiens
  misc_RNA (1)...(19): siRNA sense strand
ccaaccacacccugaagua

SEQ ID NO: 55904 - RNA, 19 nt, Homo sapiens
  misc_RNA (1)...(19): siRNA sense strand
ccacauccaguauuucaug

SEQ ID NO: 55905 - RNA, 19 nt, Homo sapiens
  misc_RNA (1)...(19): siRNA sense strand
caucccaggugguguggaa

SEQ ID NO: 55906 - RNA, 19 nt, Homo sapiens
  misc_RNA (1)...(19): siRNA sense strand
uccaguauuucaugcagua

SEQ ID NO: 55907 - RNA, 19 nt, Homo sapiens
  misc_RNA (1)...(19): siRNA sense strand
gcucaauggcuauguagau

SEQ ID NO: 55908 - RNA, 19 nt, Homo sapiens
  misc_RNA (1)...(19): siRNA sense strand
uugacaagaucgccuuuau

SEQ ID NO: 55909 - RNA, 19 nt, Homo sapiens
  misc_RNA (1)...(19): siRNA sense strand
acagagaccagcaagauuc

SEQ ID NO: 55910 - RNA, 19 nt, Homo sapiens
  misc_RNA (1)...(19): siRNA sense strand
ccucggccauguugagcua

SEQ ID NO: 55911 - RNA, 19 nt, Homo sapiens
  misc_RNA (1)...(19): siRNA sense strand
caguggcgcuggaggguau

SEQ ID NO: 55912 - RNA, 19 nt, Homo sapiens
  misc_RNA (1)...(19): siRNA sense strand
cgacgagcaugacaucaac

SEQ ID NO: 55913 - RNA, 19 nt, Homo sapiens
  misc_RNA (1)...(19): siRNA sense strand
gaggccaacuggaacuaca

SEQ ID NO: 55914 - RNA, 19 nt, Homo sapiens
  misc_RNA (1)...(19): siRNA sense strand
ccagaucugacgaauguga

SEQ ID NO: 55915 - RNA, 19 nt, Homo sapiens
  misc_RNA (1)...(19): siRNA sense strand
agaagaacaugcaaauagc

SEQ ID NO: 55916 - RNA, 19 nt, Homo sapiens
  misc_RNA (1)...(19): siRNA sense strand
ccaaggagaacuauaacca

SEQ ID NO: 55917 - RNA, 19 nt, Homo sapiens
  misc_RNA (1)...(19): siRNA sense strand
gcgacgagcaugacaucaa

SEQ ID NO: 55918 - RNA, 19 nt, Homo sapiens
  misc_RNA (1)...(19): siRNA sense strand
ggaacuacaacaccaacau

SEQ ID NO: 55919 - RNA, 19 nt, Homo sapiens
  misc_RNA (1)...(19): siRNA sense strand
gcacccaggccaggaaguu

SEQ ID NO: 55920 - RNA, 19 nt, Homo sapiens
  misc_RNA (1)...(19): siRNA sense strand
gacaagaucgccuuuaucc

SEQ ID NO: 55921 - RNA, 19 nt, Homo sapiens
  misc_RNA (1)...(19): siRNA sense strand
caauggcuauguagaugca

SEQ ID NO: 55922 - RNA, 19 nt, Homo sapiens
  misc_RNA (1)...(19): siRNA sense strand
gagagccauccuccaguuu

SEQ ID NO: 55923 - RNA, 19 nt, Homo sapiens
  misc_RNA (1)...(19): siRNA sense strand
gugaaccaguugcagaaca

SEQ ID NO: 55924 - RNA, 19 nt, Homo sapiens
  misc_RNA (1)...(19): siRNA sense strand
ugggccacauccaguauuu

SEQ ID NO: 55925 - RNA, 19 nt, Homo sapiens
  misc_RNA (1)...(19): siRNA sense strand
cagcaaguuuguggaggaa

SEQ ID NO: 55926 - RNA, 19 nt, Homo sapiens
  misc_RNA (1)...(19): siRNA sense strand
cuaucaagcggaucauaaa

SEQ ID NO: 55927 - RNA, 19 nt, Homo sapiens
  misc_RNA (1)...(19): siRNA sense strand
ggccacauccaguauuuca

SEQ ID NO: 55928 - RNA, 19 nt, Homo sapiens
  misc_RNA (1)...(19): siRNA sense strand
gaagcaucaccaaggagaa

SEQ ID NO: 55929 - RNA, 19 nt, Homo sapiens
  misc_RNA (1)...(19): siRNA sense strand
uugcagaacaccacuauca

SEQ ID NO: 55930 - RNA, 19 nt, Homo sapiens
  misc_RNA (1)...(19): siRNA sense strand
caugcaguacaaagacuua

SEQ ID NO: 55931 - RNA, 19 nt, Homo sapiens
  misc_RNA (1)...(19): siRNA sense strand
cacagaggcuaugcuaaag

SEQ ID NO: 55932 - RNA, 19 nt, Homo sapiens
  misc_RNA (1)...(19): siRNA sense strand
gaagccaugcagcugauca

SEQ ID NO: 55933 - RNA, 19 nt, Homo sapiens
  misc_RNA (1)...(19): siRNA sense strand
ggaggaguacaacaagauc

SEQ ID NO: 55934 - RNA, 19 nt, Homo sapiens
  misc_RNA (1)...(19): siRNA sense strand
caucauccaguuccaguuc

SEQ ID NO: 55935 - RNA, 19 nt, Homo sapiens
  misc_RNA (1)...(19): siRNA sense strand
aaaugggccacauccagua

SEQ ID NO: 55936 - RNA, 19 nt, Homo sapiens
  misc_RNA (1)...(19): siRNA sense strand
caccacagaggcuaugcua

SEQ ID NO: 55937 - RNA, 19 nt, Homo sapiens
  misc_RNA (1)...(19): siRNA sense strand
ccggcucaauggcuaugua

SEQ ID NO: 55938 - RNA, 19 nt, Homo sapiens
  misc_RNA (1)...(19): siRNA sense strand
acuaucaagcggaucauaa

SEQ ID NO: 55939 - RNA, 19 nt, Homo sapiens
  misc_RNA (1)...(19): siRNA sense strand
ggacaccacagaggcuaug

SEQ ID NO: 55940 - RNA, 19 nt, Homo sapiens
  misc_RNA (1)...(19): siRNA sense strand
gcaucaccaaggagaacua

SEQ ID NO: 55941 - RNA, 19 nt, Homo sapiens
  misc_RNA (1)...(19): siRNA sense strand
gugcuagcccucucagugu

SEQ ID NO: 55942 - RNA, 19 nt, Homo sapiens
  misc_RNA (1)...(19): siRNA sense strand
cucaauggcuauguagaug

SEQ ID NO: 55943 - RNA, 19 nt, Homo sapiens
  misc_RNA (1)...(19): siRNA sense strand
cacagagaccagcaagauu

SEQ ID NO: 55944 - RNA, 19 nt, Homo sapiens
  misc_RNA (1)...(19): siRNA sense strand
ugacaagaucgccuuuauc

SEQ ID NO: 55945 - RNA, 19 nt, Homo sapiens
  misc_RNA (1)...(19): siRNA sense strand
ggacgugcuagcccucuca

SEQ ID NO: 55946 - RNA, 19 nt, Homo sapiens
  misc_RNA (1)...(19): siRNA sense strand
caggaaguuugaugugaac

SEQ ID NO: 55947 - RNA, 19 nt, Homo sapiens
  misc_RNA (1)...(19): siRNA sense strand
cggaagccaugcagcugau

SEQ ID NO: 55948 - RNA, 19 nt, Homo sapiens
  misc_RNA (1)...(19): siRNA sense strand
aguuugaugugaaccaguu

SEQ ID NO: 55949 - RNA, 19 nt, Homo sapiens
  misc_RNA (1)...(19): siRNA sense strand
aauaugaagaccuguuaug

SEQ ID NO: 55950 - RNA, 19 nt, Homo sapiens
  misc_RNA (1)...(19): siRNA sense strand
guccaacaucuaugacuug

SEQ ID NO: 55951 - RNA, 19 nt, Homo sapiens
  misc_RNA (1)...(19): siRNA sense strand
ucagcuucaucauccaguu

SEQ ID NO: 55952 - RNA, 19 nt, Homo sapiens
  misc_RNA (1)...(19): siRNA sense strand
aguauuucaugcaguacaa

SEQ ID NO: 55953 - RNA, 19 nt, Homo sapiens
  misc_RNA (1)...(19): siRNA sense strand
gauauggaaaccaccuaca

SEQ ID NO: 55954 - RNA, 19 nt, Homo sapiens
  misc_RNA (1)...(19): siRNA sense strand
gggccaaguuccacauucc

SEQ ID NO: 55955 - RNA, 19 nt, Homo sapiens
  misc_RNA (1)...(19): siRNA sense strand
uggaggguauuugauggaa

SEQ ID NO: 55956 - RNA, 19 nt, Homo sapiens
  misc_RNA (1)...(19): siRNA sense strand
ugaagauggcccuugacaa

SEQ ID NO: 55957 - RNA, 19 nt, Homo sapiens
  misc_RNA (1)...(19): siRNA sense strand
cgagccagaucugacgaau

SEQ ID NO: 55958 - RNA, 19 nt, Homo sapiens
  misc_RNA (1)...(19): siRNA sense strand
gguggugcccuucccuuca

SEQ ID NO: 55959 - RNA, 19 nt, Homo sapiens
  misc_RNA (1)...(19): siRNA sense strand
gagccagaucugacgaaug

SEQ ID NO: 55960 - RNA, 19 nt, Homo sapiens
  misc_RNA (1)...(19): siRNA sense strand
gaaauaugaagaccuguua

SEQ ID NO: 55961 - RNA, 19 nt, Homo sapiens
  misc_RNA (1)...(19): siRNA sense strand
gcaaguuuguggaggaaua

SEQ ID NO: 55962 - RNA, 19 nt, Homo sapiens
  misc_RNA (1)...(19): siRNA sense strand
uaaggaggcugaugauuuc

SEQ ID NO: 55963 - RNA, 19 nt, Homo sapiens
  misc_RNA (1)...(19): siRNA sense strand
ccacagaggcuaugcuaaa

SEQ ID NO: 55964 - RNA, 19 nt, Homo sapiens
  misc_RNA (1)...(19): siRNA sense strand
ucaagcggaucauaaagaa

SEQ ID NO: 55965 - RNA, 19 nt, Homo sapiens
  misc_RNA (1)...(19): siRNA sense strand
ccaggaggauguuuaagga

SEQ ID NO: 55966 - RNA, 19 nt, Homo sapiens
  misc_RNA (1)...(19): siRNA sense strand
gcagaagaacaugcaaaua

SEQ ID NO: 55967 - RNA, 19 nt, Homo sapiens
  misc_RNA (1)...(19): siRNA sense strand
uuaaggaggcugaugauuu

SEQ ID NO: 55968 - RNA, 19 nt, Homo sapiens
  misc_RNA (1)...(19): siRNA sense strand
cagaagaacaugcaaauag

SEQ ID NO: 55969 - RNA, 19 nt, Homo sapiens
  misc_RNA (1)...(19): siRNA sense strand
ucaccaaggagaacuauaa

SEQ ID NO: 55970 - RNA, 19 nt, Homo sapiens
  misc_RNA (1)...(19): siRNA sense strand
ccaggaaguuugaugugaa

SEQ ID NO: 55971 - RNA, 19 nt, Homo sapiens
  misc_RNA (1)...(19): siRNA sense strand
ggcaaggacuuccggauca

SEQ ID NO: 55972 - RNA, 19 nt, Homo sapiens
  misc_RNA (1)...(19): siRNA sense strand
cgaaauacguggaacucau

SEQ ID NO: 55973 - RNA, 19 nt, Homo sapiens
  misc_RNA (1)...(19): siRNA sense strand
acaagucgaugcuggagaa

SEQ ID NO: 55974 - RNA, 19 nt, Homo sapiens
  misc_RNA (1)...(19): siRNA sense strand
ugaugaagauggcccuuga

SEQ ID NO: 55975 - RNA, 19 nt, Homo sapiens
  misc_RNA (1)...(19): siRNA sense strand
ggaaauaugaagaccuguu

SEQ ID NO: 55976 - RNA, 19 nt, Homo sapiens
  misc_RNA (1)...(19): siRNA sense strand
ggaggcugaugauuucuuc

SEQ ID NO: 55977 - RNA, 19 nt, Homo sapiens
  misc_RNA (1)...(19): siRNA sense strand
caccaucccuggagcaaga

SEQ ID NO: 55978 - RNA, 19 nt, Homo sapiens
  misc_RNA (1)...(19): siRNA sense strand
gguccaacaucuaugacuu

SEQ ID NO: 55979 - RNA, 19 nt, Homo sapiens
  misc_RNA (1)...(19): siRNA sense strand
ccaagcaccugcacagucu

SEQ ID NO: 55980 - RNA, 19 nt, Homo sapiens
  misc_RNA (1)...(19): siRNA sense strand
gcaccaccgugaacuugga

SEQ ID NO: 55981 - RNA, 19 nt, Homo sapiens
  misc_RNA (1)...(19): siRNA sense strand
gaaauacguggaacucauc

SEQ ID NO: 55982 - RNA, 19 nt, Homo sapiens
  misc_RNA (1)...(19): siRNA sense strand
ucagcuaccucgucgauca

SEQ ID NO: 55983 - RNA, 19 nt, Homo sapiens
  misc_RNA (1)...(19): siRNA sense strand
gcaaggacuuccggaucaa

SEQ ID NO: 55984 - RNA, 19 nt, Homo sapiens
  misc_RNA (1)...(19): siRNA sense strand
gccaggaaguuugauguga

SEQ ID NO: 55985 - RNA, 19 nt, Homo sapiens
  misc_RNA (1)...(19): siRNA sense strand
agccagaucugacgaaugu

SEQ ID NO: 55986 - RNA, 19 nt, Homo sapiens
  misc_RNA (1)...(19): siRNA sense strand
gaacuacaacaccaacauc

SEQ ID NO: 55987 - RNA, 19 nt, Homo sapiens
  misc_RNA (1)...(19): siRNA sense strand
acaccaacaucaccacaga

SEQ ID NO: 55988 - RNA, 19 nt, Homo sapiens
  misc_RNA (1)...(19): siRNA sense strand
ccacagagaccagcaagau

SEQ ID NO: 55989 - RNA, 19 nt, Homo sapiens
  misc_RNA (1)...(19): siRNA sense strand
gagccauccuccaguuuua

SEQ ID NO: 55990 - RNA, 19 nt, Homo sapiens
  misc_RNA (1)...(19): siRNA sense strand
gcagaacaccacuaucaag

SEQ ID NO: 55991 - RNA, 19 nt, Homo sapiens
  misc_RNA (1)...(19): siRNA sense strand
ccaaccacacccugaagua

SEQ ID NO: 55992 - RNA, 19 nt, Homo sapiens
  misc_RNA (1)...(19): siRNA sense strand
caucccaggugguguggaa

SEQ ID NO: 55993 - RNA, 19 nt, Homo sapiens
  misc_RNA (1)...(19): siRNA sense strand
ccacauccaguauuucaug

SEQ ID NO: 55994 - RNA, 19 nt, Homo sapiens
  misc_RNA (1)...(19): siRNA sense strand
uccaguauuucaugcagua

SEQ ID NO: 55995 - RNA, 19 nt, Homo sapiens
  misc_RNA (1)...(19): siRNA sense strand
gcucaauggcuauguagau

SEQ ID NO: 55996 - RNA, 19 nt, Homo sapiens
  misc_RNA (1)...(19): siRNA sense strand
uugacaagaucgccuuuau

SEQ ID NO: 55997 - RNA, 19 nt, Homo sapiens
  misc_RNA (1)...(19): siRNA sense strand
ccagaucugacgaauguga

SEQ ID NO: 55998 - RNA, 19 nt, Homo sapiens
  misc_RNA (1)...(19): siRNA sense strand
ccucggccauguugagcua

SEQ ID NO: 55999 - RNA, 19 nt, Homo sapiens
  misc_RNA (1)...(19): siRNA sense strand
caguggcgcuggaggguau

SEQ ID NO: 56000 - RNA, 19 nt, Homo sapiens
  misc_RNA (1)...(19): siRNA sense strand
cgacgagcaugacaucaac

SEQ ID NO: 56001 - RNA, 19 nt, Homo sapiens
  misc_RNA (1)...(19): siRNA sense strand
gaggccaacuggaacuaca

SEQ ID NO: 56002 - RNA, 19 nt, Homo sapiens
  misc_RNA (1)...(19): siRNA sense strand
acagagaccagcaagauuc

SEQ ID NO: 56003 - RNA, 19 nt, Homo sapiens
  misc_RNA (1)...(19): siRNA sense strand
agaagaacaugcaaauagc

SEQ ID NO: 56004 - RNA, 19 nt, Homo sapiens
  misc_RNA (1)...(19): siRNA sense strand
ccaaggagaacuauaacca

SEQ ID NO: 56005 - RNA, 19 nt, Homo sapiens
  misc_RNA (1)...(19): siRNA sense strand
ggaacuacaacaccaacau

SEQ ID NO: 56006 - RNA, 19 nt, Homo sapiens
  misc_RNA (1)...(19): siRNA sense strand
gcgacgagcaugacaucaa

SEQ ID NO: 56007 - RNA, 19 nt, Homo sapiens
  misc_RNA (1)...(19): siRNA sense strand
gcacccaggccaggaaguu

SEQ ID NO: 56008 - RNA, 19 nt, Homo sapiens
  misc_RNA (1)...(19): siRNA sense strand
gacaagaucgccuuuaucc

SEQ ID NO: 56009 - RNA, 19 nt, Homo sapiens
  misc_RNA (1)...(19): siRNA sense strand
caauggcuauguagaugca

SEQ ID NO: 56010 - RNA, 19 nt, Homo sapiens
  misc_RNA (1)...(19): siRNA sense strand
gagagccauccuccaguuu

SEQ ID NO: 56011 - RNA, 19 nt, Homo sapiens
  misc_RNA (1)...(19): siRNA sense strand
gugaaccaguugcagaaca

SEQ ID NO: 56012 - RNA, 19 nt, Homo sapiens
  misc_RNA (1)...(19): siRNA sense strand
ugggccacauccaguauuu

SEQ ID NO: 56013 - RNA, 19 nt, Homo sapiens
  misc_RNA (1)...(19): siRNA sense strand
cagcaaguuuguggaggaa

SEQ ID NO: 56014 - RNA, 19 nt, Homo sapiens
  misc_RNA (1)...(19): siRNA sense strand
cuaucaagcggaucauaaa

SEQ ID NO: 56015 - RNA, 19 nt, Homo sapiens
  misc_RNA (1)...(19): siRNA sense strand
ggccacauccaguauuuca

SEQ ID NO: 56016 - RNA, 19 nt, Homo sapiens
  misc_RNA (1)...(19): siRNA sense strand
gaagcaucaccaaggagaa

SEQ ID NO: 56017 - RNA, 19 nt, Homo sapiens
  misc_RNA (1)...(19): siRNA sense strand
uugcagaacaccacuauca

SEQ ID NO: 56018 - RNA, 19 nt, Homo sapiens
  misc_RNA (1)...(19): siRNA sense strand
caugcaguacaaagacuua

SEQ ID NO: 56019 - RNA, 19 nt, Homo sapiens
  misc_RNA (1)...(19): siRNA sense strand
cacagaggcuaugcuaaag

SEQ ID NO: 56020 - RNA, 19 nt, Homo sapiens
  misc_RNA (1)...(19): siRNA sense strand
gaagccaugcagcugauca

SEQ ID NO: 56021 - RNA, 19 nt, Homo sapiens
  misc_RNA (1)...(19): siRNA sense strand
ggaggaguacaacaagauc

SEQ ID NO: 56022 - RNA, 19 nt, Homo sapiens
  misc_RNA (1)...(19): siRNA sense strand
caucauccaguuccaguuc

SEQ ID NO: 56023 - RNA, 19 nt, Homo sapiens
  misc_RNA (1)...(19): siRNA sense strand
aaaugggccacauccagua

SEQ ID NO: 56024 - RNA, 19 nt, Homo sapiens
  misc_RNA (1)...(19): siRNA sense strand
caccacagaggcuaugcua

SEQ ID NO: 56025 - RNA, 19 nt, Homo sapiens
  misc_RNA (1)...(19): siRNA sense strand
ccggcucaauggcuaugua

SEQ ID NO: 56026 - RNA, 19 nt, Homo sapiens
  misc_RNA (1)...(19): siRNA sense strand
acuaucaagcggaucauaa

SEQ ID NO: 56027 - RNA, 19 nt, Homo sapiens
  misc_RNA (1)...(19): siRNA sense strand
ggacaccacagaggcuaug

SEQ ID NO: 56028 - RNA, 19 nt, Homo sapiens
  misc_RNA (1)...(19): siRNA sense strand
gcaucaccaaggagaacua

SEQ ID NO: 56029 - RNA, 19 nt, Homo sapiens
  misc_RNA (1)...(19): siRNA sense strand
gugcuagcccucucagugu

SEQ ID NO: 56030 - RNA, 19 nt, Homo sapiens
  misc_RNA (1)...(19): siRNA sense strand
cucaauggcuauguagaug

SEQ ID NO: 56031 - RNA, 19 nt, Homo sapiens
  misc_RNA (1)...(19): siRNA sense strand
ugacaagaucgccuuuauc

SEQ ID NO: 56032 - RNA, 19 nt, Homo sapiens
  misc_RNA (1)...(19): siRNA sense strand
cacagagaccagcaagauu

SEQ ID NO: 56033 - RNA, 19 nt, Homo sapiens
  misc_RNA (1)...(19): siRNA sense strand
ggacgugcuagcccucuca

SEQ ID NO: 56034 - RNA, 19 nt, Homo sapiens
  misc_RNA (1)...(19): siRNA sense strand
aauaugaagaccuguuaug

SEQ ID NO: 56035 - RNA, 19 nt, Homo sapiens
  misc_RNA (1)...(19): siRNA sense strand
cggaagccaugcagcugau

SEQ ID NO: 56036 - RNA, 19 nt, Homo sapiens
  misc_RNA (1)...(19): siRNA sense strand
caggaaguuugaugugaac

SEQ ID NO: 56037 - RNA, 19 nt, Homo sapiens
  misc_RNA (1)...(19): siRNA sense strand
aguuugaugugaaccaguu

SEQ ID NO: 56038 - RNA, 19 nt, Homo sapiens
  misc_RNA (1)...(19): siRNA sense strand
guccaacaucuaugacuug

SEQ ID NO: 56039 - RNA, 19 nt, Homo sapiens
  misc_RNA (1)...(19): siRNA sense strand
ucagcuucaucauccaguu

SEQ ID NO: 56040 - RNA, 19 nt, Homo sapiens
  misc_RNA (1)...(19): siRNA sense strand
aguauuucaugcaguacaa

SEQ ID NO: 56041 - RNA, 19 nt, Homo sapiens
  misc_RNA (1)...(19): siRNA sense strand
gauauggaaaccaccuaca

SEQ ID NO: 56042 - RNA, 19 nt, Homo sapiens
  misc_RNA (1)...(19): siRNA sense strand
gggccaaguuccacauucc

SEQ ID NO: 56043 - RNA, 19 nt, Homo sapiens
  misc_RNA (1)...(19): siRNA sense strand
uggaggguauuugauggaa

SEQ ID NO: 56044 - RNA, 19 nt, Homo sapiens
  misc_RNA (1)...(19): siRNA sense strand
ugaagauggcccuugacaa

SEQ ID NO: 56045 - RNA, 19 nt, Homo sapiens
  misc_RNA (1)...(19): siRNA sense strand
cgagccagaucugacgaau

SEQ ID NO: 56046 - RNA, 19 nt, Homo sapiens
  misc_RNA (1)...(19): siRNA sense strand
gguggugcccuucccuuca

SEQ ID NO: 56047 - RNA, 19 nt, Homo sapiens
  misc_RNA (1)...(19): siRNA sense strand
gagccagaucugacgaaug

SEQ ID NO: 56048 - RNA, 19 nt, Homo sapiens
  misc_RNA (1)...(19): siRNA sense strand
gaaauaugaagaccuguua

SEQ ID NO: 56049 - RNA, 19 nt, Homo sapiens
  misc_RNA (1)...(19): siRNA sense strand
gcaaguuuguggaggaaua

SEQ ID NO: 56050 - RNA, 19 nt, Homo sapiens
  misc_RNA (1)...(19): siRNA sense strand
uaaggaggcugaugauuuc

SEQ ID NO: 56051 - RNA, 19 nt, Homo sapiens
  misc_RNA (1)...(19): siRNA sense strand
ccacagaggcuaugcuaaa

SEQ ID NO: 56052 - RNA, 19 nt, Homo sapiens
  misc_RNA (1)...(19): siRNA sense strand
ucaagcggaucauaaagaa

SEQ ID NO: 56053 - RNA, 19 nt, Homo sapiens
  misc_RNA (1)...(19): siRNA sense strand
ccaggaggauguuuaagga

SEQ ID NO: 56054 - RNA, 19 nt, Homo sapiens
  misc_RNA (1)...(19): siRNA sense strand
gcagaagaacaugcaaaua

SEQ ID NO: 56055 - RNA, 19 nt, Homo sapiens
  misc_RNA (1)...(19): siRNA sense strand
uuaaggaggcugaugauuu

SEQ ID NO: 56056 - RNA, 19 nt, Homo sapiens
  misc_RNA (1)...(19): siRNA sense strand
cagaagaacaugcaaauag

SEQ ID NO: 56057 - RNA, 19 nt, Homo sapiens
  misc_RNA (1)...(19): siRNA sense strand
ucaccaaggagaacuauaa

SEQ ID NO: 56058 - RNA, 19 nt, Homo sapiens
  misc_RNA (1)...(19): siRNA sense strand
ccaggaaguuugaugugaa

SEQ ID NO: 56059 - RNA, 19 nt, Homo sapiens
  misc_RNA (1)...(19): siRNA sense strand
ggcaaggacuuccggauca

SEQ ID NO: 56060 - RNA, 19 nt, Homo sapiens
  misc_RNA (1)...(19): siRNA sense strand
cgaaauacguggaacucau

SEQ ID NO: 56061 - RNA, 19 nt, Homo sapiens
  misc_RNA (1)...(19): siRNA sense strand
acaagucgaugcuggagaa

SEQ ID NO: 56062 - RNA, 19 nt, Homo sapiens
  misc_RNA (1)...(19): siRNA sense strand
ugaugaagauggcccuuga

SEQ ID NO: 56063 - RNA, 19 nt, Homo sapiens
  misc_RNA (1)...(19): siRNA sense strand
ggaaauaugaagaccuguu

SEQ ID NO: 56064 - RNA, 19 nt, Homo sapiens
  misc_RNA (1)...(19): siRNA sense strand
ggaggcugaugauuucuuc

SEQ ID NO: 56065 - RNA, 19 nt, Homo sapiens
  misc_RNA (1)...(19): siRNA sense strand
caccaucccuggagcaaga

SEQ ID NO: 56066 - RNA, 19 nt, Homo sapiens
  misc_RNA (1)...(19): siRNA sense strand
gguccaacaucuaugacuu

SEQ ID NO: 56067 - RNA, 19 nt, Homo sapiens
  misc_RNA (1)...(19): siRNA sense strand
ccaagcaccugcacagucu

SEQ ID NO: 56068 - RNA, 19 nt, Homo sapiens
  misc_RNA (1)...(19): siRNA sense strand
gcaccaccgugaacuugga

SEQ ID NO: 56069 - RNA, 19 nt, Homo sapiens
  misc_RNA (1)...(19): siRNA sense strand
gaaauacguggaacucauc

SEQ ID NO: 56070 - RNA, 19 nt, Homo sapiens
  misc_RNA (1)...(19): siRNA sense strand
ucagcuaccucgucgauca

SEQ ID NO: 56071 - RNA, 19 nt, Homo sapiens
  misc_RNA (1)...(19): siRNA sense strand
gcaaggacuuccggaucaa

SEQ ID NO: 56072 - RNA, 19 nt, Homo sapiens
  misc_RNA (1)...(19): siRNA sense strand
gccaggaaguuugauguga

SEQ ID NO: 56073 - RNA, 19 nt, Homo sapiens
  misc_RNA (1)...(19): siRNA sense strand
agccagaucugacgaaugu

SEQ ID NO: 56074 - RNA, 19 nt, Homo sapiens
  misc_RNA (1)...(19): siRNA sense strand
gaacuacaacaccaacauc

SEQ ID NO: 56075 - RNA, 19 nt, Homo sapiens
  misc_RNA (1)...(19): siRNA sense strand
acaccaacaucaccacaga

SEQ ID NO: 56076 - RNA, 19 nt, Homo sapiens
  misc_RNA (1)...(19): siRNA sense strand
ccacagagaccagcaagau

SEQ ID NO: 56077 - RNA, 19 nt, Homo sapiens
  misc_RNA (1)...(19): siRNA sense strand
gagccauccuccaguuuua

SEQ ID NO: 56078 - RNA, 19 nt, Homo sapiens
  misc_RNA (1)...(19): siRNA sense strand
gcagaacaccacuaucaag

SEQ ID NO: 56079 - RNA, 19 nt, Homo sapiens
  misc_RNA (1)...(19): siRNA sense strand
ccaaccacacccugaagua

SEQ ID NO: 56080 - RNA, 19 nt, Homo sapiens
  misc_RNA (1)...(19): siRNA sense strand
caucccaggugguguggaa

SEQ ID NO: 56081 - RNA, 19 nt, Homo sapiens
  misc_RNA (1)...(19): siRNA sense strand
ccacauccaguauuucaug

SEQ ID NO: 56082 - RNA, 19 nt, Homo sapiens
  misc_RNA (1)...(19): siRNA sense strand
uccaguauuucaugcagua

SEQ ID NO: 56083 - RNA, 19 nt, Homo sapiens
  misc_RNA (1)...(19): siRNA sense strand
gcucaauggcuauguagau

SEQ ID NO: 56084 - RNA, 19 nt, Homo sapiens
  misc_RNA (1)...(19): siRNA sense strand
uugacaagaucgccuuuau

SEQ ID NO: 56085 - RNA, 19 nt, Homo sapiens
  misc_RNA (1)...(19): siRNA sense strand
ccagaucugacgaauguga

SEQ ID NO: 56086 - RNA, 19 nt, Homo sapiens
  misc_RNA (1)...(19): siRNA sense strand
ccucggccauguugagcua

SEQ ID NO: 56087 - RNA, 19 nt, Homo sapiens
  misc_RNA (1)...(19): siRNA sense strand
caguggcgcuggaggguau

SEQ ID NO: 56088 - RNA, 19 nt, Homo sapiens
  misc_RNA (1)...(19): siRNA sense strand
cgacgagcaugacaucaac

SEQ ID NO: 56089 - RNA, 19 nt, Homo sapiens
  misc_RNA (1)...(19): siRNA sense strand
gaggccaacuggaacuaca

SEQ ID NO: 56090 - RNA, 19 nt, Homo sapiens
  misc_RNA (1)...(19): siRNA sense strand
acagagaccagcaagauuc

SEQ ID NO: 56091 - RNA, 19 nt, Homo sapiens
  misc_RNA (1)...(19): siRNA sense strand
agaagaacaugcaaauagc

SEQ ID NO: 56092 - RNA, 19 nt, Homo sapiens
  misc_RNA (1)...(19): siRNA sense strand
ccaaggagaacuauaacca

SEQ ID NO: 56093 - RNA, 19 nt, Homo sapiens
  misc_RNA (1)...(19): siRNA sense strand
ggaacuacaacaccaacau

SEQ ID NO: 56094 - RNA, 19 nt, Homo sapiens
  misc_RNA (1)...(19): siRNA sense strand
gcgacgagcaugacaucaa

SEQ ID NO: 56095 - RNA, 19 nt, Homo sapiens
  misc_RNA (1)...(19): siRNA sense strand
gcacccaggccaggaaguu

SEQ ID NO: 56096 - RNA, 19 nt, Homo sapiens
  misc_RNA (1)...(19): siRNA sense strand
gacaagaucgccuuuaucc

SEQ ID NO: 56097 - RNA, 19 nt, Homo sapiens
  misc_RNA (1)...(19): siRNA sense strand
caauggcuauguagaugca

SEQ ID NO: 56098 - RNA, 19 nt, Homo sapiens
  misc_RNA (1)...(19): siRNA sense strand
gagagccauccuccaguuu

SEQ ID NO: 56099 - RNA, 19 nt, Homo sapiens
  misc_RNA (1)...(19): siRNA sense strand
gugaaccaguugcagaaca

SEQ ID NO: 56100 - RNA, 19 nt, Homo sapiens
  misc_RNA (1)...(19): siRNA sense strand
ugggccacauccaguauuu

SEQ ID NO: 56101 - RNA, 19 nt, Homo sapiens
  misc_RNA (1)...(19): siRNA sense strand
cagcaaguuuguggaggaa

SEQ ID NO: 56102 - RNA, 19 nt, Homo sapiens
  misc_RNA (1)...(19): siRNA sense strand
cuaucaagcggaucauaaa

SEQ ID NO: 56103 - RNA, 19 nt, Homo sapiens
  misc_RNA (1)...(19): siRNA sense strand
ggccacauccaguauuuca

SEQ ID NO: 56104 - RNA, 19 nt, Homo sapiens
  misc_RNA (1)...(19): siRNA sense strand
gaagcaucaccaaggagaa

SEQ ID NO: 56105 - RNA, 19 nt, Homo sapiens
  misc_RNA (1)...(19): siRNA sense strand
uugcagaacaccacuauca

SEQ ID NO: 56106 - RNA, 19 nt, Homo sapiens
  misc_RNA (1)...(19): siRNA sense strand
caugcaguacaaagacuua

SEQ ID NO: 56107 - RNA, 19 nt, Homo sapiens
  misc_RNA (1)...(19): siRNA sense strand
cacagaggcuaugcuaaag

SEQ ID NO: 56108 - RNA, 19 nt, Homo sapiens
  misc_RNA (1)...(19): siRNA sense strand
gaagccaugcagcugauca

SEQ ID NO: 56109 - RNA, 19 nt, Homo sapiens
  misc_RNA (1)...(19): siRNA sense strand
ggaggaguacaacaagauc

SEQ ID NO: 56110 - RNA, 19 nt, Homo sapiens
  misc_RNA (1)...(19): siRNA sense strand
caucauccaguuccaguuc

SEQ ID NO: 56111 - RNA, 19 nt, Homo sapiens
  misc_RNA (1)...(19): siRNA sense strand
aaaugggccacauccagua

SEQ ID NO: 56112 - RNA, 19 nt, Homo sapiens
  misc_RNA (1)...(19): siRNA sense strand
caccacagaggcuaugcua

SEQ ID NO: 56113 - RNA, 19 nt, Homo sapiens
  misc_RNA (1)...(19): siRNA sense strand
ccggcucaauggcuaugua

SEQ ID NO: 56114 - RNA, 19 nt, Homo sapiens
  misc_RNA (1)...(19): siRNA sense strand
acuaucaagcggaucauaa

SEQ ID NO: 56115 - RNA, 19 nt, Homo sapiens
  misc_RNA (1)...(19): siRNA sense strand
ggacaccacagaggcuaug

SEQ ID NO: 56116 - RNA, 19 nt, Homo sapiens
  misc_RNA (1)...(19): siRNA sense strand
gcaucaccaaggagaacua

SEQ ID NO: 56117 - RNA, 19 nt, Homo sapiens
  misc_RNA (1)...(19): siRNA sense strand
gugcuagcccucucagugu

SEQ ID NO: 56118 - RNA, 19 nt, Homo sapiens
  misc_RNA (1)...(19): siRNA sense strand
cucaauggcuauguagaug

SEQ ID NO: 56119 - RNA, 19 nt, Homo sapiens
  misc_RNA (1)...(19): siRNA sense strand
ugacaagaucgccuuuauc

SEQ ID NO: 56120 - RNA, 19 nt, Homo sapiens
  misc_RNA (1)...(19): siRNA sense strand
cacagagaccagcaagauu

SEQ ID NO: 56121 - RNA, 19 nt, Homo sapiens
  misc_RNA (1)...(19): siRNA sense strand
ggacgugcuagcccucuca

SEQ ID NO: 56122 - RNA, 19 nt, Homo sapiens
  misc_RNA (1)...(19): siRNA sense strand
aauaugaagaccuguuaug

SEQ ID NO: 56123 - RNA, 19 nt, Homo sapiens
  misc_RNA (1)...(19): siRNA sense strand
cggaagccaugcagcugau

SEQ ID NO: 56124 - RNA, 19 nt, Homo sapiens
  misc_RNA (1)...(19): siRNA sense strand
caggaaguuugaugugaac

SEQ ID NO: 56125 - RNA, 19 nt, Homo sapiens
  misc_RNA (1)...(19): siRNA sense strand
aguuugaugugaaccaguu

SEQ ID NO: 56126 - RNA, 19 nt, Homo sapiens
  misc_RNA (1)...(19): siRNA sense strand
guccaacaucuaugacuug

SEQ ID NO: 56127 - RNA, 19 nt, Homo sapiens
  misc_RNA (1)...(19): siRNA sense strand
ucagcuucaucauccaguu

SEQ ID NO: 56128 - RNA, 19 nt, Homo sapiens
  misc_RNA (1)...(19): siRNA sense strand
aguauuucaugcaguacaa

SEQ ID NO: 56129 - RNA, 19 nt, Homo sapiens
  misc_RNA (1)...(19): siRNA sense strand
gauauggaaaccaccuaca

SEQ ID NO: 56130 - RNA, 19 nt, Homo sapiens
  misc_RNA (1)...(19): siRNA sense strand
gggccaaguuccacauucc

SEQ ID NO: 56131 - RNA, 19 nt, Homo sapiens
  misc_RNA (1)...(19): siRNA sense strand
uggaggguauuugauggaa

SEQ ID NO: 56132 - RNA, 19 nt, Homo sapiens
  misc_RNA (1)...(19): siRNA sense strand
ugaagauggcccuugacaa

SEQ ID NO: 56133 - RNA, 19 nt, Homo sapiens
  misc_RNA (1)...(19): siRNA sense strand
cgagccagaucugacgaau

SEQ ID NO: 56134 - RNA, 19 nt, Homo sapiens
  misc_RNA (1)...(19): siRNA sense strand
gguggugcccuucccuuca

SEQ ID NO: 56135 - RNA, 19 nt, Homo sapiens
  misc_RNA (1)...(19): siRNA sense strand
gagccagaucugacgaaug

SEQ ID NO: 56136 - RNA, 19 nt, Homo sapiens
  misc_RNA (1)...(19): siRNA sense strand
caaggaaccuccacaagga

SEQ ID NO: 56137 - RNA, 19 nt, Homo sapiens
  misc_RNA (1)...(19): siRNA sense strand
gaugaugccuuaaaacuua

SEQ ID NO: 56138 - RNA, 19 nt, Homo sapiens
  misc_RNA (1)...(19): siRNA sense strand
ugagaagaaucgaccuuua

SEQ ID NO: 56139 - RNA, 19 nt, Homo sapiens
  misc_RNA (1)...(19): siRNA sense strand
caaccagaauuagcaaaua

SEQ ID NO: 56140 - RNA, 19 nt, Homo sapiens
  misc_RNA (1)...(19): siRNA sense strand
gagaagaaucgaccuuuaa

SEQ ID NO: 56141 - RNA, 19 nt, Homo sapiens
  misc_RNA (1)...(19): siRNA sense strand
ugacaaggaucaugcaaga

SEQ ID NO: 56142 - RNA, 19 nt, Homo sapiens
  misc_RNA (1)...(19): siRNA sense strand
gcaguucuguuuauaagga

SEQ ID NO: 56143 - RNA, 19 nt, Homo sapiens
  misc_RNA (1)...(19): siRNA sense strand
gacauggucuggauaguug

SEQ ID NO: 56144 - RNA, 19 nt, Homo sapiens
  misc_RNA (1)...(19): siRNA sense strand
gaccacaaccucuucagua

SEQ ID NO: 56145 - RNA, 19 nt, Homo sapiens
  misc_RNA (1)...(19): siRNA sense strand
gaaaggcauuaaguacaaa

SEQ ID NO: 56146 - RNA, 19 nt, Homo sapiens
  misc_RNA (1)...(19): siRNA sense strand
agaaaggcauuaaguacaa

SEQ ID NO: 56147 - RNA, 19 nt, Homo sapiens
  misc_RNA (1)...(19): siRNA sense strand
ggcauuaaguacaaauuug

SEQ ID NO: 56148 - RNA, 19 nt, Homo sapiens
  misc_RNA (1)...(19): siRNA sense strand
caaauaaaguagacauggu

SEQ ID NO: 56149 - RNA, 19 nt, Homo sapiens
  misc_RNA (1)...(19): siRNA sense strand
ucagauauuuccagagaau

SEQ ID NO: 56150 - RNA, 19 nt, Homo sapiens
  misc_RNA (1)...(19): siRNA sense strand
cacaaccucuucaguagaa

SEQ ID NO: 56151 - RNA, 19 nt, Homo sapiens
  misc_RNA (1)...(19): siRNA sense strand
ggagaaaggcauuaaguac

SEQ ID NO: 56152 - RNA, 19 nt, Homo sapiens
  misc_RNA (1)...(19): siRNA sense strand
ggccaccgcucaggaauga

SEQ ID NO: 56153 - RNA, 19 nt, Homo sapiens
  misc_RNA (1)...(19): siRNA sense strand
gagaaaggcauuaaguaca

SEQ ID NO: 56154 - RNA, 19 nt, Homo sapiens
  misc_RNA (1)...(19): siRNA sense strand
gaacaaccagaauuagcaa

SEQ ID NO: 56155 - RNA, 19 nt, Homo sapiens
  misc_RNA (1)...(19): siRNA sense strand
gguggcaguucuguuuaua

SEQ ID NO: 56156 - RNA, 19 nt, Homo sapiens
  misc_RNA (1)...(19): siRNA sense strand
aagucuagaugaugccuua

SEQ ID NO: 56157 - RNA, 19 nt, Homo sapiens
  misc_RNA (1)...(19): siRNA sense strand
gaucaugcaagacuuugaa

SEQ ID NO: 56158 - RNA, 19 nt, Homo sapiens
  misc_RNA (1)...(19): siRNA sense strand
cagcagagaacucaaggaa

SEQ ID NO: 56159 - RNA, 19 nt, Homo sapiens
  misc_RNA (1)...(19): siRNA sense strand
caggccaucuuaaacuauu

SEQ ID NO: 56160 - RNA, 19 nt, Homo sapiens
  misc_RNA (1)...(19): siRNA sense strand
gaggagaaaggcauuaagu

SEQ ID NO: 56161 - RNA, 19 nt, Homo sapiens
  misc_RNA (1)...(19): siRNA sense strand
auucagauauuuccagaga

SEQ ID NO: 56162 - RNA, 19 nt, Homo sapiens
  misc_RNA (1)...(19): siRNA sense strand
agaagaaucgaccuuuaaa

SEQ ID NO: 56163 - RNA, 19 nt, Homo sapiens
  misc_RNA (1)...(19): siRNA sense strand
gaagaccugguucuccauu

SEQ ID NO: 56164 - RNA, 19 nt, Homo sapiens
  misc_RNA (1)...(19): siRNA sense strand
gaagaaucgaccuuuaaag

SEQ ID NO: 56165 - RNA, 19 nt, Homo sapiens
  misc_RNA (1)...(19): siRNA sense strand
acaaggagcucauuuucuu

SEQ ID NO: 56166 - RNA, 19 nt, Homo sapiens
  misc_RNA (1)...(19): siRNA sense strand
caaggaucaugcaagacuu

SEQ ID NO: 56167 - RNA, 19 nt, Homo sapiens
  misc_RNA (1)...(19): siRNA sense strand
aguagaagguaaacagaau

SEQ ID NO: 56168 - RNA, 19 nt, Homo sapiens
  misc_RNA (1)...(19): siRNA sense strand
guugguggcaguucuguuu

SEQ ID NO: 56169 - RNA, 19 nt, Homo sapiens
  misc_RNA (1)...(19): siRNA sense strand
gauaguugguggcaguucu

SEQ ID NO: 56170 - RNA, 19 nt, Homo sapiens
  misc_RNA (1)...(19): siRNA sense strand
cccaggccaucuuaaacua

SEQ ID NO: 56171 - RNA, 19 nt, Homo sapiens
  misc_RNA (1)...(19): siRNA sense strand
uuacugaacaaccagaauu

SEQ ID NO: 56172 - RNA, 19 nt, Homo sapiens
  misc_RNA (1)...(19): siRNA sense strand
ucacccaggccaucuuaaa

SEQ ID NO: 56173 - RNA, 19 nt, Homo sapiens
  misc_RNA (1)...(19): siRNA sense strand
auaaggaagccaugaauca

SEQ ID NO: 56174 - RNA, 19 nt, Homo sapiens
  misc_RNA (1)...(19): siRNA sense strand
cagguguucucucugaugu

SEQ ID NO: 56175 - RNA, 19 nt, Homo sapiens
  misc_RNA (1)...(19): siRNA sense strand
uggcaguucuguuuauaag

SEQ ID NO: 56176 - RNA, 19 nt, Homo sapiens
  misc_RNA (1)...(19): siRNA sense strand
gugauuauggguaagaaga

SEQ ID NO: 56177 - RNA, 19 nt, Homo sapiens
  misc_RNA (1)...(19): siRNA sense strand
gaaugaccacaaccucuuc

SEQ ID NO: 56178 - RNA, 19 nt, Homo sapiens
  misc_RNA (1)...(19): siRNA sense strand
uacugaacaaccagaauua

SEQ ID NO: 56179 - RNA, 19 nt, Homo sapiens
  misc_RNA (1)...(19): siRNA sense strand
aggagaaaggcauuaagua

SEQ ID NO: 56180 - RNA, 19 nt, Homo sapiens
  misc_RNA (1)...(19): siRNA sense strand
ugaacaaccagaauuagca

SEQ ID NO: 56181 - RNA, 19 nt, Homo sapiens
  misc_RNA (1)...(19): siRNA sense strand
ccacaaccucuucaguaga

SEQ ID NO: 56182 - RNA, 19 nt, Homo sapiens
  misc_RNA (1)...(19): siRNA sense strand
aaucacccaggccaucuua

SEQ ID NO: 56183 - RNA, 19 nt, Homo sapiens
  misc_RNA (1)...(19): siRNA sense strand
acccagguguucucucuga

SEQ ID NO: 56184 - RNA, 19 nt, Homo sapiens
  misc_RNA (1)...(19): siRNA sense strand
agauauuuccagagaauga

SEQ ID NO: 56185 - RNA, 19 nt, Homo sapiens
  misc_RNA (1)...(19): siRNA sense strand
caguagaagguaaacagaa

SEQ ID NO: 56186 - RNA, 19 nt, Homo sapiens
  misc_RNA (1)...(19): siRNA sense strand
agaaugaccacaaccucuu

SEQ ID NO: 56187 - RNA, 19 nt, Homo sapiens
  misc_RNA (1)...(19): siRNA sense strand
gccagaauacccagguguu

SEQ ID NO: 56188 - RNA, 19 nt, Homo sapiens
  misc_RNA (1)...(19): siRNA sense strand
ggaggagaaaggcauuaag

SEQ ID NO: 56189 - RNA, 19 nt, Homo sapiens
  misc_RNA (1)...(19): siRNA sense strand
uuccagaagucuagaugau

SEQ ID NO: 56190 - RNA, 19 nt, Homo sapiens
  misc_RNA (1)...(19): siRNA sense strand
ggaucaugcaagacuuuga

SEQ ID NO: 56191 - RNA, 19 nt, Homo sapiens
  misc_RNA (1)...(19): siRNA sense strand
gaaucacccaggccaucuu

SEQ ID NO: 56192 - RNA, 19 nt, Homo sapiens
  misc_RNA (1)...(19): siRNA sense strand
accacaaccucuucaguag

SEQ ID NO: 56193 - RNA, 19 nt, Homo sapiens
  misc_RNA (1)...(19): siRNA sense strand
ccagaauuagcaaauaaag

SEQ ID NO: 56194 - RNA, 19 nt, Homo sapiens
  misc_RNA (1)...(19): siRNA sense strand
gaaguauaugagaagaaug

SEQ ID NO: 56195 - RNA, 19 nt, Homo sapiens
  misc_RNA (1)...(19): siRNA sense strand
ccaccgcucaggaaugaau

SEQ ID NO: 56196 - RNA, 19 nt, Homo sapiens
  misc_RNA (1)...(19): siRNA sense strand
guggcaguucuguuuauaa

SEQ ID NO: 56197 - RNA, 19 nt, Homo sapiens
  misc_RNA (1)...(19): siRNA sense strand
guagaagguaaacagaauc

SEQ ID NO: 56198 - RNA, 19 nt, Homo sapiens
  misc_RNA (1)...(19): siRNA sense strand
ucaguagaagguaaacaga

SEQ ID NO: 56199 - RNA, 19 nt, Homo sapiens
  misc_RNA (1)...(19): siRNA sense strand
ucuagaugaugccuuaaaa

SEQ ID NO: 56200 - RNA, 19 nt, Homo sapiens
  misc_RNA (1)...(19): siRNA sense strand
acaaggaucaugcaagacu

SEQ ID NO: 56201 - RNA, 19 nt, Homo sapiens
  misc_RNA (1)...(19): siRNA sense strand
ccuuaaaacuuacugaaca

SEQ ID NO: 56202 - RNA, 19 nt, Homo sapiens
  misc_RNA (1)...(19): siRNA sense strand
ggacagaggugcaacauuu

SEQ ID NO: 56203 - RNA, 19 nt, Homo sapiens
  misc_RNA (1)...(19): siRNA sense strand
guaaagugcuucugauauu

SEQ ID NO: 56204 - RNA, 19 nt, Homo sapiens
  misc_RNA (1)...(19): siRNA sense strand
gaacuacaacccagaggaa

SEQ ID NO: 56205 - RNA, 19 nt, Homo sapiens
  misc_RNA (1)...(19): siRNA sense strand
gauauuguuuccagacaga

SEQ ID NO: 56206 - RNA, 19 nt, Homo sapiens
  misc_RNA (1)...(19): siRNA sense strand
gaaaucaccagaaccuuca

SEQ ID NO: 56207 - RNA, 19 nt, Homo sapiens
  misc_RNA (1)...(19): siRNA sense strand
uaaagugcuucugauauug

SEQ ID NO: 56208 - RNA, 19 nt, Homo sapiens
  misc_RNA (1)...(19): siRNA sense strand
uaccugaccuucauuuaug

SEQ ID NO: 56209 - RNA, 19 nt, Homo sapiens
  misc_RNA (1)...(19): siRNA sense strand
gaacaacauggacaucaga

SEQ ID NO: 56210 - RNA, 19 nt, Homo sapiens
  misc_RNA (1)...(19): siRNA sense strand
ggccacuggugcugaauuu

SEQ ID NO: 56211 - RNA, 19 nt, Homo sapiens
  misc_RNA (1)...(19): siRNA sense strand
caacauggacaucagaaau

SEQ ID NO: 56212 - RNA, 19 nt, Homo sapiens
  misc_RNA (1)...(19): siRNA sense strand
ugaagaagcacaugcauca

SEQ ID NO: 56213 - RNA, 19 nt, Homo sapiens
  misc_RNA (1)...(19): siRNA sense strand
ggagguggcugugcaugug

SEQ ID NO: 56214 - RNA, 19 nt, Homo sapiens
  misc_RNA (1)...(19): siRNA sense strand
gggaguuuaugcaagguaa

SEQ ID NO: 56215 - RNA, 19 nt, Homo sapiens
  misc_RNA (1)...(19): siRNA sense strand
gguaaagugcuucugauau

SEQ ID NO: 56216 - RNA, 19 nt, Homo sapiens
  misc_RNA (1)...(19): siRNA sense strand
guaccugaccuucauuuau

SEQ ID NO: 56217 - RNA, 19 nt, Homo sapiens
  misc_RNA (1)...(19): siRNA sense strand
caucagaaaucaccagaac

SEQ ID NO: 56218 - RNA, 19 nt, Homo sapiens
  misc_RNA (1)...(19): siRNA sense strand
ugaagacuuuaguuccaua

SEQ ID NO: 56219 - RNA, 19 nt, Homo sapiens
  misc_RNA (1)...(19): siRNA sense strand
ucagauggcugggcuuuua

SEQ ID NO: 56220 - RNA, 19 nt, Homo sapiens
  misc_RNA (1)...(19): siRNA sense strand
gcaggcagcccaucuacug

SEQ ID NO: 56221 - RNA, 19 nt, Homo sapiens
  misc_RNA (1)...(19): siRNA sense strand
ggguaaagugcuucugaua

SEQ ID NO: 56222 - RNA, 19 nt, Homo sapiens
  misc_RNA (1)...(19): siRNA sense strand
gaccuucauuuauguucaa

SEQ ID NO: 56223 - RNA, 19 nt, Homo sapiens
  misc_RNA (1)...(19): siRNA sense strand
gugcaacauuugggaguuu

SEQ ID NO: 56224 - RNA, 19 nt, Homo sapiens
  misc_RNA (1)...(19): siRNA sense strand
gaguuuaugcaagguaaua

SEQ ID NO: 56225 - RNA, 19 nt, Homo sapiens
  misc_RNA (1)...(19): siRNA sense strand
ggaaguucgugcuguucug

SEQ ID NO: 56226 - RNA, 19 nt, Homo sapiens
  misc_RNA (1)...(19): siRNA sense strand
guaaaucuggcccuuggaa

SEQ ID NO: 56227 - RNA, 19 nt, Homo sapiens
  misc_RNA (1)...(19): siRNA sense strand
ggucguggguaaagugcuu

SEQ ID NO: 56228 - RNA, 19 nt, Homo sapiens
  misc_RNA (1)...(19): siRNA sense strand
uuaguuccauagcagauuu

SEQ ID NO: 56229 - RNA, 19 nt, Homo sapiens
  misc_RNA (1)...(19): siRNA sense strand
agacggguaugaccaggaa

SEQ ID NO: 56230 - RNA, 19 nt, Homo sapiens
  misc_RNA (1)...(19): siRNA sense strand
gaggcuuauugaagacuuu

SEQ ID NO: 56231 - RNA, 19 nt, Homo sapiens
  misc_RNA (1)...(19): siRNA sense strand
cacgacaacuggauaccaa

SEQ ID NO: 56232 - RNA, 19 nt, Homo sapiens
  misc_RNA (1)...(19): siRNA sense strand
ccagggcuguggcugaaga

SEQ ID NO: 56233 - RNA, 19 nt, Homo sapiens
  misc_RNA (1)...(19): siRNA sense strand
gaccaguucaagaggcuua

SEQ ID NO: 56234 - RNA, 19 nt, Homo sapiens
  misc_RNA (1)...(19): siRNA sense strand
agaggaaguucgugcuguu

SEQ ID NO: 56235 - RNA, 19 nt, Homo sapiens
  misc_RNA (1)...(19): siRNA sense strand
caacuggauaccaaccuuu

SEQ ID NO: 56236 - RNA, 19 nt, Homo sapiens
  misc_RNA (1)...(19): siRNA sense strand
gacuagaggacacgacuga

SEQ ID NO: 56237 - RNA, 19 nt, Homo sapiens
  misc_RNA (1)...(19): siRNA sense strand
agaagcacaugcaucagau

SEQ ID NO: 56238 - RNA, 19 nt, Homo sapiens
  misc_RNA (1)...(19): siRNA sense strand
acauggacaucagaaauca

SEQ ID NO: 56239 - RNA, 19 nt, Homo sapiens
  misc_RNA (1)...(19): siRNA sense strand
ggugcaacauuugggaguu

SEQ ID NO: 56240 - RNA, 19 nt, Homo sapiens
  misc_RNA (1)...(19): siRNA sense strand
ggaaaagcuccacaguuaa

SEQ ID NO: 56241 - RNA, 19 nt, Homo sapiens
  misc_RNA (1)...(19): siRNA sense strand
caagaggcuuauugaagac

SEQ ID NO: 56242 - RNA, 19 nt, Homo sapiens
  misc_RNA (1)...(19): siRNA sense strand
gacagaggugcaacauuug

SEQ ID NO: 56243 - RNA, 19 nt, Homo sapiens
  misc_RNA (1)...(19): siRNA sense strand
ugcaacauuugggaguuua

SEQ ID NO: 56244 - RNA, 19 nt, Homo sapiens
  misc_RNA (1)...(19): siRNA sense strand
agacuuuaguuccauagca

SEQ ID NO: 56245 - RNA, 19 nt, Homo sapiens
  misc_RNA (1)...(19): siRNA sense strand
acaacuggauaccaaccuu

SEQ ID NO: 56246 - RNA, 19 nt, Homo sapiens
  misc_RNA (1)...(19): siRNA sense strand
cuacaacccagaggaaguu

SEQ ID NO: 56247 - RNA, 19 nt, Homo sapiens
  misc_RNA (1)...(19): siRNA sense strand
aagaagcacaugcaucaga

SEQ ID NO: 56248 - RNA, 19 nt, Homo sapiens
  misc_RNA (1)...(19): siRNA sense strand
ugaccuucauuuauguuca

SEQ ID NO: 56249 - RNA, 19 nt, Homo sapiens
  misc_RNA (1)...(19): siRNA sense strand
guauuucugguucgucuug

SEQ ID NO: 56250 - RNA, 19 nt, Homo sapiens
  misc_RNA (1)...(19): siRNA sense strand
guggguaaagugcuucuga

SEQ ID NO: 56251 - RNA, 19 nt, Homo sapiens
  misc_RNA (1)...(19): siRNA sense strand
cagccacgacaacuggaua

SEQ ID NO: 56252 - RNA, 19 nt, Homo sapiens
  misc_RNA (1)...(19): siRNA sense strand
ggaaguuguaccugaccuu

SEQ ID NO: 56253 - RNA, 19 nt, Homo sapiens
  misc_RNA (1)...(19): siRNA sense strand
caacauuugggaguuuaug

SEQ ID NO: 56254 - RNA, 19 nt, Homo sapiens
  misc_RNA (1)...(19): siRNA sense strand
gaagacuuuaguuccauag

SEQ ID NO: 56255 - RNA, 19 nt, Homo sapiens
  misc_RNA (1)...(19): siRNA sense strand
ugcauguggucguggguaa

SEQ ID NO: 56256 - RNA, 19 nt, Homo sapiens
  misc_RNA (1)...(19): siRNA sense strand
agaacaacauggacaucag

SEQ ID NO: 56257 - RNA, 19 nt, Homo sapiens
  misc_RNA (1)...(19): siRNA sense strand
gcaacauuugggaguuuau

SEQ ID NO: 56258 - RNA, 19 nt, Homo sapiens
  misc_RNA (1)...(19): siRNA sense strand
aaucuggcccuuggaacua

SEQ ID NO: 56259 - RNA, 19 nt, Homo sapiens
  misc_RNA (1)...(19): siRNA sense strand
aaagugcuucugauauugu

SEQ ID NO: 56260 - RNA, 19 nt, Homo sapiens
  misc_RNA (1)...(19): siRNA sense strand
cauuuacauugaagaagca

SEQ ID NO: 56261 - RNA, 19 nt, Homo sapiens
  misc_RNA (1)...(19): siRNA sense strand
gagaagaauuucagcaaga

SEQ ID NO: 56262 - RNA, 19 nt, Homo sapiens
  misc_RNA (1)...(19): siRNA sense strand
ggacaauaacgccaacaua

SEQ ID NO: 56263 - RNA, 19 nt, Homo sapiens
  misc_RNA (1)...(19): siRNA sense strand
ggcauuggcuggagaagaa

SEQ ID NO: 56264 - RNA, 19 nt, Homo sapiens
  misc_RNA (1)...(19): siRNA sense strand
aaacuagauuagcugguua

SEQ ID NO: 56265 - RNA, 19 nt, Homo sapiens
  misc_RNA (1)...(19): siRNA sense strand
gacaauaacgccaacauag

SEQ ID NO: 56266 - RNA, 19 nt, Homo sapiens
  misc_RNA (1)...(19): siRNA sense strand
agaaggaggugacaacagu

SEQ ID NO: 56267 - RNA, 19 nt, Homo sapiens
  misc_RNA (1)...(19): siRNA sense strand
gcaaugguacccaggagaa

SEQ ID NO: 56268 - RNA, 19 nt, Homo sapiens
  misc_RNA (1)...(19): siRNA sense strand
gaaccaggaagaucgaugu

SEQ ID NO: 56269 - RNA, 19 nt, Homo sapiens
  misc_RNA (1)...(19): siRNA sense strand
ccacaugccaccuucuuga

SEQ ID NO: 56270 - RNA, 19 nt, Homo sapiens
  misc_RNA (1)...(19): siRNA sense strand
gacaacaguggcaauggua

SEQ ID NO: 56271 - RNA, 19 nt, Homo sapiens
  misc_RNA (1)...(19): siRNA sense strand
ccuccucgaugccuacaaa

SEQ ID NO: 56272 - RNA, 19 nt, Homo sapiens
  misc_RNA (1)...(19): siRNA sense strand
gugcaugucuccaguacag

SEQ ID NO: 56273 - RNA, 19 nt, Homo sapiens
  misc_RNA (1)...(19): siRNA sense strand
cuacaaacaggugaaauug

SEQ ID NO: 56274 - RNA, 19 nt, Homo sapiens
  misc_RNA (1)...(19): siRNA sense strand
ugacaacaguggcaauggu

SEQ ID NO: 56275 - RNA, 19 nt, Homo sapiens
  misc_RNA (1)...(19): siRNA sense strand
ccuacaaacaggugaaauu

SEQ ID NO: 56276 - RNA, 19 nt, Homo sapiens
  misc_RNA (1)...(19): siRNA sense strand
cagcaagagaugaaagaaa

SEQ ID NO: 56277 - RNA, 19 nt, Homo sapiens
  misc_RNA (1)...(19): siRNA sense strand
ucagauggcugggcgauac

SEQ ID NO: 56278 - RNA, 19 nt, Homo sapiens
  misc_RNA (1)...(19): siRNA sense strand
uggaagaguucuccucagu

SEQ ID NO: 56279 - RNA, 19 nt, Homo sapiens
  misc_RNA (1)...(19): siRNA sense strand
gcugaucacacugcaaauu

SEQ ID NO: 56280 - RNA, 19 nt, Homo sapiens
  misc_RNA (1)...(19): siRNA sense strand
ggacuccucuuugucuuuu

SEQ ID NO: 56281 - RNA, 19 nt, Homo sapiens
  misc_RNA (1)...(19): siRNA sense strand
gcaugucuccaguacagaa

SEQ ID NO: 56282 - RNA, 19 nt, Homo sapiens
  misc_RNA (1)...(19): siRNA sense strand
gaagaauuucagcaagaga

SEQ ID NO: 56283 - RNA, 19 nt, Homo sapiens
  misc_RNA (1)...(19): siRNA sense strand
ugaagaagcaccagaacca

SEQ ID NO: 56284 - RNA, 19 nt, Homo sapiens
  misc_RNA (1)...(19): siRNA sense strand
gcugaccgcauggacaaua

SEQ ID NO: 56285 - RNA, 19 nt, Homo sapiens
  misc_RNA (1)...(19): siRNA sense strand
gacagaaaauugcuuaucu

SEQ ID NO: 56286 - RNA, 19 nt, Homo sapiens
  misc_RNA (1)...(19): siRNA sense strand
cugcaaauucugccaguuu

SEQ ID NO: 56287 - RNA, 19 nt, Homo sapiens
  misc_RNA (1)...(19): siRNA sense strand
caugccaccuucuugacuu

SEQ ID NO: 56288 - RNA, 19 nt, Homo sapiens
  misc_RNA (1)...(19): siRNA sense strand
gaauuucagcaagagauga

SEQ ID NO: 56289 - RNA, 19 nt, Homo sapiens
  misc_RNA (1)...(19): siRNA sense strand
uugcuuaucugggaggaaa

SEQ ID NO: 56290 - RNA, 19 nt, Homo sapiens
  misc_RNA (1)...(19): siRNA sense strand
caauaacgccaacauagcu

SEQ ID NO: 56291 - RNA, 19 nt, Homo sapiens
  misc_RNA (1)...(19): siRNA sense strand
cugcuggucuacauugaug

SEQ ID NO: 56292 - RNA, 19 nt, Homo sapiens
  misc_RNA (1)...(19): siRNA sense strand
agcaagagaugaaagaaaa

SEQ ID NO: 56293 - RNA, 19 nt, Homo sapiens
  misc_RNA (1)...(19): siRNA sense strand
gggacuccucuuugucuuu

SEQ ID NO: 56294 - RNA, 19 nt, Homo sapiens
  misc_RNA (1)...(19): siRNA sense strand
cugaccgcauggacaauaa

SEQ ID NO: 56295 - RNA, 19 nt, Homo sapiens
  misc_RNA (1)...(19): siRNA sense strand
gugcagagacagaaaauug

SEQ ID NO: 56296 - RNA, 19 nt, Homo sapiens
  misc_RNA (1)...(19): siRNA sense strand
agaagaauuucagcaagag

SEQ ID NO: 56297 - RNA, 19 nt, Homo sapiens
  misc_RNA (1)...(19): siRNA sense strand
ugaucacacugcaaauucu

SEQ ID NO: 56298 - RNA, 19 nt, Homo sapiens
  misc_RNA (1)...(19): siRNA sense strand
aaaacuagauuagcugguu

SEQ ID NO: 56299 - RNA, 19 nt, Homo sapiens
  misc_RNA (1)...(19): siRNA sense strand
gaucacacugcaaauucug

SEQ ID NO: 56300 - RNA, 19 nt, Homo sapiens
  misc_RNA (1)...(19): siRNA sense strand
uggagaagaauuucagcaa

SEQ ID NO: 56301 - RNA, 19 nt, Homo sapiens
  misc_RNA (1)...(19): siRNA sense strand
gaagcaccagaaccaggaa

SEQ ID NO: 56302 - RNA, 19 nt, Homo sapiens
  misc_RNA (1)...(19): siRNA sense strand
uccgcaaacugguggaaga

SEQ ID NO: 56303 - RNA, 19 nt, Homo sapiens
  misc_RNA (1)...(19): siRNA sense strand
guacagaaggaggugacaa

SEQ ID NO: 56304 - RNA, 19 nt, Homo sapiens
  misc_RNA (1)...(19): siRNA sense strand
cauccucagcguagacuug

SEQ ID NO: 56305 - RNA, 19 nt, Homo sapiens
  misc_RNA (1)...(19): siRNA sense strand
uucaagaaguccggcauug

SEQ ID NO: 56306 - RNA, 19 nt, Homo sapiens
  misc_RNA (1)...(19): siRNA sense strand
gcaccagaaccaggaagau

SEQ ID NO: 56307 - RNA, 19 nt, Homo sapiens
  misc_RNA (1)...(19): siRNA sense strand
uagacuugcugaucacacu

SEQ ID NO: 56308 - RNA, 19 nt, Homo sapiens
  misc_RNA (1)...(19): siRNA sense strand
gcauugugcagagacagaa

SEQ ID NO: 56309 - RNA, 19 nt, Homo sapiens
  misc_RNA (1)...(19): siRNA sense strand
gagaagaauuucagcaaga

SEQ ID NO: 56310 - RNA, 19 nt, Homo sapiens
  misc_RNA (1)...(19): siRNA sense strand
ggacaauaacgccaacaua

SEQ ID NO: 56311 - RNA, 19 nt, Homo sapiens
  misc_RNA (1)...(19): siRNA sense strand
ggcauuggcuggagaagaa

SEQ ID NO: 56312 - RNA, 19 nt, Homo sapiens
  misc_RNA (1)...(19): siRNA sense strand
aaacuagauuagcugguua

SEQ ID NO: 56313 - RNA, 19 nt, Homo sapiens
  misc_RNA (1)...(19): siRNA sense strand
gacaauaacgccaacauag

SEQ ID NO: 56314 - RNA, 19 nt, Homo sapiens
  misc_RNA (1)...(19): siRNA sense strand
agaaggaggugacaacagu

SEQ ID NO: 56315 - RNA, 19 nt, Homo sapiens
  misc_RNA (1)...(19): siRNA sense strand
gcaaugguacccaggagaa

SEQ ID NO: 56316 - RNA, 19 nt, Homo sapiens
  misc_RNA (1)...(19): siRNA sense strand
gaaccaggaagaucgaugu

SEQ ID NO: 56317 - RNA, 19 nt, Homo sapiens
  misc_RNA (1)...(19): siRNA sense strand
ccacaugccaccuucuuga

SEQ ID NO: 56318 - RNA, 19 nt, Homo sapiens
  misc_RNA (1)...(19): siRNA sense strand
gacaacaguggcaauggua

SEQ ID NO: 56319 - RNA, 19 nt, Homo sapiens
  misc_RNA (1)...(19): siRNA sense strand
ccuccucgaugccuacaaa

SEQ ID NO: 56320 - RNA, 19 nt, Homo sapiens
  misc_RNA (1)...(19): siRNA sense strand
gugcaugucuccaguacag

SEQ ID NO: 56321 - RNA, 19 nt, Homo sapiens
  misc_RNA (1)...(19): siRNA sense strand
cuacaaacaggugaaauug

SEQ ID NO: 56322 - RNA, 19 nt, Homo sapiens
  misc_RNA (1)...(19): siRNA sense strand
ugacaacaguggcaauggu

SEQ ID NO: 56323 - RNA, 19 nt, Homo sapiens
  misc_RNA (1)...(19): siRNA sense strand
ccuacaaacaggugaaauu

SEQ ID NO: 56324 - RNA, 19 nt, Homo sapiens
  misc_RNA (1)...(19): siRNA sense strand
cagcaagagaugaaagaaa

SEQ ID NO: 56325 - RNA, 19 nt, Homo sapiens
  misc_RNA (1)...(19): siRNA sense strand
ucagauggcugggcgauac

SEQ ID NO: 56326 - RNA, 19 nt, Homo sapiens
  misc_RNA (1)...(19): siRNA sense strand
uggaagaguucuccucagu

SEQ ID NO: 56327 - RNA, 19 nt, Homo sapiens
  misc_RNA (1)...(19): siRNA sense strand
gcugaucacacugcaaauu

SEQ ID NO: 56328 - RNA, 19 nt, Homo sapiens
  misc_RNA (1)...(19): siRNA sense strand
ggacuccucuuugucuuuu

SEQ ID NO: 56329 - RNA, 19 nt, Homo sapiens
  misc_RNA (1)...(19): siRNA sense strand
gcaugucuccaguacagaa

SEQ ID NO: 56330 - RNA, 19 nt, Homo sapiens
  misc_RNA (1)...(19): siRNA sense strand
gaagaauuucagcaagaga

SEQ ID NO: 56331 - RNA, 19 nt, Homo sapiens
  misc_RNA (1)...(19): siRNA sense strand
ugaagaagcaccagaacca

SEQ ID NO: 56332 - RNA, 19 nt, Homo sapiens
  misc_RNA (1)...(19): siRNA sense strand
gcugaccgcauggacaaua

SEQ ID NO: 56333 - RNA, 19 nt, Homo sapiens
  misc_RNA (1)...(19): siRNA sense strand
gacagaaaauugcuuaucu

SEQ ID NO: 56334 - RNA, 19 nt, Homo sapiens
  misc_RNA (1)...(19): siRNA sense strand
cugcaaauucugccaguuu

SEQ ID NO: 56335 - RNA, 19 nt, Homo sapiens
  misc_RNA (1)...(19): siRNA sense strand
caugccaccuucuugacuu

SEQ ID NO: 56336 - RNA, 19 nt, Homo sapiens
  misc_RNA (1)...(19): siRNA sense strand
gaauuucagcaagagauga

SEQ ID NO: 56337 - RNA, 19 nt, Homo sapiens
  misc_RNA (1)...(19): siRNA sense strand
uugcuuaucugggaggaaa

SEQ ID NO: 56338 - RNA, 19 nt, Homo sapiens
  misc_RNA (1)...(19): siRNA sense strand
caauaacgccaacauagcu

SEQ ID NO: 56339 - RNA, 19 nt, Homo sapiens
  misc_RNA (1)...(19): siRNA sense strand
cugcuggucuacauugaug

SEQ ID NO: 56340 - RNA, 19 nt, Homo sapiens
  misc_RNA (1)...(19): siRNA sense strand
agcaagagaugaaagaaaa

SEQ ID NO: 56341 - RNA, 19 nt, Homo sapiens
  misc_RNA (1)...(19): siRNA sense strand
gggacuccucuuugucuuu

SEQ ID NO: 56342 - RNA, 19 nt, Homo sapiens
  misc_RNA (1)...(19): siRNA sense strand
cugaccgcauggacaauaa

SEQ ID NO: 56343 - RNA, 19 nt, Homo sapiens
  misc_RNA (1)...(19): siRNA sense strand
gugcagagacagaaaauug

SEQ ID NO: 56344 - RNA, 19 nt, Homo sapiens
  misc_RNA (1)...(19): siRNA sense strand
agaagaauuucagcaagag

SEQ ID NO: 56345 - RNA, 19 nt, Homo sapiens
  misc_RNA (1)...(19): siRNA sense strand
ugaucacacugcaaauucu

SEQ ID NO: 56346 - RNA, 19 nt, Homo sapiens
  misc_RNA (1)...(19): siRNA sense strand
aaaacuagauuagcugguu

SEQ ID NO: 56347 - RNA, 19 nt, Homo sapiens
  misc_RNA (1)...(19): siRNA sense strand
gaucacacugcaaauucug

SEQ ID NO: 56348 - RNA, 19 nt, Homo sapiens
  misc_RNA (1)...(19): siRNA sense strand
uggagaagaauuucagcaa

SEQ ID NO: 56349 - RNA, 19 nt, Homo sapiens
  misc_RNA (1)...(19): siRNA sense strand
gaagcaccagaaccaggaa

SEQ ID NO: 56350 - RNA, 19 nt, Homo sapiens
  misc_RNA (1)...(19): siRNA sense strand
uccgcaaacugguggaaga

SEQ ID NO: 56351 - RNA, 19 nt, Homo sapiens
  misc_RNA (1)...(19): siRNA sense strand
guacagaaggaggugacaa

SEQ ID NO: 56352 - RNA, 19 nt, Homo sapiens
  misc_RNA (1)...(19): siRNA sense strand
cauccucagcguagacuug

SEQ ID NO: 56353 - RNA, 19 nt, Homo sapiens
  misc_RNA (1)...(19): siRNA sense strand
uucaagaaguccggcauug

SEQ ID NO: 56354 - RNA, 19 nt, Homo sapiens
  misc_RNA (1)...(19): siRNA sense strand
gcaccagaaccaggaagau

SEQ ID NO: 56355 - RNA, 19 nt, Homo sapiens
  misc_RNA (1)...(19): siRNA sense strand
uagacuugcugaucacacu

SEQ ID NO: 56356 - RNA, 19 nt, Homo sapiens
  misc_RNA (1)...(19): siRNA sense strand
gcauugugcagagacagaa

SEQ ID NO: 56357 - RNA, 19 nt, Homo sapiens
  misc_RNA (1)...(19): siRNA sense strand
gaaagccugucgaauguuc

SEQ ID NO: 56358 - RNA, 19 nt, Homo sapiens
  misc_RNA (1)...(19): siRNA sense strand
ggacuucucuguucguauc

SEQ ID NO: 56359 - RNA, 19 nt, Homo sapiens
  misc_RNA (1)...(19): siRNA sense strand
ggacauaugccaucucauc

SEQ ID NO: 56360 - RNA, 19 nt, Homo sapiens
  misc_RNA (1)...(19): siRNA sense strand
gcauggaccuugucuguac

SEQ ID NO: 56361 - RNA, 19 nt, Homo sapiens
  misc_RNA (1)...(19): siRNA sense strand
aaacaaauacggcgcauug

SEQ ID NO: 56362 - RNA, 19 nt, Homo sapiens
  misc_RNA (1)...(19): siRNA sense strand
gagaagauccaacccauca

SEQ ID NO: 56363 - RNA, 19 nt, Homo sapiens
  misc_RNA (1)...(19): siRNA sense strand
gaaacuaaaguccugaaga

SEQ ID NO: 56364 - RNA, 19 nt, Homo sapiens
  misc_RNA (1)...(19): siRNA sense strand
gaucauggguguguuugug

SEQ ID NO: 56365 - RNA, 19 nt, Homo sapiens
  misc_RNA (1)...(19): siRNA sense strand
ggaaggcaguggcugagau

SEQ ID NO: 56366 - RNA, 19 nt, Homo sapiens
  misc_RNA (1)...(19): siRNA sense strand
gaccuugucuguacucauc

SEQ ID NO: 56367 - RNA, 19 nt, Homo sapiens
  misc_RNA (1)...(19): siRNA sense strand
caaggugaccaacuucuuu

SEQ ID NO: 56368 - RNA, 19 nt, Homo sapiens
  misc_RNA (1)...(19): siRNA sense strand
cuacaggauugcucagaaa

SEQ ID NO: 56369 - RNA, 19 nt, Homo sapiens
  misc_RNA (1)...(19): siRNA sense strand
uggaaagccugucgaaugu

SEQ ID NO: 56370 - RNA, 19 nt, Homo sapiens
  misc_RNA (1)...(19): siRNA sense strand
aaacuaaaguccugaagac

SEQ ID NO: 56371 - RNA, 19 nt, Homo sapiens
  misc_RNA (1)...(19): siRNA sense strand
ccauagagacggugaguau

SEQ ID NO: 56372 - RNA, 19 nt, Homo sapiens
  misc_RNA (1)...(19): siRNA sense strand
ggacagguauugggcuauc

SEQ ID NO: 56373 - RNA, 19 nt, Homo sapiens
  misc_RNA (1)...(19): siRNA sense strand
gaaggcaguggcugagauu

SEQ ID NO: 56374 - RNA, 19 nt, Homo sapiens
  misc_RNA (1)...(19): siRNA sense strand
gcuguuggcuaccuuucuu

SEQ ID NO: 56375 - RNA, 19 nt, Homo sapiens
  misc_RNA (1)...(19): siRNA sense strand
caggacauaugccaucuca

SEQ ID NO: 56376 - RNA, 19 nt, Homo sapiens
  misc_RNA (1)...(19): siRNA sense strand
gcaaucugguuuaccugau

SEQ ID NO: 56377 - RNA, 19 nt, Homo sapiens
  misc_RNA (1)...(19): siRNA sense strand
caggauugcucagaaacaa

SEQ ID NO: 56378 - RNA, 19 nt, Homo sapiens
  misc_RNA (1)...(19): siRNA sense strand
gaagauccaacccaucaca

SEQ ID NO: 56379 - RNA, 19 nt, Homo sapiens
  misc_RNA (1)...(19): siRNA sense strand
gagacggugaguaucaaua

SEQ ID NO: 56380 - RNA, 19 nt, Homo sapiens
  misc_RNA (1)...(19): siRNA sense strand
ugaagacucugucggugau

SEQ ID NO: 56381 - RNA, 19 nt, Homo sapiens
  misc_RNA (1)...(19): siRNA sense strand
cuaccuuucuucaucuuga

SEQ ID NO: 56382 - RNA, 19 nt, Homo sapiens
  misc_RNA (1)...(19): siRNA sense strand
cgacgaauaaugccauaga

SEQ ID NO: 56383 - RNA, 19 nt, Homo sapiens
  misc_RNA (1)...(19): siRNA sense strand
gcaguccacgccaagaauu

SEQ ID NO: 56384 - RNA, 19 nt, Homo sapiens
  misc_RNA (1)...(19): siRNA sense strand
agacggugaguaucaauaa

SEQ ID NO: 56385 - RNA, 19 nt, Homo sapiens
  misc_RNA (1)...(19): siRNA sense strand
ggauugcucagaaacaaau

SEQ ID NO: 56386 - RNA, 19 nt, Homo sapiens
  misc_RNA (1)...(19): siRNA sense strand
ggagugcaaucugguuuac

SEQ ID NO: 56387 - RNA, 19 nt, Homo sapiens
  misc_RNA (1)...(19): siRNA sense strand
gaggcuccaucuccaagga

SEQ ID NO: 56388 - RNA, 19 nt, Homo sapiens
  misc_RNA (1)...(19): siRNA sense strand
gauccaacccaucacacaa

SEQ ID NO: 56389 - RNA, 19 nt, Homo sapiens
  misc_RNA (1)...(19): siRNA sense strand
gaucagcguggacagguau

SEQ ID NO: 56390 - RNA, 19 nt, Homo sapiens
  misc_RNA (1)...(19): siRNA sense strand
ugacguguuugugugguuu

SEQ ID NO: 56391 - RNA, 19 nt, Homo sapiens
  misc_RNA (1)...(19): siRNA sense strand
uaagauguccuucaaaaga

SEQ ID NO: 56392 - RNA, 19 nt, Homo sapiens
  misc_RNA (1)...(19): siRNA sense strand
ucuacaggauugcucagaa

SEQ ID NO: 56393 - RNA, 19 nt, Homo sapiens
  misc_RNA (1)...(19): siRNA sense strand
gugaguaucaauaacaaug

SEQ ID NO: 56394 - RNA, 19 nt, Homo sapiens
  misc_RNA (1)...(19): siRNA sense strand
guucucaaccggaaaguuc

SEQ ID NO: 56395 - RNA, 19 nt, Homo sapiens
  misc_RNA (1)...(19): siRNA sense strand
accaggaucuacaggauug

SEQ ID NO: 56396 - RNA, 19 nt, Homo sapiens
  misc_RNA (1)...(19): siRNA sense strand
uauccucacugccuguuuc

SEQ ID NO: 56397 - RNA, 19 nt, Homo sapiens
  misc_RNA (1)...(19): siRNA sense strand
caccacagguaauggaaag

SEQ ID NO: 56398 - RNA, 19 nt, Homo sapiens
  misc_RNA (1)...(19): siRNA sense strand
ccaucaugauugucaccua

SEQ ID NO: 56399 - RNA, 19 nt, Homo sapiens
  misc_RNA (1)...(19): siRNA sense strand
caaucugguuuaccugauc

SEQ ID NO: 56400 - RNA, 19 nt, Homo sapiens
  misc_RNA (1)...(19): siRNA sense strand
gacgaauaaugccauagag

SEQ ID NO: 56401 - RNA, 19 nt, Homo sapiens
  misc_RNA (1)...(19): siRNA sense strand
acaccaggaucuacaggau

SEQ ID NO: 56402 - RNA, 19 nt, Homo sapiens
  misc_RNA (1)...(19): siRNA sense strand
uaacaucuggguggccuuu

SEQ ID NO: 56403 - RNA, 19 nt, Homo sapiens
  misc_RNA (1)...(19): siRNA sense strand
gcauugauuccaacaccuu

SEQ ID NO: 56404 - RNA, 19 nt, Homo sapiens
  misc_RNA (1)...(19): siRNA sense strand
cagcccuucugcauugauu

SEQ ID NO: 56405 - RNA, 19 nt, Homo sapiens
  misc_RNA (1)...(19): siRNA sense strand
gagaaacuaaaguccugaa

SEQ ID NO: 56406 - RNA, 19 nt, Homo sapiens
  misc_RNA (1)...(19): siRNA sense strand
gaaacaaauacggcgcauu

SEQ ID NO: 56407 - RNA, 19 nt, Homo sapiens
  misc_RNA (1)...(19): siRNA sense strand
ggugaucauggguguguuu

SEQ ID NO: 56408 - RNA, 19 nt, Homo sapiens
  misc_RNA (1)...(19): siRNA sense strand
uagagacggugaguaucaa

SEQ ID NO: 56409 - RNA, 19 nt, Homo sapiens
  misc_RNA (1)...(19): siRNA sense strand
ugaucagcguggacaggua

SEQ ID NO: 56410 - RNA, 19 nt, Homo sapiens
  misc_RNA (1)...(19): siRNA sense strand
acaucuggguggccuuuga

SEQ ID NO: 56411 - RNA, 19 nt, Homo sapiens
  misc_RNA (1)...(19): siRNA sense strand
ggaaagccugucgaauguu

SEQ ID NO: 56412 - RNA, 19 nt, Homo sapiens
  misc_RNA (1)...(19): siRNA sense strand
cuccagcccuuuccgguau

SEQ ID NO: 56413 - RNA, 19 nt, Homo sapiens
  misc_RNA (1)...(19): siRNA sense strand
uaucggucauauuggacua

SEQ ID NO: 56414 - RNA, 19 nt, Homo sapiens
  misc_RNA (1)...(19): siRNA sense strand
caaggagugcaaucugguu

SEQ ID NO: 56415 - RNA, 19 nt, Homo sapiens
  misc_RNA (1)...(19): siRNA sense strand
gaccaacuucuuugucauc

SEQ ID NO: 56416 - RNA, 19 nt, Homo sapiens
  misc_RNA (1)...(19): siRNA sense strand
ugccagaccaccacaggua

SEQ ID NO: 56417 - RNA, 19 nt, Homo sapiens
  misc_RNA (1)...(19): siRNA sense strand
ugucuguacucaucuccuu

SEQ ID NO: 56418 - RNA, 19 nt, Homo sapiens
  misc_RNA (1)...(19): siRNA sense strand
ccaaggugaccaacuucuu

SEQ ID NO: 56419 - RNA, 19 nt, Homo sapiens
  misc_RNA (1)...(19): siRNA sense strand
cuaugacacugacgucucu

SEQ ID NO: 56420 - RNA, 19 nt, Homo sapiens
  misc_RNA (1)...(19): siRNA sense strand
cggugaguaucaauaacaa

SEQ ID NO: 56421 - RNA, 19 nt, Homo sapiens
  misc_RNA (1)...(19): siRNA sense strand
uaauggaaagccugucgaa

SEQ ID NO: 56422 - RNA, 19 nt, Homo sapiens
  misc_RNA (1)...(19): siRNA sense strand
gccagaccaccacagguaa

SEQ ID NO: 56423 - RNA, 19 nt, Homo sapiens
  misc_RNA (1)...(19): siRNA sense strand
cagcaguccacgccaagaa

SEQ ID NO: 56424 - RNA, 19 nt, Homo sapiens
  misc_RNA (1)...(19): siRNA sense strand
uggcugagaccauagacaa

SEQ ID NO: 56425 - RNA, 19 nt, Homo sapiens
  misc_RNA (1)...(19): siRNA sense strand
caaaagagaaacuaaaguc

SEQ ID NO: 56426 - RNA, 19 nt, Homo sapiens
  misc_RNA (1)...(19): siRNA sense strand
auggaaagccugucgaaug

SEQ ID NO: 56427 - RNA, 19 nt, Homo sapiens
  misc_RNA (1)...(19): siRNA sense strand
gcuggcuucuggcccuuug

SEQ ID NO: 56428 - RNA, 19 nt, Homo sapiens
  misc_RNA (1)...(19): siRNA sense strand
uggcauggaccuugucugu

SEQ ID NO: 56429 - RNA, 19 nt, Homo sapiens
  misc_RNA (1)...(19): siRNA sense strand
auagagacggugaguauca

SEQ ID NO: 56430 - RNA, 19 nt, Homo sapiens
  misc_RNA (1)...(19): siRNA sense strand
gguggccuuugacaucaug

SEQ ID NO: 56431 - RNA, 19 nt, Homo sapiens
  misc_RNA (1)...(19): siRNA sense strand
gaccaccacagguaaugga

SEQ ID NO: 56432 - RNA, 19 nt, Homo sapiens
  misc_RNA (1)...(19): siRNA sense strand
ggcauggaccuugucugua

SEQ ID NO: 56433 - RNA, 19 nt, Homo sapiens
  misc_RNA (1)...(19): siRNA sense strand
ucagcuggcacaaggcaaa

SEQ ID NO: 56434 - RNA, 19 nt, Homo sapiens
  misc_RNA (1)...(19): siRNA sense strand
cccuaucggucauauugga

SEQ ID NO: 56435 - RNA, 19 nt, Homo sapiens
  misc_RNA (1)...(19): siRNA sense strand
ccaccacagguaauggaaa

SEQ ID NO: 56436 - RNA, 19 nt, Homo sapiens
  misc_RNA (1)...(19): siRNA sense strand
gacuuugcccugcgacgaa

SEQ ID NO: 56437 - RNA, 19 nt, Homo sapiens
  misc_RNA (1)...(19): siRNA sense strand
ugguuugggugggcuaauu

SEQ ID NO: 56438 - RNA, 19 nt, Homo sapiens
  misc_RNA (1)...(19): siRNA sense strand
cccuuuggguccuucugua

SEQ ID NO: 56439 - RNA, 19 nt, Homo sapiens
  misc_RNA (1)...(19): siRNA sense strand
gaagaaagccacucagaug

SEQ ID NO: 56440 - RNA, 19 nt, Homo sapiens
  misc_RNA (1)...(19): siRNA sense strand
guaggugaguggaaauuca

SEQ ID NO: 56441 - RNA, 19 nt, Homo sapiens
  misc_RNA (1)...(19): siRNA sense strand
gagaagaaagccacucaga

SEQ ID NO: 56442 - RNA, 19 nt, Homo sapiens
  misc_RNA (1)...(19): siRNA sense strand
gcaagcgagucaacaccaa

SEQ ID NO: 56443 - RNA, 19 nt, Homo sapiens
  misc_RNA (1)...(19): siRNA sense strand
ucacguggcugggcuaugu

SEQ ID NO: 56444 - RNA, 19 nt, Homo sapiens
  misc_RNA (1)...(19): siRNA sense strand
cagaacgagugcaucauug

SEQ ID NO: 56445 - RNA, 19 nt, Homo sapiens
  misc_RNA (1)...(19): siRNA sense strand
gaagaaugggcaugccaaa

SEQ ID NO: 56446 - RNA, 19 nt, Homo sapiens
  misc_RNA (1)...(19): siRNA sense strand
cacugaaucuguccuggua

SEQ ID NO: 56447 - RNA, 19 nt, Homo sapiens
  misc_RNA (1)...(19): siRNA sense strand
ggaccucccucaagaccau

SEQ ID NO: 56448 - RNA, 19 nt, Homo sapiens
  misc_RNA (1)...(19): siRNA sense strand
ucacacacauccugaacau

SEQ ID NO: 56449 - RNA, 19 nt, Homo sapiens
  misc_RNA (1)...(19): siRNA sense strand
ggugguaggugaguggaaa

SEQ ID NO: 56450 - RNA, 19 nt, Homo sapiens
  misc_RNA (1)...(19): siRNA sense strand
ccugagggcuccacuaaag

SEQ ID NO: 56451 - RNA, 19 nt, Homo sapiens
  misc_RNA (1)...(19): siRNA sense strand
gcaacgugcuggugugcau

SEQ ID NO: 56452 - RNA, 19 nt, Homo sapiens
  misc_RNA (1)...(19): siRNA sense strand
ccagaacgagugcaucauu

SEQ ID NO: 56453 - RNA, 19 nt, Homo sapiens
  misc_RNA (1)...(19): siRNA sense strand
cuacaccaccuucaacauu

SEQ ID NO: 56454 - RNA, 19 nt, Homo sapiens
  misc_RNA (1)...(19): siRNA sense strand
agaaugggcaugccaaaga

SEQ ID NO: 56455 - RNA, 19 nt, Homo sapiens
  misc_RNA (1)...(19): siRNA sense strand
gaaugggcaugccaaagac

SEQ ID NO: 56456 - RNA, 19 nt, Homo sapiens
  misc_RNA (1)...(19): siRNA sense strand
uacaccaccuucaacauug

SEQ ID NO: 56457 - RNA, 19 nt, Homo sapiens
  misc_RNA (1)...(19): siRNA sense strand
gaccagaacgagugcauca

SEQ ID NO: 56458 - RNA, 19 nt, Homo sapiens
  misc_RNA (1)...(19): siRNA sense strand
acaucaagaucuacauugu

SEQ ID NO: 56459 - RNA, 19 nt, Homo sapiens
  misc_RNA (1)...(19): siRNA sense strand
gcacggcgagcauccugaa

SEQ ID NO: 56460 - RNA, 19 nt, Homo sapiens
  misc_RNA (1)...(19): siRNA sense strand
uggcugcccuucuucauca

SEQ ID NO: 56461 - RNA, 19 nt, Homo sapiens
  misc_RNA (1)...(19): siRNA sense strand
ccaucagcaucgacaggua

SEQ ID NO: 56462 - RNA, 19 nt, Homo sapiens
  misc_RNA (1)...(19): siRNA sense strand
acacacauccugaacauac

SEQ ID NO: 56463 - RNA, 19 nt, Homo sapiens
  misc_RNA (1)...(19): siRNA sense strand
caccugagggcuccacuaa

SEQ ID NO: 56464 - RNA, 19 nt, Homo sapiens
  misc_RNA (1)...(19): siRNA sense strand
ccacuccucuucggacuca

SEQ ID NO: 56465 - RNA, 19 nt, Homo sapiens
  misc_RNA (1)...(19): siRNA sense strand
aaucuguccugguaugaug

SEQ ID NO: 56466 - RNA, 19 nt, Homo sapiens
  misc_RNA (1)...(19): siRNA sense strand
ucaauaacgcagaccagaa

SEQ ID NO: 56467 - RNA, 19 nt, Homo sapiens
  misc_RNA (1)...(19): siRNA sense strand
gcgagcauccugaacuugu

SEQ ID NO: 56468 - RNA, 19 nt, Homo sapiens
  misc_RNA (1)...(19): siRNA sense strand
cggcgagcauccugaacuu

SEQ ID NO: 56469 - RNA, 19 nt, Homo sapiens
  misc_RNA (1)...(19): siRNA sense strand
cuacaucaagaucuacauu

SEQ ID NO: 56470 - RNA, 19 nt, Homo sapiens
  misc_RNA (1)...(19): siRNA sense strand
uacgugcccuucauuguca

SEQ ID NO: 56471 - RNA, 19 nt, Homo sapiens
  misc_RNA (1)...(19): siRNA sense strand
aaacgcagcagccgagcuu

SEQ ID NO: 56472 - RNA, 19 nt, Homo sapiens
  misc_RNA (1)...(19): siRNA sense strand
caauaacgcagaccagaac

SEQ ID NO: 56473 - RNA, 19 nt, Homo sapiens
  misc_RNA (1)...(19): siRNA sense strand
cugcuggucuacaucaaga

SEQ ID NO: 56474 - RNA, 19 nt, Homo sapiens
  misc_RNA (1)...(19): siRNA sense strand
cugaaucuguccugguaug

SEQ ID NO: 56475 - RNA, 19 nt, Homo sapiens
  misc_RNA (1)...(19): siRNA sense strand
acccggaccucccucaaga

SEQ ID NO: 56476 - RNA, 19 nt, Homo sapiens
  misc_RNA (1)...(19): siRNA sense strand
caagcgagucaacaccaaa

SEQ ID NO: 56477 - RNA, 19 nt, Homo sapiens
  misc_RNA (1)...(19): siRNA sense strand
ggacagaccccacuacaac

SEQ ID NO: 56478 - RNA, 19 nt, Homo sapiens
  misc_RNA (1)...(19): siRNA sense strand
ggaaauucagcaggauuca

SEQ ID NO: 56479 - RNA, 19 nt, Homo sapiens
  misc_RNA (1)...(19): siRNA sense strand
cagaugcucgccauuguuc

SEQ ID NO: 56480 - RNA, 19 nt, Homo sapiens
  misc_RNA (1)...(19): siRNA sense strand
agaagaaagccacucagau

SEQ ID NO: 56481 - RNA, 19 nt, Homo sapiens
  misc_RNA (1)...(19): siRNA sense strand
gcagaccaccaccaacuac

SEQ ID NO: 56482 - RNA, 19 nt, Homo sapiens
  misc_RNA (1)...(19): siRNA sense strand
cgagcauccugaacuugug

SEQ ID NO: 56483 - RNA, 19 nt, Homo sapiens
  misc_RNA (1)...(19): siRNA sense strand
guccugguaugaugaugau

SEQ ID NO: 56484 - RNA, 19 nt, Homo sapiens
  misc_RNA (1)...(19): siRNA sense strand
ccgccaaaccagagaagaa

SEQ ID NO: 56485 - RNA, 19 nt, Homo sapiens
  misc_RNA (1)...(19): siRNA sense strand
ucacccugcuggucuacau

SEQ ID NO: 56486 - RNA, 19 nt, Homo sapiens
  misc_RNA (1)...(19): siRNA sense strand
gaagcucucccagcagaag

SEQ ID NO: 56487 - RNA, 19 nt, Homo sapiens
  misc_RNA (1)...(19): siRNA sense strand
ccaaaccagagaagaaugg

SEQ ID NO: 56488 - RNA, 19 nt, Homo sapiens
  misc_RNA (1)...(19): siRNA sense strand
uggucuacaucaagaucua

SEQ ID NO: 56489 - RNA, 19 nt, Homo sapiens
  misc_RNA (1)...(19): siRNA sense strand
gaaucuguccugguaugau

SEQ ID NO: 56490 - RNA, 19 nt, Homo sapiens
  misc_RNA (1)...(19): siRNA sense strand
guucucggcguguucauca

SEQ ID NO: 56491 - RNA, 19 nt, Homo sapiens
  misc_RNA (1)...(19): siRNA sense strand
caaagaccaccccaagauu

SEQ ID NO: 56492 - RNA, 19 nt, Homo sapiens
  misc_RNA (1)...(19): siRNA sense strand
gagcauccugaacuugugu

SEQ ID NO: 56493 - RNA, 19 nt, Homo sapiens
  misc_RNA (1)...(19): siRNA sense strand
ucagaugcucgccauuguu

SEQ ID NO: 56494 - RNA, 19 nt, Homo sapiens
  misc_RNA (1)...(19): siRNA sense strand
ccaaagaccaccccaagau

SEQ ID NO: 56495 - RNA, 19 nt, Homo sapiens
  misc_RNA (1)...(19): siRNA sense strand
cuacgugcccuucauuguc

SEQ ID NO: 56496 - RNA, 19 nt, Homo sapiens
  misc_RNA (1)...(19): siRNA sense strand
gaagaaagccacucagaug

SEQ ID NO: 56497 - RNA, 19 nt, Homo sapiens
  misc_RNA (1)...(19): siRNA sense strand
guaggugaguggaaauuca

SEQ ID NO: 56498 - RNA, 19 nt, Homo sapiens
  misc_RNA (1)...(19): siRNA sense strand
gagaagaaagccacucaga

SEQ ID NO: 56499 - RNA, 19 nt, Homo sapiens
  misc_RNA (1)...(19): siRNA sense strand
gcaagcgagucaacaccaa

SEQ ID NO: 56500 - RNA, 19 nt, Homo sapiens
  misc_RNA (1)...(19): siRNA sense strand
ucacguggcugggcuaugu

SEQ ID NO: 56501 - RNA, 19 nt, Homo sapiens
  misc_RNA (1)...(19): siRNA sense strand
cagaacgagugcaucauug

SEQ ID NO: 56502 - RNA, 19 nt, Homo sapiens
  misc_RNA (1)...(19): siRNA sense strand
gaagaaugggcaugccaaa

SEQ ID NO: 56503 - RNA, 19 nt, Homo sapiens
  misc_RNA (1)...(19): siRNA sense strand
cacugaaucuguccuggua

SEQ ID NO: 56504 - RNA, 19 nt, Homo sapiens
  misc_RNA (1)...(19): siRNA sense strand
ggaccucccucaagaccau

SEQ ID NO: 56505 - RNA, 19 nt, Homo sapiens
  misc_RNA (1)...(19): siRNA sense strand
ucacacacauccugaacau

SEQ ID NO: 56506 - RNA, 19 nt, Homo sapiens
  misc_RNA (1)...(19): siRNA sense strand
ggugguaggugaguggaaa

SEQ ID NO: 56507 - RNA, 19 nt, Homo sapiens
  misc_RNA (1)...(19): siRNA sense strand
ccugagggcuccacuaaag

SEQ ID NO: 56508 - RNA, 19 nt, Homo sapiens
  misc_RNA (1)...(19): siRNA sense strand
gcaacgugcuggugugcau

SEQ ID NO: 56509 - RNA, 19 nt, Homo sapiens
  misc_RNA (1)...(19): siRNA sense strand
ccagaacgagugcaucauu

SEQ ID NO: 56510 - RNA, 19 nt, Homo sapiens
  misc_RNA (1)...(19): siRNA sense strand
cuacaccaccuucaacauu

SEQ ID NO: 56511 - RNA, 19 nt, Homo sapiens
  misc_RNA (1)...(19): siRNA sense strand
agaaugggcaugccaaaga

SEQ ID NO: 56512 - RNA, 19 nt, Homo sapiens
  misc_RNA (1)...(19): siRNA sense strand
gaaugggcaugccaaagac

SEQ ID NO: 56513 - RNA, 19 nt, Homo sapiens
  misc_RNA (1)...(19): siRNA sense strand
uacaccaccuucaacauug

SEQ ID NO: 56514 - RNA, 19 nt, Homo sapiens
  misc_RNA (1)...(19): siRNA sense strand
gaccagaacgagugcauca

SEQ ID NO: 56515 - RNA, 19 nt, Homo sapiens
  misc_RNA (1)...(19): siRNA sense strand
acaucaagaucuacauugu

SEQ ID NO: 56516 - RNA, 19 nt, Homo sapiens
  misc_RNA (1)...(19): siRNA sense strand
gcacggcgagcauccugaa

SEQ ID NO: 56517 - RNA, 19 nt, Homo sapiens
  misc_RNA (1)...(19): siRNA sense strand
uggcugcccuucuucauca

SEQ ID NO: 56518 - RNA, 19 nt, Homo sapiens
  misc_RNA (1)...(19): siRNA sense strand
ccaucagcaucgacaggua

SEQ ID NO: 56519 - RNA, 19 nt, Homo sapiens
  misc_RNA (1)...(19): siRNA sense strand
acacacauccugaacauac

SEQ ID NO: 56520 - RNA, 19 nt, Homo sapiens
  misc_RNA (1)...(19): siRNA sense strand
caccugagggcuccacuaa

SEQ ID NO: 56521 - RNA, 19 nt, Homo sapiens
  misc_RNA (1)...(19): siRNA sense strand
ccacuccucuucggacuca

SEQ ID NO: 56522 - RNA, 19 nt, Homo sapiens
  misc_RNA (1)...(19): siRNA sense strand
aaucuguccugguaugaug

SEQ ID NO: 56523 - RNA, 19 nt, Homo sapiens
  misc_RNA (1)...(19): siRNA sense strand
ucaauaacgcagaccagaa

SEQ ID NO: 56524 - RNA, 19 nt, Homo sapiens
  misc_RNA (1)...(19): siRNA sense strand
gcgagcauccugaacuugu

SEQ ID NO: 56525 - RNA, 19 nt, Homo sapiens
  misc_RNA (1)...(19): siRNA sense strand
cggcgagcauccugaacuu

SEQ ID NO: 56526 - RNA, 19 nt, Homo sapiens
  misc_RNA (1)...(19): siRNA sense strand
cuacaucaagaucuacauu

SEQ ID NO: 56527 - RNA, 19 nt, Homo sapiens
  misc_RNA (1)...(19): siRNA sense strand
uacgugcccuucauuguca

SEQ ID NO: 56528 - RNA, 19 nt, Homo sapiens
  misc_RNA (1)...(19): siRNA sense strand
aaacgcagcagccgagcuu

SEQ ID NO: 56529 - RNA, 19 nt, Homo sapiens
  misc_RNA (1)...(19): siRNA sense strand
caauaacgcagaccagaac

SEQ ID NO: 56530 - RNA, 19 nt, Homo sapiens
  misc_RNA (1)...(19): siRNA sense strand
cugcuggucuacaucaaga

SEQ ID NO: 56531 - RNA, 19 nt, Homo sapiens
  misc_RNA (1)...(19): siRNA sense strand
cugaaucuguccugguaug

SEQ ID NO: 56532 - RNA, 19 nt, Homo sapiens
  misc_RNA (1)...(19): siRNA sense strand
acccggaccucccucaaga

SEQ ID NO: 56533 - RNA, 19 nt, Homo sapiens
  misc_RNA (1)...(19): siRNA sense strand
caagcgagucaacaccaaa

SEQ ID NO: 56534 - RNA, 19 nt, Homo sapiens
  misc_RNA (1)...(19): siRNA sense strand
ggacagaccccacuacaac

SEQ ID NO: 56535 - RNA, 19 nt, Homo sapiens
  misc_RNA (1)...(19): siRNA sense strand
ggaaauucagcaggauuca

SEQ ID NO: 56536 - RNA, 19 nt, Homo sapiens
  misc_RNA (1)...(19): siRNA sense strand
cagaugcucgccauuguuc

SEQ ID NO: 56537 - RNA, 19 nt, Homo sapiens
  misc_RNA (1)...(19): siRNA sense strand
agaagaaagccacucagau

SEQ ID NO: 56538 - RNA, 19 nt, Homo sapiens
  misc_RNA (1)...(19): siRNA sense strand
gcagaccaccaccaacuac

SEQ ID NO: 56539 - RNA, 19 nt, Homo sapiens
  misc_RNA (1)...(19): siRNA sense strand
cgagcauccugaacuugug

SEQ ID NO: 56540 - RNA, 19 nt, Homo sapiens
  misc_RNA (1)...(19): siRNA sense strand
guccugguaugaugaugau

SEQ ID NO: 56541 - RNA, 19 nt, Homo sapiens
  misc_RNA (1)...(19): siRNA sense strand
ccgccaaaccagagaagaa

SEQ ID NO: 56542 - RNA, 19 nt, Homo sapiens
  misc_RNA (1)...(19): siRNA sense strand
ucacccugcuggucuacau

SEQ ID NO: 56543 - RNA, 19 nt, Homo sapiens
  misc_RNA (1)...(19): siRNA sense strand
gaagcucucccagcagaag

SEQ ID NO: 56544 - RNA, 19 nt, Homo sapiens
  misc_RNA (1)...(19): siRNA sense strand
ccaaaccagagaagaaugg

SEQ ID NO: 56545 - RNA, 19 nt, Homo sapiens
  misc_RNA (1)...(19): siRNA sense strand
uggucuacaucaagaucua

SEQ ID NO: 56546 - RNA, 19 nt, Homo sapiens
  misc_RNA (1)...(19): siRNA sense strand
gaaucuguccugguaugau

SEQ ID NO: 56547 - RNA, 19 nt, Homo sapiens
  misc_RNA (1)...(19): siRNA sense strand
guucucggcguguucauca

SEQ ID NO: 56548 - RNA, 19 nt, Homo sapiens
  misc_RNA (1)...(19): siRNA sense strand
caaagaccaccccaagauu

SEQ ID NO: 56549 - RNA, 19 nt, Homo sapiens
  misc_RNA (1)...(19): siRNA sense strand
gagcauccugaacuugugu

SEQ ID NO: 56550 - RNA, 19 nt, Homo sapiens
  misc_RNA (1)...(19): siRNA sense strand
ucagaugcucgccauuguu

SEQ ID NO: 56551 - RNA, 19 nt, Homo sapiens
  misc_RNA (1)...(19): siRNA sense strand
ccaaagaccaccccaagau

SEQ ID NO: 56552 - RNA, 19 nt, Homo sapiens
  misc_RNA (1)...(19): siRNA sense strand
cuacgugcccuucauuguc

SEQ ID NO: 56553 - RNA, 19 nt, Homo sapiens
  misc_RNA (1)...(19): siRNA sense strand
gaagaaggcaacccaaaug

SEQ ID NO: 56554 - RNA, 19 nt, Homo sapiens
  misc_RNA (1)...(19): siRNA sense strand
gcaauggccuggugugcau

SEQ ID NO: 56555 - RNA, 19 nt, Homo sapiens
  misc_RNA (1)...(19): siRNA sense strand
gguggagucuggaauuuca

SEQ ID NO: 56556 - RNA, 19 nt, Homo sapiens
  misc_RNA (1)...(19): siRNA sense strand
guccugcccucuucuguuu

SEQ ID NO: 56557 - RNA, 19 nt, Homo sapiens
  misc_RNA (1)...(19): siRNA sense strand
gagaagaaggcaacccaaa

SEQ ID NO: 56558 - RNA, 19 nt, Homo sapiens
  misc_RNA (1)...(19): siRNA sense strand
guacuggccuuugcugugu

SEQ ID NO: 56559 - RNA, 19 nt, Homo sapiens
  misc_RNA (1)...(19): siRNA sense strand
gcauggcugugcugaagga

SEQ ID NO: 56560 - RNA, 19 nt, Homo sapiens
  misc_RNA (1)...(19): siRNA sense strand
guacagccagcauccuuaa

SEQ ID NO: 56561 - RNA, 19 nt, Homo sapiens
  misc_RNA (1)...(19): siRNA sense strand
ccucuucuguuuggcuuua

SEQ ID NO: 56562 - RNA, 19 nt, Homo sapiens
  misc_RNA (1)...(19): siRNA sense strand
cgacauggcugggcuacgu

SEQ ID NO: 56563 - RNA, 19 nt, Homo sapiens
  misc_RNA (1)...(19): siRNA sense strand
cagguggagucuggaauuu

SEQ ID NO: 56564 - RNA, 19 nt, Homo sapiens
  misc_RNA (1)...(19): siRNA sense strand
uggcugggcuacgugaaua

SEQ ID NO: 56565 - RNA, 19 nt, Homo sapiens
  misc_RNA (1)...(19): siRNA sense strand
gugcauggcugugcugaag

SEQ ID NO: 56566 - RNA, 19 nt, Homo sapiens
  misc_RNA (1)...(19): siRNA sense strand
uggcugcccuucuucuuga

SEQ ID NO: 56567 - RNA, 19 nt, Homo sapiens
  misc_RNA (1)...(19): siRNA sense strand
gacuaccaccaacuacuua

SEQ ID NO: 56568 - RNA, 19 nt, Homo sapiens
  misc_RNA (1)...(19): siRNA sense strand
cgcauuugcugugauguuu

SEQ ID NO: 56569 - RNA, 19 nt, Homo sapiens
  misc_RNA (1)...(19): siRNA sense strand
ugacccauguucucaauac

SEQ ID NO: 56570 - RNA, 19 nt, Homo sapiens
  misc_RNA (1)...(19): siRNA sense strand
ggucaugcccguucacuac

SEQ ID NO: 56571 - RNA, 19 nt, Homo sapiens
  misc_RNA (1)...(19): siRNA sense strand
cagcauccuuaaucucugu

SEQ ID NO: 56572 - RNA, 19 nt, Homo sapiens
  misc_RNA (1)...(19): siRNA sense strand
gcuguguccugcccucuuc

SEQ ID NO: 56573 - RNA, 19 nt, Homo sapiens
  misc_RNA (1)...(19): siRNA sense strand
cuuaaucucugugccauca

SEQ ID NO: 56574 - RNA, 19 nt, Homo sapiens
  misc_RNA (1)...(19): siRNA sense strand
ugaguagccaccugaacua

SEQ ID NO: 56575 - RNA, 19 nt, Homo sapiens
  misc_RNA (1)...(19): siRNA sense strand
ggugaugcccuggguggua

SEQ ID NO: 56576 - RNA, 19 nt, Homo sapiens
  misc_RNA (1)...(19): siRNA sense strand
cacccuggaugucaugaug

SEQ ID NO: 56577 - RNA, 19 nt, Homo sapiens
  misc_RNA (1)...(19): siRNA sense strand
agaagaaggcaacccaaau

SEQ ID NO: 56578 - RNA, 19 nt, Homo sapiens
  misc_RNA (1)...(19): siRNA sense strand
gugaugcccugggugguau

SEQ ID NO: 56579 - RNA, 19 nt, Homo sapiens
  misc_RNA (1)...(19): siRNA sense strand
cagccagcauccuuaaucu

SEQ ID NO: 56580 - RNA, 19 nt, Homo sapiens
  misc_RNA (1)...(19): siRNA sense strand
ccaucagcauagacaggua

SEQ ID NO: 56581 - RNA, 19 nt, Homo sapiens
  misc_RNA (1)...(19): siRNA sense strand
uggaauuucagccgcauuu

SEQ ID NO: 56582 - RNA, 19 nt, Homo sapiens
  misc_RNA (1)...(19): siRNA sense strand
acuaugcccucuccuacug

SEQ ID NO: 56583 - RNA, 19 nt, Homo sapiens
  misc_RNA (1)...(19): siRNA sense strand
agacuaccaccaacuacuu

SEQ ID NO: 56584 - RNA, 19 nt, Homo sapiens
  misc_RNA (1)...(19): siRNA sense strand
gaauuucagccgcauuugc

SEQ ID NO: 56585 - RNA, 19 nt, Homo sapiens
  misc_RNA (1)...(19): siRNA sense strand
ccgcccacaugccuacuau

SEQ ID NO: 56586 - RNA, 19 nt, Homo sapiens
  misc_RNA (1)...(19): siRNA sense strand
ggaauuucagccgcauuug

SEQ ID NO: 56587 - RNA, 19 nt, Homo sapiens
  misc_RNA (1)...(19): siRNA sense strand
cagcauggcacgggacaga

SEQ ID NO: 56588 - RNA, 19 nt, Homo sapiens
  misc_RNA (1)...(19): siRNA sense strand
gccaucgucuucggcaaug

SEQ ID NO: 56589 - RNA, 19 nt, Homo sapiens
  misc_RNA (1)...(19): siRNA sense strand
acagguggagucuggaauu

SEQ ID NO: 56590 - RNA, 19 nt, Homo sapiens
  misc_RNA (1)...(19): siRNA sense strand
gccagcauccuuaaucucu

SEQ ID NO: 56591 - RNA, 19 nt, Homo sapiens
  misc_RNA (1)...(19): siRNA sense strand
uguacagccagcauccuua

SEQ ID NO: 56592 - RNA, 19 nt, Homo sapiens
  misc_RNA (1)...(19): siRNA sense strand
ucucugugccaucagcaua

SEQ ID NO: 56593 - RNA, 19 nt, Homo sapiens
  misc_RNA (1)...(19): siRNA sense strand
cauccuggccaucgucuuc

SEQ ID NO: 56594 - RNA, 19 nt, Homo sapiens
  misc_RNA (1)...(19): siRNA sense strand
ccuacuaugcccucuccua

SEQ ID NO: 56595 - RNA, 19 nt, Homo sapiens
  misc_RNA (1)...(19): siRNA sense strand
cuguuuggcuuuaauacca

SEQ ID NO: 56596 - RNA, 19 nt, Homo sapiens
  misc_RNA (1)...(19): siRNA sense strand
gcaauggccuggugugcau

SEQ ID NO: 56597 - RNA, 19 nt, Homo sapiens
  misc_RNA (1)...(19): siRNA sense strand
gguggagucuggaauuuca

SEQ ID NO: 56598 - RNA, 19 nt, Homo sapiens
  misc_RNA (1)...(19): siRNA sense strand
guccugcccucuucuguuu

SEQ ID NO: 56599 - RNA, 19 nt, Homo sapiens
  misc_RNA (1)...(19): siRNA sense strand
guacuggccuuugcugugu

SEQ ID NO: 56600 - RNA, 19 nt, Homo sapiens
  misc_RNA (1)...(19): siRNA sense strand
gcauggcugugcugaagga

SEQ ID NO: 56601 - RNA, 19 nt, Homo sapiens
  misc_RNA (1)...(19): siRNA sense strand
guacagccagcauccuuaa

SEQ ID NO: 56602 - RNA, 19 nt, Homo sapiens
  misc_RNA (1)...(19): siRNA sense strand
ccucuucuguuuggcuuua

SEQ ID NO: 56603 - RNA, 19 nt, Homo sapiens
  misc_RNA (1)...(19): siRNA sense strand
cagguggagucuggaauuu

SEQ ID NO: 56604 - RNA, 19 nt, Homo sapiens
  misc_RNA (1)...(19): siRNA sense strand
gugcauggcugugcugaag

SEQ ID NO: 56605 - RNA, 19 nt, Homo sapiens
  misc_RNA (1)...(19): siRNA sense strand
gacuaccaccaacuacuua

SEQ ID NO: 56606 - RNA, 19 nt, Homo sapiens
  misc_RNA (1)...(19): siRNA sense strand
cgcauuugcugugauguuu

SEQ ID NO: 56607 - RNA, 19 nt, Homo sapiens
  misc_RNA (1)...(19): siRNA sense strand
ggucaugcccguucacuac

SEQ ID NO: 56608 - RNA, 19 nt, Homo sapiens
  misc_RNA (1)...(19): siRNA sense strand
cagcauccuuaaucucugu

SEQ ID NO: 56609 - RNA, 19 nt, Homo sapiens
  misc_RNA (1)...(19): siRNA sense strand
gcuguguccugcccucuuc

SEQ ID NO: 56610 - RNA, 19 nt, Homo sapiens
  misc_RNA (1)...(19): siRNA sense strand
cuuaaucucugugccauca

SEQ ID NO: 56611 - RNA, 19 nt, Homo sapiens
  misc_RNA (1)...(19): siRNA sense strand
ugaguagccaccugaacua

SEQ ID NO: 56612 - RNA, 19 nt, Homo sapiens
  misc_RNA (1)...(19): siRNA sense strand
ggugaugcccuggguggua

SEQ ID NO: 56613 - RNA, 19 nt, Homo sapiens
  misc_RNA (1)...(19): siRNA sense strand
cacccuggaugucaugaug

SEQ ID NO: 56614 - RNA, 19 nt, Homo sapiens
  misc_RNA (1)...(19): siRNA sense strand
gugaugcccugggugguau

SEQ ID NO: 56615 - RNA, 19 nt, Homo sapiens
  misc_RNA (1)...(19): siRNA sense strand
cagccagcauccuuaaucu

SEQ ID NO: 56616 - RNA, 19 nt, Homo sapiens
  misc_RNA (1)...(19): siRNA sense strand
ccaucagcauagacaggua

SEQ ID NO: 56617 - RNA, 19 nt, Homo sapiens
  misc_RNA (1)...(19): siRNA sense strand
agacuaccaccaacuacuu

SEQ ID NO: 56618 - RNA, 19 nt, Homo sapiens
  misc_RNA (1)...(19): siRNA sense strand
acuaugcccucuccuacug

SEQ ID NO: 56619 - RNA, 19 nt, Homo sapiens
  misc_RNA (1)...(19): siRNA sense strand
uggaauuucagccgcauuu

SEQ ID NO: 56620 - RNA, 19 nt, Homo sapiens
  misc_RNA (1)...(19): siRNA sense strand
gaauuucagccgcauuugc

SEQ ID NO: 56621 - RNA, 19 nt, Homo sapiens
  misc_RNA (1)...(19): siRNA sense strand
ccgcccacaugccuacuau

SEQ ID NO: 56622 - RNA, 19 nt, Homo sapiens
  misc_RNA (1)...(19): siRNA sense strand
ggaauuucagccgcauuug

SEQ ID NO: 56623 - RNA, 19 nt, Homo sapiens
  misc_RNA (1)...(19): siRNA sense strand
cagcauggcacgggacaga

SEQ ID NO: 56624 - RNA, 19 nt, Homo sapiens
  misc_RNA (1)...(19): siRNA sense strand
gccaucgucuucggcaaug

SEQ ID NO: 56625 - RNA, 19 nt, Homo sapiens
  misc_RNA (1)...(19): siRNA sense strand
acagguggagucuggaauu

SEQ ID NO: 56626 - RNA, 19 nt, Homo sapiens
  misc_RNA (1)...(19): siRNA sense strand
gccagcauccuuaaucucu

SEQ ID NO: 56627 - RNA, 19 nt, Homo sapiens
  misc_RNA (1)...(19): siRNA sense strand
uguacagccagcauccuua

SEQ ID NO: 56628 - RNA, 19 nt, Homo sapiens
  misc_RNA (1)...(19): siRNA sense strand
cauccuggccaucgucuuc

SEQ ID NO: 56629 - RNA, 19 nt, Homo sapiens
  misc_RNA (1)...(19): siRNA sense strand
ucucugugccaucagcaua

SEQ ID NO: 56630 - RNA, 19 nt, Homo sapiens
  misc_RNA (1)...(19): siRNA sense strand
ccuacuaugcccucuccua

SEQ ID NO: 56631 - RNA, 19 nt, Homo sapiens
  misc_RNA (1)...(19): siRNA sense strand
cuguuuggcuuuaauacca

SEQ ID NO: 56632 - RNA, 19 nt, Homo sapiens
  misc_RNA (1)...(19): siRNA sense strand
gaagaaggcaacccaaaug

SEQ ID NO: 56633 - RNA, 19 nt, Homo sapiens
  misc_RNA (1)...(19): siRNA sense strand
gcaauggccuggugugcau

SEQ ID NO: 56634 - RNA, 19 nt, Homo sapiens
  misc_RNA (1)...(19): siRNA sense strand
gguggagucuggaauuuca

SEQ ID NO: 56635 - RNA, 19 nt, Homo sapiens
  misc_RNA (1)...(19): siRNA sense strand
guccugcccucuucuguuu

SEQ ID NO: 56636 - RNA, 19 nt, Homo sapiens
  misc_RNA (1)...(19): siRNA sense strand
gagaagaaggcaacccaaa

SEQ ID NO: 56637 - RNA, 19 nt, Homo sapiens
  misc_RNA (1)...(19): siRNA sense strand
guacuggccuuugcugugu

SEQ ID NO: 56638 - RNA, 19 nt, Homo sapiens
  misc_RNA (1)...(19): siRNA sense strand
gcauggcugugcugaagga

SEQ ID NO: 56639 - RNA, 19 nt, Homo sapiens
  misc_RNA (1)...(19): siRNA sense strand
guacagccagcauccuuaa

SEQ ID NO: 56640 - RNA, 19 nt, Homo sapiens
  misc_RNA (1)...(19): siRNA sense strand
ccucuucuguuuggcuuua

SEQ ID NO: 56641 - RNA, 19 nt, Homo sapiens
  misc_RNA (1)...(19): siRNA sense strand
cgacauggcugggcuacgu

SEQ ID NO: 56642 - RNA, 19 nt, Homo sapiens
  misc_RNA (1)...(19): siRNA sense strand
cagguggagucuggaauuu

SEQ ID NO: 56643 - RNA, 19 nt, Homo sapiens
  misc_RNA (1)...(19): siRNA sense strand
uggcugggcuacgugaaua

SEQ ID NO: 56644 - RNA, 19 nt, Homo sapiens
  misc_RNA (1)...(19): siRNA sense strand
gugcauggcugugcugaag

SEQ ID NO: 56645 - RNA, 19 nt, Homo sapiens
  misc_RNA (1)...(19): siRNA sense strand
uggcugcccuucuucuuga

SEQ ID NO: 56646 - RNA, 19 nt, Homo sapiens
  misc_RNA (1)...(19): siRNA sense strand
gacuaccaccaacuacuua

SEQ ID NO: 56647 - RNA, 19 nt, Homo sapiens
  misc_RNA (1)...(19): siRNA sense strand
cgcauuugcugugauguuu

SEQ ID NO: 56648 - RNA, 19 nt, Homo sapiens
  misc_RNA (1)...(19): siRNA sense strand
ugacccauguucucaauac

SEQ ID NO: 56649 - RNA, 19 nt, Homo sapiens
  misc_RNA (1)...(19): siRNA sense strand
ggucaugcccguucacuac

SEQ ID NO: 56650 - RNA, 19 nt, Homo sapiens
  misc_RNA (1)...(19): siRNA sense strand
cagcauccuuaaucucugu

SEQ ID NO: 56651 - RNA, 19 nt, Homo sapiens
  misc_RNA (1)...(19): siRNA sense strand
gcuguguccugcccucuuc

SEQ ID NO: 56652 - RNA, 19 nt, Homo sapiens
  misc_RNA (1)...(19): siRNA sense strand
cuuaaucucugugccauca

SEQ ID NO: 56653 - RNA, 19 nt, Homo sapiens
  misc_RNA (1)...(19): siRNA sense strand
ugaguagccaccugaacua

SEQ ID NO: 56654 - RNA, 19 nt, Homo sapiens
  misc_RNA (1)...(19): siRNA sense strand
ggugaugcccuggguggua

SEQ ID NO: 56655 - RNA, 19 nt, Homo sapiens
  misc_RNA (1)...(19): siRNA sense strand
cacccuggaugucaugaug

SEQ ID NO: 56656 - RNA, 19 nt, Homo sapiens
  misc_RNA (1)...(19): siRNA sense strand
agaagaaggcaacccaaau

SEQ ID NO: 56657 - RNA, 19 nt, Homo sapiens
  misc_RNA (1)...(19): siRNA sense strand
gugaugcccugggugguau

SEQ ID NO: 56658 - RNA, 19 nt, Homo sapiens
  misc_RNA (1)...(19): siRNA sense strand
cagccagcauccuuaaucu

SEQ ID NO: 56659 - RNA, 19 nt, Homo sapiens
  misc_RNA (1)...(19): siRNA sense strand
ccaucagcauagacaggua

SEQ ID NO: 56660 - RNA, 19 nt, Homo sapiens
  misc_RNA (1)...(19): siRNA sense strand
uggaauuucagccgcauuu

SEQ ID NO: 56661 - RNA, 19 nt, Homo sapiens
  misc_RNA (1)...(19): siRNA sense strand
acuaugcccucuccuacug

SEQ ID NO: 56662 - RNA, 19 nt, Homo sapiens
  misc_RNA (1)...(19): siRNA sense strand
agacuaccaccaacuacuu

SEQ ID NO: 56663 - RNA, 19 nt, Homo sapiens
  misc_RNA (1)...(19): siRNA sense strand
gaauuucagccgcauuugc

SEQ ID NO: 56664 - RNA, 19 nt, Homo sapiens
  misc_RNA (1)...(19): siRNA sense strand
ccgcccacaugccuacuau

SEQ ID NO: 56665 - RNA, 19 nt, Homo sapiens
  misc_RNA (1)...(19): siRNA sense strand
ggaauuucagccgcauuug

SEQ ID NO: 56666 - RNA, 19 nt, Homo sapiens
  misc_RNA (1)...(19): siRNA sense strand
cagcauggcacgggacaga

SEQ ID NO: 56667 - RNA, 19 nt, Homo sapiens
  misc_RNA (1)...(19): siRNA sense strand
gccaucgucuucggcaaug

SEQ ID NO: 56668 - RNA, 19 nt, Homo sapiens
  misc_RNA (1)...(19): siRNA sense strand
acagguggagucuggaauu

SEQ ID NO: 56669 - RNA, 19 nt, Homo sapiens
  misc_RNA (1)...(19): siRNA sense strand
gccagcauccuuaaucucu

SEQ ID NO: 56670 - RNA, 19 nt, Homo sapiens
  misc_RNA (1)...(19): siRNA sense strand
uguacagccagcauccuua

SEQ ID NO: 56671 - RNA, 19 nt, Homo sapiens
  misc_RNA (1)...(19): siRNA sense strand
ucucugugccaucagcaua

SEQ ID NO: 56672 - RNA, 19 nt, Homo sapiens
  misc_RNA (1)...(19): siRNA sense strand
cauccuggccaucgucuuc

SEQ ID NO: 56673 - RNA, 19 nt, Homo sapiens
  misc_RNA (1)...(19): siRNA sense strand
ccuacuaugcccucuccua

SEQ ID NO: 56674 - RNA, 19 nt, Homo sapiens
  misc_RNA (1)...(19): siRNA sense strand
cuguuuggcuuuaauacca

SEQ ID NO: 56675 - RNA, 19 nt, Homo sapiens
  misc_RNA (1)...(19): siRNA sense strand
gaagaaggcaacccaaaug

SEQ ID NO: 56676 - RNA, 19 nt, Homo sapiens
  misc_RNA (1)...(19): siRNA sense strand
gcaauggccuggugugcau

SEQ ID NO: 56677 - RNA, 19 nt, Homo sapiens
  misc_RNA (1)...(19): siRNA sense strand
gguggagucuggaauuuca

SEQ ID NO: 56678 - RNA, 19 nt, Homo sapiens
  misc_RNA (1)...(19): siRNA sense strand
guccugcccucuucuguuu

SEQ ID NO: 56679 - RNA, 19 nt, Homo sapiens
  misc_RNA (1)...(19): siRNA sense strand
gagaagaaggcaacccaaa

SEQ ID NO: 56680 - RNA, 19 nt, Homo sapiens
  misc_RNA (1)...(19): siRNA sense strand
guacuggccuuugcugugu

SEQ ID NO: 56681 - RNA, 19 nt, Homo sapiens
  misc_RNA (1)...(19): siRNA sense strand
gcauggcugugcugaagga

SEQ ID NO: 56682 - RNA, 19 nt, Homo sapiens
  misc_RNA (1)...(19): siRNA sense strand
guacagccagcauccuuaa

SEQ ID NO: 56683 - RNA, 19 nt, Homo sapiens
  misc_RNA (1)...(19): siRNA sense strand
ccucuucuguuuggcuuua

SEQ ID NO: 56684 - RNA, 19 nt, Homo sapiens
  misc_RNA (1)...(19): siRNA sense strand
cgacauggcugggcuacgu

SEQ ID NO: 56685 - RNA, 19 nt, Homo sapiens
  misc_RNA (1)...(19): siRNA sense strand
cagguggagucuggaauuu

SEQ ID NO: 56686 - RNA, 19 nt, Homo sapiens
  misc_RNA (1)...(19): siRNA sense strand
uggcugggcuacgugaaua

SEQ ID NO: 56687 - RNA, 19 nt, Homo sapiens
  misc_RNA (1)...(19): siRNA sense strand
gugcauggcugugcugaag

SEQ ID NO: 56688 - RNA, 19 nt, Homo sapiens
  misc_RNA (1)...(19): siRNA sense strand
uggcugcccuucuucuuga

SEQ ID NO: 56689 - RNA, 19 nt, Homo sapiens
  misc_RNA (1)...(19): siRNA sense strand
gacuaccaccaacuacuua

SEQ ID NO: 56690 - RNA, 19 nt, Homo sapiens
  misc_RNA (1)...(19): siRNA sense strand
cgcauuugcugugauguuu

SEQ ID NO: 56691 - RNA, 19 nt, Homo sapiens
  misc_RNA (1)...(19): siRNA sense strand
ugacccauguucucaauac

SEQ ID NO: 56692 - RNA, 19 nt, Homo sapiens
  misc_RNA (1)...(19): siRNA sense strand
ggucaugcccguucacuac

SEQ ID NO: 56693 - RNA, 19 nt, Homo sapiens
  misc_RNA (1)...(19): siRNA sense strand
cagcauccuuaaucucugu

SEQ ID NO: 56694 - RNA, 19 nt, Homo sapiens
  misc_RNA (1)...(19): siRNA sense strand
gcuguguccugcccucuuc

SEQ ID NO: 56695 - RNA, 19 nt, Homo sapiens
  misc_RNA (1)...(19): siRNA sense strand
cuuaaucucugugccauca

SEQ ID NO: 56696 - RNA, 19 nt, Homo sapiens
  misc_RNA (1)...(19): siRNA sense strand
ugaguagccaccugaacua

SEQ ID NO: 56697 - RNA, 19 nt, Homo sapiens
  misc_RNA (1)...(19): siRNA sense strand
ggugaugcccuggguggua

SEQ ID NO: 56698 - RNA, 19 nt, Homo sapiens
  misc_RNA (1)...(19): siRNA sense strand
cacccuggaugucaugaug

SEQ ID NO: 56699 - RNA, 19 nt, Homo sapiens
  misc_RNA (1)...(19): siRNA sense strand
agaagaaggcaacccaaau

SEQ ID NO: 56700 - RNA, 19 nt, Homo sapiens
  misc_RNA (1)...(19): siRNA sense strand
gugaugcccugggugguau

SEQ ID NO: 56701 - RNA, 19 nt, Homo sapiens
  misc_RNA (1)...(19): siRNA sense strand
cagccagcauccuuaaucu

SEQ ID NO: 56702 - RNA, 19 nt, Homo sapiens
  misc_RNA (1)...(19): siRNA sense strand
ccaucagcauagacaggua

SEQ ID NO: 56703 - RNA, 19 nt, Homo sapiens
  misc_RNA (1)...(19): siRNA sense strand
uggaauuucagccgcauuu

SEQ ID NO: 56704 - RNA, 19 nt, Homo sapiens
  misc_RNA (1)...(19): siRNA sense strand
acuaugcccucuccuacug

SEQ ID NO: 56705 - RNA, 19 nt, Homo sapiens
  misc_RNA (1)...(19): siRNA sense strand
agacuaccaccaacuacuu

SEQ ID NO: 56706 - RNA, 19 nt, Homo sapiens
  misc_RNA (1)...(19): siRNA sense strand
gaauuucagccgcauuugc

SEQ ID NO: 56707 - RNA, 19 nt, Homo sapiens
  misc_RNA (1)...(19): siRNA sense strand
ccgcccacaugccuacuau

SEQ ID NO: 56708 - RNA, 19 nt, Homo sapiens
  misc_RNA (1)...(19): siRNA sense strand
ggaauuucagccgcauuug

SEQ ID NO: 56709 - RNA, 19 nt, Homo sapiens
  misc_RNA (1)...(19): siRNA sense strand
cagcauggcacgggacaga

SEQ ID NO: 56710 - RNA, 19 nt, Homo sapiens
  misc_RNA (1)...(19): siRNA sense strand
gccaucgucuucggcaaug

SEQ ID NO: 56711 - RNA, 19 nt, Homo sapiens
  misc_RNA (1)...(19): siRNA sense strand
acagguggagucuggaauu

SEQ ID NO: 56712 - RNA, 19 nt, Homo sapiens
  misc_RNA (1)...(19): siRNA sense strand
gccagcauccuuaaucucu

SEQ ID NO: 56713 - RNA, 19 nt, Homo sapiens
  misc_RNA (1)...(19): siRNA sense strand
uguacagccagcauccuua

SEQ ID NO: 56714 - RNA, 19 nt, Homo sapiens
  misc_RNA (1)...(19): siRNA sense strand
ucucugugccaucagcaua

SEQ ID NO: 56715 - RNA, 19 nt, Homo sapiens
  misc_RNA (1)...(19): siRNA sense strand
cauccuggccaucgucuuc

SEQ ID NO: 56716 - RNA, 19 nt, Homo sapiens
  misc_RNA (1)...(19): siRNA sense strand
ccuacuaugcccucuccua

SEQ ID NO: 56717 - RNA, 19 nt, Homo sapiens
  misc_RNA (1)...(19): siRNA sense strand
cuguuuggcuuuaauacca

SEQ ID NO: 56718 - RNA, 19 nt, Homo sapiens
  misc_RNA (1)...(19): siRNA sense strand
gaagaaggcaacccaaaug

SEQ ID NO: 56719 - RNA, 19 nt, Homo sapiens
  misc_RNA (1)...(19): siRNA sense strand
gcaauggccuggugugcau

SEQ ID NO: 56720 - RNA, 19 nt, Homo sapiens
  misc_RNA (1)...(19): siRNA sense strand
gguggagucuggaauuuca

SEQ ID NO: 56721 - RNA, 19 nt, Homo sapiens
  misc_RNA (1)...(19): siRNA sense strand
guccugcccucuucuguuu

SEQ ID NO: 56722 - RNA, 19 nt, Homo sapiens
  misc_RNA (1)...(19): siRNA sense strand
gagaagaaggcaacccaaa

SEQ ID NO: 56723 - RNA, 19 nt, Homo sapiens
  misc_RNA (1)...(19): siRNA sense strand
guacuggccuuugcugugu

SEQ ID NO: 56724 - RNA, 19 nt, Homo sapiens
  misc_RNA (1)...(19): siRNA sense strand
gcauggcugugcugaagga

SEQ ID NO: 56725 - RNA, 19 nt, Homo sapiens
  misc_RNA (1)...(19): siRNA sense strand
guacagccagcauccuuaa

SEQ ID NO: 56726 - RNA, 19 nt, Homo sapiens
  misc_RNA (1)...(19): siRNA sense strand
ccucuucuguuuggcuuua

SEQ ID NO: 56727 - RNA, 19 nt, Homo sapiens
  misc_RNA (1)...(19): siRNA sense strand
cgacauggcugggcuacgu

SEQ ID NO: 56728 - RNA, 19 nt, Homo sapiens
  misc_RNA (1)...(19): siRNA sense strand
cagguggagucuggaauuu

SEQ ID NO: 56729 - RNA, 19 nt, Homo sapiens
  misc_RNA (1)...(19): siRNA sense strand
uggcugggcuacgugaaua

SEQ ID NO: 56730 - RNA, 19 nt, Homo sapiens
  misc_RNA (1)...(19): siRNA sense strand
gugcauggcugugcugaag

SEQ ID NO: 56731 - RNA, 19 nt, Homo sapiens
  misc_RNA (1)...(19): siRNA sense strand
uggcugcccuucuucuuga

SEQ ID NO: 56732 - RNA, 19 nt, Homo sapiens
  misc_RNA (1)...(19): siRNA sense strand
gacuaccaccaacuacuua

SEQ ID NO: 56733 - RNA, 19 nt, Homo sapiens
  misc_RNA (1)...(19): siRNA sense strand
cgcauuugcugugauguuu

SEQ ID NO: 56734 - RNA, 19 nt, Homo sapiens
  misc_RNA (1)...(19): siRNA sense strand
ugacccauguucucaauac

SEQ ID NO: 56735 - RNA, 19 nt, Homo sapiens
  misc_RNA (1)...(19): siRNA sense strand
ggucaugcccguucacuac

SEQ ID NO: 56736 - RNA, 19 nt, Homo sapiens
  misc_RNA (1)...(19): siRNA sense strand
cagcauccuuaaucucugu

SEQ ID NO: 56737 - RNA, 19 nt, Homo sapiens
  misc_RNA (1)...(19): siRNA sense strand
gcuguguccugcccucuuc

SEQ ID NO: 56738 - RNA, 19 nt, Homo sapiens
  misc_RNA (1)...(19): siRNA sense strand
cuuaaucucugugccauca

SEQ ID NO: 56739 - RNA, 19 nt, Homo sapiens
  misc_RNA (1)...(19): siRNA sense strand
ugaguagccaccugaacua

SEQ ID NO: 56740 - RNA, 19 nt, Homo sapiens
  misc_RNA (1)...(19): siRNA sense strand
ggugaugcccuggguggua

SEQ ID NO: 56741 - RNA, 19 nt, Homo sapiens
  misc_RNA (1)...(19): siRNA sense strand
cacccuggaugucaugaug

SEQ ID NO: 56742 - RNA, 19 nt, Homo sapiens
  misc_RNA (1)...(19): siRNA sense strand
agaagaaggcaacccaaau

SEQ ID NO: 56743 - RNA, 19 nt, Homo sapiens
  misc_RNA (1)...(19): siRNA sense strand
gugaugcccugggugguau

SEQ ID NO: 56744 - RNA, 19 nt, Homo sapiens
  misc_RNA (1)...(19): siRNA sense strand
cagccagcauccuuaaucu

SEQ ID NO: 56745 - RNA, 19 nt, Homo sapiens
  misc_RNA (1)...(19): siRNA sense strand
ccaucagcauagacaggua

SEQ ID NO: 56746 - RNA, 19 nt, Homo sapiens
  misc_RNA (1)...(19): siRNA sense strand
uggaauuucagccgcauuu

SEQ ID NO: 56747 - RNA, 19 nt, Homo sapiens
  misc_RNA (1)...(19): siRNA sense strand
acuaugcccucuccuacug

SEQ ID NO: 56748 - RNA, 19 nt, Homo sapiens
  misc_RNA (1)...(19): siRNA sense strand
agacuaccaccaacuacuu

SEQ ID NO: 56749 - RNA, 19 nt, Homo sapiens
  misc_RNA (1)...(19): siRNA sense strand
gaauuucagccgcauuugc

SEQ ID NO: 56750 - RNA, 19 nt, Homo sapiens
  misc_RNA (1)...(19): siRNA sense strand
ccgcccacaugccuacuau

SEQ ID NO: 56751 - RNA, 19 nt, Homo sapiens
  misc_RNA (1)...(19): siRNA sense strand
ggaauuucagccgcauuug

SEQ ID NO: 56752 - RNA, 19 nt, Homo sapiens
  misc_RNA (1)...(19): siRNA sense strand
cagcauggcacgggacaga

SEQ ID NO: 56753 - RNA, 19 nt, Homo sapiens
  misc_RNA (1)...(19): siRNA sense strand
gccaucgucuucggcaaug

SEQ ID NO: 56754 - RNA, 19 nt, Homo sapiens
  misc_RNA (1)...(19): siRNA sense strand
acagguggagucuggaauu

SEQ ID NO: 56755 - RNA, 19 nt, Homo sapiens
  misc_RNA (1)...(19): siRNA sense strand
gccagcauccuuaaucucu

SEQ ID NO: 56756 - RNA, 19 nt, Homo sapiens
  misc_RNA (1)...(19): siRNA sense strand
uguacagccagcauccuua

SEQ ID NO: 56757 - RNA, 19 nt, Homo sapiens
  misc_RNA (1)...(19): siRNA sense strand
ucucugugccaucagcaua

SEQ ID NO: 56758 - RNA, 19 nt, Homo sapiens
  misc_RNA (1)...(19): siRNA sense strand
cauccuggccaucgucuuc

SEQ ID NO: 56759 - RNA, 19 nt, Homo sapiens
  misc_RNA (1)...(19): siRNA sense strand
ccuacuaugcccucuccua

SEQ ID NO: 56760 - RNA, 19 nt, Homo sapiens
  misc_RNA (1)...(19): siRNA sense strand
cuguuuggcuuuaauacca

SEQ ID NO: 56761 - RNA, 19 nt, Homo sapiens
  misc_RNA (1)...(19): siRNA sense strand
caucuacacugucuucaac

SEQ ID NO: 56762 - RNA, 19 nt, Homo sapiens
  misc_RNA (1)...(19): siRNA sense strand
gugcaccgccuccaucuuc

SEQ ID NO: 56763 - RNA, 19 nt, Homo sapiens
  misc_RNA (1)...(19): siRNA sense strand
cgugugcuccuucuuccua

SEQ ID NO: 56764 - RNA, 19 nt, Homo sapiens
  misc_RNA (1)...(19): siRNA sense strand
ccaucagcguggacagguu

SEQ ID NO: 56765 - RNA, 19 nt, Homo sapiens
  misc_RNA (1)...(19): siRNA sense strand
gcaccgccuccaucuucaa

SEQ ID NO: 56766 - RNA, 19 nt, Homo sapiens
  misc_RNA (1)...(19): siRNA sense strand
gagaagaauugguuuguug

SEQ ID NO: 56767 - RNA, 19 nt, Homo sapiens
  misc_RNA (1)...(19): siRNA sense strand
gccagucucuucugauuaa

SEQ ID NO: 56768 - RNA, 19 nt, Homo sapiens
  misc_RNA (1)...(19): siRNA sense strand
ccagaaagcaaucuuguuu

SEQ ID NO: 56769 - RNA, 19 nt, Homo sapiens
  misc_RNA (1)...(19): siRNA sense strand
ucacagcccugaccgagaa

SEQ ID NO: 56770 - RNA, 19 nt, Homo sapiens
  misc_RNA (1)...(19): siRNA sense strand
ccaagaagcaugcagagaa

SEQ ID NO: 56771 - RNA, 19 nt, Homo sapiens
  misc_RNA (1)...(19): siRNA sense strand
uggaaaggcuggaggagaa

SEQ ID NO: 56772 - RNA, 19 nt, Homo sapiens
  misc_RNA (1)...(19): siRNA sense strand
caagaagcaugcagagaag

SEQ ID NO: 56773 - RNA, 19 nt, Homo sapiens
  misc_RNA (1)...(19): siRNA sense strand
ggaaaucaccaccuucaca

SEQ ID NO: 56774 - RNA, 19 nt, Homo sapiens
  misc_RNA (1)...(19): siRNA sense strand
acaccuauauauccaagaa

SEQ ID NO: 56775 - RNA, 19 nt, Homo sapiens
  misc_RNA (1)...(19): siRNA sense strand
gaggagaaccauuacaaca

SEQ ID NO: 56776 - RNA, 19 nt, Homo sapiens
  misc_RNA (1)...(19): siRNA sense strand
gcagagaagaauugguuug

SEQ ID NO: 56777 - RNA, 19 nt, Homo sapiens
  misc_RNA (1)...(19): siRNA sense strand
caccaaaugaggaauguuu

SEQ ID NO: 56778 - RNA, 19 nt, Homo sapiens
  misc_RNA (1)...(19): siRNA sense strand
gcccugaccgagaaguuua

SEQ ID NO: 56779 - RNA, 19 nt, Homo sapiens
  misc_RNA (1)...(19): siRNA sense strand
gaagaaugggagcugcaaa

SEQ ID NO: 56780 - RNA, 19 nt, Homo sapiens
  misc_RNA (1)...(19): siRNA sense strand
ggcuggaggagaaccauua

SEQ ID NO: 56781 - RNA, 19 nt, Homo sapiens
  misc_RNA (1)...(19): siRNA sense strand
agagaagaauugguuuguu

SEQ ID NO: 56782 - RNA, 19 nt, Homo sapiens
  misc_RNA (1)...(19): siRNA sense strand
ccauuacaacaccuauaua

SEQ ID NO: 56783 - RNA, 19 nt, Homo sapiens
  misc_RNA (1)...(19): siRNA sense strand
cugccagucucuucugauu

SEQ ID NO: 56784 - RNA, 19 nt, Homo sapiens
  misc_RNA (1)...(19): siRNA sense strand
cccaaacuccucuacugua

SEQ ID NO: 56785 - RNA, 19 nt, Homo sapiens
  misc_RNA (1)...(19): siRNA sense strand
gaaccauuacaacaccuau

SEQ ID NO: 56786 - RNA, 19 nt, Homo sapiens
  misc_RNA (1)...(19): siRNA sense strand
ugaccgagaaguuuaaucu

SEQ ID NO: 56787 - RNA, 19 nt, Homo sapiens
  misc_RNA (1)...(19): siRNA sense strand
gacucacuauggccagaaa

SEQ ID NO: 56788 - RNA, 19 nt, Homo sapiens
  misc_RNA (1)...(19): siRNA sense strand
uaaucugccuccagggaau

SEQ ID NO: 56789 - RNA, 19 nt, Homo sapiens
  misc_RNA (1)...(19): siRNA sense strand
uuacaacaccuauauaucc

SEQ ID NO: 56790 - RNA, 19 nt, Homo sapiens
  misc_RNA (1)...(19): siRNA sense strand
gcccaaacuccucuacugu

SEQ ID NO: 56791 - RNA, 19 nt, Homo sapiens
  misc_RNA (1)...(19): siRNA sense strand
ggaggagaaccauuacaac

SEQ ID NO: 56792 - RNA, 19 nt, Homo sapiens
  misc_RNA (1)...(19): siRNA sense strand
gaagcaugcagagaagaau

SEQ ID NO: 56793 - RNA, 19 nt, Homo sapiens
  misc_RNA (1)...(19): siRNA sense strand
gccagaaagcaaucuuguu

SEQ ID NO: 56794 - RNA, 19 nt, Homo sapiens
  misc_RNA (1)...(19): siRNA sense strand
uggaggagaaccauuacaa

SEQ ID NO: 56795 - RNA, 19 nt, Homo sapiens
  misc_RNA (1)...(19): siRNA sense strand
cagagaagaauugguuugu

SEQ ID NO: 56796 - RNA, 19 nt, Homo sapiens
  misc_RNA (1)...(19): siRNA sense strand
uacaacaccuauauaucca

SEQ ID NO: 56797 - RNA, 19 nt, Homo sapiens
  misc_RNA (1)...(19): siRNA sense strand
agaagcaugcagagaagaa

SEQ ID NO: 56798 - RNA, 19 nt, Homo sapiens
  misc_RNA (1)...(19): siRNA sense strand
ggccagaaagcaaucuugu

SEQ ID NO: 56799 - RNA, 19 nt, Homo sapiens
  misc_RNA (1)...(19): siRNA sense strand
aaaugaggaauguuuguuc

SEQ ID NO: 56800 - RNA, 19 nt, Homo sapiens
  misc_RNA (1)...(19): siRNA sense strand
uuguuggccucaagaagaa

SEQ ID NO: 56801 - RNA, 19 nt, Homo sapiens
  misc_RNA (1)...(19): siRNA sense strand
ucacagcccugaccgagaa

SEQ ID NO: 56802 - RNA, 19 nt, Homo sapiens
  misc_RNA (1)...(19): siRNA sense strand
ggaaaucaccaccuucaca

SEQ ID NO: 56803 - RNA, 19 nt, Homo sapiens
  misc_RNA (1)...(19): siRNA sense strand
gcccugaccgagaaguuua

SEQ ID NO: 56804 - RNA, 19 nt, Homo sapiens
  misc_RNA (1)...(19): siRNA sense strand
cccaaacuccucuacugua

SEQ ID NO: 56805 - RNA, 19 nt, Homo sapiens
  misc_RNA (1)...(19): siRNA sense strand
ugaccgagaaguuuaaucu

SEQ ID NO: 56806 - RNA, 19 nt, Homo sapiens
  misc_RNA (1)...(19): siRNA sense strand
uaaucugccuccagggaau

SEQ ID NO: 56807 - RNA, 19 nt, Homo sapiens
  misc_RNA (1)...(19): siRNA sense strand
gcccaaacuccucuacugu

SEQ ID NO: 56808 - RNA, 19 nt, Homo sapiens
  misc_RNA (1)...(19): siRNA sense strand
ucacagcccugaccgagaa

SEQ ID NO: 56809 - RNA, 19 nt, Homo sapiens
  misc_RNA (1)...(19): siRNA sense strand
ggaaaucaccaccuucaca

SEQ ID NO: 56810 - RNA, 19 nt, Homo sapiens
  misc_RNA (1)...(19): siRNA sense strand
gcccugaccgagaaguuua

SEQ ID NO: 56811 - RNA, 19 nt, Homo sapiens
  misc_RNA (1)...(19): siRNA sense strand
cccaaacuccucuacugua

SEQ ID NO: 56812 - RNA, 19 nt, Homo sapiens
  misc_RNA (1)...(19): siRNA sense strand
ugaccgagaaguuuaaucu

SEQ ID NO: 56813 - RNA, 19 nt, Homo sapiens
  misc_RNA (1)...(19): siRNA sense strand
uaaucugccuccagggaau

SEQ ID NO: 56814 - RNA, 19 nt, Homo sapiens
  misc_RNA (1)...(19): siRNA sense strand
gcccaaacuccucuacugu

SEQ ID NO: 56815 - RNA, 19 nt, Homo sapiens
  misc_RNA (1)...(19): siRNA sense strand
gaaacaagcccuuuaaguu

SEQ ID NO: 56816 - RNA, 19 nt, Homo sapiens
  misc_RNA (1)...(19): siRNA sense strand
aacaagcccuuuaaguuua

SEQ ID NO: 56817 - RNA, 19 nt, Homo sapiens
  misc_RNA (1)...(19): siRNA sense strand
gcuugaagauggaaagaaa

SEQ ID NO: 56818 - RNA, 19 nt, Homo sapiens
  misc_RNA (1)...(19): siRNA sense strand
gagccaaacugacuauauc

SEQ ID NO: 56819 - RNA, 19 nt, Homo sapiens
  misc_RNA (1)...(19): siRNA sense strand
gaagauggaaagaaauuug

SEQ ID NO: 56820 - RNA, 19 nt, Homo sapiens
  misc_RNA (1)...(19): siRNA sense strand
gacagaaacaagcccuuua

SEQ ID NO: 56821 - RNA, 19 nt, Homo sapiens
  misc_RNA (1)...(19): siRNA sense strand
ggacagaaacaagcccuuu

SEQ ID NO: 56822 - RNA, 19 nt, Homo sapiens
  misc_RNA (1)...(19): siRNA sense strand
acagaaacaagcccuuuaa

SEQ ID NO: 56823 - RNA, 19 nt, Homo sapiens
  misc_RNA (1)...(19): siRNA sense strand
acaccgggaugcuugaaga

SEQ ID NO: 56824 - RNA, 19 nt, Homo sapiens
  misc_RNA (1)...(19): siRNA sense strand
gauccgaggcugggaagaa

SEQ ID NO: 56825 - RNA, 19 nt, Homo sapiens
  misc_RNA (1)...(19): siRNA sense strand
gcacuacaccgggaugcuu

SEQ ID NO: 56826 - RNA, 19 nt, Homo sapiens
  misc_RNA (1)...(19): siRNA sense strand
acaagcccuuuaaguuuau

SEQ ID NO: 56827 - RNA, 19 nt, Homo sapiens
  misc_RNA (1)...(19): siRNA sense strand
agaaacaagcccuuuaagu

SEQ ID NO: 56828 - RNA, 19 nt, Homo sapiens
  misc_RNA (1)...(19): siRNA sense strand
gagugcagguggaaaccau

SEQ ID NO: 56829 - RNA, 19 nt, Homo sapiens
  misc_RNA (1)...(19): siRNA sense strand
agaccugcguggugcacua

SEQ ID NO: 56830 - RNA, 19 nt, Homo sapiens
  misc_RNA (1)...(19): siRNA sense strand
ggcaucaucccaccacaug

SEQ ID NO: 56831 - RNA, 19 nt, Homo sapiens
  misc_RNA (1)...(19): siRNA sense strand
ccacucucgucuucgaugu

SEQ ID NO: 56832 - RNA, 19 nt, Homo sapiens
  misc_RNA (1)...(19): siRNA sense strand
cagagagccaaacugacua

SEQ ID NO: 56833 - RNA, 19 nt, Homo sapiens
  misc_RNA (1)...(19): siRNA sense strand
cgucuucgauguggagcuu

SEQ ID NO: 56834 - RNA, 19 nt, Homo sapiens
  misc_RNA (1)...(19): siRNA sense strand
acaugccacucucgucuuc

SEQ ID NO: 56835 - RNA, 19 nt, Homo sapiens
  misc_RNA (1)...(19): siRNA sense strand
gagagccaaacugacuaua

SEQ ID NO: 56836 - RNA, 19 nt, Homo sapiens
  misc_RNA (1)...(19): siRNA sense strand
agagccaaacugacuauau

SEQ ID NO: 56837 - RNA, 19 nt, Homo sapiens
  misc_RNA (1)...(19): siRNA sense strand
gaugagugugggucagaga

SEQ ID NO: 56838 - RNA, 19 nt, Homo sapiens
  misc_RNA (1)...(19): siRNA sense strand
cgggaugcuugaagaugga

SEQ ID NO: 56839 - RNA, 19 nt, Homo sapiens
  misc_RNA (1)...(19): siRNA sense strand
gaaacaagcccuuuaaguu

SEQ ID NO: 56840 - RNA, 19 nt, Homo sapiens
  misc_RNA (1)...(19): siRNA sense strand
aacaagcccuuuaaguuua

SEQ ID NO: 56841 - RNA, 19 nt, Homo sapiens
  misc_RNA (1)...(19): siRNA sense strand
gcuugaagauggaaagaaa

SEQ ID NO: 56842 - RNA, 19 nt, Homo sapiens
  misc_RNA (1)...(19): siRNA sense strand
gagccaaacugacuauauc

SEQ ID NO: 56843 - RNA, 19 nt, Homo sapiens
  misc_RNA (1)...(19): siRNA sense strand
gaagauggaaagaaauuug

SEQ ID NO: 56844 - RNA, 19 nt, Homo sapiens
  misc_RNA (1)...(19): siRNA sense strand
gacagaaacaagcccuuua

SEQ ID NO: 56845 - RNA, 19 nt, Homo sapiens
  misc_RNA (1)...(19): siRNA sense strand
ggacagaaacaagcccuuu

SEQ ID NO: 56846 - RNA, 19 nt, Homo sapiens
  misc_RNA (1)...(19): siRNA sense strand
acagaaacaagcccuuuaa

SEQ ID NO: 56847 - RNA, 19 nt, Homo sapiens
  misc_RNA (1)...(19): siRNA sense strand
acaccgggaugcuugaaga

SEQ ID NO: 56848 - RNA, 19 nt, Homo sapiens
  misc_RNA (1)...(19): siRNA sense strand
gauccgaggcugggaagaa

SEQ ID NO: 56849 - RNA, 19 nt, Homo sapiens
  misc_RNA (1)...(19): siRNA sense strand
gcacuacaccgggaugcuu

SEQ ID NO: 56850 - RNA, 19 nt, Homo sapiens
  misc_RNA (1)...(19): siRNA sense strand
acaagcccuuuaaguuuau

SEQ ID NO: 56851 - RNA, 19 nt, Homo sapiens
  misc_RNA (1)...(19): siRNA sense strand
agaaacaagcccuuuaagu

SEQ ID NO: 56852 - RNA, 19 nt, Homo sapiens
  misc_RNA (1)...(19): siRNA sense strand
gagugcagguggaaaccau

SEQ ID NO: 56853 - RNA, 19 nt, Homo sapiens
  misc_RNA (1)...(19): siRNA sense strand
agaccugcguggugcacua

SEQ ID NO: 56854 - RNA, 19 nt, Homo sapiens
  misc_RNA (1)...(19): siRNA sense strand
ggcaucaucccaccacaug

SEQ ID NO: 56855 - RNA, 19 nt, Homo sapiens
  misc_RNA (1)...(19): siRNA sense strand
ccacucucgucuucgaugu

SEQ ID NO: 56856 - RNA, 19 nt, Homo sapiens
  misc_RNA (1)...(19): siRNA sense strand
cagagagccaaacugacua

SEQ ID NO: 56857 - RNA, 19 nt, Homo sapiens
  misc_RNA (1)...(19): siRNA sense strand
cgucuucgauguggagcuu

SEQ ID NO: 56858 - RNA, 19 nt, Homo sapiens
  misc_RNA (1)...(19): siRNA sense strand
acaugccacucucgucuuc

SEQ ID NO: 56859 - RNA, 19 nt, Homo sapiens
  misc_RNA (1)...(19): siRNA sense strand
gagagccaaacugacuaua

SEQ ID NO: 56860 - RNA, 19 nt, Homo sapiens
  misc_RNA (1)...(19): siRNA sense strand
agagccaaacugacuauau

SEQ ID NO: 56861 - RNA, 19 nt, Homo sapiens
  misc_RNA (1)...(19): siRNA sense strand
gaugagugugggucagaga

SEQ ID NO: 56862 - RNA, 19 nt, Homo sapiens
  misc_RNA (1)...(19): siRNA sense strand
cgggaugcuugaagaugga

SEQ ID NO: 56863 - RNA, 19 nt, Homo sapiens
  misc_RNA (1)...(19): siRNA sense strand
gaucagagcuggcgcaaag

SEQ ID NO: 56864 - RNA, 19 nt, Homo sapiens
  misc_RNA (1)...(19): siRNA sense strand
gcaaagagcggguacugaa

SEQ ID NO: 56865 - RNA, 19 nt, Homo sapiens
  misc_RNA (1)...(19): siRNA sense strand
gcaaugaaaucuggacuca

SEQ ID NO: 56866 - RNA, 19 nt, Homo sapiens
  misc_RNA (1)...(19): siRNA sense strand
gauguuuccuaccuauaua

SEQ ID NO: 56867 - RNA, 19 nt, Homo sapiens
  misc_RNA (1)...(19): siRNA sense strand
gagcaauggugggaagauu

SEQ ID NO: 56868 - RNA, 19 nt, Homo sapiens
  misc_RNA (1)...(19): siRNA sense strand
ccacuguucugugcaauga

SEQ ID NO: 56869 - RNA, 19 nt, Homo sapiens
  misc_RNA (1)...(19): siRNA sense strand
ggauguuuccuaccuauau

SEQ ID NO: 56870 - RNA, 19 nt, Homo sapiens
  misc_RNA (1)...(19): siRNA sense strand
ggagcugccugccaaccuu

SEQ ID NO: 56871 - RNA, 19 nt, Homo sapiens
  misc_RNA (1)...(19): siRNA sense strand
caaagaggacugugagcaa

SEQ ID NO: 56872 - RNA, 19 nt, Homo sapiens
  misc_RNA (1)...(19): siRNA sense strand
ggacuucaggguuuaacaa

SEQ ID NO: 56873 - RNA, 19 nt, Homo sapiens
  misc_RNA (1)...(19): siRNA sense strand
ccaggaagcccauaaggau

SEQ ID NO: 56874 - RNA, 19 nt, Homo sapiens
  misc_RNA (1)...(19): siRNA sense strand
ggaagaaugccugcuguuc

SEQ ID NO: 56875 - RNA, 19 nt, Homo sapiens
  misc_RNA (1)...(19): siRNA sense strand
ccuacaaggucagcaacua

SEQ ID NO: 56876 - RNA, 19 nt, Homo sapiens
  misc_RNA (1)...(19): siRNA sense strand
aaagaggacugugagcaau

SEQ ID NO: 56877 - RNA, 19 nt, Homo sapiens
  misc_RNA (1)...(19): siRNA sense strand
aaugaaaucuggacucacu

SEQ ID NO: 56878 - RNA, 19 nt, Homo sapiens
  misc_RNA (1)...(19): siRNA sense strand
caaguugcaugagcagugu

SEQ ID NO: 56879 - RNA, 19 nt, Homo sapiens
  misc_RNA (1)...(19): siRNA sense strand
gcaaacggcauuucaucca

SEQ ID NO: 56880 - RNA, 19 nt, Homo sapiens
  misc_RNA (1)...(19): siRNA sense strand
cuucaggguuuaacaagug

SEQ ID NO: 56881 - RNA, 19 nt, Homo sapiens
  misc_RNA (1)...(19): siRNA sense strand
gccaaccuuuccauuucua

SEQ ID NO: 56882 - RNA, 19 nt, Homo sapiens
  misc_RNA (1)...(19): siRNA sense strand
ugucgacccuggaggaaga

SEQ ID NO: 56883 - RNA, 19 nt, Homo sapiens
  misc_RNA (1)...(19): siRNA sense strand
cugccaaccuuuccauuuc

SEQ ID NO: 56884 - RNA, 19 nt, Homo sapiens
  misc_RNA (1)...(19): siRNA sense strand
ggaagcccauaaggauguu

SEQ ID NO: 56885 - RNA, 19 nt, Homo sapiens
  misc_RNA (1)...(19): siRNA sense strand
gccaagcaccacaaggaaa

SEQ ID NO: 56886 - RNA, 19 nt, Homo sapiens
  misc_RNA (1)...(19): siRNA sense strand
acuguucugugcaaugaaa

SEQ ID NO: 56887 - RNA, 19 nt, Homo sapiens
  misc_RNA (1)...(19): siRNA sense strand
ggacucacuccuacaaggu

SEQ ID NO: 56888 - RNA, 19 nt, Homo sapiens
  misc_RNA (1)...(19): siRNA sense strand
gccaggaagcccauaagga

SEQ ID NO: 56889 - RNA, 19 nt, Homo sapiens
  misc_RNA (1)...(19): siRNA sense strand
ggagguggcgagguucuau

SEQ ID NO: 56890 - RNA, 19 nt, Homo sapiens
  misc_RNA (1)...(19): siRNA sense strand
gccuggccuuuccugcuua

SEQ ID NO: 56891 - RNA, 19 nt, Homo sapiens
  misc_RNA (1)...(19): siRNA sense strand
cuaccuauauagauucaac

SEQ ID NO: 56892 - RNA, 19 nt, Homo sapiens
  misc_RNA (1)...(19): siRNA sense strand
augaggagguggcgagguu

SEQ ID NO: 56893 - RNA, 19 nt, Homo sapiens
  misc_RNA (1)...(19): siRNA sense strand
gaacgccaagcaccacaag

SEQ ID NO: 56894 - RNA, 19 nt, Homo sapiens
  misc_RNA (1)...(19): siRNA sense strand
gagcugccugccaaccuuu

SEQ ID NO: 56895 - RNA, 19 nt, Homo sapiens
  misc_RNA (1)...(19): siRNA sense strand
gcucagacaaggauugcau

SEQ ID NO: 56896 - RNA, 19 nt, Homo sapiens
  misc_RNA (1)...(19): siRNA sense strand
ccgaggacaaguugcauga

SEQ ID NO: 56897 - RNA, 19 nt, Homo sapiens
  misc_RNA (1)...(19): siRNA sense strand
ccugccaaccuuuccauuu

SEQ ID NO: 56898 - RNA, 19 nt, Homo sapiens
  misc_RNA (1)...(19): siRNA sense strand
gcgcaaagagcggguacug

SEQ ID NO: 56899 - RNA, 19 nt, Homo sapiens
  misc_RNA (1)...(19): siRNA sense strand
gaacgugccccugugcaaa

SEQ ID NO: 56900 - RNA, 19 nt, Homo sapiens
  misc_RNA (1)...(19): siRNA sense strand
aagauugucgcaccuccua

SEQ ID NO: 56901 - RNA, 19 nt, Homo sapiens
  misc_RNA (1)...(19): siRNA sense strand
gggaggcucagacaaggau

SEQ ID NO: 56902 - RNA, 19 nt, Homo sapiens
  misc_RNA (1)...(19): siRNA sense strand
aaaucuggacucacuccua

SEQ ID NO: 56903 - RNA, 19 nt, Homo sapiens
  misc_RNA (1)...(19): siRNA sense strand
gcaagagcaacuggcacaa

SEQ ID NO: 56904 - RNA, 19 nt, Homo sapiens
  misc_RNA (1)...(19): siRNA sense strand
gaucagagcuggcgcaaag

SEQ ID NO: 56905 - RNA, 19 nt, Homo sapiens
  misc_RNA (1)...(19): siRNA sense strand
gcaaagagcggguacugaa

SEQ ID NO: 56906 - RNA, 19 nt, Homo sapiens
  misc_RNA (1)...(19): siRNA sense strand
gcaaugaaaucuggacuca

SEQ ID NO: 56907 - RNA, 19 nt, Homo sapiens
  misc_RNA (1)...(19): siRNA sense strand
gauguuuccuaccuauaua

SEQ ID NO: 56908 - RNA, 19 nt, Homo sapiens
  misc_RNA (1)...(19): siRNA sense strand
gagcaauggugggaagauu

SEQ ID NO: 56909 - RNA, 19 nt, Homo sapiens
  misc_RNA (1)...(19): siRNA sense strand
ccacuguucugugcaauga

SEQ ID NO: 56910 - RNA, 19 nt, Homo sapiens
  misc_RNA (1)...(19): siRNA sense strand
ggauguuuccuaccuauau

SEQ ID NO: 56911 - RNA, 19 nt, Homo sapiens
  misc_RNA (1)...(19): siRNA sense strand
ggagcugccugccaaccuu

SEQ ID NO: 56912 - RNA, 19 nt, Homo sapiens
  misc_RNA (1)...(19): siRNA sense strand
caaagaggacugugagcaa

SEQ ID NO: 56913 - RNA, 19 nt, Homo sapiens
  misc_RNA (1)...(19): siRNA sense strand
ggacuucaggguuuaacaa

SEQ ID NO: 56914 - RNA, 19 nt, Homo sapiens
  misc_RNA (1)...(19): siRNA sense strand
ccaggaagcccauaaggau

SEQ ID NO: 56915 - RNA, 19 nt, Homo sapiens
  misc_RNA (1)...(19): siRNA sense strand
ggaagaaugccugcuguuc

SEQ ID NO: 56916 - RNA, 19 nt, Homo sapiens
  misc_RNA (1)...(19): siRNA sense strand
ccuacaaggucagcaacua

SEQ ID NO: 56917 - RNA, 19 nt, Homo sapiens
  misc_RNA (1)...(19): siRNA sense strand
aaagaggacugugagcaau

SEQ ID NO: 56918 - RNA, 19 nt, Homo sapiens
  misc_RNA (1)...(19): siRNA sense strand
aaugaaaucuggacucacu

SEQ ID NO: 56919 - RNA, 19 nt, Homo sapiens
  misc_RNA (1)...(19): siRNA sense strand
caaguugcaugagcagugu

SEQ ID NO: 56920 - RNA, 19 nt, Homo sapiens
  misc_RNA (1)...(19): siRNA sense strand
gcaaacggcauuucaucca

SEQ ID NO: 56921 - RNA, 19 nt, Homo sapiens
  misc_RNA (1)...(19): siRNA sense strand
cuucaggguuuaacaagug

SEQ ID NO: 56922 - RNA, 19 nt, Homo sapiens
  misc_RNA (1)...(19): siRNA sense strand
gccaaccuuuccauuucua

SEQ ID NO: 56923 - RNA, 19 nt, Homo sapiens
  misc_RNA (1)...(19): siRNA sense strand
ugucgacccuggaggaaga

SEQ ID NO: 56924 - RNA, 19 nt, Homo sapiens
  misc_RNA (1)...(19): siRNA sense strand
cugccaaccuuuccauuuc

SEQ ID NO: 56925 - RNA, 19 nt, Homo sapiens
  misc_RNA (1)...(19): siRNA sense strand
ggaagcccauaaggauguu

SEQ ID NO: 56926 - RNA, 19 nt, Homo sapiens
  misc_RNA (1)...(19): siRNA sense strand
gccaagcaccacaaggaaa

SEQ ID NO: 56927 - RNA, 19 nt, Homo sapiens
  misc_RNA (1)...(19): siRNA sense strand
acuguucugugcaaugaaa

SEQ ID NO: 56928 - RNA, 19 nt, Homo sapiens
  misc_RNA (1)...(19): siRNA sense strand
ggacucacuccuacaaggu

SEQ ID NO: 56929 - RNA, 19 nt, Homo sapiens
  misc_RNA (1)...(19): siRNA sense strand
gccaggaagcccauaagga

SEQ ID NO: 56930 - RNA, 19 nt, Homo sapiens
  misc_RNA (1)...(19): siRNA sense strand
ggagguggcgagguucuau

SEQ ID NO: 56931 - RNA, 19 nt, Homo sapiens
  misc_RNA (1)...(19): siRNA sense strand
gccuggccuuuccugcuua

SEQ ID NO: 56932 - RNA, 19 nt, Homo sapiens
  misc_RNA (1)...(19): siRNA sense strand
cuaccuauauagauucaac

SEQ ID NO: 56933 - RNA, 19 nt, Homo sapiens
  misc_RNA (1)...(19): siRNA sense strand
augaggagguggcgagguu

SEQ ID NO: 56934 - RNA, 19 nt, Homo sapiens
  misc_RNA (1)...(19): siRNA sense strand
gaacgccaagcaccacaag

SEQ ID NO: 56935 - RNA, 19 nt, Homo sapiens
  misc_RNA (1)...(19): siRNA sense strand
gagcugccugccaaccuuu

SEQ ID NO: 56936 - RNA, 19 nt, Homo sapiens
  misc_RNA (1)...(19): siRNA sense strand
gcucagacaaggauugcau

SEQ ID NO: 56937 - RNA, 19 nt, Homo sapiens
  misc_RNA (1)...(19): siRNA sense strand
ccgaggacaaguugcauga

SEQ ID NO: 56938 - RNA, 19 nt, Homo sapiens
  misc_RNA (1)...(19): siRNA sense strand
ccugccaaccuuuccauuu

SEQ ID NO: 56939 - RNA, 19 nt, Homo sapiens
  misc_RNA (1)...(19): siRNA sense strand
gcgcaaagagcggguacug

SEQ ID NO: 56940 - RNA, 19 nt, Homo sapiens
  misc_RNA (1)...(19): siRNA sense strand
gaacgugccccugugcaaa

SEQ ID NO: 56941 - RNA, 19 nt, Homo sapiens
  misc_RNA (1)...(19): siRNA sense strand
aagauugucgcaccuccua

SEQ ID NO: 56942 - RNA, 19 nt, Homo sapiens
  misc_RNA (1)...(19): siRNA sense strand
gggaggcucagacaaggau

SEQ ID NO: 56943 - RNA, 19 nt, Homo sapiens
  misc_RNA (1)...(19): siRNA sense strand
aaaucuggacucacuccua

SEQ ID NO: 56944 - RNA, 19 nt, Homo sapiens
  misc_RNA (1)...(19): siRNA sense strand
gcaagagcaacuggcacaa

SEQ ID NO: 56945 - RNA, 19 nt, Homo sapiens
  misc_RNA (1)...(19): siRNA sense strand
gaucagagcuggcgcaaag

SEQ ID NO: 56946 - RNA, 19 nt, Homo sapiens
  misc_RNA (1)...(19): siRNA sense strand
gcaaagagcggguacugaa

SEQ ID NO: 56947 - RNA, 19 nt, Homo sapiens
  misc_RNA (1)...(19): siRNA sense strand
gcaaugaaaucuggacuca

SEQ ID NO: 56948 - RNA, 19 nt, Homo sapiens
  misc_RNA (1)...(19): siRNA sense strand
gauguuuccuaccuauaua

SEQ ID NO: 56949 - RNA, 19 nt, Homo sapiens
  misc_RNA (1)...(19): siRNA sense strand
gagcaauggugggaagauu

SEQ ID NO: 56950 - RNA, 19 nt, Homo sapiens
  misc_RNA (1)...(19): siRNA sense strand
ccacuguucugugcaauga

SEQ ID NO: 56951 - RNA, 19 nt, Homo sapiens
  misc_RNA (1)...(19): siRNA sense strand
ggauguuuccuaccuauau

SEQ ID NO: 56952 - RNA, 19 nt, Homo sapiens
  misc_RNA (1)...(19): siRNA sense strand
ggagcugccugccaaccuu

SEQ ID NO: 56953 - RNA, 19 nt, Homo sapiens
  misc_RNA (1)...(19): siRNA sense strand
caaagaggacugugagcaa

SEQ ID NO: 56954 - RNA, 19 nt, Homo sapiens
  misc_RNA (1)...(19): siRNA sense strand
ggacuucaggguuuaacaa

SEQ ID NO: 56955 - RNA, 19 nt, Homo sapiens
  misc_RNA (1)...(19): siRNA sense strand
ccaggaagcccauaaggau

SEQ ID NO: 56956 - RNA, 19 nt, Homo sapiens
  misc_RNA (1)...(19): siRNA sense strand
ggaagaaugccugcuguuc

SEQ ID NO: 56957 - RNA, 19 nt, Homo sapiens
  misc_RNA (1)...(19): siRNA sense strand
ccuacaaggucagcaacua

SEQ ID NO: 56958 - RNA, 19 nt, Homo sapiens
  misc_RNA (1)...(19): siRNA sense strand
aaagaggacugugagcaau

SEQ ID NO: 56959 - RNA, 19 nt, Homo sapiens
  misc_RNA (1)...(19): siRNA sense strand
aaugaaaucuggacucacu

SEQ ID NO: 56960 - RNA, 19 nt, Homo sapiens
  misc_RNA (1)...(19): siRNA sense strand
caaguugcaugagcagugu

SEQ ID NO: 56961 - RNA, 19 nt, Homo sapiens
  misc_RNA (1)...(19): siRNA sense strand
gcaaacggcauuucaucca

SEQ ID NO: 56962 - RNA, 19 nt, Homo sapiens
  misc_RNA (1)...(19): siRNA sense strand
cuucaggguuuaacaagug

SEQ ID NO: 56963 - RNA, 19 nt, Homo sapiens
  misc_RNA (1)...(19): siRNA sense strand
gccaaccuuuccauuucua

SEQ ID NO: 56964 - RNA, 19 nt, Homo sapiens
  misc_RNA (1)...(19): siRNA sense strand
ugucgacccuggaggaaga

SEQ ID NO: 56965 - RNA, 19 nt, Homo sapiens
  misc_RNA (1)...(19): siRNA sense strand
cugccaaccuuuccauuuc

SEQ ID NO: 56966 - RNA, 19 nt, Homo sapiens
  misc_RNA (1)...(19): siRNA sense strand
ggaagcccauaaggauguu

SEQ ID NO: 56967 - RNA, 19 nt, Homo sapiens
  misc_RNA (1)...(19): siRNA sense strand
gccaagcaccacaaggaaa

SEQ ID NO: 56968 - RNA, 19 nt, Homo sapiens
  misc_RNA (1)...(19): siRNA sense strand
acuguucugugcaaugaaa

SEQ ID NO: 56969 - RNA, 19 nt, Homo sapiens
  misc_RNA (1)...(19): siRNA sense strand
ggacucacuccuacaaggu

SEQ ID NO: 56970 - RNA, 19 nt, Homo sapiens
  misc_RNA (1)...(19): siRNA sense strand
gccaggaagcccauaagga

SEQ ID NO: 56971 - RNA, 19 nt, Homo sapiens
  misc_RNA (1)...(19): siRNA sense strand
ggagguggcgagguucuau

SEQ ID NO: 56972 - RNA, 19 nt, Homo sapiens
  misc_RNA (1)...(19): siRNA sense strand
gccuggccuuuccugcuua

SEQ ID NO: 56973 - RNA, 19 nt, Homo sapiens
  misc_RNA (1)...(19): siRNA sense strand
cuaccuauauagauucaac

SEQ ID NO: 56974 - RNA, 19 nt, Homo sapiens
  misc_RNA (1)...(19): siRNA sense strand
augaggagguggcgagguu

SEQ ID NO: 56975 - RNA, 19 nt, Homo sapiens
  misc_RNA (1)...(19): siRNA sense strand
gaacgccaagcaccacaag

SEQ ID NO: 56976 - RNA, 19 nt, Homo sapiens
  misc_RNA (1)...(19): siRNA sense strand
gagcugccugccaaccuuu

SEQ ID NO: 56977 - RNA, 19 nt, Homo sapiens
  misc_RNA (1)...(19): siRNA sense strand
gcucagacaaggauugcau

SEQ ID NO: 56978 - RNA, 19 nt, Homo sapiens
  misc_RNA (1)...(19): siRNA sense strand
ccgaggacaaguugcauga

SEQ ID NO: 56979 - RNA, 19 nt, Homo sapiens
  misc_RNA (1)...(19): siRNA sense strand
ccugccaaccuuuccauuu

SEQ ID NO: 56980 - RNA, 19 nt, Homo sapiens
  misc_RNA (1)...(19): siRNA sense strand
gcgcaaagagcggguacug

SEQ ID NO: 56981 - RNA, 19 nt, Homo sapiens
  misc_RNA (1)...(19): siRNA sense strand
gaacgugccccugugcaaa

SEQ ID NO: 56982 - RNA, 19 nt, Homo sapiens
  misc_RNA (1)...(19): siRNA sense strand
aagauugucgcaccuccua

SEQ ID NO: 56983 - RNA, 19 nt, Homo sapiens
  misc_RNA (1)...(19): siRNA sense strand
gggaggcucagacaaggau

SEQ ID NO: 56984 - RNA, 19 nt, Homo sapiens
  misc_RNA (1)...(19): siRNA sense strand
aaaucuggacucacuccua

SEQ ID NO: 56985 - RNA, 19 nt, Homo sapiens
  misc_RNA (1)...(19): siRNA sense strand
gcaagagcaacuggcacaa

SEQ ID NO: 56986 - RNA, 19 nt, Homo sapiens
  misc_RNA (1)...(19): siRNA sense strand
gaucagagcuggcgcaaag

SEQ ID NO: 56987 - RNA, 19 nt, Homo sapiens
  misc_RNA (1)...(19): siRNA sense strand
gcaaagagcggguacugaa

SEQ ID NO: 56988 - RNA, 19 nt, Homo sapiens
  misc_RNA (1)...(19): siRNA sense strand
gcaaugaaaucuggacuca

SEQ ID NO: 56989 - RNA, 19 nt, Homo sapiens
  misc_RNA (1)...(19): siRNA sense strand
gauguuuccuaccuauaua

SEQ ID NO: 56990 - RNA, 19 nt, Homo sapiens
  misc_RNA (1)...(19): siRNA sense strand
gagcaauggugggaagauu

SEQ ID NO: 56991 - RNA, 19 nt, Homo sapiens
  misc_RNA (1)...(19): siRNA sense strand
ccacuguucugugcaauga

SEQ ID NO: 56992 - RNA, 19 nt, Homo sapiens
  misc_RNA (1)...(19): siRNA sense strand
ggauguuuccuaccuauau

SEQ ID NO: 56993 - RNA, 19 nt, Homo sapiens
  misc_RNA (1)...(19): siRNA sense strand
ggagcugccugccaaccuu

SEQ ID NO: 56994 - RNA, 19 nt, Homo sapiens
  misc_RNA (1)...(19): siRNA sense strand
caaagaggacugugagcaa

SEQ ID NO: 56995 - RNA, 19 nt, Homo sapiens
  misc_RNA (1)...(19): siRNA sense strand
ggacuucaggguuuaacaa

SEQ ID NO: 56996 - RNA, 19 nt, Homo sapiens
  misc_RNA (1)...(19): siRNA sense strand
ccaggaagcccauaaggau

SEQ ID NO: 56997 - RNA, 19 nt, Homo sapiens
  misc_RNA (1)...(19): siRNA sense strand
ggaagaaugccugcuguuc

SEQ ID NO: 56998 - RNA, 19 nt, Homo sapiens
  misc_RNA (1)...(19): siRNA sense strand
ccuacaaggucagcaacua

SEQ ID NO: 56999 - RNA, 19 nt, Homo sapiens
  misc_RNA (1)...(19): siRNA sense strand
aaagaggacugugagcaau

SEQ ID NO: 57000 - RNA, 19 nt, Homo sapiens
  misc_RNA (1)...(19): siRNA sense strand
aaugaaaucuggacucacu

SEQ ID NO: 57001 - RNA, 19 nt, Homo sapiens
  misc_RNA (1)...(19): siRNA sense strand
caaguugcaugagcagugu

SEQ ID NO: 57002 - RNA, 19 nt, Homo sapiens
  misc_RNA (1)...(19): siRNA sense strand
gcaaacggcauuucaucca

SEQ ID NO: 57003 - RNA, 19 nt, Homo sapiens
  misc_RNA (1)...(19): siRNA sense strand
cuucaggguuuaacaagug

SEQ ID NO: 57004 - RNA, 19 nt, Homo sapiens
  misc_RNA (1)...(19): siRNA sense strand
gccaaccuuuccauuucua

SEQ ID NO: 57005 - RNA, 19 nt, Homo sapiens
  misc_RNA (1)...(19): siRNA sense strand
ugucgacccuggaggaaga

SEQ ID NO: 57006 - RNA, 19 nt, Homo sapiens
  misc_RNA (1)...(19): siRNA sense strand
cugccaaccuuuccauuuc

SEQ ID NO: 57007 - RNA, 19 nt, Homo sapiens
  misc_RNA (1)...(19): siRNA sense strand
ggaagcccauaaggauguu

SEQ ID NO: 57008 - RNA, 19 nt, Homo sapiens
  misc_RNA (1)...(19): siRNA sense strand
gccaagcaccacaaggaaa

SEQ ID NO: 57009 - RNA, 19 nt, Homo sapiens
  misc_RNA (1)...(19): siRNA sense strand
acuguucugugcaaugaaa

SEQ ID NO: 57010 - RNA, 19 nt, Homo sapiens
  misc_RNA (1)...(19): siRNA sense strand
ggacucacuccuacaaggu

SEQ ID NO: 57011 - RNA, 19 nt, Homo sapiens
  misc_RNA (1)...(19): siRNA sense strand
gccaggaagcccauaagga

SEQ ID NO: 57012 - RNA, 19 nt, Homo sapiens
  misc_RNA (1)...(19): siRNA sense strand
ggagguggcgagguucuau

SEQ ID NO: 57013 - RNA, 19 nt, Homo sapiens
  misc_RNA (1)...(19): siRNA sense strand
gccuggccuuuccugcuua

SEQ ID NO: 57014 - RNA, 19 nt, Homo sapiens
  misc_RNA (1)...(19): siRNA sense strand
cuaccuauauagauucaac

SEQ ID NO: 57015 - RNA, 19 nt, Homo sapiens
  misc_RNA (1)...(19): siRNA sense strand
augaggagguggcgagguu

SEQ ID NO: 57016 - RNA, 19 nt, Homo sapiens
  misc_RNA (1)...(19): siRNA sense strand
gaacgccaagcaccacaag

SEQ ID NO: 57017 - RNA, 19 nt, Homo sapiens
  misc_RNA (1)...(19): siRNA sense strand
gagcugccugccaaccuuu

SEQ ID NO: 57018 - RNA, 19 nt, Homo sapiens
  misc_RNA (1)...(19): siRNA sense strand
gcucagacaaggauugcau

SEQ ID NO: 57019 - RNA, 19 nt, Homo sapiens
  misc_RNA (1)...(19): siRNA sense strand
ccgaggacaaguugcauga

SEQ ID NO: 57020 - RNA, 19 nt, Homo sapiens
  misc_RNA (1)...(19): siRNA sense strand
ccugccaaccuuuccauuu

SEQ ID NO: 57021 - RNA, 19 nt, Homo sapiens
  misc_RNA (1)...(19): siRNA sense strand
gcgcaaagagcggguacug

SEQ ID NO: 57022 - RNA, 19 nt, Homo sapiens
  misc_RNA (1)...(19): siRNA sense strand
gaacgugccccugugcaaa

SEQ ID NO: 57023 - RNA, 19 nt, Homo sapiens
  misc_RNA (1)...(19): siRNA sense strand
aagauugucgcaccuccua

SEQ ID NO: 57024 - RNA, 19 nt, Homo sapiens
  misc_RNA (1)...(19): siRNA sense strand
gggaggcucagacaaggau

SEQ ID NO: 57025 - RNA, 19 nt, Homo sapiens
  misc_RNA (1)...(19): siRNA sense strand
aaaucuggacucacuccua

SEQ ID NO: 57026 - RNA, 19 nt, Homo sapiens
  misc_RNA (1)...(19): siRNA sense strand
gcaagagcaacuggcacaa

SEQ ID NO: 57027 - RNA, 19 nt, Homo sapiens
  misc_RNA (1)...(19): siRNA sense strand
gaucagagcuggcgcaaag

SEQ ID NO: 57028 - RNA, 19 nt, Homo sapiens
  misc_RNA (1)...(19): siRNA sense strand
gcaaagagcggguacugaa

SEQ ID NO: 57029 - RNA, 19 nt, Homo sapiens
  misc_RNA (1)...(19): siRNA sense strand
gcaaugaaaucuggacuca

SEQ ID NO: 57030 - RNA, 19 nt, Homo sapiens
  misc_RNA (1)...(19): siRNA sense strand
gauguuuccuaccuauaua

SEQ ID NO: 57031 - RNA, 19 nt, Homo sapiens
  misc_RNA (1)...(19): siRNA sense strand
gagcaauggugggaagauu

SEQ ID NO: 57032 - RNA, 19 nt, Homo sapiens
  misc_RNA (1)...(19): siRNA sense strand
ccacuguucugugcaauga

SEQ ID NO: 57033 - RNA, 19 nt, Homo sapiens
  misc_RNA (1)...(19): siRNA sense strand
ggauguuuccuaccuauau

SEQ ID NO: 57034 - RNA, 19 nt, Homo sapiens
  misc_RNA (1)...(19): siRNA sense strand
ggagcugccugccaaccuu

SEQ ID NO: 57035 - RNA, 19 nt, Homo sapiens
  misc_RNA (1)...(19): siRNA sense strand
caaagaggacugugagcaa

SEQ ID NO: 57036 - RNA, 19 nt, Homo sapiens
  misc_RNA (1)...(19): siRNA sense strand
ggacuucaggguuuaacaa

SEQ ID NO: 57037 - RNA, 19 nt, Homo sapiens
  misc_RNA (1)...(19): siRNA sense strand
ccaggaagcccauaaggau

SEQ ID NO: 57038 - RNA, 19 nt, Homo sapiens
  misc_RNA (1)...(19): siRNA sense strand
ggaagaaugccugcuguuc

SEQ ID NO: 57039 - RNA, 19 nt, Homo sapiens
  misc_RNA (1)...(19): siRNA sense strand
ccuacaaggucagcaacua

SEQ ID NO: 57040 - RNA, 19 nt, Homo sapiens
  misc_RNA (1)...(19): siRNA sense strand
aaagaggacugugagcaau

SEQ ID NO: 57041 - RNA, 19 nt, Homo sapiens
  misc_RNA (1)...(19): siRNA sense strand
aaugaaaucuggacucacu

SEQ ID NO: 57042 - RNA, 19 nt, Homo sapiens
  misc_RNA (1)...(19): siRNA sense strand
caaguugcaugagcagugu

SEQ ID NO: 57043 - RNA, 19 nt, Homo sapiens
  misc_RNA (1)...(19): siRNA sense strand
gcaaacggcauuucaucca

SEQ ID NO: 57044 - RNA, 19 nt, Homo sapiens
  misc_RNA (1)...(19): siRNA sense strand
cuucaggguuuaacaagug

SEQ ID NO: 57045 - RNA, 19 nt, Homo sapiens
  misc_RNA (1)...(19): siRNA sense strand
gccaaccuuuccauuucua

SEQ ID NO: 57046 - RNA, 19 nt, Homo sapiens
  misc_RNA (1)...(19): siRNA sense strand
ugucgacccuggaggaaga

SEQ ID NO: 57047 - RNA, 19 nt, Homo sapiens
  misc_RNA (1)...(19): siRNA sense strand
cugccaaccuuuccauuuc

SEQ ID NO: 57048 - RNA, 19 nt, Homo sapiens
  misc_RNA (1)...(19): siRNA sense strand
ggaagcccauaaggauguu

SEQ ID NO: 57049 - RNA, 19 nt, Homo sapiens
  misc_RNA (1)...(19): siRNA sense strand
gccaagcaccacaaggaaa

SEQ ID NO: 57050 - RNA, 19 nt, Homo sapiens
  misc_RNA (1)...(19): siRNA sense strand
acuguucugugcaaugaaa

SEQ ID NO: 57051 - RNA, 19 nt, Homo sapiens
  misc_RNA (1)...(19): siRNA sense strand
ggacucacuccuacaaggu

SEQ ID NO: 57052 - RNA, 19 nt, Homo sapiens
  misc_RNA (1)...(19): siRNA sense strand
gccaggaagcccauaagga

SEQ ID NO: 57053 - RNA, 19 nt, Homo sapiens
  misc_RNA (1)...(19): siRNA sense strand
ggagguggcgagguucuau

SEQ ID NO: 57054 - RNA, 19 nt, Homo sapiens
  misc_RNA (1)...(19): siRNA sense strand
gccuggccuuuccugcuua

SEQ ID NO: 57055 - RNA, 19 nt, Homo sapiens
  misc_RNA (1)...(19): siRNA sense strand
cuaccuauauagauucaac

SEQ ID NO: 57056 - RNA, 19 nt, Homo sapiens
  misc_RNA (1)...(19): siRNA sense strand
augaggagguggcgagguu

SEQ ID NO: 57057 - RNA, 19 nt, Homo sapiens
  misc_RNA (1)...(19): siRNA sense strand
gaacgccaagcaccacaag

SEQ ID NO: 57058 - RNA, 19 nt, Homo sapiens
  misc_RNA (1)...(19): siRNA sense strand
gagcugccugccaaccuuu

SEQ ID NO: 57059 - RNA, 19 nt, Homo sapiens
  misc_RNA (1)...(19): siRNA sense strand
gcucagacaaggauugcau

SEQ ID NO: 57060 - RNA, 19 nt, Homo sapiens
  misc_RNA (1)...(19): siRNA sense strand
ccgaggacaaguugcauga

SEQ ID NO: 57061 - RNA, 19 nt, Homo sapiens
  misc_RNA (1)...(19): siRNA sense strand
ccugccaaccuuuccauuu

SEQ ID NO: 57062 - RNA, 19 nt, Homo sapiens
  misc_RNA (1)...(19): siRNA sense strand
gcgcaaagagcggguacug

SEQ ID NO: 57063 - RNA, 19 nt, Homo sapiens
  misc_RNA (1)...(19): siRNA sense strand
gaacgugccccugugcaaa

SEQ ID NO: 57064 - RNA, 19 nt, Homo sapiens
  misc_RNA (1)...(19): siRNA sense strand
aagauugucgcaccuccua

SEQ ID NO: 57065 - RNA, 19 nt, Homo sapiens
  misc_RNA (1)...(19): siRNA sense strand
gggaggcucagacaaggau

SEQ ID NO: 57066 - RNA, 19 nt, Homo sapiens
  misc_RNA (1)...(19): siRNA sense strand
aaaucuggacucacuccua

SEQ ID NO: 57067 - RNA, 19 nt, Homo sapiens
  misc_RNA (1)...(19): siRNA sense strand
gcaagagcaacuggcacaa

SEQ ID NO: 57068 - RNA, 19 nt, Homo sapiens
  misc_RNA (1)...(19): siRNA sense strand
gaucagagcuggcgcaaag

SEQ ID NO: 57069 - RNA, 19 nt, Homo sapiens
  misc_RNA (1)...(19): siRNA sense strand
gcaaagagcggguacugaa

SEQ ID NO: 57070 - RNA, 19 nt, Homo sapiens
  misc_RNA (1)...(19): siRNA sense strand
gcaaugaaaucuggacuca

SEQ ID NO: 57071 - RNA, 19 nt, Homo sapiens
  misc_RNA (1)...(19): siRNA sense strand
gauguuuccuaccuauaua

SEQ ID NO: 57072 - RNA, 19 nt, Homo sapiens
  misc_RNA (1)...(19): siRNA sense strand
gagcaauggugggaagauu

SEQ ID NO: 57073 - RNA, 19 nt, Homo sapiens
  misc_RNA (1)...(19): siRNA sense strand
ccacuguucugugcaauga

SEQ ID NO: 57074 - RNA, 19 nt, Homo sapiens
  misc_RNA (1)...(19): siRNA sense strand
ggauguuuccuaccuauau

SEQ ID NO: 57075 - RNA, 19 nt, Homo sapiens
  misc_RNA (1)...(19): siRNA sense strand
ggagcugccugccaaccuu

SEQ ID NO: 57076 - RNA, 19 nt, Homo sapiens
  misc_RNA (1)...(19): siRNA sense strand
caaagaggacugugagcaa

SEQ ID NO: 57077 - RNA, 19 nt, Homo sapiens
  misc_RNA (1)...(19): siRNA sense strand
ggacuucaggguuuaacaa

SEQ ID NO: 57078 - RNA, 19 nt, Homo sapiens
  misc_RNA (1)...(19): siRNA sense strand
ccaggaagcccauaaggau

SEQ ID NO: 57079 - RNA, 19 nt, Homo sapiens
  misc_RNA (1)...(19): siRNA sense strand
ggaagaaugccugcuguuc

SEQ ID NO: 57080 - RNA, 19 nt, Homo sapiens
  misc_RNA (1)...(19): siRNA sense strand
ccuacaaggucagcaacua

SEQ ID NO: 57081 - RNA, 19 nt, Homo sapiens
  misc_RNA (1)...(19): siRNA sense strand
aaagaggacugugagcaau

SEQ ID NO: 57082 - RNA, 19 nt, Homo sapiens
  misc_RNA (1)...(19): siRNA sense strand
aaugaaaucuggacucacu

SEQ ID NO: 57083 - RNA, 19 nt, Homo sapiens
  misc_RNA (1)...(19): siRNA sense strand
caaguugcaugagcagugu

SEQ ID NO: 57084 - RNA, 19 nt, Homo sapiens
  misc_RNA (1)...(19): siRNA sense strand
gcaaacggcauuucaucca

SEQ ID NO: 57085 - RNA, 19 nt, Homo sapiens
  misc_RNA (1)...(19): siRNA sense strand
cuucaggguuuaacaagug

SEQ ID NO: 57086 - RNA, 19 nt, Homo sapiens
  misc_RNA (1)...(19): siRNA sense strand
gccaaccuuuccauuucua

SEQ ID NO: 57087 - RNA, 19 nt, Homo sapiens
  misc_RNA (1)...(19): siRNA sense strand
ugucgacccuggaggaaga

SEQ ID NO: 57088 - RNA, 19 nt, Homo sapiens
  misc_RNA (1)...(19): siRNA sense strand
cugccaaccuuuccauuuc

SEQ ID NO: 57089 - RNA, 19 nt, Homo sapiens
  misc_RNA (1)...(19): siRNA sense strand
ggaagcccauaaggauguu

SEQ ID NO: 57090 - RNA, 19 nt, Homo sapiens
  misc_RNA (1)...(19): siRNA sense strand
gccaagcaccacaaggaaa

SEQ ID NO: 57091 - RNA, 19 nt, Homo sapiens
  misc_RNA (1)...(19): siRNA sense strand
acuguucugugcaaugaaa

SEQ ID NO: 57092 - RNA, 19 nt, Homo sapiens
  misc_RNA (1)...(19): siRNA sense strand
ggacucacuccuacaaggu

SEQ ID NO: 57093 - RNA, 19 nt, Homo sapiens
  misc_RNA (1)...(19): siRNA sense strand
gccaggaagcccauaagga

SEQ ID NO: 57094 - RNA, 19 nt, Homo sapiens
  misc_RNA (1)...(19): siRNA sense strand
ggagguggcgagguucuau

SEQ ID NO: 57095 - RNA, 19 nt, Homo sapiens
  misc_RNA (1)...(19): siRNA sense strand
gccuggccuuuccugcuua

SEQ ID NO: 57096 - RNA, 19 nt, Homo sapiens
  misc_RNA (1)...(19): siRNA sense strand
cuaccuauauagauucaac

SEQ ID NO: 57097 - RNA, 19 nt, Homo sapiens
  misc_RNA (1)...(19): siRNA sense strand
augaggagguggcgagguu

SEQ ID NO: 57098 - RNA, 19 nt, Homo sapiens
  misc_RNA (1)...(19): siRNA sense strand
gaacgccaagcaccacaag

SEQ ID NO: 57099 - RNA, 19 nt, Homo sapiens
  misc_RNA (1)...(19): siRNA sense strand
gagcugccugccaaccuuu

SEQ ID NO: 57100 - RNA, 19 nt, Homo sapiens
  misc_RNA (1)...(19): siRNA sense strand
gcucagacaaggauugcau

SEQ ID NO: 57101 - RNA, 19 nt, Homo sapiens
  misc_RNA (1)...(19): siRNA sense strand
ccgaggacaaguugcauga

SEQ ID NO: 57102 - RNA, 19 nt, Homo sapiens
  misc_RNA (1)...(19): siRNA sense strand
ccugccaaccuuuccauuu

SEQ ID NO: 57103 - RNA, 19 nt, Homo sapiens
  misc_RNA (1)...(19): siRNA sense strand
gcgcaaagagcggguacug

SEQ ID NO: 57104 - RNA, 19 nt, Homo sapiens
  misc_RNA (1)...(19): siRNA sense strand
gaacgugccccugugcaaa

SEQ ID NO: 57105 - RNA, 19 nt, Homo sapiens
  misc_RNA (1)...(19): siRNA sense strand
aagauugucgcaccuccua

SEQ ID NO: 57106 - RNA, 19 nt, Homo sapiens
  misc_RNA (1)...(19): siRNA sense strand
gggaggcucagacaaggau

SEQ ID NO: 57107 - RNA, 19 nt, Homo sapiens
  misc_RNA (1)...(19): siRNA sense strand
aaaucuggacucacuccua

SEQ ID NO: 57108 - RNA, 19 nt, Homo sapiens
  misc_RNA (1)...(19): siRNA sense strand
gcaagagcaacuggcacaa

SEQ ID NO: 57109 - RNA, 19 nt, Homo sapiens
  misc_RNA (1)...(19): siRNA sense strand
ggacugaucuccucaaugu

SEQ ID NO: 57110 - RNA, 19 nt, Homo sapiens
  misc_RNA (1)...(19): siRNA sense strand
ggaaauggaugccacuucu

SEQ ID NO: 57111 - RNA, 19 nt, Homo sapiens
  misc_RNA (1)...(19): siRNA sense strand
gccaggagcugcacaagga

SEQ ID NO: 57112 - RNA, 19 nt, Homo sapiens
  misc_RNA (1)...(19): siRNA sense strand
gacuggaccucaggaguua

SEQ ID NO: 57113 - RNA, 19 nt, Homo sapiens
  misc_RNA (1)...(19): siRNA sense strand
ggacuggaccucaggaguu

SEQ ID NO: 57114 - RNA, 19 nt, Homo sapiens
  misc_RNA (1)...(19): siRNA sense strand
gaugugcccuuaugcaaag

SEQ ID NO: 57115 - RNA, 19 nt, Homo sapiens
  misc_RNA (1)...(19): siRNA sense strand
cauacaaggucagcaacua

SEQ ID NO: 57116 - RNA, 19 nt, Homo sapiens
  misc_RNA (1)...(19): siRNA sense strand
gaaggccucuggagucacu

SEQ ID NO: 57117 - RNA, 19 nt, Homo sapiens
  misc_RNA (1)...(19): siRNA sense strand
ggaugugcccuuaugcaaa

SEQ ID NO: 57118 - RNA, 19 nt, Homo sapiens
  misc_RNA (1)...(19): siRNA sense strand
ccucaggaguuaacaagug

SEQ ID NO: 57119 - RNA, 19 nt, Homo sapiens
  misc_RNA (1)...(19): siRNA sense strand
gugaaggccucuggaguca

SEQ ID NO: 57120 - RNA, 19 nt, Homo sapiens
  misc_RNA (1)...(19): siRNA sense strand
ugugaaugcuggugagaug

SEQ ID NO: 57121 - RNA, 19 nt, Homo sapiens
  misc_RNA (1)...(19): siRNA sense strand
ggauccagcaggugaauca

SEQ ID NO: 57122 - RNA, 19 nt, Homo sapiens
  misc_RNA (1)...(19): siRNA sense strand
ggacaagcugcaugaccaa

SEQ ID NO: 57123 - RNA, 19 nt, Homo sapiens
  misc_RNA (1)...(19): siRNA sense strand
auccagaugugguuugauu

SEQ ID NO: 57124 - RNA, 19 nt, Homo sapiens
  misc_RNA (1)...(19): siRNA sense strand
ggaccacugcggcaagaug

SEQ ID NO: 57125 - RNA, 19 nt, Homo sapiens
  misc_RNA (1)...(19): siRNA sense strand
ugcagucccuggaagaaga

SEQ ID NO: 57126 - RNA, 19 nt, Homo sapiens
  misc_RNA (1)...(19): siRNA sense strand
ccagaugugguuugauuca

SEQ ID NO: 57127 - RNA, 19 nt, Homo sapiens
  misc_RNA (1)...(19): siRNA sense strand
caagagcaacuggcacaga

SEQ ID NO: 57128 - RNA, 19 nt, Homo sapiens
  misc_RNA (1)...(19): siRNA sense strand
gaaauggaugccacuucug

SEQ ID NO: 57129 - RNA, 19 nt, Homo sapiens
  misc_RNA (1)...(19): siRNA sense strand
cuuccuggaugugcccuua

SEQ ID NO: 57130 - RNA, 19 nt, Homo sapiens
  misc_RNA (1)...(19): siRNA sense strand
gaaugcuggugagaugcuu

SEQ ID NO: 57131 - RNA, 19 nt, Homo sapiens
  misc_RNA (1)...(19): siRNA sense strand
ugaaucagacguggcgaaa

SEQ ID NO: 57132 - RNA, 19 nt, Homo sapiens
  misc_RNA (1)...(19): siRNA sense strand
caaugcagucccuggaaga

SEQ ID NO: 57133 - RNA, 19 nt, Homo sapiens
  misc_RNA (1)...(19): siRNA sense strand
ggaccucaggaguuaacaa

SEQ ID NO: 57134 - RNA, 19 nt, Homo sapiens
  misc_RNA (1)...(19): siRNA sense strand
gcucucugccgcaccuuug

SEQ ID NO: 57135 - RNA, 19 nt, Homo sapiens
  misc_RNA (1)...(19): siRNA sense strand
ccucccgccuguacaacuu

SEQ ID NO: 57136 - RNA, 19 nt, Homo sapiens
  misc_RNA (1)...(19): siRNA sense strand
gaccucaggaguuaacaag

SEQ ID NO: 57137 - RNA, 19 nt, Homo sapiens
  misc_RNA (1)...(19): siRNA sense strand
gcagucccuggaagaagaa

SEQ ID NO: 57138 - RNA, 19 nt, Homo sapiens
  misc_RNA (1)...(19): siRNA sense strand
gcaccuuugaguccuacuu

SEQ ID NO: 57139 - RNA, 19 nt, Homo sapiens
  misc_RNA (1)...(19): siRNA sense strand
gaagauggaucacgucuaa

SEQ ID NO: 57140 - RNA, 19 nt, Homo sapiens
  misc_RNA (1)...(19): siRNA sense strand
gagcagaaguuguuuauga

SEQ ID NO: 57141 - RNA, 19 nt, Homo sapiens
  misc_RNA (1)...(19): siRNA sense strand
guaaaggauccucuuauua

SEQ ID NO: 57142 - RNA, 19 nt, Homo sapiens
  misc_RNA (1)...(19): siRNA sense strand
aagauuggcuacuuuguua

SEQ ID NO: 57143 - RNA, 19 nt, Homo sapiens
  misc_RNA (1)...(19): siRNA sense strand
caacagcuauggauugguu

SEQ ID NO: 57144 - RNA, 19 nt, Homo sapiens
  misc_RNA (1)...(19): siRNA sense strand
gaucacgucuaaaccagua

SEQ ID NO: 57145 - RNA, 19 nt, Homo sapiens
  misc_RNA (1)...(19): siRNA sense strand
ggaauuguccagucaagua

SEQ ID NO: 57146 - RNA, 19 nt, Homo sapiens
  misc_RNA (1)...(19): siRNA sense strand
uaaccgaagugaagacuga

SEQ ID NO: 57147 - RNA, 19 nt, Homo sapiens
  misc_RNA (1)...(19): siRNA sense strand
gaaacucccucccuaaggu

SEQ ID NO: 57148 - RNA, 19 nt, Homo sapiens
  misc_RNA (1)...(19): siRNA sense strand
cuacugggcuacguauuua

SEQ ID NO: 57149 - RNA, 19 nt, Homo sapiens
  misc_RNA (1)...(19): siRNA sense strand
ggacagccgucauuacaag

SEQ ID NO: 57150 - RNA, 19 nt, Homo sapiens
  misc_RNA (1)...(19): siRNA sense strand
aaacauaccugccaugcau

SEQ ID NO: 57151 - RNA, 19 nt, Homo sapiens
  misc_RNA (1)...(19): siRNA sense strand
gagaauauguuguuaugac

SEQ ID NO: 57152 - RNA, 19 nt, Homo sapiens
  misc_RNA (1)...(19): siRNA sense strand
gcuauggauugguuuauug

SEQ ID NO: 57153 - RNA, 19 nt, Homo sapiens
  misc_RNA (1)...(19): siRNA sense strand
gaaguuaugcuuauacaag

SEQ ID NO: 57154 - RNA, 19 nt, Homo sapiens
  misc_RNA (1)...(19): siRNA sense strand
cuggaaggaugaaagguua

SEQ ID NO: 57155 - RNA, 19 nt, Homo sapiens
  misc_RNA (1)...(19): siRNA sense strand
aguaaaggauccucuuauu

SEQ ID NO: 57156 - RNA, 19 nt, Homo sapiens
  misc_RNA (1)...(19): siRNA sense strand
gcugcuauuuggaaucuuu

SEQ ID NO: 57157 - RNA, 19 nt, Homo sapiens
  misc_RNA (1)...(19): siRNA sense strand
aaacagagagccucagcua

SEQ ID NO: 57158 - RNA, 19 nt, Homo sapiens
  misc_RNA (1)...(19): siRNA sense strand
gaaaguaaaggauccucuu

SEQ ID NO: 57159 - RNA, 19 nt, Homo sapiens
  misc_RNA (1)...(19): siRNA sense strand
acagagagccucagcuaaa

SEQ ID NO: 57160 - RNA, 19 nt, Homo sapiens
  misc_RNA (1)...(19): siRNA sense strand
gaccgacugucaagaauag

SEQ ID NO: 57161 - RNA, 19 nt, Homo sapiens
  misc_RNA (1)...(19): siRNA sense strand
agagaaagauuggcuacuu

SEQ ID NO: 57162 - RNA, 19 nt, Homo sapiens
  misc_RNA (1)...(19): siRNA sense strand
cagaaguuguuuaugaaug

SEQ ID NO: 57163 - RNA, 19 nt, Homo sapiens
  misc_RNA (1)...(19): siRNA sense strand
gugcaaccauagaaccuaa

SEQ ID NO: 57164 - RNA, 19 nt, Homo sapiens
  misc_RNA (1)...(19): siRNA sense strand
uaacaacugugcucaccau

SEQ ID NO: 57165 - RNA, 19 nt, Homo sapiens
  misc_RNA (1)...(19): siRNA sense strand
gcccaugcuugcccacuaa

SEQ ID NO: 57166 - RNA, 19 nt, Homo sapiens
  misc_RNA (1)...(19): siRNA sense strand
agaacugucuuuggaguaa

SEQ ID NO: 57167 - RNA, 19 nt, Homo sapiens
  misc_RNA (1)...(19): siRNA sense strand
ccacucauuuccacuugaa

SEQ ID NO: 57168 - RNA, 19 nt, Homo sapiens
  misc_RNA (1)...(19): siRNA sense strand
gcaccuugcuguacaccau

SEQ ID NO: 57169 - RNA, 19 nt, Homo sapiens
  misc_RNA (1)...(19): siRNA sense strand
aaaguaaaggauccucuua

SEQ ID NO: 57170 - RNA, 19 nt, Homo sapiens
  misc_RNA (1)...(19): siRNA sense strand
gagcaucagugccagaaac

SEQ ID NO: 57171 - RNA, 19 nt, Homo sapiens
  misc_RNA (1)...(19): siRNA sense strand
caagagcagaaguuguuua

SEQ ID NO: 57172 - RNA, 19 nt, Homo sapiens
  misc_RNA (1)...(19): siRNA sense strand
ugacaguccuccgguuaaa

SEQ ID NO: 57173 - RNA, 19 nt, Homo sapiens
  misc_RNA (1)...(19): siRNA sense strand
gauugaguuugccacagua

SEQ ID NO: 57174 - RNA, 19 nt, Homo sapiens
  misc_RNA (1)...(19): siRNA sense strand
acaguagacucuggaauug

SEQ ID NO: 57175 - RNA, 19 nt, Homo sapiens
  misc_RNA (1)...(19): siRNA sense strand
caagaugaacuuaaagaca

SEQ ID NO: 57176 - RNA, 19 nt, Homo sapiens
  misc_RNA (1)...(19): siRNA sense strand
cuacguauuuaaacagaga

SEQ ID NO: 57177 - RNA, 19 nt, Homo sapiens
  misc_RNA (1)...(19): siRNA sense strand
uaccugccaugcauaauga

SEQ ID NO: 57178 - RNA, 19 nt, Homo sapiens
  misc_RNA (1)...(19): siRNA sense strand
gauggcaccuugcuguaca

SEQ ID NO: 57179 - RNA, 19 nt, Homo sapiens
  misc_RNA (1)...(19): siRNA sense strand
gaacuuaaagacaauacca

SEQ ID NO: 57180 - RNA, 19 nt, Homo sapiens
  misc_RNA (1)...(19): siRNA sense strand
caacugugcucaccaugac

SEQ ID NO: 57181 - RNA, 19 nt, Homo sapiens
  misc_RNA (1)...(19): siRNA sense strand
acaggagaauauguuguua

SEQ ID NO: 57182 - RNA, 19 nt, Homo sapiens
  misc_RNA (1)...(19): siRNA sense strand
gaccacucauuuccacuug

SEQ ID NO: 57183 - RNA, 19 nt, Homo sapiens
  misc_RNA (1)...(19): siRNA sense strand
acagacuccuagaugguua

SEQ ID NO: 57184 - RNA, 19 nt, Homo sapiens
  misc_RNA (1)...(19): siRNA sense strand
ccagaaacucccucccuaa

SEQ ID NO: 57185 - RNA, 19 nt, Homo sapiens
  misc_RNA (1)...(19): siRNA sense strand
aggagaauauguuguuaug

SEQ ID NO: 57186 - RNA, 19 nt, Homo sapiens
  misc_RNA (1)...(19): siRNA sense strand
acaguccuccgguuaaaua

SEQ ID NO: 57187 - RNA, 19 nt, Homo sapiens
  misc_RNA (1)...(19): siRNA sense strand
gaaaagccaaagaaaguaa

SEQ ID NO: 57188 - RNA, 19 nt, Homo sapiens
  misc_RNA (1)...(19): siRNA sense strand
ggacagacuccuagauggu

SEQ ID NO: 57189 - RNA, 19 nt, Homo sapiens
  misc_RNA (1)...(19): siRNA sense strand
gaaguuguuuaugaaugga

SEQ ID NO: 57190 - RNA, 19 nt, Homo sapiens
  misc_RNA (1)...(19): siRNA sense strand
ggaaggaugaaagguuaaa

SEQ ID NO: 57191 - RNA, 19 nt, Homo sapiens
  misc_RNA (1)...(19): siRNA sense strand
gcagaaguuguuuaugaau

SEQ ID NO: 57192 - RNA, 19 nt, Homo sapiens
  misc_RNA (1)...(19): siRNA sense strand
gaagugaagacugauaucu

SEQ ID NO: 57193 - RNA, 19 nt, Homo sapiens
  misc_RNA (1)...(19): siRNA sense strand
gcuauggacagccgucauu

SEQ ID NO: 57194 - RNA, 19 nt, Homo sapiens
  misc_RNA (1)...(19): siRNA sense strand
ccagucaaguacaggagaa

SEQ ID NO: 57195 - RNA, 19 nt, Homo sapiens
  misc_RNA (1)...(19): siRNA sense strand
aaaccaguaugaccuucuu

SEQ ID NO: 57196 - RNA, 19 nt, Homo sapiens
  misc_RNA (1)...(19): siRNA sense strand
uaugacaguccuccgguua

SEQ ID NO: 57197 - RNA, 19 nt, Homo sapiens
  misc_RNA (1)...(19): siRNA sense strand
gauuggcuacuuuguuauu

SEQ ID NO: 57198 - RNA, 19 nt, Homo sapiens
  misc_RNA (1)...(19): siRNA sense strand
ccuagaugguuaugacaau

SEQ ID NO: 57199 - RNA, 19 nt, Homo sapiens
  misc_RNA (1)...(19): siRNA sense strand
agaaguuguuuaugaaugg

SEQ ID NO: 57200 - RNA, 19 nt, Homo sapiens
  misc_RNA (1)...(19): siRNA sense strand
ccacuaaaauuuggaaguu

SEQ ID NO: 57201 - RNA, 19 nt, Homo sapiens
  misc_RNA (1)...(19): siRNA sense strand
ggauugggagagcguguaa

SEQ ID NO: 57202 - RNA, 19 nt, Homo sapiens
  misc_RNA (1)...(19): siRNA sense strand
cauuuccacuugaagagaa

SEQ ID NO: 57203 - RNA, 19 nt, Homo sapiens
  misc_RNA (1)...(19): siRNA sense strand
gcuggaaggaugaaagguu

SEQ ID NO: 57204 - RNA, 19 nt, Homo sapiens
  misc_RNA (1)...(19): siRNA sense strand
aacaguagacucuggaauu

SEQ ID NO: 57205 - RNA, 19 nt, Homo sapiens
  misc_RNA (1)...(19): siRNA sense strand
caagaaaaccuuuaacagu

SEQ ID NO: 57206 - RNA, 19 nt, Homo sapiens
  misc_RNA (1)...(19): siRNA sense strand
uuaaaggaccuaugacagu

SEQ ID NO: 57207 - RNA, 19 nt, Homo sapiens
  misc_RNA (1)...(19): siRNA sense strand
ugauugaguuugccacagu

SEQ ID NO: 57208 - RNA, 19 nt, Homo sapiens
  misc_RNA (1)...(19): siRNA sense strand
uuaaagacaauaccacugu

SEQ ID NO: 57209 - RNA, 19 nt, Homo sapiens
  misc_RNA (1)...(19): siRNA sense strand
agcagaaguuguuuaugaa

SEQ ID NO: 57210 - RNA, 19 nt, Homo sapiens
  misc_RNA (1)...(19): siRNA sense strand
ucuacugggcuacguauuu

SEQ ID NO: 57211 - RNA, 19 nt, Homo sapiens
  misc_RNA (1)...(19): siRNA sense strand
ggaaguuaugcuuauacaa

SEQ ID NO: 57212 - RNA, 19 nt, Homo sapiens
  misc_RNA (1)...(19): siRNA sense strand
ggagaauauguuguuauga

SEQ ID NO: 57213 - RNA, 19 nt, Homo sapiens
  misc_RNA (1)...(19): siRNA sense strand
gguuguagcagaagaugga

SEQ ID NO: 57214 - RNA, 19 nt, Homo sapiens
  misc_RNA (1)...(19): siRNA sense strand
gugcuaugccuuuguguuc

SEQ ID NO: 57215 - RNA, 19 nt, Homo sapiens
  misc_RNA (1)...(19): siRNA sense strand
ccacuugaagagaaagauu

SEQ ID NO: 57216 - RNA, 19 nt, Homo sapiens
  misc_RNA (1)...(19): siRNA sense strand
uaaccuaauggcaaguaaa

SEQ ID NO: 57217 - RNA, 19 nt, Homo sapiens
  misc_RNA (1)...(19): siRNA sense strand
ggcuacguauuuaaacaga

SEQ ID NO: 57218 - RNA, 19 nt, Homo sapiens
  misc_RNA (1)...(19): siRNA sense strand
ggucaagcccgaaacaaaa

SEQ ID NO: 57219 - RNA, 19 nt, Homo sapiens
  misc_RNA (1)...(19): siRNA sense strand
guaugaccuucuuggacaa

SEQ ID NO: 57220 - RNA, 19 nt, Homo sapiens
  misc_RNA (1)...(19): siRNA sense strand
gacagacuccuagaugguu

SEQ ID NO: 57221 - RNA, 19 nt, Homo sapiens
  misc_RNA (1)...(19): siRNA sense strand
gccuggauccuccuucuga

SEQ ID NO: 57222 - RNA, 19 nt, Homo sapiens
  misc_RNA (1)...(19): siRNA sense strand
caaguacaggagaauaugu

SEQ ID NO: 57223 - RNA, 19 nt, Homo sapiens
  misc_RNA (1)...(19): siRNA sense strand
uugccacaguaaacuauuu

SEQ ID NO: 57224 - RNA, 19 nt, Homo sapiens
  misc_RNA (1)...(19): siRNA sense strand
gagagcguguaaccgaagu

SEQ ID NO: 57225 - RNA, 19 nt, Homo sapiens
  misc_RNA (1)...(19): siRNA sense strand
uacaggagaauauguuguu

SEQ ID NO: 57226 - RNA, 19 nt, Homo sapiens
  misc_RNA (1)...(19): siRNA sense strand
uggaaguuaugcuuauaca

SEQ ID NO: 57227 - RNA, 19 nt, Homo sapiens
  misc_RNA (1)...(19): siRNA sense strand
cagaaaagccaaagaaagu

SEQ ID NO: 57228 - RNA, 19 nt, Homo sapiens
  misc_RNA (1)...(19): siRNA sense strand
gacagugagagcugaaugu

SEQ ID NO: 57229 - RNA, 19 nt, Homo sapiens
  misc_RNA (1)...(19): siRNA sense strand
cagagagccucagcuaaaa

SEQ ID NO: 57230 - RNA, 19 nt, Homo sapiens
  misc_RNA (1)...(19): siRNA sense strand
cagaaacucccucccuaag

SEQ ID NO: 57231 - RNA, 19 nt, Homo sapiens
  misc_RNA (1)...(19): siRNA sense strand
guacaggagaauauguugu

SEQ ID NO: 57232 - RNA, 19 nt, Homo sapiens
  misc_RNA (1)...(19): siRNA sense strand
gucaaguacaggagaauau

SEQ ID NO: 57233 - RNA, 19 nt, Homo sapiens
  misc_RNA (1)...(19): siRNA sense strand
gauaucuucgucaccaguu

SEQ ID NO: 57234 - RNA, 19 nt, Homo sapiens
  misc_RNA (1)...(19): siRNA sense strand
aagagcagaaguuguuuau

SEQ ID NO: 57235 - RNA, 19 nt, Homo sapiens
  misc_RNA (1)...(19): siRNA sense strand
aaagaggucaagcccgaaa

SEQ ID NO: 57236 - RNA, 19 nt, Homo sapiens
  misc_RNA (1)...(19): siRNA sense strand
ucucacaagucuccuucug

SEQ ID NO: 57237 - RNA, 19 nt, Homo sapiens
  misc_RNA (1)...(19): siRNA sense strand
gaauuguccagucaaguac

SEQ ID NO: 57238 - RNA, 19 nt, Homo sapiens
  misc_RNA (1)...(19): siRNA sense strand
aguagacucuggaauuguc

SEQ ID NO: 57239 - RNA, 19 nt, Homo sapiens
  misc_RNA (1)...(19): siRNA sense strand
ccaaauaaguugcuucgaa

SEQ ID NO: 57240 - RNA, 19 nt, Homo sapiens
  misc_RNA (1)...(19): siRNA sense strand
ggaagaguguaguaaauga

SEQ ID NO: 57241 - RNA, 19 nt, Homo sapiens
  misc_RNA (1)...(19): siRNA sense strand
uuacugggcuacauauuua

SEQ ID NO: 57242 - RNA, 19 nt, Homo sapiens
  misc_RNA (1)...(19): siRNA sense strand
gaaaggagacaauuaaauc

SEQ ID NO: 57243 - RNA, 19 nt, Homo sapiens
  misc_RNA (1)...(19): siRNA sense strand
caaauaaguugcuucgaau

SEQ ID NO: 57244 - RNA, 19 nt, Homo sapiens
  misc_RNA (1)...(19): siRNA sense strand
uaacaacuguccuaacaau

SEQ ID NO: 57245 - RNA, 19 nt, Homo sapiens
  misc_RNA (1)...(19): siRNA sense strand
cuucagaggucacuuauau

SEQ ID NO: 57246 - RNA, 19 nt, Homo sapiens
  misc_RNA (1)...(19): siRNA sense strand
gcucuagguuaaaucaaua

SEQ ID NO: 57247 - RNA, 19 nt, Homo sapiens
  misc_RNA (1)...(19): siRNA sense strand
caaguuucauucuggcuua

SEQ ID NO: 57248 - RNA, 19 nt, Homo sapiens
  misc_RNA (1)...(19): siRNA sense strand
caaaguggcuuaugcaacu

SEQ ID NO: 57249 - RNA, 19 nt, Homo sapiens
  misc_RNA (1)...(19): siRNA sense strand
gccauggacugguuuauug

SEQ ID NO: 57250 - RNA, 19 nt, Homo sapiens
  misc_RNA (1)...(19): siRNA sense strand
ccugauggcucuagguuaa

SEQ ID NO: 57251 - RNA, 19 nt, Homo sapiens
  misc_RNA (1)...(19): siRNA sense strand
ccaagaagaugaggcuaaa

SEQ ID NO: 57252 - RNA, 19 nt, Homo sapiens
  misc_RNA (1)...(19): siRNA sense strand
ggacuuacaaugcaucuga

SEQ ID NO: 57253 - RNA, 19 nt, Homo sapiens
  misc_RNA (1)...(19): siRNA sense strand
caacuucagaggucacuua

SEQ ID NO: 57254 - RNA, 19 nt, Homo sapiens
  misc_RNA (1)...(19): siRNA sense strand
ggaaaggagacaauuaaau

SEQ ID NO: 57255 - RNA, 19 nt, Homo sapiens
  misc_RNA (1)...(19): siRNA sense strand
caacugccauggacugguu

SEQ ID NO: 57256 - RNA, 19 nt, Homo sapiens
  misc_RNA (1)...(19): siRNA sense strand
ucagaggucacuuauauuu

SEQ ID NO: 57257 - RNA, 19 nt, Homo sapiens
  misc_RNA (1)...(19): siRNA sense strand
auggaaagaugaacguuua

SEQ ID NO: 57258 - RNA, 19 nt, Homo sapiens
  misc_RNA (1)...(19): siRNA sense strand
gucauucucucccaaguuu

SEQ ID NO: 57259 - RNA, 19 nt, Homo sapiens
  misc_RNA (1)...(19): siRNA sense strand
gcucauucauguccucuga

SEQ ID NO: 57260 - RNA, 19 nt, Homo sapiens
  misc_RNA (1)...(19): siRNA sense strand
gaauauccuucgacuaaac

SEQ ID NO: 57261 - RNA, 19 nt, Homo sapiens
  misc_RNA (1)...(19): siRNA sense strand
caaugcacuuggaggauuu

SEQ ID NO: 57262 - RNA, 19 nt, Homo sapiens
  misc_RNA (1)...(19): siRNA sense strand
ggaaagaugaacguuuaaa

SEQ ID NO: 57263 - RNA, 19 nt, Homo sapiens
  misc_RNA (1)...(19): siRNA sense strand
ggacucugcuguauaccau

SEQ ID NO: 57264 - RNA, 19 nt, Homo sapiens
  misc_RNA (1)...(19): siRNA sense strand
ugacaaugccaaauaaguu

SEQ ID NO: 57265 - RNA, 19 nt, Homo sapiens
  misc_RNA (1)...(19): siRNA sense strand
gaaaaggcuuccguuauga

SEQ ID NO: 57266 - RNA, 19 nt, Homo sapiens
  misc_RNA (1)...(19): siRNA sense strand
ccaugaggcuuacaguuca

SEQ ID NO: 57267 - RNA, 19 nt, Homo sapiens
  misc_RNA (1)...(19): siRNA sense strand
uguguucucugcccuaauu

SEQ ID NO: 57268 - RNA, 19 nt, Homo sapiens
  misc_RNA (1)...(19): siRNA sense strand
aaaccuaucugccuugcau

SEQ ID NO: 57269 - RNA, 19 nt, Homo sapiens
  misc_RNA (1)...(19): siRNA sense strand
cagaauguccagaauaguu

SEQ ID NO: 57270 - RNA, 19 nt, Homo sapiens
  misc_RNA (1)...(19): siRNA sense strand
ggacugguuuauugcuguu

SEQ ID NO: 57271 - RNA, 19 nt, Homo sapiens
  misc_RNA (1)...(19): siRNA sense strand
ggaauucucuccccaaagu

SEQ ID NO: 57272 - RNA, 19 nt, Homo sapiens
  misc_RNA (1)...(19): siRNA sense strand
aguaacaacuguccuaaca

SEQ ID NO: 57273 - RNA, 19 nt, Homo sapiens
  misc_RNA (1)...(19): siRNA sense strand
gagaauucuugacagacuu

SEQ ID NO: 57274 - RNA, 19 nt, Homo sapiens
  misc_RNA (1)...(19): siRNA sense strand
caacaucgaguuccugcuu

SEQ ID NO: 57275 - RNA, 19 nt, Homo sapiens
  misc_RNA (1)...(19): siRNA sense strand
augaauauccuucgacuaa

SEQ ID NO: 57276 - RNA, 19 nt, Homo sapiens
  misc_RNA (1)...(19): siRNA sense strand
uggcuaacauccaagaaga

SEQ ID NO: 57277 - RNA, 19 nt, Homo sapiens
  misc_RNA (1)...(19): siRNA sense strand
acaacuguccuaacaauga

SEQ ID NO: 57278 - RNA, 19 nt, Homo sapiens
  misc_RNA (1)...(19): siRNA sense strand
acaauuaaauccaguacag

SEQ ID NO: 57279 - RNA, 19 nt, Homo sapiens
  misc_RNA (1)...(19): siRNA sense strand
gaugggacucugcuguaua

SEQ ID NO: 57280 - RNA, 19 nt, Homo sapiens
  misc_RNA (1)...(19): siRNA sense strand
gacaaugccaaauaaguug

SEQ ID NO: 57281 - RNA, 19 nt, Homo sapiens
  misc_RNA (1)...(19): siRNA sense strand
cagauacagauauggaaua

SEQ ID NO: 57282 - RNA, 19 nt, Homo sapiens
  misc_RNA (1)...(19): siRNA sense strand
ccaguucucuccaccaucu

SEQ ID NO: 57283 - RNA, 19 nt, Homo sapiens
  misc_RNA (1)...(19): siRNA sense strand
ugauacagaacaacgcuua

SEQ ID NO: 57284 - RNA, 19 nt, Homo sapiens
  misc_RNA (1)...(19): siRNA sense strand
ugaauauccuucgacuaaa

SEQ ID NO: 57285 - RNA, 19 nt, Homo sapiens
  misc_RNA (1)...(19): siRNA sense strand
ggcuacauauuuaaacaga

SEQ ID NO: 57286 - RNA, 19 nt, Homo sapiens
  misc_RNA (1)...(19): siRNA sense strand
agaaaaggcuuccguuaug

SEQ ID NO: 57287 - RNA, 19 nt, Homo sapiens
  misc_RNA (1)...(19): siRNA sense strand
agaggucacuuauauuugg

SEQ ID NO: 57288 - RNA, 19 nt, Homo sapiens
  misc_RNA (1)...(19): siRNA sense strand
cgccagaacccaacaagaa

SEQ ID NO: 57289 - RNA, 19 nt, Homo sapiens
  misc_RNA (1)...(19): siRNA sense strand
ggaguaacaacuguccuaa

SEQ ID NO: 57290 - RNA, 19 nt, Homo sapiens
  misc_RNA (1)...(19): siRNA sense strand
acaucuacgugaccaguuu

SEQ ID NO: 57291 - RNA, 19 nt, Homo sapiens
  misc_RNA (1)...(19): siRNA sense strand
uaucugccuugcaucauga

SEQ ID NO: 57292 - RNA, 19 nt, Homo sapiens
  misc_RNA (1)...(19): siRNA sense strand
ucggaaaggagacaauuaa

SEQ ID NO: 57293 - RNA, 19 nt, Homo sapiens
  misc_RNA (1)...(19): siRNA sense strand
cuaacaaugacaacucuaa

SEQ ID NO: 57294 - RNA, 19 nt, Homo sapiens
  misc_RNA (1)...(19): siRNA sense strand
agaacuguguuuggaguaa

SEQ ID NO: 57295 - RNA, 19 nt, Homo sapiens
  misc_RNA (1)...(19): siRNA sense strand
gggaagaguguaguaaaug

SEQ ID NO: 57296 - RNA, 19 nt, Homo sapiens
  misc_RNA (1)...(19): siRNA sense strand
ugggaagaguguaguaaau

SEQ ID NO: 57297 - RNA, 19 nt, Homo sapiens
  misc_RNA (1)...(19): siRNA sense strand
cgagaauucuugacagacu

SEQ ID NO: 57298 - RNA, 19 nt, Homo sapiens
  misc_RNA (1)...(19): siRNA sense strand
gauguuuucuuucgacaaa

SEQ ID NO: 57299 - RNA, 19 nt, Homo sapiens
  misc_RNA (1)...(19): siRNA sense strand
gaugggaagaguguaguaa

SEQ ID NO: 57300 - RNA, 19 nt, Homo sapiens
  misc_RNA (1)...(19): siRNA sense strand
gccaaucaaucggaaagga

SEQ ID NO: 57301 - RNA, 19 nt, Homo sapiens
  misc_RNA (1)...(19): siRNA sense strand
uacgagaauucuugacaga

SEQ ID NO: 57302 - RNA, 19 nt, Homo sapiens
  misc_RNA (1)...(19): siRNA sense strand
gguuuauugcuguuuguua

SEQ ID NO: 57303 - RNA, 19 nt, Homo sapiens
  misc_RNA (1)...(19): siRNA sense strand
uaaauccaguacaggugaa

SEQ ID NO: 57304 - RNA, 19 nt, Homo sapiens
  misc_RNA (1)...(19): siRNA sense strand
ggcucuagguuaaaucaau

SEQ ID NO: 57305 - RNA, 19 nt, Homo sapiens
  misc_RNA (1)...(19): siRNA sense strand
agaauguccagaauaguuu

SEQ ID NO: 57306 - RNA, 19 nt, Homo sapiens
  misc_RNA (1)...(19): siRNA sense strand
aaaggcuuccguuaugaua

SEQ ID NO: 57307 - RNA, 19 nt, Homo sapiens
  misc_RNA (1)...(19): siRNA sense strand
ggugcuggcuaacauccaa

SEQ ID NO: 57308 - RNA, 19 nt, Homo sapiens
  misc_RNA (1)...(19): siRNA sense strand
ucugaaauuuggcagcuau

SEQ ID NO: 57309 - RNA, 19 nt, Homo sapiens
  misc_RNA (1)...(19): siRNA sense strand
caucagugcucggaauucu

SEQ ID NO: 57310 - RNA, 19 nt, Homo sapiens
  misc_RNA (1)...(19): siRNA sense strand
ugucucagauacagauaug

SEQ ID NO: 57311 - RNA, 19 nt, Homo sapiens
  misc_RNA (1)...(19): siRNA sense strand
gaaauuuggcagcuaugca

SEQ ID NO: 57312 - RNA, 19 nt, Homo sapiens
  misc_RNA (1)...(19): siRNA sense strand
acaauuuaauggcuagcaa

SEQ ID NO: 57313 - RNA, 19 nt, Homo sapiens
  misc_RNA (1)...(19): siRNA sense strand
gagacaauuaaauccagua

SEQ ID NO: 57314 - RNA, 19 nt, Homo sapiens
  misc_RNA (1)...(19): siRNA sense strand
gaggucacuuauauuugga

SEQ ID NO: 57315 - RNA, 19 nt, Homo sapiens
  misc_RNA (1)...(19): siRNA sense strand
auaaguugcuucgaauuca

SEQ ID NO: 57316 - RNA, 19 nt, Homo sapiens
  misc_RNA (1)...(19): siRNA sense strand
ggaugggaagaguguagua

SEQ ID NO: 57317 - RNA, 19 nt, Homo sapiens
  misc_RNA (1)...(19): siRNA sense strand
ugcaagaacuguguuugga

SEQ ID NO: 57318 - RNA, 19 nt, Homo sapiens
  misc_RNA (1)...(19): siRNA sense strand
uuacaaugcaucugauuca

SEQ ID NO: 57319 - RNA, 19 nt, Homo sapiens
  misc_RNA (1)...(19): siRNA sense strand
uaaagguccuaugaauauc

SEQ ID NO: 57320 - RNA, 19 nt, Homo sapiens
  misc_RNA (1)...(19): siRNA sense strand
uggcagcuaugcauauaca

SEQ ID NO: 57321 - RNA, 19 nt, Homo sapiens
  misc_RNA (1)...(19): siRNA sense strand
caagcugaaugcccaaugc

SEQ ID NO: 57322 - RNA, 19 nt, Homo sapiens
  misc_RNA (1)...(19): siRNA sense strand
cauguccucugaaauuugg

SEQ ID NO: 57323 - RNA, 19 nt, Homo sapiens
  misc_RNA (1)...(19): siRNA sense strand
caacuguccuaacaaugac

SEQ ID NO: 57324 - RNA, 19 nt, Homo sapiens
  misc_RNA (1)...(19): siRNA sense strand
gaacuguguuuggaguaac

SEQ ID NO: 57325 - RNA, 19 nt, Homo sapiens
  misc_RNA (1)...(19): siRNA sense strand
ugaugggacucugcuguau

SEQ ID NO: 57326 - RNA, 19 nt, Homo sapiens
  misc_RNA (1)...(19): siRNA sense strand
cagcucauuuccaccugaa

SEQ ID NO: 57327 - RNA, 19 nt, Homo sapiens
  misc_RNA (1)...(19): siRNA sense strand
cuguauaccaugaggcuua

SEQ ID NO: 57328 - RNA, 19 nt, Homo sapiens
  misc_RNA (1)...(19): siRNA sense strand
caauuuaauggcuagcaaa

SEQ ID NO: 57329 - RNA, 19 nt, Homo sapiens
  misc_RNA (1)...(19): siRNA sense strand
guaacaacuguccuaacaa

SEQ ID NO: 57330 - RNA, 19 nt, Homo sapiens
  misc_RNA (1)...(19): siRNA sense strand
cggaaaggagacaauuaaa

SEQ ID NO: 57331 - RNA, 19 nt, Homo sapiens
  misc_RNA (1)...(19): siRNA sense strand
uuuggcagcuaugcauaua

SEQ ID NO: 57332 - RNA, 19 nt, Homo sapiens
  misc_RNA (1)...(19): siRNA sense strand
gguuggugcuggcuaacau

SEQ ID NO: 57333 - RNA, 19 nt, Homo sapiens
  misc_RNA (1)...(19): siRNA sense strand
cuaucugccuugcaucaug

SEQ ID NO: 57334 - RNA, 19 nt, Homo sapiens
  misc_RNA (1)...(19): siRNA sense strand
uuuacugggcuacauauuu

SEQ ID NO: 57335 - RNA, 19 nt, Homo sapiens
  misc_RNA (1)...(19): siRNA sense strand
aaagaaaaggcuuccguua

SEQ ID NO: 57336 - RNA, 19 nt, Homo sapiens
  misc_RNA (1)...(19): siRNA sense strand
cagaggucacuuauauuug

SEQ ID NO: 57337 - RNA, 19 nt, Homo sapiens
  misc_RNA (1)...(19): siRNA sense strand
uagcaaaauugacagaaug

SEQ ID NO: 57338 - RNA, 19 nt, Homo sapiens
  misc_RNA (1)...(19): siRNA sense strand
gugaauauacuguaaugac

SEQ ID NO: 57339 - RNA, 19 nt, Homo sapiens
  misc_RNA (1)...(19): siRNA sense strand
guucauagcugucugcuuu

SEQ ID NO: 57340 - RNA, 19 nt, Homo sapiens
  misc_RNA (1)...(19): siRNA sense strand
agaaaucugucucacauaa

SEQ ID NO: 57341 - RNA, 19 nt, Homo sapiens
  misc_RNA (1)...(19): siRNA sense strand
ggauaaagaccacaguuaa

SEQ ID NO: 57342 - RNA, 19 nt, Homo sapiens
  misc_RNA (1)...(19): siRNA sense strand
gaaauggaauacacaaugg

SEQ ID NO: 57343 - RNA, 19 nt, Homo sapiens
  misc_RNA (1)...(19): siRNA sense strand
gagaaauugugcacagaaa

SEQ ID NO: 57344 - RNA, 19 nt, Homo sapiens
  misc_RNA (1)...(19): siRNA sense strand
gaucaagacugcagaggau

SEQ ID NO: 57345 - RNA, 19 nt, Homo sapiens
  misc_RNA (1)...(19): siRNA sense strand
aaaugcagcugaaaccaua

SEQ ID NO: 57346 - RNA, 19 nt, Homo sapiens
  misc_RNA (1)...(19): siRNA sense strand
gacggaagauggguuauuu

SEQ ID NO: 57347 - RNA, 19 nt, Homo sapiens
  misc_RNA (1)...(19): siRNA sense strand
aagcaaaucuuccacaguu

SEQ ID NO: 57348 - RNA, 19 nt, Homo sapiens
  misc_RNA (1)...(19): siRNA sense strand
ggagaaaucagaaagucua

SEQ ID NO: 57349 - RNA, 19 nt, Homo sapiens
  misc_RNA (1)...(19): siRNA sense strand
gaagauggguuauuuuaug

SEQ ID NO: 57350 - RNA, 19 nt, Homo sapiens
  misc_RNA (1)...(19): siRNA sense strand
gaccacaguuaauaccaua

SEQ ID NO: 57351 - RNA, 19 nt, Homo sapiens
  misc_RNA (1)...(19): siRNA sense strand
gaacugaggugggaaacca

SEQ ID NO: 57352 - RNA, 19 nt, Homo sapiens
  misc_RNA (1)...(19): siRNA sense strand
ggucaugcaugcccuuuga

SEQ ID NO: 57353 - RNA, 19 nt, Homo sapiens
  misc_RNA (1)...(19): siRNA sense strand
gaaaucagaaagucuaaug

SEQ ID NO: 57354 - RNA, 19 nt, Homo sapiens
  misc_RNA (1)...(19): siRNA sense strand
gggaaaccauucaagcaaa

SEQ ID NO: 57355 - RNA, 19 nt, Homo sapiens
  misc_RNA (1)...(19): siRNA sense strand
acaguuugcucgaugguua

SEQ ID NO: 57356 - RNA, 19 nt, Homo sapiens
  misc_RNA (1)...(19): siRNA sense strand
aaagaaaucugucucacau

SEQ ID NO: 57357 - RNA, 19 nt, Homo sapiens
  misc_RNA (1)...(19): siRNA sense strand
uauauuccgugcauuauga

SEQ ID NO: 57358 - RNA, 19 nt, Homo sapiens
  misc_RNA (1)...(19): siRNA sense strand
ggaaaccauucaagcaaau

SEQ ID NO: 57359 - RNA, 19 nt, Homo sapiens
  misc_RNA (1)...(19): siRNA sense strand
gaaagaaaucugucucaca

SEQ ID NO: 57360 - RNA, 19 nt, Homo sapiens
  misc_RNA (1)...(19): siRNA sense strand
ugacagugauucuuucuca

SEQ ID NO: 57361 - RNA, 19 nt, Homo sapiens
  misc_RNA (1)...(19): siRNA sense strand
ggaguuaugccuauccaaa

SEQ ID NO: 57362 - RNA, 19 nt, Homo sapiens
  misc_RNA (1)...(19): siRNA sense strand
gacaaaagguccugagaaa

SEQ ID NO: 57363 - RNA, 19 nt, Homo sapiens
  misc_RNA (1)...(19): siRNA sense strand
ugagaaaucaguugaaguu

SEQ ID NO: 57364 - RNA, 19 nt, Homo sapiens
  misc_RNA (1)...(19): siRNA sense strand
caaaccguaucaagugaaa

SEQ ID NO: 57365 - RNA, 19 nt, Homo sapiens
  misc_RNA (1)...(19): siRNA sense strand
gauacuuucuucaggaaug

SEQ ID NO: 57366 - RNA, 19 nt, Homo sapiens
  misc_RNA (1)...(19): siRNA sense strand
aaccauaucugcagcaaga

SEQ ID NO: 57367 - RNA, 19 nt, Homo sapiens
  misc_RNA (1)...(19): siRNA sense strand
gugaaaccaucaaaucaau

SEQ ID NO: 57368 - RNA, 19 nt, Homo sapiens
  misc_RNA (1)...(19): siRNA sense strand
gauaaagaccacaguuaau

SEQ ID NO: 57369 - RNA, 19 nt, Homo sapiens
  misc_RNA (1)...(19): siRNA sense strand
gugauucuuucucaaguuu

SEQ ID NO: 57370 - RNA, 19 nt, Homo sapiens
  misc_RNA (1)...(19): siRNA sense strand
uaugacagcuccaaauaag

SEQ ID NO: 57371 - RNA, 19 nt, Homo sapiens
  misc_RNA (1)...(19): siRNA sense strand
cagcuuaguucaauaugau

SEQ ID NO: 57372 - RNA, 19 nt, Homo sapiens
  misc_RNA (1)...(19): siRNA sense strand
ucgaaaggcuucaguugga

SEQ ID NO: 57373 - RNA, 19 nt, Homo sapiens
  misc_RNA (1)...(19): siRNA sense strand
gggcaaaccguaucaagug

SEQ ID NO: 57374 - RNA, 19 nt, Homo sapiens
  misc_RNA (1)...(19): siRNA sense strand
gaaaccauaucugcagcaa

SEQ ID NO: 57375 - RNA, 19 nt, Homo sapiens
  misc_RNA (1)...(19): siRNA sense strand
ucaccaauauucaaaugga

SEQ ID NO: 57376 - RNA, 19 nt, Homo sapiens
  misc_RNA (1)...(19): siRNA sense strand
caagugaaaccaucaaauc

SEQ ID NO: 57377 - RNA, 19 nt, Homo sapiens
  misc_RNA (1)...(19): siRNA sense strand
uaacaacuguccucaccau

SEQ ID NO: 57378 - RNA, 19 nt, Homo sapiens
  misc_RNA (1)...(19): siRNA sense strand
cguauucucuuuccaguca

SEQ ID NO: 57379 - RNA, 19 nt, Homo sapiens
  misc_RNA (1)...(19): siRNA sense strand
acaauaugaugguaacgaa

SEQ ID NO: 57380 - RNA, 19 nt, Homo sapiens
  misc_RNA (1)...(19): siRNA sense strand
ggcaaaccguaucaaguga

SEQ ID NO: 57381 - RNA, 19 nt, Homo sapiens
  misc_RNA (1)...(19): siRNA sense strand
uaaggacacuauggagaaa

SEQ ID NO: 57382 - RNA, 19 nt, Homo sapiens
  misc_RNA (1)...(19): siRNA sense strand
gcacaccucggucuuacuu

SEQ ID NO: 57383 - RNA, 19 nt, Homo sapiens
  misc_RNA (1)...(19): siRNA sense strand
ggagaaauugugcacagaa

SEQ ID NO: 57384 - RNA, 19 nt, Homo sapiens
  misc_RNA (1)...(19): siRNA sense strand
cuucaggaauggaaagaaa

SEQ ID NO: 57385 - RNA, 19 nt, Homo sapiens
  misc_RNA (1)...(19): siRNA sense strand
ccacaguuguucaagaauc

SEQ ID NO: 57386 - RNA, 19 nt, Homo sapiens
  misc_RNA (1)...(19): siRNA sense strand
gccauggacugguucauag

SEQ ID NO: 57387 - RNA, 19 nt, Homo sapiens
  misc_RNA (1)...(19): siRNA sense strand
aauaugacagcuccaaaua

SEQ ID NO: 57388 - RNA, 19 nt, Homo sapiens
  misc_RNA (1)...(19): siRNA sense strand
ugaaauggaauacacaaug

SEQ ID NO: 57389 - RNA, 19 nt, Homo sapiens
  misc_RNA (1)...(19): siRNA sense strand
ggaauggaaagaaaucugu

SEQ ID NO: 57390 - RNA, 19 nt, Homo sapiens
  misc_RNA (1)...(19): siRNA sense strand
caauuacgggugaauauau

SEQ ID NO: 57391 - RNA, 19 nt, Homo sapiens
  misc_RNA (1)...(19): siRNA sense strand
ccagcuuaguucaauauga

SEQ ID NO: 57392 - RNA, 19 nt, Homo sapiens
  misc_RNA (1)...(19): siRNA sense strand
ggaccuguuucugauguug

SEQ ID NO: 57393 - RNA, 19 nt, Homo sapiens
  misc_RNA (1)...(19): siRNA sense strand
uugcugcugucaacuauuu

SEQ ID NO: 57394 - RNA, 19 nt, Homo sapiens
  misc_RNA (1)...(19): siRNA sense strand
ccaugagauugguggauuu

SEQ ID NO: 57395 - RNA, 19 nt, Homo sapiens
  misc_RNA (1)...(19): siRNA sense strand
gcagacauggauugacaaa

SEQ ID NO: 57396 - RNA, 19 nt, Homo sapiens
  misc_RNA (1)...(19): siRNA sense strand
gggcauuuaacaugguuua

SEQ ID NO: 57397 - RNA, 19 nt, Homo sapiens
  misc_RNA (1)...(19): siRNA sense strand
ucacguguuuggaucaaga

SEQ ID NO: 57398 - RNA, 19 nt, Homo sapiens
  misc_RNA (1)...(19): siRNA sense strand
gcaaaucuuccacaguugu

SEQ ID NO: 57399 - RNA, 19 nt, Homo sapiens
  misc_RNA (1)...(19): siRNA sense strand
uuacagaagugaaaacuga

SEQ ID NO: 57400 - RNA, 19 nt, Homo sapiens
  misc_RNA (1)...(19): siRNA sense strand
gagaaaucagaaagucuaa

SEQ ID NO: 57401 - RNA, 19 nt, Homo sapiens
  misc_RNA (1)...(19): siRNA sense strand
gggugaauauauuguuaug

SEQ ID NO: 57402 - RNA, 19 nt, Homo sapiens
  misc_RNA (1)...(19): siRNA sense strand
ucaauuacgggugaauaua

SEQ ID NO: 57403 - RNA, 19 nt, Homo sapiens
  misc_RNA (1)...(19): siRNA sense strand
gaaaucugucucacauaau

SEQ ID NO: 57404 - RNA, 19 nt, Homo sapiens
  misc_RNA (1)...(19): siRNA sense strand
ucaguuggaucugcuucua

SEQ ID NO: 57405 - RNA, 19 nt, Homo sapiens
  misc_RNA (1)...(19): siRNA sense strand
ggauauaugccucgaaagg

SEQ ID NO: 57406 - RNA, 19 nt, Homo sapiens
  misc_RNA (1)...(19): siRNA sense strand
ccaauuugaacaugagaaa

SEQ ID NO: 57407 - RNA, 19 nt, Homo sapiens
  misc_RNA (1)...(19): siRNA sense strand
cuggauauaugccucgaaa

SEQ ID NO: 57408 - RNA, 19 nt, Homo sapiens
  misc_RNA (1)...(19): siRNA sense strand
acgggugaauauauuguua

SEQ ID NO: 57409 - RNA, 19 nt, Homo sapiens
  misc_RNA (1)...(19): siRNA sense strand
cuaaggacacuauggagaa

SEQ ID NO: 57410 - RNA, 19 nt, Homo sapiens
  misc_RNA (1)...(19): siRNA sense strand
cccaaaguguccuaugcua

SEQ ID NO: 57411 - RNA, 19 nt, Homo sapiens
  misc_RNA (1)...(19): siRNA sense strand
caguugaaguuccgaagga

SEQ ID NO: 57412 - RNA, 19 nt, Homo sapiens
  misc_RNA (1)...(19): siRNA sense strand
gauucuuucucaaguuuca

SEQ ID NO: 57413 - RNA, 19 nt, Homo sapiens
  misc_RNA (1)...(19): siRNA sense strand
gcaaaccguaucaagugaa

SEQ ID NO: 57414 - RNA, 19 nt, Homo sapiens
  misc_RNA (1)...(19): siRNA sense strand
ugucaacuauuucaccaau

SEQ ID NO: 57415 - RNA, 19 nt, Homo sapiens
  misc_RNA (1)...(19): siRNA sense strand
ucagacggaagauggguua

SEQ ID NO: 57416 - RNA, 19 nt, Homo sapiens
  misc_RNA (1)...(19): siRNA sense strand
ucaagacugcagaggauaa

SEQ ID NO: 57417 - RNA, 19 nt, Homo sapiens
  misc_RNA (1)...(19): siRNA sense strand
aggauaaagaccacaguua

SEQ ID NO: 57418 - RNA, 19 nt, Homo sapiens
  misc_RNA (1)...(19): siRNA sense strand
gaggauaaagaccacaguu

SEQ ID NO: 57419 - RNA, 19 nt, Homo sapiens
  misc_RNA (1)...(19): siRNA sense strand
caaaagguccugagaaauc

SEQ ID NO: 57420 - RNA, 19 nt, Homo sapiens
  misc_RNA (1)...(19): siRNA sense strand
cgaguuugcugcugucaac

SEQ ID NO: 57421 - RNA, 19 nt, Homo sapiens
  misc_RNA (1)...(19): siRNA sense strand
caacuguccucaccaugac

SEQ ID NO: 57422 - RNA, 19 nt, Homo sapiens
  misc_RNA (1)...(19): siRNA sense strand
aggcagacauggauugaca

SEQ ID NO: 57423 - RNA, 19 nt, Homo sapiens
  misc_RNA (1)...(19): siRNA sense strand
gcaagagcacuuccaucug

SEQ ID NO: 57424 - RNA, 19 nt, Homo sapiens
  misc_RNA (1)...(19): siRNA sense strand
gacagugauucuuucucaa

SEQ ID NO: 57425 - RNA, 19 nt, Homo sapiens
  misc_RNA (1)...(19): siRNA sense strand
caauggauguguucuucag

SEQ ID NO: 57426 - RNA, 19 nt, Homo sapiens
  misc_RNA (1)...(19): siRNA sense strand
gcuuuggaccuguuucuga

SEQ ID NO: 57427 - RNA, 19 nt, Homo sapiens
  misc_RNA (1)...(19): siRNA sense strand
uaauaugacagcuccaaau

SEQ ID NO: 57428 - RNA, 19 nt, Homo sapiens
  misc_RNA (1)...(19): siRNA sense strand
ugaacaauaugaugguaac

SEQ ID NO: 57429 - RNA, 19 nt, Homo sapiens
  misc_RNA (1)...(19): siRNA sense strand
caccauaagugcggagugu

SEQ ID NO: 57430 - RNA, 19 nt, Homo sapiens
  misc_RNA (1)...(19): siRNA sense strand
gcucgaugguuaugacaac

SEQ ID NO: 57431 - RNA, 19 nt, Homo sapiens
  misc_RNA (1)...(19): siRNA sense strand
uaaagaccacaguuaauac

SEQ ID NO: 57432 - RNA, 19 nt, Homo sapiens
  misc_RNA (1)...(19): siRNA sense strand
gcacuuccaucugcuucuc

SEQ ID NO: 57433 - RNA, 19 nt, Homo sapiens
  misc_RNA (1)...(19): siRNA sense strand
caccaauauucaaauggaa

SEQ ID NO: 57434 - RNA, 19 nt, Homo sapiens
  misc_RNA (1)...(19): siRNA sense strand
cugcuuugcuuuuguauuu

SEQ ID NO: 57435 - RNA, 19 nt, Homo sapiens
  misc_RNA (1)...(19): siRNA sense strand
acaacuguccucaccauga

SEQ ID NO: 57436 - RNA, 19 nt, Homo sapiens
  misc_RNA (1)...(19): siRNA sense strand
cccaugagauugguggauu

SEQ ID NO: 57437 - RNA, 19 nt, Homo sapiens
  misc_RNA (1)...(19): siRNA sense strand
cggagugucccaugagauu

SEQ ID NO: 57438 - RNA, 19 nt, Homo sapiens
  misc_RNA (1)...(19): siRNA sense strand
acaccucggucuuacuuag

SEQ ID NO: 57439 - RNA, 19 nt, Homo sapiens
  misc_RNA (1)...(19): siRNA sense strand
gaagauggcuccagacuga

SEQ ID NO: 57440 - RNA, 19 nt, Homo sapiens
  misc_RNA (1)...(19): siRNA sense strand
cgacaaagcuggaaagaug

SEQ ID NO: 57441 - RNA, 19 nt, Homo sapiens
  misc_RNA (1)...(19): siRNA sense strand
gaacuuauccagucacuuu

SEQ ID NO: 57442 - RNA, 19 nt, Homo sapiens
  misc_RNA (1)...(19): siRNA sense strand
gaugaaaggcuucgguuua

SEQ ID NO: 57443 - RNA, 19 nt, Homo sapiens
  misc_RNA (1)...(19): siRNA sense strand
guucggcacuuucaacuua

SEQ ID NO: 57444 - RNA, 19 nt, Homo sapiens
  misc_RNA (1)...(19): siRNA sense strand
gacaacaucacgauauuua

SEQ ID NO: 57445 - RNA, 19 nt, Homo sapiens
  misc_RNA (1)...(19): siRNA sense strand
gcagggacgucgaauacaa

SEQ ID NO: 57446 - RNA, 19 nt, Homo sapiens
  misc_RNA (1)...(19): siRNA sense strand
ggaacucucugcccaaagu

SEQ ID NO: 57447 - RNA, 19 nt, Homo sapiens
  misc_RNA (1)...(19): siRNA sense strand
gaauacaaccucagucuca

SEQ ID NO: 57448 - RNA, 19 nt, Homo sapiens
  misc_RNA (1)...(19): siRNA sense strand
cauaaugaccgugaucuua

SEQ ID NO: 57449 - RNA, 19 nt, Homo sapiens
  misc_RNA (1)...(19): siRNA sense strand
gaucuuggaugggcucuug

SEQ ID NO: 57450 - RNA, 19 nt, Homo sapiens
  misc_RNA (1)...(19): siRNA sense strand
ugaaagaugagaccaauga

SEQ ID NO: 57451 - RNA, 19 nt, Homo sapiens
  misc_RNA (1)...(19): siRNA sense strand
guccaucgcucacaacaug

SEQ ID NO: 57452 - RNA, 19 nt, Homo sapiens
  misc_RNA (1)...(19): siRNA sense strand
caaccucagucucaguaaa

SEQ ID NO: 57453 - RNA, 19 nt, Homo sapiens
  misc_RNA (1)...(19): siRNA sense strand
uaccuucccugcauaauga

SEQ ID NO: 57454 - RNA, 19 nt, Homo sapiens
  misc_RNA (1)...(19): siRNA sense strand
ggaauguucucugguuuua

SEQ ID NO: 57455 - RNA, 19 nt, Homo sapiens
  misc_RNA (1)...(19): siRNA sense strand
aaaggaagauuggcuacuu

SEQ ID NO: 57456 - RNA, 19 nt, Homo sapiens
  misc_RNA (1)...(19): siRNA sense strand
cuaaauaagucaacaaacg

SEQ ID NO: 57457 - RNA, 19 nt, Homo sapiens
  misc_RNA (1)...(19): siRNA sense strand
cgugaagucauacuaaaua

SEQ ID NO: 57458 - RNA, 19 nt, Homo sapiens
  misc_RNA (1)...(19): siRNA sense strand
gaauagggagccggugaua

SEQ ID NO: 57459 - RNA, 19 nt, Homo sapiens
  misc_RNA (1)...(19): siRNA sense strand
gaccuaccuucccugcaua

SEQ ID NO: 57460 - RNA, 19 nt, Homo sapiens
  misc_RNA (1)...(19): siRNA sense strand
gcagcuaugcguacccuaa

SEQ ID NO: 57461 - RNA, 19 nt, Homo sapiens
  misc_RNA (1)...(19): siRNA sense strand
ucaauuacuuuaccaagag

SEQ ID NO: 57462 - RNA, 19 nt, Homo sapiens
  misc_RNA (1)...(19): siRNA sense strand
gucaauuacuuuaccaaga

SEQ ID NO: 57463 - RNA, 19 nt, Homo sapiens
  misc_RNA (1)...(19): siRNA sense strand
ucacagaugccaaccaguu

SEQ ID NO: 57464 - RNA, 19 nt, Homo sapiens
  misc_RNA (1)...(19): siRNA sense strand
caaaaugucccgaaucgua

SEQ ID NO: 57465 - RNA, 19 nt, Homo sapiens
  misc_RNA (1)...(19): siRNA sense strand
ucucggcgcugauagaguu

SEQ ID NO: 57466 - RNA, 19 nt, Homo sapiens
  misc_RNA (1)...(19): siRNA sense strand
gccauggacugguucauag

SEQ ID NO: 57467 - RNA, 19 nt, Homo sapiens
  misc_RNA (1)...(19): siRNA sense strand
aagauuggcuacuuuguca

SEQ ID NO: 57468 - RNA, 19 nt, Homo sapiens
  misc_RNA (1)...(19): siRNA sense strand
ccaugcagcuugaggacuu

SEQ ID NO: 57469 - RNA, 19 nt, Homo sapiens
  misc_RNA (1)...(19): siRNA sense strand
augaaaggcuucgguuuaa

SEQ ID NO: 57470 - RNA, 19 nt, Homo sapiens
  misc_RNA (1)...(19): siRNA sense strand
gaaccaguaccaccugaug

SEQ ID NO: 57471 - RNA, 19 nt, Homo sapiens
  misc_RNA (1)...(19): siRNA sense strand
gaagauuggcuacuuuguc

SEQ ID NO: 57472 - RNA, 19 nt, Homo sapiens
  misc_RNA (1)...(19): siRNA sense strand
uuacaacaguaucagcaaa

SEQ ID NO: 57473 - RNA, 19 nt, Homo sapiens
  misc_RNA (1)...(19): siRNA sense strand
aaggaagauuggcuacuuu

SEQ ID NO: 57474 - RNA, 19 nt, Homo sapiens
  misc_RNA (1)...(19): siRNA sense strand
guauuuccaugaacuuauc

SEQ ID NO: 57475 - RNA, 19 nt, Homo sapiens
  misc_RNA (1)...(19): siRNA sense strand
aauggaauguucucugguu

SEQ ID NO: 57476 - RNA, 19 nt, Homo sapiens
  misc_RNA (1)...(19): siRNA sense strand
auagggagccggugauaaa

SEQ ID NO: 57477 - RNA, 19 nt, Homo sapiens
  misc_RNA (1)...(19): siRNA sense strand
caggaacucucugcccaaa

SEQ ID NO: 57478 - RNA, 19 nt, Homo sapiens
  misc_RNA (1)...(19): siRNA sense strand
gaaaggcuucgguuuaagg

SEQ ID NO: 57479 - RNA, 19 nt, Homo sapiens
  misc_RNA (1)...(19): siRNA sense strand
cagcaaaauugacaaaaug

SEQ ID NO: 57480 - RNA, 19 nt, Homo sapiens
  misc_RNA (1)...(19): siRNA sense strand
agaaguccaucgcucacaa

SEQ ID NO: 57481 - RNA, 19 nt, Homo sapiens
  misc_RNA (1)...(19): siRNA sense strand
caauuacuuuaccaagaga

SEQ ID NO: 57482 - RNA, 19 nt, Homo sapiens
  misc_RNA (1)...(19): siRNA sense strand
ccaccgccauggacugguu

SEQ ID NO: 57483 - RNA, 19 nt, Homo sapiens
  misc_RNA (1)...(19): siRNA sense strand
uaaugaccgugaucuuauc

SEQ ID NO: 57484 - RNA, 19 nt, Homo sapiens
  misc_RNA (1)...(19): siRNA sense strand
gcacaggcgaauacacaau

SEQ ID NO: 57485 - RNA, 19 nt, Homo sapiens
  misc_RNA (1)...(19): siRNA sense strand
gcacccugcucuacaccau

SEQ ID NO: 57486 - RNA, 19 nt, Homo sapiens
  misc_RNA (1)...(19): siRNA sense strand
ugagaccaaugacaacauc

SEQ ID NO: 57487 - RNA, 19 nt, Homo sapiens
  misc_RNA (1)...(19): siRNA sense strand
gaagcagccaagaucaaga

SEQ ID NO: 57488 - RNA, 19 nt, Homo sapiens
  misc_RNA (1)...(19): siRNA sense strand
ggaagcagccaagaucaag

SEQ ID NO: 57489 - RNA, 19 nt, Homo sapiens
  misc_RNA (1)...(19): siRNA sense strand
uaucacagguguccuuuug

SEQ ID NO: 57490 - RNA, 19 nt, Homo sapiens
  misc_RNA (1)...(19): siRNA sense strand
ucugaaauuuggcagcuau

SEQ ID NO: 57491 - RNA, 19 nt, Homo sapiens
  misc_RNA (1)...(19): siRNA sense strand
caaugacaacaucacgaua

SEQ ID NO: 57492 - RNA, 19 nt, Homo sapiens
  misc_RNA (1)...(19): siRNA sense strand
cagcagggacgucgaauac

SEQ ID NO: 57493 - RNA, 19 nt, Homo sapiens
  misc_RNA (1)...(19): siRNA sense strand
gcauaaugaccgugaucuu

SEQ ID NO: 57494 - RNA, 19 nt, Homo sapiens
  misc_RNA (1)...(19): siRNA sense strand
agaccuaccuucccugcau

SEQ ID NO: 57495 - RNA, 19 nt, Homo sapiens
  misc_RNA (1)...(19): siRNA sense strand
gacaaagcuggaaagauga

SEQ ID NO: 57496 - RNA, 19 nt, Homo sapiens
  misc_RNA (1)...(19): siRNA sense strand
aagaugagaccaaugacaa

SEQ ID NO: 57497 - RNA, 19 nt, Homo sapiens
  misc_RNA (1)...(19): siRNA sense strand
cagcacaggcgaauacaca

SEQ ID NO: 57498 - RNA, 19 nt, Homo sapiens
  misc_RNA (1)...(19): siRNA sense strand
cuaauucugaagucguuua

SEQ ID NO: 57499 - RNA, 19 nt, Homo sapiens
  misc_RNA (1)...(19): siRNA sense strand
ugacaacaucacgauauuu

SEQ ID NO: 57500 - RNA, 19 nt, Homo sapiens
  misc_RNA (1)...(19): siRNA sense strand
ggauggcuacgacaacaga

SEQ ID NO: 57501 - RNA, 19 nt, Homo sapiens
  misc_RNA (1)...(19): siRNA sense strand
ccaugaacuuauccaguca

SEQ ID NO: 57502 - RNA, 19 nt, Homo sapiens
  misc_RNA (1)...(19): siRNA sense strand
ccacggugcugaccaugac

SEQ ID NO: 57503 - RNA, 19 nt, Homo sapiens
  misc_RNA (1)...(19): siRNA sense strand
ggaagauuggcuacuuugu

SEQ ID NO: 57504 - RNA, 19 nt, Homo sapiens
  misc_RNA (1)...(19): siRNA sense strand
ccaaugacaacaucacgau

SEQ ID NO: 57505 - RNA, 19 nt, Homo sapiens
  misc_RNA (1)...(19): siRNA sense strand
gcuaugcguacccuaauuc

SEQ ID NO: 57506 - RNA, 19 nt, Homo sapiens
  misc_RNA (1)...(19): siRNA sense strand
gcacgcuugcccucugaaa

SEQ ID NO: 57507 - RNA, 19 nt, Homo sapiens
  misc_RNA (1)...(19): siRNA sense strand
gauauuuaccaggaucuug

SEQ ID NO: 57508 - RNA, 19 nt, Homo sapiens
  misc_RNA (1)...(19): siRNA sense strand
ccagcagggacgucgaaua

SEQ ID NO: 57509 - RNA, 19 nt, Homo sapiens
  misc_RNA (1)...(19): siRNA sense strand
cagacacguucuuccacaa

SEQ ID NO: 57510 - RNA, 19 nt, Homo sapiens
  misc_RNA (1)...(19): siRNA sense strand
ggugaggaccgacaucuac

SEQ ID NO: 57511 - RNA, 19 nt, Homo sapiens
  misc_RNA (1)...(19): siRNA sense strand
gcaccagcacaggcgaaua

SEQ ID NO: 57512 - RNA, 19 nt, Homo sapiens
  misc_RNA (1)...(19): siRNA sense strand
ggugggcacugagaacauc

SEQ ID NO: 57513 - RNA, 19 nt, Homo sapiens
  misc_RNA (1)...(19): siRNA sense strand
ggaccaacggcuccaccaa

SEQ ID NO: 57514 - RNA, 19 nt, Homo sapiens
  misc_RNA (1)...(19): siRNA sense strand
acgcuugcccucugaaauu

SEQ ID NO: 57515 - RNA, 19 nt, Homo sapiens
  misc_RNA (1)...(19): siRNA sense strand
acacggaaauggaguacac

SEQ ID NO: 57516 - RNA, 19 nt, Homo sapiens
  misc_RNA (1)...(19): siRNA sense strand
gcgccucccucucaacaac

SEQ ID NO: 57517 - RNA, 19 nt, Homo sapiens
  misc_RNA (1)...(19): siRNA sense strand
gugcuaugccuucgucuuc

SEQ ID NO: 57518 - RNA, 19 nt, Homo sapiens
  misc_RNA (1)...(19): siRNA sense strand
cagcucacuuccaccugaa

SEQ ID NO: 57519 - RNA, 19 nt, Homo sapiens
  misc_RNA (1)...(19): siRNA sense strand
aaugacaacaucacgauau

SEQ ID NO: 57520 - RNA, 19 nt, Homo sapiens
  misc_RNA (1)...(19): siRNA sense strand
augacaacaucacgauauu

SEQ ID NO: 57521 - RNA, 19 nt, Homo sapiens
  misc_RNA (1)...(19): siRNA sense strand
ugggagagcgcaucacuca

SEQ ID NO: 57522 - RNA, 19 nt, Homo sapiens
  misc_RNA (1)...(19): siRNA sense strand
aaucaugacagcucacuuc

SEQ ID NO: 57523 - RNA, 19 nt, Homo sapiens
  misc_RNA (1)...(19): siRNA sense strand
cgaauacacaaucaugaca

SEQ ID NO: 57524 - RNA, 19 nt, Homo sapiens
  misc_RNA (1)...(19): siRNA sense strand
augcguacccuaauucuga

SEQ ID NO: 57525 - RNA, 19 nt, Homo sapiens
  misc_RNA (1)...(19): siRNA sense strand
ugaaaggcuucgguuuaag

SEQ ID NO: 57526 - RNA, 19 nt, Homo sapiens
  misc_RNA (1)...(19): siRNA sense strand
cuccuucucuuuuguauuu

SEQ ID NO: 57527 - RNA, 19 nt, Homo sapiens
  misc_RNA (1)...(19): siRNA sense strand
aagcgugaagucauacuaa

SEQ ID NO: 57528 - RNA, 19 nt, Homo sapiens
  misc_RNA (1)...(19): siRNA sense strand
gccacggucaauuacuuua

SEQ ID NO: 57529 - RNA, 19 nt, Homo sapiens
  misc_RNA (1)...(19): siRNA sense strand
cgccauggacugguucaua

SEQ ID NO: 57530 - RNA, 19 nt, Homo sapiens
  misc_RNA (1)...(19): siRNA sense strand
agugaaagaugagaccaau

SEQ ID NO: 57531 - RNA, 19 nt, Homo sapiens
  misc_RNA (1)...(19): siRNA sense strand
cgcuugcccucugaaauuu

SEQ ID NO: 57532 - RNA, 19 nt, Homo sapiens
  misc_RNA (1)...(19): siRNA sense strand
gaugagaccaaugacaaca

SEQ ID NO: 57533 - RNA, 19 nt, Homo sapiens
  misc_RNA (1)...(19): siRNA sense strand
aaucguauucccagucuug

SEQ ID NO: 57534 - RNA, 19 nt, Homo sapiens
  misc_RNA (1)...(19): siRNA sense strand
ggcgaauacacaaucauga

SEQ ID NO: 57535 - RNA, 19 nt, Homo sapiens
  misc_RNA (1)...(19): siRNA sense strand
guacccuaauucugaaguc

SEQ ID NO: 57536 - RNA, 19 nt, Homo sapiens
  misc_RNA (1)...(19): siRNA sense strand
uacaaccucagucucagua

SEQ ID NO: 57537 - RNA, 19 nt, Homo sapiens
  misc_RNA (1)...(19): siRNA sense strand
gcgugaagucauacuaaau

SEQ ID NO: 57538 - RNA, 19 nt, Homo sapiens
  misc_RNA (1)...(19): siRNA sense strand
ucacgauauuuaccaggau

SEQ ID NO: 57539 - RNA, 19 nt, Homo sapiens
  misc_RNA (1)...(19): siRNA sense strand
guucauagcuguuugcuuu

SEQ ID NO: 57540 - RNA, 19 nt, Homo sapiens
  misc_RNA (1)...(19): siRNA sense strand
gaugagagguugaaguuug

SEQ ID NO: 57541 - RNA, 19 nt, Homo sapiens
  misc_RNA (1)...(19): siRNA sense strand
uaacacaggugaauacguu

SEQ ID NO: 57542 - RNA, 19 nt, Homo sapiens
  misc_RNA (1)...(19): siRNA sense strand
gauauacacuccuugcauu

SEQ ID NO: 57543 - RNA, 19 nt, Homo sapiens
  misc_RNA (1)...(19): siRNA sense strand
caacugagauucugagucu

SEQ ID NO: 57544 - RNA, 19 nt, Homo sapiens
  misc_RNA (1)...(19): siRNA sense strand
cgaauucucuucccaguug

SEQ ID NO: 57545 - RNA, 19 nt, Homo sapiens
  misc_RNA (1)...(19): siRNA sense strand
gagcuaugcuuaucccaaa

SEQ ID NO: 57546 - RNA, 19 nt, Homo sapiens
  misc_RNA (1)...(19): siRNA sense strand
ccaaauaucaucugaagaa

SEQ ID NO: 57547 - RNA, 19 nt, Homo sapiens
  misc_RNA (1)...(19): siRNA sense strand
caugacaacuccuaauaaa

SEQ ID NO: 57548 - RNA, 19 nt, Homo sapiens
  misc_RNA (1)...(19): siRNA sense strand
ggacaaacaguaucuagug

SEQ ID NO: 57549 - RNA, 19 nt, Homo sapiens
  misc_RNA (1)...(19): siRNA sense strand
gacaaacaguaucuaguga

SEQ ID NO: 57550 - RNA, 19 nt, Homo sapiens
  misc_RNA (1)...(19): siRNA sense strand
caaacaguaucuagugaga

SEQ ID NO: 57551 - RNA, 19 nt, Homo sapiens
  misc_RNA (1)...(19): siRNA sense strand
ccaugaggcugguuaacuu

SEQ ID NO: 57552 - RNA, 19 nt, Homo sapiens
  misc_RNA (1)...(19): siRNA sense strand
cacgagagcgcccaucuua

SEQ ID NO: 57553 - RNA, 19 nt, Homo sapiens
  misc_RNA (1)...(19): siRNA sense strand
cuucaagccuucuccagua

SEQ ID NO: 57554 - RNA, 19 nt, Homo sapiens
  misc_RNA (1)...(19): siRNA sense strand
caacuugcuugaaggcuau

SEQ ID NO: 57555 - RNA, 19 nt, Homo sapiens
  misc_RNA (1)...(19): siRNA sense strand
aagaugggcuacuucauga

SEQ ID NO: 57556 - RNA, 19 nt, Homo sapiens
  misc_RNA (1)...(19): siRNA sense strand
gaugggcuacuucaugaua

SEQ ID NO: 57557 - RNA, 19 nt, Homo sapiens
  misc_RNA (1)...(19): siRNA sense strand
ccacugccauggauugguu

SEQ ID NO: 57558 - RNA, 19 nt, Homo sapiens
  misc_RNA (1)...(19): siRNA sense strand
ccaugaggcuuaccaucaa

SEQ ID NO: 57559 - RNA, 19 nt, Homo sapiens
  misc_RNA (1)...(19): siRNA sense strand
gguaguuuaucuuuccaaa

SEQ ID NO: 57560 - RNA, 19 nt, Homo sapiens
  misc_RNA (1)...(19): siRNA sense strand
aaaggaagaugggcuacuu

SEQ ID NO: 57561 - RNA, 19 nt, Homo sapiens
  misc_RNA (1)...(19): siRNA sense strand
gauucaaccuuguguacug

SEQ ID NO: 57562 - RNA, 19 nt, Homo sapiens
  misc_RNA (1)...(19): siRNA sense strand
caagccuucuccaguauga

SEQ ID NO: 57563 - RNA, 19 nt, Homo sapiens
  misc_RNA (1)...(19): siRNA sense strand
guucgcagcugucaacuac

SEQ ID NO: 57564 - RNA, 19 nt, Homo sapiens
  misc_RNA (1)...(19): siRNA sense strand
guccauugcucacaacaug

SEQ ID NO: 57565 - RNA, 19 nt, Homo sapiens
  misc_RNA (1)...(19): siRNA sense strand
ggugaauacguuauaauga

SEQ ID NO: 57566 - RNA, 19 nt, Homo sapiens
  misc_RNA (1)...(19): siRNA sense strand
ccuaauaaacucuucagaa

SEQ ID NO: 57567 - RNA, 19 nt, Homo sapiens
  misc_RNA (1)...(19): siRNA sense strand
gcgcccaucuuacaaucaa

SEQ ID NO: 57568 - RNA, 19 nt, Homo sapiens
  misc_RNA (1)...(19): siRNA sense strand
gaucacuucucugucuuug

SEQ ID NO: 57569 - RNA, 19 nt, Homo sapiens
  misc_RNA (1)...(19): siRNA sense strand
uuaccaaucuucagacaca

SEQ ID NO: 57570 - RNA, 19 nt, Homo sapiens
  misc_RNA (1)...(19): siRNA sense strand
caguagaagucccagaaga

SEQ ID NO: 57571 - RNA, 19 nt, Homo sapiens
  misc_RNA (1)...(19): siRNA sense strand
gcagcugucaacuacuuua

SEQ ID NO: 57572 - RNA, 19 nt, Homo sapiens
  misc_RNA (1)...(19): siRNA sense strand
gaaaaggaaggcacaguuu

SEQ ID NO: 57573 - RNA, 19 nt, Homo sapiens
  misc_RNA (1)...(19): siRNA sense strand
caacuacuuuaccaaucuu

SEQ ID NO: 57574 - RNA, 19 nt, Homo sapiens
  misc_RNA (1)...(19): siRNA sense strand
ugacaacuccuaauaaacu

SEQ ID NO: 57575 - RNA, 19 nt, Homo sapiens
  misc_RNA (1)...(19): siRNA sense strand
ccacagugacaauaucaaa

SEQ ID NO: 57576 - RNA, 19 nt, Homo sapiens
  misc_RNA (1)...(19): siRNA sense strand
ucucugcucuuaucgaguu

SEQ ID NO: 57577 - RNA, 19 nt, Homo sapiens
  misc_RNA (1)...(19): siRNA sense strand
gugucuuucuggauuaaua

SEQ ID NO: 57578 - RNA, 19 nt, Homo sapiens
  misc_RNA (1)...(19): siRNA sense strand
gugaauacguuauaaugac

SEQ ID NO: 57579 - RNA, 19 nt, Homo sapiens
  misc_RNA (1)...(19): siRNA sense strand
gggcaugcuuguccacuca

SEQ ID NO: 57580 - RNA, 19 nt, Homo sapiens
  misc_RNA (1)...(19): siRNA sense strand
guaucuagugagacaauua

SEQ ID NO: 57581 - RNA, 19 nt, Homo sapiens
  misc_RNA (1)...(19): siRNA sense strand
ugccauggauugguucaua

SEQ ID NO: 57582 - RNA, 19 nt, Homo sapiens
  misc_RNA (1)...(19): siRNA sense strand
caggugucuuucuggauua

SEQ ID NO: 57583 - RNA, 19 nt, Homo sapiens
  misc_RNA (1)...(19): siRNA sense strand
ugucagauguggagaugga

SEQ ID NO: 57584 - RNA, 19 nt, Homo sapiens
  misc_RNA (1)...(19): siRNA sense strand
ucaacuacuuuaccaaucu

SEQ ID NO: 57585 - RNA, 19 nt, Homo sapiens
  misc_RNA (1)...(19): siRNA sense strand
auacagauauacacuccuu

SEQ ID NO: 57586 - RNA, 19 nt, Homo sapiens
  misc_RNA (1)...(19): siRNA sense strand
cgagagcgcccaucuuaca

SEQ ID NO: 57587 - RNA, 19 nt, Homo sapiens
  misc_RNA (1)...(19): siRNA sense strand
cauccugacuccaaauauc

SEQ ID NO: 57588 - RNA, 19 nt, Homo sapiens
  misc_RNA (1)...(19): siRNA sense strand
cgucuucucugcucuuauc

SEQ ID NO: 57589 - RNA, 19 nt, Homo sapiens
  misc_RNA (1)...(19): siRNA sense strand
ccaaagauacaauggaagu

SEQ ID NO: 57590 - RNA, 19 nt, Homo sapiens
  misc_RNA (1)...(19): siRNA sense strand
gagcgcccaucuuacaauc

SEQ ID NO: 57591 - RNA, 19 nt, Homo sapiens
  misc_RNA (1)...(19): siRNA sense strand
caacaugacaacuccuaau

SEQ ID NO: 57592 - RNA, 19 nt, Homo sapiens
  misc_RNA (1)...(19): siRNA sense strand
acaggugaauacguuauaa

SEQ ID NO: 57593 - RNA, 19 nt, Homo sapiens
  misc_RNA (1)...(19): siRNA sense strand
gaggugcugucacugaagu

SEQ ID NO: 57594 - RNA, 19 nt, Homo sapiens
  misc_RNA (1)...(19): siRNA sense strand
cugguuaacuuuccuaugg

SEQ ID NO: 57595 - RNA, 19 nt, Homo sapiens
  misc_RNA (1)...(19): siRNA sense strand
ucagaauaaugcagaaugg

SEQ ID NO: 57596 - RNA, 19 nt, Homo sapiens
  misc_RNA (1)...(19): siRNA sense strand
ggacugaugagagguugaa

SEQ ID NO: 57597 - RNA, 19 nt, Homo sapiens
  misc_RNA (1)...(19): siRNA sense strand
gaguauacgauggauguuu

SEQ ID NO: 57598 - RNA, 19 nt, Homo sapiens
  misc_RNA (1)...(19): siRNA sense strand
caucuuccgaggccaauaa

SEQ ID NO: 57599 - RNA, 19 nt, Homo sapiens
  misc_RNA (1)...(19): siRNA sense strand
ucgcagcugucaacuacuu

SEQ ID NO: 57600 - RNA, 19 nt, Homo sapiens
  misc_RNA (1)...(19): siRNA sense strand
aacaugacaacuccuaaua

SEQ ID NO: 57601 - RNA, 19 nt, Homo sapiens
  misc_RNA (1)...(19): siRNA sense strand
guagaagucccagaagaau

SEQ ID NO: 57602 - RNA, 19 nt, Homo sapiens
  misc_RNA (1)...(19): siRNA sense strand
uaccaucaaugcugacugu

SEQ ID NO: 57603 - RNA, 19 nt, Homo sapiens
  misc_RNA (1)...(19): siRNA sense strand
ucacugaagucaaaacaga

SEQ ID NO: 57604 - RNA, 19 nt, Homo sapiens
  misc_RNA (1)...(19): siRNA sense strand
acaugacaacuccuaauaa

SEQ ID NO: 57605 - RNA, 19 nt, Homo sapiens
  misc_RNA (1)...(19): siRNA sense strand
ccaguaaaauagaccagua

SEQ ID NO: 57606 - RNA, 19 nt, Homo sapiens
  misc_RNA (1)...(19): siRNA sense strand
aaggaucacuucucugucu

SEQ ID NO: 57607 - RNA, 19 nt, Homo sapiens
  misc_RNA (1)...(19): siRNA sense strand
cuagugagacaauuaaauc

SEQ ID NO: 57608 - RNA, 19 nt, Homo sapiens
  misc_RNA (1)...(19): siRNA sense strand
gcauuauucuguggcuaga

SEQ ID NO: 57609 - RNA, 19 nt, Homo sapiens
  misc_RNA (1)...(19): siRNA sense strand
ucccaaaagugaaaucaua

SEQ ID NO: 57610 - RNA, 19 nt, Homo sapiens
  misc_RNA (1)...(19): siRNA sense strand
uuauacaccaugaggcuua

SEQ ID NO: 57611 - RNA, 19 nt, Homo sapiens
  misc_RNA (1)...(19): siRNA sense strand
agaauaaugcagaauggaa

SEQ ID NO: 57612 - RNA, 19 nt, Homo sapiens
  misc_RNA (1)...(19): siRNA sense strand
gcuugaaggcuaugacaau

SEQ ID NO: 57613 - RNA, 19 nt, Homo sapiens
  misc_RNA (1)...(19): siRNA sense strand
gcugucaacuacuuuacca

SEQ ID NO: 57614 - RNA, 19 nt, Homo sapiens
  misc_RNA (1)...(19): siRNA sense strand
auacacuccuugcauuaug

SEQ ID NO: 57615 - RNA, 19 nt, Homo sapiens
  misc_RNA (1)...(19): siRNA sense strand
aaugcugacugucccauga

SEQ ID NO: 57616 - RNA, 19 nt, Homo sapiens
  misc_RNA (1)...(19): siRNA sense strand
ucuccaguaugaucugauu

SEQ ID NO: 57617 - RNA, 19 nt, Homo sapiens
  misc_RNA (1)...(19): siRNA sense strand
uuuggaagcugagauuguu

SEQ ID NO: 57618 - RNA, 19 nt, Homo sapiens
  misc_RNA (1)...(19): siRNA sense strand
gaucaccacuguuuuaacu

SEQ ID NO: 57619 - RNA, 19 nt, Homo sapiens
  misc_RNA (1)...(19): siRNA sense strand
gagucugaauaauuugaug

SEQ ID NO: 57620 - RNA, 19 nt, Homo sapiens
  misc_RNA (1)...(19): siRNA sense strand
aacaguaucuagugagaca

SEQ ID NO: 57621 - RNA, 19 nt, Homo sapiens
  misc_RNA (1)...(19): siRNA sense strand
gccauggauugguucauag

SEQ ID NO: 57622 - RNA, 19 nt, Homo sapiens
  misc_RNA (1)...(19): siRNA sense strand
ucagucggauccuggacaa

SEQ ID NO: 57623 - RNA, 19 nt, Homo sapiens
  misc_RNA (1)...(19): siRNA sense strand
ggaucacuucucugucuuu

SEQ ID NO: 57624 - RNA, 19 nt, Homo sapiens
  misc_RNA (1)...(19): siRNA sense strand
cuccaaauaucaucugaag

SEQ ID NO: 57625 - RNA, 19 nt, Homo sapiens
  misc_RNA (1)...(19): siRNA sense strand
gcucacaacaugacaacuc

SEQ ID NO: 57626 - RNA, 19 nt, Homo sapiens
  misc_RNA (1)...(19): siRNA sense strand
guacuggguaguuuaucuu

SEQ ID NO: 57627 - RNA, 19 nt, Homo sapiens
  misc_RNA (1)...(19): siRNA sense strand
ucucuucccaguugcauuu

SEQ ID NO: 57628 - RNA, 19 nt, Homo sapiens
  misc_RNA (1)...(19): siRNA sense strand
gagagcgcccaucuuacaa

SEQ ID NO: 57629 - RNA, 19 nt, Homo sapiens
  misc_RNA (1)...(19): siRNA sense strand
uggaggugcugucacugaa

SEQ ID NO: 57630 - RNA, 19 nt, Homo sapiens
  misc_RNA (1)...(19): siRNA sense strand
uacacuccuugcauuauga

SEQ ID NO: 57631 - RNA, 19 nt, Homo sapiens
  misc_RNA (1)...(19): siRNA sense strand
gacaguuuacuuccacuug

SEQ ID NO: 57632 - RNA, 19 nt, Homo sapiens
  misc_RNA (1)...(19): siRNA sense strand
gguuaacuuuccuauggau

SEQ ID NO: 57633 - RNA, 19 nt, Homo sapiens
  misc_RNA (1)...(19): siRNA sense strand
gacaacuccuaauaaacuc

SEQ ID NO: 57634 - RNA, 19 nt, Homo sapiens
  misc_RNA (1)...(19): siRNA sense strand
cuggacgccugacaccuuu

SEQ ID NO: 57635 - RNA, 19 nt, Homo sapiens
  misc_RNA (1)...(19): siRNA sense strand
gucaacuacuuuaccaauc

SEQ ID NO: 57636 - RNA, 19 nt, Homo sapiens
  misc_RNA (1)...(19): siRNA sense strand
cuggacaacuugcuugaag

SEQ ID NO: 57637 - RNA, 19 nt, Homo sapiens
  misc_RNA (1)...(19): siRNA sense strand
cugaugagagguugaaguu

SEQ ID NO: 57638 - RNA, 19 nt, Homo sapiens
  misc_RNA (1)...(19): siRNA sense strand
ccacccacagugacaauau

SEQ ID NO: 57639 - RNA, 19 nt, Homo sapiens
  misc_RNA (1)...(19): siRNA sense strand
aaagaucccuuaugucaaa

SEQ ID NO: 57640 - RNA, 19 nt, Homo sapiens
  misc_RNA (1)...(19): siRNA sense strand
agaauaaacuggagaugaa

SEQ ID NO: 57641 - RNA, 19 nt, Homo sapiens
  misc_RNA (1)...(19): siRNA sense strand
acagauugcucaaaggaua

SEQ ID NO: 57642 - RNA, 19 nt, Homo sapiens
  misc_RNA (1)...(19): siRNA sense strand
ccaaagaucccuuauguca

SEQ ID NO: 57643 - RNA, 19 nt, Homo sapiens
  misc_RNA (1)...(19): siRNA sense strand
gagaaacauugguuacuuc

SEQ ID NO: 57644 - RNA, 19 nt, Homo sapiens
  misc_RNA (1)...(19): siRNA sense strand
aaagggagcuagcaaacaa

SEQ ID NO: 57645 - RNA, 19 nt, Homo sapiens
  misc_RNA (1)...(19): siRNA sense strand
caacaugccauacgugaaa

SEQ ID NO: 57646 - RNA, 19 nt, Homo sapiens
  misc_RNA (1)...(19): siRNA sense strand
gcucaaaggauaugacauu

SEQ ID NO: 57647 - RNA, 19 nt, Homo sapiens
  misc_RNA (1)...(19): siRNA sense strand
ucuauuggcuuuacuaugu

SEQ ID NO: 57648 - RNA, 19 nt, Homo sapiens
  misc_RNA (1)...(19): siRNA sense strand
ccacgacugucacuaaguu

SEQ ID NO: 57649 - RNA, 19 nt, Homo sapiens
  misc_RNA (1)...(19): siRNA sense strand
caaguggucccgaauguuu

SEQ ID NO: 57650 - RNA, 19 nt, Homo sapiens
  misc_RNA (1)...(19): siRNA sense strand
gaaccucacccuagacaau

SEQ ID NO: 57651 - RNA, 19 nt, Homo sapiens
  misc_RNA (1)...(19): siRNA sense strand
gacaaguggucccgaaugu

SEQ ID NO: 57652 - RNA, 19 nt, Homo sapiens
  misc_RNA (1)...(19): siRNA sense strand
ggacagauugcucaaagga

SEQ ID NO: 57653 - RNA, 19 nt, Homo sapiens
  misc_RNA (1)...(19): siRNA sense strand
ugccaaagaucccuuaugu

SEQ ID NO: 57654 - RNA, 19 nt, Homo sapiens
  misc_RNA (1)...(19): siRNA sense strand
gggagacccugccaaagau

SEQ ID NO: 57655 - RNA, 19 nt, Homo sapiens
  misc_RNA (1)...(19): siRNA sense strand
acuacaagauggugucuaa

SEQ ID NO: 57656 - RNA, 19 nt, Homo sapiens
  misc_RNA (1)...(19): siRNA sense strand
acaccuacuuucugaauga

SEQ ID NO: 57657 - RNA, 19 nt, Homo sapiens
  misc_RNA (1)...(19): siRNA sense strand
gacauggucuccgaaguga

SEQ ID NO: 57658 - RNA, 19 nt, Homo sapiens
  misc_RNA (1)...(19): siRNA sense strand
acaagauggugucuaagaa

SEQ ID NO: 57659 - RNA, 19 nt, Homo sapiens
  misc_RNA (1)...(19): siRNA sense strand
ucacuaaguuuucgucuaa

SEQ ID NO: 57660 - RNA, 19 nt, Homo sapiens
  misc_RNA (1)...(19): siRNA sense strand
gaugugaauuccauagaca

SEQ ID NO: 57661 - RNA, 19 nt, Homo sapiens
  misc_RNA (1)...(19): siRNA sense strand
gcacacagcaccaaugaac

SEQ ID NO: 57662 - RNA, 19 nt, Homo sapiens
  misc_RNA (1)...(19): siRNA sense strand
ccacugaugacauugaauu

SEQ ID NO: 57663 - RNA, 19 nt, Homo sapiens
  misc_RNA (1)...(19): siRNA sense strand
gaaagagacaguggacaga

SEQ ID NO: 57664 - RNA, 19 nt, Homo sapiens
  misc_RNA (1)...(19): siRNA sense strand
gcuuuacuauguacacuga

SEQ ID NO: 57665 - RNA, 19 nt, Homo sapiens
  misc_RNA (1)...(19): siRNA sense strand
cuauaccacugaugacauu

SEQ ID NO: 57666 - RNA, 19 nt, Homo sapiens
  misc_RNA (1)...(19): siRNA sense strand
agagaaacauugguuacuu

SEQ ID NO: 57667 - RNA, 19 nt, Homo sapiens
  misc_RNA (1)...(19): siRNA sense strand
ccgaagugaauauggauua

SEQ ID NO: 57668 - RNA, 19 nt, Homo sapiens
  misc_RNA (1)...(19): siRNA sense strand
ugaauuccauagacaagug

SEQ ID NO: 57669 - RNA, 19 nt, Homo sapiens
  misc_RNA (1)...(19): siRNA sense strand
gaagguggaguucacaaca

SEQ ID NO: 57670 - RNA, 19 nt, Homo sapiens
  misc_RNA (1)...(19): siRNA sense strand
gauuauacacucaccaugu

SEQ ID NO: 57671 - RNA, 19 nt, Homo sapiens
  misc_RNA (1)...(19): siRNA sense strand
uaggguagcugaccaacuc

SEQ ID NO: 57672 - RNA, 19 nt, Homo sapiens
  misc_RNA (1)...(19): siRNA sense strand
aaaccuacaugccuucuac

SEQ ID NO: 57673 - RNA, 19 nt, Homo sapiens
  misc_RNA (1)...(19): siRNA sense strand
aaccacagcugcauguaug

SEQ ID NO: 57674 - RNA, 19 nt, Homo sapiens
  misc_RNA (1)...(19): siRNA sense strand
cgaagugaauauggauuau

SEQ ID NO: 57675 - RNA, 19 nt, Homo sapiens
  misc_RNA (1)...(19): siRNA sense strand
ccaaugagaagaauaaacu

SEQ ID NO: 57676 - RNA, 19 nt, Homo sapiens
  misc_RNA (1)...(19): siRNA sense strand
cuucuacacugauuacaau

SEQ ID NO: 57677 - RNA, 19 nt, Homo sapiens
  misc_RNA (1)...(19): siRNA sense strand
cuaaagagaaacauugguu

SEQ ID NO: 57678 - RNA, 19 nt, Homo sapiens
  misc_RNA (1)...(19): siRNA sense strand
aagagacaguggacagauu

SEQ ID NO: 57679 - RNA, 19 nt, Homo sapiens
  misc_RNA (1)...(19): siRNA sense strand
uuacuggaauggaggagaa

SEQ ID NO: 57680 - RNA, 19 nt, Homo sapiens
  misc_RNA (1)...(19): siRNA sense strand
guggacagauugcucaaag

SEQ ID NO: 57681 - RNA, 19 nt, Homo sapiens
  misc_RNA (1)...(19): siRNA sense strand
ugauuaccauggucuguug

SEQ ID NO: 57682 - RNA, 19 nt, Homo sapiens
  misc_RNA (1)...(19): siRNA sense strand
gaccagagugccaaugaga

SEQ ID NO: 57683 - RNA, 19 nt, Homo sapiens
  misc_RNA (1)...(19): siRNA sense strand
gugccaaugagaagaauaa

SEQ ID NO: 57684 - RNA, 19 nt, Homo sapiens
  misc_RNA (1)...(19): siRNA sense strand
gaucgaugucgccagcaua

SEQ ID NO: 57685 - RNA, 19 nt, Homo sapiens
  misc_RNA (1)...(19): siRNA sense strand
gauggguugcuuuguguuu

SEQ ID NO: 57686 - RNA, 19 nt, Homo sapiens
  misc_RNA (1)...(19): siRNA sense strand
caaugaacccagcaacaug

SEQ ID NO: 57687 - RNA, 19 nt, Homo sapiens
  misc_RNA (1)...(19): siRNA sense strand
caaccacagcugcauguau

SEQ ID NO: 57688 - RNA, 19 nt, Homo sapiens
  misc_RNA (1)...(19): siRNA sense strand
caaagaucccuuaugucaa

SEQ ID NO: 57689 - RNA, 19 nt, Homo sapiens
  misc_RNA (1)...(19): siRNA sense strand
cuauuggcuuuacuaugua

SEQ ID NO: 57690 - RNA, 19 nt, Homo sapiens
  misc_RNA (1)...(19): siRNA sense strand
gguaccagacaccuacuuu

SEQ ID NO: 57691 - RNA, 19 nt, Homo sapiens
  misc_RNA (1)...(19): siRNA sense strand
gggaaaggcccucagaaaa

SEQ ID NO: 57692 - RNA, 19 nt, Homo sapiens
  misc_RNA (1)...(19): siRNA sense strand
cuacacugauuacaauucu

SEQ ID NO: 57693 - RNA, 19 nt, Homo sapiens
  misc_RNA (1)...(19): siRNA sense strand
uauccacgacugucacuaa

SEQ ID NO: 57694 - RNA, 19 nt, Homo sapiens
  misc_RNA (1)...(19): siRNA sense strand
agucacugguguuaauaaa

SEQ ID NO: 57695 - RNA, 19 nt, Homo sapiens
  misc_RNA (1)...(19): siRNA sense strand
aagaauaaacuggagauga

SEQ ID NO: 57696 - RNA, 19 nt, Homo sapiens
  misc_RNA (1)...(19): siRNA sense strand
ugggaaaggcccucagaaa

SEQ ID NO: 57697 - RNA, 19 nt, Homo sapiens
  misc_RNA (1)...(19): siRNA sense strand
gcaacaugccauacgugaa

SEQ ID NO: 57698 - RNA, 19 nt, Homo sapiens
  misc_RNA (1)...(19): siRNA sense strand
gaauaaacuggagaugaau

SEQ ID NO: 57699 - RNA, 19 nt, Homo sapiens
  misc_RNA (1)...(19): siRNA sense strand
ccaaugaacccagcaacau

SEQ ID NO: 57700 - RNA, 19 nt, Homo sapiens
  misc_RNA (1)...(19): siRNA sense strand
ucugauggguugcuuugug

SEQ ID NO: 57701 - RNA, 19 nt, Homo sapiens
  misc_RNA (1)...(19): siRNA sense strand
cgucuaaagagaaacauug

SEQ ID NO: 57702 - RNA, 19 nt, Homo sapiens
  misc_RNA (1)...(19): siRNA sense strand
cuaagaagguggaguucac

SEQ ID NO: 57703 - RNA, 19 nt, Homo sapiens
  misc_RNA (1)...(19): siRNA sense strand
uacaagauggugucuaaga

SEQ ID NO: 57704 - RNA, 19 nt, Homo sapiens
  misc_RNA (1)...(19): siRNA sense strand
gacaccuacuuucugaaug

SEQ ID NO: 57705 - RNA, 19 nt, Homo sapiens
  misc_RNA (1)...(19): siRNA sense strand
ccucccagcucaaagucaa

SEQ ID NO: 57706 - RNA, 19 nt, Homo sapiens
  misc_RNA (1)...(19): siRNA sense strand
uacaugccuucuacacuga

SEQ ID NO: 57707 - RNA, 19 nt, Homo sapiens
  misc_RNA (1)...(19): siRNA sense strand
gaagaauaaacuggagaug

SEQ ID NO: 57708 - RNA, 19 nt, Homo sapiens
  misc_RNA (1)...(19): siRNA sense strand
cacugaaccucacccuaga

SEQ ID NO: 57709 - RNA, 19 nt, Homo sapiens
  misc_RNA (1)...(19): siRNA sense strand
cuggaaauccggaaugaga

SEQ ID NO: 57710 - RNA, 19 nt, Homo sapiens
  misc_RNA (1)...(19): siRNA sense strand
guucacaacaggagcguau

SEQ ID NO: 57711 - RNA, 19 nt, Homo sapiens
  misc_RNA (1)...(19): siRNA sense strand
caagauggugucuaagaag

SEQ ID NO: 57712 - RNA, 19 nt, Homo sapiens
  misc_RNA (1)...(19): siRNA sense strand
ggaucgaugucgccagcau

SEQ ID NO: 57713 - RNA, 19 nt, Homo sapiens
  misc_RNA (1)...(19): siRNA sense strand
uaccacugaugacauugaa

SEQ ID NO: 57714 - RNA, 19 nt, Homo sapiens
  misc_RNA (1)...(19): siRNA sense strand
aacuggagaugaauaaagu

SEQ ID NO: 57715 - RNA, 19 nt, Homo sapiens
  misc_RNA (1)...(19): siRNA sense strand
aaugucgucuauuggcuuu

SEQ ID NO: 57716 - RNA, 19 nt, Homo sapiens
  misc_RNA (1)...(19): siRNA sense strand
ucuccgaagugaauaugga

SEQ ID NO: 57717 - RNA, 19 nt, Homo sapiens
  misc_RNA (1)...(19): siRNA sense strand
aaacuggagaugaauaaag

SEQ ID NO: 57718 - RNA, 19 nt, Homo sapiens
  misc_RNA (1)...(19): siRNA sense strand
uuacaucuucuuugggaaa

SEQ ID NO: 57719 - RNA, 19 nt, Homo sapiens
  misc_RNA (1)...(19): siRNA sense strand
cagagucgcacuaggaauc

SEQ ID NO: 57720 - RNA, 19 nt, Homo sapiens
  misc_RNA (1)...(19): siRNA sense strand
ccagcaacaugccauacgu

SEQ ID NO: 57721 - RNA, 19 nt, Homo sapiens
  misc_RNA (1)...(19): siRNA sense strand
ccuacuuucugaaugacaa

SEQ ID NO: 57722 - RNA, 19 nt, Homo sapiens
  misc_RNA (1)...(19): siRNA sense strand
cgacgcccacgguaacauu

SEQ ID NO: 57723 - RNA, 19 nt, Homo sapiens
  misc_RNA (1)...(19): siRNA sense strand
guaccagacaccuacuuuc

SEQ ID NO: 57724 - RNA, 19 nt, Homo sapiens
  misc_RNA (1)...(19): siRNA sense strand
cauggucuccgaagugaau

SEQ ID NO: 57725 - RNA, 19 nt, Homo sapiens
  misc_RNA (1)...(19): siRNA sense strand
cugcauguaugauggaucu

SEQ ID NO: 57726 - RNA, 19 nt, Homo sapiens
  misc_RNA (1)...(19): siRNA sense strand
ugucuaagaagguggaguu

SEQ ID NO: 57727 - RNA, 19 nt, Homo sapiens
  misc_RNA (1)...(19): siRNA sense strand
cccaucaccuuuucucuuu

SEQ ID NO: 57728 - RNA, 19 nt, Homo sapiens
  misc_RNA (1)...(19): siRNA sense strand
uaucugauggguugcuuug

SEQ ID NO: 57729 - RNA, 19 nt, Homo sapiens
  misc_RNA (1)...(19): siRNA sense strand
agacaccuacuuucugaau

SEQ ID NO: 57730 - RNA, 19 nt, Homo sapiens
  misc_RNA (1)...(19): siRNA sense strand
cugauggguugcuuugugu

SEQ ID NO: 57731 - RNA, 19 nt, Homo sapiens
  misc_RNA (1)...(19): siRNA sense strand
aaagagaaacauugguuac

SEQ ID NO: 57732 - RNA, 19 nt, Homo sapiens
  misc_RNA (1)...(19): siRNA sense strand
gcaccaaugaacccagcaa

SEQ ID NO: 57733 - RNA, 19 nt, Homo sapiens
  misc_RNA (1)...(19): siRNA sense strand
gcauguaugauggaucuuc

SEQ ID NO: 57734 - RNA, 19 nt, Homo sapiens
  misc_RNA (1)...(19): siRNA sense strand
ggacuccgaaucacaacca

SEQ ID NO: 57735 - RNA, 19 nt, Homo sapiens
  misc_RNA (1)...(19): siRNA sense strand
agagacaguggacagauug

SEQ ID NO: 57736 - RNA, 19 nt, Homo sapiens
  misc_RNA (1)...(19): siRNA sense strand
gccagagucgcacuaggaa

SEQ ID NO: 57737 - RNA, 19 nt, Homo sapiens
  misc_RNA (1)...(19): siRNA sense strand
ccagagugccaaugagaag

SEQ ID NO: 57738 - RNA, 19 nt, Homo sapiens
  misc_RNA (1)...(19): siRNA sense strand
uagcaaacaagaccagagu

SEQ ID NO: 57739 - RNA, 19 nt, Homo sapiens
  misc_RNA (1)...(19): siRNA sense strand
caacaagccuggagagaua

SEQ ID NO: 57740 - RNA, 19 nt, Homo sapiens
  misc_RNA (1)...(19): siRNA sense strand
gcacaaugcuagccuauga

SEQ ID NO: 57741 - RNA, 19 nt, Homo sapiens
  misc_RNA (1)...(19): siRNA sense strand
gauuauaccuugacaaugu

SEQ ID NO: 57742 - RNA, 19 nt, Homo sapiens
  misc_RNA (1)...(19): siRNA sense strand
gauaagaggcuguccuaua

SEQ ID NO: 57743 - RNA, 19 nt, Homo sapiens
  misc_RNA (1)...(19): siRNA sense strand
gagaaacauuggcuacuuu

SEQ ID NO: 57744 - RNA, 19 nt, Homo sapiens
  misc_RNA (1)...(19): siRNA sense strand
auaagaggcuguccuauaa

SEQ ID NO: 57745 - RNA, 19 nt, Homo sapiens
  misc_RNA (1)...(19): siRNA sense strand
aguaauaugucgcugguua

SEQ ID NO: 57746 - RNA, 19 nt, Homo sapiens
  misc_RNA (1)...(19): siRNA sense strand
auacacaacugaugacauu

SEQ ID NO: 57747 - RNA, 19 nt, Homo sapiens
  misc_RNA (1)...(19): siRNA sense strand
gcaucgauaugguuucuga

SEQ ID NO: 57748 - RNA, 19 nt, Homo sapiens
  misc_RNA (1)...(19): siRNA sense strand
ccacaguucucuauuguag

SEQ ID NO: 57749 - RNA, 19 nt, Homo sapiens
  misc_RNA (1)...(19): siRNA sense strand
ugaaggccauugacaugua

SEQ ID NO: 57750 - RNA, 19 nt, Homo sapiens
  misc_RNA (1)...(19): siRNA sense strand
ugacuugacugaugugaau

SEQ ID NO: 57751 - RNA, 19 nt, Homo sapiens
  misc_RNA (1)...(19): siRNA sense strand
ucauggcccuucuggaaua

SEQ ID NO: 57752 - RNA, 19 nt, Homo sapiens
  misc_RNA (1)...(19): siRNA sense strand
gaaaggcuaugacauucgu

SEQ ID NO: 57753 - RNA, 19 nt, Homo sapiens
  misc_RNA (1)...(19): siRNA sense strand
aaacauacaugccuuccau

SEQ ID NO: 57754 - RNA, 19 nt, Homo sapiens
  misc_RNA (1)...(19): siRNA sense strand
gagauaagaggcuguccua

SEQ ID NO: 57755 - RNA, 19 nt, Homo sapiens
  misc_RNA (1)...(19): siRNA sense strand
ggagguacccacuggauga

SEQ ID NO: 57756 - RNA, 19 nt, Homo sapiens
  misc_RNA (1)...(19): siRNA sense strand
ccuauuuccugaacgauaa

SEQ ID NO: 57757 - RNA, 19 nt, Homo sapiens
  misc_RNA (1)...(19): siRNA sense strand
gcuguccuauaauguaaua

SEQ ID NO: 57758 - RNA, 19 nt, Homo sapiens
  misc_RNA (1)...(19): siRNA sense strand
gguuaucccucagcuuuaa

SEQ ID NO: 57759 - RNA, 19 nt, Homo sapiens
  misc_RNA (1)...(19): siRNA sense strand
ucacaacuguccucacaau

SEQ ID NO: 57760 - RNA, 19 nt, Homo sapiens
  misc_RNA (1)...(19): siRNA sense strand
guuaagaaccgcaugauuc

SEQ ID NO: 57761 - RNA, 19 nt, Homo sapiens
  misc_RNA (1)...(19): siRNA sense strand
gaucgguggucccgcauau

SEQ ID NO: 57762 - RNA, 19 nt, Homo sapiens
  misc_RNA (1)...(19): siRNA sense strand
ucaaugacccuaguaauau

SEQ ID NO: 57763 - RNA, 19 nt, Homo sapiens
  misc_RNA (1)...(19): siRNA sense strand
caugagaacaucuuacuga

SEQ ID NO: 57764 - RNA, 19 nt, Homo sapiens
  misc_RNA (1)...(19): siRNA sense strand
acugagcacucucgagaua

SEQ ID NO: 57765 - RNA, 19 nt, Homo sapiens
  misc_RNA (1)...(19): siRNA sense strand
caaugacccuaguaauaug

SEQ ID NO: 57766 - RNA, 19 nt, Homo sapiens
  misc_RNA (1)...(19): siRNA sense strand
ugagcacucucgagauaaa

SEQ ID NO: 57767 - RNA, 19 nt, Homo sapiens
  misc_RNA (1)...(19): siRNA sense strand
ggaugaacauugacauugc

SEQ ID NO: 57768 - RNA, 19 nt, Homo sapiens
  misc_RNA (1)...(19): siRNA sense strand
gacaauguacuuucaacaa

SEQ ID NO: 57769 - RNA, 19 nt, Homo sapiens
  misc_RNA (1)...(19): siRNA sense strand
gaggcuguccuauaaugua

SEQ ID NO: 57770 - RNA, 19 nt, Homo sapiens
  misc_RNA (1)...(19): siRNA sense strand
ccugaaaggcuaugacauu

SEQ ID NO: 57771 - RNA, 19 nt, Homo sapiens
  misc_RNA (1)...(19): siRNA sense strand
aaucacaacuguccucaca

SEQ ID NO: 57772 - RNA, 19 nt, Homo sapiens
  misc_RNA (1)...(19): siRNA sense strand
cagguuaucccucagcuuu

SEQ ID NO: 57773 - RNA, 19 nt, Homo sapiens
  misc_RNA (1)...(19): siRNA sense strand
gaaauugagagcuauggau

SEQ ID NO: 57774 - RNA, 19 nt, Homo sapiens
  misc_RNA (1)...(19): siRNA sense strand
aaacugcaccuuggaaauu

SEQ ID NO: 57775 - RNA, 19 nt, Homo sapiens
  misc_RNA (1)...(19): siRNA sense strand
auaugucgcugguuaaaga

SEQ ID NO: 57776 - RNA, 19 nt, Homo sapiens
  misc_RNA (1)...(19): siRNA sense strand
uuaaagagacgguggauag

SEQ ID NO: 57777 - RNA, 19 nt, Homo sapiens
  misc_RNA (1)...(19): siRNA sense strand
aaagaaagcagcugagaag

SEQ ID NO: 57778 - RNA, 19 nt, Homo sapiens
  misc_RNA (1)...(19): siRNA sense strand
gacauugccagcaucgaua

SEQ ID NO: 57779 - RNA, 19 nt, Homo sapiens
  misc_RNA (1)...(19): siRNA sense strand
ucaacuacaucuucuuugg

SEQ ID NO: 57780 - RNA, 19 nt, Homo sapiens
  misc_RNA (1)...(19): siRNA sense strand
acaaacuuaucaccaagaa

SEQ ID NO: 57781 - RNA, 19 nt, Homo sapiens
  misc_RNA (1)...(19): siRNA sense strand
aaauugagagcuauggaua

SEQ ID NO: 57782 - RNA, 19 nt, Homo sapiens
  misc_RNA (1)...(19): siRNA sense strand
ugagagcuauggauacaca

SEQ ID NO: 57783 - RNA, 19 nt, Homo sapiens
  misc_RNA (1)...(19): siRNA sense strand
agagaaacauuggcuacuu

SEQ ID NO: 57784 - RNA, 19 nt, Homo sapiens
  misc_RNA (1)...(19): siRNA sense strand
gauaugguuucugaaguca

SEQ ID NO: 57785 - RNA, 19 nt, Homo sapiens
  misc_RNA (1)...(19): siRNA sense strand
agacgcgccucccaacuga

SEQ ID NO: 57786 - RNA, 19 nt, Homo sapiens
  misc_RNA (1)...(19): siRNA sense strand
ggaauaugcccuagucaac

SEQ ID NO: 57787 - RNA, 19 nt, Homo sapiens
  misc_RNA (1)...(19): siRNA sense strand
gugcacggagugacuguua

SEQ ID NO: 57788 - RNA, 19 nt, Homo sapiens
  misc_RNA (1)...(19): siRNA sense strand
gggaugaacauugacauug

SEQ ID NO: 57789 - RNA, 19 nt, Homo sapiens
  misc_RNA (1)...(19): siRNA sense strand
guaauaugucgcugguuaa

SEQ ID NO: 57790 - RNA, 19 nt, Homo sapiens
  misc_RNA (1)...(19): siRNA sense strand
gaaggccauugacauguac

SEQ ID NO: 57791 - RNA, 19 nt, Homo sapiens
  misc_RNA (1)...(19): siRNA sense strand
acaacuguccucacaauga

SEQ ID NO: 57792 - RNA, 19 nt, Homo sapiens
  misc_RNA (1)...(19): siRNA sense strand
gcaaggguggcauuaggaa

SEQ ID NO: 57793 - RNA, 19 nt, Homo sapiens
  misc_RNA (1)...(19): siRNA sense strand
aagaggcuguccuauaaug

SEQ ID NO: 57794 - RNA, 19 nt, Homo sapiens
  misc_RNA (1)...(19): siRNA sense strand
cgauaugguuucugaaguc

SEQ ID NO: 57795 - RNA, 19 nt, Homo sapiens
  misc_RNA (1)...(19): siRNA sense strand
acaauguacuuucaacaag

SEQ ID NO: 57796 - RNA, 19 nt, Homo sapiens
  misc_RNA (1)...(19): siRNA sense strand
gaaacauuggcuacuuuau

SEQ ID NO: 57797 - RNA, 19 nt, Homo sapiens
  misc_RNA (1)...(19): siRNA sense strand
agaaacauuggcuacuuua

SEQ ID NO: 57798 - RNA, 19 nt, Homo sapiens
  misc_RNA (1)...(19): siRNA sense strand
aauaaucgccgcugucugu

SEQ ID NO: 57799 - RNA, 19 nt, Homo sapiens
  misc_RNA (1)...(19): siRNA sense strand
caacuguccucacaaugac

SEQ ID NO: 57800 - RNA, 19 nt, Homo sapiens
  misc_RNA (1)...(19): siRNA sense strand
cauuaggaaucacaacugu

SEQ ID NO: 57801 - RNA, 19 nt, Homo sapiens
  misc_RNA (1)...(19): siRNA sense strand
cugaugacauugaguuuua

SEQ ID NO: 57802 - RNA, 19 nt, Homo sapiens
  misc_RNA (1)...(19): siRNA sense strand
gaacgauaagaagucauuu

SEQ ID NO: 57803 - RNA, 19 nt, Homo sapiens
  misc_RNA (1)...(19): siRNA sense strand
aaacauuggcuacuuuauc

SEQ ID NO: 57804 - RNA, 19 nt, Homo sapiens
  misc_RNA (1)...(19): siRNA sense strand
ggacucagaaucacaacca

SEQ ID NO: 57805 - RNA, 19 nt, Homo sapiens
  misc_RNA (1)...(19): siRNA sense strand
ccuuggaaauugagagcua

SEQ ID NO: 57806 - RNA, 19 nt, Homo sapiens
  misc_RNA (1)...(19): siRNA sense strand
ugaacgauaagaagucauu

SEQ ID NO: 57807 - RNA, 19 nt, Homo sapiens
  misc_RNA (1)...(19): siRNA sense strand
gcgccuggaugucaacaag

SEQ ID NO: 57808 - RNA, 19 nt, Homo sapiens
  misc_RNA (1)...(19): siRNA sense strand
ugggucuccuucuggauua

SEQ ID NO: 57809 - RNA, 19 nt, Homo sapiens
  misc_RNA (1)...(19): siRNA sense strand
uaacaggaguaacgaaaau

SEQ ID NO: 57810 - RNA, 19 nt, Homo sapiens
  misc_RNA (1)...(19): siRNA sense strand
acacaacugaugacauuga

SEQ ID NO: 57811 - RNA, 19 nt, Homo sapiens
  misc_RNA (1)...(19): siRNA sense strand
ggaaauugagagcuaugga

SEQ ID NO: 57812 - RNA, 19 nt, Homo sapiens
  misc_RNA (1)...(19): siRNA sense strand
uaugguuucugaagucaau

SEQ ID NO: 57813 - RNA, 19 nt, Homo sapiens
  misc_RNA (1)...(19): siRNA sense strand
gugcgcagagugucaauga

SEQ ID NO: 57814 - RNA, 19 nt, Homo sapiens
  misc_RNA (1)...(19): siRNA sense strand
cugaaaggcuaugacauuc

SEQ ID NO: 57815 - RNA, 19 nt, Homo sapiens
  misc_RNA (1)...(19): siRNA sense strand
ccauugacauguaccugau

SEQ ID NO: 57816 - RNA, 19 nt, Homo sapiens
  misc_RNA (1)...(19): siRNA sense strand
acaaugaccacaaucaaca

SEQ ID NO: 57817 - RNA, 19 nt, Homo sapiens
  misc_RNA (1)...(19): siRNA sense strand
ucacaaugaccacaaucaa

SEQ ID NO: 57818 - RNA, 19 nt, Homo sapiens
  misc_RNA (1)...(19): siRNA sense strand
aaacuugacucuggacaac

SEQ ID NO: 57819 - RNA, 19 nt, Homo sapiens
  misc_RNA (1)...(19): siRNA sense strand
aggcuguccuauaauguaa

SEQ ID NO: 57820 - RNA, 19 nt, Homo sapiens
  misc_RNA (1)...(19): siRNA sense strand
uuucugaagucaauaugga

SEQ ID NO: 57821 - RNA, 19 nt, Homo sapiens
  misc_RNA (1)...(19): siRNA sense strand
ugaugugaaugccauagau

SEQ ID NO: 57822 - RNA, 19 nt, Homo sapiens
  misc_RNA (1)...(19): siRNA sense strand
caccaucccugacuugacu

SEQ ID NO: 57823 - RNA, 19 nt, Homo sapiens
  misc_RNA (1)...(19): siRNA sense strand
cuuccacaguucucuauug

SEQ ID NO: 57824 - RNA, 19 nt, Homo sapiens
  misc_RNA (1)...(19): siRNA sense strand
gguacccacuggaugaaca

SEQ ID NO: 57825 - RNA, 19 nt, Homo sapiens
  misc_RNA (1)...(19): siRNA sense strand
gauggcaccguccuuuaug

SEQ ID NO: 57826 - RNA, 19 nt, Homo sapiens
  misc_RNA (1)...(19): siRNA sense strand
cggagugacuguuaagaac

SEQ ID NO: 57827 - RNA, 19 nt, Homo sapiens
  misc_RNA (1)...(19): siRNA sense strand
ucuucaacaucgucuauug

SEQ ID NO: 57828 - RNA, 19 nt, Homo sapiens
  misc_RNA (1)...(19): siRNA sense strand
guggauagacuccugaaag

SEQ ID NO: 57829 - RNA, 19 nt, Homo sapiens
  misc_RNA (1)...(19): siRNA sense strand
acuuuauccugcaaacaua

SEQ ID NO: 57830 - RNA, 19 nt, Homo sapiens
  misc_RNA (1)...(19): siRNA sense strand
uaauaugucgcugguuaaa

SEQ ID NO: 57831 - RNA, 19 nt, Homo sapiens
  misc_RNA (1)...(19): siRNA sense strand
uggauagacuccugaaagg

SEQ ID NO: 57832 - RNA, 19 nt, Homo sapiens
  misc_RNA (1)...(19): siRNA sense strand
uggcgaugauaaugcagua

SEQ ID NO: 57833 - RNA, 19 nt, Homo sapiens
  misc_RNA (1)...(19): siRNA sense strand
aagcuuaagagaaacauug

SEQ ID NO: 57834 - RNA, 19 nt, Homo sapiens
  misc_RNA (1)...(19): siRNA sense strand
ccgaaaugcucuggaacga

SEQ ID NO: 57835 - RNA, 19 nt, Homo sapiens
  misc_RNA (1)...(19): siRNA sense strand
gccuggaugucaacaagau

SEQ ID NO: 57836 - RNA, 19 nt, Homo sapiens
  misc_RNA (1)...(19): siRNA sense strand
gaauaugcccuagucaacu

SEQ ID NO: 57837 - RNA, 19 nt, Homo sapiens
  misc_RNA (1)...(19): siRNA sense strand
uuucauggcccuucuggaa

SEQ ID NO: 57838 - RNA, 19 nt, Homo sapiens
  misc_RNA (1)...(19): siRNA sense strand
aaaaugaaauggccacauc

SEQ ID NO: 57839 - RNA, 19 nt, Homo sapiens
  misc_RNA (1)...(19): siRNA sense strand
caacaagccuggagagaua

SEQ ID NO: 57840 - RNA, 19 nt, Homo sapiens
  misc_RNA (1)...(19): siRNA sense strand
gcacaaugcuagccuauga

SEQ ID NO: 57841 - RNA, 19 nt, Homo sapiens
  misc_RNA (1)...(19): siRNA sense strand
gauuauaccuugacaaugu

SEQ ID NO: 57842 - RNA, 19 nt, Homo sapiens
  misc_RNA (1)...(19): siRNA sense strand
gauaagaggcuguccuaua

SEQ ID NO: 57843 - RNA, 19 nt, Homo sapiens
  misc_RNA (1)...(19): siRNA sense strand
gagaaacauuggcuacuuu

SEQ ID NO: 57844 - RNA, 19 nt, Homo sapiens
  misc_RNA (1)...(19): siRNA sense strand
auaagaggcuguccuauaa

SEQ ID NO: 57845 - RNA, 19 nt, Homo sapiens
  misc_RNA (1)...(19): siRNA sense strand
aguaauaugucgcugguua

SEQ ID NO: 57846 - RNA, 19 nt, Homo sapiens
  misc_RNA (1)...(19): siRNA sense strand
auacacaacugaugacauu

SEQ ID NO: 57847 - RNA, 19 nt, Homo sapiens
  misc_RNA (1)...(19): siRNA sense strand
gcaucgauaugguuucuga

SEQ ID NO: 57848 - RNA, 19 nt, Homo sapiens
  misc_RNA (1)...(19): siRNA sense strand
ccacaguucucuauuguag

SEQ ID NO: 57849 - RNA, 19 nt, Homo sapiens
  misc_RNA (1)...(19): siRNA sense strand
ugaaggccauugacaugua

SEQ ID NO: 57850 - RNA, 19 nt, Homo sapiens
  misc_RNA (1)...(19): siRNA sense strand
ugacuugacugaugugaau

SEQ ID NO: 57851 - RNA, 19 nt, Homo sapiens
  misc_RNA (1)...(19): siRNA sense strand
ucauggcccuucuggaaua

SEQ ID NO: 57852 - RNA, 19 nt, Homo sapiens
  misc_RNA (1)...(19): siRNA sense strand
gaaaggcuaugacauucgu

SEQ ID NO: 57853 - RNA, 19 nt, Homo sapiens
  misc_RNA (1)...(19): siRNA sense strand
aaacauacaugccuuccau

SEQ ID NO: 57854 - RNA, 19 nt, Homo sapiens
  misc_RNA (1)...(19): siRNA sense strand
gagauaagaggcuguccua

SEQ ID NO: 57855 - RNA, 19 nt, Homo sapiens
  misc_RNA (1)...(19): siRNA sense strand
ggagguacccacuggauga

SEQ ID NO: 57856 - RNA, 19 nt, Homo sapiens
  misc_RNA (1)...(19): siRNA sense strand
ccuauuuccugaacgauaa

SEQ ID NO: 57857 - RNA, 19 nt, Homo sapiens
  misc_RNA (1)...(19): siRNA sense strand
gcuguccuauaauguaaua

SEQ ID NO: 57858 - RNA, 19 nt, Homo sapiens
  misc_RNA (1)...(19): siRNA sense strand
gguuaucccucagcuuuaa

SEQ ID NO: 57859 - RNA, 19 nt, Homo sapiens
  misc_RNA (1)...(19): siRNA sense strand
ucacaacuguccucacaau

SEQ ID NO: 57860 - RNA, 19 nt, Homo sapiens
  misc_RNA (1)...(19): siRNA sense strand
guuaagaaccgcaugauuc

SEQ ID NO: 57861 - RNA, 19 nt, Homo sapiens
  misc_RNA (1)...(19): siRNA sense strand
gaucgguggucccgcauau

SEQ ID NO: 57862 - RNA, 19 nt, Homo sapiens
  misc_RNA (1)...(19): siRNA sense strand
ucaaugacccuaguaauau

SEQ ID NO: 57863 - RNA, 19 nt, Homo sapiens
  misc_RNA (1)...(19): siRNA sense strand
caugagaacaucuuacuga

SEQ ID NO: 57864 - RNA, 19 nt, Homo sapiens
  misc_RNA (1)...(19): siRNA sense strand
acugagcacucucgagaua

SEQ ID NO: 57865 - RNA, 19 nt, Homo sapiens
  misc_RNA (1)...(19): siRNA sense strand
caaugacccuaguaauaug

SEQ ID NO: 57866 - RNA, 19 nt, Homo sapiens
  misc_RNA (1)...(19): siRNA sense strand
ugagcacucucgagauaaa

SEQ ID NO: 57867 - RNA, 19 nt, Homo sapiens
  misc_RNA (1)...(19): siRNA sense strand
ggaugaacauugacauugc

SEQ ID NO: 57868 - RNA, 19 nt, Homo sapiens
  misc_RNA (1)...(19): siRNA sense strand
gacaauguacuuucaacaa

SEQ ID NO: 57869 - RNA, 19 nt, Homo sapiens
  misc_RNA (1)...(19): siRNA sense strand
gaggcuguccuauaaugua

SEQ ID NO: 57870 - RNA, 19 nt, Homo sapiens
  misc_RNA (1)...(19): siRNA sense strand
ccugaaaggcuaugacauu

SEQ ID NO: 57871 - RNA, 19 nt, Homo sapiens
  misc_RNA (1)...(19): siRNA sense strand
aaucacaacuguccucaca

SEQ ID NO: 57872 - RNA, 19 nt, Homo sapiens
  misc_RNA (1)...(19): siRNA sense strand
cagguuaucccucagcuuu

SEQ ID NO: 57873 - RNA, 19 nt, Homo sapiens
  misc_RNA (1)...(19): siRNA sense strand
gaaauugagagcuauggau

SEQ ID NO: 57874 - RNA, 19 nt, Homo sapiens
  misc_RNA (1)...(19): siRNA sense strand
aaacugcaccuuggaaauu

SEQ ID NO: 57875 - RNA, 19 nt, Homo sapiens
  misc_RNA (1)...(19): siRNA sense strand
auaugucgcugguuaaaga

SEQ ID NO: 57876 - RNA, 19 nt, Homo sapiens
  misc_RNA (1)...(19): siRNA sense strand
uuaaagagacgguggauag

SEQ ID NO: 57877 - RNA, 19 nt, Homo sapiens
  misc_RNA (1)...(19): siRNA sense strand
aaagaaagcagcugagaag

SEQ ID NO: 57878 - RNA, 19 nt, Homo sapiens
  misc_RNA (1)...(19): siRNA sense strand
gacauugccagcaucgaua

SEQ ID NO: 57879 - RNA, 19 nt, Homo sapiens
  misc_RNA (1)...(19): siRNA sense strand
ucaacuacaucuucuuugg

SEQ ID NO: 57880 - RNA, 19 nt, Homo sapiens
  misc_RNA (1)...(19): siRNA sense strand
acaaacuuaucaccaagaa

SEQ ID NO: 57881 - RNA, 19 nt, Homo sapiens
  misc_RNA (1)...(19): siRNA sense strand
aaauugagagcuauggaua

SEQ ID NO: 57882 - RNA, 19 nt, Homo sapiens
  misc_RNA (1)...(19): siRNA sense strand
ugagagcuauggauacaca

SEQ ID NO: 57883 - RNA, 19 nt, Homo sapiens
  misc_RNA (1)...(19): siRNA sense strand
agagaaacauuggcuacuu

SEQ ID NO: 57884 - RNA, 19 nt, Homo sapiens
  misc_RNA (1)...(19): siRNA sense strand
gauaugguuucugaaguca

SEQ ID NO: 57885 - RNA, 19 nt, Homo sapiens
  misc_RNA (1)...(19): siRNA sense strand
agacgcgccucccaacuga

SEQ ID NO: 57886 - RNA, 19 nt, Homo sapiens
  misc_RNA (1)...(19): siRNA sense strand
ggaauaugcccuagucaac

SEQ ID NO: 57887 - RNA, 19 nt, Homo sapiens
  misc_RNA (1)...(19): siRNA sense strand
gugcacggagugacuguua

SEQ ID NO: 57888 - RNA, 19 nt, Homo sapiens
  misc_RNA (1)...(19): siRNA sense strand
gggaugaacauugacauug

SEQ ID NO: 57889 - RNA, 19 nt, Homo sapiens
  misc_RNA (1)...(19): siRNA sense strand
guaauaugucgcugguuaa

SEQ ID NO: 57890 - RNA, 19 nt, Homo sapiens
  misc_RNA (1)...(19): siRNA sense strand
gaaggccauugacauguac

SEQ ID NO: 57891 - RNA, 19 nt, Homo sapiens
  misc_RNA (1)...(19): siRNA sense strand
acaacuguccucacaauga

SEQ ID NO: 57892 - RNA, 19 nt, Homo sapiens
  misc_RNA (1)...(19): siRNA sense strand
gcaaggguggcauuaggaa

SEQ ID NO: 57893 - RNA, 19 nt, Homo sapiens
  misc_RNA (1)...(19): siRNA sense strand
aagaggcuguccuauaaug

SEQ ID NO: 57894 - RNA, 19 nt, Homo sapiens
  misc_RNA (1)...(19): siRNA sense strand
cgauaugguuucugaaguc

SEQ ID NO: 57895 - RNA, 19 nt, Homo sapiens
  misc_RNA (1)...(19): siRNA sense strand
acaauguacuuucaacaag

SEQ ID NO: 57896 - RNA, 19 nt, Homo sapiens
  misc_RNA (1)...(19): siRNA sense strand
gaaacauuggcuacuuuau

SEQ ID NO: 57897 - RNA, 19 nt, Homo sapiens
  misc_RNA (1)...(19): siRNA sense strand
agaaacauuggcuacuuua

SEQ ID NO: 57898 - RNA, 19 nt, Homo sapiens
  misc_RNA (1)...(19): siRNA sense strand
aauaaucgccgcugucugu

SEQ ID NO: 57899 - RNA, 19 nt, Homo sapiens
  misc_RNA (1)...(19): siRNA sense strand
caacuguccucacaaugac

SEQ ID NO: 57900 - RNA, 19 nt, Homo sapiens
  misc_RNA (1)...(19): siRNA sense strand
cauuaggaaucacaacugu

SEQ ID NO: 57901 - RNA, 19 nt, Homo sapiens
  misc_RNA (1)...(19): siRNA sense strand
cugaugacauugaguuuua

SEQ ID NO: 57902 - RNA, 19 nt, Homo sapiens
  misc_RNA (1)...(19): siRNA sense strand
gaacgauaagaagucauuu

SEQ ID NO: 57903 - RNA, 19 nt, Homo sapiens
  misc_RNA (1)...(19): siRNA sense strand
aaacauuggcuacuuuauc

SEQ ID NO: 57904 - RNA, 19 nt, Homo sapiens
  misc_RNA (1)...(19): siRNA sense strand
ggacucagaaucacaacca

SEQ ID NO: 57905 - RNA, 19 nt, Homo sapiens
  misc_RNA (1)...(19): siRNA sense strand
ccuuggaaauugagagcua

SEQ ID NO: 57906 - RNA, 19 nt, Homo sapiens
  misc_RNA (1)...(19): siRNA sense strand
ugaacgauaagaagucauu

SEQ ID NO: 57907 - RNA, 19 nt, Homo sapiens
  misc_RNA (1)...(19): siRNA sense strand
gcgccuggaugucaacaag

SEQ ID NO: 57908 - RNA, 19 nt, Homo sapiens
  misc_RNA (1)...(19): siRNA sense strand
ugggucuccuucuggauua

SEQ ID NO: 57909 - RNA, 19 nt, Homo sapiens
  misc_RNA (1)...(19): siRNA sense strand
uaacaggaguaacgaaaau

SEQ ID NO: 57910 - RNA, 19 nt, Homo sapiens
  misc_RNA (1)...(19): siRNA sense strand
acacaacugaugacauuga

SEQ ID NO: 57911 - RNA, 19 nt, Homo sapiens
  misc_RNA (1)...(19): siRNA sense strand
ggaaauugagagcuaugga

SEQ ID NO: 57912 - RNA, 19 nt, Homo sapiens
  misc_RNA (1)...(19): siRNA sense strand
uaugguuucugaagucaau

SEQ ID NO: 57913 - RNA, 19 nt, Homo sapiens
  misc_RNA (1)...(19): siRNA sense strand
gugcgcagagugucaauga

SEQ ID NO: 57914 - RNA, 19 nt, Homo sapiens
  misc_RNA (1)...(19): siRNA sense strand
cugaaaggcuaugacauuc

SEQ ID NO: 57915 - RNA, 19 nt, Homo sapiens
  misc_RNA (1)...(19): siRNA sense strand
ccauugacauguaccugau

SEQ ID NO: 57916 - RNA, 19 nt, Homo sapiens
  misc_RNA (1)...(19): siRNA sense strand
acaaugaccacaaucaaca

SEQ ID NO: 57917 - RNA, 19 nt, Homo sapiens
  misc_RNA (1)...(19): siRNA sense strand
ucacaaugaccacaaucaa

SEQ ID NO: 57918 - RNA, 19 nt, Homo sapiens
  misc_RNA (1)...(19): siRNA sense strand
aaacuugacucuggacaac

SEQ ID NO: 57919 - RNA, 19 nt, Homo sapiens
  misc_RNA (1)...(19): siRNA sense strand
aggcuguccuauaauguaa

SEQ ID NO: 57920 - RNA, 19 nt, Homo sapiens
  misc_RNA (1)...(19): siRNA sense strand
uuucugaagucaauaugga

SEQ ID NO: 57921 - RNA, 19 nt, Homo sapiens
  misc_RNA (1)...(19): siRNA sense strand
ugaugugaaugccauagau

SEQ ID NO: 57922 - RNA, 19 nt, Homo sapiens
  misc_RNA (1)...(19): siRNA sense strand
caccaucccugacuugacu

SEQ ID NO: 57923 - RNA, 19 nt, Homo sapiens
  misc_RNA (1)...(19): siRNA sense strand
cuuccacaguucucuauug

SEQ ID NO: 57924 - RNA, 19 nt, Homo sapiens
  misc_RNA (1)...(19): siRNA sense strand
gguacccacuggaugaaca

SEQ ID NO: 57925 - RNA, 19 nt, Homo sapiens
  misc_RNA (1)...(19): siRNA sense strand
gauggcaccguccuuuaug

SEQ ID NO: 57926 - RNA, 19 nt, Homo sapiens
  misc_RNA (1)...(19): siRNA sense strand
cggagugacuguuaagaac

SEQ ID NO: 57927 - RNA, 19 nt, Homo sapiens
  misc_RNA (1)...(19): siRNA sense strand
ucuucaacaucgucuauug

SEQ ID NO: 57928 - RNA, 19 nt, Homo sapiens
  misc_RNA (1)...(19): siRNA sense strand
guggauagacuccugaaag

SEQ ID NO: 57929 - RNA, 19 nt, Homo sapiens
  misc_RNA (1)...(19): siRNA sense strand
acuuuauccugcaaacaua

SEQ ID NO: 57930 - RNA, 19 nt, Homo sapiens
  misc_RNA (1)...(19): siRNA sense strand
uaauaugucgcugguuaaa

SEQ ID NO: 57931 - RNA, 19 nt, Homo sapiens
  misc_RNA (1)...(19): siRNA sense strand
uggauagacuccugaaagg

SEQ ID NO: 57932 - RNA, 19 nt, Homo sapiens
  misc_RNA (1)...(19): siRNA sense strand
uggcgaugauaaugcagua

SEQ ID NO: 57933 - RNA, 19 nt, Homo sapiens
  misc_RNA (1)...(19): siRNA sense strand
aagcuuaagagaaacauug

SEQ ID NO: 57934 - RNA, 19 nt, Homo sapiens
  misc_RNA (1)...(19): siRNA sense strand
ccgaaaugcucuggaacga

SEQ ID NO: 57935 - RNA, 19 nt, Homo sapiens
  misc_RNA (1)...(19): siRNA sense strand
gccuggaugucaacaagau

SEQ ID NO: 57936 - RNA, 19 nt, Homo sapiens
  misc_RNA (1)...(19): siRNA sense strand
gaauaugcccuagucaacu

SEQ ID NO: 57937 - RNA, 19 nt, Homo sapiens
  misc_RNA (1)...(19): siRNA sense strand
uuucauggcccuucuggaa

SEQ ID NO: 57938 - RNA, 19 nt, Homo sapiens
  misc_RNA (1)...(19): siRNA sense strand
aaaaugaaauggccacauc

SEQ ID NO: 57939 - RNA, 19 nt, Homo sapiens
  misc_RNA (1)...(19): siRNA sense strand
caacauggauuauaccuua

SEQ ID NO: 57940 - RNA, 19 nt, Homo sapiens
  misc_RNA (1)...(19): siRNA sense strand
gaacugcacucuggaaauu

SEQ ID NO: 57941 - RNA, 19 nt, Homo sapiens
  misc_RNA (1)...(19): siRNA sense strand
ucacugagcuuucgguuga

SEQ ID NO: 57942 - RNA, 19 nt, Homo sapiens
  misc_RNA (1)...(19): siRNA sense strand
gaaauauucuguugacauc

SEQ ID NO: 57943 - RNA, 19 nt, Homo sapiens
  misc_RNA (1)...(19): siRNA sense strand
gauuauaccuuaaccaugu

SEQ ID NO: 57944 - RNA, 19 nt, Homo sapiens
  misc_RNA (1)...(19): siRNA sense strand
caacaauauuggagagaua

SEQ ID NO: 57945 - RNA, 19 nt, Homo sapiens
  misc_RNA (1)...(19): siRNA sense strand
ggauugagcucccgcaguu

SEQ ID NO: 57946 - RNA, 19 nt, Homo sapiens
  misc_RNA (1)...(19): siRNA sense strand
gaacauguccuuugugaag

SEQ ID NO: 57947 - RNA, 19 nt, Homo sapiens
  misc_RNA (1)...(19): siRNA sense strand
gaacauuggauacuucauu

SEQ ID NO: 57948 - RNA, 19 nt, Homo sapiens
  misc_RNA (1)...(19): siRNA sense strand
gggaacauguccuuuguga

SEQ ID NO: 57949 - RNA, 19 nt, Homo sapiens
  misc_RNA (1)...(19): siRNA sense strand
ugacaucgcuggaaguuca

SEQ ID NO: 57950 - RNA, 19 nt, Homo sapiens
  misc_RNA (1)...(19): siRNA sense strand
gaagucaacauggauuaua

SEQ ID NO: 57951 - RNA, 19 nt, Homo sapiens
  misc_RNA (1)...(19): siRNA sense strand
agacuuauaugcccucuau

SEQ ID NO: 57952 - RNA, 19 nt, Homo sapiens
  misc_RNA (1)...(19): siRNA sense strand
uaccaggaauucagcaaua

SEQ ID NO: 57953 - RNA, 19 nt, Homo sapiens
  misc_RNA (1)...(19): siRNA sense strand
gaauucagcaauauccuuu

SEQ ID NO: 57954 - RNA, 19 nt, Homo sapiens
  misc_RNA (1)...(19): siRNA sense strand
gcuguacuauguuaacuga

SEQ ID NO: 57955 - RNA, 19 nt, Homo sapiens
  misc_RNA (1)...(19): siRNA sense strand
agaagaagcuugcagaaaa

SEQ ID NO: 57956 - RNA, 19 nt, Homo sapiens
  misc_RNA (1)...(19): siRNA sense strand
ugauggaccucaggagaua

SEQ ID NO: 57957 - RNA, 19 nt, Homo sapiens
  misc_RNA (1)...(19): siRNA sense strand
gaggaacauuggauacuuc

SEQ ID NO: 57958 - RNA, 19 nt, Homo sapiens
  misc_RNA (1)...(19): siRNA sense strand
cgacaugguuuccgaaguc

SEQ ID NO: 57959 - RNA, 19 nt, Homo sapiens
  misc_RNA (1)...(19): siRNA sense strand
gcccgacacauauuucuua

SEQ ID NO: 57960 - RNA, 19 nt, Homo sapiens
  misc_RNA (1)...(19): siRNA sense strand
ggaaauauucuguugacau

SEQ ID NO: 57961 - RNA, 19 nt, Homo sapiens
  misc_RNA (1)...(19): siRNA sense strand
guugaaaggcuacgacauu

SEQ ID NO: 57962 - RNA, 19 nt, Homo sapiens
  misc_RNA (1)...(19): siRNA sense strand
ccauugacauguaccuuau

SEQ ID NO: 57963 - RNA, 19 nt, Homo sapiens
  misc_RNA (1)...(19): siRNA sense strand
gguggaugcucauggaaau

SEQ ID NO: 57964 - RNA, 19 nt, Homo sapiens
  misc_RNA (1)...(19): siRNA sense strand
caacugugcugacaaugac

SEQ ID NO: 57965 - RNA, 19 nt, Homo sapiens
  misc_RNA (1)...(19): siRNA sense strand
cggaugacauugaguuuua

SEQ ID NO: 57966 - RNA, 19 nt, Homo sapiens
  misc_RNA (1)...(19): siRNA sense strand
cuucacagcucaaaauuaa

SEQ ID NO: 57967 - RNA, 19 nt, Homo sapiens
  misc_RNA (1)...(19): siRNA sense strand
ucauggaaauauucuguug

SEQ ID NO: 57968 - RNA, 19 nt, Homo sapiens
  misc_RNA (1)...(19): siRNA sense strand
gccauugacauguaccuua

SEQ ID NO: 57969 - RNA, 19 nt, Homo sapiens
  misc_RNA (1)...(19): siRNA sense strand
caaaauccccuaugucaaa

SEQ ID NO: 57970 - RNA, 19 nt, Homo sapiens
  misc_RNA (1)...(19): siRNA sense strand
ugaagaggaacauuggaua

SEQ ID NO: 57971 - RNA, 19 nt, Homo sapiens
  misc_RNA (1)...(19): siRNA sense strand
aagaaugaccguucaaaga

SEQ ID NO: 57972 - RNA, 19 nt, Homo sapiens
  misc_RNA (1)...(19): siRNA sense strand
gcagaagaagcuugcagaa

SEQ ID NO: 57973 - RNA, 19 nt, Homo sapiens
  misc_RNA (1)...(19): siRNA sense strand
gcacaagaagacccaucua

SEQ ID NO: 57974 - RNA, 19 nt, Homo sapiens
  misc_RNA (1)...(19): siRNA sense strand
caaagaaugaccguucaaa

SEQ ID NO: 57975 - RNA, 19 nt, Homo sapiens
  misc_RNA (1)...(19): siRNA sense strand
cgucuggucucgaggaaug

SEQ ID NO: 57976 - RNA, 19 nt, Homo sapiens
  misc_RNA (1)...(19): siRNA sense strand
gcaauauccuuugacaacu

SEQ ID NO: 57977 - RNA, 19 nt, Homo sapiens
  misc_RNA (1)...(19): siRNA sense strand
ggcaaagaaugaccguuca

SEQ ID NO: 57978 - RNA, 19 nt, Homo sapiens
  misc_RNA (1)...(19): siRNA sense strand
gaagaggaacauuggauac

SEQ ID NO: 57979 - RNA, 19 nt, Homo sapiens
  misc_RNA (1)...(19): siRNA sense strand
cuacgacauucgccuaaga

SEQ ID NO: 57980 - RNA, 19 nt, Homo sapiens
  misc_RNA (1)...(19): siRNA sense strand
ggaugcucauggaaauauu

SEQ ID NO: 57981 - RNA, 19 nt, Homo sapiens
  misc_RNA (1)...(19): siRNA sense strand
ugaaugccauagacagaug

SEQ ID NO: 57982 - RNA, 19 nt, Homo sapiens
  misc_RNA (1)...(19): siRNA sense strand
acagaagccucccgcacaa

SEQ ID NO: 57983 - RNA, 19 nt, Homo sapiens
  misc_RNA (1)...(19): siRNA sense strand
uggacaagcuguugaaagg

SEQ ID NO: 57984 - RNA, 19 nt, Homo sapiens
  misc_RNA (1)...(19): siRNA sense strand
gagaagggcaugggcgauu

SEQ ID NO: 57985 - RNA, 19 nt, Homo sapiens
  misc_RNA (1)...(19): siRNA sense strand
ggaauucagcaauauccuu

SEQ ID NO: 57986 - RNA, 19 nt, Homo sapiens
  misc_RNA (1)...(19): siRNA sense strand
cagaagaagcuugcagaaa

SEQ ID NO: 57987 - RNA, 19 nt, Homo sapiens
  misc_RNA (1)...(19): siRNA sense strand
gacagcagcaugcaugaug

SEQ ID NO: 57988 - RNA, 19 nt, Homo sapiens
  misc_RNA (1)...(19): siRNA sense strand
uaccugaucuaaccgaugu

SEQ ID NO: 57989 - RNA, 19 nt, Homo sapiens
  misc_RNA (1)...(19): siRNA sense strand
ugaaggagacgguggacaa

SEQ ID NO: 57990 - RNA, 19 nt, Homo sapiens
  misc_RNA (1)...(19): siRNA sense strand
cagccaaggcaaagaauga

SEQ ID NO: 57991 - RNA, 19 nt, Homo sapiens
  misc_RNA (1)...(19): siRNA sense strand
ccuucuggaucaauuauga

SEQ ID NO: 57992 - RNA, 19 nt, Homo sapiens
  misc_RNA (1)...(19): siRNA sense strand
uuuacuggcuguacuaugu

SEQ ID NO: 57993 - RNA, 19 nt, Homo sapiens
  misc_RNA (1)...(19): siRNA sense strand
uaaaauaccugaucuaacc

SEQ ID NO: 57994 - RNA, 19 nt, Homo sapiens
  misc_RNA (1)...(19): siRNA sense strand
ucagcaauauccuuugaca

SEQ ID NO: 57995 - RNA, 19 nt, Homo sapiens
  misc_RNA (1)...(19): siRNA sense strand
gaacgaucccgggaacaug

SEQ ID NO: 57996 - RNA, 19 nt, Homo sapiens
  misc_RNA (1)...(19): siRNA sense strand
guucaaagagcgaaagcaa

SEQ ID NO: 57997 - RNA, 19 nt, Homo sapiens
  misc_RNA (1)...(19): siRNA sense strand
gcaaagaaugaccguucaa

SEQ ID NO: 57998 - RNA, 19 nt, Homo sapiens
  misc_RNA (1)...(19): siRNA sense strand
gaagaagcuugcagaaaag

SEQ ID NO: 57999 - RNA, 19 nt, Homo sapiens
  misc_RNA (1)...(19): siRNA sense strand
ccacggaugacauugaguu

SEQ ID NO: 58000 - RNA, 19 nt, Homo sapiens
  misc_RNA (1)...(19): siRNA sense strand
caaagccauugacauguac

SEQ ID NO: 58001 - RNA, 19 nt, Homo sapiens
  misc_RNA (1)...(19): siRNA sense strand
gugcauggagugacaguga

SEQ ID NO: 58002 - RNA, 19 nt, Homo sapiens
  misc_RNA (1)...(19): siRNA sense strand
caauauccuuugacaacuc

SEQ ID NO: 58003 - RNA, 19 nt, Homo sapiens
  misc_RNA (1)...(19): siRNA sense strand
agaggaacauuggauacuu

SEQ ID NO: 58004 - RNA, 19 nt, Homo sapiens
  misc_RNA (1)...(19): siRNA sense strand
gaucguguuuccauucacu

SEQ ID NO: 58005 - RNA, 19 nt, Homo sapiens
  misc_RNA (1)...(19): siRNA sense strand
ccaggaucguguuuccauu

SEQ ID NO: 58006 - RNA, 19 nt, Homo sapiens
  misc_RNA (1)...(19): siRNA sense strand
ugaugcaucugcugcuaga

SEQ ID NO: 58007 - RNA, 19 nt, Homo sapiens
  misc_RNA (1)...(19): siRNA sense strand
uaugcccucuauacugaua

SEQ ID NO: 58008 - RNA, 19 nt, Homo sapiens
  misc_RNA (1)...(19): siRNA sense strand
gcucauggaaauauucugu

SEQ ID NO: 58009 - RNA, 19 nt, Homo sapiens
  misc_RNA (1)...(19): siRNA sense strand
ggaguaugccuuugucaac

SEQ ID NO: 58010 - RNA, 19 nt, Homo sapiens
  misc_RNA (1)...(19): siRNA sense strand
caaccucacgcuugacaau

SEQ ID NO: 58011 - RNA, 19 nt, Homo sapiens
  misc_RNA (1)...(19): siRNA sense strand
gaucuaaccgaugugaaug

SEQ ID NO: 58012 - RNA, 19 nt, Homo sapiens
  misc_RNA (1)...(19): siRNA sense strand
ggaauccaguacaggaaac

SEQ ID NO: 58013 - RNA, 19 nt, Homo sapiens
  misc_RNA (1)...(19): siRNA sense strand
cgcuggaaguucacaauga

SEQ ID NO: 58014 - RNA, 19 nt, Homo sapiens
  misc_RNA (1)...(19): siRNA sense strand
ucaacaauauuggagagau

SEQ ID NO: 58015 - RNA, 19 nt, Homo sapiens
  misc_RNA (1)...(19): siRNA sense strand
gcauggagugacagugaaa

SEQ ID NO: 58016 - RNA, 19 nt, Homo sapiens
  misc_RNA (1)...(19): siRNA sense strand
ccgaagucaacauggauua

SEQ ID NO: 58017 - RNA, 19 nt, Homo sapiens
  misc_RNA (1)...(19): siRNA sense strand
ccucuauacugauaacgau

SEQ ID NO: 58018 - RNA, 19 nt, Homo sapiens
  misc_RNA (1)...(19): siRNA sense strand
ccgggaacauguccuuugu

SEQ ID NO: 58019 - RNA, 19 nt, Homo sapiens
  misc_RNA (1)...(19): siRNA sense strand
cuacaccacggaugacauu

SEQ ID NO: 58020 - RNA, 19 nt, Homo sapiens
  misc_RNA (1)...(19): siRNA sense strand
uaugaugcaucugcugcua

SEQ ID NO: 58021 - RNA, 19 nt, Homo sapiens
  misc_RNA (1)...(19): siRNA sense strand
gaagccucccgcacaagaa

SEQ ID NO: 58022 - RNA, 19 nt, Homo sapiens
  misc_RNA (1)...(19): siRNA sense strand
aguaugccuuugucaacua

SEQ ID NO: 58023 - RNA, 19 nt, Homo sapiens
  misc_RNA (1)...(19): siRNA sense strand
gaguaugccuuugucaacu

SEQ ID NO: 58024 - RNA, 19 nt, Homo sapiens
  misc_RNA (1)...(19): siRNA sense strand
cccgacacauauuucuuaa

SEQ ID NO: 58025 - RNA, 19 nt, Homo sapiens
  misc_RNA (1)...(19): siRNA sense strand
uacuggcuguacuauguua

SEQ ID NO: 58026 - RNA, 19 nt, Homo sapiens
  misc_RNA (1)...(19): siRNA sense strand
acaacugugcugacaauga

SEQ ID NO: 58027 - RNA, 19 nt, Homo sapiens
  misc_RNA (1)...(19): siRNA sense strand
aacauuggauacuucauuc

SEQ ID NO: 58028 - RNA, 19 nt, Homo sapiens
  misc_RNA (1)...(19): siRNA sense strand
ucuggaaauugaaagcuau

SEQ ID NO: 58029 - RNA, 19 nt, Homo sapiens
  misc_RNA (1)...(19): siRNA sense strand
agaaugaccguucaaagag

SEQ ID NO: 58030 - RNA, 19 nt, Homo sapiens
  misc_RNA (1)...(19): siRNA sense strand
agacagccaaggcaaagaa

SEQ ID NO: 58031 - RNA, 19 nt, Homo sapiens
  misc_RNA (1)...(19): siRNA sense strand
cgggagaccuugcccaaaa

SEQ ID NO: 58032 - RNA, 19 nt, Homo sapiens
  misc_RNA (1)...(19): siRNA sense strand
ggauacuucauucuucaga

SEQ ID NO: 58033 - RNA, 19 nt, Homo sapiens
  misc_RNA (1)...(19): siRNA sense strand
acuucauucuucagacuua

SEQ ID NO: 58034 - RNA, 19 nt, Homo sapiens
  misc_RNA (1)...(19): siRNA sense strand
acugcacucuggaaauuga

SEQ ID NO: 58035 - RNA, 19 nt, Homo sapiens
  misc_RNA (1)...(19): siRNA sense strand
auucagcaauauccuuuga

SEQ ID NO: 58036 - RNA, 19 nt, Homo sapiens
  misc_RNA (1)...(19): siRNA sense strand
caacuacauuuucuuugga

SEQ ID NO: 58037 - RNA, 19 nt, Homo sapiens
  misc_RNA (1)...(19): siRNA sense strand
uugaaaggcuacgacauuc

SEQ ID NO: 58038 - RNA, 19 nt, Homo sapiens
  misc_RNA (1)...(19): siRNA sense strand
gacaugguuuccgaaguca

SEQ ID NO: 58039 - RNA, 19 nt, Homo sapiens
  misc_RNA (1)...(19): siRNA sense strand
caacauggauuauaccuua

SEQ ID NO: 58040 - RNA, 19 nt, Homo sapiens
  misc_RNA (1)...(19): siRNA sense strand
gaacugcacucuggaaauu

SEQ ID NO: 58041 - RNA, 19 nt, Homo sapiens
  misc_RNA (1)...(19): siRNA sense strand
ucacugagcuuucgguuga

SEQ ID NO: 58042 - RNA, 19 nt, Homo sapiens
  misc_RNA (1)...(19): siRNA sense strand
gaaauauucuguugacauc

SEQ ID NO: 58043 - RNA, 19 nt, Homo sapiens
  misc_RNA (1)...(19): siRNA sense strand
gauuauaccuuaaccaugu

SEQ ID NO: 58044 - RNA, 19 nt, Homo sapiens
  misc_RNA (1)...(19): siRNA sense strand
caacaauauuggagagaua

SEQ ID NO: 58045 - RNA, 19 nt, Homo sapiens
  misc_RNA (1)...(19): siRNA sense strand
ggauugagcucccgcaguu

SEQ ID NO: 58046 - RNA, 19 nt, Homo sapiens
  misc_RNA (1)...(19): siRNA sense strand
gaacauguccuuugugaag

SEQ ID NO: 58047 - RNA, 19 nt, Homo sapiens
  misc_RNA (1)...(19): siRNA sense strand
gaacauuggauacuucauu

SEQ ID NO: 58048 - RNA, 19 nt, Homo sapiens
  misc_RNA (1)...(19): siRNA sense strand
gggaacauguccuuuguga

SEQ ID NO: 58049 - RNA, 19 nt, Homo sapiens
  misc_RNA (1)...(19): siRNA sense strand
ugacaucgcuggaaguuca

SEQ ID NO: 58050 - RNA, 19 nt, Homo sapiens
  misc_RNA (1)...(19): siRNA sense strand
gaagucaacauggauuaua

SEQ ID NO: 58051 - RNA, 19 nt, Homo sapiens
  misc_RNA (1)...(19): siRNA sense strand
agacuuauaugcccucuau

SEQ ID NO: 58052 - RNA, 19 nt, Homo sapiens
  misc_RNA (1)...(19): siRNA sense strand
uaccaggaauucagcaaua

SEQ ID NO: 58053 - RNA, 19 nt, Homo sapiens
  misc_RNA (1)...(19): siRNA sense strand
gaauucagcaauauccuuu

SEQ ID NO: 58054 - RNA, 19 nt, Homo sapiens
  misc_RNA (1)...(19): siRNA sense strand
gcuguacuauguuaacuga

SEQ ID NO: 58055 - RNA, 19 nt, Homo sapiens
  misc_RNA (1)...(19): siRNA sense strand
agaagaagcuugcagaaaa

SEQ ID NO: 58056 - RNA, 19 nt, Homo sapiens
  misc_RNA (1)...(19): siRNA sense strand
ugauggaccucaggagaua

SEQ ID NO: 58057 - RNA, 19 nt, Homo sapiens
  misc_RNA (1)...(19): siRNA sense strand
gaggaacauuggauacuuc

SEQ ID NO: 58058 - RNA, 19 nt, Homo sapiens
  misc_RNA (1)...(19): siRNA sense strand
cgacaugguuuccgaaguc

SEQ ID NO: 58059 - RNA, 19 nt, Homo sapiens
  misc_RNA (1)...(19): siRNA sense strand
gcccgacacauauuucuua

SEQ ID NO: 58060 - RNA, 19 nt, Homo sapiens
  misc_RNA (1)...(19): siRNA sense strand
ggaaauauucuguugacau

SEQ ID NO: 58061 - RNA, 19 nt, Homo sapiens
  misc_RNA (1)...(19): siRNA sense strand
guugaaaggcuacgacauu

SEQ ID NO: 58062 - RNA, 19 nt, Homo sapiens
  misc_RNA (1)...(19): siRNA sense strand
ccauugacauguaccuuau

SEQ ID NO: 58063 - RNA, 19 nt, Homo sapiens
  misc_RNA (1)...(19): siRNA sense strand
gguggaugcucauggaaau

SEQ ID NO: 58064 - RNA, 19 nt, Homo sapiens
  misc_RNA (1)...(19): siRNA sense strand
caacugugcugacaaugac

SEQ ID NO: 58065 - RNA, 19 nt, Homo sapiens
  misc_RNA (1)...(19): siRNA sense strand
cggaugacauugaguuuua

SEQ ID NO: 58066 - RNA, 19 nt, Homo sapiens
  misc_RNA (1)...(19): siRNA sense strand
cuucacagcucaaaauuaa

SEQ ID NO: 58067 - RNA, 19 nt, Homo sapiens
  misc_RNA (1)...(19): siRNA sense strand
ucauggaaauauucuguug

SEQ ID NO: 58068 - RNA, 19 nt, Homo sapiens
  misc_RNA (1)...(19): siRNA sense strand
gccauugacauguaccuua

SEQ ID NO: 58069 - RNA, 19 nt, Homo sapiens
  misc_RNA (1)...(19): siRNA sense strand
caaaauccccuaugucaaa

SEQ ID NO: 58070 - RNA, 19 nt, Homo sapiens
  misc_RNA (1)...(19): siRNA sense strand
ugaagaggaacauuggaua

SEQ ID NO: 58071 - RNA, 19 nt, Homo sapiens
  misc_RNA (1)...(19): siRNA sense strand
aagaaugaccguucaaaga

SEQ ID NO: 58072 - RNA, 19 nt, Homo sapiens
  misc_RNA (1)...(19): siRNA sense strand
gcagaagaagcuugcagaa

SEQ ID NO: 58073 - RNA, 19 nt, Homo sapiens
  misc_RNA (1)...(19): siRNA sense strand
gcacaagaagacccaucua

SEQ ID NO: 58074 - RNA, 19 nt, Homo sapiens
  misc_RNA (1)...(19): siRNA sense strand
caaagaaugaccguucaaa

SEQ ID NO: 58075 - RNA, 19 nt, Homo sapiens
  misc_RNA (1)...(19): siRNA sense strand
cgucuggucucgaggaaug

SEQ ID NO: 58076 - RNA, 19 nt, Homo sapiens
  misc_RNA (1)...(19): siRNA sense strand
gcaauauccuuugacaacu

SEQ ID NO: 58077 - RNA, 19 nt, Homo sapiens
  misc_RNA (1)...(19): siRNA sense strand
ggcaaagaaugaccguuca

SEQ ID NO: 58078 - RNA, 19 nt, Homo sapiens
  misc_RNA (1)...(19): siRNA sense strand
gaagaggaacauuggauac

SEQ ID NO: 58079 - RNA, 19 nt, Homo sapiens
  misc_RNA (1)...(19): siRNA sense strand
cuacgacauucgccuaaga

SEQ ID NO: 58080 - RNA, 19 nt, Homo sapiens
  misc_RNA (1)...(19): siRNA sense strand
ggaugcucauggaaauauu

SEQ ID NO: 58081 - RNA, 19 nt, Homo sapiens
  misc_RNA (1)...(19): siRNA sense strand
ugaaugccauagacagaug

SEQ ID NO: 58082 - RNA, 19 nt, Homo sapiens
  misc_RNA (1)...(19): siRNA sense strand
acagaagccucccgcacaa

SEQ ID NO: 58083 - RNA, 19 nt, Homo sapiens
  misc_RNA (1)...(19): siRNA sense strand
uggacaagcuguugaaagg

SEQ ID NO: 58084 - RNA, 19 nt, Homo sapiens
  misc_RNA (1)...(19): siRNA sense strand
gagaagggcaugggcgauu

SEQ ID NO: 58085 - RNA, 19 nt, Homo sapiens
  misc_RNA (1)...(19): siRNA sense strand
ggaauucagcaauauccuu

SEQ ID NO: 58086 - RNA, 19 nt, Homo sapiens
  misc_RNA (1)...(19): siRNA sense strand
cagaagaagcuugcagaaa

SEQ ID NO: 58087 - RNA, 19 nt, Homo sapiens
  misc_RNA (1)...(19): siRNA sense strand
gacagcagcaugcaugaug

SEQ ID NO: 58088 - RNA, 19 nt, Homo sapiens
  misc_RNA (1)...(19): siRNA sense strand
uaccugaucuaaccgaugu

SEQ ID NO: 58089 - RNA, 19 nt, Homo sapiens
  misc_RNA (1)...(19): siRNA sense strand
ugaaggagacgguggacaa

SEQ ID NO: 58090 - RNA, 19 nt, Homo sapiens
  misc_RNA (1)...(19): siRNA sense strand
cagccaaggcaaagaauga

SEQ ID NO: 58091 - RNA, 19 nt, Homo sapiens
  misc_RNA (1)...(19): siRNA sense strand
ccuucuggaucaauuauga

SEQ ID NO: 58092 - RNA, 19 nt, Homo sapiens
  misc_RNA (1)...(19): siRNA sense strand
uuuacuggcuguacuaugu

SEQ ID NO: 58093 - RNA, 19 nt, Homo sapiens
  misc_RNA (1)...(19): siRNA sense strand
uaaaauaccugaucuaacc

SEQ ID NO: 58094 - RNA, 19 nt, Homo sapiens
  misc_RNA (1)...(19): siRNA sense strand
ucagcaauauccuuugaca

SEQ ID NO: 58095 - RNA, 19 nt, Homo sapiens
  misc_RNA (1)...(19): siRNA sense strand
gaacgaucccgggaacaug

SEQ ID NO: 58096 - RNA, 19 nt, Homo sapiens
  misc_RNA (1)...(19): siRNA sense strand
guucaaagagcgaaagcaa

SEQ ID NO: 58097 - RNA, 19 nt, Homo sapiens
  misc_RNA (1)...(19): siRNA sense strand
gcaaagaaugaccguucaa

SEQ ID NO: 58098 - RNA, 19 nt, Homo sapiens
  misc_RNA (1)...(19): siRNA sense strand
gaagaagcuugcagaaaag

SEQ ID NO: 58099 - RNA, 19 nt, Homo sapiens
  misc_RNA (1)...(19): siRNA sense strand
ccacggaugacauugaguu

SEQ ID NO: 58100 - RNA, 19 nt, Homo sapiens
  misc_RNA (1)...(19): siRNA sense strand
caaagccauugacauguac

SEQ ID NO: 58101 - RNA, 19 nt, Homo sapiens
  misc_RNA (1)...(19): siRNA sense strand
gugcauggagugacaguga

SEQ ID NO: 58102 - RNA, 19 nt, Homo sapiens
  misc_RNA (1)...(19): siRNA sense strand
caauauccuuugacaacuc

SEQ ID NO: 58103 - RNA, 19 nt, Homo sapiens
  misc_RNA (1)...(19): siRNA sense strand
agaggaacauuggauacuu

SEQ ID NO: 58104 - RNA, 19 nt, Homo sapiens
  misc_RNA (1)...(19): siRNA sense strand
gaucguguuuccauucacu

SEQ ID NO: 58105 - RNA, 19 nt, Homo sapiens
  misc_RNA (1)...(19): siRNA sense strand
ccaggaucguguuuccauu

SEQ ID NO: 58106 - RNA, 19 nt, Homo sapiens
  misc_RNA (1)...(19): siRNA sense strand
ugaugcaucugcugcuaga

SEQ ID NO: 58107 - RNA, 19 nt, Homo sapiens
  misc_RNA (1)...(19): siRNA sense strand
uaugcccucuauacugaua

SEQ ID NO: 58108 - RNA, 19 nt, Homo sapiens
  misc_RNA (1)...(19): siRNA sense strand
gcucauggaaauauucugu

SEQ ID NO: 58109 - RNA, 19 nt, Homo sapiens
  misc_RNA (1)...(19): siRNA sense strand
ggaguaugccuuugucaac

SEQ ID NO: 58110 - RNA, 19 nt, Homo sapiens
  misc_RNA (1)...(19): siRNA sense strand
caaccucacgcuugacaau

SEQ ID NO: 58111 - RNA, 19 nt, Homo sapiens
  misc_RNA (1)...(19): siRNA sense strand
gaucuaaccgaugugaaug

SEQ ID NO: 58112 - RNA, 19 nt, Homo sapiens
  misc_RNA (1)...(19): siRNA sense strand
ggaauccaguacaggaaac

SEQ ID NO: 58113 - RNA, 19 nt, Homo sapiens
  misc_RNA (1)...(19): siRNA sense strand
cgcuggaaguucacaauga

SEQ ID NO: 58114 - RNA, 19 nt, Homo sapiens
  misc_RNA (1)...(19): siRNA sense strand
ucaacaauauuggagagau

SEQ ID NO: 58115 - RNA, 19 nt, Homo sapiens
  misc_RNA (1)...(19): siRNA sense strand
gcauggagugacagugaaa

SEQ ID NO: 58116 - RNA, 19 nt, Homo sapiens
  misc_RNA (1)...(19): siRNA sense strand
ccgaagucaacauggauua

SEQ ID NO: 58117 - RNA, 19 nt, Homo sapiens
  misc_RNA (1)...(19): siRNA sense strand
ccucuauacugauaacgau

SEQ ID NO: 58118 - RNA, 19 nt, Homo sapiens
  misc_RNA (1)...(19): siRNA sense strand
ccgggaacauguccuuugu

SEQ ID NO: 58119 - RNA, 19 nt, Homo sapiens
  misc_RNA (1)...(19): siRNA sense strand
cuacaccacggaugacauu

SEQ ID NO: 58120 - RNA, 19 nt, Homo sapiens
  misc_RNA (1)...(19): siRNA sense strand
uaugaugcaucugcugcua

SEQ ID NO: 58121 - RNA, 19 nt, Homo sapiens
  misc_RNA (1)...(19): siRNA sense strand
gaagccucccgcacaagaa

SEQ ID NO: 58122 - RNA, 19 nt, Homo sapiens
  misc_RNA (1)...(19): siRNA sense strand
aguaugccuuugucaacua

SEQ ID NO: 58123 - RNA, 19 nt, Homo sapiens
  misc_RNA (1)...(19): siRNA sense strand
gaguaugccuuugucaacu

SEQ ID NO: 58124 - RNA, 19 nt, Homo sapiens
  misc_RNA (1)...(19): siRNA sense strand
cccgacacauauuucuuaa

SEQ ID NO: 58125 - RNA, 19 nt, Homo sapiens
  misc_RNA (1)...(19): siRNA sense strand
uacuggcuguacuauguua

SEQ ID NO: 58126 - RNA, 19 nt, Homo sapiens
  misc_RNA (1)...(19): siRNA sense strand
acaacugugcugacaauga

SEQ ID NO: 58127 - RNA, 19 nt, Homo sapiens
  misc_RNA (1)...(19): siRNA sense strand
aacauuggauacuucauuc

SEQ ID NO: 58128 - RNA, 19 nt, Homo sapiens
  misc_RNA (1)...(19): siRNA sense strand
ucuggaaauugaaagcuau

SEQ ID NO: 58129 - RNA, 19 nt, Homo sapiens
  misc_RNA (1)...(19): siRNA sense strand
agaaugaccguucaaagag

SEQ ID NO: 58130 - RNA, 19 nt, Homo sapiens
  misc_RNA (1)...(19): siRNA sense strand
agacagccaaggcaaagaa

SEQ ID NO: 58131 - RNA, 19 nt, Homo sapiens
  misc_RNA (1)...(19): siRNA sense strand
cgggagaccuugcccaaaa

SEQ ID NO: 58132 - RNA, 19 nt, Homo sapiens
  misc_RNA (1)...(19): siRNA sense strand
ggauacuucauucuucaga

SEQ ID NO: 58133 - RNA, 19 nt, Homo sapiens
  misc_RNA (1)...(19): siRNA sense strand
acuucauucuucagacuua

SEQ ID NO: 58134 - RNA, 19 nt, Homo sapiens
  misc_RNA (1)...(19): siRNA sense strand
acugcacucuggaaauuga

SEQ ID NO: 58135 - RNA, 19 nt, Homo sapiens
  misc_RNA (1)...(19): siRNA sense strand
auucagcaauauccuuuga

SEQ ID NO: 58136 - RNA, 19 nt, Homo sapiens
  misc_RNA (1)...(19): siRNA sense strand
caacuacauuuucuuugga

SEQ ID NO: 58137 - RNA, 19 nt, Homo sapiens
  misc_RNA (1)...(19): siRNA sense strand
uugaaaggcuacgacauuc

SEQ ID NO: 58138 - RNA, 19 nt, Homo sapiens
  misc_RNA (1)...(19): siRNA sense strand
gacaugguuuccgaaguca

SEQ ID NO: 58139 - RNA, 19 nt, Homo sapiens
  misc_RNA (1)...(19): siRNA sense strand
ggaaggauaugacaauaaa

SEQ ID NO: 58140 - RNA, 19 nt, Homo sapiens
  misc_RNA (1)...(19): siRNA sense strand
ggucaugucugucuacuuu

SEQ ID NO: 58141 - RNA, 19 nt, Homo sapiens
  misc_RNA (1)...(19): siRNA sense strand
gaaaucugaugaugacuau

SEQ ID NO: 58142 - RNA, 19 nt, Homo sapiens
  misc_RNA (1)...(19): siRNA sense strand
gaagcgaaguucuguugaa

SEQ ID NO: 58143 - RNA, 19 nt, Homo sapiens
  misc_RNA (1)...(19): siRNA sense strand
cuacucgacuccuguauuu

SEQ ID NO: 58144 - RNA, 19 nt, Homo sapiens
  misc_RNA (1)...(19): siRNA sense strand
gccagaacaucuuuaggua

SEQ ID NO: 58145 - RNA, 19 nt, Homo sapiens
  misc_RNA (1)...(19): siRNA sense strand
gaauaaugcuacacaccuu

SEQ ID NO: 58146 - RNA, 19 nt, Homo sapiens
  misc_RNA (1)...(19): siRNA sense strand
gaugaugacuaugaagauu

SEQ ID NO: 58147 - RNA, 19 nt, Homo sapiens
  misc_RNA (1)...(19): siRNA sense strand
ccagugaacgcuaucaaua

SEQ ID NO: 58148 - RNA, 19 nt, Homo sapiens
  misc_RNA (1)...(19): siRNA sense strand
ggagugaagccaacguuaa

SEQ ID NO: 58149 - RNA, 19 nt, Homo sapiens
  misc_RNA (1)...(19): siRNA sense strand
gcgaaguucuguugaagug

SEQ ID NO: 58150 - RNA, 19 nt, Homo sapiens
  misc_RNA (1)...(19): siRNA sense strand
gagauuauguggucauguc

SEQ ID NO: 58151 - RNA, 19 nt, Homo sapiens
  misc_RNA (1)...(19): siRNA sense strand
caacguuaauucacacaga

SEQ ID NO: 58152 - RNA, 19 nt, Homo sapiens
  misc_RNA (1)...(19): siRNA sense strand
gcagaagaaugggauacuu

SEQ ID NO: 58153 - RNA, 19 nt, Homo sapiens
  misc_RNA (1)...(19): siRNA sense strand
ccuggaggcuuuaucaauu

SEQ ID NO: 58154 - RNA, 19 nt, Homo sapiens
  misc_RNA (1)...(19): siRNA sense strand
cagaacaucuuuagguauc

SEQ ID NO: 58155 - RNA, 19 nt, Homo sapiens
  misc_RNA (1)...(19): siRNA sense strand
caagcaaggacaaagauaa

SEQ ID NO: 58156 - RNA, 19 nt, Homo sapiens
  misc_RNA (1)...(19): siRNA sense strand
uguuuaaucuggucuauug

SEQ ID NO: 58157 - RNA, 19 nt, Homo sapiens
  misc_RNA (1)...(19): siRNA sense strand
agagagagaugaagaguac

SEQ ID NO: 58158 - RNA, 19 nt, Homo sapiens
  misc_RNA (1)...(19): siRNA sense strand
cgagugcucuacacccuaa

SEQ ID NO: 58159 - RNA, 19 nt, Homo sapiens
  misc_RNA (1)...(19): siRNA sense strand
ggaaaucgcuccccaaggu

SEQ ID NO: 58160 - RNA, 19 nt, Homo sapiens
  misc_RNA (1)...(19): siRNA sense strand
uauggcaccuugcauuauu

SEQ ID NO: 58161 - RNA, 19 nt, Homo sapiens
  misc_RNA (1)...(19): siRNA sense strand
agaagaaugggauacuuua

SEQ ID NO: 58162 - RNA, 19 nt, Homo sapiens
  misc_RNA (1)...(19): siRNA sense strand
agacaugggaggauacaua

SEQ ID NO: 58163 - RNA, 19 nt, Homo sapiens
  misc_RNA (1)...(19): siRNA sense strand
gaucagcaaccauucaaau

SEQ ID NO: 58164 - RNA, 19 nt, Homo sapiens
  misc_RNA (1)...(19): siRNA sense strand
ucacagcgauggaucucuu

SEQ ID NO: 58165 - RNA, 19 nt, Homo sapiens
  misc_RNA (1)...(19): siRNA sense strand
ccauuaaaguccuccgauu

SEQ ID NO: 58166 - RNA, 19 nt, Homo sapiens
  misc_RNA (1)...(19): siRNA sense strand
ccaacaggaugcugagaau

SEQ ID NO: 58167 - RNA, 19 nt, Homo sapiens
  misc_RNA (1)...(19): siRNA sense strand
acccuaagguugacaauug

SEQ ID NO: 58168 - RNA, 19 nt, Homo sapiens
  misc_RNA (1)...(19): siRNA sense strand
ucucugcucugguggagua

SEQ ID NO: 58169 - RNA, 19 nt, Homo sapiens
  misc_RNA (1)...(19): siRNA sense strand
acaagauccuggaggcuuu

SEQ ID NO: 58170 - RNA, 19 nt, Homo sapiens
  misc_RNA (1)...(19): siRNA sense strand
cgauggaucucuuuguauc

SEQ ID NO: 58171 - RNA, 19 nt, Homo sapiens
  misc_RNA (1)...(19): siRNA sense strand
gaagugggcgacacaagau

SEQ ID NO: 58172 - RNA, 19 nt, Homo sapiens
  misc_RNA (1)...(19): siRNA sense strand
cagaagaaugggauacuuu

SEQ ID NO: 58173 - RNA, 19 nt, Homo sapiens
  misc_RNA (1)...(19): siRNA sense strand
ucacugucaucuuaaacaa

SEQ ID NO: 58174 - RNA, 19 nt, Homo sapiens
  misc_RNA (1)...(19): siRNA sense strand
gcacaggaagcucagucua

SEQ ID NO: 58175 - RNA, 19 nt, Homo sapiens
  misc_RNA (1)...(19): siRNA sense strand
gaaauaccaccgaaguagu

SEQ ID NO: 58176 - RNA, 19 nt, Homo sapiens
  misc_RNA (1)...(19): siRNA sense strand
uaagaaauaccaccgaagu

SEQ ID NO: 58177 - RNA, 19 nt, Homo sapiens
  misc_RNA (1)...(19): siRNA sense strand
caauaaggaugcuguucca

SEQ ID NO: 58178 - RNA, 19 nt, Homo sapiens
  misc_RNA (1)...(19): siRNA sense strand
ucaugucugucuacuuuga

SEQ ID NO: 58179 - RNA, 19 nt, Homo sapiens
  misc_RNA (1)...(19): siRNA sense strand
ggucuugacuccaaaaguu

SEQ ID NO: 58180 - RNA, 19 nt, Homo sapiens
  misc_RNA (1)...(19): siRNA sense strand
gaacaggagcuuggagaca

SEQ ID NO: 58181 - RNA, 19 nt, Homo sapiens
  misc_RNA (1)...(19): siRNA sense strand
gaguauggcaccuugcauu

SEQ ID NO: 58182 - RNA, 19 nt, Homo sapiens
  misc_RNA (1)...(19): siRNA sense strand
cccaaggucuccuauguca

SEQ ID NO: 58183 - RNA, 19 nt, Homo sapiens
  misc_RNA (1)...(19): siRNA sense strand
ggauaugacaauaaacuuc

SEQ ID NO: 58184 - RNA, 19 nt, Homo sapiens
  misc_RNA (1)...(19): siRNA sense strand
acaaccugcuggaaggaua

SEQ ID NO: 58185 - RNA, 19 nt, Homo sapiens
  misc_RNA (1)...(19): siRNA sense strand
gagugaagccaacguuaau

SEQ ID NO: 58186 - RNA, 19 nt, Homo sapiens
  misc_RNA (1)...(19): siRNA sense strand
gaagaguacggcuaugagu

SEQ ID NO: 58187 - RNA, 19 nt, Homo sapiens
  misc_RNA (1)...(19): siRNA sense strand
agugaacgcuaucaauaug

SEQ ID NO: 58188 - RNA, 19 nt, Homo sapiens
  misc_RNA (1)...(19): siRNA sense strand
caaggucuccuaugucaca

SEQ ID NO: 58189 - RNA, 19 nt, Homo sapiens
  misc_RNA (1)...(19): siRNA sense strand
gcucuacccuggcuucacu

SEQ ID NO: 58190 - RNA, 19 nt, Homo sapiens
  misc_RNA (1)...(19): siRNA sense strand
gacaugggaggauacauau

SEQ ID NO: 58191 - RNA, 19 nt, Homo sapiens
  misc_RNA (1)...(19): siRNA sense strand
ccaagcaaggacaaagaua

SEQ ID NO: 58192 - RNA, 19 nt, Homo sapiens
  misc_RNA (1)...(19): siRNA sense strand
uugcacaacuuuccaaugg

SEQ ID NO: 58193 - RNA, 19 nt, Homo sapiens
  misc_RNA (1)...(19): siRNA sense strand
aacaggaugcugagaauuu

SEQ ID NO: 58194 - RNA, 19 nt, Homo sapiens
  misc_RNA (1)...(19): siRNA sense strand
acaggaugcugagaauuug

SEQ ID NO: 58195 - RNA, 19 nt, Homo sapiens
  misc_RNA (1)...(19): siRNA sense strand
aaucugaugaugacuauga

SEQ ID NO: 58196 - RNA, 19 nt, Homo sapiens
  misc_RNA (1)...(19): siRNA sense strand
gauccuggaggcuuuauca

SEQ ID NO: 58197 - RNA, 19 nt, Homo sapiens
  misc_RNA (1)...(19): siRNA sense strand
ccacgugaagaaauuguuu

SEQ ID NO: 58198 - RNA, 19 nt, Homo sapiens
  misc_RNA (1)...(19): siRNA sense strand
cauuaaaguccuccgauug

SEQ ID NO: 58199 - RNA, 19 nt, Homo sapiens
  misc_RNA (1)...(19): siRNA sense strand
agcgauggaucucuuugua

SEQ ID NO: 58200 - RNA, 19 nt, Homo sapiens
  misc_RNA (1)...(19): siRNA sense strand
ugaagugggcgacacaaga

SEQ ID NO: 58201 - RNA, 19 nt, Homo sapiens
  misc_RNA (1)...(19): siRNA sense strand
uuaaaguccuccgauugaa

SEQ ID NO: 58202 - RNA, 19 nt, Homo sapiens
  misc_RNA (1)...(19): siRNA sense strand
aauaaacuucggccugaua

SEQ ID NO: 58203 - RNA, 19 nt, Homo sapiens
  misc_RNA (1)...(19): siRNA sense strand
gcuacacaccuucaagaga

SEQ ID NO: 58204 - RNA, 19 nt, Homo sapiens
  misc_RNA (1)...(19): siRNA sense strand
caagaucagcaaccauuca

SEQ ID NO: 58205 - RNA, 19 nt, Homo sapiens
  misc_RNA (1)...(19): siRNA sense strand
aagcaaggacaaagauaaa

SEQ ID NO: 58206 - RNA, 19 nt, Homo sapiens
  misc_RNA (1)...(19): siRNA sense strand
gaaaccaagcaaggacaaa

SEQ ID NO: 58207 - RNA, 19 nt, Homo sapiens
  misc_RNA (1)...(19): siRNA sense strand
ggaaaccaagcaaggacaa

SEQ ID NO: 58208 - RNA, 19 nt, Homo sapiens
  misc_RNA (1)...(19): siRNA sense strand
agaaaucugaugaugacua

SEQ ID NO: 58209 - RNA, 19 nt, Homo sapiens
  misc_RNA (1)...(19): siRNA sense strand
gugucuuucuggaucaaua

SEQ ID NO: 58210 - RNA, 19 nt, Homo sapiens
  misc_RNA (1)...(19): siRNA sense strand
agacaacuuccggagauua

SEQ ID NO: 58211 - RNA, 19 nt, Homo sapiens
  misc_RNA (1)...(19): siRNA sense strand
gaggcuuuaucaauucuca

SEQ ID NO: 58212 - RNA, 19 nt, Homo sapiens
  misc_RNA (1)...(19): siRNA sense strand
uccagacacuuucuucaga

SEQ ID NO: 58213 - RNA, 19 nt, Homo sapiens
  misc_RNA (1)...(19): siRNA sense strand
gcuggaaggauaugacaau

SEQ ID NO: 58214 - RNA, 19 nt, Homo sapiens
  misc_RNA (1)...(19): siRNA sense strand
ggaagcgaaguucuguuga

SEQ ID NO: 58215 - RNA, 19 nt, Homo sapiens
  misc_RNA (1)...(19): siRNA sense strand
cuauccacgugaagaaauu

SEQ ID NO: 58216 - RNA, 19 nt, Homo sapiens
  misc_RNA (1)...(19): siRNA sense strand
gcugagaauuuggaaugau

SEQ ID NO: 58217 - RNA, 19 nt, Homo sapiens
  misc_RNA (1)...(19): siRNA sense strand
cuggaaggauaugacaaua

SEQ ID NO: 58218 - RNA, 19 nt, Homo sapiens
  misc_RNA (1)...(19): siRNA sense strand
cagugaacgcuaucaauau

SEQ ID NO: 58219 - RNA, 19 nt, Homo sapiens
  misc_RNA (1)...(19): siRNA sense strand
gaagaaugggauacuuuac

SEQ ID NO: 58220 - RNA, 19 nt, Homo sapiens
  misc_RNA (1)...(19): siRNA sense strand
gacaacuuccggagauuau

SEQ ID NO: 58221 - RNA, 19 nt, Homo sapiens
  misc_RNA (1)...(19): siRNA sense strand
aagaaauaccaccgaagua

SEQ ID NO: 58222 - RNA, 19 nt, Homo sapiens
  misc_RNA (1)...(19): siRNA sense strand
cugagaauuuggaaugaug

SEQ ID NO: 58223 - RNA, 19 nt, Homo sapiens
  misc_RNA (1)...(19): siRNA sense strand
aaacuucggccugauauag

SEQ ID NO: 58224 - RNA, 19 nt, Homo sapiens
  misc_RNA (1)...(19): siRNA sense strand
aguauggcaccuugcauua

SEQ ID NO: 58225 - RNA, 19 nt, Homo sapiens
  misc_RNA (1)...(19): siRNA sense strand
ggaucucuuuguaucuguu

SEQ ID NO: 58226 - RNA, 19 nt, Homo sapiens
  misc_RNA (1)...(19): siRNA sense strand
agaaugggauacuuuacca

SEQ ID NO: 58227 - RNA, 19 nt, Homo sapiens
  misc_RNA (1)...(19): siRNA sense strand
caacuuccggagauuaugu

SEQ ID NO: 58228 - RNA, 19 nt, Homo sapiens
  misc_RNA (1)...(19): siRNA sense strand
gaugcugagugccaauuac

SEQ ID NO: 58229 - RNA, 19 nt, Homo sapiens
  misc_RNA (1)...(19): siRNA sense strand
cuuuguaucuguuuguuuc

SEQ ID NO: 58230 - RNA, 19 nt, Homo sapiens
  misc_RNA (1)...(19): siRNA sense strand
guucuccaguuauggcuau

SEQ ID NO: 58231 - RNA, 19 nt, Homo sapiens
  misc_RNA (1)...(19): siRNA sense strand
gugaagccaacguuaauuc

SEQ ID NO: 58232 - RNA, 19 nt, Homo sapiens
  misc_RNA (1)...(19): siRNA sense strand
gcgauggaucucuuuguau

SEQ ID NO: 58233 - RNA, 19 nt, Homo sapiens
  misc_RNA (1)...(19): siRNA sense strand
ccagaacaucuuuagguau

SEQ ID NO: 58234 - RNA, 19 nt, Homo sapiens
  misc_RNA (1)...(19): siRNA sense strand
uggaaggauaugacaauaa

SEQ ID NO: 58235 - RNA, 19 nt, Homo sapiens
  misc_RNA (1)...(19): siRNA sense strand
caagauccuggaggcuuua

SEQ ID NO: 58236 - RNA, 19 nt, Homo sapiens
  misc_RNA (1)...(19): siRNA sense strand
gcugagugccaauuacaau

SEQ ID NO: 58237 - RNA, 19 nt, Homo sapiens
  misc_RNA (1)...(19): siRNA sense strand
caacaggaugcugagaauu

SEQ ID NO: 58238 - RNA, 19 nt, Homo sapiens
  misc_RNA (1)...(19): siRNA sense strand
aagccaacguuaauucaca

SEQ ID NO: 58239 - RNA, 19 nt, Homo sapiens
  misc_RNA (1)...(19): siRNA sense strand
ggucaugucugucuacuuu

SEQ ID NO: 58240 - RNA, 19 nt, Homo sapiens
  misc_RNA (1)...(19): siRNA sense strand
gaagcgaaguucuguugaa

SEQ ID NO: 58241 - RNA, 19 nt, Homo sapiens
  misc_RNA (1)...(19): siRNA sense strand
gccagaacaucuuuaggua

SEQ ID NO: 58242 - RNA, 19 nt, Homo sapiens
  misc_RNA (1)...(19): siRNA sense strand
gaauaaugcuacacaccuu

SEQ ID NO: 58243 - RNA, 19 nt, Homo sapiens
  misc_RNA (1)...(19): siRNA sense strand
gcgaaguucuguugaagug

SEQ ID NO: 58244 - RNA, 19 nt, Homo sapiens
  misc_RNA (1)...(19): siRNA sense strand
gagauuauguggucauguc

SEQ ID NO: 58245 - RNA, 19 nt, Homo sapiens
  misc_RNA (1)...(19): siRNA sense strand
ccuggaggcuuuaucaauu

SEQ ID NO: 58246 - RNA, 19 nt, Homo sapiens
  misc_RNA (1)...(19): siRNA sense strand
gcagaagaaugggauacuu

SEQ ID NO: 58247 - RNA, 19 nt, Homo sapiens
  misc_RNA (1)...(19): siRNA sense strand
cagaacaucuuuagguauc

SEQ ID NO: 58248 - RNA, 19 nt, Homo sapiens
  misc_RNA (1)...(19): siRNA sense strand
caagcaaggacaaagauaa

SEQ ID NO: 58249 - RNA, 19 nt, Homo sapiens
  misc_RNA (1)...(19): siRNA sense strand
uguuuaaucuggucuauug

SEQ ID NO: 58250 - RNA, 19 nt, Homo sapiens
  misc_RNA (1)...(19): siRNA sense strand
agagagagaugaagaguac

SEQ ID NO: 58251 - RNA, 19 nt, Homo sapiens
  misc_RNA (1)...(19): siRNA sense strand
cgagugcucuacacccuaa

SEQ ID NO: 58252 - RNA, 19 nt, Homo sapiens
  misc_RNA (1)...(19): siRNA sense strand
ggaaaucgcuccccaaggu

SEQ ID NO: 58253 - RNA, 19 nt, Homo sapiens
  misc_RNA (1)...(19): siRNA sense strand
uauggcaccuugcauuauu

SEQ ID NO: 58254 - RNA, 19 nt, Homo sapiens
  misc_RNA (1)...(19): siRNA sense strand
agaagaaugggauacuuua

SEQ ID NO: 58255 - RNA, 19 nt, Homo sapiens
  misc_RNA (1)...(19): siRNA sense strand
agacaugggaggauacaua

SEQ ID NO: 58256 - RNA, 19 nt, Homo sapiens
  misc_RNA (1)...(19): siRNA sense strand
gaucagcaaccauucaaau

SEQ ID NO: 58257 - RNA, 19 nt, Homo sapiens
  misc_RNA (1)...(19): siRNA sense strand
ucacagcgauggaucucuu

SEQ ID NO: 58258 - RNA, 19 nt, Homo sapiens
  misc_RNA (1)...(19): siRNA sense strand
ccaacaggaugcugagaau

SEQ ID NO: 58259 - RNA, 19 nt, Homo sapiens
  misc_RNA (1)...(19): siRNA sense strand
acccuaagguugacaauug

SEQ ID NO: 58260 - RNA, 19 nt, Homo sapiens
  misc_RNA (1)...(19): siRNA sense strand
ucucugcucugguggagua

SEQ ID NO: 58261 - RNA, 19 nt, Homo sapiens
  misc_RNA (1)...(19): siRNA sense strand
acaagauccuggaggcuuu

SEQ ID NO: 58262 - RNA, 19 nt, Homo sapiens
  misc_RNA (1)...(19): siRNA sense strand
cgauggaucucuuuguauc

SEQ ID NO: 58263 - RNA, 19 nt, Homo sapiens
  misc_RNA (1)...(19): siRNA sense strand
gaagugggcgacacaagau

SEQ ID NO: 58264 - RNA, 19 nt, Homo sapiens
  misc_RNA (1)...(19): siRNA sense strand
cagaagaaugggauacuuu

SEQ ID NO: 58265 - RNA, 19 nt, Homo sapiens
  misc_RNA (1)...(19): siRNA sense strand
gaaauaccaccgaaguagu

SEQ ID NO: 58266 - RNA, 19 nt, Homo sapiens
  misc_RNA (1)...(19): siRNA sense strand
uaagaaauaccaccgaagu

SEQ ID NO: 58267 - RNA, 19 nt, Homo sapiens
  misc_RNA (1)...(19): siRNA sense strand
caauaaggaugcuguucca

SEQ ID NO: 58268 - RNA, 19 nt, Homo sapiens
  misc_RNA (1)...(19): siRNA sense strand
ucaugucugucuacuuuga

SEQ ID NO: 58269 - RNA, 19 nt, Homo sapiens
  misc_RNA (1)...(19): siRNA sense strand
cccaaggucuccuauguca

SEQ ID NO: 58270 - RNA, 19 nt, Homo sapiens
  misc_RNA (1)...(19): siRNA sense strand
gaacaggagcuuggagaca

SEQ ID NO: 58271 - RNA, 19 nt, Homo sapiens
  misc_RNA (1)...(19): siRNA sense strand
gaguauggcaccuugcauu

SEQ ID NO: 58272 - RNA, 19 nt, Homo sapiens
  misc_RNA (1)...(19): siRNA sense strand
gaagaguacggcuaugagu

SEQ ID NO: 58273 - RNA, 19 nt, Homo sapiens
  misc_RNA (1)...(19): siRNA sense strand
caaggucuccuaugucaca

SEQ ID NO: 58274 - RNA, 19 nt, Homo sapiens
  misc_RNA (1)...(19): siRNA sense strand
uugcacaacuuuccaaugg

SEQ ID NO: 58275 - RNA, 19 nt, Homo sapiens
  misc_RNA (1)...(19): siRNA sense strand
aacaggaugcugagaauuu

SEQ ID NO: 58276 - RNA, 19 nt, Homo sapiens
  misc_RNA (1)...(19): siRNA sense strand
gacaugggaggauacauau

SEQ ID NO: 58277 - RNA, 19 nt, Homo sapiens
  misc_RNA (1)...(19): siRNA sense strand
ccaagcaaggacaaagaua

SEQ ID NO: 58278 - RNA, 19 nt, Homo sapiens
  misc_RNA (1)...(19): siRNA sense strand
ccacgugaagaaauuguuu

SEQ ID NO: 58279 - RNA, 19 nt, Homo sapiens
  misc_RNA (1)...(19): siRNA sense strand
acaggaugcugagaauuug

SEQ ID NO: 58280 - RNA, 19 nt, Homo sapiens
  misc_RNA (1)...(19): siRNA sense strand
gauccuggaggcuuuauca

SEQ ID NO: 58281 - RNA, 19 nt, Homo sapiens
  misc_RNA (1)...(19): siRNA sense strand
ugaagugggcgacacaaga

SEQ ID NO: 58282 - RNA, 19 nt, Homo sapiens
  misc_RNA (1)...(19): siRNA sense strand
agcgauggaucucuuugua

SEQ ID NO: 58283 - RNA, 19 nt, Homo sapiens
  misc_RNA (1)...(19): siRNA sense strand
gaggcuuuaucaauucuca

SEQ ID NO: 58284 - RNA, 19 nt, Homo sapiens
  misc_RNA (1)...(19): siRNA sense strand
gcuacacaccuucaagaga

SEQ ID NO: 58285 - RNA, 19 nt, Homo sapiens
  misc_RNA (1)...(19): siRNA sense strand
caagaucagcaaccauuca

SEQ ID NO: 58286 - RNA, 19 nt, Homo sapiens
  misc_RNA (1)...(19): siRNA sense strand
aagcaaggacaaagauaaa

SEQ ID NO: 58287 - RNA, 19 nt, Homo sapiens
  misc_RNA (1)...(19): siRNA sense strand
gaaaccaagcaaggacaaa

SEQ ID NO: 58288 - RNA, 19 nt, Homo sapiens
  misc_RNA (1)...(19): siRNA sense strand
ggaaaccaagcaaggacaa

SEQ ID NO: 58289 - RNA, 19 nt, Homo sapiens
  misc_RNA (1)...(19): siRNA sense strand
gugucuuucuggaucaaua

SEQ ID NO: 58290 - RNA, 19 nt, Homo sapiens
  misc_RNA (1)...(19): siRNA sense strand
uccagacacuuucuucaga

SEQ ID NO: 58291 - RNA, 19 nt, Homo sapiens
  misc_RNA (1)...(19): siRNA sense strand
agacaacuuccggagauua

SEQ ID NO: 58292 - RNA, 19 nt, Homo sapiens
  misc_RNA (1)...(19): siRNA sense strand
cuauccacgugaagaaauu

SEQ ID NO: 58293 - RNA, 19 nt, Homo sapiens
  misc_RNA (1)...(19): siRNA sense strand
gcugagaauuuggaaugau

SEQ ID NO: 58294 - RNA, 19 nt, Homo sapiens
  misc_RNA (1)...(19): siRNA sense strand
ggaagcgaaguucuguuga

SEQ ID NO: 58295 - RNA, 19 nt, Homo sapiens
  misc_RNA (1)...(19): siRNA sense strand
aagaaauaccaccgaagua

SEQ ID NO: 58296 - RNA, 19 nt, Homo sapiens
  misc_RNA (1)...(19): siRNA sense strand
cugagaauuuggaaugaug

SEQ ID NO: 58297 - RNA, 19 nt, Homo sapiens
  misc_RNA (1)...(19): siRNA sense strand
gaagaaugggauacuuuac

SEQ ID NO: 58298 - RNA, 19 nt, Homo sapiens
  misc_RNA (1)...(19): siRNA sense strand
gacaacuuccggagauuau

SEQ ID NO: 58299 - RNA, 19 nt, Homo sapiens
  misc_RNA (1)...(19): siRNA sense strand
caacuuccggagauuaugu

SEQ ID NO: 58300 - RNA, 19 nt, Homo sapiens
  misc_RNA (1)...(19): siRNA sense strand
aguauggcaccuugcauua

SEQ ID NO: 58301 - RNA, 19 nt, Homo sapiens
  misc_RNA (1)...(19): siRNA sense strand
ggaucucuuuguaucuguu

SEQ ID NO: 58302 - RNA, 19 nt, Homo sapiens
  misc_RNA (1)...(19): siRNA sense strand
agaaugggauacuuuacca

SEQ ID NO: 58303 - RNA, 19 nt, Homo sapiens
  misc_RNA (1)...(19): siRNA sense strand
cuuuguaucuguuuguuuc

SEQ ID NO: 58304 - RNA, 19 nt, Homo sapiens
  misc_RNA (1)...(19): siRNA sense strand
gaugcugagugccaauuac

SEQ ID NO: 58305 - RNA, 19 nt, Homo sapiens
  misc_RNA (1)...(19): siRNA sense strand
guucuccaguuauggcuau

SEQ ID NO: 58306 - RNA, 19 nt, Homo sapiens
  misc_RNA (1)...(19): siRNA sense strand
caagauccuggaggcuuua

SEQ ID NO: 58307 - RNA, 19 nt, Homo sapiens
  misc_RNA (1)...(19): siRNA sense strand
gcugagugccaauuacaau

SEQ ID NO: 58308 - RNA, 19 nt, Homo sapiens
  misc_RNA (1)...(19): siRNA sense strand
gcgauggaucucuuuguau

SEQ ID NO: 58309 - RNA, 19 nt, Homo sapiens
  misc_RNA (1)...(19): siRNA sense strand
caacaggaugcugagaauu

SEQ ID NO: 58310 - RNA, 19 nt, Homo sapiens
  misc_RNA (1)...(19): siRNA sense strand
ccagaacaucuuuagguau

SEQ ID NO: 58311 - RNA, 19 nt, Homo sapiens
  misc_RNA (1)...(19): siRNA sense strand
agaaauaccaccgaaguag

SEQ ID NO: 58312 - RNA, 19 nt, Homo sapiens
  misc_RNA (1)...(19): siRNA sense strand
gaugaagaguacggcuaug

SEQ ID NO: 58313 - RNA, 19 nt, Homo sapiens
  misc_RNA (1)...(19): siRNA sense strand
cagcaccauugcccggaaa

SEQ ID NO: 58314 - RNA, 19 nt, Homo sapiens
  misc_RNA (1)...(19): siRNA sense strand
gaucaauaaggaugcuguu

SEQ ID NO: 58315 - RNA, 19 nt, Homo sapiens
  misc_RNA (1)...(19): siRNA sense strand
cccaagaucagcaaccauu

SEQ ID NO: 58316 - RNA, 19 nt, Homo sapiens
  misc_RNA (1)...(19): siRNA sense strand
gaacaucuuuagguaucac

SEQ ID NO: 58317 - RNA, 19 nt, Homo sapiens
  misc_RNA (1)...(19): siRNA sense strand
cccuaagguugacaauuga

SEQ ID NO: 58318 - RNA, 19 nt, Homo sapiens
  misc_RNA (1)...(19): siRNA sense strand
uggaagcgaaguucuguug

SEQ ID NO: 58319 - RNA, 19 nt, Homo sapiens
  misc_RNA (1)...(19): siRNA sense strand
uuggagacaugggaggaua

SEQ ID NO: 58320 - RNA, 19 nt, Homo sapiens
  misc_RNA (1)...(19): siRNA sense strand
cuggaggcuuuaucaauuc

SEQ ID NO: 58321 - RNA, 19 nt, Homo sapiens
  misc_RNA (1)...(19): siRNA sense strand
cacgugaagaaauuguuua

SEQ ID NO: 58322 - RNA, 19 nt, Homo sapiens
  misc_RNA (1)...(19): siRNA sense strand
gcuauccacgugaagaaau

SEQ ID NO: 58323 - RNA, 19 nt, Homo sapiens
  misc_RNA (1)...(19): siRNA sense strand
ccaccgaaguagugaagac

SEQ ID NO: 58324 - RNA, 19 nt, Homo sapiens
  misc_RNA (1)...(19): siRNA sense strand
aaauaccaccgaaguagug

SEQ ID NO: 58325 - RNA, 19 nt, Homo sapiens
  misc_RNA (1)...(19): siRNA sense strand
gaucucuuuguaucuguuu

SEQ ID NO: 58326 - RNA, 19 nt, Homo sapiens
  misc_RNA (1)...(19): siRNA sense strand
caagagagagaugaagagu

SEQ ID NO: 58327 - RNA, 19 nt, Homo sapiens
  misc_RNA (1)...(19): siRNA sense strand
gauauccgcccaagaucag

SEQ ID NO: 58328 - RNA, 19 nt, Homo sapiens
  misc_RNA (1)...(19): siRNA sense strand
guauggcaccuugcauuau

SEQ ID NO: 58329 - RNA, 19 nt, Homo sapiens
  misc_RNA (1)...(19): siRNA sense strand
ucaauucucauuuguuggu

SEQ ID NO: 58330 - RNA, 19 nt, Homo sapiens
  misc_RNA (1)...(19): siRNA sense strand
ugaugcugagugccaauua

SEQ ID NO: 58331 - RNA, 19 nt, Homo sapiens
  misc_RNA (1)...(19): siRNA sense strand
uauccugggugucuuucug

SEQ ID NO: 58332 - RNA, 19 nt, Homo sapiens
  misc_RNA (1)...(19): siRNA sense strand
ggcuuuaucaauucucauu

SEQ ID NO: 58333 - RNA, 19 nt, Homo sapiens
  misc_RNA (1)...(19): siRNA sense strand
acaggagcuuggagacaug

SEQ ID NO: 58334 - RNA, 19 nt, Homo sapiens
  misc_RNA (1)...(19): siRNA sense strand
caauggaagcgaaguucug

SEQ ID NO: 58335 - RNA, 19 nt, Homo sapiens
  misc_RNA (1)...(19): siRNA sense strand
aagcgaaguucuguugaag

SEQ ID NO: 58336 - RNA, 19 nt, Homo sapiens
  misc_RNA (1)...(19): siRNA sense strand
aacaggagcuuggagacau

SEQ ID NO: 58337 - RNA, 19 nt, Homo sapiens
  misc_RNA (1)...(19): siRNA sense strand
agaguacggcuaugagugu

SEQ ID NO: 58338 - RNA, 19 nt, Homo sapiens
  misc_RNA (1)...(19): siRNA sense strand
aagagagagaugaagagua

SEQ ID NO: 58339 - RNA, 19 nt, Homo sapiens
  misc_RNA (1)...(19): siRNA sense strand
ggaaggauaugacaauaaa

SEQ ID NO: 58340 - RNA, 19 nt, Homo sapiens
  misc_RNA (1)...(19): siRNA sense strand
ggucaugucugucuacuuu

SEQ ID NO: 58341 - RNA, 19 nt, Homo sapiens
  misc_RNA (1)...(19): siRNA sense strand
gaaaucugaugaugacuau

SEQ ID NO: 58342 - RNA, 19 nt, Homo sapiens
  misc_RNA (1)...(19): siRNA sense strand
gaagcgaaguucuguugaa

SEQ ID NO: 58343 - RNA, 19 nt, Homo sapiens
  misc_RNA (1)...(19): siRNA sense strand
cuacucgacuccuguauuu

SEQ ID NO: 58344 - RNA, 19 nt, Homo sapiens
  misc_RNA (1)...(19): siRNA sense strand
gccagaacaucuuuaggua

SEQ ID NO: 58345 - RNA, 19 nt, Homo sapiens
  misc_RNA (1)...(19): siRNA sense strand
gaauaaugcuacacaccuu

SEQ ID NO: 58346 - RNA, 19 nt, Homo sapiens
  misc_RNA (1)...(19): siRNA sense strand
gaugaugacuaugaagauu

SEQ ID NO: 58347 - RNA, 19 nt, Homo sapiens
  misc_RNA (1)...(19): siRNA sense strand
ccagugaacgcuaucaaua

SEQ ID NO: 58348 - RNA, 19 nt, Homo sapiens
  misc_RNA (1)...(19): siRNA sense strand
ggagugaagccaacguuaa

SEQ ID NO: 58349 - RNA, 19 nt, Homo sapiens
  misc_RNA (1)...(19): siRNA sense strand
gcgaaguucuguugaagug

SEQ ID NO: 58350 - RNA, 19 nt, Homo sapiens
  misc_RNA (1)...(19): siRNA sense strand
gagauuauguggucauguc

SEQ ID NO: 58351 - RNA, 19 nt, Homo sapiens
  misc_RNA (1)...(19): siRNA sense strand
caacguuaauucacacaga

SEQ ID NO: 58352 - RNA, 19 nt, Homo sapiens
  misc_RNA (1)...(19): siRNA sense strand
gcagaagaaugggauacuu

SEQ ID NO: 58353 - RNA, 19 nt, Homo sapiens
  misc_RNA (1)...(19): siRNA sense strand
ccuggaggcuuuaucaauu

SEQ ID NO: 58354 - RNA, 19 nt, Homo sapiens
  misc_RNA (1)...(19): siRNA sense strand
cagaacaucuuuagguauc

SEQ ID NO: 58355 - RNA, 19 nt, Homo sapiens
  misc_RNA (1)...(19): siRNA sense strand
caagcaaggacaaagauaa

SEQ ID NO: 58356 - RNA, 19 nt, Homo sapiens
  misc_RNA (1)...(19): siRNA sense strand
uguuuaaucuggucuauug

SEQ ID NO: 58357 - RNA, 19 nt, Homo sapiens
  misc_RNA (1)...(19): siRNA sense strand
agagagagaugaagaguac

SEQ ID NO: 58358 - RNA, 19 nt, Homo sapiens
  misc_RNA (1)...(19): siRNA sense strand
cgagugcucuacacccuaa

SEQ ID NO: 58359 - RNA, 19 nt, Homo sapiens
  misc_RNA (1)...(19): siRNA sense strand
ggaaaucgcuccccaaggu

SEQ ID NO: 58360 - RNA, 19 nt, Homo sapiens
  misc_RNA (1)...(19): siRNA sense strand
uauggcaccuugcauuauu

SEQ ID NO: 58361 - RNA, 19 nt, Homo sapiens
  misc_RNA (1)...(19): siRNA sense strand
agaagaaugggauacuuua

SEQ ID NO: 58362 - RNA, 19 nt, Homo sapiens
  misc_RNA (1)...(19): siRNA sense strand
agacaugggaggauacaua

SEQ ID NO: 58363 - RNA, 19 nt, Homo sapiens
  misc_RNA (1)...(19): siRNA sense strand
gaucagcaaccauucaaau

SEQ ID NO: 58364 - RNA, 19 nt, Homo sapiens
  misc_RNA (1)...(19): siRNA sense strand
ucacagcgauggaucucuu

SEQ ID NO: 58365 - RNA, 19 nt, Homo sapiens
  misc_RNA (1)...(19): siRNA sense strand
ccauuaaaguccuccgauu

SEQ ID NO: 58366 - RNA, 19 nt, Homo sapiens
  misc_RNA (1)...(19): siRNA sense strand
ccaacaggaugcugagaau

SEQ ID NO: 58367 - RNA, 19 nt, Homo sapiens
  misc_RNA (1)...(19): siRNA sense strand
acccuaagguugacaauug

SEQ ID NO: 58368 - RNA, 19 nt, Homo sapiens
  misc_RNA (1)...(19): siRNA sense strand
ucucugcucugguggagua

SEQ ID NO: 58369 - RNA, 19 nt, Homo sapiens
  misc_RNA (1)...(19): siRNA sense strand
acaagauccuggaggcuuu

SEQ ID NO: 58370 - RNA, 19 nt, Homo sapiens
  misc_RNA (1)...(19): siRNA sense strand
cgauggaucucuuuguauc

SEQ ID NO: 58371 - RNA, 19 nt, Homo sapiens
  misc_RNA (1)...(19): siRNA sense strand
gaagugggcgacacaagau

SEQ ID NO: 58372 - RNA, 19 nt, Homo sapiens
  misc_RNA (1)...(19): siRNA sense strand
cagaagaaugggauacuuu

SEQ ID NO: 58373 - RNA, 19 nt, Homo sapiens
  misc_RNA (1)...(19): siRNA sense strand
ucacugucaucuuaaacaa

SEQ ID NO: 58374 - RNA, 19 nt, Homo sapiens
  misc_RNA (1)...(19): siRNA sense strand
gcacaggaagcucagucua

SEQ ID NO: 58375 - RNA, 19 nt, Homo sapiens
  misc_RNA (1)...(19): siRNA sense strand
gaaauaccaccgaaguagu

SEQ ID NO: 58376 - RNA, 19 nt, Homo sapiens
  misc_RNA (1)...(19): siRNA sense strand
uaagaaauaccaccgaagu

SEQ ID NO: 58377 - RNA, 19 nt, Homo sapiens
  misc_RNA (1)...(19): siRNA sense strand
caauaaggaugcuguucca

SEQ ID NO: 58378 - RNA, 19 nt, Homo sapiens
  misc_RNA (1)...(19): siRNA sense strand
ucaugucugucuacuuuga

SEQ ID NO: 58379 - RNA, 19 nt, Homo sapiens
  misc_RNA (1)...(19): siRNA sense strand
ggucuugacuccaaaaguu

SEQ ID NO: 58380 - RNA, 19 nt, Homo sapiens
  misc_RNA (1)...(19): siRNA sense strand
gaacaggagcuuggagaca

SEQ ID NO: 58381 - RNA, 19 nt, Homo sapiens
  misc_RNA (1)...(19): siRNA sense strand
gaguauggcaccuugcauu

SEQ ID NO: 58382 - RNA, 19 nt, Homo sapiens
  misc_RNA (1)...(19): siRNA sense strand
cccaaggucuccuauguca

SEQ ID NO: 58383 - RNA, 19 nt, Homo sapiens
  misc_RNA (1)...(19): siRNA sense strand
ggauaugacaauaaacuuc

SEQ ID NO: 58384 - RNA, 19 nt, Homo sapiens
  misc_RNA (1)...(19): siRNA sense strand
acaaccugcuggaaggaua

SEQ ID NO: 58385 - RNA, 19 nt, Homo sapiens
  misc_RNA (1)...(19): siRNA sense strand
gagugaagccaacguuaau

SEQ ID NO: 58386 - RNA, 19 nt, Homo sapiens
  misc_RNA (1)...(19): siRNA sense strand
gaagaguacggcuaugagu

SEQ ID NO: 58387 - RNA, 19 nt, Homo sapiens
  misc_RNA (1)...(19): siRNA sense strand
agugaacgcuaucaauaug

SEQ ID NO: 58388 - RNA, 19 nt, Homo sapiens
  misc_RNA (1)...(19): siRNA sense strand
caaggucuccuaugucaca

SEQ ID NO: 58389 - RNA, 19 nt, Homo sapiens
  misc_RNA (1)...(19): siRNA sense strand
gcucuacccuggcuucacu

SEQ ID NO: 58390 - RNA, 19 nt, Homo sapiens
  misc_RNA (1)...(19): siRNA sense strand
gacaugggaggauacauau

SEQ ID NO: 58391 - RNA, 19 nt, Homo sapiens
  misc_RNA (1)...(19): siRNA sense strand
ccaagcaaggacaaagaua

SEQ ID NO: 58392 - RNA, 19 nt, Homo sapiens
  misc_RNA (1)...(19): siRNA sense strand
uugcacaacuuuccaaugg

SEQ ID NO: 58393 - RNA, 19 nt, Homo sapiens
  misc_RNA (1)...(19): siRNA sense strand
aacaggaugcugagaauuu

SEQ ID NO: 58394 - RNA, 19 nt, Homo sapiens
  misc_RNA (1)...(19): siRNA sense strand
acaggaugcugagaauuug

SEQ ID NO: 58395 - RNA, 19 nt, Homo sapiens
  misc_RNA (1)...(19): siRNA sense strand
aaucugaugaugacuauga

SEQ ID NO: 58396 - RNA, 19 nt, Homo sapiens
  misc_RNA (1)...(19): siRNA sense strand
gauccuggaggcuuuauca

SEQ ID NO: 58397 - RNA, 19 nt, Homo sapiens
  misc_RNA (1)...(19): siRNA sense strand
ccacgugaagaaauuguuu

SEQ ID NO: 58398 - RNA, 19 nt, Homo sapiens
  misc_RNA (1)...(19): siRNA sense strand
cauuaaaguccuccgauug

SEQ ID NO: 58399 - RNA, 19 nt, Homo sapiens
  misc_RNA (1)...(19): siRNA sense strand
agcgauggaucucuuugua

SEQ ID NO: 58400 - RNA, 19 nt, Homo sapiens
  misc_RNA (1)...(19): siRNA sense strand
ugaagugggcgacacaaga

SEQ ID NO: 58401 - RNA, 19 nt, Homo sapiens
  misc_RNA (1)...(19): siRNA sense strand
uuaaaguccuccgauugaa

SEQ ID NO: 58402 - RNA, 19 nt, Homo sapiens
  misc_RNA (1)...(19): siRNA sense strand
aauaaacuucggccugaua

SEQ ID NO: 58403 - RNA, 19 nt, Homo sapiens
  misc_RNA (1)...(19): siRNA sense strand
gcuacacaccuucaagaga

SEQ ID NO: 58404 - RNA, 19 nt, Homo sapiens
  misc_RNA (1)...(19): siRNA sense strand
caagaucagcaaccauuca

SEQ ID NO: 58405 - RNA, 19 nt, Homo sapiens
  misc_RNA (1)...(19): siRNA sense strand
aagcaaggacaaagauaaa

SEQ ID NO: 58406 - RNA, 19 nt, Homo sapiens
  misc_RNA (1)...(19): siRNA sense strand
gaaaccaagcaaggacaaa

SEQ ID NO: 58407 - RNA, 19 nt, Homo sapiens
  misc_RNA (1)...(19): siRNA sense strand
ggaaaccaagcaaggacaa

SEQ ID NO: 58408 - RNA, 19 nt, Homo sapiens
  misc_RNA (1)...(19): siRNA sense strand
agaaaucugaugaugacua

SEQ ID NO: 58409 - RNA, 19 nt, Homo sapiens
  misc_RNA (1)...(19): siRNA sense strand
gugucuuucuggaucaaua

SEQ ID NO: 58410 - RNA, 19 nt, Homo sapiens
  misc_RNA (1)...(19): siRNA sense strand
agacaacuuccggagauua

SEQ ID NO: 58411 - RNA, 19 nt, Homo sapiens
  misc_RNA (1)...(19): siRNA sense strand
gaggcuuuaucaauucuca

SEQ ID NO: 58412 - RNA, 19 nt, Homo sapiens
  misc_RNA (1)...(19): siRNA sense strand
uccagacacuuucuucaga

SEQ ID NO: 58413 - RNA, 19 nt, Homo sapiens
  misc_RNA (1)...(19): siRNA sense strand
gcuggaaggauaugacaau

SEQ ID NO: 58414 - RNA, 19 nt, Homo sapiens
  misc_RNA (1)...(19): siRNA sense strand
ggaagcgaaguucuguuga

SEQ ID NO: 58415 - RNA, 19 nt, Homo sapiens
  misc_RNA (1)...(19): siRNA sense strand
cuauccacgugaagaaauu

SEQ ID NO: 58416 - RNA, 19 nt, Homo sapiens
  misc_RNA (1)...(19): siRNA sense strand
gcugagaauuuggaaugau

SEQ ID NO: 58417 - RNA, 19 nt, Homo sapiens
  misc_RNA (1)...(19): siRNA sense strand
cuggaaggauaugacaaua

SEQ ID NO: 58418 - RNA, 19 nt, Homo sapiens
  misc_RNA (1)...(19): siRNA sense strand
cagugaacgcuaucaauau

SEQ ID NO: 58419 - RNA, 19 nt, Homo sapiens
  misc_RNA (1)...(19): siRNA sense strand
gaagaaugggauacuuuac

SEQ ID NO: 58420 - RNA, 19 nt, Homo sapiens
  misc_RNA (1)...(19): siRNA sense strand
gacaacuuccggagauuau

SEQ ID NO: 58421 - RNA, 19 nt, Homo sapiens
  misc_RNA (1)...(19): siRNA sense strand
aagaaauaccaccgaagua

SEQ ID NO: 58422 - RNA, 19 nt, Homo sapiens
  misc_RNA (1)...(19): siRNA sense strand
cugagaauuuggaaugaug

SEQ ID NO: 58423 - RNA, 19 nt, Homo sapiens
  misc_RNA (1)...(19): siRNA sense strand
aaacuucggccugauauag

SEQ ID NO: 58424 - RNA, 19 nt, Homo sapiens
  misc_RNA (1)...(19): siRNA sense strand
aguauggcaccuugcauua

SEQ ID NO: 58425 - RNA, 19 nt, Homo sapiens
  misc_RNA (1)...(19): siRNA sense strand
ggaucucuuuguaucuguu

SEQ ID NO: 58426 - RNA, 19 nt, Homo sapiens
  misc_RNA (1)...(19): siRNA sense strand
agaaugggauacuuuacca

SEQ ID NO: 58427 - RNA, 19 nt, Homo sapiens
  misc_RNA (1)...(19): siRNA sense strand
caacuuccggagauuaugu

SEQ ID NO: 58428 - RNA, 19 nt, Homo sapiens
  misc_RNA (1)...(19): siRNA sense strand
gaugcugagugccaauuac

SEQ ID NO: 58429 - RNA, 19 nt, Homo sapiens
  misc_RNA (1)...(19): siRNA sense strand
cuuuguaucuguuuguuuc

SEQ ID NO: 58430 - RNA, 19 nt, Homo sapiens
  misc_RNA (1)...(19): siRNA sense strand
guucuccaguuauggcuau

SEQ ID NO: 58431 - RNA, 19 nt, Homo sapiens
  misc_RNA (1)...(19): siRNA sense strand
gugaagccaacguuaauuc

SEQ ID NO: 58432 - RNA, 19 nt, Homo sapiens
  misc_RNA (1)...(19): siRNA sense strand
gcgauggaucucuuuguau

SEQ ID NO: 58433 - RNA, 19 nt, Homo sapiens
  misc_RNA (1)...(19): siRNA sense strand
ccagaacaucuuuagguau

SEQ ID NO: 58434 - RNA, 19 nt, Homo sapiens
  misc_RNA (1)...(19): siRNA sense strand
uggaaggauaugacaauaa

SEQ ID NO: 58435 - RNA, 19 nt, Homo sapiens
  misc_RNA (1)...(19): siRNA sense strand
caagauccuggaggcuuua

SEQ ID NO: 58436 - RNA, 19 nt, Homo sapiens
  misc_RNA (1)...(19): siRNA sense strand
gcugagugccaauuacaau

SEQ ID NO: 58437 - RNA, 19 nt, Homo sapiens
  misc_RNA (1)...(19): siRNA sense strand
caacaggaugcugagaauu

SEQ ID NO: 58438 - RNA, 19 nt, Homo sapiens
  misc_RNA (1)...(19): siRNA sense strand
aagccaacguuaauucaca

SEQ ID NO: 58439 - RNA, 19 nt, Homo sapiens
  misc_RNA (1)...(19): siRNA sense strand
gcagagacaccuugaagua

SEQ ID NO: 58440 - RNA, 19 nt, Homo sapiens
  misc_RNA (1)...(19): siRNA sense strand
ugacuucucuaaucuguuu

SEQ ID NO: 58441 - RNA, 19 nt, Homo sapiens
  misc_RNA (1)...(19): siRNA sense strand
gagaauggcugacaucaac

SEQ ID NO: 58442 - RNA, 19 nt, Homo sapiens
  misc_RNA (1)...(19): siRNA sense strand
ggacauacuccucaacuau

SEQ ID NO: 58443 - RNA, 19 nt, Homo sapiens
  misc_RNA (1)...(19): siRNA sense strand
gagaagagucgccuuguga

SEQ ID NO: 58444 - RNA, 19 nt, Homo sapiens
  misc_RNA (1)...(19): siRNA sense strand
gagaucugcuuccggcuaa

SEQ ID NO: 58445 - RNA, 19 nt, Homo sapiens
  misc_RNA (1)...(19): siRNA sense strand
ccaaggugcuggacuuuca

SEQ ID NO: 58446 - RNA, 19 nt, Homo sapiens
  misc_RNA (1)...(19): siRNA sense strand
gcacaggucauccucgauu

SEQ ID NO: 58447 - RNA, 19 nt, Homo sapiens
  misc_RNA (1)...(19): siRNA sense strand
ccaacagccuggaagagaa

SEQ ID NO: 58448 - RNA, 19 nt, Homo sapiens
  misc_RNA (1)...(19): siRNA sense strand
ccacuggauuggauauuau

SEQ ID NO: 58449 - RNA, 19 nt, Homo sapiens
  misc_RNA (1)...(19): siRNA sense strand
gaaccugcuuuccugugaa

SEQ ID NO: 58450 - RNA, 19 nt, Homo sapiens
  misc_RNA (1)...(19): siRNA sense strand
agagacaccuugaaguaug

SEQ ID NO: 58451 - RNA, 19 nt, Homo sapiens
  misc_RNA (1)...(19): siRNA sense strand
uaagaacggugaggagcaa

SEQ ID NO: 58452 - RNA, 19 nt, Homo sapiens
  misc_RNA (1)...(19): siRNA sense strand
agacugacuucucuaaucu

SEQ ID NO: 58453 - RNA, 19 nt, Homo sapiens
  misc_RNA (1)...(19): siRNA sense strand
ggagcaaaccgugcaauuc

SEQ ID NO: 58454 - RNA, 19 nt, Homo sapiens
  misc_RNA (1)...(19): siRNA sense strand
gaucugcggcuucuugcaa

SEQ ID NO: 58455 - RNA, 19 nt, Homo sapiens
  misc_RNA (1)...(19): siRNA sense strand
ggagaauggcugacaucaa

SEQ ID NO: 58456 - RNA, 19 nt, Homo sapiens
  misc_RNA (1)...(19): siRNA sense strand
uggccuagcuggagaaugg

SEQ ID NO: 58457 - RNA, 19 nt, Homo sapiens
  misc_RNA (1)...(19): siRNA sense strand
gcauggagggcuucaacuu

SEQ ID NO: 58458 - RNA, 19 nt, Homo sapiens
  misc_RNA (1)...(19): siRNA sense strand
ggaccaacagccuggaaga

SEQ ID NO: 58459 - RNA, 19 nt, Homo sapiens
  misc_RNA (1)...(19): siRNA sense strand
gagacaccuugaaguaugg

SEQ ID NO: 58460 - RNA, 19 nt, Homo sapiens
  misc_RNA (1)...(19): siRNA sense strand
agaaccugcuuuccuguga

SEQ ID NO: 58461 - RNA, 19 nt, Homo sapiens
  misc_RNA (1)...(19): siRNA sense strand
uggagcagauccugguuga

SEQ ID NO: 58462 - RNA, 19 nt, Homo sapiens
  misc_RNA (1)...(19): siRNA sense strand
caucaacggccaauaccaa

SEQ ID NO: 58463 - RNA, 19 nt, Homo sapiens
  misc_RNA (1)...(19): siRNA sense strand
cacaggucauccucgauuu

SEQ ID NO: 58464 - RNA, 19 nt, Homo sapiens
  misc_RNA (1)...(19): siRNA sense strand
gaagagucgccuugugagu

SEQ ID NO: 58465 - RNA, 19 nt, Homo sapiens
  misc_RNA (1)...(19): siRNA sense strand
gagcagauccugguugacu

SEQ ID NO: 58466 - RNA, 19 nt, Homo sapiens
  misc_RNA (1)...(19): siRNA sense strand
gagcaaaccgugcaauucc

SEQ ID NO: 58467 - RNA, 19 nt, Homo sapiens
  misc_RNA (1)...(19): siRNA sense strand
ugacaucaacggccaauac

SEQ ID NO: 58468 - RNA, 19 nt, Homo sapiens
  misc_RNA (1)...(19): siRNA sense strand
agagaagagucgccuugug

SEQ ID NO: 58469 - RNA, 19 nt, Homo sapiens
  misc_RNA (1)...(19): siRNA sense strand
uggacauacuccucaacua

SEQ ID NO: 58470 - RNA, 19 nt, Homo sapiens
  misc_RNA (1)...(19): siRNA sense strand
cauggagggcuucaacuug

SEQ ID NO: 58471 - RNA, 19 nt, Homo sapiens
  misc_RNA (1)...(19): siRNA sense strand
cuaaucuguuugcuagaga

SEQ ID NO: 58472 - RNA, 19 nt, Homo sapiens
  misc_RNA (1)...(19): siRNA sense strand
cagagacaccuugaaguau

SEQ ID NO: 58473 - RNA, 19 nt, Homo sapiens
  misc_RNA (1)...(19): siRNA sense strand
gcgcacagagacugacuuc

SEQ ID NO: 58474 - RNA, 19 nt, Homo sapiens
  misc_RNA (1)...(19): siRNA sense strand
ggaagugguggacauacuc

SEQ ID NO: 58475 - RNA, 19 nt, Homo sapiens
  misc_RNA (1)...(19): siRNA sense strand
gcuggagaauggcugacau

SEQ ID NO: 58476 - RNA, 19 nt, Homo sapiens
  misc_RNA (1)...(19): siRNA sense strand
caacggccaauaccaacau

SEQ ID NO: 58477 - RNA, 19 nt, Homo sapiens
  misc_RNA (1)...(19): siRNA sense strand
ggauauuauuggccuagcu

SEQ ID NO: 58478 - RNA, 19 nt, Homo sapiens
  misc_RNA (1)...(19): siRNA sense strand
gaucugcuuccggcuaaga

SEQ ID NO: 58479 - RNA, 19 nt, Homo sapiens
  misc_RNA (1)...(19): siRNA sense strand
caacagccuggaagagaag

SEQ ID NO: 58480 - RNA, 19 nt, Homo sapiens
  misc_RNA (1)...(19): siRNA sense strand
gcagagacaccuugaagua

SEQ ID NO: 58481 - RNA, 19 nt, Homo sapiens
  misc_RNA (1)...(19): siRNA sense strand
ugacuucucuaaucuguuu

SEQ ID NO: 58482 - RNA, 19 nt, Homo sapiens
  misc_RNA (1)...(19): siRNA sense strand
gagaauggcugacaucaac

SEQ ID NO: 58483 - RNA, 19 nt, Homo sapiens
  misc_RNA (1)...(19): siRNA sense strand
ggacauacuccucaacuau

SEQ ID NO: 58484 - RNA, 19 nt, Homo sapiens
  misc_RNA (1)...(19): siRNA sense strand
gagaagagucgccuuguga

SEQ ID NO: 58485 - RNA, 19 nt, Homo sapiens
  misc_RNA (1)...(19): siRNA sense strand
gagaucugcuuccggcuaa

SEQ ID NO: 58486 - RNA, 19 nt, Homo sapiens
  misc_RNA (1)...(19): siRNA sense strand
ccaaggugcuggacuuuca

SEQ ID NO: 58487 - RNA, 19 nt, Homo sapiens
  misc_RNA (1)...(19): siRNA sense strand
gcacaggucauccucgauu

SEQ ID NO: 58488 - RNA, 19 nt, Homo sapiens
  misc_RNA (1)...(19): siRNA sense strand
ccaacagccuggaagagaa

SEQ ID NO: 58489 - RNA, 19 nt, Homo sapiens
  misc_RNA (1)...(19): siRNA sense strand
ccacuggauuggauauuau

SEQ ID NO: 58490 - RNA, 19 nt, Homo sapiens
  misc_RNA (1)...(19): siRNA sense strand
gaaccugcuuuccugugaa

SEQ ID NO: 58491 - RNA, 19 nt, Homo sapiens
  misc_RNA (1)...(19): siRNA sense strand
agagacaccuugaaguaug

SEQ ID NO: 58492 - RNA, 19 nt, Homo sapiens
  misc_RNA (1)...(19): siRNA sense strand
uaagaacggugaggagcaa

SEQ ID NO: 58493 - RNA, 19 nt, Homo sapiens
  misc_RNA (1)...(19): siRNA sense strand
agacugacuucucuaaucu

SEQ ID NO: 58494 - RNA, 19 nt, Homo sapiens
  misc_RNA (1)...(19): siRNA sense strand
ggagcaaaccgugcaauuc

SEQ ID NO: 58495 - RNA, 19 nt, Homo sapiens
  misc_RNA (1)...(19): siRNA sense strand
gaucugcggcuucuugcaa

SEQ ID NO: 58496 - RNA, 19 nt, Homo sapiens
  misc_RNA (1)...(19): siRNA sense strand
ggagaauggcugacaucaa

SEQ ID NO: 58497 - RNA, 19 nt, Homo sapiens
  misc_RNA (1)...(19): siRNA sense strand
uggccuagcuggagaaugg

SEQ ID NO: 58498 - RNA, 19 nt, Homo sapiens
  misc_RNA (1)...(19): siRNA sense strand
gcauggagggcuucaacuu

SEQ ID NO: 58499 - RNA, 19 nt, Homo sapiens
  misc_RNA (1)...(19): siRNA sense strand
ggaccaacagccuggaaga

SEQ ID NO: 58500 - RNA, 19 nt, Homo sapiens
  misc_RNA (1)...(19): siRNA sense strand
gagacaccuugaaguaugg

SEQ ID NO: 58501 - RNA, 19 nt, Homo sapiens
  misc_RNA (1)...(19): siRNA sense strand
agaaccugcuuuccuguga

SEQ ID NO: 58502 - RNA, 19 nt, Homo sapiens
  misc_RNA (1)...(19): siRNA sense strand
uggagcagauccugguuga

SEQ ID NO: 58503 - RNA, 19 nt, Homo sapiens
  misc_RNA (1)...(19): siRNA sense strand
caucaacggccaauaccaa

SEQ ID NO: 58504 - RNA, 19 nt, Homo sapiens
  misc_RNA (1)...(19): siRNA sense strand
cacaggucauccucgauuu

SEQ ID NO: 58505 - RNA, 19 nt, Homo sapiens
  misc_RNA (1)...(19): siRNA sense strand
gaagagucgccuugugagu

SEQ ID NO: 58506 - RNA, 19 nt, Homo sapiens
  misc_RNA (1)...(19): siRNA sense strand
gagcagauccugguugacu

SEQ ID NO: 58507 - RNA, 19 nt, Homo sapiens
  misc_RNA (1)...(19): siRNA sense strand
gagcaaaccgugcaauucc

SEQ ID NO: 58508 - RNA, 19 nt, Homo sapiens
  misc_RNA (1)...(19): siRNA sense strand
ugacaucaacggccaauac

SEQ ID NO: 58509 - RNA, 19 nt, Homo sapiens
  misc_RNA (1)...(19): siRNA sense strand
agagaagagucgccuugug

SEQ ID NO: 58510 - RNA, 19 nt, Homo sapiens
  misc_RNA (1)...(19): siRNA sense strand
uggacauacuccucaacua

SEQ ID NO: 58511 - RNA, 19 nt, Homo sapiens
  misc_RNA (1)...(19): siRNA sense strand
cauggagggcuucaacuug

SEQ ID NO: 58512 - RNA, 19 nt, Homo sapiens
  misc_RNA (1)...(19): siRNA sense strand
cuaaucuguuugcuagaga

SEQ ID NO: 58513 - RNA, 19 nt, Homo sapiens
  misc_RNA (1)...(19): siRNA sense strand
cagagacaccuugaaguau

SEQ ID NO: 58514 - RNA, 19 nt, Homo sapiens
  misc_RNA (1)...(19): siRNA sense strand
gcgcacagagacugacuuc

SEQ ID NO: 58515 - RNA, 19 nt, Homo sapiens
  misc_RNA (1)...(19): siRNA sense strand
ggaagugguggacauacuc

SEQ ID NO: 58516 - RNA, 19 nt, Homo sapiens
  misc_RNA (1)...(19): siRNA sense strand
gcuggagaauggcugacau

SEQ ID NO: 58517 - RNA, 19 nt, Homo sapiens
  misc_RNA (1)...(19): siRNA sense strand
caacggccaauaccaacau

SEQ ID NO: 58518 - RNA, 19 nt, Homo sapiens
  misc_RNA (1)...(19): siRNA sense strand
ggauauuauuggccuagcu

SEQ ID NO: 58519 - RNA, 19 nt, Homo sapiens
  misc_RNA (1)...(19): siRNA sense strand
caacagccuggaagagaag

SEQ ID NO: 58520 - RNA, 19 nt, Homo sapiens
  misc_RNA (1)...(19): siRNA sense strand
gaucugcuuccggcuaaga

SEQ ID NO: 58521 - RNA, 19 nt, Homo sapiens
  misc_RNA (1)...(19): siRNA sense strand
gaagguggcuccagugauu

SEQ ID NO: 58522 - RNA, 19 nt, Homo sapiens
  misc_RNA (1)...(19): siRNA sense strand
gauaugagaugguguuuga

SEQ ID NO: 58523 - RNA, 19 nt, Homo sapiens
  misc_RNA (1)...(19): siRNA sense strand
caaccaaagugauugauuu

SEQ ID NO: 58524 - RNA, 19 nt, Homo sapiens
  misc_RNA (1)...(19): siRNA sense strand
cuaaugagcuucuccaaga

SEQ ID NO: 58525 - RNA, 19 nt, Homo sapiens
  misc_RNA (1)...(19): siRNA sense strand
ggaagacaaugaagagaga

SEQ ID NO: 58526 - RNA, 19 nt, Homo sapiens
  misc_RNA (1)...(19): siRNA sense strand
aaacacaaguggaaacuga

SEQ ID NO: 58527 - RNA, 19 nt, Homo sapiens
  misc_RNA (1)...(19): siRNA sense strand
gacauugacuuccugauug

SEQ ID NO: 58528 - RNA, 19 nt, Homo sapiens
  misc_RNA (1)...(19): siRNA sense strand
aaacagggcauccuagaua

SEQ ID NO: 58529 - RNA, 19 nt, Homo sapiens
  misc_RNA (1)...(19): siRNA sense strand
gauuaaaugugaugagaga

SEQ ID NO: 58530 - RNA, 19 nt, Homo sapiens
  misc_RNA (1)...(19): siRNA sense strand
gaauaugucacacuaaaga

SEQ ID NO: 58531 - RNA, 19 nt, Homo sapiens
  misc_RNA (1)...(19): siRNA sense strand
gagacaaggucaauuucuu

SEQ ID NO: 58532 - RNA, 19 nt, Homo sapiens
  misc_RNA (1)...(19): siRNA sense strand
ggaguuggcagaguauuua

SEQ ID NO: 58533 - RNA, 19 nt, Homo sapiens
  misc_RNA (1)...(19): siRNA sense strand
caaaguggaugucaacuac

SEQ ID NO: 58534 - RNA, 19 nt, Homo sapiens
  misc_RNA (1)...(19): siRNA sense strand
ccaaguggcucagaaguuc

SEQ ID NO: 58535 - RNA, 19 nt, Homo sapiens
  misc_RNA (1)...(19): siRNA sense strand
uggaauaugucacacuaaa

SEQ ID NO: 58536 - RNA, 19 nt, Homo sapiens
  misc_RNA (1)...(19): siRNA sense strand
gauuaaagccagaaugaug

SEQ ID NO: 58537 - RNA, 19 nt, Homo sapiens
  misc_RNA (1)...(19): siRNA sense strand
gaacagacagcgugauucu

SEQ ID NO: 58538 - RNA, 19 nt, Homo sapiens
  misc_RNA (1)...(19): siRNA sense strand
ggauaugguuggauuagca

SEQ ID NO: 58539 - RNA, 19 nt, Homo sapiens
  misc_RNA (1)...(19): siRNA sense strand
cgccauaucuaacauguau

SEQ ID NO: 58540 - RNA, 19 nt, Homo sapiens
  misc_RNA (1)...(19): siRNA sense strand
auacuaacauguucaccua

SEQ ID NO: 58541 - RNA, 19 nt, Homo sapiens
  misc_RNA (1)...(19): siRNA sense strand
auuaugaccuguccuauga

SEQ ID NO: 58542 - RNA, 19 nt, Homo sapiens
  misc_RNA (1)...(19): siRNA sense strand
cagcaaauacuaacauguu

SEQ ID NO: 58543 - RNA, 19 nt, Homo sapiens
  misc_RNA (1)...(19): siRNA sense strand
gaagauggcucuggggauu

SEQ ID NO: 58544 - RNA, 19 nt, Homo sapiens
  misc_RNA (1)...(19): siRNA sense strand
ugaagcgcauguugauaaa

SEQ ID NO: 58545 - RNA, 19 nt, Homo sapiens
  misc_RNA (1)...(19): siRNA sense strand
ugauaaauguuuggaguug

SEQ ID NO: 58546 - RNA, 19 nt, Homo sapiens
  misc_RNA (1)...(19): siRNA sense strand
gauuccaucugaucuugaa

SEQ ID NO: 58547 - RNA, 19 nt, Homo sapiens
  misc_RNA (1)...(19): siRNA sense strand
ccagaaugauggaguaugg

SEQ ID NO: 58548 - RNA, 19 nt, Homo sapiens
  misc_RNA (1)...(19): siRNA sense strand
gcauguugauaaauguuug

SEQ ID NO: 58549 - RNA, 19 nt, Homo sapiens
  misc_RNA (1)...(19): siRNA sense strand
caucaacagcaaauacuaa

SEQ ID NO: 58550 - RNA, 19 nt, Homo sapiens
  misc_RNA (1)...(19): siRNA sense strand
ggaagccucagcacacaaa

SEQ ID NO: 58551 - RNA, 19 nt, Homo sapiens
  misc_RNA (1)...(19): siRNA sense strand
gcucugcucuccugguuag

SEQ ID NO: 58552 - RNA, 19 nt, Homo sapiens
  misc_RNA (1)...(19): siRNA sense strand
caaagugauugauuuccau

SEQ ID NO: 58553 - RNA, 19 nt, Homo sapiens
  misc_RNA (1)...(19): siRNA sense strand
caacucaccaagacauuga

SEQ ID NO: 58554 - RNA, 19 nt, Homo sapiens
  misc_RNA (1)...(19): siRNA sense strand
gcgugauucugauuaaaug

SEQ ID NO: 58555 - RNA, 19 nt, Homo sapiens
  misc_RNA (1)...(19): siRNA sense strand
ccaaaguggaugucaacua

SEQ ID NO: 58556 - RNA, 19 nt, Homo sapiens
  misc_RNA (1)...(19): siRNA sense strand
ccaaagugauugauuucca

SEQ ID NO: 58557 - RNA, 19 nt, Homo sapiens
  misc_RNA (1)...(19): siRNA sense strand
gugauuaaagccagaauga

SEQ ID NO: 58558 - RNA, 19 nt, Homo sapiens
  misc_RNA (1)...(19): siRNA sense strand
guuuggaguuggcagagua

SEQ ID NO: 58559 - RNA, 19 nt, Homo sapiens
  misc_RNA (1)...(19): siRNA sense strand
aagcgcauguugauaaaug

SEQ ID NO: 58560 - RNA, 19 nt, Homo sapiens
  misc_RNA (1)...(19): siRNA sense strand
gcaugccuccuaccucuuu

SEQ ID NO: 58561 - RNA, 19 nt, Homo sapiens
  misc_RNA (1)...(19): siRNA sense strand
cuaugaaauugcuccagua

SEQ ID NO: 58562 - RNA, 19 nt, Homo sapiens
  misc_RNA (1)...(19): siRNA sense strand
cauccuagauacuucaauc

SEQ ID NO: 58563 - RNA, 19 nt, Homo sapiens
  misc_RNA (1)...(19): siRNA sense strand
ccaacucugugacguggaa

SEQ ID NO: 58564 - RNA, 19 nt, Homo sapiens
  misc_RNA (1)...(19): siRNA sense strand
gcaaauacuaacauguuca

SEQ ID NO: 58565 - RNA, 19 nt, Homo sapiens
  misc_RNA (1)...(19): siRNA sense strand
gaaugagucgccucucgaa

SEQ ID NO: 58566 - RNA, 19 nt, Homo sapiens
  misc_RNA (1)...(19): siRNA sense strand
cuaacauguucaccuauga

SEQ ID NO: 58567 - RNA, 19 nt, Homo sapiens
  misc_RNA (1)...(19): siRNA sense strand
caacagcaaauacuaacau

SEQ ID NO: 58568 - RNA, 19 nt, Homo sapiens
  misc_RNA (1)...(19): siRNA sense strand
gacaaugaagagagaauga

SEQ ID NO: 58569 - RNA, 19 nt, Homo sapiens
  misc_RNA (1)...(19): siRNA sense strand
gauuacugaugucccgaaa

SEQ ID NO: 58570 - RNA, 19 nt, Homo sapiens
  misc_RNA (1)...(19): siRNA sense strand
gaucgcacgcuuuaagaug

SEQ ID NO: 58571 - RNA, 19 nt, Homo sapiens
  misc_RNA (1)...(19): siRNA sense strand
gaugaucgcacgcuuuaag

SEQ ID NO: 58572 - RNA, 19 nt, Homo sapiens
  misc_RNA (1)...(19): siRNA sense strand
gaggaaauuuugaugcauu

SEQ ID NO: 58573 - RNA, 19 nt, Homo sapiens
  misc_RNA (1)...(19): siRNA sense strand
agacauugacuuccugauu

SEQ ID NO: 58574 - RNA, 19 nt, Homo sapiens
  misc_RNA (1)...(19): siRNA sense strand
ggaugucaacuacgcguuu

SEQ ID NO: 58575 - RNA, 19 nt, Homo sapiens
  misc_RNA (1)...(19): siRNA sense strand
ggacgccacguugauguuu

SEQ ID NO: 58576 - RNA, 19 nt, Homo sapiens
  misc_RNA (1)...(19): siRNA sense strand
acagcgugauucugauuaa

SEQ ID NO: 58577 - RNA, 19 nt, Homo sapiens
  misc_RNA (1)...(19): siRNA sense strand
aaucaacuuucuacugguu

SEQ ID NO: 58578 - RNA, 19 nt, Homo sapiens
  misc_RNA (1)...(19): siRNA sense strand
guuuggauaugguuggauu

SEQ ID NO: 58579 - RNA, 19 nt, Homo sapiens
  misc_RNA (1)...(19): siRNA sense strand
caacuacgcguuucuccau

SEQ ID NO: 58580 - RNA, 19 nt, Homo sapiens
  misc_RNA (1)...(19): siRNA sense strand
uugaagcgcauguugauaa

SEQ ID NO: 58581 - RNA, 19 nt, Homo sapiens
  misc_RNA (1)...(19): siRNA sense strand
gaaaaugauuccaucugau

SEQ ID NO: 58582 - RNA, 19 nt, Homo sapiens
  misc_RNA (1)...(19): siRNA sense strand
gaugagagagggaaaauga

SEQ ID NO: 58583 - RNA, 19 nt, Homo sapiens
  misc_RNA (1)...(19): siRNA sense strand
gacagcgugauucugauua

SEQ ID NO: 58584 - RNA, 19 nt, Homo sapiens
  misc_RNA (1)...(19): siRNA sense strand
ucccagaagucaaggagaa

SEQ ID NO: 58585 - RNA, 19 nt, Homo sapiens
  misc_RNA (1)...(19): siRNA sense strand
gcuccaguauuugugcuuu

SEQ ID NO: 58586 - RNA, 19 nt, Homo sapiens
  misc_RNA (1)...(19): siRNA sense strand
agaaauagaacgccuugga

SEQ ID NO: 58587 - RNA, 19 nt, Homo sapiens
  misc_RNA (1)...(19): siRNA sense strand
acauugacuuccugauuga

SEQ ID NO: 58588 - RNA, 19 nt, Homo sapiens
  misc_RNA (1)...(19): siRNA sense strand
gcagaauugcaaccaaaug

SEQ ID NO: 58589 - RNA, 19 nt, Homo sapiens
  misc_RNA (1)...(19): siRNA sense strand
gaaaggaauggcugcucuu

SEQ ID NO: 58590 - RNA, 19 nt, Homo sapiens
  misc_RNA (1)...(19): siRNA sense strand
gaagucaaggagaaaggaa

SEQ ID NO: 58591 - RNA, 19 nt, Homo sapiens
  misc_RNA (1)...(19): siRNA sense strand
ccuccaagcuugcguacuc

SEQ ID NO: 58592 - RNA, 19 nt, Homo sapiens
  misc_RNA (1)...(19): siRNA sense strand
agggauugaugcagaauug

SEQ ID NO: 58593 - RNA, 19 nt, Homo sapiens
  misc_RNA (1)...(19): siRNA sense strand
gcucuucccaggcucauug

SEQ ID NO: 58594 - RNA, 19 nt, Homo sapiens
  misc_RNA (1)...(19): siRNA sense strand
aagccagaaugauggagua

SEQ ID NO: 58595 - RNA, 19 nt, Homo sapiens
  misc_RNA (1)...(19): siRNA sense strand
cuagauacuucaaucaacu

SEQ ID NO: 58596 - RNA, 19 nt, Homo sapiens
  misc_RNA (1)...(19): siRNA sense strand
gcaacucaccaagacauug

SEQ ID NO: 58597 - RNA, 19 nt, Homo sapiens
  misc_RNA (1)...(19): siRNA sense strand
acacaaaugucugcuucug

SEQ ID NO: 58598 - RNA, 19 nt, Homo sapiens
  misc_RNA (1)...(19): siRNA sense strand
gagaagagggauugaugca

SEQ ID NO: 58599 - RNA, 19 nt, Homo sapiens
  misc_RNA (1)...(19): siRNA sense strand
ggaauccacacaagaugau

SEQ ID NO: 58600 - RNA, 19 nt, Homo sapiens
  misc_RNA (1)...(19): siRNA sense strand
cgucugaacauagucauuu

SEQ ID NO: 58601 - RNA, 19 nt, Homo sapiens
  misc_RNA (1)...(19): siRNA sense strand
cagacuggcugacaucaac

SEQ ID NO: 58602 - RNA, 19 nt, Homo sapiens
  misc_RNA (1)...(19): siRNA sense strand
uuuggaauaugucacacua

SEQ ID NO: 58603 - RNA, 19 nt, Homo sapiens
  misc_RNA (1)...(19): siRNA sense strand
ugggagacaaggucaauuu

SEQ ID NO: 58604 - RNA, 19 nt, Homo sapiens
  misc_RNA (1)...(19): siRNA sense strand
cagcgugauucugauuaaa

SEQ ID NO: 58605 - RNA, 19 nt, Homo sapiens
  misc_RNA (1)...(19): siRNA sense strand
gauagaucaaccaaaguga

SEQ ID NO: 58606 - RNA, 19 nt, Homo sapiens
  misc_RNA (1)...(19): siRNA sense strand
gccaaacaacucuaaaaua

SEQ ID NO: 58607 - RNA, 19 nt, Homo sapiens
  misc_RNA (1)...(19): siRNA sense strand
ggagacaaggucaauuucu

SEQ ID NO: 58608 - RNA, 19 nt, Homo sapiens
  misc_RNA (1)...(19): siRNA sense strand
uuuaaacuauggcugaugu

SEQ ID NO: 58609 - RNA, 19 nt, Homo sapiens
  misc_RNA (1)...(19): siRNA sense strand
uagagaagagggauugaug

SEQ ID NO: 58610 - RNA, 19 nt, Homo sapiens
  misc_RNA (1)...(19): siRNA sense strand
gugcucugcucuccugguu

SEQ ID NO: 58611 - RNA, 19 nt, Homo sapiens
  misc_RNA (1)...(19): siRNA sense strand
gugauugauuuccauuauc

SEQ ID NO: 58612 - RNA, 19 nt, Homo sapiens
  misc_RNA (1)...(19): siRNA sense strand
uuuaagauguucccagaag

SEQ ID NO: 58613 - RNA, 19 nt, Homo sapiens
  misc_RNA (1)...(19): siRNA sense strand
ucaacuuucuacugguuug

SEQ ID NO: 58614 - RNA, 19 nt, Homo sapiens
  misc_RNA (1)...(19): siRNA sense strand
gcugcagccuuagggauug

SEQ ID NO: 58615 - RNA, 19 nt, Homo sapiens
  misc_RNA (1)...(19): siRNA sense strand
gaugucaacuacgcguuuc

SEQ ID NO: 58616 - RNA, 19 nt, Homo sapiens
  misc_RNA (1)...(19): siRNA sense strand
cugauuaaaugugaugaga

SEQ ID NO: 58617 - RNA, 19 nt, Homo sapiens
  misc_RNA (1)...(19): siRNA sense strand
acuaacauguucaccuaug

SEQ ID NO: 58618 - RNA, 19 nt, Homo sapiens
  misc_RNA (1)...(19): siRNA sense strand
ucaccaagacauugacuuc

SEQ ID NO: 58619 - RNA, 19 nt, Homo sapiens
  misc_RNA (1)...(19): siRNA sense strand
cgauagaucaaccaaagug

SEQ ID NO: 58620 - RNA, 19 nt, Homo sapiens
  misc_RNA (1)...(19): siRNA sense strand
ggaauaugucacacuaaag

SEQ ID NO: 58621 - RNA, 19 nt, Homo sapiens
  misc_RNA (1)...(19): siRNA sense strand
gaauaaugcugaccaagaa

SEQ ID NO: 58622 - RNA, 19 nt, Homo sapiens
  misc_RNA (1)...(19): siRNA sense strand
gcacaucucugccuguuug

SEQ ID NO: 58623 - RNA, 19 nt, Homo sapiens
  misc_RNA (1)...(19): siRNA sense strand
gagaagaggugucgugucu

SEQ ID NO: 58624 - RNA, 19 nt, Homo sapiens
  misc_RNA (1)...(19): siRNA sense strand
gcaagaggguacuccauau

SEQ ID NO: 58625 - RNA, 19 nt, Homo sapiens
  misc_RNA (1)...(19): siRNA sense strand
gaagaggugucgugucugu

SEQ ID NO: 58626 - RNA, 19 nt, Homo sapiens
  misc_RNA (1)...(19): siRNA sense strand
guaauccucccacuucuua

SEQ ID NO: 58627 - RNA, 19 nt, Homo sapiens
  misc_RNA (1)...(19): siRNA sense strand
ggaauaaugcugaccaaga

SEQ ID NO: 58628 - RNA, 19 nt, Homo sapiens
  misc_RNA (1)...(19): siRNA sense strand
gauccagagugccaaguaa

SEQ ID NO: 58629 - RNA, 19 nt, Homo sapiens
  misc_RNA (1)...(19): siRNA sense strand
gcucaauucugcaaagaga

SEQ ID NO: 58630 - RNA, 19 nt, Homo sapiens
  misc_RNA (1)...(19): siRNA sense strand
gcaaagcuguacaagagau

SEQ ID NO: 58631 - RNA, 19 nt, Homo sapiens
  misc_RNA (1)...(19): siRNA sense strand
acacugcccuugcucaauu

SEQ ID NO: 58632 - RNA, 19 nt, Homo sapiens
  misc_RNA (1)...(19): siRNA sense strand
caaagaagaggccugcaaa

SEQ ID NO: 58633 - RNA, 19 nt, Homo sapiens
  misc_RNA (1)...(19): siRNA sense strand
gcaaagagaagaaaauuga

SEQ ID NO: 58634 - RNA, 19 nt, Homo sapiens
  misc_RNA (1)...(19): siRNA sense strand
cugcaaagcuguacaagag

SEQ ID NO: 58635 - RNA, 19 nt, Homo sapiens
  misc_RNA (1)...(19): siRNA sense strand
ggacugcucugcacaucuc

SEQ ID NO: 58636 - RNA, 19 nt, Homo sapiens
  misc_RNA (1)...(19): siRNA sense strand
caagaggguacuccauaua

SEQ ID NO: 58637 - RNA, 19 nt, Homo sapiens
  misc_RNA (1)...(19): siRNA sense strand
agacuucccugcuuugguu

SEQ ID NO: 58638 - RNA, 19 nt, Homo sapiens
  misc_RNA (1)...(19): siRNA sense strand
gcaaagaagaggccugcaa

SEQ ID NO: 58639 - RNA, 19 nt, Homo sapiens
  misc_RNA (1)...(19): siRNA sense strand
ucucuaugcuggaauaaug

SEQ ID NO: 58640 - RNA, 19 nt, Homo sapiens
  misc_RNA (1)...(19): siRNA sense strand
gggagcaauuuauaggaaa

SEQ ID NO: 58641 - RNA, 19 nt, Homo sapiens
  misc_RNA (1)...(19): siRNA sense strand
cauaucagcccuugaggaa

SEQ ID NO: 58642 - RNA, 19 nt, Homo sapiens
  misc_RNA (1)...(19): siRNA sense strand
gguacuccauauacaggua

SEQ ID NO: 58643 - RNA, 19 nt, Homo sapiens
  misc_RNA (1)...(19): siRNA sense strand
gcagcccgaguacuuauaa

SEQ ID NO: 58644 - RNA, 19 nt, Homo sapiens
  misc_RNA (1)...(19): siRNA sense strand
caaauaccgccaucucaau

SEQ ID NO: 58645 - RNA, 19 nt, Homo sapiens
  misc_RNA (1)...(19): siRNA sense strand
gguauucucuaugcuggaa

SEQ ID NO: 58646 - RNA, 19 nt, Homo sapiens
  misc_RNA (1)...(19): siRNA sense strand
ucagguuucuaaugaucua

SEQ ID NO: 58647 - RNA, 19 nt, Homo sapiens
  misc_RNA (1)...(19): siRNA sense strand
ccacaccgcccuaacuguu

SEQ ID NO: 58648 - RNA, 19 nt, Homo sapiens
  misc_RNA (1)...(19): siRNA sense strand
ucaaauaccgccaucucaa

SEQ ID NO: 58649 - RNA, 19 nt, Homo sapiens
  misc_RNA (1)...(19): siRNA sense strand
cagaagcggcucaguuaga

SEQ ID NO: 58650 - RNA, 19 nt, Homo sapiens
  misc_RNA (1)...(19): siRNA sense strand
aacauacgcuggccuggaa

SEQ ID NO: 58651 - RNA, 19 nt, Homo sapiens
  misc_RNA (1)...(19): siRNA sense strand
gaaggccaguggucuugca

SEQ ID NO: 58652 - RNA, 19 nt, Homo sapiens
  misc_RNA (1)...(19): siRNA sense strand
ggagcaauuuauaggaaag

SEQ ID NO: 58653 - RNA, 19 nt, Homo sapiens
  misc_RNA (1)...(19): siRNA sense strand
gcccgaguacuuauaauug

SEQ ID NO: 58654 - RNA, 19 nt, Homo sapiens
  misc_RNA (1)...(19): siRNA sense strand
cagcagaagcggcucaguu

SEQ ID NO: 58655 - RNA, 19 nt, Homo sapiens
  misc_RNA (1)...(19): siRNA sense strand
agcagaagcggcucaguua

SEQ ID NO: 58656 - RNA, 19 nt, Homo sapiens
  misc_RNA (1)...(19): siRNA sense strand
caaagaguuuauggacaga

SEQ ID NO: 58657 - RNA, 19 nt, Homo sapiens
  misc_RNA (1)...(19): siRNA sense strand
acaggaccauaagcgauua

SEQ ID NO: 58658 - RNA, 19 nt, Homo sapiens
  misc_RNA (1)...(19): siRNA sense strand
gcagcuggagaaacaauug

SEQ ID NO: 58659 - RNA, 19 nt, Homo sapiens
  misc_RNA (1)...(19): siRNA sense strand
ggaaaaggggugauuguug

SEQ ID NO: 58660 - RNA, 19 nt, Homo sapiens
  misc_RNA (1)...(19): siRNA sense strand
auggaaggcuuucaccaaa

SEQ ID NO: 58661 - RNA, 19 nt, Homo sapiens
  misc_RNA (1)...(19): siRNA sense strand
ucaguuagaguccagcaaa

SEQ ID NO: 58662 - RNA, 19 nt, Homo sapiens
  misc_RNA (1)...(19): siRNA sense strand
ggagaugguggcccuaaca

SEQ ID NO: 58663 - RNA, 19 nt, Homo sapiens
  misc_RNA (1)...(19): siRNA sense strand
cgcccuaacuguugucaug

SEQ ID NO: 58664 - RNA, 19 nt, Homo sapiens
  misc_RNA (1)...(19): siRNA sense strand
gaccaagaauggcccaaaa

SEQ ID NO: 58665 - RNA, 19 nt, Homo sapiens
  misc_RNA (1)...(19): siRNA sense strand
ggaaugggagccuauuguc

SEQ ID NO: 58666 - RNA, 19 nt, Homo sapiens
  misc_RNA (1)...(19): siRNA sense strand
gggaaugggagccuauugu

SEQ ID NO: 58667 - RNA, 19 nt, Homo sapiens
  misc_RNA (1)...(19): siRNA sense strand
cccaaaaguucuagaguuu

SEQ ID NO: 58668 - RNA, 19 nt, Homo sapiens
  misc_RNA (1)...(19): siRNA sense strand
gcccaaaaguucuagaguu

SEQ ID NO: 58669 - RNA, 19 nt, Homo sapiens
  misc_RNA (1)...(19): siRNA sense strand
ggaaggcuuucaccaaacc

SEQ ID NO: 58670 - RNA, 19 nt, Homo sapiens
  misc_RNA (1)...(19): siRNA sense strand
ccucagguuucuaaugauc

SEQ ID NO: 58671 - RNA, 19 nt, Homo sapiens
  misc_RNA (1)...(19): siRNA sense strand
gugauucaguccaccuuag

SEQ ID NO: 58672 - RNA, 19 nt, Homo sapiens
  misc_RNA (1)...(19): siRNA sense strand
agggagcaauuuauaggaa

SEQ ID NO: 58673 - RNA, 19 nt, Homo sapiens
  misc_RNA (1)...(19): siRNA sense strand
gcaggagugcaaugcuuug

SEQ ID NO: 58674 - RNA, 19 nt, Homo sapiens
  misc_RNA (1)...(19): siRNA sense strand
gaggugucgugucuguguu

SEQ ID NO: 58675 - RNA, 19 nt, Homo sapiens
  misc_RNA (1)...(19): siRNA sense strand
caucaugucaaacaagugu

SEQ ID NO: 58676 - RNA, 19 nt, Homo sapiens
  misc_RNA (1)...(19): siRNA sense strand
cauggcaaguaaagguuau

SEQ ID NO: 58677 - RNA, 19 nt, Homo sapiens
  misc_RNA (1)...(19): siRNA sense strand
uggagaaacaauugucauu

SEQ ID NO: 58678 - RNA, 19 nt, Homo sapiens
  misc_RNA (1)...(19): siRNA sense strand
gagggagcaauuuauagga

SEQ ID NO: 58679 - RNA, 19 nt, Homo sapiens
  misc_RNA (1)...(19): siRNA sense strand
ugaggaagccaagaaagga

SEQ ID NO: 58680 - RNA, 19 nt, Homo sapiens
  misc_RNA (1)...(19): siRNA sense strand
uggauggcaugcagcaaga

SEQ ID NO: 58681 - RNA, 19 nt, Homo sapiens
  misc_RNA (1)...(19): siRNA sense strand
cacaggaccauaagcgauu

SEQ ID NO: 58682 - RNA, 19 nt, Homo sapiens
  misc_RNA (1)...(19): siRNA sense strand
ucacugauggcaagacugu

SEQ ID NO: 58683 - RNA, 19 nt, Homo sapiens
  misc_RNA (1)...(19): siRNA sense strand
gcagaagcggcucaguuag

SEQ ID NO: 58684 - RNA, 19 nt, Homo sapiens
  misc_RNA (1)...(19): siRNA sense strand
ggaagccaagaaaggacua

SEQ ID NO: 58685 - RNA, 19 nt, Homo sapiens
  misc_RNA (1)...(19): siRNA sense strand
ccaaggguguagagauaac

SEQ ID NO: 58686 - RNA, 19 nt, Homo sapiens
  misc_RNA (1)...(19): siRNA sense strand
ucauggcaaguaaagguua

SEQ ID NO: 58687 - RNA, 19 nt, Homo sapiens
  misc_RNA (1)...(19): siRNA sense strand
agaggguacuccauauaca

SEQ ID NO: 58688 - RNA, 19 nt, Homo sapiens
  misc_RNA (1)...(19): siRNA sense strand
gcacagucucaucauguca

SEQ ID NO: 58689 - RNA, 19 nt, Homo sapiens
  misc_RNA (1)...(19): siRNA sense strand
ggcaaaguaguaacucaug

SEQ ID NO: 58690 - RNA, 19 nt, Homo sapiens
  misc_RNA (1)...(19): siRNA sense strand
uuugagggagcaauuuaua

SEQ ID NO: 58691 - RNA, 19 nt, Homo sapiens
  misc_RNA (1)...(19): siRNA sense strand
agaagcggcucaguuagag

SEQ ID NO: 58692 - RNA, 19 nt, Homo sapiens
  misc_RNA (1)...(19): siRNA sense strand
acagucucaucaugucaaa

SEQ ID NO: 58693 - RNA, 19 nt, Homo sapiens
  misc_RNA (1)...(19): siRNA sense strand
gaguuuaauugccguuuug

SEQ ID NO: 58694 - RNA, 19 nt, Homo sapiens
  misc_RNA (1)...(19): siRNA sense strand
agcaagaggguacuccaua

SEQ ID NO: 58695 - RNA, 19 nt, Homo sapiens
  misc_RNA (1)...(19): siRNA sense strand
aagagaucaugcaggagaa

SEQ ID NO: 58696 - RNA, 19 nt, Homo sapiens
  misc_RNA (1)...(19): siRNA sense strand
aaaguuugagggagcaauu

SEQ ID NO: 58697 - RNA, 19 nt, Homo sapiens
  misc_RNA (1)...(19): siRNA sense strand
ccacacugcccuugcucaa

SEQ ID NO: 58698 - RNA, 19 nt, Homo sapiens
  misc_RNA (1)...(19): siRNA sense strand
guagagauaacaggguuuc

SEQ ID NO: 58699 - RNA, 19 nt, Homo sapiens
  misc_RNA (1)...(19): siRNA sense strand
uguaguuguuggaccagaa

SEQ ID NO: 58700 - RNA, 19 nt, Homo sapiens
  misc_RNA (1)...(19): siRNA sense strand
gcacaauggaaggcuuuca

SEQ ID NO: 58701 - RNA, 19 nt, Homo sapiens
  misc_RNA (1)...(19): siRNA sense strand
gagcaauuuauaggaaaga

SEQ ID NO: 58702 - RNA, 19 nt, Homo sapiens
  misc_RNA (1)...(19): siRNA sense strand
cugcacaucucugccuguu

SEQ ID NO: 58703 - RNA, 19 nt, Homo sapiens
  misc_RNA (1)...(19): siRNA sense strand
ugucuguguuucacugaug

SEQ ID NO: 58704 - RNA, 19 nt, Homo sapiens
  misc_RNA (1)...(19): siRNA sense strand
agaagaggccugcaaagcu

SEQ ID NO: 58705 - RNA, 19 nt, Homo sapiens
  misc_RNA (1)...(19): siRNA sense strand
gccugcagcuucauuuuga

SEQ ID NO: 58706 - RNA, 19 nt, Homo sapiens
  misc_RNA (1)...(19): siRNA sense strand
aauggaaggcuuucaccaa

SEQ ID NO: 58707 - RNA, 19 nt, Homo sapiens
  misc_RNA (1)...(19): siRNA sense strand
ccccucagguuucuaauga

SEQ ID NO: 58708 - RNA, 19 nt, Homo sapiens
  misc_RNA (1)...(19): siRNA sense strand
acaccgcccuaacuguugu

SEQ ID NO: 58709 - RNA, 19 nt, Homo sapiens
  misc_RNA (1)...(19): siRNA sense strand
gaaaaccacaccgcccuaa

SEQ ID NO: 58710 - RNA, 19 nt, Homo sapiens
  misc_RNA (1)...(19): siRNA sense strand
caagaauggcccaaaaguu

SEQ ID NO: 58711 - RNA, 19 nt, Homo sapiens
  misc_RNA (1)...(19): siRNA sense strand
gugaaggccaguggucuug

SEQ ID NO: 58712 - RNA, 19 nt, Homo sapiens
  misc_RNA (1)...(19): siRNA sense strand
aagguuauccuggagacua

SEQ ID NO: 58713 - RNA, 19 nt, Homo sapiens
  misc_RNA (1)...(19): siRNA sense strand
cccgaguacuuauaauugg

SEQ ID NO: 58714 - RNA, 19 nt, Homo sapiens
  misc_RNA (1)...(19): siRNA sense strand
ugauccagagugccaagua

SEQ ID NO: 58715 - RNA, 19 nt, Homo sapiens
  misc_RNA (1)...(19): siRNA sense strand
gaauaaugcugaccaagaa

SEQ ID NO: 58716 - RNA, 19 nt, Homo sapiens
  misc_RNA (1)...(19): siRNA sense strand
gcacaucucugccuguuug

SEQ ID NO: 58717 - RNA, 19 nt, Homo sapiens
  misc_RNA (1)...(19): siRNA sense strand
gagaagaggugucgugucu

SEQ ID NO: 58718 - RNA, 19 nt, Homo sapiens
  misc_RNA (1)...(19): siRNA sense strand
gcaagaggguacuccauau

SEQ ID NO: 58719 - RNA, 19 nt, Homo sapiens
  misc_RNA (1)...(19): siRNA sense strand
gaagaggugucgugucugu

SEQ ID NO: 58720 - RNA, 19 nt, Homo sapiens
  misc_RNA (1)...(19): siRNA sense strand
guaauccucccacuucuua

SEQ ID NO: 58721 - RNA, 19 nt, Homo sapiens
  misc_RNA (1)...(19): siRNA sense strand
ggaauaaugcugaccaaga

SEQ ID NO: 58722 - RNA, 19 nt, Homo sapiens
  misc_RNA (1)...(19): siRNA sense strand
gauccagagugccaaguaa

SEQ ID NO: 58723 - RNA, 19 nt, Homo sapiens
  misc_RNA (1)...(19): siRNA sense strand
gcucaauucugcaaagaga

SEQ ID NO: 58724 - RNA, 19 nt, Homo sapiens
  misc_RNA (1)...(19): siRNA sense strand
gcaaagcuguacaagagau

SEQ ID NO: 58725 - RNA, 19 nt, Homo sapiens
  misc_RNA (1)...(19): siRNA sense strand
acacugcccuugcucaauu

SEQ ID NO: 58726 - RNA, 19 nt, Homo sapiens
  misc_RNA (1)...(19): siRNA sense strand
caaagaagaggccugcaaa

SEQ ID NO: 58727 - RNA, 19 nt, Homo sapiens
  misc_RNA (1)...(19): siRNA sense strand
gcaaagagaagaaaauuga

SEQ ID NO: 58728 - RNA, 19 nt, Homo sapiens
  misc_RNA (1)...(19): siRNA sense strand
cugcaaagcuguacaagag

SEQ ID NO: 58729 - RNA, 19 nt, Homo sapiens
  misc_RNA (1)...(19): siRNA sense strand
ggacugcucugcacaucuc

SEQ ID NO: 58730 - RNA, 19 nt, Homo sapiens
  misc_RNA (1)...(19): siRNA sense strand
caagaggguacuccauaua

SEQ ID NO: 58731 - RNA, 19 nt, Homo sapiens
  misc_RNA (1)...(19): siRNA sense strand
agacuucccugcuuugguu

SEQ ID NO: 58732 - RNA, 19 nt, Homo sapiens
  misc_RNA (1)...(19): siRNA sense strand
gcaaagaagaggccugcaa

SEQ ID NO: 58733 - RNA, 19 nt, Homo sapiens
  misc_RNA (1)...(19): siRNA sense strand
ucucuaugcuggaauaaug

SEQ ID NO: 58734 - RNA, 19 nt, Homo sapiens
  misc_RNA (1)...(19): siRNA sense strand
gggagcaauuuauaggaaa

SEQ ID NO: 58735 - RNA, 19 nt, Homo sapiens
  misc_RNA (1)...(19): siRNA sense strand
cauaucagcccuugaggaa

SEQ ID NO: 58736 - RNA, 19 nt, Homo sapiens
  misc_RNA (1)...(19): siRNA sense strand
gguacuccauauacaggua

SEQ ID NO: 58737 - RNA, 19 nt, Homo sapiens
  misc_RNA (1)...(19): siRNA sense strand
gcagcccgaguacuuauaa

SEQ ID NO: 58738 - RNA, 19 nt, Homo sapiens
  misc_RNA (1)...(19): siRNA sense strand
caaauaccgccaucucaau

SEQ ID NO: 58739 - RNA, 19 nt, Homo sapiens
  misc_RNA (1)...(19): siRNA sense strand
gguauucucuaugcuggaa

SEQ ID NO: 58740 - RNA, 19 nt, Homo sapiens
  misc_RNA (1)...(19): siRNA sense strand
ucagguuucuaaugaucua

SEQ ID NO: 58741 - RNA, 19 nt, Homo sapiens
  misc_RNA (1)...(19): siRNA sense strand
ccacaccgcccuaacuguu

SEQ ID NO: 58742 - RNA, 19 nt, Homo sapiens
  misc_RNA (1)...(19): siRNA sense strand
ucaaauaccgccaucucaa

SEQ ID NO: 58743 - RNA, 19 nt, Homo sapiens
  misc_RNA (1)...(19): siRNA sense strand
cagaagcggcucaguuaga

SEQ ID NO: 58744 - RNA, 19 nt, Homo sapiens
  misc_RNA (1)...(19): siRNA sense strand
aacauacgcuggccuggaa

SEQ ID NO: 58745 - RNA, 19 nt, Homo sapiens
  misc_RNA (1)...(19): siRNA sense strand
gaaggccaguggucuugca

SEQ ID NO: 58746 - RNA, 19 nt, Homo sapiens
  misc_RNA (1)...(19): siRNA sense strand
ggagcaauuuauaggaaag

SEQ ID NO: 58747 - RNA, 19 nt, Homo sapiens
  misc_RNA (1)...(19): siRNA sense strand
gcccgaguacuuauaauug

SEQ ID NO: 58748 - RNA, 19 nt, Homo sapiens
  misc_RNA (1)...(19): siRNA sense strand
cagcagaagcggcucaguu

SEQ ID NO: 58749 - RNA, 19 nt, Homo sapiens
  misc_RNA (1)...(19): siRNA sense strand
agcagaagcggcucaguua

SEQ ID NO: 58750 - RNA, 19 nt, Homo sapiens
  misc_RNA (1)...(19): siRNA sense strand
caaagaguuuauggacaga

SEQ ID NO: 58751 - RNA, 19 nt, Homo sapiens
  misc_RNA (1)...(19): siRNA sense strand
acaggaccauaagcgauua

SEQ ID NO: 58752 - RNA, 19 nt, Homo sapiens
  misc_RNA (1)...(19): siRNA sense strand
gcagcuggagaaacaauug

SEQ ID NO: 58753 - RNA, 19 nt, Homo sapiens
  misc_RNA (1)...(19): siRNA sense strand
ggaaaaggggugauuguug

SEQ ID NO: 58754 - RNA, 19 nt, Homo sapiens
  misc_RNA (1)...(19): siRNA sense strand
auggaaggcuuucaccaaa

SEQ ID NO: 58755 - RNA, 19 nt, Homo sapiens
  misc_RNA (1)...(19): siRNA sense strand
ucaguuagaguccagcaaa

SEQ ID NO: 58756 - RNA, 19 nt, Homo sapiens
  misc_RNA (1)...(19): siRNA sense strand
ggagaugguggcccuaaca

SEQ ID NO: 58757 - RNA, 19 nt, Homo sapiens
  misc_RNA (1)...(19): siRNA sense strand
cgcccuaacuguugucaug

SEQ ID NO: 58758 - RNA, 19 nt, Homo sapiens
  misc_RNA (1)...(19): siRNA sense strand
gaccaagaauggcccaaaa

SEQ ID NO: 58759 - RNA, 19 nt, Homo sapiens
  misc_RNA (1)...(19): siRNA sense strand
ggaaugggagccuauuguc

SEQ ID NO: 58760 - RNA, 19 nt, Homo sapiens
  misc_RNA (1)...(19): siRNA sense strand
gggaaugggagccuauugu

SEQ ID NO: 58761 - RNA, 19 nt, Homo sapiens
  misc_RNA (1)...(19): siRNA sense strand
cccaaaaguucuagaguuu

SEQ ID NO: 58762 - RNA, 19 nt, Homo sapiens
  misc_RNA (1)...(19): siRNA sense strand
gcccaaaaguucuagaguu

SEQ ID NO: 58763 - RNA, 19 nt, Homo sapiens
  misc_RNA (1)...(19): siRNA sense strand
cgucggcuuucgugccaua

SEQ ID NO: 58764 - RNA, 19 nt, Homo sapiens
  misc_RNA (1)...(19): siRNA sense strand
ggaaggcuuucaccaaacc

SEQ ID NO: 58765 - RNA, 19 nt, Homo sapiens
  misc_RNA (1)...(19): siRNA sense strand
ccucagguuucuaaugauc

SEQ ID NO: 58766 - RNA, 19 nt, Homo sapiens
  misc_RNA (1)...(19): siRNA sense strand
gugauucaguccaccuuag

SEQ ID NO: 58767 - RNA, 19 nt, Homo sapiens
  misc_RNA (1)...(19): siRNA sense strand
agggagcaauuuauaggaa

SEQ ID NO: 58768 - RNA, 19 nt, Homo sapiens
  misc_RNA (1)...(19): siRNA sense strand
gcaggagugcaaugcuuug

SEQ ID NO: 58769 - RNA, 19 nt, Homo sapiens
  misc_RNA (1)...(19): siRNA sense strand
gaggugucgugucuguguu

SEQ ID NO: 58770 - RNA, 19 nt, Homo sapiens
  misc_RNA (1)...(19): siRNA sense strand
caucaugucaaacaagugu

SEQ ID NO: 58771 - RNA, 19 nt, Homo sapiens
  misc_RNA (1)...(19): siRNA sense strand
cauggcaaguaaagguuau

SEQ ID NO: 58772 - RNA, 19 nt, Homo sapiens
  misc_RNA (1)...(19): siRNA sense strand
uggagaaacaauugucauu

SEQ ID NO: 58773 - RNA, 19 nt, Homo sapiens
  misc_RNA (1)...(19): siRNA sense strand
gagggagcaauuuauagga

SEQ ID NO: 58774 - RNA, 19 nt, Homo sapiens
  misc_RNA (1)...(19): siRNA sense strand
ugaggaagccaagaaagga

SEQ ID NO: 58775 - RNA, 19 nt, Homo sapiens
  misc_RNA (1)...(19): siRNA sense strand
uggauggcaugcagcaaga

SEQ ID NO: 58776 - RNA, 19 nt, Homo sapiens
  misc_RNA (1)...(19): siRNA sense strand
cacaggaccauaagcgauu

SEQ ID NO: 58777 - RNA, 19 nt, Homo sapiens
  misc_RNA (1)...(19): siRNA sense strand
ucacugauggcaagacugu

SEQ ID NO: 58778 - RNA, 19 nt, Homo sapiens
  misc_RNA (1)...(19): siRNA sense strand
gcagaagcggcucaguuag

SEQ ID NO: 58779 - RNA, 19 nt, Homo sapiens
  misc_RNA (1)...(19): siRNA sense strand
ggaagccaagaaaggacua

SEQ ID NO: 58780 - RNA, 19 nt, Homo sapiens
  misc_RNA (1)...(19): siRNA sense strand
ccaaggguguagagauaac

SEQ ID NO: 58781 - RNA, 19 nt, Homo sapiens
  misc_RNA (1)...(19): siRNA sense strand
ucauggcaaguaaagguua

SEQ ID NO: 58782 - RNA, 19 nt, Homo sapiens
  misc_RNA (1)...(19): siRNA sense strand
agaggguacuccauauaca

SEQ ID NO: 58783 - RNA, 19 nt, Homo sapiens
  misc_RNA (1)...(19): siRNA sense strand
gcacagucucaucauguca

SEQ ID NO: 58784 - RNA, 19 nt, Homo sapiens
  misc_RNA (1)...(19): siRNA sense strand
ggcaaaguaguaacucaug

SEQ ID NO: 58785 - RNA, 19 nt, Homo sapiens
  misc_RNA (1)...(19): siRNA sense strand
uuugagggagcaauuuaua

SEQ ID NO: 58786 - RNA, 19 nt, Homo sapiens
  misc_RNA (1)...(19): siRNA sense strand
agaagcggcucaguuagag

SEQ ID NO: 58787 - RNA, 19 nt, Homo sapiens
  misc_RNA (1)...(19): siRNA sense strand
acagucucaucaugucaaa

SEQ ID NO: 58788 - RNA, 19 nt, Homo sapiens
  misc_RNA (1)...(19): siRNA sense strand
gaguuuaauugccguuuug

SEQ ID NO: 58789 - RNA, 19 nt, Homo sapiens
  misc_RNA (1)...(19): siRNA sense strand
agcaagaggguacuccaua

SEQ ID NO: 58790 - RNA, 19 nt, Homo sapiens
  misc_RNA (1)...(19): siRNA sense strand
aagagaucaugcaggagaa

SEQ ID NO: 58791 - RNA, 19 nt, Homo sapiens
  misc_RNA (1)...(19): siRNA sense strand
aaaguuugagggagcaauu

SEQ ID NO: 58792 - RNA, 19 nt, Homo sapiens
  misc_RNA (1)...(19): siRNA sense strand
ccacacugcccuugcucaa

SEQ ID NO: 58793 - RNA, 19 nt, Homo sapiens
  misc_RNA (1)...(19): siRNA sense strand
guagagauaacaggguuuc

SEQ ID NO: 58794 - RNA, 19 nt, Homo sapiens
  misc_RNA (1)...(19): siRNA sense strand
uguaguuguuggaccagaa

SEQ ID NO: 58795 - RNA, 19 nt, Homo sapiens
  misc_RNA (1)...(19): siRNA sense strand
gcacaauggaaggcuuuca

SEQ ID NO: 58796 - RNA, 19 nt, Homo sapiens
  misc_RNA (1)...(19): siRNA sense strand
gagcaauuuauaggaaaga

SEQ ID NO: 58797 - RNA, 19 nt, Homo sapiens
  misc_RNA (1)...(19): siRNA sense strand
cugcacaucucugccuguu

SEQ ID NO: 58798 - RNA, 19 nt, Homo sapiens
  misc_RNA (1)...(19): siRNA sense strand
ugucuguguuucacugaug

SEQ ID NO: 58799 - RNA, 19 nt, Homo sapiens
  misc_RNA (1)...(19): siRNA sense strand
agaagaggccugcaaagcu

SEQ ID NO: 58800 - RNA, 19 nt, Homo sapiens
  misc_RNA (1)...(19): siRNA sense strand
gccugcagcuucauuuuga

SEQ ID NO: 58801 - RNA, 19 nt, Homo sapiens
  misc_RNA (1)...(19): siRNA sense strand
aauggaaggcuuucaccaa

SEQ ID NO: 58802 - RNA, 19 nt, Homo sapiens
  misc_RNA (1)...(19): siRNA sense strand
ccccucagguuucuaauga

SEQ ID NO: 58803 - RNA, 19 nt, Homo sapiens
  misc_RNA (1)...(19): siRNA sense strand
acaccgcccuaacuguugu

SEQ ID NO: 58804 - RNA, 19 nt, Homo sapiens
  misc_RNA (1)...(19): siRNA sense strand
gaaaaccacaccgcccuaa

SEQ ID NO: 58805 - RNA, 19 nt, Homo sapiens
  misc_RNA (1)...(19): siRNA sense strand
caagaauggcccaaaaguu

SEQ ID NO: 58806 - RNA, 19 nt, Homo sapiens
  misc_RNA (1)...(19): siRNA sense strand
gugaaggccaguggucuug

SEQ ID NO: 58807 - RNA, 19 nt, Homo sapiens
  misc_RNA (1)...(19): siRNA sense strand
aagguuauccuggagacua

SEQ ID NO: 58808 - RNA, 19 nt, Homo sapiens
  misc_RNA (1)...(19): siRNA sense strand
cccgaguacuuauaauugg

SEQ ID NO: 58809 - RNA, 19 nt, Homo sapiens
  misc_RNA (1)...(19): siRNA sense strand
ugauccagagugccaagua

SEQ ID NO: 58810 - RNA, 19 nt, Homo sapiens
  misc_RNA (1)...(19): siRNA sense strand
gcagccagaugcacccuua

SEQ ID NO: 58811 - RNA, 19 nt, Homo sapiens
  misc_RNA (1)...(19): siRNA sense strand
gaccauggcuggaggaaga

SEQ ID NO: 58812 - RNA, 19 nt, Homo sapiens
  misc_RNA (1)...(19): siRNA sense strand
ggaagaagaagaagccuau

SEQ ID NO: 58813 - RNA, 19 nt, Homo sapiens
  misc_RNA (1)...(19): siRNA sense strand
gaagaagccuauggaugga

SEQ ID NO: 58814 - RNA, 19 nt, Homo sapiens
  misc_RNA (1)...(19): siRNA sense strand
ccagaugcacccuuaggua

SEQ ID NO: 58815 - RNA, 19 nt, Homo sapiens
  misc_RNA (1)...(19): siRNA sense strand
gaagaagaagccuauggau

SEQ ID NO: 58816 - RNA, 19 nt, Homo sapiens
  misc_RNA (1)...(19): siRNA sense strand
gugcugaggaugagaacua

SEQ ID NO: 58817 - RNA, 19 nt, Homo sapiens
  misc_RNA (1)...(19): siRNA sense strand
uggcagacccguccaagaa

SEQ ID NO: 58818 - RNA, 19 nt, Homo sapiens
  misc_RNA (1)...(19): siRNA sense strand
gcuggaggaagaagaagaa

SEQ ID NO: 58819 - RNA, 19 nt, Homo sapiens
  misc_RNA (1)...(19): siRNA sense strand
gcagugcugaggaugagaa

SEQ ID NO: 58820 - RNA, 19 nt, Homo sapiens
  misc_RNA (1)...(19): siRNA sense strand
gcgacuauguguguaugug

SEQ ID NO: 58821 - RNA, 19 nt, Homo sapiens
  misc_RNA (1)...(19): siRNA sense strand
agaagaagaagccuaugga

SEQ ID NO: 58822 - RNA, 19 nt, Homo sapiens
  misc_RNA (1)...(19): siRNA sense strand
guguguaugugcugaucuu

SEQ ID NO: 58823 - RNA, 19 nt, Homo sapiens
  misc_RNA (1)...(19): siRNA sense strand
gcagcgacuauguguguau

SEQ ID NO: 58824 - RNA, 19 nt, Homo sapiens
  misc_RNA (1)...(19): siRNA sense strand
ggcccagccucucaucauc

SEQ ID NO: 58825 - RNA, 19 nt, Homo sapiens
  misc_RNA (1)...(19): siRNA sense strand
ucucugaagcuucuuggaa

SEQ ID NO: 58826 - RNA, 19 nt, Homo sapiens
  misc_RNA (1)...(19): siRNA sense strand
cagcgacuauguguguaug

SEQ ID NO: 58827 - RNA, 19 nt, Homo sapiens
  misc_RNA (1)...(19): siRNA sense strand
uguaugugcugaucuuugc

SEQ ID NO: 58828 - RNA, 19 nt, Homo sapiens
  misc_RNA (1)...(19): siRNA sense strand
gaagaagaagaagccuaug

SEQ ID NO: 58829 - RNA, 19 nt, Homo sapiens
  misc_RNA (1)...(19): siRNA sense strand
gaugcacccuuagguacag

SEQ ID NO: 58830 - RNA, 19 nt, Homo sapiens
  misc_RNA (1)...(19): siRNA sense strand
ggagaaggcuugccgagau

SEQ ID NO: 58831 - RNA, 19 nt, Homo sapiens
  misc_RNA (1)...(19): siRNA sense strand
cgaagaaacucaagaagca

SEQ ID NO: 58832 - RNA, 19 nt, Homo sapiens
  misc_RNA (1)...(19): siRNA sense strand
acaaagaugucaacgaaug

SEQ ID NO: 58833 - RNA, 19 nt, Homo sapiens
  misc_RNA (1)...(19): siRNA sense strand
gguauucccuuccaugaga

SEQ ID NO: 58834 - RNA, 19 nt, Homo sapiens
  misc_RNA (1)...(19): siRNA sense strand
gcuucgagcucuccucuga

SEQ ID NO: 58835 - RNA, 19 nt, Homo sapiens
  misc_RNA (1)...(19): siRNA sense strand
gaaucaaccugggaaguag

SEQ ID NO: 58836 - RNA, 19 nt, Homo sapiens
  misc_RNA (1)...(19): siRNA sense strand
gagaaggcuugccgagaug

SEQ ID NO: 58837 - RNA, 19 nt, Homo sapiens
  misc_RNA (1)...(19): siRNA sense strand
cagggaugcugucaugaaa

SEQ ID NO: 58838 - RNA, 19 nt, Homo sapiens
  misc_RNA (1)...(19): siRNA sense strand
gacuaucacuccacgaaga

SEQ ID NO: 58839 - RNA, 19 nt, Homo sapiens
  misc_RNA (1)...(19): siRNA sense strand
uagacugcaucaacaagua

SEQ ID NO: 58840 - RNA, 19 nt, Homo sapiens
  misc_RNA (1)...(19): siRNA sense strand
uauaaacccucgucuggau

SEQ ID NO: 58841 - RNA, 19 nt, Homo sapiens
  misc_RNA (1)...(19): siRNA sense strand
ccaagagugugaaguccuu

SEQ ID NO: 58842 - RNA, 19 nt, Homo sapiens
  misc_RNA (1)...(19): siRNA sense strand
ggaaucuggucaucaaggu

SEQ ID NO: 58843 - RNA, 19 nt, Homo sapiens
  misc_RNA (1)...(19): siRNA sense strand
ccggguagcuuccacuguu

SEQ ID NO: 58844 - RNA, 19 nt, Homo sapiens
  misc_RNA (1)...(19): siRNA sense strand
ccacgaagaaacucaagaa

SEQ ID NO: 58845 - RNA, 19 nt, Homo sapiens
  misc_RNA (1)...(19): siRNA sense strand
ugaaucaaccugggaagua

SEQ ID NO: 58846 - RNA, 19 nt, Homo sapiens
  misc_RNA (1)...(19): siRNA sense strand
cgaggacuguaucaucuga

SEQ ID NO: 58847 - RNA, 19 nt, Homo sapiens
  misc_RNA (1)...(19): siRNA sense strand
gagcuacaccugccacugu

SEQ ID NO: 58848 - RNA, 19 nt, Homo sapiens
  misc_RNA (1)...(19): siRNA sense strand
caagauacuuagacugcau

SEQ ID NO: 58849 - RNA, 19 nt, Homo sapiens
  misc_RNA (1)...(19): siRNA sense strand
ggacaccugugaggacauc

SEQ ID NO: 58850 - RNA, 19 nt, Homo sapiens
  misc_RNA (1)...(19): siRNA sense strand
ggacgucgggacugaauca

SEQ ID NO: 58851 - RNA, 19 nt, Homo sapiens
  misc_RNA (1)...(19): siRNA sense strand
acacgaggaugcagugcuu

SEQ ID NO: 58852 - RNA, 19 nt, Homo sapiens
  misc_RNA (1)...(19): siRNA sense strand
gagcgaggacuguaucauc

SEQ ID NO: 58853 - RNA, 19 nt, Homo sapiens
  misc_RNA (1)...(19): siRNA sense strand
gagguauucccuuccauga

SEQ ID NO: 58854 - RNA, 19 nt, Homo sapiens
  misc_RNA (1)...(19): siRNA sense strand
aggaaacggugaaagugaa

SEQ ID NO: 58855 - RNA, 19 nt, Homo sapiens
  misc_RNA (1)...(19): siRNA sense strand
ggagcggcuucgccuucua

SEQ ID NO: 58856 - RNA, 19 nt, Homo sapiens
  misc_RNA (1)...(19): siRNA sense strand
caggaaacggugaaaguga

SEQ ID NO: 58857 - RNA, 19 nt, Homo sapiens
  misc_RNA (1)...(19): siRNA sense strand
gacgagggcuuugcguaca

SEQ ID NO: 58858 - RNA, 19 nt, Homo sapiens
  misc_RNA (1)...(19): siRNA sense strand
cuccagaucugccacaaca

SEQ ID NO: 58859 - RNA, 19 nt, Homo sapiens
  misc_RNA (1)...(19): siRNA sense strand
gagaagacaccaccaucca

SEQ ID NO: 58860 - RNA, 19 nt, Homo sapiens
  misc_RNA (1)...(19): siRNA sense strand
gcugguagcugaguuugac

SEQ ID NO: 58861 - RNA, 19 nt, Homo sapiens
  misc_RNA (1)...(19): siRNA sense strand
caacuucuucugccugugu

SEQ ID NO: 58862 - RNA, 19 nt, Homo sapiens
  misc_RNA (1)...(19): siRNA sense strand
cgcgggagguguucgagaa

SEQ ID NO: 58863 - RNA, 19 nt, Homo sapiens
  misc_RNA (1)...(19): siRNA sense strand
gaacuggcugaacggagaa

SEQ ID NO: 58864 - RNA, 19 nt, Homo sapiens
  misc_RNA (1)...(19): siRNA sense strand
cgcggaaucuggucaucaa

SEQ ID NO: 58865 - RNA, 19 nt, Homo sapiens
  misc_RNA (1)...(19): siRNA sense strand
ggaccugccaagacauaga

SEQ ID NO: 58866 - RNA, 19 nt, Homo sapiens
  misc_RNA (1)...(19): siRNA sense strand
gaccucgugcagccuauaa

SEQ ID NO: 58867 - RNA, 19 nt, Homo sapiens
  misc_RNA (1)...(19): siRNA sense strand
guacaagcacagcgacauc

SEQ ID NO: 58868 - RNA, 19 nt, Homo sapiens
  misc_RNA (1)...(19): siRNA sense strand
cagaugugccggugacuuc

SEQ ID NO: 58869 - RNA, 19 nt, Homo sapiens
  misc_RNA (1)...(19): siRNA sense strand
gggaugcugucaugaaaau

SEQ ID NO: 58870 - RNA, 19 nt, Homo sapiens
  misc_RNA (1)...(19): siRNA sense strand
guauucccuuccaugagaa

SEQ ID NO: 58871 - RNA, 19 nt, Homo sapiens
  misc_RNA (1)...(19): siRNA sense strand
uagacuaucacuccacgaa

SEQ ID NO: 58872 - RNA, 19 nt, Homo sapiens
  misc_RNA (1)...(19): siRNA sense strand
ccaggaaacggugaaagug

SEQ ID NO: 58873 - RNA, 19 nt, Homo sapiens
  misc_RNA (1)...(19): siRNA sense strand
ccagaucugccacaacaag

SEQ ID NO: 58874 - RNA, 19 nt, Homo sapiens
  misc_RNA (1)...(19): siRNA sense strand
ggaccucgugcagccuaua

SEQ ID NO: 58875 - RNA, 19 nt, Homo sapiens
  misc_RNA (1)...(19): siRNA sense strand
ccucaugggcaacuucuuc

SEQ ID NO: 58876 - RNA, 19 nt, Homo sapiens
  misc_RNA (1)...(19): siRNA sense strand
gacaccaccauccaggaaa

SEQ ID NO: 58877 - RNA, 19 nt, Homo sapiens
  misc_RNA (1)...(19): siRNA sense strand
gcauguggcagacaaucuc

SEQ ID NO: 58878 - RNA, 19 nt, Homo sapiens
  misc_RNA (1)...(19): siRNA sense strand
uggcacugguagacuauca

SEQ ID NO: 58879 - RNA, 19 nt, Homo sapiens
  misc_RNA (1)...(19): siRNA sense strand
cuguggcacugguagacua

SEQ ID NO: 58880 - RNA, 19 nt, Homo sapiens
  misc_RNA (1)...(19): siRNA sense strand
ucuacagccuggacuacau

SEQ ID NO: 58881 - RNA, 19 nt, Homo sapiens
  misc_RNA (1)...(19): siRNA sense strand
agacaccaccauccaggaa

SEQ ID NO: 58882 - RNA, 19 nt, Homo sapiens
  misc_RNA (1)...(19): siRNA sense strand
auacuuagacugcaucaac

SEQ ID NO: 58883 - RNA, 19 nt, Homo sapiens
  misc_RNA (1)...(19): siRNA sense strand
uacuuagacugcaucaaca

SEQ ID NO: 58884 - RNA, 19 nt, Homo sapiens
  misc_RNA (1)...(19): siRNA sense strand
gaacuuggcuggaacguuu

SEQ ID NO: 58885 - RNA, 19 nt, Homo sapiens
  misc_RNA (1)...(19): siRNA sense strand
ggaaccaucucucacauua

SEQ ID NO: 58886 - RNA, 19 nt, Homo sapiens
  misc_RNA (1)...(19): siRNA sense strand
uaacagcaauucaccauua

SEQ ID NO: 58887 - RNA, 19 nt, Homo sapiens
  misc_RNA (1)...(19): siRNA sense strand
gcacgugucucccggguua

SEQ ID NO: 58888 - RNA, 19 nt, Homo sapiens
  misc_RNA (1)...(19): siRNA sense strand
gaacuauaccuacgauuua

SEQ ID NO: 58889 - RNA, 19 nt, Homo sapiens
  misc_RNA (1)...(19): siRNA sense strand
gcauacagcugcaauuuga

SEQ ID NO: 58890 - RNA, 19 nt, Homo sapiens
  misc_RNA (1)...(19): siRNA sense strand
caggagagguuauguauuu

SEQ ID NO: 58891 - RNA, 19 nt, Homo sapiens
  misc_RNA (1)...(19): siRNA sense strand
ggagacagcauguuuauaa

SEQ ID NO: 58892 - RNA, 19 nt, Homo sapiens
  misc_RNA (1)...(19): siRNA sense strand
gauaugcacugucuguaua

SEQ ID NO: 58893 - RNA, 19 nt, Homo sapiens
  misc_RNA (1)...(19): siRNA sense strand
caaaucaggucuucauaaa

SEQ ID NO: 58894 - RNA, 19 nt, Homo sapiens
  misc_RNA (1)...(19): siRNA sense strand
gaacuucacugacuuugau

SEQ ID NO: 58895 - RNA, 19 nt, Homo sapiens
  misc_RNA (1)...(19): siRNA sense strand
gaccaaggcuuccauauca

SEQ ID NO: 58896 - RNA, 19 nt, Homo sapiens
  misc_RNA (1)...(19): siRNA sense strand
gaaaugagcuagcaauucg

SEQ ID NO: 58897 - RNA, 19 nt, Homo sapiens
  misc_RNA (1)...(19): siRNA sense strand
gaacaugucuuuaccuuuu

SEQ ID NO: 58898 - RNA, 19 nt, Homo sapiens
  misc_RNA (1)...(19): siRNA sense strand
ggaguuugcuuaccuuauu

SEQ ID NO: 58899 - RNA, 19 nt, Homo sapiens
  misc_RNA (1)...(19): siRNA sense strand
ggacaauacuguggaaauu

SEQ ID NO: 58900 - RNA, 19 nt, Homo sapiens
  misc_RNA (1)...(19): siRNA sense strand
gcaaggcaauggauauauu

SEQ ID NO: 58901 - RNA, 19 nt, Homo sapiens
  misc_RNA (1)...(19): siRNA sense strand
ggaaacagccucuucuuga

SEQ ID NO: 58902 - RNA, 19 nt, Homo sapiens
  misc_RNA (1)...(19): siRNA sense strand
gugaagagcagcaauaaua

SEQ ID NO: 58903 - RNA, 19 nt, Homo sapiens
  misc_RNA (1)...(19): siRNA sense strand
caacaaagauuaccuugag

SEQ ID NO: 58904 - RNA, 19 nt, Homo sapiens
  misc_RNA (1)...(19): siRNA sense strand
gaucauaauugcaccugua

SEQ ID NO: 58905 - RNA, 19 nt, Homo sapiens
  misc_RNA (1)...(19): siRNA sense strand
gaaaugguccugauaucua

SEQ ID NO: 58906 - RNA, 19 nt, Homo sapiens
  misc_RNA (1)...(19): siRNA sense strand
caaccuccauuaaaucaua

SEQ ID NO: 58907 - RNA, 19 nt, Homo sapiens
  misc_RNA (1)...(19): siRNA sense strand
acaaucaucucucauagua

SEQ ID NO: 58908 - RNA, 19 nt, Homo sapiens
  misc_RNA (1)...(19): siRNA sense strand
guacagacauaccuucauu

SEQ ID NO: 58909 - RNA, 19 nt, Homo sapiens
  misc_RNA (1)...(19): siRNA sense strand
ggacauagaagaaauacaa

SEQ ID NO: 58910 - RNA, 19 nt, Homo sapiens
  misc_RNA (1)...(19): siRNA sense strand
gcaaagugguguuguugaa

SEQ ID NO: 58911 - RNA, 19 nt, Homo sapiens
  misc_RNA (1)...(19): siRNA sense strand
ggugaaaccuuacuuggaa

SEQ ID NO: 58912 - RNA, 19 nt, Homo sapiens
  misc_RNA (1)...(19): siRNA sense strand
gaaaucaucuggacuucau

SEQ ID NO: 58913 - RNA, 19 nt, Homo sapiens
  misc_RNA (1)...(19): siRNA sense strand
gaacagccuuuccagauuc

SEQ ID NO: 58914 - RNA, 19 nt, Homo sapiens
  misc_RNA (1)...(19): siRNA sense strand
gaagauauuuggcaaugau

SEQ ID NO: 58915 - RNA, 19 nt, Homo sapiens
  misc_RNA (1)...(19): siRNA sense strand
gcacgugacuuuguagaaa

SEQ ID NO: 58916 - RNA, 19 nt, Homo sapiens
  misc_RNA (1)...(19): siRNA sense strand
gcgaagauaucaaugaaug

SEQ ID NO: 58917 - RNA, 19 nt, Homo sapiens
  misc_RNA (1)...(19): siRNA sense strand
gcaaggauguggugguuau

SEQ ID NO: 58918 - RNA, 19 nt, Homo sapiens
  misc_RNA (1)...(19): siRNA sense strand
ucaaaccuauggcaucuua

SEQ ID NO: 58919 - RNA, 19 nt, Homo sapiens
  misc_RNA (1)...(19): siRNA sense strand
gagaggaaauuugguguuu

SEQ ID NO: 58920 - RNA, 19 nt, Homo sapiens
  misc_RNA (1)...(19): siRNA sense strand
uagauuaccuggcuguaua

SEQ ID NO: 58921 - RNA, 19 nt, Homo sapiens
  misc_RNA (1)...(19): siRNA sense strand
gaagggagcagcuggcuaa

SEQ ID NO: 58922 - RNA, 19 nt, Homo sapiens
  misc_RNA (1)...(19): siRNA sense strand
caacaugaauugcaccuau

SEQ ID NO: 58923 - RNA, 19 nt, Homo sapiens
  misc_RNA (1)...(19): siRNA sense strand
ggauauauuugcgaagaua

SEQ ID NO: 58924 - RNA, 19 nt, Homo sapiens
  misc_RNA (1)...(19): siRNA sense strand
ggaaagguccugcguauca

SEQ ID NO: 58925 - RNA, 19 nt, Homo sapiens
  misc_RNA (1)...(19): siRNA sense strand
caaccacccucauaauuau

SEQ ID NO: 58926 - RNA, 19 nt, Homo sapiens
  misc_RNA (1)...(19): siRNA sense strand
gagcugcgguggauauuug

SEQ ID NO: 58927 - RNA, 19 nt, Homo sapiens
  misc_RNA (1)...(19): siRNA sense strand
gagaaacuguguaguagug

SEQ ID NO: 58928 - RNA, 19 nt, Homo sapiens
  misc_RNA (1)...(19): siRNA sense strand
guacuugggucauugauuc

SEQ ID NO: 58929 - RNA, 19 nt, Homo sapiens
  misc_RNA (1)...(19): siRNA sense strand
agucaaaucuaucagcuua

SEQ ID NO: 58930 - RNA, 19 nt, Homo sapiens
  misc_RNA (1)...(19): siRNA sense strand
caccaucacucucacauuu

SEQ ID NO: 58931 - RNA, 19 nt, Homo sapiens
  misc_RNA (1)...(19): siRNA sense strand
ccaaccacccucauaauua

SEQ ID NO: 58932 - RNA, 19 nt, Homo sapiens
  misc_RNA (1)...(19): siRNA sense strand
gauacgagauggagauaau

SEQ ID NO: 58933 - RNA, 19 nt, Homo sapiens
  misc_RNA (1)...(19): siRNA sense strand
caacuguacuuggcauaua

SEQ ID NO: 58934 - RNA, 19 nt, Homo sapiens
  misc_RNA (1)...(19): siRNA sense strand
gcagcagacuguugacaaa

SEQ ID NO: 58935 - RNA, 19 nt, Homo sapiens
  misc_RNA (1)...(19): siRNA sense strand
gagcucaaguucagugauu

SEQ ID NO: 58936 - RNA, 19 nt, Homo sapiens
  misc_RNA (1)...(19): siRNA sense strand
caaaguggccugaccauug

SEQ ID NO: 58937 - RNA, 19 nt, Homo sapiens
  misc_RNA (1)...(19): siRNA sense strand
ggauucggaugcaccaaua

SEQ ID NO: 58938 - RNA, 19 nt, Homo sapiens
  misc_RNA (1)...(19): siRNA sense strand
gaaguaacacccaacugua

SEQ ID NO: 58939 - RNA, 19 nt, Homo sapiens
  misc_RNA (1)...(19): siRNA sense strand
agacaucccuuggaagaua

SEQ ID NO: 58940 - RNA, 19 nt, Homo sapiens
  misc_RNA (1)...(19): siRNA sense strand
uuucaaaucuggaguugua

SEQ ID NO: 58941 - RNA, 19 nt, Homo sapiens
  misc_RNA (1)...(19): siRNA sense strand
caaaugauaugcacugucu

SEQ ID NO: 58942 - RNA, 19 nt, Homo sapiens
  misc_RNA (1)...(19): siRNA sense strand
caaacugcacuuuagauua

SEQ ID NO: 58943 - RNA, 19 nt, Homo sapiens
  misc_RNA (1)...(19): siRNA sense strand
ggagauccgugaaggaaau

SEQ ID NO: 58944 - RNA, 19 nt, Homo sapiens
  misc_RNA (1)...(19): siRNA sense strand
aacagaaacucuagaauga

SEQ ID NO: 58945 - RNA, 19 nt, Homo sapiens
  misc_RNA (1)...(19): siRNA sense strand
ggugucaacuguacagaaa

SEQ ID NO: 58946 - RNA, 19 nt, Homo sapiens
  misc_RNA (1)...(19): siRNA sense strand
gcaaaaggcuggaagaugu

SEQ ID NO: 58947 - RNA, 19 nt, Homo sapiens
  misc_RNA (1)...(19): siRNA sense strand
ugacagauaucaucguguu

SEQ ID NO: 58948 - RNA, 19 nt, Homo sapiens
  misc_RNA (1)...(19): siRNA sense strand
gagacagcauguuuauaaa

SEQ ID NO: 58949 - RNA, 19 nt, Homo sapiens
  misc_RNA (1)...(19): siRNA sense strand
gaacuggaauucaaagacu

SEQ ID NO: 58950 - RNA, 19 nt, Homo sapiens
  misc_RNA (1)...(19): siRNA sense strand
gcaaggacguggcuucaag

SEQ ID NO: 58951 - RNA, 19 nt, Homo sapiens
  misc_RNA (1)...(19): siRNA sense strand
caacagagacuaucacaag

SEQ ID NO: 58952 - RNA, 19 nt, Homo sapiens
  misc_RNA (1)...(19): siRNA sense strand
caucagugacuuaacauua

SEQ ID NO: 58953 - RNA, 19 nt, Homo sapiens
  misc_RNA (1)...(19): siRNA sense strand
caacaaugagcaugugaua

SEQ ID NO: 58954 - RNA, 19 nt, Homo sapiens
  misc_RNA (1)...(19): siRNA sense strand
gauugugucuggauuguug

SEQ ID NO: 58955 - RNA, 19 nt, Homo sapiens
  misc_RNA (1)...(19): siRNA sense strand
caccaagacugucaauuug

SEQ ID NO: 58956 - RNA, 19 nt, Homo sapiens
  misc_RNA (1)...(19): siRNA sense strand
ucaccaagacugucaauuu

SEQ ID NO: 58957 - RNA, 19 nt, Homo sapiens
  misc_RNA (1)...(19): siRNA sense strand
caccaauacuuuccaaauu

SEQ ID NO: 58958 - RNA, 19 nt, Homo sapiens
  misc_RNA (1)...(19): siRNA sense strand
guucauaucucccaacuac

SEQ ID NO: 58959 - RNA, 19 nt, Homo sapiens
  misc_RNA (1)...(19): siRNA sense strand
ggagauuccucuucugcuu

SEQ ID NO: 58960 - RNA, 19 nt, Homo sapiens
  misc_RNA (1)...(19): siRNA sense strand
gaaugaguuucaccuauca

SEQ ID NO: 58961 - RNA, 19 nt, Homo sapiens
  misc_RNA (1)...(19): siRNA sense strand
cugacaggcucgaauaaua

SEQ ID NO: 58962 - RNA, 19 nt, Homo sapiens
  misc_RNA (1)...(19): siRNA sense strand
ggaucacccuaauguuuaa

SEQ ID NO: 58963 - RNA, 19 nt, Homo sapiens
  misc_RNA (1)...(19): siRNA sense strand
gaaacagccucuucuugag

SEQ ID NO: 58964 - RNA, 19 nt, Homo sapiens
  misc_RNA (1)...(19): siRNA sense strand
caacaaucaucucucauag

SEQ ID NO: 58965 - RNA, 19 nt, Homo sapiens
  misc_RNA (1)...(19): siRNA sense strand
gaguuugcuuaccuuauua

SEQ ID NO: 58966 - RNA, 19 nt, Homo sapiens
  misc_RNA (1)...(19): siRNA sense strand
ccaacaaucaucucucaua

SEQ ID NO: 58967 - RNA, 19 nt, Homo sapiens
  misc_RNA (1)...(19): siRNA sense strand
gagaucagcuuugacaaca

SEQ ID NO: 58968 - RNA, 19 nt, Homo sapiens
  misc_RNA (1)...(19): siRNA sense strand
ggacggccauuacucacaa

SEQ ID NO: 58969 - RNA, 19 nt, Homo sapiens
  misc_RNA (1)...(19): siRNA sense strand
ccaacuauccaaaugcuua

SEQ ID NO: 58970 - RNA, 19 nt, Homo sapiens
  misc_RNA (1)...(19): siRNA sense strand
ccaauuauccaaacaauca

SEQ ID NO: 58971 - RNA, 19 nt, Homo sapiens
  misc_RNA (1)...(19): siRNA sense strand
cagaauagcccaacugugu

SEQ ID NO: 58972 - RNA, 19 nt, Homo sapiens
  misc_RNA (1)...(19): siRNA sense strand
cagaugcagugguuuguuu

SEQ ID NO: 58973 - RNA, 19 nt, Homo sapiens
  misc_RNA (1)...(19): siRNA sense strand
ggucuggauucucagcuua

SEQ ID NO: 58974 - RNA, 19 nt, Homo sapiens
  misc_RNA (1)...(19): siRNA sense strand
gagaugguccuuuguauca

SEQ ID NO: 58975 - RNA, 19 nt, Homo sapiens
  misc_RNA (1)...(19): siRNA sense strand
gagacuguguccagaacua

SEQ ID NO: 58976 - RNA, 19 nt, Homo sapiens
  misc_RNA (1)...(19): siRNA sense strand
gcagacuacccaaaugaua

SEQ ID NO: 58977 - RNA, 19 nt, Homo sapiens
  misc_RNA (1)...(19): siRNA sense strand
gaacugaggagguggacaa

SEQ ID NO: 58978 - RNA, 19 nt, Homo sapiens
  misc_RNA (1)...(19): siRNA sense strand
ggagauggacauagaagaa

SEQ ID NO: 58979 - RNA, 19 nt, Homo sapiens
  misc_RNA (1)...(19): siRNA sense strand
gcagugcacuucacaaacu

SEQ ID NO: 58980 - RNA, 19 nt, Homo sapiens
  misc_RNA (1)...(19): siRNA sense strand
guauugcgguacagacaua

SEQ ID NO: 58981 - RNA, 19 nt, Homo sapiens
  misc_RNA (1)...(19): siRNA sense strand
uaacguguauccuggagaa

SEQ ID NO: 58982 - RNA, 19 nt, Homo sapiens
  misc_RNA (1)...(19): siRNA sense strand
aaacugcacuuuagauuac

SEQ ID NO: 58983 - RNA, 19 nt, Homo sapiens
  misc_RNA (1)...(19): siRNA sense strand
uaacucagaccauucauug

SEQ ID NO: 58984 - RNA, 19 nt, Homo sapiens
  misc_RNA (1)...(19): siRNA sense strand
gaaggucucucaggaaaua

SEQ ID NO: 58985 - RNA, 19 nt, Homo sapiens
  misc_RNA (1)...(19): siRNA sense strand
gaaugaagguggcaaagaa

SEQ ID NO: 58986 - RNA, 19 nt, Homo sapiens
  misc_RNA (1)...(19): siRNA sense strand
gggacaagguguagaaaua

SEQ ID NO: 58987 - RNA, 19 nt, Homo sapiens
  misc_RNA (1)...(19): siRNA sense strand
gacaagaagucuguaaaua

SEQ ID NO: 58988 - RNA, 19 nt, Homo sapiens
  misc_RNA (1)...(19): siRNA sense strand
uaaggaagguuacaacgua

SEQ ID NO: 58989 - RNA, 19 nt, Homo sapiens
  misc_RNA (1)...(19): siRNA sense strand
gagaagaggugauugacuu

SEQ ID NO: 58990 - RNA, 19 nt, Homo sapiens
  misc_RNA (1)...(19): siRNA sense strand
gcaaacagcuucgcaguca

SEQ ID NO: 58991 - RNA, 19 nt, Homo sapiens
  misc_RNA (1)...(19): siRNA sense strand
gaaauaugccuacuuguug

SEQ ID NO: 58992 - RNA, 19 nt, Homo sapiens
  misc_RNA (1)...(19): siRNA sense strand
gcaagugacugcuaucaau

SEQ ID NO: 58993 - RNA, 19 nt, Homo sapiens
  misc_RNA (1)...(19): siRNA sense strand
gaaaagaaauggcaaguga

SEQ ID NO: 58994 - RNA, 19 nt, Homo sapiens
  misc_RNA (1)...(19): siRNA sense strand
ccucugggcuugagaauaa

SEQ ID NO: 58995 - RNA, 19 nt, Homo sapiens
  misc_RNA (1)...(19): siRNA sense strand
caacguauauggcaucgaa

SEQ ID NO: 58996 - RNA, 19 nt, Homo sapiens
  misc_RNA (1)...(19): siRNA sense strand
caacguugcuggaguauuc

SEQ ID NO: 58997 - RNA, 19 nt, Homo sapiens
  misc_RNA (1)...(19): siRNA sense strand
gcaaagaaugcacagaaua

SEQ ID NO: 58998 - RNA, 19 nt, Homo sapiens
  misc_RNA (1)...(19): siRNA sense strand
aaacagaaauugcuuaugg

SEQ ID NO: 58999 - RNA, 19 nt, Homo sapiens
  misc_RNA (1)...(19): siRNA sense strand
ggaaauaugccuacuuguu

SEQ ID NO: 59000 - RNA, 19 nt, Homo sapiens
  misc_RNA (1)...(19): siRNA sense strand
gcagaaaucgccaaacauu

SEQ ID NO: 59001 - RNA, 19 nt, Homo sapiens
  misc_RNA (1)...(19): siRNA sense strand
caacuuauaaggaagguua

SEQ ID NO: 59002 - RNA, 19 nt, Homo sapiens
  misc_RNA (1)...(19): siRNA sense strand
gaauaagacuguuguuguc

SEQ ID NO: 59003 - RNA, 19 nt, Homo sapiens
  misc_RNA (1)...(19): siRNA sense strand
gaaagcugauauugcaauu

SEQ ID NO: 59004 - RNA, 19 nt, Homo sapiens
  misc_RNA (1)...(19): siRNA sense strand
gcucacacaacaacaauua

SEQ ID NO: 59005 - RNA, 19 nt, Homo sapiens
  misc_RNA (1)...(19): siRNA sense strand
ggaagagaaacacaaagua

SEQ ID NO: 59006 - RNA, 19 nt, Homo sapiens
  misc_RNA (1)...(19): siRNA sense strand
caagaaagaugagauguac

SEQ ID NO: 59007 - RNA, 19 nt, Homo sapiens
  misc_RNA (1)...(19): siRNA sense strand
caguaaaucuugcaguauu

SEQ ID NO: 59008 - RNA, 19 nt, Homo sapiens
  misc_RNA (1)...(19): siRNA sense strand
gugcaaaugucucuggauu

SEQ ID NO: 59009 - RNA, 19 nt, Homo sapiens
  misc_RNA (1)...(19): siRNA sense strand
caaagaaugcacagaauau

SEQ ID NO: 59010 - RNA, 19 nt, Homo sapiens
  misc_RNA (1)...(19): siRNA sense strand
gaagagaaacacaaaguag

SEQ ID NO: 59011 - RNA, 19 nt, Homo sapiens
  misc_RNA (1)...(19): siRNA sense strand
gccaaggacucuggaagua

SEQ ID NO: 59012 - RNA, 19 nt, Homo sapiens
  misc_RNA (1)...(19): siRNA sense strand
gaguagggaugguucaguu

SEQ ID NO: 59013 - RNA, 19 nt, Homo sapiens
  misc_RNA (1)...(19): siRNA sense strand
agaaauugcuuauggaaca

SEQ ID NO: 59014 - RNA, 19 nt, Homo sapiens
  misc_RNA (1)...(19): siRNA sense strand
cggcaaggaugcgauauuu

SEQ ID NO: 59015 - RNA, 19 nt, Homo sapiens
  misc_RNA (1)...(19): siRNA sense strand
gcaauugcuccauuaacua

SEQ ID NO: 59016 - RNA, 19 nt, Homo sapiens
  misc_RNA (1)...(19): siRNA sense strand
gaggaucuuucuaagcaaa

SEQ ID NO: 59017 - RNA, 19 nt, Homo sapiens
  misc_RNA (1)...(19): siRNA sense strand
gguguguggugguucuuua

SEQ ID NO: 59018 - RNA, 19 nt, Homo sapiens
  misc_RNA (1)...(19): siRNA sense strand
gagauguaccgaucacuuu

SEQ ID NO: 59019 - RNA, 19 nt, Homo sapiens
  misc_RNA (1)...(19): siRNA sense strand
gcauauuucuguccuccuu

SEQ ID NO: 59020 - RNA, 19 nt, Homo sapiens
  misc_RNA (1)...(19): siRNA sense strand
uaugagggcuacuguguug

SEQ ID NO: 59021 - RNA, 19 nt, Homo sapiens
  misc_RNA (1)...(19): siRNA sense strand
gacaagguguagaaauaga

SEQ ID NO: 59022 - RNA, 19 nt, Homo sapiens
  misc_RNA (1)...(19): siRNA sense strand
ugaccuggcugcagaaauc

SEQ ID NO: 59023 - RNA, 19 nt, Homo sapiens
  misc_RNA (1)...(19): siRNA sense strand
gagaggagucuaugcuauu

SEQ ID NO: 59024 - RNA, 19 nt, Homo sapiens
  misc_RNA (1)...(19): siRNA sense strand
ugaaagggauaaaguaaac

SEQ ID NO: 59025 - RNA, 19 nt, Homo sapiens
  misc_RNA (1)...(19): siRNA sense strand
uucaagaucuggaguuaaa

SEQ ID NO: 59026 - RNA, 19 nt, Homo sapiens
  misc_RNA (1)...(19): siRNA sense strand
cgagaggagucuaugcuau

SEQ ID NO: 59027 - RNA, 19 nt, Homo sapiens
  misc_RNA (1)...(19): siRNA sense strand
ucaagaagccucagaaguc

SEQ ID NO: 59028 - RNA, 19 nt, Homo sapiens
  misc_RNA (1)...(19): siRNA sense strand
guaaauaccaucacaucau

SEQ ID NO: 59029 - RNA, 19 nt, Homo sapiens
  misc_RNA (1)...(19): siRNA sense strand
cccaguaaaucuugcagua

SEQ ID NO: 59030 - RNA, 19 nt, Homo sapiens
  misc_RNA (1)...(19): siRNA sense strand
cuucugcucugaccuauga

SEQ ID NO: 59031 - RNA, 19 nt, Homo sapiens
  misc_RNA (1)...(19): siRNA sense strand
ggucaacacuggaagaaaa

SEQ ID NO: 59032 - RNA, 19 nt, Homo sapiens
  misc_RNA (1)...(19): siRNA sense strand
ucaagaauacagugcauuu

SEQ ID NO: 59033 - RNA, 19 nt, Homo sapiens
  misc_RNA (1)...(19): siRNA sense strand
ugacagaggcuuaucaaca

SEQ ID NO: 59034 - RNA, 19 nt, Homo sapiens
  misc_RNA (1)...(19): siRNA sense strand
ucauggagcucaaaacuaa

SEQ ID NO: 59035 - RNA, 19 nt, Homo sapiens
  misc_RNA (1)...(19): siRNA sense strand
uggcaaugcugguggcuuu

SEQ ID NO: 59036 - RNA, 19 nt, Homo sapiens
  misc_RNA (1)...(19): siRNA sense strand
gaacuuguauaugggaaag

SEQ ID NO: 59037 - RNA, 19 nt, Homo sapiens
  misc_RNA (1)...(19): siRNA sense strand
gagaauaagacuguuguug

SEQ ID NO: 59038 - RNA, 19 nt, Homo sapiens
  misc_RNA (1)...(19): siRNA sense strand
ggcaaagaaugcacagaau

SEQ ID NO: 59039 - RNA, 19 nt, Homo sapiens
  misc_RNA (1)...(19): siRNA sense strand
caaggacucuggaaguaag

SEQ ID NO: 59040 - RNA, 19 nt, Homo sapiens
  misc_RNA (1)...(19): siRNA sense strand
gugcugaggaucuuucuaa

SEQ ID NO: 59041 - RNA, 19 nt, Homo sapiens
  misc_RNA (1)...(19): siRNA sense strand
cgaaagugcugaggaucuu

SEQ ID NO: 59042 - RNA, 19 nt, Homo sapiens
  misc_RNA (1)...(19): siRNA sense strand
guuugaagauggaagagaa

SEQ ID NO: 59043 - RNA, 19 nt, Homo sapiens
  misc_RNA (1)...(19): siRNA sense strand
cuccuuagcuugauugaau

SEQ ID NO: 59044 - RNA, 19 nt, Homo sapiens
  misc_RNA (1)...(19): siRNA sense strand
caaauggugguacgauaaa

SEQ ID NO: 59045 - RNA, 19 nt, Homo sapiens
  misc_RNA (1)...(19): siRNA sense strand
ugggaaagcugauauugca

SEQ ID NO: 59046 - RNA, 19 nt, Homo sapiens
  misc_RNA (1)...(19): siRNA sense strand
caagaagucuguaaauacc

SEQ ID NO: 59047 - RNA, 19 nt, Homo sapiens
  misc_RNA (1)...(19): siRNA sense strand
gaucaagaauacagugcau

SEQ ID NO: 59048 - RNA, 19 nt, Homo sapiens
  misc_RNA (1)...(19): siRNA sense strand
gauggaagagaaacacaaa

SEQ ID NO: 59049 - RNA, 19 nt, Homo sapiens
  misc_RNA (1)...(19): siRNA sense strand
ggagugaaguggacaaaau

SEQ ID NO: 59050 - RNA, 19 nt, Homo sapiens
  misc_RNA (1)...(19): siRNA sense strand
ggauaaaguaaacgacauu

SEQ ID NO: 59051 - RNA, 19 nt, Homo sapiens
  misc_RNA (1)...(19): siRNA sense strand
agaggagucuaugcuauuu

SEQ ID NO: 59052 - RNA, 19 nt, Homo sapiens
  misc_RNA (1)...(19): siRNA sense strand
gaacgaguacauugagcaa

SEQ ID NO: 59053 - RNA, 19 nt, Homo sapiens
  misc_RNA (1)...(19): siRNA sense strand
ggaaagcugauauugcaau

SEQ ID NO: 59054 - RNA, 19 nt, Homo sapiens
  misc_RNA (1)...(19): siRNA sense strand
gaaucuccguauguuauga

SEQ ID NO: 59055 - RNA, 19 nt, Homo sapiens
  misc_RNA (1)...(19): siRNA sense strand
gacagaggcuuaucaacac

SEQ ID NO: 59056 - RNA, 19 nt, Homo sapiens
  misc_RNA (1)...(19): siRNA sense strand
gaaacacaaaguagugaau

SEQ ID NO: 59057 - RNA, 19 nt, Homo sapiens
  misc_RNA (1)...(19): siRNA sense strand
ugaguucuguuacaaguca

SEQ ID NO: 59058 - RNA, 19 nt, Homo sapiens
  misc_RNA (1)...(19): siRNA sense strand
caucgaaagugcugaggau

SEQ ID NO: 59059 - RNA, 19 nt, Homo sapiens
  misc_RNA (1)...(19): siRNA sense strand
caaguuugcauaccucuau

SEQ ID NO: 59060 - RNA, 19 nt, Homo sapiens
  misc_RNA (1)...(19): siRNA sense strand
ggaagguuacaacguauau

SEQ ID NO: 59061 - RNA, 19 nt, Homo sapiens
  misc_RNA (1)...(19): siRNA sense strand
aacaaauggugguacgaua

SEQ ID NO: 59062 - RNA, 19 nt, Homo sapiens
  misc_RNA (1)...(19): siRNA sense strand
agggaaauaugccuacuug

SEQ ID NO: 59063 - RNA, 19 nt, Homo sapiens
  misc_RNA (1)...(19): siRNA sense strand
ggaaguccaaagggaaaua

SEQ ID NO: 59064 - RNA, 19 nt, Homo sapiens
  misc_RNA (1)...(19): siRNA sense strand
uauugcaauugcuccauua

SEQ ID NO: 59065 - RNA, 19 nt, Homo sapiens
  misc_RNA (1)...(19): siRNA sense strand
aaguacaaguugacaauug

SEQ ID NO: 59066 - RNA, 19 nt, Homo sapiens
  misc_RNA (1)...(19): siRNA sense strand
cuaaggaagcaaagaauug

SEQ ID NO: 59067 - RNA, 19 nt, Homo sapiens
  misc_RNA (1)...(19): siRNA sense strand
acaagaaagaugagaugua

SEQ ID NO: 59068 - RNA, 19 nt, Homo sapiens
  misc_RNA (1)...(19): siRNA sense strand
acaaauggugguacgauaa

SEQ ID NO: 59069 - RNA, 19 nt, Homo sapiens
  misc_RNA (1)...(19): siRNA sense strand
gaaauugcuuauggaacau

SEQ ID NO: 59070 - RNA, 19 nt, Homo sapiens
  misc_RNA (1)...(19): siRNA sense strand
uuggagaacuuguauaugg

SEQ ID NO: 59071 - RNA, 19 nt, Homo sapiens
  misc_RNA (1)...(19): siRNA sense strand
agaaaucgccaaacauugu

SEQ ID NO: 59072 - RNA, 19 nt, Homo sapiens
  misc_RNA (1)...(19): siRNA sense strand
ugaaaugcuugaaggcaau

SEQ ID NO: 59073 - RNA, 19 nt, Homo sapiens
  misc_RNA (1)...(19): siRNA sense strand
ggacaagguguagaaauag

SEQ ID NO: 59074 - RNA, 19 nt, Homo sapiens
  misc_RNA (1)...(19): siRNA sense strand
gaugauucguugguaucua

SEQ ID NO: 59075 - RNA, 19 nt, Homo sapiens
  misc_RNA (1)...(19): siRNA sense strand
ggaacggcguguaauucug

SEQ ID NO: 59076 - RNA, 19 nt, Homo sapiens
  misc_RNA (1)...(19): siRNA sense strand
acacauccauuugucauuc

SEQ ID NO: 59077 - RNA, 19 nt, Homo sapiens
  misc_RNA (1)...(19): siRNA sense strand
gaucuaaaauugcaguguu

SEQ ID NO: 59078 - RNA, 19 nt, Homo sapiens
  misc_RNA (1)...(19): siRNA sense strand
cugaggaucuuucuaagca

SEQ ID NO: 59079 - RNA, 19 nt, Homo sapiens
  misc_RNA (1)...(19): siRNA sense strand
gcaaggaugcgauauuucg

SEQ ID NO: 59080 - RNA, 19 nt, Homo sapiens
  misc_RNA (1)...(19): siRNA sense strand
cugcagaaaucgccaaaca

SEQ ID NO: 59081 - RNA, 19 nt, Homo sapiens
  misc_RNA (1)...(19): siRNA sense strand
uugaaggucucucaggaaa

SEQ ID NO: 59082 - RNA, 19 nt, Homo sapiens
  misc_RNA (1)...(19): siRNA sense strand
uaaggaagcaaagaauuga

SEQ ID NO: 59083 - RNA, 19 nt, Homo sapiens
  misc_RNA (1)...(19): siRNA sense strand
ugacagugacagaggcuua

SEQ ID NO: 59084 - RNA, 19 nt, Homo sapiens
  misc_RNA (1)...(19): siRNA sense strand
gggaagaaguuauagauuu

SEQ ID NO: 59085 - RNA, 19 nt, Homo sapiens
  misc_RNA (1)...(19): siRNA sense strand
gcagaaauuugucuacauu

SEQ ID NO: 59086 - RNA, 19 nt, Homo sapiens
  misc_RNA (1)...(19): siRNA sense strand
gaagaacgccaaucaguuu

SEQ ID NO: 59087 - RNA, 19 nt, Homo sapiens
  misc_RNA (1)...(19): siRNA sense strand
gaacauacaucgucacaac

SEQ ID NO: 59088 - RNA, 19 nt, Homo sapiens
  misc_RNA (1)...(19): siRNA sense strand
ggaagaaguuauagauuuc

SEQ ID NO: 59089 - RNA, 19 nt, Homo sapiens
  misc_RNA (1)...(19): siRNA sense strand
gaacaucagcgacagcuuu

SEQ ID NO: 59090 - RNA, 19 nt, Homo sapiens
  misc_RNA (1)...(19): siRNA sense strand
gcagagaauugauauaucu

SEQ ID NO: 59091 - RNA, 19 nt, Homo sapiens
  misc_RNA (1)...(19): siRNA sense strand
ggacauugacuuaaacaaa

SEQ ID NO: 59092 - RNA, 19 nt, Homo sapiens
  misc_RNA (1)...(19): siRNA sense strand
gguaguaggugccaauuuc

SEQ ID NO: 59093 - RNA, 19 nt, Homo sapiens
  misc_RNA (1)...(19): siRNA sense strand
ggaaugaagaugauaaguu

SEQ ID NO: 59094 - RNA, 19 nt, Homo sapiens
  misc_RNA (1)...(19): siRNA sense strand
gaacuacacagacacuauu

SEQ ID NO: 59095 - RNA, 19 nt, Homo sapiens
  misc_RNA (1)...(19): siRNA sense strand
gagaugaccuauagauucu

SEQ ID NO: 59096 - RNA, 19 nt, Homo sapiens
  misc_RNA (1)...(19): siRNA sense strand
ucacaacaauccuagaaga

SEQ ID NO: 59097 - RNA, 19 nt, Homo sapiens
  misc_RNA (1)...(19): siRNA sense strand
ggaucuccaucaugauuaa

SEQ ID NO: 59098 - RNA, 19 nt, Homo sapiens
  misc_RNA (1)...(19): siRNA sense strand
gcuuugagaugaccuauag

SEQ ID NO: 59099 - RNA, 19 nt, Homo sapiens
  misc_RNA (1)...(19): siRNA sense strand
gaagcaggaucuacuaagg

SEQ ID NO: 59100 - RNA, 19 nt, Homo sapiens
  misc_RNA (1)...(19): siRNA sense strand
ccacgugauugaaaugaaa

SEQ ID NO: 59101 - RNA, 19 nt, Homo sapiens
  misc_RNA (1)...(19): siRNA sense strand
gaaauccaaaggcaaauau

SEQ ID NO: 59102 - RNA, 19 nt, Homo sapiens
  misc_RNA (1)...(19): siRNA sense strand
ccaagcggaugaaggguuu

SEQ ID NO: 59103 - RNA, 19 nt, Homo sapiens
  misc_RNA (1)...(19): siRNA sense strand
gcgccaaugugacagguuu

SEQ ID NO: 59104 - RNA, 19 nt, Homo sapiens
  misc_RNA (1)...(19): siRNA sense strand
gaggaaauccaaaggcaaa

SEQ ID NO: 59105 - RNA, 19 nt, Homo sapiens
  misc_RNA (1)...(19): siRNA sense strand
ucauggacauugacuuaaa

SEQ ID NO: 59106 - RNA, 19 nt, Homo sapiens
  misc_RNA (1)...(19): siRNA sense strand
gaaggugggagguaacuug

SEQ ID NO: 59107 - RNA, 19 nt, Homo sapiens
  misc_RNA (1)...(19): siRNA sense strand
ggaaauccaaaggcaaaua

SEQ ID NO: 59108 - RNA, 19 nt, Homo sapiens
  misc_RNA (1)...(19): siRNA sense strand
ggugcgauuugaagguuua

SEQ ID NO: 59109 - RNA, 19 nt, Homo sapiens
  misc_RNA (1)...(19): siRNA sense strand
gagaguggcgccaauguga

SEQ ID NO: 59110 - RNA, 19 nt, Homo sapiens
  misc_RNA (1)...(19): siRNA sense strand
ucagaacgccucaaugcua

SEQ ID NO: 59111 - RNA, 19 nt, Homo sapiens
  misc_RNA (1)...(19): siRNA sense strand
ccuagaagauccuuaugug

SEQ ID NO: 59112 - RNA, 19 nt, Homo sapiens
  misc_RNA (1)...(19): siRNA sense strand
gaucggaggacuuggacua

SEQ ID NO: 59113 - RNA, 19 nt, Homo sapiens
  misc_RNA (1)...(19): siRNA sense strand
cagaacgccucaaugcuau

SEQ ID NO: 59114 - RNA, 19 nt, Homo sapiens
  misc_RNA (1)...(19): siRNA sense strand
ccagugaccaguccaauga

SEQ ID NO: 59115 - RNA, 19 nt, Homo sapiens
  misc_RNA (1)...(19): siRNA sense strand
ugggagagcuggucuaugg

SEQ ID NO: 59116 - RNA, 19 nt, Homo sapiens
  misc_RNA (1)...(19): siRNA sense strand
ccaaucaguuuguccuuca

SEQ ID NO: 59117 - RNA, 19 nt, Homo sapiens
  misc_RNA (1)...(19): siRNA sense strand
cuccacgucugcuucauua

SEQ ID NO: 59118 - RNA, 19 nt, Homo sapiens
  misc_RNA (1)...(19): siRNA sense strand
caguaaaccuggcaguguu

SEQ ID NO: 59119 - RNA, 19 nt, Homo sapiens
  misc_RNA (1)...(19): siRNA sense strand
ucagcaucauugaccauua

SEQ ID NO: 59120 - RNA, 19 nt, Homo sapiens
  misc_RNA (1)...(19): siRNA sense strand
caaaggcuauggcauugca

SEQ ID NO: 59121 - RNA, 19 nt, Homo sapiens
  misc_RNA (1)...(19): siRNA sense strand
ccacuacauucuugcaaau

SEQ ID NO: 59122 - RNA, 19 nt, Homo sapiens
  misc_RNA (1)...(19): siRNA sense strand
gaacguaggacugucaaca

SEQ ID NO: 59123 - RNA, 19 nt, Homo sapiens
  misc_RNA (1)...(19): siRNA sense strand
ccaugaaggugggagguaa

SEQ ID NO: 59124 - RNA, 19 nt, Homo sapiens
  misc_RNA (1)...(19): siRNA sense strand
ucaagaagaacgccaauca

SEQ ID NO: 59125 - RNA, 19 nt, Homo sapiens
  misc_RNA (1)...(19): siRNA sense strand
agaagauccuuaugugaug

SEQ ID NO: 59126 - RNA, 19 nt, Homo sapiens
  misc_RNA (1)...(19): siRNA sense strand
gauaccggaugcucuuuca

SEQ ID NO: 59127 - RNA, 19 nt, Homo sapiens
  misc_RNA (1)...(19): siRNA sense strand
ugagaugaccuauagauuc

SEQ ID NO: 59128 - RNA, 19 nt, Homo sapiens
  misc_RNA (1)...(19): siRNA sense strand
ggcgauaauucaaguguuc

SEQ ID NO: 59129 - RNA, 19 nt, Homo sapiens
  misc_RNA (1)...(19): siRNA sense strand
aaagauugguuacuggaau

SEQ ID NO: 59130 - RNA, 19 nt, Homo sapiens
  misc_RNA (1)...(19): siRNA sense strand
gaaagauugguuacuggaa

SEQ ID NO: 59131 - RNA, 19 nt, Homo sapiens
  misc_RNA (1)...(19): siRNA sense strand
gguggacugugaaucagaa

SEQ ID NO: 59132 - RNA, 19 nt, Homo sapiens
  misc_RNA (1)...(19): siRNA sense strand
ccaaguccaugcaaucgau

SEQ ID NO: 59133 - RNA, 19 nt, Homo sapiens
  misc_RNA (1)...(19): siRNA sense strand
ggugauggcugaggcuuuc

SEQ ID NO: 59134 - RNA, 19 nt, Homo sapiens
  misc_RNA (1)...(19): siRNA sense strand
cuucauggacauugacuua

SEQ ID NO: 59135 - RNA, 19 nt, Homo sapiens
  misc_RNA (1)...(19): siRNA sense strand
gaagucagcagagccauca

SEQ ID NO: 59136 - RNA, 19 nt, Homo sapiens
  misc_RNA (1)...(19): siRNA sense strand
acacacggguggacuggaa

SEQ ID NO: 59137 - RNA, 19 nt, Homo sapiens
  misc_RNA (1)...(19): siRNA sense strand
gaugaccuauagauucugu

SEQ ID NO: 59138 - RNA, 19 nt, Homo sapiens
  misc_RNA (1)...(19): siRNA sense strand
gcaguuuaaugagaaagga

SEQ ID NO: 59139 - RNA, 19 nt, Homo sapiens
  misc_RNA (1)...(19): siRNA sense strand
guuuccagcuggugaacua

SEQ ID NO: 59140 - RNA, 19 nt, Homo sapiens
  misc_RNA (1)...(19): siRNA sense strand
ccucugcgcucaccuacga

SEQ ID NO: 59141 - RNA, 19 nt, Homo sapiens
  misc_RNA (1)...(19): siRNA sense strand
aaauugcuguguuugagaa

SEQ ID NO: 59142 - RNA, 19 nt, Homo sapiens
  misc_RNA (1)...(19): siRNA sense strand
cagaggaccuagcgaagca

SEQ ID NO: 59143 - RNA, 19 nt, Homo sapiens
  misc_RNA (1)...(19): siRNA sense strand
caucaucuccucauauaca

SEQ ID NO: 59144 - RNA, 19 nt, Homo sapiens
  misc_RNA (1)...(19): siRNA sense strand
uaaucaucaucuccucaua

SEQ ID NO: 59145 - RNA, 19 nt, Homo sapiens
  misc_RNA (1)...(19): siRNA sense strand
uagauucuguucccaguuc

SEQ ID NO: 59146 - RNA, 19 nt, Homo sapiens
  misc_RNA (1)...(19): siRNA sense strand
ggaacaugcugcuuuuaga

SEQ ID NO: 59147 - RNA, 19 nt, Homo sapiens
  misc_RNA (1)...(19): siRNA sense strand
ggagagcuggucuauggaa

SEQ ID NO: 59148 - RNA, 19 nt, Homo sapiens
  misc_RNA (1)...(19): siRNA sense strand
augcagcaguggaagaaua

SEQ ID NO: 59149 - RNA, 19 nt, Homo sapiens
  misc_RNA (1)...(19): siRNA sense strand
aggagucuaugccaucuuu

SEQ ID NO: 59150 - RNA, 19 nt, Homo sapiens
  misc_RNA (1)...(19): siRNA sense strand
ggugggagguaacuuggau

SEQ ID NO: 59151 - RNA, 19 nt, Homo sapiens
  misc_RNA (1)...(19): siRNA sense strand
gggaucuccaucaugauua

SEQ ID NO: 59152 - RNA, 19 nt, Homo sapiens
  misc_RNA (1)...(19): siRNA sense strand
gucuggagauugucaguga

SEQ ID NO: 59153 - RNA, 19 nt, Homo sapiens
  misc_RNA (1)...(19): siRNA sense strand
uagaagauccuuaugugau

SEQ ID NO: 59154 - RNA, 19 nt, Homo sapiens
  misc_RNA (1)...(19): siRNA sense strand
ggcagagaauugauauauc

SEQ ID NO: 59155 - RNA, 19 nt, Homo sapiens
  misc_RNA (1)...(19): siRNA sense strand
ggaggcagagaauugauau

SEQ ID NO: 59156 - RNA, 19 nt, Homo sapiens
  misc_RNA (1)...(19): siRNA sense strand
gcuuauccguccugcagaa

SEQ ID NO: 59157 - RNA, 19 nt, Homo sapiens
  misc_RNA (1)...(19): siRNA sense strand
ucaacaugcugaccuccuu

SEQ ID NO: 59158 - RNA, 19 nt, Homo sapiens
  misc_RNA (1)...(19): siRNA sense strand
ccugagaaauccaguaaac

SEQ ID NO: 59159 - RNA, 19 nt, Homo sapiens
  misc_RNA (1)...(19): siRNA sense strand
uagcgaagcagacagaaau

SEQ ID NO: 59160 - RNA, 19 nt, Homo sapiens
  misc_RNA (1)...(19): siRNA sense strand
aucaucaucuccucauaua

SEQ ID NO: 59161 - RNA, 19 nt, Homo sapiens
  misc_RNA (1)...(19): siRNA sense strand
gagauuuggaugugcauug

SEQ ID NO: 59162 - RNA, 19 nt, Homo sapiens
  misc_RNA (1)...(19): siRNA sense strand
gguccgggaagaaguuaua

SEQ ID NO: 59163 - RNA, 19 nt, Homo sapiens
  misc_RNA (1)...(19): siRNA sense strand
guggcucccuuaacuauca

SEQ ID NO: 59164 - RNA, 19 nt, Homo sapiens
  misc_RNA (1)...(19): siRNA sense strand
uaacaggaaacgugcaguu

SEQ ID NO: 59165 - RNA, 19 nt, Homo sapiens
  misc_RNA (1)...(19): siRNA sense strand
caaggagaguggcgccaau

SEQ ID NO: 59166 - RNA, 19 nt, Homo sapiens
  misc_RNA (1)...(19): siRNA sense strand
ggcagaaauuugucuacau

SEQ ID NO: 59167 - RNA, 19 nt, Homo sapiens
  misc_RNA (1)...(19): siRNA sense strand
gcagaaaguccuggauaca

SEQ ID NO: 59168 - RNA, 19 nt, Homo sapiens
  misc_RNA (1)...(19): siRNA sense strand
cauuacaaguggcagaaau

SEQ ID NO: 59169 - RNA, 19 nt, Homo sapiens
  misc_RNA (1)...(19): siRNA sense strand
gcccugagaaauccaguaa

SEQ ID NO: 59170 - RNA, 19 nt, Homo sapiens
  misc_RNA (1)...(19): siRNA sense strand
uccaaaccauuuaugaguu

SEQ ID NO: 59171 - RNA, 19 nt, Homo sapiens
  misc_RNA (1)...(19): siRNA sense strand
ucccuuaacuaucacuuug

SEQ ID NO: 59172 - RNA, 19 nt, Homo sapiens
  misc_RNA (1)...(19): siRNA sense strand
gaacgccaaucaguuugag

SEQ ID NO: 59173 - RNA, 19 nt, Homo sapiens
  misc_RNA (1)...(19): siRNA sense strand
cagcaucauugaccauuac

SEQ ID NO: 59174 - RNA, 19 nt, Homo sapiens
  misc_RNA (1)...(19): siRNA sense strand
ugaccaguccaaugaguuu

SEQ ID NO: 59175 - RNA, 19 nt, Homo sapiens
  misc_RNA (1)...(19): siRNA sense strand
ggaaggacgggaccagaca

SEQ ID NO: 59176 - RNA, 19 nt, Homo sapiens
  misc_RNA (1)...(19): siRNA sense strand
agaagaacgccaaucaguu

SEQ ID NO: 59177 - RNA, 19 nt, Homo sapiens
  misc_RNA (1)...(19): siRNA sense strand
cuuaugugaugcucaagaa

SEQ ID NO: 59178 - RNA, 19 nt, Homo sapiens
  misc_RNA (1)...(19): siRNA sense strand
gggcgauaauucaaguguu

SEQ ID NO: 59179 - RNA, 19 nt, Homo sapiens
  misc_RNA (1)...(19): siRNA sense strand
ggugguggacugugaauca

SEQ ID NO: 59180 - RNA, 19 nt, Homo sapiens
  misc_RNA (1)...(19): siRNA sense strand
ggaagagacccaaguacac

SEQ ID NO: 59181 - RNA, 19 nt, Homo sapiens
  misc_RNA (1)...(19): siRNA sense strand
cacaggaacaugcugcuuu

SEQ ID NO: 59182 - RNA, 19 nt, Homo sapiens
  misc_RNA (1)...(19): siRNA sense strand
uuacuggaaugaagaugau

SEQ ID NO: 59183 - RNA, 19 nt, Homo sapiens
  misc_RNA (1)...(19): siRNA sense strand
gggagccacgggauuguaa

SEQ ID NO: 59184 - RNA, 19 nt, Homo sapiens
  misc_RNA (1)...(19): siRNA sense strand
ccacguagaucacuuggau

SEQ ID NO: 59185 - RNA, 19 nt, Homo sapiens
  misc_RNA (1)...(19): siRNA sense strand
ccauuugaauuaccacgua

SEQ ID NO: 59186 - RNA, 19 nt, Homo sapiens
  misc_RNA (1)...(19): siRNA sense strand
gcuuugccgugcaguuaua

SEQ ID NO: 59187 - RNA, 19 nt, Homo sapiens
  misc_RNA (1)...(19): siRNA sense strand
ugaauuaccacguagauca

SEQ ID NO: 59188 - RNA, 19 nt, Homo sapiens
  misc_RNA (1)...(19): siRNA sense strand
cagcauagguggacuuuuc

SEQ ID NO: 59189 - RNA, 19 nt, Homo sapiens
  misc_RNA (1)...(19): siRNA sense strand
ccgcuuugccgugcaguua

SEQ ID NO: 59190 - RNA, 19 nt, Homo sapiens
  misc_RNA (1)...(19): siRNA sense strand
gccgugcaguuauacaaca

SEQ ID NO: 59191 - RNA, 19 nt, Homo sapiens
  misc_RNA (1)...(19): siRNA sense strand
guagaucacuuggauuccu

SEQ ID NO: 59192 - RNA, 19 nt, Homo sapiens
  misc_RNA (1)...(19): siRNA sense strand
uauacaacaccaaccagaa

SEQ ID NO: 59193 - RNA, 19 nt, Homo sapiens
  misc_RNA (1)...(19): siRNA sense strand
ccagaacaccaccgagaag

SEQ ID NO: 59194 - RNA, 19 nt, Homo sapiens
  misc_RNA (1)...(19): siRNA sense strand
gcccuuccauuugaauuac

SEQ ID NO: 59195 - RNA, 19 nt, Homo sapiens
  misc_RNA (1)...(19): siRNA sense strand
ccacguagaucacuuggau

SEQ ID NO: 59196 - RNA, 19 nt, Homo sapiens
  misc_RNA (1)...(19): siRNA sense strand
ccauuugaauuaccacgua

SEQ ID NO: 59197 - RNA, 19 nt, Homo sapiens
  misc_RNA (1)...(19): siRNA sense strand
gcuuugccgugcaguuaua

SEQ ID NO: 59198 - RNA, 19 nt, Homo sapiens
  misc_RNA (1)...(19): siRNA sense strand
ugaauuaccacguagauca

SEQ ID NO: 59199 - RNA, 19 nt, Homo sapiens
  misc_RNA (1)...(19): siRNA sense strand
cagcauagguggacuuuuc

SEQ ID NO: 59200 - RNA, 19 nt, Homo sapiens
  misc_RNA (1)...(19): siRNA sense strand
ccgcuuugccgugcaguua

SEQ ID NO: 59201 - RNA, 19 nt, Homo sapiens
  misc_RNA (1)...(19): siRNA sense strand
gccgugcaguuauacaaca

SEQ ID NO: 59202 - RNA, 19 nt, Homo sapiens
  misc_RNA (1)...(19): siRNA sense strand
guagaucacuuggauuccu

SEQ ID NO: 59203 - RNA, 19 nt, Homo sapiens
  misc_RNA (1)...(19): siRNA sense strand
uauacaacaccaaccagaa

SEQ ID NO: 59204 - RNA, 19 nt, Homo sapiens
  misc_RNA (1)...(19): siRNA sense strand
ccagaacaccaccgagaag

SEQ ID NO: 59205 - RNA, 19 nt, Homo sapiens
  misc_RNA (1)...(19): siRNA sense strand
gcccuuccauuugaauuac

SEQ ID NO: 59206 - RNA, 19 nt, Homo sapiens
  misc_RNA (1)...(19): siRNA sense strand
ccacguagaucacuuggau

SEQ ID NO: 59207 - RNA, 19 nt, Homo sapiens
  misc_RNA (1)...(19): siRNA sense strand
ccauuugaauuaccacgua

SEQ ID NO: 59208 - RNA, 19 nt, Homo sapiens
  misc_RNA (1)...(19): siRNA sense strand
gcuuugccgugcaguuaua

SEQ ID NO: 59209 - RNA, 19 nt, Homo sapiens
  misc_RNA (1)...(19): siRNA sense strand
ugaauuaccacguagauca

SEQ ID NO: 59210 - RNA, 19 nt, Homo sapiens
  misc_RNA (1)...(19): siRNA sense strand
cagcauagguggacuuuuc

SEQ ID NO: 59211 - RNA, 19 nt, Homo sapiens
  misc_RNA (1)...(19): siRNA sense strand
ccgcuuugccgugcaguua

SEQ ID NO: 59212 - RNA, 19 nt, Homo sapiens
  misc_RNA (1)...(19): siRNA sense strand
gccgugcaguuauacaaca

SEQ ID NO: 59213 - RNA, 19 nt, Homo sapiens
  misc_RNA (1)...(19): siRNA sense strand
guagaucacuuggauuccu

SEQ ID NO: 59214 - RNA, 19 nt, Homo sapiens
  misc_RNA (1)...(19): siRNA sense strand
uauacaacaccaaccagaa

SEQ ID NO: 59215 - RNA, 19 nt, Homo sapiens
  misc_RNA (1)...(19): siRNA sense strand
ccagaacaccaccgagaag

SEQ ID NO: 59216 - RNA, 19 nt, Homo sapiens
  misc_RNA (1)...(19): siRNA sense strand
gcccuuccauuugaauuac

SEQ ID NO: 59217 - RNA, 19 nt, Homo sapiens
  misc_RNA (1)...(19): siRNA sense strand
gcaaauagguggucucuuc

SEQ ID NO: 59218 - RNA, 19 nt, Homo sapiens
  misc_RNA (1)...(19): siRNA sense strand
ggaaugauauggauaaguu

SEQ ID NO: 59219 - RNA, 19 nt, Homo sapiens
  misc_RNA (1)...(19): siRNA sense strand
gauaagaggucgguacaua

SEQ ID NO: 59220 - RNA, 19 nt, Homo sapiens
  misc_RNA (1)...(19): siRNA sense strand
guuaaaggcuaccauuaua

SEQ ID NO: 59221 - RNA, 19 nt, Homo sapiens
  misc_RNA (1)...(19): siRNA sense strand
gcccaaggguuccucauua

SEQ ID NO: 59222 - RNA, 19 nt, Homo sapiens
  misc_RNA (1)...(19): siRNA sense strand
gaacagaacagugguugua

SEQ ID NO: 59223 - RNA, 19 nt, Homo sapiens
  misc_RNA (1)...(19): siRNA sense strand
gagaagaaguuuguaauag

SEQ ID NO: 59224 - RNA, 19 nt, Homo sapiens
  misc_RNA (1)...(19): siRNA sense strand
uuacauaucucccucauca

SEQ ID NO: 59225 - RNA, 19 nt, Homo sapiens
  misc_RNA (1)...(19): siRNA sense strand
aaacagaaauugccuaugg

SEQ ID NO: 59226 - RNA, 19 nt, Homo sapiens
  misc_RNA (1)...(19): siRNA sense strand
ugaaggaaaugacaaguau

SEQ ID NO: 59227 - RNA, 19 nt, Homo sapiens
  misc_RNA (1)...(19): siRNA sense strand
cagaagaccuggccaaaca

SEQ ID NO: 59228 - RNA, 19 nt, Homo sapiens
  misc_RNA (1)...(19): siRNA sense strand
guacauaccuugaccucau

SEQ ID NO: 59229 - RNA, 19 nt, Homo sapiens
  misc_RNA (1)...(19): siRNA sense strand
gggcauaucuaucaugauc

SEQ ID NO: 59230 - RNA, 19 nt, Homo sapiens
  misc_RNA (1)...(19): siRNA sense strand
gaaggauacuguguagauu

SEQ ID NO: 59231 - RNA, 19 nt, Homo sapiens
  misc_RNA (1)...(19): siRNA sense strand
gacagggaauguucaguuu

SEQ ID NO: 59232 - RNA, 19 nt, Homo sapiens
  misc_RNA (1)...(19): siRNA sense strand
uguaauagacugugagaua

SEQ ID NO: 59233 - RNA, 19 nt, Homo sapiens
  misc_RNA (1)...(19): siRNA sense strand
gaaacacagaucaggaaua

SEQ ID NO: 59234 - RNA, 19 nt, Homo sapiens
  misc_RNA (1)...(19): siRNA sense strand
gagccaauguuacuggauu

SEQ ID NO: 59235 - RNA, 19 nt, Homo sapiens
  misc_RNA (1)...(19): siRNA sense strand
uagaagaacuugacagaag

SEQ ID NO: 59236 - RNA, 19 nt, Homo sapiens
  misc_RNA (1)...(19): siRNA sense strand
gcaacuaagaccuucguua

SEQ ID NO: 59237 - RNA, 19 nt, Homo sapiens
  misc_RNA (1)...(19): siRNA sense strand
gaagacaagagaagaaguu

SEQ ID NO: 59238 - RNA, 19 nt, Homo sapiens
  misc_RNA (1)...(19): siRNA sense strand
gaaugaagcugaccuuuuc

SEQ ID NO: 59239 - RNA, 19 nt, Homo sapiens
  misc_RNA (1)...(19): siRNA sense strand
gcauaucuaucaugaucaa

SEQ ID NO: 59240 - RNA, 19 nt, Homo sapiens
  misc_RNA (1)...(19): siRNA sense strand
uaggagaacuuguuuaugg

SEQ ID NO: 59241 - RNA, 19 nt, Homo sapiens
  misc_RNA (1)...(19): siRNA sense strand
ccucugcucugacuuauga

SEQ ID NO: 59242 - RNA, 19 nt, Homo sapiens
  misc_RNA (1)...(19): siRNA sense strand
gaagaaguuuguaauagac

SEQ ID NO: 59243 - RNA, 19 nt, Homo sapiens
  misc_RNA (1)...(19): siRNA sense strand
gguguuuggugguucuuua

SEQ ID NO: 59244 - RNA, 19 nt, Homo sapiens
  misc_RNA (1)...(19): siRNA sense strand
gaucugagacuccuccaaa

SEQ ID NO: 59245 - RNA, 19 nt, Homo sapiens
  misc_RNA (1)...(19): siRNA sense strand
uagaacagauuguaagugu

SEQ ID NO: 59246 - RNA, 19 nt, Homo sapiens
  misc_RNA (1)...(19): siRNA sense strand
gcaggcgucuucuacauuc

SEQ ID NO: 59247 - RNA, 19 nt, Homo sapiens
  misc_RNA (1)...(19): siRNA sense strand
guaauagacugugagauag

SEQ ID NO: 59248 - RNA, 19 nt, Homo sapiens
  misc_RNA (1)...(19): siRNA sense strand
ugacacagcugcuauugag

SEQ ID NO: 59249 - RNA, 19 nt, Homo sapiens
  misc_RNA (1)...(19): siRNA sense strand
caagagaagaaguuuguaa

SEQ ID NO: 59250 - RNA, 19 nt, Homo sapiens
  misc_RNA (1)...(19): siRNA sense strand
gaagaaacuagaucagaga

SEQ ID NO: 59251 - RNA, 19 nt, Homo sapiens
  misc_RNA (1)...(19): siRNA sense strand
cagggaauguucaguuuga

SEQ ID NO: 59252 - RNA, 19 nt, Homo sapiens
  misc_RNA (1)...(19): siRNA sense strand
gaacugcaaucagacaaag

SEQ ID NO: 59253 - RNA, 19 nt, Homo sapiens
  misc_RNA (1)...(19): siRNA sense strand
ggacguagagucaauuaca

SEQ ID NO: 59254 - RNA, 19 nt, Homo sapiens
  misc_RNA (1)...(19): siRNA sense strand
ucaaacagguucgaauuca

SEQ ID NO: 59255 - RNA, 19 nt, Homo sapiens
  misc_RNA (1)...(19): siRNA sense strand
cagacaaaguucaggauug

SEQ ID NO: 59256 - RNA, 19 nt, Homo sapiens
  misc_RNA (1)...(19): siRNA sense strand
caaugaguuuggcaucuuu

SEQ ID NO: 59257 - RNA, 19 nt, Homo sapiens
  misc_RNA (1)...(19): siRNA sense strand
guugguuacuggaaugaua

SEQ ID NO: 59258 - RNA, 19 nt, Homo sapiens
  misc_RNA (1)...(19): siRNA sense strand
aaacacagaucaggaauac

SEQ ID NO: 59259 - RNA, 19 nt, Homo sapiens
  misc_RNA (1)...(19): siRNA sense strand
gaucaggaauacacugcuu

SEQ ID NO: 59260 - RNA, 19 nt, Homo sapiens
  misc_RNA (1)...(19): siRNA sense strand
gacuacagcugagggagua

SEQ ID NO: 59261 - RNA, 19 nt, Homo sapiens
  misc_RNA (1)...(19): siRNA sense strand
gcagagccaucaguauuca

SEQ ID NO: 59262 - RNA, 19 nt, Homo sapiens
  misc_RNA (1)...(19): siRNA sense strand
gaaaagauguggaccuaca

SEQ ID NO: 59263 - RNA, 19 nt, Homo sapiens
  misc_RNA (1)...(19): siRNA sense strand
cagcagagccaucaguauu

SEQ ID NO: 59264 - RNA, 19 nt, Homo sapiens
  misc_RNA (1)...(19): siRNA sense strand
caaacagguucgaauucaa

SEQ ID NO: 59265 - RNA, 19 nt, Homo sapiens
  misc_RNA (1)...(19): siRNA sense strand
guuaguagauuuaguccau

SEQ ID NO: 59266 - RNA, 19 nt, Homo sapiens
  misc_RNA (1)...(19): siRNA sense strand
ucuaagcccuucaugaguu

SEQ ID NO: 59267 - RNA, 19 nt, Homo sapiens
  misc_RNA (1)...(19): siRNA sense strand
gacaaucacuuugguacga

SEQ ID NO: 59268 - RNA, 19 nt, Homo sapiens
  misc_RNA (1)...(19): siRNA sense strand
cuugagagguuuauacaug

SEQ ID NO: 59269 - RNA, 19 nt, Homo sapiens
  misc_RNA (1)...(19): siRNA sense strand
gcaaauccaagggcaaauu

SEQ ID NO: 59270 - RNA, 19 nt, Homo sapiens
  misc_RNA (1)...(19): siRNA sense strand
cugcuaaccuggcugcuuu

SEQ ID NO: 59271 - RNA, 19 nt, Homo sapiens
  misc_RNA (1)...(19): siRNA sense strand
gguaggagaacuuguuuau

SEQ ID NO: 59272 - RNA, 19 nt, Homo sapiens
  misc_RNA (1)...(19): siRNA sense strand
caugaaauguuugaaggaa

SEQ ID NO: 59273 - RNA, 19 nt, Homo sapiens
  misc_RNA (1)...(19): siRNA sense strand
ccaguauucuagaggagua

SEQ ID NO: 59274 - RNA, 19 nt, Homo sapiens
  misc_RNA (1)...(19): siRNA sense strand
uggcaaugcugguggcuuu

SEQ ID NO: 59275 - RNA, 19 nt, Homo sapiens
  misc_RNA (1)...(19): siRNA sense strand
agaagaacuugacagaaga

SEQ ID NO: 59276 - RNA, 19 nt, Homo sapiens
  misc_RNA (1)...(19): siRNA sense strand
caacuaagaccuucguuac

SEQ ID NO: 59277 - RNA, 19 nt, Homo sapiens
  misc_RNA (1)...(19): siRNA sense strand
gcagaaaauugauaucuca

SEQ ID NO: 59278 - RNA, 19 nt, Homo sapiens
  misc_RNA (1)...(19): siRNA sense strand
gauuguaaguguuggaaag

SEQ ID NO: 59279 - RNA, 19 nt, Homo sapiens
  misc_RNA (1)...(19): siRNA sense strand
caaauggugguacgauaaa

SEQ ID NO: 59280 - RNA, 19 nt, Homo sapiens
  misc_RNA (1)...(19): siRNA sense strand
cccaaggguuccucauuaa

SEQ ID NO: 59281 - RNA, 19 nt, Homo sapiens
  misc_RNA (1)...(19): siRNA sense strand
gaagaccuggccaaacaaa

SEQ ID NO: 59282 - RNA, 19 nt, Homo sapiens
  misc_RNA (1)...(19): siRNA sense strand
gcgaccagccucccaauga

SEQ ID NO: 59283 - RNA, 19 nt, Homo sapiens
  misc_RNA (1)...(19): siRNA sense strand
cauagucuuugccuacauu

SEQ ID NO: 59284 - RNA, 19 nt, Homo sapiens
  misc_RNA (1)...(19): siRNA sense strand
uaaccacaauuauggaauc

SEQ ID NO: 59285 - RNA, 19 nt, Homo sapiens
  misc_RNA (1)...(19): siRNA sense strand
gcaaugacacagcugcuau

SEQ ID NO: 59286 - RNA, 19 nt, Homo sapiens
  misc_RNA (1)...(19): siRNA sense strand
uagagucaauuacacaaug

SEQ ID NO: 59287 - RNA, 19 nt, Homo sapiens
  misc_RNA (1)...(19): siRNA sense strand
ggaaaugacaaguaugaag

SEQ ID NO: 59288 - RNA, 19 nt, Homo sapiens
  misc_RNA (1)...(19): siRNA sense strand
guacaccucugcucugacu

SEQ ID NO: 59289 - RNA, 19 nt, Homo sapiens
  misc_RNA (1)...(19): siRNA sense strand
aaagccagauuauccauca

SEQ ID NO: 59290 - RNA, 19 nt, Homo sapiens
  misc_RNA (1)...(19): siRNA sense strand
aaacaaagccagauuaucc

SEQ ID NO: 59291 - RNA, 19 nt, Homo sapiens
  misc_RNA (1)...(19): siRNA sense strand
gcagaagcgaagagaauga

SEQ ID NO: 59292 - RNA, 19 nt, Homo sapiens
  misc_RNA (1)...(19): siRNA sense strand
gaauggaacuguuuugucu

SEQ ID NO: 59293 - RNA, 19 nt, Homo sapiens
  misc_RNA (1)...(19): siRNA sense strand
aagaaacaaagccagauua

SEQ ID NO: 59294 - RNA, 19 nt, Homo sapiens
  misc_RNA (1)...(19): siRNA sense strand
caaggguuccucauuaaga

SEQ ID NO: 59295 - RNA, 19 nt, Homo sapiens
  misc_RNA (1)...(19): siRNA sense strand
gaaagugggaggaaaucug

SEQ ID NO: 59296 - RNA, 19 nt, Homo sapiens
  misc_RNA (1)...(19): siRNA sense strand
ccucucaggucgaauuguu

SEQ ID NO: 59297 - RNA, 19 nt, Homo sapiens
  misc_RNA (1)...(19): siRNA sense strand
gaugguaggagaacuuguu

SEQ ID NO: 59298 - RNA, 19 nt, Homo sapiens
  misc_RNA (1)...(19): siRNA sense strand
cuagaaagguugguuacug

SEQ ID NO: 59299 - RNA, 19 nt, Homo sapiens
  misc_RNA (1)...(19): siRNA sense strand
gagauagagagacuucaaa

SEQ ID NO: 59300 - RNA, 19 nt, Homo sapiens
  misc_RNA (1)...(19): siRNA sense strand
uuaaugaugucagcuauag

SEQ ID NO: 59301 - RNA, 19 nt, Homo sapiens
  misc_RNA (1)...(19): siRNA sense strand
gaaauugccuauggaacac

SEQ ID NO: 59302 - RNA, 19 nt, Homo sapiens
  misc_RNA (1)...(19): siRNA sense strand
gggcagaagcgaagagaau

SEQ ID NO: 59303 - RNA, 19 nt, Homo sapiens
  misc_RNA (1)...(19): siRNA sense strand
caauguagcaggcgucuuc

SEQ ID NO: 59304 - RNA, 19 nt, Homo sapiens
  misc_RNA (1)...(19): siRNA sense strand
aacaaauggugguacgaua

SEQ ID NO: 59305 - RNA, 19 nt, Homo sapiens
  misc_RNA (1)...(19): siRNA sense strand
ucauuaagaacuccuguaa

SEQ ID NO: 59306 - RNA, 19 nt, Homo sapiens
  misc_RNA (1)...(19): siRNA sense strand
caaaaugguuggcauguca

SEQ ID NO: 59307 - RNA, 19 nt, Homo sapiens
  misc_RNA (1)...(19): siRNA sense strand
gaaacaaagccagauuauc

SEQ ID NO: 59308 - RNA, 19 nt, Homo sapiens
  misc_RNA (1)...(19): siRNA sense strand
uaagaaacaaagccagauu

SEQ ID NO: 59309 - RNA, 19 nt, Homo sapiens
  misc_RNA (1)...(19): siRNA sense strand
ugauagaguucuguuacaa

SEQ ID NO: 59310 - RNA, 19 nt, Homo sapiens
  misc_RNA (1)...(19): siRNA sense strand
acaaauggugguacgauaa

SEQ ID NO: 59311 - RNA, 19 nt, Homo sapiens
  misc_RNA (1)...(19): siRNA sense strand
guagauuuaguccauauga

SEQ ID NO: 59312 - RNA, 19 nt, Homo sapiens
  misc_RNA (1)...(19): siRNA sense strand
caagggaugcagacacaaa

SEQ ID NO: 59313 - RNA, 19 nt, Homo sapiens
  misc_RNA (1)...(19): siRNA sense strand
gaaagguugguuacuggaa

SEQ ID NO: 59314 - RNA, 19 nt, Homo sapiens
  misc_RNA (1)...(19): siRNA sense strand
caugguggagccaauguua

SEQ ID NO: 59315 - RNA, 19 nt, Homo sapiens
  misc_RNA (1)...(19): siRNA sense strand
gaugaaagugggaggaaau

SEQ ID NO: 59316 - RNA, 19 nt, Homo sapiens
  misc_RNA (1)...(19): siRNA sense strand
ggaacugcaaucagacaaa

SEQ ID NO: 59317 - RNA, 19 nt, Homo sapiens
  misc_RNA (1)...(19): siRNA sense strand
gggcauaucaccuuuaaua

SEQ ID NO: 59318 - RNA, 19 nt, Homo sapiens
  misc_RNA (1)...(19): siRNA sense strand
cagaauaguuggagggaua

SEQ ID NO: 59319 - RNA, 19 nt, Homo sapiens
  misc_RNA (1)...(19): siRNA sense strand
ggaguucuaugugauauuu

SEQ ID NO: 59320 - RNA, 19 nt, Homo sapiens
  misc_RNA (1)...(19): siRNA sense strand
ucacaacccuggacuuauu

SEQ ID NO: 59321 - RNA, 19 nt, Homo sapiens
  misc_RNA (1)...(19): siRNA sense strand
gaagggaagcugcauauga

SEQ ID NO: 59322 - RNA, 19 nt, Homo sapiens
  misc_RNA (1)...(19): siRNA sense strand
ggaagaacccuauguuaug

SEQ ID NO: 59323 - RNA, 19 nt, Homo sapiens
  misc_RNA (1)...(19): siRNA sense strand
gaagaacccuauguuaugu

SEQ ID NO: 59324 - RNA, 19 nt, Homo sapiens
  misc_RNA (1)...(19): siRNA sense strand
aaagacaaguccagcaaua

SEQ ID NO: 59325 - RNA, 19 nt, Homo sapiens
  misc_RNA (1)...(19): siRNA sense strand
ggaggcaucuucauuguuc

SEQ ID NO: 59326 - RNA, 19 nt, Homo sapiens
  misc_RNA (1)...(19): siRNA sense strand
cuaaauaguuucugguuug

SEQ ID NO: 59327 - RNA, 19 nt, Homo sapiens
  misc_RNA (1)...(19): siRNA sense strand
gcugggcacuccucuauuu

SEQ ID NO: 59328 - RNA, 19 nt, Homo sapiens
  misc_RNA (1)...(19): siRNA sense strand
agagauggaucaacaauga

SEQ ID NO: 59329 - RNA, 19 nt, Homo sapiens
  misc_RNA (1)...(19): siRNA sense strand
ugacagauuugaaggauau

SEQ ID NO: 59330 - RNA, 19 nt, Homo sapiens
  misc_RNA (1)...(19): siRNA sense strand
ggacuuauuugcuuuggau

SEQ ID NO: 59331 - RNA, 19 nt, Homo sapiens
  misc_RNA (1)...(19): siRNA sense strand
gcaaggaguucuaugugau

SEQ ID NO: 59332 - RNA, 19 nt, Homo sapiens
  misc_RNA (1)...(19): siRNA sense strand
gaucaacaaugaccuucuu

SEQ ID NO: 59333 - RNA, 19 nt, Homo sapiens
  misc_RNA (1)...(19): siRNA sense strand
ucaaagcucccuccagaua

SEQ ID NO: 59334 - RNA, 19 nt, Homo sapiens
  misc_RNA (1)...(19): siRNA sense strand
acaaaucacggaagaauaa

SEQ ID NO: 59335 - RNA, 19 nt, Homo sapiens
  misc_RNA (1)...(19): siRNA sense strand
aaagcucccuccagauaua

SEQ ID NO: 59336 - RNA, 19 nt, Homo sapiens
  misc_RNA (1)...(19): siRNA sense strand
gagaagaugugggcuuuca

SEQ ID NO: 59337 - RNA, 19 nt, Homo sapiens
  misc_RNA (1)...(19): siRNA sense strand
gaauuagcuuucaaguuug

SEQ ID NO: 59338 - RNA, 19 nt, Homo sapiens
  misc_RNA (1)...(19): siRNA sense strand
gaagaagggaagcugcaua

SEQ ID NO: 59339 - RNA, 19 nt, Homo sapiens
  misc_RNA (1)...(19): siRNA sense strand
gccuagaccuguugaaaga

SEQ ID NO: 59340 - RNA, 19 nt, Homo sapiens
  misc_RNA (1)...(19): siRNA sense strand
ucaaggagaugaagaaagg

SEQ ID NO: 59341 - RNA, 19 nt, Homo sapiens
  misc_RNA (1)...(19): siRNA sense strand
ucucgaaguuccacacaua

SEQ ID NO: 59342 - RNA, 19 nt, Homo sapiens
  misc_RNA (1)...(19): siRNA sense strand
uaugacauccagagaauua

SEQ ID NO: 59343 - RNA, 19 nt, Homo sapiens
  misc_RNA (1)...(19): siRNA sense strand
caaucuggcugccuucuug

SEQ ID NO: 59344 - RNA, 19 nt, Homo sapiens
  misc_RNA (1)...(19): siRNA sense strand
ggcaaggaguucuauguga

SEQ ID NO: 59345 - RNA, 19 nt, Homo sapiens
  misc_RNA (1)...(19): siRNA sense strand
gauauugccuagaccuguu

SEQ ID NO: 59346 - RNA, 19 nt, Homo sapiens
  misc_RNA (1)...(19): siRNA sense strand
gguccuuucuguauuugua

SEQ ID NO: 59347 - RNA, 19 nt, Homo sapiens
  misc_RNA (1)...(19): siRNA sense strand
uuaugaaccugaucaaaga

SEQ ID NO: 59348 - RNA, 19 nt, Homo sapiens
  misc_RNA (1)...(19): siRNA sense strand
gguuagagauggaucaaca

SEQ ID NO: 59349 - RNA, 19 nt, Homo sapiens
  misc_RNA (1)...(19): siRNA sense strand
ccagauauuuggauguaug

SEQ ID NO: 59350 - RNA, 19 nt, Homo sapiens
  misc_RNA (1)...(19): siRNA sense strand
aaaccaagauagaauaugg

SEQ ID NO: 59351 - RNA, 19 nt, Homo sapiens
  misc_RNA (1)...(19): siRNA sense strand
gaagaaaggcaaggaguuc

SEQ ID NO: 59352 - RNA, 19 nt, Homo sapiens
  misc_RNA (1)...(19): siRNA sense strand
gaaagaauugucaaacauc

SEQ ID NO: 59353 - RNA, 19 nt, Homo sapiens
  misc_RNA (1)...(19): siRNA sense strand
cagcugcccucugggaaua

SEQ ID NO: 59354 - RNA, 19 nt, Homo sapiens
  misc_RNA (1)...(19): siRNA sense strand
ggagugggaacaccuauug

SEQ ID NO: 59355 - RNA, 19 nt, Homo sapiens
  misc_RNA (1)...(19): siRNA sense strand
caacagaacacucauuguc

SEQ ID NO: 59356 - RNA, 19 nt, Homo sapiens
  misc_RNA (1)...(19): siRNA sense strand
uacaagagcucaucaaagc

SEQ ID NO: 59357 - RNA, 19 nt, Homo sapiens
  misc_RNA (1)...(19): siRNA sense strand
cauccuggguuucauuuau

SEQ ID NO: 59358 - RNA, 19 nt, Homo sapiens
  misc_RNA (1)...(19): siRNA sense strand
ucaccagcauuaacagaaa

SEQ ID NO: 59359 - RNA, 19 nt, Homo sapiens
  misc_RNA (1)...(19): siRNA sense strand
aaaugagccuguuaauguu

SEQ ID NO: 59360 - RNA, 19 nt, Homo sapiens
  misc_RNA (1)...(19): siRNA sense strand
gaagaugugggcuuucaug

SEQ ID NO: 59361 - RNA, 19 nt, Homo sapiens
  misc_RNA (1)...(19): siRNA sense strand
uggaucugguccucuauua

SEQ ID NO: 59362 - RNA, 19 nt, Homo sapiens
  misc_RNA (1)...(19): siRNA sense strand
caaagcaaaccaagauaga

SEQ ID NO: 59363 - RNA, 19 nt, Homo sapiens
  misc_RNA (1)...(19): siRNA sense strand
gcaaagcaaaccaagauag

SEQ ID NO: 59364 - RNA, 19 nt, Homo sapiens
  misc_RNA (1)...(19): siRNA sense strand
caaggaguucuaugugaua

SEQ ID NO: 59365 - RNA, 19 nt, Homo sapiens
  misc_RNA (1)...(19): siRNA sense strand
ugauaagccucuauaugga

SEQ ID NO: 59366 - RNA, 19 nt, Homo sapiens
  misc_RNA (1)...(19): siRNA sense strand
gaagcugcauaugaugaaa

SEQ ID NO: 59367 - RNA, 19 nt, Homo sapiens
  misc_RNA (1)...(19): siRNA sense strand
gcaaaccaagauagaauau

SEQ ID NO: 59368 - RNA, 19 nt, Homo sapiens
  misc_RNA (1)...(19): siRNA sense strand
agucagcuguguacucuuu

SEQ ID NO: 59369 - RNA, 19 nt, Homo sapiens
  misc_RNA (1)...(19): siRNA sense strand
agagagugcucaccacaga

SEQ ID NO: 59370 - RNA, 19 nt, Homo sapiens
  misc_RNA (1)...(19): siRNA sense strand
caacaaugaccuucuucaa

SEQ ID NO: 59371 - RNA, 19 nt, Homo sapiens
  misc_RNA (1)...(19): siRNA sense strand
ggagggauauggugguuuu

SEQ ID NO: 59372 - RNA, 19 nt, Homo sapiens
  misc_RNA (1)...(19): siRNA sense strand
gauaagccucuauauggaa

SEQ ID NO: 59373 - RNA, 19 nt, Homo sapiens
  misc_RNA (1)...(19): siRNA sense strand
cgaggaagacaacaaagaa

SEQ ID NO: 59374 - RNA, 19 nt, Homo sapiens
  misc_RNA (1)...(19): siRNA sense strand
agaccgcccugguaagaaa

SEQ ID NO: 59375 - RNA, 19 nt, Homo sapiens
  misc_RNA (1)...(19): siRNA sense strand
ccuaugacauccagagaau

SEQ ID NO: 59376 - RNA, 19 nt, Homo sapiens
  misc_RNA (1)...(19): siRNA sense strand
ucacggaagaauaaugaua

SEQ ID NO: 59377 - RNA, 19 nt, Homo sapiens
  misc_RNA (1)...(19): siRNA sense strand
aagggaagcugcauaugau

SEQ ID NO: 59378 - RNA, 19 nt, Homo sapiens
  misc_RNA (1)...(19): siRNA sense strand
cagcagaccgcccugguaa

SEQ ID NO: 59379 - RNA, 19 nt, Homo sapiens
  misc_RNA (1)...(19): siRNA sense strand
gaucugguccucuauuaca

SEQ ID NO: 59380 - RNA, 19 nt, Homo sapiens
  misc_RNA (1)...(19): siRNA sense strand
gaaguuccacacauacaga

SEQ ID NO: 59381 - RNA, 19 nt, Homo sapiens
  misc_RNA (1)...(19): siRNA sense strand
gcagaccgcccugguaaga

SEQ ID NO: 59382 - RNA, 19 nt, Homo sapiens
  misc_RNA (1)...(19): siRNA sense strand
ugucauccaucauugagaa

SEQ ID NO: 59383 - RNA, 19 nt, Homo sapiens
  misc_RNA (1)...(19): siRNA sense strand
guacaguggcguaaacaug

SEQ ID NO: 59384 - RNA, 19 nt, Homo sapiens
  misc_RNA (1)...(19): siRNA sense strand
uugcaaugcucucgaaguu

SEQ ID NO: 59385 - RNA, 19 nt, Homo sapiens
  misc_RNA (1)...(19): siRNA sense strand
ugaaggauauugccuagac

SEQ ID NO: 59386 - RNA, 19 nt, Homo sapiens
  misc_RNA (1)...(19): siRNA sense strand
gaaaucugauaagccucua

SEQ ID NO: 59387 - RNA, 19 nt, Homo sapiens
  misc_RNA (1)...(19): siRNA sense strand
ucagugcugugcagucuau

SEQ ID NO: 59388 - RNA, 19 nt, Homo sapiens
  misc_RNA (1)...(19): siRNA sense strand
ggaagcugcauaugaugaa

SEQ ID NO: 59389 - RNA, 19 nt, Homo sapiens
  misc_RNA (1)...(19): siRNA sense strand
uaacaccacauuaaccuau

SEQ ID NO: 59390 - RNA, 19 nt, Homo sapiens
  misc_RNA (1)...(19): siRNA sense strand
aaaaugagccuguuaaugu

SEQ ID NO: 59391 - RNA, 19 nt, Homo sapiens
  misc_RNA (1)...(19): siRNA sense strand
gaaaggcaaggaguucuau

SEQ ID NO: 59392 - RNA, 19 nt, Homo sapiens
  misc_RNA (1)...(19): siRNA sense strand
gcagucaccagcauuaaca

SEQ ID NO: 59393 - RNA, 19 nt, Homo sapiens
  misc_RNA (1)...(19): siRNA sense strand
ugguguggcugcucucuuu

SEQ ID NO: 59394 - RNA, 19 nt, Homo sapiens
  misc_RNA (1)...(19): siRNA sense strand
uggaagaacccuauguuau

SEQ ID NO: 59395 - RNA, 19 nt, Homo sapiens
  misc_RNA (1)...(19): siRNA sense strand
gcagugccauagacauaag

SEQ ID NO: 59396 - RNA, 19 nt, Homo sapiens
  misc_RNA (1)...(19): siRNA sense strand
caacagugggcuuaacaug

SEQ ID NO: 59397 - RNA, 19 nt, Homo sapiens
  misc_RNA (1)...(19): siRNA sense strand
caaagaggaaggaacugaa

SEQ ID NO: 59398 - RNA, 19 nt, Homo sapiens
  misc_RNA (1)...(19): siRNA sense strand
gcaugaugaccgaguacua

SEQ ID NO: 59399 - RNA, 19 nt, Homo sapiens
  misc_RNA (1)...(19): siRNA sense strand
gaagcccaaugguaccaau

SEQ ID NO: 59400 - RNA, 19 nt, Homo sapiens
  misc_RNA (1)...(19): siRNA sense strand
ggcauaucaccuuuaauaa

SEQ ID NO: 59401 - RNA, 19 nt, Homo sapiens
  misc_RNA (1)...(19): siRNA sense strand
ucacgugucauccaucauu

SEQ ID NO: 59402 - RNA, 19 nt, Homo sapiens
  misc_RNA (1)...(19): siRNA sense strand
ccgcugaaauccuuaagca

SEQ ID NO: 59403 - RNA, 19 nt, Homo sapiens
  misc_RNA (1)...(19): siRNA sense strand
gggaagcugcauaugauga

SEQ ID NO: 59404 - RNA, 19 nt, Homo sapiens
  misc_RNA (1)...(19): siRNA sense strand
gaaacugcaaccucacuca

SEQ ID NO: 59405 - RNA, 19 nt, Homo sapiens
  misc_RNA (1)...(19): siRNA sense strand
ucaccaccauucuggaaga

SEQ ID NO: 59406 - RNA, 19 nt, Homo sapiens
  misc_RNA (1)...(19): siRNA sense strand
ggacagcaacaaagacaag

SEQ ID NO: 59407 - RNA, 19 nt, Homo sapiens
  misc_RNA (1)...(19): siRNA sense strand
cagcacaggucuaauucgu

SEQ ID NO: 59408 - RNA, 19 nt, Homo sapiens
  misc_RNA (1)...(19): siRNA sense strand
ggauguaugugcucuuagc

SEQ ID NO: 59409 - RNA, 19 nt, Homo sapiens
  misc_RNA (1)...(19): siRNA sense strand
gguuaaagaacucauagau

SEQ ID NO: 59410 - RNA, 19 nt, Homo sapiens
  misc_RNA (1)...(19): siRNA sense strand
gaugguuaaagaacucaua

SEQ ID NO: 59411 - RNA, 19 nt, Homo sapiens
  misc_RNA (1)...(19): siRNA sense strand
gaagaauuagcuuucaagu

SEQ ID NO: 59412 - RNA, 19 nt, Homo sapiens
  misc_RNA (1)...(19): siRNA sense strand
gccaacagaacacucauug

SEQ ID NO: 59413 - RNA, 19 nt, Homo sapiens
  misc_RNA (1)...(19): siRNA sense strand
ugacggacagcaacaaaga

SEQ ID NO: 59414 - RNA, 19 nt, Homo sapiens
  misc_RNA (1)...(19): siRNA sense strand
gacaaguccagcaauauca

SEQ ID NO: 59415 - RNA, 19 nt, Homo sapiens
  misc_RNA (1)...(19): siRNA sense strand
gaugaucuggcaaagcaaa

SEQ ID NO: 59416 - RNA, 19 nt, Homo sapiens
  misc_RNA (1)...(19): siRNA sense strand
cugauaagccucuauaugg

SEQ ID NO: 59417 - RNA, 19 nt, Homo sapiens
  misc_RNA (1)...(19): siRNA sense strand
gggcauaucaccuuuaaua

SEQ ID NO: 59418 - RNA, 19 nt, Homo sapiens
  misc_RNA (1)...(19): siRNA sense strand
cagaauaguuggagggaua

SEQ ID NO: 59419 - RNA, 19 nt, Homo sapiens
  misc_RNA (1)...(19): siRNA sense strand
ggaguucuaugugauauuu

SEQ ID NO: 59420 - RNA, 19 nt, Homo sapiens
  misc_RNA (1)...(19): siRNA sense strand
ucacaacccuggacuuauu

SEQ ID NO: 59421 - RNA, 19 nt, Homo sapiens
  misc_RNA (1)...(19): siRNA sense strand
gaagggaagcugcauauga

SEQ ID NO: 59422 - RNA, 19 nt, Homo sapiens
  misc_RNA (1)...(19): siRNA sense strand
ggaagaacccuauguuaug

SEQ ID NO: 59423 - RNA, 19 nt, Homo sapiens
  misc_RNA (1)...(19): siRNA sense strand
gaagaacccuauguuaugu

SEQ ID NO: 59424 - RNA, 19 nt, Homo sapiens
  misc_RNA (1)...(19): siRNA sense strand
aaagacaaguccagcaaua

SEQ ID NO: 59425 - RNA, 19 nt, Homo sapiens
  misc_RNA (1)...(19): siRNA sense strand
ggaggcaucuucauuguuc

SEQ ID NO: 59426 - RNA, 19 nt, Homo sapiens
  misc_RNA (1)...(19): siRNA sense strand
cuaaauaguuucugguuug

SEQ ID NO: 59427 - RNA, 19 nt, Homo sapiens
  misc_RNA (1)...(19): siRNA sense strand
gcugggcacuccucuauuu

SEQ ID NO: 59428 - RNA, 19 nt, Homo sapiens
  misc_RNA (1)...(19): siRNA sense strand
agagauggaucaacaauga

SEQ ID NO: 59429 - RNA, 19 nt, Homo sapiens
  misc_RNA (1)...(19): siRNA sense strand
ugacagauuugaaggauau

SEQ ID NO: 59430 - RNA, 19 nt, Homo sapiens
  misc_RNA (1)...(19): siRNA sense strand
ggacuuauuugcuuuggau

SEQ ID NO: 59431 - RNA, 19 nt, Homo sapiens
  misc_RNA (1)...(19): siRNA sense strand
gcaaggaguucuaugugau

SEQ ID NO: 59432 - RNA, 19 nt, Homo sapiens
  misc_RNA (1)...(19): siRNA sense strand
gaucaacaaugaccuucuu

SEQ ID NO: 59433 - RNA, 19 nt, Homo sapiens
  misc_RNA (1)...(19): siRNA sense strand
ucaaagcucccuccagaua

SEQ ID NO: 59434 - RNA, 19 nt, Homo sapiens
  misc_RNA (1)...(19): siRNA sense strand
acaaaucacggaagaauaa

SEQ ID NO: 59435 - RNA, 19 nt, Homo sapiens
  misc_RNA (1)...(19): siRNA sense strand
aaagcucccuccagauaua

SEQ ID NO: 59436 - RNA, 19 nt, Homo sapiens
  misc_RNA (1)...(19): siRNA sense strand
gagaagaugugggcuuuca

SEQ ID NO: 59437 - RNA, 19 nt, Homo sapiens
  misc_RNA (1)...(19): siRNA sense strand
gaauuagcuuucaaguuug

SEQ ID NO: 59438 - RNA, 19 nt, Homo sapiens
  misc_RNA (1)...(19): siRNA sense strand
gaagaagggaagcugcaua

SEQ ID NO: 59439 - RNA, 19 nt, Homo sapiens
  misc_RNA (1)...(19): siRNA sense strand
gccuagaccuguugaaaga

SEQ ID NO: 59440 - RNA, 19 nt, Homo sapiens
  misc_RNA (1)...(19): siRNA sense strand
ucaaggagaugaagaaagg

SEQ ID NO: 59441 - RNA, 19 nt, Homo sapiens
  misc_RNA (1)...(19): siRNA sense strand
ucucgaaguuccacacaua

SEQ ID NO: 59442 - RNA, 19 nt, Homo sapiens
  misc_RNA (1)...(19): siRNA sense strand
uaugacauccagagaauua

SEQ ID NO: 59443 - RNA, 19 nt, Homo sapiens
  misc_RNA (1)...(19): siRNA sense strand
caaucuggcugccuucuug

SEQ ID NO: 59444 - RNA, 19 nt, Homo sapiens
  misc_RNA (1)...(19): siRNA sense strand
ggcaaggaguucuauguga

SEQ ID NO: 59445 - RNA, 19 nt, Homo sapiens
  misc_RNA (1)...(19): siRNA sense strand
gauauugccuagaccuguu

SEQ ID NO: 59446 - RNA, 19 nt, Homo sapiens
  misc_RNA (1)...(19): siRNA sense strand
gguccuuucuguauuugua

SEQ ID NO: 59447 - RNA, 19 nt, Homo sapiens
  misc_RNA (1)...(19): siRNA sense strand
uuaugaaccugaucaaaga

SEQ ID NO: 59448 - RNA, 19 nt, Homo sapiens
  misc_RNA (1)...(19): siRNA sense strand
gguuagagauggaucaaca

SEQ ID NO: 59449 - RNA, 19 nt, Homo sapiens
  misc_RNA (1)...(19): siRNA sense strand
ccagauauuuggauguaug

SEQ ID NO: 59450 - RNA, 19 nt, Homo sapiens
  misc_RNA (1)...(19): siRNA sense strand
aaaccaagauagaauaugg

SEQ ID NO: 59451 - RNA, 19 nt, Homo sapiens
  misc_RNA (1)...(19): siRNA sense strand
gaagaaaggcaaggaguuc

SEQ ID NO: 59452 - RNA, 19 nt, Homo sapiens
  misc_RNA (1)...(19): siRNA sense strand
gaaagaauugucaaacauc

SEQ ID NO: 59453 - RNA, 19 nt, Homo sapiens
  misc_RNA (1)...(19): siRNA sense strand
cagcugcccucugggaaua

SEQ ID NO: 59454 - RNA, 19 nt, Homo sapiens
  misc_RNA (1)...(19): siRNA sense strand
ggagugggaacaccuauug

SEQ ID NO: 59455 - RNA, 19 nt, Homo sapiens
  misc_RNA (1)...(19): siRNA sense strand
caacagaacacucauuguc

SEQ ID NO: 59456 - RNA, 19 nt, Homo sapiens
  misc_RNA (1)...(19): siRNA sense strand
uacaagagcucaucaaagc

SEQ ID NO: 59457 - RNA, 19 nt, Homo sapiens
  misc_RNA (1)...(19): siRNA sense strand
cauccuggguuucauuuau

SEQ ID NO: 59458 - RNA, 19 nt, Homo sapiens
  misc_RNA (1)...(19): siRNA sense strand
ucaccagcauuaacagaaa

SEQ ID NO: 59459 - RNA, 19 nt, Homo sapiens
  misc_RNA (1)...(19): siRNA sense strand
aaaugagccuguuaauguu

SEQ ID NO: 59460 - RNA, 19 nt, Homo sapiens
  misc_RNA (1)...(19): siRNA sense strand
gaagaugugggcuuucaug

SEQ ID NO: 59461 - RNA, 19 nt, Homo sapiens
  misc_RNA (1)...(19): siRNA sense strand
uggaucugguccucuauua

SEQ ID NO: 59462 - RNA, 19 nt, Homo sapiens
  misc_RNA (1)...(19): siRNA sense strand
caaagcaaaccaagauaga

SEQ ID NO: 59463 - RNA, 19 nt, Homo sapiens
  misc_RNA (1)...(19): siRNA sense strand
gcaaagcaaaccaagauag

SEQ ID NO: 59464 - RNA, 19 nt, Homo sapiens
  misc_RNA (1)...(19): siRNA sense strand
caaggaguucuaugugaua

SEQ ID NO: 59465 - RNA, 19 nt, Homo sapiens
  misc_RNA (1)...(19): siRNA sense strand
ugauaagccucuauaugga

SEQ ID NO: 59466 - RNA, 19 nt, Homo sapiens
  misc_RNA (1)...(19): siRNA sense strand
gaagcugcauaugaugaaa

SEQ ID NO: 59467 - RNA, 19 nt, Homo sapiens
  misc_RNA (1)...(19): siRNA sense strand
gcaaaccaagauagaauau

SEQ ID NO: 59468 - RNA, 19 nt, Homo sapiens
  misc_RNA (1)...(19): siRNA sense strand
agucagcuguguacucuuu

SEQ ID NO: 59469 - RNA, 19 nt, Homo sapiens
  misc_RNA (1)...(19): siRNA sense strand
agagagugcucaccacaga

SEQ ID NO: 59470 - RNA, 19 nt, Homo sapiens
  misc_RNA (1)...(19): siRNA sense strand
caacaaugaccuucuucaa

SEQ ID NO: 59471 - RNA, 19 nt, Homo sapiens
  misc_RNA (1)...(19): siRNA sense strand
ggagggauauggugguuuu

SEQ ID NO: 59472 - RNA, 19 nt, Homo sapiens
  misc_RNA (1)...(19): siRNA sense strand
gauaagccucuauauggaa

SEQ ID NO: 59473 - RNA, 19 nt, Homo sapiens
  misc_RNA (1)...(19): siRNA sense strand
cgaggaagacaacaaagaa

SEQ ID NO: 59474 - RNA, 19 nt, Homo sapiens
  misc_RNA (1)...(19): siRNA sense strand
agaccgcccugguaagaaa

SEQ ID NO: 59475 - RNA, 19 nt, Homo sapiens
  misc_RNA (1)...(19): siRNA sense strand
ccuaugacauccagagaau

SEQ ID NO: 59476 - RNA, 19 nt, Homo sapiens
  misc_RNA (1)...(19): siRNA sense strand
ucacggaagaauaaugaua

SEQ ID NO: 59477 - RNA, 19 nt, Homo sapiens
  misc_RNA (1)...(19): siRNA sense strand
aagggaagcugcauaugau

SEQ ID NO: 59478 - RNA, 19 nt, Homo sapiens
  misc_RNA (1)...(19): siRNA sense strand
cagcagaccgcccugguaa

SEQ ID NO: 59479 - RNA, 19 nt, Homo sapiens
  misc_RNA (1)...(19): siRNA sense strand
gaucugguccucuauuaca

SEQ ID NO: 59480 - RNA, 19 nt, Homo sapiens
  misc_RNA (1)...(19): siRNA sense strand
gaaguuccacacauacaga

SEQ ID NO: 59481 - RNA, 19 nt, Homo sapiens
  misc_RNA (1)...(19): siRNA sense strand
gcagaccgcccugguaaga

SEQ ID NO: 59482 - RNA, 19 nt, Homo sapiens
  misc_RNA (1)...(19): siRNA sense strand
ugucauccaucauugagaa

SEQ ID NO: 59483 - RNA, 19 nt, Homo sapiens
  misc_RNA (1)...(19): siRNA sense strand
guacaguggcguaaacaug

SEQ ID NO: 59484 - RNA, 19 nt, Homo sapiens
  misc_RNA (1)...(19): siRNA sense strand
uugcaaugcucucgaaguu

SEQ ID NO: 59485 - RNA, 19 nt, Homo sapiens
  misc_RNA (1)...(19): siRNA sense strand
ugaaggauauugccuagac

SEQ ID NO: 59486 - RNA, 19 nt, Homo sapiens
  misc_RNA (1)...(19): siRNA sense strand
gaaaucugauaagccucua

SEQ ID NO: 59487 - RNA, 19 nt, Homo sapiens
  misc_RNA (1)...(19): siRNA sense strand
ucagugcugugcagucuau

SEQ ID NO: 59488 - RNA, 19 nt, Homo sapiens
  misc_RNA (1)...(19): siRNA sense strand
ggaagcugcauaugaugaa

SEQ ID NO: 59489 - RNA, 19 nt, Homo sapiens
  misc_RNA (1)...(19): siRNA sense strand
uaacaccacauuaaccuau

SEQ ID NO: 59490 - RNA, 19 nt, Homo sapiens
  misc_RNA (1)...(19): siRNA sense strand
aaaaugagccuguuaaugu

SEQ ID NO: 59491 - RNA, 19 nt, Homo sapiens
  misc_RNA (1)...(19): siRNA sense strand
gaaaggcaaggaguucuau

SEQ ID NO: 59492 - RNA, 19 nt, Homo sapiens
  misc_RNA (1)...(19): siRNA sense strand
gcagucaccagcauuaaca

SEQ ID NO: 59493 - RNA, 19 nt, Homo sapiens
  misc_RNA (1)...(19): siRNA sense strand
ugguguggcugcucucuuu

SEQ ID NO: 59494 - RNA, 19 nt, Homo sapiens
  misc_RNA (1)...(19): siRNA sense strand
uggaagaacccuauguuau

SEQ ID NO: 59495 - RNA, 19 nt, Homo sapiens
  misc_RNA (1)...(19): siRNA sense strand
gcagugccauagacauaag

SEQ ID NO: 59496 - RNA, 19 nt, Homo sapiens
  misc_RNA (1)...(19): siRNA sense strand
caacagugggcuuaacaug

SEQ ID NO: 59497 - RNA, 19 nt, Homo sapiens
  misc_RNA (1)...(19): siRNA sense strand
caaagaggaaggaacugaa

SEQ ID NO: 59498 - RNA, 19 nt, Homo sapiens
  misc_RNA (1)...(19): siRNA sense strand
gcaugaugaccgaguacua

SEQ ID NO: 59499 - RNA, 19 nt, Homo sapiens
  misc_RNA (1)...(19): siRNA sense strand
gaagcccaaugguaccaau

SEQ ID NO: 59500 - RNA, 19 nt, Homo sapiens
  misc_RNA (1)...(19): siRNA sense strand
ggcauaucaccuuuaauaa

SEQ ID NO: 59501 - RNA, 19 nt, Homo sapiens
  misc_RNA (1)...(19): siRNA sense strand
ucacgugucauccaucauu

SEQ ID NO: 59502 - RNA, 19 nt, Homo sapiens
  misc_RNA (1)...(19): siRNA sense strand
ccgcugaaauccuuaagca

SEQ ID NO: 59503 - RNA, 19 nt, Homo sapiens
  misc_RNA (1)...(19): siRNA sense strand
gggaagcugcauaugauga

SEQ ID NO: 59504 - RNA, 19 nt, Homo sapiens
  misc_RNA (1)...(19): siRNA sense strand
gaaacugcaaccucacuca

SEQ ID NO: 59505 - RNA, 19 nt, Homo sapiens
  misc_RNA (1)...(19): siRNA sense strand
ucaccaccauucuggaaga

SEQ ID NO: 59506 - RNA, 19 nt, Homo sapiens
  misc_RNA (1)...(19): siRNA sense strand
ggacagcaacaaagacaag

SEQ ID NO: 59507 - RNA, 19 nt, Homo sapiens
  misc_RNA (1)...(19): siRNA sense strand
cagcacaggucuaauucgu

SEQ ID NO: 59508 - RNA, 19 nt, Homo sapiens
  misc_RNA (1)...(19): siRNA sense strand
ggauguaugugcucuuagc

SEQ ID NO: 59509 - RNA, 19 nt, Homo sapiens
  misc_RNA (1)...(19): siRNA sense strand
gguuaaagaacucauagau

SEQ ID NO: 59510 - RNA, 19 nt, Homo sapiens
  misc_RNA (1)...(19): siRNA sense strand
gaugguuaaagaacucaua

SEQ ID NO: 59511 - RNA, 19 nt, Homo sapiens
  misc_RNA (1)...(19): siRNA sense strand
gaagaauuagcuuucaagu

SEQ ID NO: 59512 - RNA, 19 nt, Homo sapiens
  misc_RNA (1)...(19): siRNA sense strand
gccaacagaacacucauug

SEQ ID NO: 59513 - RNA, 19 nt, Homo sapiens
  misc_RNA (1)...(19): siRNA sense strand
ugacggacagcaacaaaga

SEQ ID NO: 59514 - RNA, 19 nt, Homo sapiens
  misc_RNA (1)...(19): siRNA sense strand
gacaaguccagcaauauca

SEQ ID NO: 59515 - RNA, 19 nt, Homo sapiens
  misc_RNA (1)...(19): siRNA sense strand
gaugaucuggcaaagcaaa

SEQ ID NO: 59516 - RNA, 19 nt, Homo sapiens
  misc_RNA (1)...(19): siRNA sense strand
cugauaagccucuauaugg

SEQ ID NO: 59517 - RNA, 19 nt, Homo sapiens
  misc_RNA (1)...(19): siRNA sense strand
caacaaagauuccuucuau

SEQ ID NO: 59518 - RNA, 19 nt, Homo sapiens
  misc_RNA (1)...(19): siRNA sense strand
gaacaucacagauuccuua

SEQ ID NO: 59519 - RNA, 19 nt, Homo sapiens
  misc_RNA (1)...(19): siRNA sense strand
gaacuugcauucagauuug

SEQ ID NO: 59520 - RNA, 19 nt, Homo sapiens
  misc_RNA (1)...(19): siRNA sense strand
gcacuggucucauucguuu

SEQ ID NO: 59521 - RNA, 19 nt, Homo sapiens
  misc_RNA (1)...(19): siRNA sense strand
gauagaauauggagcagua

SEQ ID NO: 59522 - RNA, 19 nt, Homo sapiens
  misc_RNA (1)...(19): siRNA sense strand
gacagaagguugccaggua

SEQ ID NO: 59523 - RNA, 19 nt, Homo sapiens
  misc_RNA (1)...(19): siRNA sense strand
gcaaggaguuucauguaau

SEQ ID NO: 59524 - RNA, 19 nt, Homo sapiens
  misc_RNA (1)...(19): siRNA sense strand
guaaagaaaccauggcaua

SEQ ID NO: 59525 - RNA, 19 nt, Homo sapiens
  misc_RNA (1)...(19): siRNA sense strand
ugacucugcugaugauuua

SEQ ID NO: 59526 - RNA, 19 nt, Homo sapiens
  misc_RNA (1)...(19): siRNA sense strand
ggaagagccuuauguccuu

SEQ ID NO: 59527 - RNA, 19 nt, Homo sapiens
  misc_RNA (1)...(19): siRNA sense strand
ccugauaucuggauguaua

SEQ ID NO: 59528 - RNA, 19 nt, Homo sapiens
  misc_RNA (1)...(19): siRNA sense strand
ugacagcacuggucucauu

SEQ ID NO: 59529 - RNA, 19 nt, Homo sapiens
  misc_RNA (1)...(19): siRNA sense strand
ggaguuucauguaaucuuu

SEQ ID NO: 59530 - RNA, 19 nt, Homo sapiens
  misc_RNA (1)...(19): siRNA sense strand
gagagaaggucaucgacuu

SEQ ID NO: 59531 - RNA, 19 nt, Homo sapiens
  misc_RNA (1)...(19): siRNA sense strand
gaaggaagaaggucuagaa

SEQ ID NO: 59532 - RNA, 19 nt, Homo sapiens
  misc_RNA (1)...(19): siRNA sense strand
cuaaauaguuucugguuug

SEQ ID NO: 59533 - RNA, 19 nt, Homo sapiens
  misc_RNA (1)...(19): siRNA sense strand
ucacacagcucaucagcaa

SEQ ID NO: 59534 - RNA, 19 nt, Homo sapiens
  misc_RNA (1)...(19): siRNA sense strand
ccacacauguauuaagauu

SEQ ID NO: 59535 - RNA, 19 nt, Homo sapiens
  misc_RNA (1)...(19): siRNA sense strand
gaauauugguggcaucuuc

SEQ ID NO: 59536 - RNA, 19 nt, Homo sapiens
  misc_RNA (1)...(19): siRNA sense strand
gaaggcaaacugcauauga

SEQ ID NO: 59537 - RNA, 19 nt, Homo sapiens
  misc_RNA (1)...(19): siRNA sense strand
ggcaaggaguuucauguaa

SEQ ID NO: 59538 - RNA, 19 nt, Homo sapiens
  misc_RNA (1)...(19): siRNA sense strand
guauuaagauuugguggua

SEQ ID NO: 59539 - RNA, 19 nt, Homo sapiens
  misc_RNA (1)...(19): siRNA sense strand
acaaaccucucuaugguaa

SEQ ID NO: 59540 - RNA, 19 nt, Homo sapiens
  misc_RNA (1)...(19): siRNA sense strand
gcuaaauaguuucugguuu

SEQ ID NO: 59541 - RNA, 19 nt, Homo sapiens
  misc_RNA (1)...(19): siRNA sense strand
ugacaaaccucucuauggu

SEQ ID NO: 59542 - RNA, 19 nt, Homo sapiens
  misc_RNA (1)...(19): siRNA sense strand
gcacacauuuaacgacaga

SEQ ID NO: 59543 - RNA, 19 nt, Homo sapiens
  misc_RNA (1)...(19): siRNA sense strand
auacuacccuuaccuauga

SEQ ID NO: 59544 - RNA, 19 nt, Homo sapiens
  misc_RNA (1)...(19): siRNA sense strand
gagaacagauuuugauuug

SEQ ID NO: 59545 - RNA, 19 nt, Homo sapiens
  misc_RNA (1)...(19): siRNA sense strand
gcaguguaaucgacauaaa

SEQ ID NO: 59546 - RNA, 19 nt, Homo sapiens
  misc_RNA (1)...(19): siRNA sense strand
uaacagaaacagaacauug

SEQ ID NO: 59547 - RNA, 19 nt, Homo sapiens
  misc_RNA (1)...(19): siRNA sense strand
cagaagaaguuaucaacau

SEQ ID NO: 59548 - RNA, 19 nt, Homo sapiens
  misc_RNA (1)...(19): siRNA sense strand
gcaaaacccuuacuaaaag

SEQ ID NO: 59549 - RNA, 19 nt, Homo sapiens
  misc_RNA (1)...(19): siRNA sense strand
gaacagauuuugauuugga

SEQ ID NO: 59550 - RNA, 19 nt, Homo sapiens
  misc_RNA (1)...(19): siRNA sense strand
gauuggauauucucaagga

SEQ ID NO: 59551 - RNA, 19 nt, Homo sapiens
  misc_RNA (1)...(19): siRNA sense strand
gaacacaauuaacagaaac

SEQ ID NO: 59552 - RNA, 19 nt, Homo sapiens
  misc_RNA (1)...(19): siRNA sense strand
ggaacuugcauucagauuu

SEQ ID NO: 59553 - RNA, 19 nt, Homo sapiens
  misc_RNA (1)...(19): siRNA sense strand
gcauucagauuugcuguga

SEQ ID NO: 59554 - RNA, 19 nt, Homo sapiens
  misc_RNA (1)...(19): siRNA sense strand
ggaagaaggucuagaaaag

SEQ ID NO: 59555 - RNA, 19 nt, Homo sapiens
  misc_RNA (1)...(19): siRNA sense strand
aaagauuccuucuauguca

SEQ ID NO: 59556 - RNA, 19 nt, Homo sapiens
  misc_RNA (1)...(19): siRNA sense strand
uaaagaaaccauggcauaa

SEQ ID NO: 59557 - RNA, 19 nt, Homo sapiens
  misc_RNA (1)...(19): siRNA sense strand
ucauaaagcugaccuugca

SEQ ID NO: 59558 - RNA, 19 nt, Homo sapiens
  misc_RNA (1)...(19): siRNA sense strand
cagcgaacaucacagauuc

SEQ ID NO: 59559 - RNA, 19 nt, Homo sapiens
  misc_RNA (1)...(19): siRNA sense strand
gaagugccagcgucgguua

SEQ ID NO: 59560 - RNA, 19 nt, Homo sapiens
  misc_RNA (1)...(19): siRNA sense strand
gguggcaucuucauuguuc

SEQ ID NO: 59561 - RNA, 19 nt, Homo sapiens
  misc_RNA (1)...(19): siRNA sense strand
aaaccaagauagaauaugg

SEQ ID NO: 59562 - RNA, 19 nt, Homo sapiens
  misc_RNA (1)...(19): siRNA sense strand
gaagagccuuauguccuuu

SEQ ID NO: 59563 - RNA, 19 nt, Homo sapiens
  misc_RNA (1)...(19): siRNA sense strand
caaggaaccacacauguau

SEQ ID NO: 59564 - RNA, 19 nt, Homo sapiens
  misc_RNA (1)...(19): siRNA sense strand
gcaaacugcauaugaugaa

SEQ ID NO: 59565 - RNA, 19 nt, Homo sapiens
  misc_RNA (1)...(19): siRNA sense strand
uaugauacccagaagauaa

SEQ ID NO: 59566 - RNA, 19 nt, Homo sapiens
  misc_RNA (1)...(19): siRNA sense strand
gaggaaggcaaacugcaua

SEQ ID NO: 59567 - RNA, 19 nt, Homo sapiens
  misc_RNA (1)...(19): siRNA sense strand
ucaaggaaccacacaugua

SEQ ID NO: 59568 - RNA, 19 nt, Homo sapiens
  misc_RNA (1)...(19): siRNA sense strand
uaacuuagccgccuuucug

SEQ ID NO: 59569 - RNA, 19 nt, Homo sapiens
  misc_RNA (1)...(19): siRNA sense strand
uguauauucugcuggcuua

SEQ ID NO: 59570 - RNA, 19 nt, Homo sapiens
  misc_RNA (1)...(19): siRNA sense strand
aaauuagacuuguggaaga

SEQ ID NO: 59571 - RNA, 19 nt, Homo sapiens
  misc_RNA (1)...(19): siRNA sense strand
ucagagaguuaucuacaau

SEQ ID NO: 59572 - RNA, 19 nt, Homo sapiens
  misc_RNA (1)...(19): siRNA sense strand
ccaagucuccuccaucauu

SEQ ID NO: 59573 - RNA, 19 nt, Homo sapiens
  misc_RNA (1)...(19): siRNA sense strand
ugacaggguucagaauauu

SEQ ID NO: 59574 - RNA, 19 nt, Homo sapiens
  misc_RNA (1)...(19): siRNA sense strand
ucaaagcuccaucaaggua

SEQ ID NO: 59575 - RNA, 19 nt, Homo sapiens
  misc_RNA (1)...(19): siRNA sense strand
guagugccaugguagaaga

SEQ ID NO: 59576 - RNA, 19 nt, Homo sapiens
  misc_RNA (1)...(19): siRNA sense strand
gcaagguucugagcucaug

SEQ ID NO: 59577 - RNA, 19 nt, Homo sapiens
  misc_RNA (1)...(19): siRNA sense strand
gguauaaucuucgacucaa

SEQ ID NO: 59578 - RNA, 19 nt, Homo sapiens
  misc_RNA (1)...(19): siRNA sense strand
caaggaguuucauguaauc

SEQ ID NO: 59579 - RNA, 19 nt, Homo sapiens
  misc_RNA (1)...(19): siRNA sense strand
agaagaaguuaucaacaug

SEQ ID NO: 59580 - RNA, 19 nt, Homo sapiens
  misc_RNA (1)...(19): siRNA sense strand
caagucuccuccaucauug

SEQ ID NO: 59581 - RNA, 19 nt, Homo sapiens
  misc_RNA (1)...(19): siRNA sense strand
caagaaagccugugaucag

SEQ ID NO: 59582 - RNA, 19 nt, Homo sapiens
  misc_RNA (1)...(19): siRNA sense strand
acagaagguugccagguaa

SEQ ID NO: 59583 - RNA, 19 nt, Homo sapiens
  misc_RNA (1)...(19): siRNA sense strand
ugggaaugaugacagaaua

SEQ ID NO: 59584 - RNA, 19 nt, Homo sapiens
  misc_RNA (1)...(19): siRNA sense strand
aaagcuccaucaagguaua

SEQ ID NO: 59585 - RNA, 19 nt, Homo sapiens
  misc_RNA (1)...(19): siRNA sense strand
acaauggaauggaaugguu

SEQ ID NO: 59586 - RNA, 19 nt, Homo sapiens
  misc_RNA (1)...(19): siRNA sense strand
gcagaauaacuuucaacaa

SEQ ID NO: 59587 - RNA, 19 nt, Homo sapiens
  misc_RNA (1)...(19): siRNA sense strand
ucaguuccuugcaguguaa

SEQ ID NO: 59588 - RNA, 19 nt, Homo sapiens
  misc_RNA (1)...(19): siRNA sense strand
gacaggguucagaauauua

SEQ ID NO: 59589 - RNA, 19 nt, Homo sapiens
  misc_RNA (1)...(19): siRNA sense strand
gaaaagaggcaaggaguuu

SEQ ID NO: 59590 - RNA, 19 nt, Homo sapiens
  misc_RNA (1)...(19): siRNA sense strand
ucacgguuguguaugauga

SEQ ID NO: 59591 - RNA, 19 nt, Homo sapiens
  misc_RNA (1)...(19): siRNA sense strand
agaguuaucuacaauccuu

SEQ ID NO: 59592 - RNA, 19 nt, Homo sapiens
  misc_RNA (1)...(19): siRNA sense strand
uaagaagucugacaaaccu

SEQ ID NO: 59593 - RNA, 19 nt, Homo sapiens
  misc_RNA (1)...(19): siRNA sense strand
ggaaagccagcgaacauca

SEQ ID NO: 59594 - RNA, 19 nt, Homo sapiens
  misc_RNA (1)...(19): siRNA sense strand
caugacaggguucagaaua

SEQ ID NO: 59595 - RNA, 19 nt, Homo sapiens
  misc_RNA (1)...(19): siRNA sense strand
ccucuuugcucuugauguu

SEQ ID NO: 59596 - RNA, 19 nt, Homo sapiens
  misc_RNA (1)...(19): siRNA sense strand
gaaugaugacagaauacua

SEQ ID NO: 59597 - RNA, 19 nt, Homo sapiens
  misc_RNA (1)...(19): siRNA sense strand
gacugaugcugcucuaaug

SEQ ID NO: 59598 - RNA, 19 nt, Homo sapiens
  misc_RNA (1)...(19): siRNA sense strand
gcagccggcuuggugcuuu

SEQ ID NO: 59599 - RNA, 19 nt, Homo sapiens
  misc_RNA (1)...(19): siRNA sense strand
ggucaaaaguaaugaagaa

SEQ ID NO: 59600 - RNA, 19 nt, Homo sapiens
  misc_RNA (1)...(19): siRNA sense strand
gaaccacacauguauuaag

SEQ ID NO: 59601 - RNA, 19 nt, Homo sapiens
  misc_RNA (1)...(19): siRNA sense strand
aaccacacauguauuaaga

SEQ ID NO: 59602 - RNA, 19 nt, Homo sapiens
  misc_RNA (1)...(19): siRNA sense strand
caucacagauuccuuaucc

SEQ ID NO: 59603 - RNA, 19 nt, Homo sapiens
  misc_RNA (1)...(19): siRNA sense strand
ucacucagccgugccauuu

SEQ ID NO: 59604 - RNA, 19 nt, Homo sapiens
  misc_RNA (1)...(19): siRNA sense strand
cagguuugcuggauggauu

SEQ ID NO: 59605 - RNA, 19 nt, Homo sapiens
  misc_RNA (1)...(19): siRNA sense strand
ugaggaacuugcauucaga

SEQ ID NO: 59606 - RNA, 19 nt, Homo sapiens
  misc_RNA (1)...(19): siRNA sense strand
acaaagauuccuucuaugu

SEQ ID NO: 59607 - RNA, 19 nt, Homo sapiens
  misc_RNA (1)...(19): siRNA sense strand
cagcgucgguuaaaacaua

SEQ ID NO: 59608 - RNA, 19 nt, Homo sapiens
  misc_RNA (1)...(19): siRNA sense strand
gacaaaaugugggccuuua

SEQ ID NO: 59609 - RNA, 19 nt, Homo sapiens
  misc_RNA (1)...(19): siRNA sense strand
gacaaaccucucuauggua

SEQ ID NO: 59610 - RNA, 19 nt, Homo sapiens
  misc_RNA (1)...(19): siRNA sense strand
aaacaggcauuagcuaugg

SEQ ID NO: 59611 - RNA, 19 nt, Homo sapiens
  misc_RNA (1)...(19): siRNA sense strand
guauaaucuucgacucaaa

SEQ ID NO: 59612 - RNA, 19 nt, Homo sapiens
  misc_RNA (1)...(19): siRNA sense strand
ccagacuucucuucacuca

SEQ ID NO: 59613 - RNA, 19 nt, Homo sapiens
  misc_RNA (1)...(19): siRNA sense strand
ugaaggcuauugcauugau

SEQ ID NO: 59614 - RNA, 19 nt, Homo sapiens
  misc_RNA (1)...(19): siRNA sense strand
ccaauacuacccuuaccua

SEQ ID NO: 59615 - RNA, 19 nt, Homo sapiens
  misc_RNA (1)...(19): siRNA sense strand
cuaaacaaaccaagauaga

SEQ ID NO: 59616 - RNA, 19 nt, Homo sapiens
  misc_RNA (1)...(19): siRNA sense strand
gaagguugccagguaaaga

SEQ ID NO: 59617 - RNA, 19 nt, Homo sapiens
  misc_RNA (1)...(19): siRNA sense strand
caacaaagauuccuucuau

SEQ ID NO: 59618 - RNA, 19 nt, Homo sapiens
  misc_RNA (1)...(19): siRNA sense strand
gaacaucacagauuccuua

SEQ ID NO: 59619 - RNA, 19 nt, Homo sapiens
  misc_RNA (1)...(19): siRNA sense strand
gaacuugcauucagauuug

SEQ ID NO: 59620 - RNA, 19 nt, Homo sapiens
  misc_RNA (1)...(19): siRNA sense strand
gcacuggucucauucguuu

SEQ ID NO: 59621 - RNA, 19 nt, Homo sapiens
  misc_RNA (1)...(19): siRNA sense strand
gauagaauauggagcagua

SEQ ID NO: 59622 - RNA, 19 nt, Homo sapiens
  misc_RNA (1)...(19): siRNA sense strand
gcaaggaguuucauguaau

SEQ ID NO: 59623 - RNA, 19 nt, Homo sapiens
  misc_RNA (1)...(19): siRNA sense strand
ugacucugcugaugauuua

SEQ ID NO: 59624 - RNA, 19 nt, Homo sapiens
  misc_RNA (1)...(19): siRNA sense strand
ggaagagccuuauguccuu

SEQ ID NO: 59625 - RNA, 19 nt, Homo sapiens
  misc_RNA (1)...(19): siRNA sense strand
ccugauaucuggauguaua

SEQ ID NO: 59626 - RNA, 19 nt, Homo sapiens
  misc_RNA (1)...(19): siRNA sense strand
ugacagcacuggucucauu

SEQ ID NO: 59627 - RNA, 19 nt, Homo sapiens
  misc_RNA (1)...(19): siRNA sense strand
ggaguuucauguaaucuuu

SEQ ID NO: 59628 - RNA, 19 nt, Homo sapiens
  misc_RNA (1)...(19): siRNA sense strand
gagagaaggucaucgacuu

SEQ ID NO: 59629 - RNA, 19 nt, Homo sapiens
  misc_RNA (1)...(19): siRNA sense strand
gaaggaagaaggucuagaa

SEQ ID NO: 59630 - RNA, 19 nt, Homo sapiens
  misc_RNA (1)...(19): siRNA sense strand
cuaaauaguuucugguuug

SEQ ID NO: 59631 - RNA, 19 nt, Homo sapiens
  misc_RNA (1)...(19): siRNA sense strand
ucacacagcucaucagcaa

SEQ ID NO: 59632 - RNA, 19 nt, Homo sapiens
  misc_RNA (1)...(19): siRNA sense strand
ccacacauguauuaagauu

SEQ ID NO: 59633 - RNA, 19 nt, Homo sapiens
  misc_RNA (1)...(19): siRNA sense strand
gaauauugguggcaucuuc

SEQ ID NO: 59634 - RNA, 19 nt, Homo sapiens
  misc_RNA (1)...(19): siRNA sense strand
gaaggcaaacugcauauga

SEQ ID NO: 59635 - RNA, 19 nt, Homo sapiens
  misc_RNA (1)...(19): siRNA sense strand
ggcaaggaguuucauguaa

SEQ ID NO: 59636 - RNA, 19 nt, Homo sapiens
  misc_RNA (1)...(19): siRNA sense strand
guauuaagauuugguggua

SEQ ID NO: 59637 - RNA, 19 nt, Homo sapiens
  misc_RNA (1)...(19): siRNA sense strand
acaaaccucucuaugguaa

SEQ ID NO: 59638 - RNA, 19 nt, Homo sapiens
  misc_RNA (1)...(19): siRNA sense strand
gcuaaauaguuucugguuu

SEQ ID NO: 59639 - RNA, 19 nt, Homo sapiens
  misc_RNA (1)...(19): siRNA sense strand
ugacaaaccucucuauggu

SEQ ID NO: 59640 - RNA, 19 nt, Homo sapiens
  misc_RNA (1)...(19): siRNA sense strand
auacuacccuuaccuauga

SEQ ID NO: 59641 - RNA, 19 nt, Homo sapiens
  misc_RNA (1)...(19): siRNA sense strand
gagaacagauuuugauuug

SEQ ID NO: 59642 - RNA, 19 nt, Homo sapiens
  misc_RNA (1)...(19): siRNA sense strand
gcaguguaaucgacauaaa

SEQ ID NO: 59643 - RNA, 19 nt, Homo sapiens
  misc_RNA (1)...(19): siRNA sense strand
uaacagaaacagaacauug

SEQ ID NO: 59644 - RNA, 19 nt, Homo sapiens
  misc_RNA (1)...(19): siRNA sense strand
gcaaaacccuuacuaaaag

SEQ ID NO: 59645 - RNA, 19 nt, Homo sapiens
  misc_RNA (1)...(19): siRNA sense strand
gaacagauuuugauuugga

SEQ ID NO: 59646 - RNA, 19 nt, Homo sapiens
  misc_RNA (1)...(19): siRNA sense strand
gauuggauauucucaagga

SEQ ID NO: 59647 - RNA, 19 nt, Homo sapiens
  misc_RNA (1)...(19): siRNA sense strand
gaacacaauuaacagaaac

SEQ ID NO: 59648 - RNA, 19 nt, Homo sapiens
  misc_RNA (1)...(19): siRNA sense strand
ggaacuugcauucagauuu

SEQ ID NO: 59649 - RNA, 19 nt, Homo sapiens
  misc_RNA (1)...(19): siRNA sense strand
gcauucagauuugcuguga

SEQ ID NO: 59650 - RNA, 19 nt, Homo sapiens
  misc_RNA (1)...(19): siRNA sense strand
ggaagaaggucuagaaaag

SEQ ID NO: 59651 - RNA, 19 nt, Homo sapiens
  misc_RNA (1)...(19): siRNA sense strand
aaagauuccuucuauguca

SEQ ID NO: 59652 - RNA, 19 nt, Homo sapiens
  misc_RNA (1)...(19): siRNA sense strand
ucauaaagcugaccuugca

SEQ ID NO: 59653 - RNA, 19 nt, Homo sapiens
  misc_RNA (1)...(19): siRNA sense strand
cagcgaacaucacagauuc

SEQ ID NO: 59654 - RNA, 19 nt, Homo sapiens
  misc_RNA (1)...(19): siRNA sense strand
gguggcaucuucauuguuc

SEQ ID NO: 59655 - RNA, 19 nt, Homo sapiens
  misc_RNA (1)...(19): siRNA sense strand
aaaccaagauagaauaugg

SEQ ID NO: 59656 - RNA, 19 nt, Homo sapiens
  misc_RNA (1)...(19): siRNA sense strand
gaagagccuuauguccuuu

SEQ ID NO: 59657 - RNA, 19 nt, Homo sapiens
  misc_RNA (1)...(19): siRNA sense strand
caaggaaccacacauguau

SEQ ID NO: 59658 - RNA, 19 nt, Homo sapiens
  misc_RNA (1)...(19): siRNA sense strand
gcaaacugcauaugaugaa

SEQ ID NO: 59659 - RNA, 19 nt, Homo sapiens
  misc_RNA (1)...(19): siRNA sense strand
uaugauacccagaagauaa

SEQ ID NO: 59660 - RNA, 19 nt, Homo sapiens
  misc_RNA (1)...(19): siRNA sense strand
gaggaaggcaaacugcaua

SEQ ID NO: 59661 - RNA, 19 nt, Homo sapiens
  misc_RNA (1)...(19): siRNA sense strand
uaacuuagccgccuuucug

SEQ ID NO: 59662 - RNA, 19 nt, Homo sapiens
  misc_RNA (1)...(19): siRNA sense strand
uguauauucugcuggcuua

SEQ ID NO: 59663 - RNA, 19 nt, Homo sapiens
  misc_RNA (1)...(19): siRNA sense strand
aaauuagacuuguggaaga

SEQ ID NO: 59664 - RNA, 19 nt, Homo sapiens
  misc_RNA (1)...(19): siRNA sense strand
ucagagaguuaucuacaau

SEQ ID NO: 59665 - RNA, 19 nt, Homo sapiens
  misc_RNA (1)...(19): siRNA sense strand
ccaagucuccuccaucauu

SEQ ID NO: 59666 - RNA, 19 nt, Homo sapiens
  misc_RNA (1)...(19): siRNA sense strand
ucaaggaaccacacaugua

SEQ ID NO: 59667 - RNA, 19 nt, Homo sapiens
  misc_RNA (1)...(19): siRNA sense strand
ugacaggguucagaauauu

SEQ ID NO: 59668 - RNA, 19 nt, Homo sapiens
  misc_RNA (1)...(19): siRNA sense strand
ucaaagcuccaucaaggua

SEQ ID NO: 59669 - RNA, 19 nt, Homo sapiens
  misc_RNA (1)...(19): siRNA sense strand
gcaagguucugagcucaug

SEQ ID NO: 59670 - RNA, 19 nt, Homo sapiens
  misc_RNA (1)...(19): siRNA sense strand
gguauaaucuucgacucaa

SEQ ID NO: 59671 - RNA, 19 nt, Homo sapiens
  misc_RNA (1)...(19): siRNA sense strand
caaggaguuucauguaauc

SEQ ID NO: 59672 - RNA, 19 nt, Homo sapiens
  misc_RNA (1)...(19): siRNA sense strand
caagucuccuccaucauug

SEQ ID NO: 59673 - RNA, 19 nt, Homo sapiens
  misc_RNA (1)...(19): siRNA sense strand
caagaaagccugugaucag

SEQ ID NO: 59674 - RNA, 19 nt, Homo sapiens
  misc_RNA (1)...(19): siRNA sense strand
ugggaaugaugacagaaua

SEQ ID NO: 59675 - RNA, 19 nt, Homo sapiens
  misc_RNA (1)...(19): siRNA sense strand
aaagcuccaucaagguaua

SEQ ID NO: 59676 - RNA, 19 nt, Homo sapiens
  misc_RNA (1)...(19): siRNA sense strand
acaauggaauggaaugguu

SEQ ID NO: 59677 - RNA, 19 nt, Homo sapiens
  misc_RNA (1)...(19): siRNA sense strand
gcagaauaacuuucaacaa

SEQ ID NO: 59678 - RNA, 19 nt, Homo sapiens
  misc_RNA (1)...(19): siRNA sense strand
ucaguuccuugcaguguaa

SEQ ID NO: 59679 - RNA, 19 nt, Homo sapiens
  misc_RNA (1)...(19): siRNA sense strand
gacaggguucagaauauua

SEQ ID NO: 59680 - RNA, 19 nt, Homo sapiens
  misc_RNA (1)...(19): siRNA sense strand
gaaaagaggcaaggaguuu

SEQ ID NO: 59681 - RNA, 19 nt, Homo sapiens
  misc_RNA (1)...(19): siRNA sense strand
ucacgguuguguaugauga

SEQ ID NO: 59682 - RNA, 19 nt, Homo sapiens
  misc_RNA (1)...(19): siRNA sense strand
agaguuaucuacaauccuu

SEQ ID NO: 59683 - RNA, 19 nt, Homo sapiens
  misc_RNA (1)...(19): siRNA sense strand
uaagaagucugacaaaccu

SEQ ID NO: 59684 - RNA, 19 nt, Homo sapiens
  misc_RNA (1)...(19): siRNA sense strand
ggaaagccagcgaacauca

SEQ ID NO: 59685 - RNA, 19 nt, Homo sapiens
  misc_RNA (1)...(19): siRNA sense strand
caugacaggguucagaaua

SEQ ID NO: 59686 - RNA, 19 nt, Homo sapiens
  misc_RNA (1)...(19): siRNA sense strand
ccucuuugcucuugauguu

SEQ ID NO: 59687 - RNA, 19 nt, Homo sapiens
  misc_RNA (1)...(19): siRNA sense strand
gaaugaugacagaauacua

SEQ ID NO: 59688 - RNA, 19 nt, Homo sapiens
  misc_RNA (1)...(19): siRNA sense strand
aaccacacauguauuaaga

SEQ ID NO: 59689 - RNA, 19 nt, Homo sapiens
  misc_RNA (1)...(19): siRNA sense strand
gcagccggcuuggugcuuu

SEQ ID NO: 59690 - RNA, 19 nt, Homo sapiens
  misc_RNA (1)...(19): siRNA sense strand
ggucaaaaguaaugaagaa

SEQ ID NO: 59691 - RNA, 19 nt, Homo sapiens
  misc_RNA (1)...(19): siRNA sense strand
caucacagauuccuuaucc

SEQ ID NO: 59692 - RNA, 19 nt, Homo sapiens
  misc_RNA (1)...(19): siRNA sense strand
gacugaugcugcucuaaug

SEQ ID NO: 59693 - RNA, 19 nt, Homo sapiens
  misc_RNA (1)...(19): siRNA sense strand
gaaccacacauguauuaag

SEQ ID NO: 59694 - RNA, 19 nt, Homo sapiens
  misc_RNA (1)...(19): siRNA sense strand
ucacucagccgugccauuu

SEQ ID NO: 59695 - RNA, 19 nt, Homo sapiens
  misc_RNA (1)...(19): siRNA sense strand
cagguuugcuggauggauu

SEQ ID NO: 59696 - RNA, 19 nt, Homo sapiens
  misc_RNA (1)...(19): siRNA sense strand
ugaggaacuugcauucaga

SEQ ID NO: 59697 - RNA, 19 nt, Homo sapiens
  misc_RNA (1)...(19): siRNA sense strand
acaaagauuccuucuaugu

SEQ ID NO: 59698 - RNA, 19 nt, Homo sapiens
  misc_RNA (1)...(19): siRNA sense strand
gacaaaaugugggccuuua

SEQ ID NO: 59699 - RNA, 19 nt, Homo sapiens
  misc_RNA (1)...(19): siRNA sense strand
gacaaaccucucuauggua

SEQ ID NO: 59700 - RNA, 19 nt, Homo sapiens
  misc_RNA (1)...(19): siRNA sense strand
aaacaggcauuagcuaugg

SEQ ID NO: 59701 - RNA, 19 nt, Homo sapiens
  misc_RNA (1)...(19): siRNA sense strand
guauaaucuucgacucaaa

SEQ ID NO: 59702 - RNA, 19 nt, Homo sapiens
  misc_RNA (1)...(19): siRNA sense strand
ccaauacuacccuuaccua

SEQ ID NO: 59703 - RNA, 19 nt, Homo sapiens
  misc_RNA (1)...(19): siRNA sense strand
ugaaggcuauugcauugau

SEQ ID NO: 59704 - RNA, 19 nt, Homo sapiens
  misc_RNA (1)...(19): siRNA sense strand
ccagacuucucuucacuca

SEQ ID NO: 59705 - RNA, 19 nt, Homo sapiens
  misc_RNA (1)...(19): siRNA sense strand
ccaucaagguauaaucuuc

SEQ ID NO: 59706 - RNA, 19 nt, Homo sapiens
  misc_RNA (1)...(19): siRNA sense strand
cuaaacaaaccaagauaga

SEQ ID NO: 59707 - RNA, 19 nt, Homo sapiens
  misc_RNA (1)...(19): siRNA sense strand
ucacacuuaucaucauuuc

SEQ ID NO: 59708 - RNA, 19 nt, Homo sapiens
  misc_RNA (1)...(19): siRNA sense strand
uguggaagaugggaaauau

SEQ ID NO: 59709 - RNA, 19 nt, Homo sapiens
  misc_RNA (1)...(19): siRNA sense strand
uuugaaggcuauugcauug

SEQ ID NO: 59710 - RNA, 19 nt, Homo sapiens
  misc_RNA (1)...(19): siRNA sense strand
auacagugguguuaacaug

SEQ ID NO: 59711 - RNA, 19 nt, Homo sapiens
  misc_RNA (1)...(19): siRNA sense strand
aggaaccacacauguauua

SEQ ID NO: 59712 - RNA, 19 nt, Homo sapiens
  misc_RNA (1)...(19): siRNA sense strand
gcaagaggaaggcaaacug

SEQ ID NO: 59713 - RNA, 19 nt, Homo sapiens
  misc_RNA (1)...(19): siRNA sense strand
gagcugaggaacuugcauu

SEQ ID NO: 59714 - RNA, 19 nt, Homo sapiens
  misc_RNA (1)...(19): siRNA sense strand
ugcaagagcucaucaaagc

SEQ ID NO: 59715 - RNA, 19 nt, Homo sapiens
  misc_RNA (1)...(19): siRNA sense strand
ggaccucuuugcucuugau

SEQ ID NO: 59716 - RNA, 19 nt, Homo sapiens
  misc_RNA (1)...(19): siRNA sense strand
uguggaaucuggcccaaug

SEQ ID NO: 59717 - RNA, 19 nt, Homo sapiens
  misc_RNA (1)...(19): siRNA sense strand
acaaacagaucacucauug

SEQ ID NO: 59718 - RNA, 19 nt, Homo sapiens
  misc_RNA (1)...(19): siRNA sense strand
uaaaggagcuggcccacau

SEQ ID NO: 59719 - RNA, 19 nt, Homo sapiens
  misc_RNA (1)...(19): siRNA sense strand
caucggcgcuggugaagaa

SEQ ID NO: 59720 - RNA, 19 nt, Homo sapiens
  misc_RNA (1)...(19): siRNA sense strand
gaugacugaugcagccuua

SEQ ID NO: 59721 - RNA, 19 nt, Homo sapiens
  misc_RNA (1)...(19): siRNA sense strand
gagcaugccuuucgauuuu

SEQ ID NO: 59722 - RNA, 19 nt, Homo sapiens
  misc_RNA (1)...(19): siRNA sense strand
gcacaaggccuggcgcuuu

SEQ ID NO: 59723 - RNA, 19 nt, Homo sapiens
  misc_RNA (1)...(19): siRNA sense strand
ggaggaaucuucgaguaug

SEQ ID NO: 59724 - RNA, 19 nt, Homo sapiens
  misc_RNA (1)...(19): siRNA sense strand
gcaucgaccugcuaaagga

SEQ ID NO: 59725 - RNA, 19 nt, Homo sapiens
  misc_RNA (1)...(19): siRNA sense strand
gcaagggucugagcugaug

SEQ ID NO: 59726 - RNA, 19 nt, Homo sapiens
  misc_RNA (1)...(19): siRNA sense strand
acacaaccuugaccuauga

SEQ ID NO: 59727 - RNA, 19 nt, Homo sapiens
  misc_RNA (1)...(19): siRNA sense strand
aggauuaacuggacgaauu

SEQ ID NO: 59728 - RNA, 19 nt, Homo sapiens
  misc_RNA (1)...(19): siRNA sense strand
cuuaacagcuucugguuug

SEQ ID NO: 59729 - RNA, 19 nt, Homo sapiens
  misc_RNA (1)...(19): siRNA sense strand
ggaacggcauggucaagga

SEQ ID NO: 59730 - RNA, 19 nt, Homo sapiens
  misc_RNA (1)...(19): siRNA sense strand
ggagcaugccuuucgauuu

SEQ ID NO: 59731 - RNA, 19 nt, Homo sapiens
  misc_RNA (1)...(19): siRNA sense strand
ggucagcuguguccucuuc

SEQ ID NO: 59732 - RNA, 19 nt, Homo sapiens
  misc_RNA (1)...(19): siRNA sense strand
ucacugagguugccaaagg

SEQ ID NO: 59733 - RNA, 19 nt, Homo sapiens
  misc_RNA (1)...(19): siRNA sense strand
caaccuggcugccuuucug

SEQ ID NO: 59734 - RNA, 19 nt, Homo sapiens
  misc_RNA (1)...(19): siRNA sense strand
ggagucugguuugggaaua

SEQ ID NO: 59735 - RNA, 19 nt, Homo sapiens
  misc_RNA (1)...(19): siRNA sense strand
gagagaaggccaucgacuu

SEQ ID NO: 59736 - RNA, 19 nt, Homo sapiens
  misc_RNA (1)...(19): siRNA sense strand
caacacaaccuugaccuau

SEQ ID NO: 59737 - RNA, 19 nt, Homo sapiens
  misc_RNA (1)...(19): siRNA sense strand
ccacacgucucggccauug

SEQ ID NO: 59738 - RNA, 19 nt, Homo sapiens
  misc_RNA (1)...(19): siRNA sense strand
gaggagcccuucgucaugu

SEQ ID NO: 59739 - RNA, 19 nt, Homo sapiens
  misc_RNA (1)...(19): siRNA sense strand
ucaccacucuggaucucua

SEQ ID NO: 59740 - RNA, 19 nt, Homo sapiens
  misc_RNA (1)...(19): siRNA sense strand
gaggacaagcugcauauca

SEQ ID NO: 59741 - RNA, 19 nt, Homo sapiens
  misc_RNA (1)...(19): siRNA sense strand
cacaaggccuggcgcuuug

SEQ ID NO: 59742 - RNA, 19 nt, Homo sapiens
  misc_RNA (1)...(19): siRNA sense strand
ggaggagcccuucgucaug

SEQ ID NO: 59743 - RNA, 19 nt, Homo sapiens
  misc_RNA (1)...(19): siRNA sense strand
ggaauuccgcauuaucuuc

SEQ ID NO: 59744 - RNA, 19 nt, Homo sapiens
  misc_RNA (1)...(19): siRNA sense strand
caacaugcacacauucaau

SEQ ID NO: 59745 - RNA, 19 nt, Homo sapiens
  misc_RNA (1)...(19): siRNA sense strand
ggagugaugaugacugaug

SEQ ID NO: 59746 - RNA, 19 nt, Homo sapiens
  misc_RNA (1)...(19): siRNA sense strand
gcaugaugacugaguacua

SEQ ID NO: 59747 - RNA, 19 nt, Homo sapiens
  misc_RNA (1)...(19): siRNA sense strand
aaacagaucacucauuguc

SEQ ID NO: 59748 - RNA, 19 nt, Homo sapiens
  misc_RNA (1)...(19): siRNA sense strand
caccacagaugaccgugaa

SEQ ID NO: 59749 - RNA, 19 nt, Homo sapiens
  misc_RNA (1)...(19): siRNA sense strand
guacuaccacuucaucuuc

SEQ ID NO: 59750 - RNA, 19 nt, Homo sapiens
  misc_RNA (1)...(19): siRNA sense strand
ggauuaacuggacgaauug

SEQ ID NO: 59751 - RNA, 19 nt, Homo sapiens
  misc_RNA (1)...(19): siRNA sense strand
ucaucaacaugcacacauu

SEQ ID NO: 59752 - RNA, 19 nt, Homo sapiens
  misc_RNA (1)...(19): siRNA sense strand
ggacaagcugcauaucaug

SEQ ID NO: 59753 - RNA, 19 nt, Homo sapiens
  misc_RNA (1)...(19): siRNA sense strand
ucacucugcuuaacagcuu

SEQ ID NO: 59754 - RNA, 19 nt, Homo sapiens
  misc_RNA (1)...(19): siRNA sense strand
gacaaacagaucacucauu

SEQ ID NO: 59755 - RNA, 19 nt, Homo sapiens
  misc_RNA (1)...(19): siRNA sense strand
ucggaggaaucuucgagua

SEQ ID NO: 59756 - RNA, 19 nt, Homo sapiens
  misc_RNA (1)...(19): siRNA sense strand
gaggaggacaagcugcaua

SEQ ID NO: 59757 - RNA, 19 nt, Homo sapiens
  misc_RNA (1)...(19): siRNA sense strand
uaacuucacucugcuuaac

SEQ ID NO: 59758 - RNA, 19 nt, Homo sapiens
  misc_RNA (1)...(19): siRNA sense strand
gauacaacauccgccugaa

SEQ ID NO: 59759 - RNA, 19 nt, Homo sapiens
  misc_RNA (1)...(19): siRNA sense strand
gacaagcugcauaucauga

SEQ ID NO: 59760 - RNA, 19 nt, Homo sapiens
  misc_RNA (1)...(19): siRNA sense strand
ggaaucacccauugacucu

SEQ ID NO: 59761 - RNA, 19 nt, Homo sapiens
  misc_RNA (1)...(19): siRNA sense strand
uuaacuggacgaauuguuu

SEQ ID NO: 59762 - RNA, 19 nt, Homo sapiens
  misc_RNA (1)...(19): siRNA sense strand
gauuccggauucucaaugu

SEQ ID NO: 59763 - RNA, 19 nt, Homo sapiens
  misc_RNA (1)...(19): siRNA sense strand
aauccaagaucuccaccuu

SEQ ID NO: 59764 - RNA, 19 nt, Homo sapiens
  misc_RNA (1)...(19): siRNA sense strand
ggagcuggcccacauccuu

SEQ ID NO: 59765 - RNA, 19 nt, Homo sapiens
  misc_RNA (1)...(19): siRNA sense strand
ccaacaucaucaacaggaa

SEQ ID NO: 59766 - RNA, 19 nt, Homo sapiens
  misc_RNA (1)...(19): siRNA sense strand
aaucagacaggacgcuaua

SEQ ID NO: 59767 - RNA, 19 nt, Homo sapiens
  misc_RNA (1)...(19): siRNA sense strand
caugaugacugaguacuac

SEQ ID NO: 59768 - RNA, 19 nt, Homo sapiens
  misc_RNA (1)...(19): siRNA sense strand
ggacucugcugcccaacac

SEQ ID NO: 59769 - RNA, 19 nt, Homo sapiens
  misc_RNA (1)...(19): siRNA sense strand
gaccaucacccauguucga

SEQ ID NO: 59770 - RNA, 19 nt, Homo sapiens
  misc_RNA (1)...(19): siRNA sense strand
gugagcauccuguaucgaa

SEQ ID NO: 59771 - RNA, 19 nt, Homo sapiens
  misc_RNA (1)...(19): siRNA sense strand
ugagcauccuguaucgaaa

SEQ ID NO: 59772 - RNA, 19 nt, Homo sapiens
  misc_RNA (1)...(19): siRNA sense strand
gagagcagcguuccuucug

SEQ ID NO: 59773 - RNA, 19 nt, Homo sapiens
  misc_RNA (1)...(19): siRNA sense strand
cugaugaccuggccaagca

SEQ ID NO: 59774 - RNA, 19 nt, Homo sapiens
  misc_RNA (1)...(19): siRNA sense strand
gcuuaacagcuucugguuu

SEQ ID NO: 59775 - RNA, 19 nt, Homo sapiens
  misc_RNA (1)...(19): siRNA sense strand
cauccuugguuucuccuau

SEQ ID NO: 59776 - RNA, 19 nt, Homo sapiens
  misc_RNA (1)...(19): siRNA sense strand
gcuccgaggugguggaaaa

SEQ ID NO: 59777 - RNA, 19 nt, Homo sapiens
  misc_RNA (1)...(19): siRNA sense strand
aggauucacuuccaugaca

SEQ ID NO: 59778 - RNA, 19 nt, Homo sapiens
  misc_RNA (1)...(19): siRNA sense strand
gguggcaucuggugguucu

SEQ ID NO: 59779 - RNA, 19 nt, Homo sapiens
  misc_RNA (1)...(19): siRNA sense strand
ccaacacaaccuugaccua

SEQ ID NO: 59780 - RNA, 19 nt, Homo sapiens
  misc_RNA (1)...(19): siRNA sense strand
uacaacauccgccugaaga

SEQ ID NO: 59781 - RNA, 19 nt, Homo sapiens
  misc_RNA (1)...(19): siRNA sense strand
aggacaagcugcauaucau

SEQ ID NO: 59782 - RNA, 19 nt, Homo sapiens
  misc_RNA (1)...(19): siRNA sense strand
gaggaaucuucgaguaugc

SEQ ID NO: 59783 - RNA, 19 nt, Homo sapiens
  misc_RNA (1)...(19): siRNA sense strand
ggugugagcauccuguauc

SEQ ID NO: 59784 - RNA, 19 nt, Homo sapiens
  misc_RNA (1)...(19): siRNA sense strand
aacacaaccuugaccuaug

SEQ ID NO: 59785 - RNA, 19 nt, Homo sapiens
  misc_RNA (1)...(19): siRNA sense strand
caucaaggaggcucaaugg

SEQ ID NO: 59786 - RNA, 19 nt, Homo sapiens
  misc_RNA (1)...(19): siRNA sense strand
caacauccgccugaagauc

SEQ ID NO: 59787 - RNA, 19 nt, Homo sapiens
  misc_RNA (1)...(19): siRNA sense strand
caagcugcauaucaugaag

SEQ ID NO: 59788 - RNA, 19 nt, Homo sapiens
  misc_RNA (1)...(19): siRNA sense strand
gggccaccaugaccuucuu

SEQ ID NO: 59789 - RNA, 19 nt, Homo sapiens
  misc_RNA (1)...(19): siRNA sense strand
aauaacuucacucugcuua

SEQ ID NO: 59790 - RNA, 19 nt, Homo sapiens
  misc_RNA (1)...(19): siRNA sense strand
cgaggagcaugccuuucga

SEQ ID NO: 59791 - RNA, 19 nt, Homo sapiens
  misc_RNA (1)...(19): siRNA sense strand
gggaauuccgcauuaucuu

SEQ ID NO: 59792 - RNA, 19 nt, Homo sapiens
  misc_RNA (1)...(19): siRNA sense strand
ccauugacucugcugauga

SEQ ID NO: 59793 - RNA, 19 nt, Homo sapiens
  misc_RNA (1)...(19): siRNA sense strand
ucaccgacucucugacaaa

SEQ ID NO: 59794 - RNA, 19 nt, Homo sapiens
  misc_RNA (1)...(19): siRNA sense strand
ugacugaguacuaccacuu

SEQ ID NO: 59795 - RNA, 19 nt, Homo sapiens
  misc_RNA (1)...(19): siRNA sense strand
cucuggaucucuacgcuuu

SEQ ID NO: 59796 - RNA, 19 nt, Homo sapiens
  misc_RNA (1)...(19): siRNA sense strand
cagcgggcaccacagauga

SEQ ID NO: 59797 - RNA, 19 nt, Homo sapiens
  misc_RNA (1)...(19): siRNA sense strand
ggccugcagcacauccuua

SEQ ID NO: 59798 - RNA, 19 nt, Homo sapiens
  misc_RNA (1)...(19): siRNA sense strand
cgacuacgcgcugcucaug

SEQ ID NO: 59799 - RNA, 19 nt, Homo sapiens
  misc_RNA (1)...(19): siRNA sense strand
caccaugaccuucuucaag

SEQ ID NO: 59800 - RNA, 19 nt, Homo sapiens
  misc_RNA (1)...(19): siRNA sense strand
cgucuucuccuuccucaau

SEQ ID NO: 59801 - RNA, 19 nt, Homo sapiens
  misc_RNA (1)...(19): siRNA sense strand
ucacccauguucgagagaa

SEQ ID NO: 59802 - RNA, 19 nt, Homo sapiens
  misc_RNA (1)...(19): siRNA sense strand
ggagcccuucgucauguuu

SEQ ID NO: 59803 - RNA, 19 nt, Homo sapiens
  misc_RNA (1)...(19): siRNA sense strand
uucaagaaauccaagaucu

SEQ ID NO: 59804 - RNA, 19 nt, Homo sapiens
  misc_RNA (1)...(19): siRNA sense strand
gaccguggagcgcauggaa

SEQ ID NO: 59805 - RNA, 19 nt, Homo sapiens
  misc_RNA (1)...(19): siRNA sense strand
ccgaggugguggaaaauaa

SEQ ID NO: 59806 - RNA, 19 nt, Homo sapiens
  misc_RNA (1)...(19): siRNA sense strand
uggcccacauccuugguuu

SEQ ID NO: 59807 - RNA, 19 nt, Homo sapiens
  misc_RNA (1)...(19): siRNA sense strand
cgacugcagccacacuaug

SEQ ID NO: 59808 - RNA, 19 nt, Homo sapiens
  misc_RNA (1)...(19): siRNA sense strand
aaaccaaaaucgaguaugg

SEQ ID NO: 59809 - RNA, 19 nt, Homo sapiens
  misc_RNA (1)...(19): siRNA sense strand
ggauuccggauucucaaug

SEQ ID NO: 59810 - RNA, 19 nt, Homo sapiens
  misc_RNA (1)...(19): siRNA sense strand
gcucaaugggaaggauuaa

SEQ ID NO: 59811 - RNA, 19 nt, Homo sapiens
  misc_RNA (1)...(19): siRNA sense strand
ccaccaccaucgaguacgu

SEQ ID NO: 59812 - RNA, 19 nt, Homo sapiens
  misc_RNA (1)...(19): siRNA sense strand
acuacgcgcugcucaugga

SEQ ID NO: 59813 - RNA, 19 nt, Homo sapiens
  misc_RNA (1)...(19): siRNA sense strand
gagcauccuguaucgaaag

SEQ ID NO: 59814 - RNA, 19 nt, Homo sapiens
  misc_RNA (1)...(19): siRNA sense strand
ccaacgcccaggucaugaa

SEQ ID NO: 59815 - RNA, 19 nt, Homo sapiens
  misc_RNA (1)...(19): siRNA sense strand
cggaggaaucuucgaguau

SEQ ID NO: 59816 - RNA, 19 nt, Homo sapiens
  misc_RNA (1)...(19): siRNA sense strand
ucaaugggaaggauuaacu

SEQ ID NO: 59817 - RNA, 19 nt, Homo sapiens
  misc_RNA (1)...(19): siRNA sense strand
gaacaaugcccuucaauua

SEQ ID NO: 59818 - RNA, 19 nt, Homo sapiens
  misc_RNA (1)...(19): siRNA sense strand
gcaagaaaguuaacaaugu

SEQ ID NO: 59819 - RNA, 19 nt, Homo sapiens
  misc_RNA (1)...(19): siRNA sense strand
gaacgaacuccaaacauuu

SEQ ID NO: 59820 - RNA, 19 nt, Homo sapiens
  misc_RNA (1)...(19): siRNA sense strand
gaucauggcugacaaggau

SEQ ID NO: 59821 - RNA, 19 nt, Homo sapiens
  misc_RNA (1)...(19): siRNA sense strand
gacaagaucuacacuauag

SEQ ID NO: 59822 - RNA, 19 nt, Homo sapiens
  misc_RNA (1)...(19): siRNA sense strand
gagacaagaucuacacuau

SEQ ID NO: 59823 - RNA, 19 nt, Homo sapiens
  misc_RNA (1)...(19): siRNA sense strand
ucagagaccucaugacuau

SEQ ID NO: 59824 - RNA, 19 nt, Homo sapiens
  misc_RNA (1)...(19): siRNA sense strand
ggaugaaugugaagaaaug

SEQ ID NO: 59825 - RNA, 19 nt, Homo sapiens
  misc_RNA (1)...(19): siRNA sense strand
ggaauuugauguacucaga

SEQ ID NO: 59826 - RNA, 19 nt, Homo sapiens
  misc_RNA (1)...(19): siRNA sense strand
gaauaacuaucccuacaug

SEQ ID NO: 59827 - RNA, 19 nt, Homo sapiens
  misc_RNA (1)...(19): siRNA sense strand
ggacuucucugugcccuuu

SEQ ID NO: 59828 - RNA, 19 nt, Homo sapiens
  misc_RNA (1)...(19): siRNA sense strand
ugaacgaacuccaaacauu

SEQ ID NO: 59829 - RNA, 19 nt, Homo sapiens
  misc_RNA (1)...(19): siRNA sense strand
caaaagagcugcugacuuc

SEQ ID NO: 59830 - RNA, 19 nt, Homo sapiens
  misc_RNA (1)...(19): siRNA sense strand
acacggagcucaucccaaa

SEQ ID NO: 59831 - RNA, 19 nt, Homo sapiens
  misc_RNA (1)...(19): siRNA sense strand
uuaaauuccugcagcaaua

SEQ ID NO: 59832 - RNA, 19 nt, Homo sapiens
  misc_RNA (1)...(19): siRNA sense strand
ggacaugguuucagauaag

SEQ ID NO: 59833 - RNA, 19 nt, Homo sapiens
  misc_RNA (1)...(19): siRNA sense strand
caacagaaacuuagccaaa

SEQ ID NO: 59834 - RNA, 19 nt, Homo sapiens
  misc_RNA (1)...(19): siRNA sense strand
agacgaggcuguucucauu

SEQ ID NO: 59835 - RNA, 19 nt, Homo sapiens
  misc_RNA (1)...(19): siRNA sense strand
gcagaaggauaaccucaau

SEQ ID NO: 59836 - RNA, 19 nt, Homo sapiens
  misc_RNA (1)...(19): siRNA sense strand
ugaagaucaugcaggauua

SEQ ID NO: 59837 - RNA, 19 nt, Homo sapiens
  misc_RNA (1)...(19): siRNA sense strand
gaacaaagaccgggaaugg

SEQ ID NO: 59838 - RNA, 19 nt, Homo sapiens
  misc_RNA (1)...(19): siRNA sense strand
caagaaaguuaacaaugug

SEQ ID NO: 59839 - RNA, 19 nt, Homo sapiens
  misc_RNA (1)...(19): siRNA sense strand
ugaagaagcuuuccagaac

SEQ ID NO: 59840 - RNA, 19 nt, Homo sapiens
  misc_RNA (1)...(19): siRNA sense strand
gaaaaugccuaguaucgaa

SEQ ID NO: 59841 - RNA, 19 nt, Homo sapiens
  misc_RNA (1)...(19): siRNA sense strand
aggauaaccucaauaacua

SEQ ID NO: 59842 - RNA, 19 nt, Homo sapiens
  misc_RNA (1)...(19): siRNA sense strand
gcucauuguuucugccaua

SEQ ID NO: 59843 - RNA, 19 nt, Homo sapiens
  misc_RNA (1)...(19): siRNA sense strand
gaaccucuaugacaucgau

SEQ ID NO: 59844 - RNA, 19 nt, Homo sapiens
  misc_RNA (1)...(19): siRNA sense strand
cgacaaaccuagggagcua

SEQ ID NO: 59845 - RNA, 19 nt, Homo sapiens
  misc_RNA (1)...(19): siRNA sense strand
gggaaucagugucaugguu

SEQ ID NO: 59846 - RNA, 19 nt, Homo sapiens
  misc_RNA (1)...(19): siRNA sense strand
gaagcugccuuuccaacau

SEQ ID NO: 59847 - RNA, 19 nt, Homo sapiens
  misc_RNA (1)...(19): siRNA sense strand
ggagccugguuuccacuua

SEQ ID NO: 59848 - RNA, 19 nt, Homo sapiens
  misc_RNA (1)...(19): siRNA sense strand
ggacggcauuggcauccua

SEQ ID NO: 59849 - RNA, 19 nt, Homo sapiens
  misc_RNA (1)...(19): siRNA sense strand
caacaacgaccaguauaaa

SEQ ID NO: 59850 - RNA, 19 nt, Homo sapiens
  misc_RNA (1)...(19): siRNA sense strand
aaacuuagccaaagggaaa

SEQ ID NO: 59851 - RNA, 19 nt, Homo sapiens
  misc_RNA (1)...(19): siRNA sense strand
ggucaguggccuccaaaua

SEQ ID NO: 59852 - RNA, 19 nt, Homo sapiens
  misc_RNA (1)...(19): siRNA sense strand
ggcaaagacuuauccuuca

SEQ ID NO: 59853 - RNA, 19 nt, Homo sapiens
  misc_RNA (1)...(19): siRNA sense strand
aacaugaacuccucaagaa

SEQ ID NO: 59854 - RNA, 19 nt, Homo sapiens
  misc_RNA (1)...(19): siRNA sense strand
caacaugaacuccucaaga

SEQ ID NO: 59855 - RNA, 19 nt, Homo sapiens
  misc_RNA (1)...(19): siRNA sense strand
cuucuucgcugucauauuc

SEQ ID NO: 59856 - RNA, 19 nt, Homo sapiens
  misc_RNA (1)...(19): siRNA sense strand
gauccacucuucugucauc

SEQ ID NO: 59857 - RNA, 19 nt, Homo sapiens
  misc_RNA (1)...(19): siRNA sense strand
gcaauagacgcguguacaa

SEQ ID NO: 59858 - RNA, 19 nt, Homo sapiens
  misc_RNA (1)...(19): siRNA sense strand
aagaacaagcuaaggauua

SEQ ID NO: 59859 - RNA, 19 nt, Homo sapiens
  misc_RNA (1)...(19): siRNA sense strand
uaugauuucuucuggauug

SEQ ID NO: 59860 - RNA, 19 nt, Homo sapiens
  misc_RNA (1)...(19): siRNA sense strand
aaaccaaggacaacuuuaa

SEQ ID NO: 59861 - RNA, 19 nt, Homo sapiens
  misc_RNA (1)...(19): siRNA sense strand
agaaggauaaccucaauaa

SEQ ID NO: 59862 - RNA, 19 nt, Homo sapiens
  misc_RNA (1)...(19): siRNA sense strand
ggaaucagugucaugguuu

SEQ ID NO: 59863 - RNA, 19 nt, Homo sapiens
  misc_RNA (1)...(19): siRNA sense strand
gaagaagcuuuccagaacu

SEQ ID NO: 59864 - RNA, 19 nt, Homo sapiens
  misc_RNA (1)...(19): siRNA sense strand
caucgggacucauuucugu

SEQ ID NO: 59865 - RNA, 19 nt, Homo sapiens
  misc_RNA (1)...(19): siRNA sense strand
gauuaugacuggcaugucu

SEQ ID NO: 59866 - RNA, 19 nt, Homo sapiens
  misc_RNA (1)...(19): siRNA sense strand
ggaauugcccuucagaaag

SEQ ID NO: 59867 - RNA, 19 nt, Homo sapiens
  misc_RNA (1)...(19): siRNA sense strand
caaucuggcugccuucaug

SEQ ID NO: 59868 - RNA, 19 nt, Homo sapiens
  misc_RNA (1)...(19): siRNA sense strand
aagcauggcaagaaaguua

SEQ ID NO: 59869 - RNA, 19 nt, Homo sapiens
  misc_RNA (1)...(19): siRNA sense strand
ccacucuucugucaucuug

SEQ ID NO: 59870 - RNA, 19 nt, Homo sapiens
  misc_RNA (1)...(19): siRNA sense strand
caacaugcccaccuauuca

SEQ ID NO: 59871 - RNA, 19 nt, Homo sapiens
  misc_RNA (1)...(19): siRNA sense strand
gaaccugacaacaguaaga

SEQ ID NO: 59872 - RNA, 19 nt, Homo sapiens
  misc_RNA (1)...(19): siRNA sense strand
gcuggacgcuuucaucuac

SEQ ID NO: 59873 - RNA, 19 nt, Homo sapiens
  misc_RNA (1)...(19): siRNA sense strand
ugaggaacguucugaagug

SEQ ID NO: 59874 - RNA, 19 nt, Homo sapiens
  misc_RNA (1)...(19): siRNA sense strand
acaaugcccuucaauuaca

SEQ ID NO: 59875 - RNA, 19 nt, Homo sapiens
  misc_RNA (1)...(19): siRNA sense strand
ccaacaacgaccaguauaa

SEQ ID NO: 59876 - RNA, 19 nt, Homo sapiens
  misc_RNA (1)...(19): siRNA sense strand
ucaaugaguccaacccuaa

SEQ ID NO: 59877 - RNA, 19 nt, Homo sapiens
  misc_RNA (1)...(19): siRNA sense strand
gggagcaccucuucuacug

SEQ ID NO: 59878 - RNA, 19 nt, Homo sapiens
  misc_RNA (1)...(19): siRNA sense strand
gguaugauuucuucuggau

SEQ ID NO: 59879 - RNA, 19 nt, Homo sapiens
  misc_RNA (1)...(19): siRNA sense strand
cuaaagagcccuagguauc

SEQ ID NO: 59880 - RNA, 19 nt, Homo sapiens
  misc_RNA (1)...(19): siRNA sense strand
caacaugaacgaacuccaa

SEQ ID NO: 59881 - RNA, 19 nt, Homo sapiens
  misc_RNA (1)...(19): siRNA sense strand
gaaacgggaaucaguguca

SEQ ID NO: 59882 - RNA, 19 nt, Homo sapiens
  misc_RNA (1)...(19): siRNA sense strand
uaucuucggucguccuuga

SEQ ID NO: 59883 - RNA, 19 nt, Homo sapiens
  misc_RNA (1)...(19): siRNA sense strand
caccaccgguuauggaauu

SEQ ID NO: 59884 - RNA, 19 nt, Homo sapiens
  misc_RNA (1)...(19): siRNA sense strand
gggaguggguacaucuuug

SEQ ID NO: 59885 - RNA, 19 nt, Homo sapiens
  misc_RNA (1)...(19): siRNA sense strand
ucuaugacaucgaugaaga

SEQ ID NO: 59886 - RNA, 19 nt, Homo sapiens
  misc_RNA (1)...(19): siRNA sense strand
cgucagcauuccuacgaua

SEQ ID NO: 59887 - RNA, 19 nt, Homo sapiens
  misc_RNA (1)...(19): siRNA sense strand
gaaucagugucaugguuuc

SEQ ID NO: 59888 - RNA, 19 nt, Homo sapiens
  misc_RNA (1)...(19): siRNA sense strand
ucaggccacuucaccauga

SEQ ID NO: 59889 - RNA, 19 nt, Homo sapiens
  misc_RNA (1)...(19): siRNA sense strand
gcugcugacuucauccaaa

SEQ ID NO: 59890 - RNA, 19 nt, Homo sapiens
  misc_RNA (1)...(19): siRNA sense strand
gagaagaacgaggugauga

SEQ ID NO: 59891 - RNA, 19 nt, Homo sapiens
  misc_RNA (1)...(19): siRNA sense strand
gucaugguuucaagaagua

SEQ ID NO: 59892 - RNA, 19 nt, Homo sapiens
  misc_RNA (1)...(19): siRNA sense strand
gcaccuaccugaaaaccaa

SEQ ID NO: 59893 - RNA, 19 nt, Homo sapiens
  misc_RNA (1)...(19): siRNA sense strand
caacauccucuuacucuca

SEQ ID NO: 59894 - RNA, 19 nt, Homo sapiens
  misc_RNA (1)...(19): siRNA sense strand
gaccuggccuugcuucagu

SEQ ID NO: 59895 - RNA, 19 nt, Homo sapiens
  misc_RNA (1)...(19): siRNA sense strand
agacacaaguccagcugaa

SEQ ID NO: 59896 - RNA, 19 nt, Homo sapiens
  misc_RNA (1)...(19): siRNA sense strand
gagacaacaugaacgaacu

SEQ ID NO: 59897 - RNA, 19 nt, Homo sapiens
  misc_RNA (1)...(19): siRNA sense strand
cggaauaacuaucccuaca

SEQ ID NO: 59898 - RNA, 19 nt, Homo sapiens
  misc_RNA (1)...(19): siRNA sense strand
ucauauuccuggcuagcua

SEQ ID NO: 59899 - RNA, 19 nt, Homo sapiens
  misc_RNA (1)...(19): siRNA sense strand
gcacaccuugcacccauuu

SEQ ID NO: 59900 - RNA, 19 nt, Homo sapiens
  misc_RNA (1)...(19): siRNA sense strand
cagcaggacugggcacaga

SEQ ID NO: 59901 - RNA, 19 nt, Homo sapiens
  misc_RNA (1)...(19): siRNA sense strand
ccagcaagaucaugguauc

SEQ ID NO: 59902 - RNA, 19 nt, Homo sapiens
  misc_RNA (1)...(19): siRNA sense strand
gcaaagacuuauccuucac

SEQ ID NO: 59903 - RNA, 19 nt, Homo sapiens
  misc_RNA (1)...(19): siRNA sense strand
ggacugggcacagaacaau

SEQ ID NO: 59904 - RNA, 19 nt, Homo sapiens
  misc_RNA (1)...(19): siRNA sense strand
agacaagaucuacacuaua

SEQ ID NO: 59905 - RNA, 19 nt, Homo sapiens
  misc_RNA (1)...(19): siRNA sense strand
gacaacauccucuuacucu

SEQ ID NO: 59906 - RNA, 19 nt, Homo sapiens
  misc_RNA (1)...(19): siRNA sense strand
ggagugcacauugaagaaa

SEQ ID NO: 59907 - RNA, 19 nt, Homo sapiens
  misc_RNA (1)...(19): siRNA sense strand
ggguugcucuucuccauca

SEQ ID NO: 59908 - RNA, 19 nt, Homo sapiens
  misc_RNA (1)...(19): siRNA sense strand
gaucaugguaucuguaugg

SEQ ID NO: 59909 - RNA, 19 nt, Homo sapiens
  misc_RNA (1)...(19): siRNA sense strand
caugaacuccucaagaaug

SEQ ID NO: 59910 - RNA, 19 nt, Homo sapiens
  misc_RNA (1)...(19): siRNA sense strand
cgugguagcucugcugaug

SEQ ID NO: 59911 - RNA, 19 nt, Homo sapiens
  misc_RNA (1)...(19): siRNA sense strand
guaucgaaucugauguuua

SEQ ID NO: 59912 - RNA, 19 nt, Homo sapiens
  misc_RNA (1)...(19): siRNA sense strand
caguacaugaccaaauuua

SEQ ID NO: 59913 - RNA, 19 nt, Homo sapiens
  misc_RNA (1)...(19): siRNA sense strand
ggauacaacagaaacuuag

SEQ ID NO: 59914 - RNA, 19 nt, Homo sapiens
  misc_RNA (1)...(19): siRNA sense strand
ggcaagaaaguuaacaaug

SEQ ID NO: 59915 - RNA, 19 nt, Homo sapiens
  misc_RNA (1)...(19): siRNA sense strand
ggaagcauggcaagaaagu

SEQ ID NO: 59916 - RNA, 19 nt, Homo sapiens
  misc_RNA (1)...(19): siRNA sense strand
acagaacaaugcccuucaa

SEQ ID NO: 59917 - RNA, 19 nt, Homo sapiens
  misc_RNA (1)...(19): siRNA sense strand
caacuuagcugccuucaug

SEQ ID NO: 59918 - RNA, 19 nt, Homo sapiens
  misc_RNA (1)...(19): siRNA sense strand
gaacauggcuaaccugucu

SEQ ID NO: 59919 - RNA, 19 nt, Homo sapiens
  misc_RNA (1)...(19): siRNA sense strand
gcucaucucuguaucauau

SEQ ID NO: 59920 - RNA, 19 nt, Homo sapiens
  misc_RNA (1)...(19): siRNA sense strand
cagcuacacugccaacuua

SEQ ID NO: 59921 - RNA, 19 nt, Homo sapiens
  misc_RNA (1)...(19): siRNA sense strand
gcaaugggcauguuuauga

SEQ ID NO: 59922 - RNA, 19 nt, Homo sapiens
  misc_RNA (1)...(19): siRNA sense strand
gaauaugacugguacaucu

SEQ ID NO: 59923 - RNA, 19 nt, Homo sapiens
  misc_RNA (1)...(19): siRNA sense strand
ccaauaugcuaaauaggua

SEQ ID NO: 59924 - RNA, 19 nt, Homo sapiens
  misc_RNA (1)...(19): siRNA sense strand
caacaggucucacaucaag

SEQ ID NO: 59925 - RNA, 19 nt, Homo sapiens
  misc_RNA (1)...(19): siRNA sense strand
cuaaauagguaucugauca

SEQ ID NO: 59926 - RNA, 19 nt, Homo sapiens
  misc_RNA (1)...(19): siRNA sense strand
caauaacuaugcagaaaug

SEQ ID NO: 59927 - RNA, 19 nt, Homo sapiens
  misc_RNA (1)...(19): siRNA sense strand
gaacagcaagcuuccguaa

SEQ ID NO: 59928 - RNA, 19 nt, Homo sapiens
  misc_RNA (1)...(19): siRNA sense strand
guauugacauccuuaagaa

SEQ ID NO: 59929 - RNA, 19 nt, Homo sapiens
  misc_RNA (1)...(19): siRNA sense strand
ccacugggcucaucucugu

SEQ ID NO: 59930 - RNA, 19 nt, Homo sapiens
  misc_RNA (1)...(19): siRNA sense strand
ccagagaccuaaugacuuc

SEQ ID NO: 59931 - RNA, 19 nt, Homo sapiens
  misc_RNA (1)...(19): siRNA sense strand
gaucggagguggucgacuu

SEQ ID NO: 59932 - RNA, 19 nt, Homo sapiens
  misc_RNA (1)...(19): siRNA sense strand
ccucagagcccgacuaauu

SEQ ID NO: 59933 - RNA, 19 nt, Homo sapiens
  misc_RNA (1)...(19): siRNA sense strand
ccuccaagcugcacaacua

SEQ ID NO: 59934 - RNA, 19 nt, Homo sapiens
  misc_RNA (1)...(19): siRNA sense strand
gauccucgauuucauuuca

SEQ ID NO: 59935 - RNA, 19 nt, Homo sapiens
  misc_RNA (1)...(19): siRNA sense strand
ggagcggagugaugacuuu

SEQ ID NO: 59936 - RNA, 19 nt, Homo sapiens
  misc_RNA (1)...(19): siRNA sense strand
ggaagaagccaccuacauc

SEQ ID NO: 59937 - RNA, 19 nt, Homo sapiens
  misc_RNA (1)...(19): siRNA sense strand
gaagccaccuacaucuuug

SEQ ID NO: 59938 - RNA, 19 nt, Homo sapiens
  misc_RNA (1)...(19): siRNA sense strand
acagcaagcuuccguaaug

SEQ ID NO: 59939 - RNA, 19 nt, Homo sapiens
  misc_RNA (1)...(19): siRNA sense strand
ggguguagaugaugcauug

SEQ ID NO: 59940 - RNA, 19 nt, Homo sapiens
  misc_RNA (1)...(19): siRNA sense strand
aauggaaccuggaauggua

SEQ ID NO: 59941 - RNA, 19 nt, Homo sapiens
  misc_RNA (1)...(19): siRNA sense strand
gcagggaguuugacgagau

SEQ ID NO: 59942 - RNA, 19 nt, Homo sapiens
  misc_RNA (1)...(19): siRNA sense strand
ggcguaagcagcaauauaa

SEQ ID NO: 59943 - RNA, 19 nt, Homo sapiens
  misc_RNA (1)...(19): siRNA sense strand
gaggagcgccagucuguaa

SEQ ID NO: 59944 - RNA, 19 nt, Homo sapiens
  misc_RNA (1)...(19): siRNA sense strand
gaaucuaccaguccaauau

SEQ ID NO: 59945 - RNA, 19 nt, Homo sapiens
  misc_RNA (1)...(19): siRNA sense strand
cagcaaauccuacuucuuc

SEQ ID NO: 59946 - RNA, 19 nt, Homo sapiens
  misc_RNA (1)...(19): siRNA sense strand
ucaaacgccuccaccacua

SEQ ID NO: 59947 - RNA, 19 nt, Homo sapiens
  misc_RNA (1)...(19): siRNA sense strand
gaaguucaccuaugaccuu

SEQ ID NO: 59948 - RNA, 19 nt, Homo sapiens
  misc_RNA (1)...(19): siRNA sense strand
cauagucacugagaauaaa

SEQ ID NO: 59949 - RNA, 19 nt, Homo sapiens
  misc_RNA (1)...(19): siRNA sense strand
gcgaacaccuuuucuauug

SEQ ID NO: 59950 - RNA, 19 nt, Homo sapiens
  misc_RNA (1)...(19): siRNA sense strand
gauaauggcagauaaggau

SEQ ID NO: 59951 - RNA, 19 nt, Homo sapiens
  misc_RNA (1)...(19): siRNA sense strand
ggagggcccuguaccaaca

SEQ ID NO: 59952 - RNA, 19 nt, Homo sapiens
  misc_RNA (1)...(19): siRNA sense strand
uaaccugucuggugugaau

SEQ ID NO: 59953 - RNA, 19 nt, Homo sapiens
  misc_RNA (1)...(19): siRNA sense strand
auagguaucugaucaaugu

SEQ ID NO: 59954 - RNA, 19 nt, Homo sapiens
  misc_RNA (1)...(19): siRNA sense strand
gcagcaccauugagaauag

SEQ ID NO: 59955 - RNA, 19 nt, Homo sapiens
  misc_RNA (1)...(19): siRNA sense strand
gaagaagaaccggaacaaa

SEQ ID NO: 59956 - RNA, 19 nt, Homo sapiens
  misc_RNA (1)...(19): siRNA sense strand
ggagccggguuacaucaaa

SEQ ID NO: 59957 - RNA, 19 nt, Homo sapiens
  misc_RNA (1)...(19): siRNA sense strand
gcauagucacugagaauaa

SEQ ID NO: 59958 - RNA, 19 nt, Homo sapiens
  misc_RNA (1)...(19): siRNA sense strand
agaaucagcucaagaaacu

SEQ ID NO: 59959 - RNA, 19 nt, Homo sapiens
  misc_RNA (1)...(19): siRNA sense strand
ucugugaucucaugucuga

SEQ ID NO: 59960 - RNA, 19 nt, Homo sapiens
  misc_RNA (1)...(19): siRNA sense strand
caacaucauggaagaauau

SEQ ID NO: 59961 - RNA, 19 nt, Homo sapiens
  misc_RNA (1)...(19): siRNA sense strand
ggcaaauucuccuucaaga

SEQ ID NO: 59962 - RNA, 19 nt, Homo sapiens
  misc_RNA (1)...(19): siRNA sense strand
aggagaaccucuucaguga

SEQ ID NO: 59963 - RNA, 19 nt, Homo sapiens
  misc_RNA (1)...(19): siRNA sense strand
acaagucccugcagaugaa

SEQ ID NO: 59964 - RNA, 19 nt, Homo sapiens
  misc_RNA (1)...(19): siRNA sense strand
ucaacaucauggaagaaua

SEQ ID NO: 59965 - RNA, 19 nt, Homo sapiens
  misc_RNA (1)...(19): siRNA sense strand
ggagauggaagaacuggaa

SEQ ID NO: 59966 - RNA, 19 nt, Homo sapiens
  misc_RNA (1)...(19): siRNA sense strand
cgauggagauucuaagauc

SEQ ID NO: 59967 - RNA, 19 nt, Homo sapiens
  misc_RNA (1)...(19): siRNA sense strand
ggaggcaccauuugucauu

SEQ ID NO: 59968 - RNA, 19 nt, Homo sapiens
  misc_RNA (1)...(19): siRNA sense strand
ggacaacucccugcaggaa

SEQ ID NO: 59969 - RNA, 19 nt, Homo sapiens
  misc_RNA (1)...(19): siRNA sense strand
gaacugguagccaugaaug

SEQ ID NO: 59970 - RNA, 19 nt, Homo sapiens
  misc_RNA (1)...(19): siRNA sense strand
ugaaguggccaacucagua

SEQ ID NO: 59971 - RNA, 19 nt, Homo sapiens
  misc_RNA (1)...(19): siRNA sense strand
gugugaggcuugcaagaaa

SEQ ID NO: 59972 - RNA, 19 nt, Homo sapiens
  misc_RNA (1)...(19): siRNA sense strand
gagaaccucuucagugacu

SEQ ID NO: 59973 - RNA, 19 nt, Homo sapiens
  misc_RNA (1)...(19): siRNA sense strand
gaauguguccagagacuga

SEQ ID NO: 59974 - RNA, 19 nt, Homo sapiens
  misc_RNA (1)...(19): siRNA sense strand
ggaauuuguccuucaguga

SEQ ID NO: 59975 - RNA, 19 nt, Homo sapiens
  misc_RNA (1)...(19): siRNA sense strand
gaagaagccaccuacaucu

SEQ ID NO: 59976 - RNA, 19 nt, Homo sapiens
  misc_RNA (1)...(19): siRNA sense strand
ggacaucaccaccacaaca

SEQ ID NO: 59977 - RNA, 19 nt, Homo sapiens
  misc_RNA (1)...(19): siRNA sense strand
ugaccgacaucuacaagga

SEQ ID NO: 59978 - RNA, 19 nt, Homo sapiens
  misc_RNA (1)...(19): siRNA sense strand
ugaaugagaccgacccaaa

SEQ ID NO: 59979 - RNA, 19 nt, Homo sapiens
  misc_RNA (1)...(19): siRNA sense strand
ccaccuacaucuuugaagu

SEQ ID NO: 59980 - RNA, 19 nt, Homo sapiens
  misc_RNA (1)...(19): siRNA sense strand
caaggaugcccacgagaaa

SEQ ID NO: 59981 - RNA, 19 nt, Homo sapiens
  misc_RNA (1)...(19): siRNA sense strand
gaaagacaagggccgauuc

SEQ ID NO: 59982 - RNA, 19 nt, Homo sapiens
  misc_RNA (1)...(19): siRNA sense strand
guaagcagcaauauaagga

SEQ ID NO: 59983 - RNA, 19 nt, Homo sapiens
  misc_RNA (1)...(19): siRNA sense strand
gcaauaacuaugcagaaau

SEQ ID NO: 59984 - RNA, 19 nt, Homo sapiens
  misc_RNA (1)...(19): siRNA sense strand
cagaugaaguacuaugugu

SEQ ID NO: 59985 - RNA, 19 nt, Homo sapiens
  misc_RNA (1)...(19): siRNA sense strand
gagcgccagucuguaauga

SEQ ID NO: 59986 - RNA, 19 nt, Homo sapiens
  misc_RNA (1)...(19): siRNA sense strand
gcguaagccugaaagacaa

SEQ ID NO: 59987 - RNA, 19 nt, Homo sapiens
  misc_RNA (1)...(19): siRNA sense strand
gaaaguguggacccucuga

SEQ ID NO: 59988 - RNA, 19 nt, Homo sapiens
  misc_RNA (1)...(19): siRNA sense strand
gagagcaccuuugccaaca

SEQ ID NO: 59989 - RNA, 19 nt, Homo sapiens
  misc_RNA (1)...(19): siRNA sense strand
caaccuguaugacaucagu

SEQ ID NO: 59990 - RNA, 19 nt, Homo sapiens
  misc_RNA (1)...(19): siRNA sense strand
agaagaaccugaccaacgu

SEQ ID NO: 59991 - RNA, 19 nt, Homo sapiens
  misc_RNA (1)...(19): siRNA sense strand
gggaccaccuccaagauca

SEQ ID NO: 59992 - RNA, 19 nt, Homo sapiens
  misc_RNA (1)...(19): siRNA sense strand
cgcaauaacuaugcagaaa

SEQ ID NO: 59993 - RNA, 19 nt, Homo sapiens
  misc_RNA (1)...(19): siRNA sense strand
uauugagucugaugucuga

SEQ ID NO: 59994 - RNA, 19 nt, Homo sapiens
  misc_RNA (1)...(19): siRNA sense strand
caacacacacuccaacauc

SEQ ID NO: 59995 - RNA, 19 nt, Homo sapiens
  misc_RNA (1)...(19): siRNA sense strand
gagagguggucaugaagag

SEQ ID NO: 59996 - RNA, 19 nt, Homo sapiens
  misc_RNA (1)...(19): siRNA sense strand
gcacagagagaaauauucg

SEQ ID NO: 59997 - RNA, 19 nt, Homo sapiens
  misc_RNA (1)...(19): siRNA sense strand
gaugaauccuccauguucu

SEQ ID NO: 59998 - RNA, 19 nt, Homo sapiens
  misc_RNA (1)...(19): siRNA sense strand
guuccgacauugcuuuaug

SEQ ID NO: 59999 - RNA, 19 nt, Homo sapiens
  misc_RNA (1)...(19): siRNA sense strand
gacaagucccugcagauga

SEQ ID NO: 60000 - RNA, 19 nt, Homo sapiens
  misc_RNA (1)...(19): siRNA sense strand
cgaaacuggugauaauucu

SEQ ID NO: 60001 - RNA, 19 nt, Homo sapiens
  misc_RNA (1)...(19): siRNA sense strand
ggugauaauucuucugaac

SEQ ID NO: 60002 - RNA, 19 nt, Homo sapiens
  misc_RNA (1)...(19): siRNA sense strand
ccaaggcccagaagaagaa

SEQ ID NO: 60003 - RNA, 19 nt, Homo sapiens
  misc_RNA (1)...(19): siRNA sense strand
ccgcaucugugaucucaug

SEQ ID NO: 60004 - RNA, 19 nt, Homo sapiens
  misc_RNA (1)...(19): siRNA sense strand
caguuuggcccaucaauug

SEQ ID NO: 60005 - RNA, 19 nt, Homo sapiens
  misc_RNA (1)...(19): siRNA sense strand
gcuaaccugucugguguga

SEQ ID NO: 60006 - RNA, 19 nt, Homo sapiens
  misc_RNA (1)...(19): siRNA sense strand
gcaguuccgacauugcuuu

SEQ ID NO: 60007 - RNA, 19 nt, Homo sapiens
  misc_RNA (1)...(19): siRNA sense strand
agagagaaauauucgcaau

SEQ ID NO: 60008 - RNA, 19 nt, Homo sapiens
  misc_RNA (1)...(19): siRNA sense strand
gaauauguggaccagguuu

SEQ ID NO: 60009 - RNA, 19 nt, Homo sapiens
  misc_RNA (1)...(19): siRNA sense strand
ggagagguggucaugaaga

SEQ ID NO: 60010 - RNA, 19 nt, Homo sapiens
  misc_RNA (1)...(19): siRNA sense strand
cugaagagcaggaggauga

SEQ ID NO: 60011 - RNA, 19 nt, Homo sapiens
  misc_RNA (1)...(19): siRNA sense strand
agaagccaccuacaucuuu

SEQ ID NO: 60012 - RNA, 19 nt, Homo sapiens
  misc_RNA (1)...(19): siRNA sense strand
gcauugcucucccugaaaa

SEQ ID NO: 60013 - RNA, 19 nt, Homo sapiens
  misc_RNA (1)...(19): siRNA sense strand
caucaucacccgcaucugu

SEQ ID NO: 60014 - RNA, 19 nt, Homo sapiens
  misc_RNA (1)...(19): siRNA sense strand
gaaugagaccgacccaaag

SEQ ID NO: 60015 - RNA, 19 nt, Homo sapiens
  misc_RNA (1)...(19): siRNA sense strand
ccaagaacauggcuaaccu

SEQ ID NO: 60016 - RNA, 19 nt, Homo sapiens
  misc_RNA (1)...(19): siRNA sense strand
ucgcccagauccucgauuu

SEQ ID NO: 60017 - RNA, 19 nt, Homo sapiens
  misc_RNA (1)...(19): siRNA sense strand
ucaaggugcuggaagagua

SEQ ID NO: 60018 - RNA, 19 nt, Homo sapiens
  misc_RNA (1)...(19): siRNA sense strand
gaucguagacuucucugua

SEQ ID NO: 60019 - RNA, 19 nt, Homo sapiens
  misc_RNA (1)...(19): siRNA sense strand
ucaagaagcuggccagagu

SEQ ID NO: 60020 - RNA, 19 nt, Homo sapiens
  misc_RNA (1)...(19): siRNA sense strand
agacuucucuguacccuuu

SEQ ID NO: 60021 - RNA, 19 nt, Homo sapiens
  misc_RNA (1)...(19): siRNA sense strand
acaccaagcucugcuguaa

SEQ ID NO: 60022 - RNA, 19 nt, Homo sapiens
  misc_RNA (1)...(19): siRNA sense strand
gcaucgacauccucaagaa

SEQ ID NO: 60023 - RNA, 19 nt, Homo sapiens
  misc_RNA (1)...(19): siRNA sense strand
caacauggcaggcgucuuc

SEQ ID NO: 60024 - RNA, 19 nt, Homo sapiens
  misc_RNA (1)...(19): siRNA sense strand
gaugguggcucgcagcaau

SEQ ID NO: 60025 - RNA, 19 nt, Homo sapiens
  misc_RNA (1)...(19): siRNA sense strand
ggacggagagacacagaaa

SEQ ID NO: 60026 - RNA, 19 nt, Homo sapiens
  misc_RNA (1)...(19): siRNA sense strand
gcuccgagaucguagacuu

SEQ ID NO: 60027 - RNA, 19 nt, Homo sapiens
  misc_RNA (1)...(19): siRNA sense strand
gagcauggcguccuauaca

SEQ ID NO: 60028 - RNA, 19 nt, Homo sapiens
  misc_RNA (1)...(19): siRNA sense strand
gaacauccgcaguaacuac

SEQ ID NO: 60029 - RNA, 19 nt, Homo sapiens
  misc_RNA (1)...(19): siRNA sense strand
gggagcaccuggucuacug

SEQ ID NO: 60030 - RNA, 19 nt, Homo sapiens
  misc_RNA (1)...(19): siRNA sense strand
caagaucaguacccaccuu

SEQ ID NO: 60031 - RNA, 19 nt, Homo sapiens
  misc_RNA (1)...(19): siRNA sense strand
gagaagaacgaggugauga

SEQ ID NO: 60032 - RNA, 19 nt, Homo sapiens
  misc_RNA (1)...(19): siRNA sense strand
ccauagaccuggcgcucuu

SEQ ID NO: 60033 - RNA, 19 nt, Homo sapiens
  misc_RNA (1)...(19): siRNA sense strand
gagacgggcaucaguguga

SEQ ID NO: 60034 - RNA, 19 nt, Homo sapiens
  misc_RNA (1)...(19): siRNA sense strand
ggaacgcuccgagaucgua

SEQ ID NO: 60035 - RNA, 19 nt, Homo sapiens
  misc_RNA (1)...(19): siRNA sense strand
guauggaacggcaugauug

SEQ ID NO: 60036 - RNA, 19 nt, Homo sapiens
  misc_RNA (1)...(19): siRNA sense strand
gggcccagcuuucacuauc

SEQ ID NO: 60037 - RNA, 19 nt, Homo sapiens
  misc_RNA (1)...(19): siRNA sense strand
gcgcuggucuucaacaacu

SEQ ID NO: 60038 - RNA, 19 nt, Homo sapiens
  misc_RNA (1)...(19): siRNA sense strand
ccagauccuugacuucauc

SEQ ID NO: 60039 - RNA, 19 nt, Homo sapiens
  misc_RNA (1)...(19): siRNA sense strand
acaggcaccuacugaaugu

SEQ ID NO: 60040 - RNA, 19 nt, Homo sapiens
  misc_RNA (1)...(19): siRNA sense strand
acacccacauggucaaguu

SEQ ID NO: 60041 - RNA, 19 nt, Homo sapiens
  misc_RNA (1)...(19): siRNA sense strand
gauccaagagcaauacauc

SEQ ID NO: 60042 - RNA, 19 nt, Homo sapiens
  misc_RNA (1)...(19): siRNA sense strand
ccagcaagaucaugguucu

SEQ ID NO: 60043 - RNA, 19 nt, Homo sapiens
  misc_RNA (1)...(19): siRNA sense strand
cuucuuugcugucaucuuc

SEQ ID NO: 60044 - RNA, 19 nt, Homo sapiens
  misc_RNA (1)...(19): siRNA sense strand
ggccagaguggucaaauuc

SEQ ID NO: 60045 - RNA, 19 nt, Homo sapiens
  misc_RNA (1)...(19): siRNA sense strand
ggccaucaccgucuucaug

SEQ ID NO: 60046 - RNA, 19 nt, Homo sapiens
  misc_RNA (1)...(19): siRNA sense strand
ccauauagcccugcagugu

SEQ ID NO: 60047 - RNA, 19 nt, Homo sapiens
  misc_RNA (1)...(19): siRNA sense strand
cagugugggugaugauguu

SEQ ID NO: 60048 - RNA, 19 nt, Homo sapiens
  misc_RNA (1)...(19): siRNA sense strand
gggcgcuggucuucaacaa

SEQ ID NO: 60049 - RNA, 19 nt, Homo sapiens
  misc_RNA (1)...(19): siRNA sense strand
uggccagaguggucaaauu

SEQ ID NO: 60050 - RNA, 19 nt, Homo sapiens
  misc_RNA (1)...(19): siRNA sense strand
agcaauacaucgacacugu

SEQ ID NO: 60051 - RNA, 19 nt, Homo sapiens
  misc_RNA (1)...(19): siRNA sense strand
ccagaguggucaaauucuc

SEQ ID NO: 60052 - RNA, 19 nt, Homo sapiens
  misc_RNA (1)...(19): siRNA sense strand
cuacaggcaccuacugaau

SEQ ID NO: 60053 - RNA, 19 nt, Homo sapiens
  misc_RNA (1)...(19): siRNA sense strand
ugugggcgcuggucuucaa

SEQ ID NO: 60054 - RNA, 19 nt, Homo sapiens
  misc_RNA (1)...(19): siRNA sense strand
gggagcauggcguccuaua

SEQ ID NO: 60055 - RNA, 19 nt, Homo sapiens
  misc_RNA (1)...(19): siRNA sense strand
gauccagccgcucacaguu

SEQ ID NO: 60056 - RNA, 19 nt, Homo sapiens
  misc_RNA (1)...(19): siRNA sense strand
ggcacaggcuacagagaca

SEQ ID NO: 60057 - RNA, 19 nt, Homo sapiens
  misc_RNA (1)...(19): siRNA sense strand
cgaugugcuugccgaucua

SEQ ID NO: 60058 - RNA, 19 nt, Homo sapiens
  misc_RNA (1)...(19): siRNA sense strand
guaacuaccgugacaugca

SEQ ID NO: 60059 - RNA, 19 nt, Homo sapiens
  misc_RNA (1)...(19): siRNA sense strand
ggaacauccgcaguaacua

SEQ ID NO: 60060 - RNA, 19 nt, Homo sapiens
  misc_RNA (1)...(19): siRNA sense strand
gcccagauccuugacuuca

SEQ ID NO: 60061 - RNA, 19 nt, Homo sapiens
  misc_RNA (1)...(19): siRNA sense strand
gcgcucaccagccucaaga

SEQ ID NO: 60062 - RNA, 19 nt, Homo sapiens
  misc_RNA (1)...(19): siRNA sense strand
cgcaguaacuaccgugaca

SEQ ID NO: 60063 - RNA, 19 nt, Homo sapiens
  misc_RNA (1)...(19): siRNA sense strand
gcagugugggugaugaugu

SEQ ID NO: 60064 - RNA, 19 nt, Homo sapiens
  misc_RNA (1)...(19): siRNA sense strand
ucagugacaagaaguuuca

SEQ ID NO: 60065 - RNA, 19 nt, Homo sapiens
  misc_RNA (1)...(19): siRNA sense strand
gggccucagugacaagaag

SEQ ID NO: 60066 - RNA, 19 nt, Homo sapiens
  misc_RNA (1)...(19): siRNA sense strand
ccacggcauugucuuugag

SEQ ID NO: 60067 - RNA, 19 nt, Homo sapiens
  misc_RNA (1)...(19): siRNA sense strand
ccaucaccgucuucauguu

SEQ ID NO: 60068 - RNA, 19 nt, Homo sapiens
  misc_RNA (1)...(19): siRNA sense strand
gcucugcuguaagggauuc

SEQ ID NO: 60069 - RNA, 19 nt, Homo sapiens
  misc_RNA (1)...(19): siRNA sense strand
gcucaccagccucaagaug

SEQ ID NO: 60070 - RNA, 19 nt, Homo sapiens
  misc_RNA (1)...(19): siRNA sense strand
cguauggaacggcaugauu

SEQ ID NO: 60071 - RNA, 19 nt, Homo sapiens
  misc_RNA (1)...(19): siRNA sense strand
uggcaggcgucuucuacau

SEQ ID NO: 60072 - RNA, 19 nt, Homo sapiens
  misc_RNA (1)...(19): siRNA sense strand
caucaccgucuucauguuc

SEQ ID NO: 60073 - RNA, 19 nt, Homo sapiens
  misc_RNA (1)...(19): siRNA sense strand
guaagggauucugcaucga

SEQ ID NO: 60074 - RNA, 19 nt, Homo sapiens
  misc_RNA (1)...(19): siRNA sense strand
ucgaugugcuugccgaucu

SEQ ID NO: 60075 - RNA, 19 nt, Homo sapiens
  misc_RNA (1)...(19): siRNA sense strand
uggacuuccugcuggcuuu

SEQ ID NO: 60076 - RNA, 19 nt, Homo sapiens
  misc_RNA (1)...(19): siRNA sense strand
gcaaggacgagggcugcaa

SEQ ID NO: 60077 - RNA, 19 nt, Homo sapiens
  misc_RNA (1)...(19): siRNA sense strand
augcugcuguccucaacua

SEQ ID NO: 60078 - RNA, 19 nt, Homo sapiens
  misc_RNA (1)...(19): siRNA sense strand
ggccuucuuugcugucauc

SEQ ID NO: 60079 - RNA, 19 nt, Homo sapiens
  misc_RNA (1)...(19): siRNA sense strand
uguucaaggugcuggaaga

SEQ ID NO: 60080 - RNA, 19 nt, Homo sapiens
  misc_RNA (1)...(19): siRNA sense strand
agaaggacucccacuggaa

SEQ ID NO: 60081 - RNA, 19 nt, Homo sapiens
  misc_RNA (1)...(19): siRNA sense strand
gcagccuccucacccagau

SEQ ID NO: 60082 - RNA, 19 nt, Homo sapiens
  misc_RNA (1)...(19): siRNA sense strand
cguguggccucgcuacagu

SEQ ID NO: 60083 - RNA, 19 nt, Homo sapiens
  misc_RNA (1)...(19): siRNA sense strand
ggucugggccuucuuugcu

SEQ ID NO: 60084 - RNA, 19 nt, Homo sapiens
  misc_RNA (1)...(19): siRNA sense strand
ggagcauggcguccuauac

SEQ ID NO: 60085 - RNA, 19 nt, Homo sapiens
  misc_RNA (1)...(19): siRNA sense strand
gcaagcuggacaucgacaa

SEQ ID NO: 60086 - RNA, 19 nt, Homo sapiens
  misc_RNA (1)...(19): siRNA sense strand
uacaggcaccuacugaaug

SEQ ID NO: 60087 - RNA, 19 nt, Homo sapiens
  misc_RNA (1)...(19): siRNA sense strand
ucaucuuccucgccagcua

SEQ ID NO: 60088 - RNA, 19 nt, Homo sapiens
  misc_RNA (1)...(19): siRNA sense strand
gccaucaccgucuucaugu

SEQ ID NO: 60089 - RNA, 19 nt, Homo sapiens
  misc_RNA (1)...(19): siRNA sense strand
accaagcucugcuguaagg

SEQ ID NO: 60090 - RNA, 19 nt, Homo sapiens
  misc_RNA (1)...(19): siRNA sense strand
cuacaagcgggcagacaug

SEQ ID NO: 60091 - RNA, 19 nt, Homo sapiens
  misc_RNA (1)...(19): siRNA sense strand
gcugggcacaggcuacaga

SEQ ID NO: 60092 - RNA, 19 nt, Homo sapiens
  misc_RNA (1)...(19): siRNA sense strand
ccugggagcaccuggucua

SEQ ID NO: 60093 - RNA, 19 nt, Homo sapiens
  misc_RNA (1)...(19): siRNA sense strand
gaucaguacccaccuuucc

SEQ ID NO: 60094 - RNA, 19 nt, Homo sapiens
  misc_RNA (1)...(19): siRNA sense strand
acucagugcccaucgagaa

SEQ ID NO: 60095 - RNA, 19 nt, Homo sapiens
  misc_RNA (1)...(19): siRNA sense strand
uggcccagauccuugacuu

SEQ ID NO: 60096 - RNA, 19 nt, Homo sapiens
  misc_RNA (1)...(19): siRNA sense strand
gcgagagucugcauaggua

SEQ ID NO: 60097 - RNA, 19 nt, Homo sapiens
  misc_RNA (1)...(19): siRNA sense strand
gaacauccgcagcaacuau

SEQ ID NO: 60098 - RNA, 19 nt, Homo sapiens
  misc_RNA (1)...(19): siRNA sense strand
cgacuucccuuacccguau

SEQ ID NO: 60099 - RNA, 19 nt, Homo sapiens
  misc_RNA (1)...(19): siRNA sense strand
gcccugguguucaauaauu

SEQ ID NO: 60100 - RNA, 19 nt, Homo sapiens
  misc_RNA (1)...(19): siRNA sense strand
gaggaaaggccguuuguca

SEQ ID NO: 60101 - RNA, 19 nt, Homo sapiens
  misc_RNA (1)...(19): siRNA sense strand
cugcauagguacuucauga

SEQ ID NO: 60102 - RNA, 19 nt, Homo sapiens
  misc_RNA (1)...(19): siRNA sense strand
ggaaaggccguuugucauc

SEQ ID NO: 60103 - RNA, 19 nt, Homo sapiens
  misc_RNA (1)...(19): siRNA sense strand
acauugaggugcugacuga

SEQ ID NO: 60104 - RNA, 19 nt, Homo sapiens
  misc_RNA (1)...(19): siRNA sense strand
gggauuacuccuucaauga

SEQ ID NO: 60105 - RNA, 19 nt, Homo sapiens
  misc_RNA (1)...(19): siRNA sense strand
cagcaacuaucccgacaug

SEQ ID NO: 60106 - RNA, 19 nt, Homo sapiens
  misc_RNA (1)...(19): siRNA sense strand
gcuccgagaucguggacuu

SEQ ID NO: 60107 - RNA, 19 nt, Homo sapiens
  misc_RNA (1)...(19): siRNA sense strand
caacguggcgcucguguuc

SEQ ID NO: 60108 - RNA, 19 nt, Homo sapiens
  misc_RNA (1)...(19): siRNA sense strand
gggcccugguguucaauaa

SEQ ID NO: 60109 - RNA, 19 nt, Homo sapiens
  misc_RNA (1)...(19): siRNA sense strand
augcugcagugcucaauua

SEQ ID NO: 60110 - RNA, 19 nt, Homo sapiens
  misc_RNA (1)...(19): siRNA sense strand
guacguggauacugugucu

SEQ ID NO: 60111 - RNA, 19 nt, Homo sapiens
  misc_RNA (1)...(19): siRNA sense strand
gcaacuaucccgacaugca

SEQ ID NO: 60112 - RNA, 19 nt, Homo sapiens
  misc_RNA (1)...(19): siRNA sense strand
gcugcaagcuugucaccau

SEQ ID NO: 60113 - RNA, 19 nt, Homo sapiens
  misc_RNA (1)...(19): siRNA sense strand
ggacgagggcugcaagcuu

SEQ ID NO: 60114 - RNA, 19 nt, Homo sapiens
  misc_RNA (1)...(19): siRNA sense strand
ugacuggacguccuuugua

SEQ ID NO: 60115 - RNA, 19 nt, Homo sapiens
  misc_RNA (1)...(19): siRNA sense strand
cauagguacuucaugaaca

SEQ ID NO: 60116 - RNA, 19 nt, Homo sapiens
  misc_RNA (1)...(19): siRNA sense strand
gaucugccacaaugacaaa

SEQ ID NO: 60117 - RNA, 19 nt, Homo sapiens
  misc_RNA (1)...(19): siRNA sense strand
ucugggaucugccacaaug

SEQ ID NO: 60118 - RNA, 19 nt, Homo sapiens
  misc_RNA (1)...(19): siRNA sense strand
ugaagcggcuggcgcauac

SEQ ID NO: 60119 - RNA, 19 nt, Homo sapiens
  misc_RNA (1)...(19): siRNA sense strand
gaacaucacgugggauaac

SEQ ID NO: 60120 - RNA, 19 nt, Homo sapiens
  misc_RNA (1)...(19): siRNA sense strand
gacuggacguccuuuguag

SEQ ID NO: 60121 - RNA, 19 nt, Homo sapiens
  misc_RNA (1)...(19): siRNA sense strand
cgggauuacuccuucaaug

SEQ ID NO: 60122 - RNA, 19 nt, Homo sapiens
  misc_RNA (1)...(19): siRNA sense strand
uugaggugcuggaggagua

SEQ ID NO: 60123 - RNA, 19 nt, Homo sapiens
  misc_RNA (1)...(19): siRNA sense strand
cugcagugcucaauuacau

SEQ ID NO: 60124 - RNA, 19 nt, Homo sapiens
  misc_RNA (1)...(19): siRNA sense strand
ggcaagcacggaaagaaga

SEQ ID NO: 60125 - RNA, 19 nt, Homo sapiens
  misc_RNA (1)...(19): siRNA sense strand
gcucggcgcacuucucuag

SEQ ID NO: 60126 - RNA, 19 nt, Homo sapiens
  misc_RNA (1)...(19): siRNA sense strand
agaagaacauccgcagcaa

SEQ ID NO: 60127 - RNA, 19 nt, Homo sapiens
  misc_RNA (1)...(19): siRNA sense strand
gcucagugaccgcaaguuc

SEQ ID NO: 60128 - RNA, 19 nt, Homo sapiens
  misc_RNA (1)...(19): siRNA sense strand
gcaaggguuucugcaucga

SEQ ID NO: 60129 - RNA, 19 nt, Homo sapiens
  misc_RNA (1)...(19): siRNA sense strand
ggauuacuccuucaaugag

SEQ ID NO: 60130 - RNA, 19 nt, Homo sapiens
  misc_RNA (1)...(19): siRNA sense strand
guucaaccuucaccauugg

SEQ ID NO: 60131 - RNA, 19 nt, Homo sapiens
  misc_RNA (1)...(19): siRNA sense strand
gggauaaccgggauuacuc

SEQ ID NO: 60132 - RNA, 19 nt, Homo sapiens
  misc_RNA (1)...(19): siRNA sense strand
gcuggacgccuucaucuac

SEQ ID NO: 60133 - RNA, 19 nt, Homo sapiens
  misc_RNA (1)...(19): siRNA sense strand
caggaggaguacguggaua

SEQ ID NO: 60134 - RNA, 19 nt, Homo sapiens
  misc_RNA (1)...(19): siRNA sense strand
guaccucaguccuguuggu

SEQ ID NO: 60135 - RNA, 19 nt, Homo sapiens
  misc_RNA (1)...(19): siRNA sense strand
gcaagcacggaaagaagau

SEQ ID NO: 60136 - RNA, 19 nt, Homo sapiens
  misc_RNA (1)...(19): siRNA sense strand
gcauagguacuucaugaac

SEQ ID NO: 60137 - RNA, 19 nt, Homo sapiens
  misc_RNA (1)...(19): siRNA sense strand
gcaacagcuucaggucauc

SEQ ID NO: 60138 - RNA, 19 nt, Homo sapiens
  misc_RNA (1)...(19): siRNA sense strand
gaguaccucaguccuguug

SEQ ID NO: 60139 - RNA, 19 nt, Homo sapiens
  misc_RNA (1)...(19): siRNA sense strand
gcgcauaccaucggcuuca

SEQ ID NO: 60140 - RNA, 19 nt, Homo sapiens
  misc_RNA (1)...(19): siRNA sense strand
uagaggaagcgcucacuca

SEQ ID NO: 60141 - RNA, 19 nt, Homo sapiens
  misc_RNA (1)...(19): siRNA sense strand
ccaauggcaagcacggaaa

SEQ ID NO: 60142 - RNA, 19 nt, Homo sapiens
  misc_RNA (1)...(19): siRNA sense strand
gcugcgugauuaugguuuc

SEQ ID NO: 60143 - RNA, 19 nt, Homo sapiens
  misc_RNA (1)...(19): siRNA sense strand
gggaugaugagaucgagau

SEQ ID NO: 60144 - RNA, 19 nt, Homo sapiens
  misc_RNA (1)...(19): siRNA sense strand
gggccuuccuguccuacau

SEQ ID NO: 60145 - RNA, 19 nt, Homo sapiens
  misc_RNA (1)...(19): siRNA sense strand
cuucuucgccgucaucuuc

SEQ ID NO: 60146 - RNA, 19 nt, Homo sapiens
  misc_RNA (1)...(19): siRNA sense strand
ccucaguccuguugguuac

SEQ ID NO: 60147 - RNA, 19 nt, Homo sapiens
  misc_RNA (1)...(19): siRNA sense strand
ccgugugggugaugauguu

SEQ ID NO: 60148 - RNA, 19 nt, Homo sapiens
  misc_RNA (1)...(19): siRNA sense strand
ccaccgagcaacagcuuca

SEQ ID NO: 60149 - RNA, 19 nt, Homo sapiens
  misc_RNA (1)...(19): siRNA sense strand
gcaaggacgagggcugcaa

SEQ ID NO: 60150 - RNA, 19 nt, Homo sapiens
  misc_RNA (1)...(19): siRNA sense strand
auagguacuucaugaacau

SEQ ID NO: 60151 - RNA, 19 nt, Homo sapiens
  misc_RNA (1)...(19): siRNA sense strand
ggugcugacugacgguagu

SEQ ID NO: 60152 - RNA, 19 nt, Homo sapiens
  misc_RNA (1)...(19): siRNA sense strand
gcuacauggugcgcuacaa

SEQ ID NO: 60153 - RNA, 19 nt, Homo sapiens
  misc_RNA (1)...(19): siRNA sense strand
uggccacgcuggaggaaag

SEQ ID NO: 60154 - RNA, 19 nt, Homo sapiens
  misc_RNA (1)...(19): siRNA sense strand
gaugcugcagugcucaauu

SEQ ID NO: 60155 - RNA, 19 nt, Homo sapiens
  misc_RNA (1)...(19): siRNA sense strand
gaucuggcuacgucugguu

SEQ ID NO: 60156 - RNA, 19 nt, Homo sapiens
  misc_RNA (1)...(19): siRNA sense strand
gcaagcuggacaucgacaa

SEQ ID NO: 60157 - RNA, 19 nt, Homo sapiens
  misc_RNA (1)...(19): siRNA sense strand
ucaucuuccucgccagcua

SEQ ID NO: 60158 - RNA, 19 nt, Homo sapiens
  misc_RNA (1)...(19): siRNA sense strand
ucugggcccugguguucaa

SEQ ID NO: 60159 - RNA, 19 nt, Homo sapiens
  misc_RNA (1)...(19): siRNA sense strand
agaccucgcugcccaucgu

SEQ ID NO: 60160 - RNA, 19 nt, Homo sapiens
  misc_RNA (1)...(19): siRNA sense strand
ggaucugccacaaugacaa

SEQ ID NO: 60161 - RNA, 19 nt, Homo sapiens
  misc_RNA (1)...(19): siRNA sense strand
ucaguccuguugguuacaa

SEQ ID NO: 60162 - RNA, 19 nt, Homo sapiens
  misc_RNA (1)...(19): siRNA sense strand
gcacggaaagaagaucgau

SEQ ID NO: 60163 - RNA, 19 nt, Homo sapiens
  misc_RNA (1)...(19): siRNA sense strand
ggacggcuuccuagugaac

SEQ ID NO: 60164 - RNA, 19 nt, Homo sapiens
  misc_RNA (1)...(19): siRNA sense strand
gcaaagagaaugaauaugu

SEQ ID NO: 60165 - RNA, 19 nt, Homo sapiens
  misc_RNA (1)...(19): siRNA sense strand
cugcaaagcuugugacuug

SEQ ID NO: 60166 - RNA, 19 nt, Homo sapiens
  misc_RNA (1)...(19): siRNA sense strand
gagaggaggugugguuuga

SEQ ID NO: 60167 - RNA, 19 nt, Homo sapiens
  misc_RNA (1)...(19): siRNA sense strand
gcagugagccuugcuuaaa

SEQ ID NO: 60168 - RNA, 19 nt, Homo sapiens
  misc_RNA (1)...(19): siRNA sense strand
caaagagaaugaauaugug

SEQ ID NO: 60169 - RNA, 19 nt, Homo sapiens
  misc_RNA (1)...(19): siRNA sense strand
cauccuagcuggcaucuuc

SEQ ID NO: 60170 - RNA, 19 nt, Homo sapiens
  misc_RNA (1)...(19): siRNA sense strand
gaggucaggucauuugaug

SEQ ID NO: 60171 - RNA, 19 nt, Homo sapiens
  misc_RNA (1)...(19): siRNA sense strand
gaaugaauaugugcaagau

SEQ ID NO: 60172 - RNA, 19 nt, Homo sapiens
  misc_RNA (1)...(19): siRNA sense strand
gcaaugaaagcuuagaaga

SEQ ID NO: 60173 - RNA, 19 nt, Homo sapiens
  misc_RNA (1)...(19): siRNA sense strand
gcaccaagacccuuuacaa

SEQ ID NO: 60174 - RNA, 19 nt, Homo sapiens
  misc_RNA (1)...(19): siRNA sense strand
caacuaacccuggugguaa

SEQ ID NO: 60175 - RNA, 19 nt, Homo sapiens
  misc_RNA (1)...(19): siRNA sense strand
gaaggagugcugaacauug

SEQ ID NO: 60176 - RNA, 19 nt, Homo sapiens
  misc_RNA (1)...(19): siRNA sense strand
caagacccuuuacaacgua

SEQ ID NO: 60177 - RNA, 19 nt, Homo sapiens
  misc_RNA (1)...(19): siRNA sense strand
caucaaguccucauucauu

SEQ ID NO: 60178 - RNA, 19 nt, Homo sapiens
  misc_RNA (1)...(19): siRNA sense strand
gaggaggugugguuugaug

SEQ ID NO: 60179 - RNA, 19 nt, Homo sapiens
  misc_RNA (1)...(19): siRNA sense strand
cacaggcaaugaaagcuua

SEQ ID NO: 60180 - RNA, 19 nt, Homo sapiens
  misc_RNA (1)...(19): siRNA sense strand
gagacggccugcaaccaaa

SEQ ID NO: 60181 - RNA, 19 nt, Homo sapiens
  misc_RNA (1)...(19): siRNA sense strand
gcaacuaacccugguggua

SEQ ID NO: 60182 - RNA, 19 nt, Homo sapiens
  misc_RNA (1)...(19): siRNA sense strand
gcacaugggcugcagaaca

SEQ ID NO: 60183 - RNA, 19 nt, Homo sapiens
  misc_RNA (1)...(19): siRNA sense strand
gaucaucacaacuugcuuu

SEQ ID NO: 60184 - RNA, 19 nt, Homo sapiens
  misc_RNA (1)...(19): siRNA sense strand
gaugugcuacucugcuuua

SEQ ID NO: 60185 - RNA, 19 nt, Homo sapiens
  misc_RNA (1)...(19): siRNA sense strand
ucaacgaggccaaauauau

SEQ ID NO: 60186 - RNA, 19 nt, Homo sapiens
  misc_RNA (1)...(19): siRNA sense strand
caaugaaagcuuagaagaa

SEQ ID NO: 60187 - RNA, 19 nt, Homo sapiens
  misc_RNA (1)...(19): siRNA sense strand
caucacaacuugcuuugca

SEQ ID NO: 60188 - RNA, 19 nt, Homo sapiens
  misc_RNA (1)...(19): siRNA sense strand
gggagcaacuacaagauca

SEQ ID NO: 60189 - RNA, 19 nt, Homo sapiens
  misc_RNA (1)...(19): siRNA sense strand
gugcuacucugcuuuagug

SEQ ID NO: 60190 - RNA, 19 nt, Homo sapiens
  misc_RNA (1)...(19): siRNA sense strand
gcuggcaucuuccuugguu

SEQ ID NO: 60191 - RNA, 19 nt, Homo sapiens
  misc_RNA (1)...(19): siRNA sense strand
gcuaaucgcuaugacuaug

SEQ ID NO: 60192 - RNA, 19 nt, Homo sapiens
  misc_RNA (1)...(19): siRNA sense strand
aaggagugcugaacauuga

SEQ ID NO: 60193 - RNA, 19 nt, Homo sapiens
  misc_RNA (1)...(19): siRNA sense strand
gauuaagguuauacggaaa

SEQ ID NO: 60194 - RNA, 19 nt, Homo sapiens
  misc_RNA (1)...(19): siRNA sense strand
gugagcugcugcuggauuu

SEQ ID NO: 60195 - RNA, 19 nt, Homo sapiens
  misc_RNA (1)...(19): siRNA sense strand
ccaagacccuuuacaacgu

SEQ ID NO: 60196 - RNA, 19 nt, Homo sapiens
  misc_RNA (1)...(19): siRNA sense strand
caacgaggccaaauauauc

SEQ ID NO: 60197 - RNA, 19 nt, Homo sapiens
  misc_RNA (1)...(19): siRNA sense strand
augaauaugugcaagauga

SEQ ID NO: 60198 - RNA, 19 nt, Homo sapiens
  misc_RNA (1)...(19): siRNA sense strand
cauguucacucccaagaug

SEQ ID NO: 60199 - RNA, 19 nt, Homo sapiens
  misc_RNA (1)...(19): siRNA sense strand
ugucaucaaugccaucuau

SEQ ID NO: 60200 - RNA, 19 nt, Homo sapiens
  misc_RNA (1)...(19): siRNA sense strand
gacgacagcgagagguuua

SEQ ID NO: 60201 - RNA, 19 nt, Homo sapiens
  misc_RNA (1)...(19): siRNA sense strand
gcaagagccugaccuuuuc

SEQ ID NO: 60202 - RNA, 19 nt, Homo sapiens
  misc_RNA (1)...(19): siRNA sense strand
ccucaauucugauuagugu

SEQ ID NO: 60203 - RNA, 19 nt, Homo sapiens
  misc_RNA (1)...(19): siRNA sense strand
gaguucaccugcaaagcuu

SEQ ID NO: 60204 - RNA, 19 nt, Homo sapiens
  misc_RNA (1)...(19): siRNA sense strand
cauuauagccaucgccuuu

SEQ ID NO: 60205 - RNA, 19 nt, Homo sapiens
  misc_RNA (1)...(19): siRNA sense strand
ggugugguuugaugagaaa

SEQ ID NO: 60206 - RNA, 19 nt, Homo sapiens
  misc_RNA (1)...(19): siRNA sense strand
ccaaauauaucgcguucac

SEQ ID NO: 60207 - RNA, 19 nt, Homo sapiens
  misc_RNA (1)...(19): siRNA sense strand
ugcugaacauugaugauua

SEQ ID NO: 60208 - RNA, 19 nt, Homo sapiens
  misc_RNA (1)...(19): siRNA sense strand
ugaagucauugaagguuau

SEQ ID NO: 60209 - RNA, 19 nt, Homo sapiens
  misc_RNA (1)...(19): siRNA sense strand
cuuguuaccuuguuuguca

SEQ ID NO: 60210 - RNA, 19 nt, Homo sapiens
  misc_RNA (1)...(19): siRNA sense strand
auuagggacucucugauuu

SEQ ID NO: 60211 - RNA, 19 nt, Homo sapiens
  misc_RNA (1)...(19): siRNA sense strand
ccaaugagacggccugcaa

SEQ ID NO: 60212 - RNA, 19 nt, Homo sapiens
  misc_RNA (1)...(19): siRNA sense strand
gcacaggcaaugaaagcuu

SEQ ID NO: 60213 - RNA, 19 nt, Homo sapiens
  misc_RNA (1)...(19): siRNA sense strand
aaucccaacuuuaaacgaa

SEQ ID NO: 60214 - RNA, 19 nt, Homo sapiens
  misc_RNA (1)...(19): siRNA sense strand
cggaauggacgcuuucaaa

SEQ ID NO: 60215 - RNA, 19 nt, Homo sapiens
  misc_RNA (1)...(19): siRNA sense strand
ucagauaccagcaccaaga

SEQ ID NO: 60216 - RNA, 19 nt, Homo sapiens
  misc_RNA (1)...(19): siRNA sense strand
gagcuuugaccgacucuug

SEQ ID NO: 60217 - RNA, 19 nt, Homo sapiens
  misc_RNA (1)...(19): siRNA sense strand
ggacuaagaagcccauugc

SEQ ID NO: 60218 - RNA, 19 nt, Homo sapiens
  misc_RNA (1)...(19): siRNA sense strand
caugagcuguaccuacuau

SEQ ID NO: 60219 - RNA, 19 nt, Homo sapiens
  misc_RNA (1)...(19): siRNA sense strand
cgggagcucugcuacauca

SEQ ID NO: 60220 - RNA, 19 nt, Homo sapiens
  misc_RNA (1)...(19): siRNA sense strand
guuggaaccuggcaugaag

SEQ ID NO: 60221 - RNA, 19 nt, Homo sapiens
  misc_RNA (1)...(19): siRNA sense strand
cacaugggcugcagaacau

SEQ ID NO: 60222 - RNA, 19 nt, Homo sapiens
  misc_RNA (1)...(19): siRNA sense strand
ccagaggucaggucauuug

SEQ ID NO: 60223 - RNA, 19 nt, Homo sapiens
  misc_RNA (1)...(19): siRNA sense strand
gcaucgaccugagugacaa

SEQ ID NO: 60224 - RNA, 19 nt, Homo sapiens
  misc_RNA (1)...(19): siRNA sense strand
uaccaaggcucuggcaaga

SEQ ID NO: 60225 - RNA, 19 nt, Homo sapiens
  misc_RNA (1)...(19): siRNA sense strand
uaccuuaucugcaauacca

SEQ ID NO: 60226 - RNA, 19 nt, Homo sapiens
  misc_RNA (1)...(19): siRNA sense strand
gcgaugugcuacucugcuu

SEQ ID NO: 60227 - RNA, 19 nt, Homo sapiens
  misc_RNA (1)...(19): siRNA sense strand
gguuaugugugcccauuca

SEQ ID NO: 60228 - RNA, 19 nt, Homo sapiens
  misc_RNA (1)...(19): siRNA sense strand
gcuccuggaagguaugaua

SEQ ID NO: 60229 - RNA, 19 nt, Homo sapiens
  misc_RNA (1)...(19): siRNA sense strand
aaacugaggcuggacacua

SEQ ID NO: 60230 - RNA, 19 nt, Homo sapiens
  misc_RNA (1)...(19): siRNA sense strand
aagaugaguucaccugcaa

SEQ ID NO: 60231 - RNA, 19 nt, Homo sapiens
  misc_RNA (1)...(19): siRNA sense strand
acacuuuccucaacaucuu

SEQ ID NO: 60232 - RNA, 19 nt, Homo sapiens
  misc_RNA (1)...(19): siRNA sense strand
agucaaacguuacaauugg

SEQ ID NO: 60233 - RNA, 19 nt, Homo sapiens
  misc_RNA (1)...(19): siRNA sense strand
acaauggacuccucaucau

SEQ ID NO: 60234 - RNA, 19 nt, Homo sapiens
  misc_RNA (1)...(19): siRNA sense strand
gggcucaggugaucauugc

SEQ ID NO: 60235 - RNA, 19 nt, Homo sapiens
  misc_RNA (1)...(19): siRNA sense strand
gcugaacauugaugauuac

SEQ ID NO: 60236 - RNA, 19 nt, Homo sapiens
  misc_RNA (1)...(19): siRNA sense strand
aacugaggcuggacacuaa

SEQ ID NO: 60237 - RNA, 19 nt, Homo sapiens
  misc_RNA (1)...(19): siRNA sense strand
gaccgacucuugcgcaaac

SEQ ID NO: 60238 - RNA, 19 nt, Homo sapiens
  misc_RNA (1)...(19): siRNA sense strand
uaucgcccauucugacaaa

SEQ ID NO: 60239 - RNA, 19 nt, Homo sapiens
  misc_RNA (1)...(19): siRNA sense strand
ggagaggaggugugguuug

SEQ ID NO: 60240 - RNA, 19 nt, Homo sapiens
  misc_RNA (1)...(19): siRNA sense strand
acaacuugcuuugcaguga

SEQ ID NO: 60241 - RNA, 19 nt, Homo sapiens
  misc_RNA (1)...(19): siRNA sense strand
uacaagaucaucacaacuu

SEQ ID NO: 60242 - RNA, 19 nt, Homo sapiens
  misc_RNA (1)...(19): siRNA sense strand
agaaagugcccgagaggaa

SEQ ID NO: 60243 - RNA, 19 nt, Homo sapiens
  misc_RNA (1)...(19): siRNA sense strand
uguaucaucuggcuagcuu

SEQ ID NO: 60244 - RNA, 19 nt, Homo sapiens
  misc_RNA (1)...(19): siRNA sense strand
cacugaagcuaaucgcuau

SEQ ID NO: 60245 - RNA, 19 nt, Homo sapiens
  misc_RNA (1)...(19): siRNA sense strand
gggccaugcuugacauagu

SEQ ID NO: 60246 - RNA, 19 nt, Homo sapiens
  misc_RNA (1)...(19): siRNA sense strand
gggacucucugauuuccau

SEQ ID NO: 60247 - RNA, 19 nt, Homo sapiens
  misc_RNA (1)...(19): siRNA sense strand
aagcuaaucgcuaugacua

SEQ ID NO: 60248 - RNA, 19 nt, Homo sapiens
  misc_RNA (1)...(19): siRNA sense strand
gaggugugguuugaugaga

SEQ ID NO: 60249 - RNA, 19 nt, Homo sapiens
  misc_RNA (1)...(19): siRNA sense strand
gugcagugagccuugcuua

SEQ ID NO: 60250 - RNA, 19 nt, Homo sapiens
  misc_RNA (1)...(19): siRNA sense strand
ggaguggucagcaacuuca

SEQ ID NO: 60251 - RNA, 19 nt, Homo sapiens
  misc_RNA (1)...(19): siRNA sense strand
ggcaagagccugaccuuuu

SEQ ID NO: 60252 - RNA, 19 nt, Homo sapiens
  misc_RNA (1)...(19): siRNA sense strand
cauuggagcccucuucuca

SEQ ID NO: 60253 - RNA, 19 nt, Homo sapiens
  misc_RNA (1)...(19): siRNA sense strand
cauuagggacucucugauu

SEQ ID NO: 60254 - RNA, 19 nt, Homo sapiens
  misc_RNA (1)...(19): siRNA sense strand
guuugucacccuaaucuuu

SEQ ID NO: 60255 - RNA, 19 nt, Homo sapiens
  misc_RNA (1)...(19): siRNA sense strand
cugcaaagagaaugaauau

SEQ ID NO: 60256 - RNA, 19 nt, Homo sapiens
  misc_RNA (1)...(19): siRNA sense strand
cagugagccuugcuuaaag

SEQ ID NO: 60257 - RNA, 19 nt, Homo sapiens
  misc_RNA (1)...(19): siRNA sense strand
cugcuggacuuccucauca

SEQ ID NO: 60258 - RNA, 19 nt, Homo sapiens
  misc_RNA (1)...(19): siRNA sense strand
gcccagccgauucgcuuua

SEQ ID NO: 60259 - RNA, 19 nt, Homo sapiens
  misc_RNA (1)...(19): siRNA sense strand
gaggaugcccagccgauuc

SEQ ID NO: 60260 - RNA, 19 nt, Homo sapiens
  misc_RNA (1)...(19): siRNA sense strand
gcaucuuccuugguuaugu

SEQ ID NO: 60261 - RNA, 19 nt, Homo sapiens
  misc_RNA (1)...(19): siRNA sense strand
gaauccuuguuaccuuguu

SEQ ID NO: 60262 - RNA, 19 nt, Homo sapiens
  misc_RNA (1)...(19): siRNA sense strand
uaucuugaguggagcaaca

SEQ ID NO: 60263 - RNA, 19 nt, Homo sapiens
  misc_RNA (1)...(19): siRNA sense strand
gagacgcuccuggaaggua

SEQ ID NO: 60264 - RNA, 19 nt, Homo sapiens
  misc_RNA (1)...(19): siRNA sense strand
gaacaggaguccaagauca

SEQ ID NO: 60265 - RNA, 19 nt, Homo sapiens
  misc_RNA (1)...(19): siRNA sense strand
agaaugaggugaagagugu

SEQ ID NO: 60266 - RNA, 19 nt, Homo sapiens
  misc_RNA (1)...(19): siRNA sense strand
uuucagaucccacagauua

SEQ ID NO: 60267 - RNA, 19 nt, Homo sapiens
  misc_RNA (1)...(19): siRNA sense strand
gcuacaacaucuucaccua

SEQ ID NO: 60268 - RNA, 19 nt, Homo sapiens
  misc_RNA (1)...(19): siRNA sense strand
gugcuuggcugccucuuug

SEQ ID NO: 60269 - RNA, 19 nt, Homo sapiens
  misc_RNA (1)...(19): siRNA sense strand
acaaugagguccgcuuuga

SEQ ID NO: 60270 - RNA, 19 nt, Homo sapiens
  misc_RNA (1)...(19): siRNA sense strand
guacagaccaccaccaugu

SEQ ID NO: 60271 - RNA, 19 nt, Homo sapiens
  misc_RNA (1)...(19): siRNA sense strand
gcacacauccucgacaguu

SEQ ID NO: 60272 - RNA, 19 nt, Homo sapiens
  misc_RNA (1)...(19): siRNA sense strand
ccaucgagcuggccuccua

SEQ ID NO: 60273 - RNA, 19 nt, Homo sapiens
  misc_RNA (1)...(19): siRNA sense strand
cgaauucacuugcgcugau

SEQ ID NO: 60274 - RNA, 19 nt, Homo sapiens
  misc_RNA (1)...(19): siRNA sense strand
cagauuagcuacgccucua

SEQ ID NO: 60275 - RNA, 19 nt, Homo sapiens
  misc_RNA (1)...(19): siRNA sense strand
ugccaucacugguguuauu

SEQ ID NO: 60276 - RNA, 19 nt, Homo sapiens
  misc_RNA (1)...(19): siRNA sense strand
cagcugacacccacaauga

SEQ ID NO: 60277 - RNA, 19 nt, Homo sapiens
  misc_RNA (1)...(19): siRNA sense strand
gaucauguuuguggucaau

SEQ ID NO: 60278 - RNA, 19 nt, Homo sapiens
  misc_RNA (1)...(19): siRNA sense strand
gaauucacuugcgcugauu

SEQ ID NO: 60279 - RNA, 19 nt, Homo sapiens
  misc_RNA (1)...(19): siRNA sense strand
caacgaggccaaguucauu

SEQ ID NO: 60280 - RNA, 19 nt, Homo sapiens
  misc_RNA (1)...(19): siRNA sense strand
ucagugacuuugccuccua

SEQ ID NO: 60281 - RNA, 19 nt, Homo sapiens
  misc_RNA (1)...(19): siRNA sense strand
gguauuggccgcuacaaca

SEQ ID NO: 60282 - RNA, 19 nt, Homo sapiens
  misc_RNA (1)...(19): siRNA sense strand
ccaccgcgaugcaaguaug

SEQ ID NO: 60283 - RNA, 19 nt, Homo sapiens
  misc_RNA (1)...(19): siRNA sense strand
cacagugccuccugacuuc

SEQ ID NO: 60284 - RNA, 19 nt, Homo sapiens
  misc_RNA (1)...(19): siRNA sense strand
ccaaggccauggcugagau

SEQ ID NO: 60285 - RNA, 19 nt, Homo sapiens
  misc_RNA (1)...(19): siRNA sense strand
ucaucuggcuggcauuguu

SEQ ID NO: 60286 - RNA, 19 nt, Homo sapiens
  misc_RNA (1)...(19): siRNA sense strand
guacaccaccugcaucauc

SEQ ID NO: 60287 - RNA, 19 nt, Homo sapiens
  misc_RNA (1)...(19): siRNA sense strand
uacaacaucuucaccuauc

SEQ ID NO: 60288 - RNA, 19 nt, Homo sapiens
  misc_RNA (1)...(19): siRNA sense strand
gugccaagcugagugacaa

SEQ ID NO: 60289 - RNA, 19 nt, Homo sapiens
  misc_RNA (1)...(19): siRNA sense strand
gacgcgaugcggccaguua

SEQ ID NO: 60290 - RNA, 19 nt, Homo sapiens
  misc_RNA (1)...(19): siRNA sense strand
ugacuuugccuccuacuuc

SEQ ID NO: 60291 - RNA, 19 nt, Homo sapiens
  misc_RNA (1)...(19): siRNA sense strand
ucgacaacgucaucgcuuu

SEQ ID NO: 60292 - RNA, 19 nt, Homo sapiens
  misc_RNA (1)...(19): siRNA sense strand
ggagcaggcacuggacuuu

SEQ ID NO: 60293 - RNA, 19 nt, Homo sapiens
  misc_RNA (1)...(19): siRNA sense strand
ccacaaugagguccgcuuu

SEQ ID NO: 60294 - RNA, 19 nt, Homo sapiens
  misc_RNA (1)...(19): siRNA sense strand
gggcgacuauggcgagaca

SEQ ID NO: 60295 - RNA, 19 nt, Homo sapiens
  misc_RNA (1)...(19): siRNA sense strand
aguccaagaucauguuugu

SEQ ID NO: 60296 - RNA, 19 nt, Homo sapiens
  misc_RNA (1)...(19): siRNA sense strand
gucccgcuaugacuacuuu

SEQ ID NO: 60297 - RNA, 19 nt, Homo sapiens
  misc_RNA (1)...(19): siRNA sense strand
ucauuggcuucaccaugua

SEQ ID NO: 60298 - RNA, 19 nt, Homo sapiens
  misc_RNA (1)...(19): siRNA sense strand
ccgcuuuggugaugguauu

SEQ ID NO: 60299 - RNA, 19 nt, Homo sapiens
  misc_RNA (1)...(19): siRNA sense strand
cauugaggccuuugagcua

SEQ ID NO: 60300 - RNA, 19 nt, Homo sapiens
  misc_RNA (1)...(19): siRNA sense strand
aaagugggccgugccauga

SEQ ID NO: 60301 - RNA, 19 nt, Homo sapiens
  misc_RNA (1)...(19): siRNA sense strand
cgacaacgucaucgcuuug

SEQ ID NO: 60302 - RNA, 19 nt, Homo sapiens
  misc_RNA (1)...(19): siRNA sense strand
ccucacagguggccaucug

SEQ ID NO: 60303 - RNA, 19 nt, Homo sapiens
  misc_RNA (1)...(19): siRNA sense strand
acucagcccugcucaccaa

SEQ ID NO: 60304 - RNA, 19 nt, Homo sapiens
  misc_RNA (1)...(19): siRNA sense strand
ggaguccaagaucauguuu

SEQ ID NO: 60305 - RNA, 19 nt, Homo sapiens
  misc_RNA (1)...(19): siRNA sense strand
cccaugcgcuccacaacau

SEQ ID NO: 60306 - RNA, 19 nt, Homo sapiens
  misc_RNA (1)...(19): siRNA sense strand
guaccgauuggacgaauuc

SEQ ID NO: 60307 - RNA, 19 nt, Homo sapiens
  misc_RNA (1)...(19): siRNA sense strand
gagcaggcacuggacuuug

SEQ ID NO: 60308 - RNA, 19 nt, Homo sapiens
  misc_RNA (1)...(19): siRNA sense strand
uucauuggcuucaccaugu

SEQ ID NO: 60309 - RNA, 19 nt, Homo sapiens
  misc_RNA (1)...(19): siRNA sense strand
cacacauccucgacaguug

SEQ ID NO: 60310 - RNA, 19 nt, Homo sapiens
  misc_RNA (1)...(19): siRNA sense strand
ccacggcaguguguaccuu

SEQ ID NO: 60311 - RNA, 19 nt, Homo sapiens
  misc_RNA (1)...(19): siRNA sense strand
caacaccacccggcucugu

SEQ ID NO: 60312 - RNA, 19 nt, Homo sapiens
  misc_RNA (1)...(19): siRNA sense strand
cuacaacaucuucaccuau

SEQ ID NO: 60313 - RNA, 19 nt, Homo sapiens
  misc_RNA (1)...(19): siRNA sense strand
guucacccguucugaggau

SEQ ID NO: 60314 - RNA, 19 nt, Homo sapiens
  misc_RNA (1)...(19): siRNA sense strand
uauuucagaucccacagau

SEQ ID NO: 60315 - RNA, 19 nt, Homo sapiens
  misc_RNA (1)...(19): siRNA sense strand
gaguaccgauuggacgaau

SEQ ID NO: 60316 - RNA, 19 nt, Homo sapiens
  misc_RNA (1)...(19): siRNA sense strand
cgugccagcccuaugagua

SEQ ID NO: 60317 - RNA, 19 nt, Homo sapiens
  misc_RNA (1)...(19): siRNA sense strand
gggcagaaggcuugacucu

SEQ ID NO: 60318 - RNA, 19 nt, Homo sapiens
  misc_RNA (1)...(19): siRNA sense strand
gugcucaacgucaaguuug

SEQ ID NO: 60319 - RNA, 19 nt, Homo sapiens
  misc_RNA (1)...(19): siRNA sense strand
gauuggacgaauucacuug

SEQ ID NO: 60320 - RNA, 19 nt, Homo sapiens
  misc_RNA (1)...(19): siRNA sense strand
gacaacgucaucgcuuuga

SEQ ID NO: 60321 - RNA, 19 nt, Homo sapiens
  misc_RNA (1)...(19): siRNA sense strand
gcucgugcccgcaacaucu

SEQ ID NO: 60322 - RNA, 19 nt, Homo sapiens
  misc_RNA (1)...(19): siRNA sense strand
cgcccaagcugcacaucau

SEQ ID NO: 60323 - RNA, 19 nt, Homo sapiens
  misc_RNA (1)...(19): siRNA sense strand
ugggcucgcuggccuacaa

SEQ ID NO: 60324 - RNA, 19 nt, Homo sapiens
  misc_RNA (1)...(19): siRNA sense strand
agcccugccuccagaauga

SEQ ID NO: 60325 - RNA, 19 nt, Homo sapiens
  misc_RNA (1)...(19): siRNA sense strand
acugugguccugucaauga

SEQ ID NO: 60326 - RNA, 19 nt, Homo sapiens
  misc_RNA (1)...(19): siRNA sense strand
uugcccaucuucuauguca

SEQ ID NO: 60327 - RNA, 19 nt, Homo sapiens
  misc_RNA (1)...(19): siRNA sense strand
cauuguugcccaucuucua

SEQ ID NO: 60328 - RNA, 19 nt, Homo sapiens
  misc_RNA (1)...(19): siRNA sense strand
caccaagaccaaccgcauu

SEQ ID NO: 60329 - RNA, 19 nt, Homo sapiens
  misc_RNA (1)...(19): siRNA sense strand
gucgggagcucugcuacau

SEQ ID NO: 60330 - RNA, 19 nt, Homo sapiens
  misc_RNA (1)...(19): siRNA sense strand
caacaucuucaccuaucug

SEQ ID NO: 60331 - RNA, 19 nt, Homo sapiens
  misc_RNA (1)...(19): siRNA sense strand
ccagugccaagcugaguga

SEQ ID NO: 60332 - RNA, 19 nt, Homo sapiens
  misc_RNA (1)...(19): siRNA sense strand
gugguggacucgacaacgu

SEQ ID NO: 60333 - RNA, 19 nt, Homo sapiens
  misc_RNA (1)...(19): siRNA sense strand
ugacaagucccgcuaugac

SEQ ID NO: 60334 - RNA, 19 nt, Homo sapiens
  misc_RNA (1)...(19): siRNA sense strand
gagcccugccuccagaaug

SEQ ID NO: 60335 - RNA, 19 nt, Homo sapiens
  misc_RNA (1)...(19): siRNA sense strand
ucaacgaggccaaguucau

SEQ ID NO: 60336 - RNA, 19 nt, Homo sapiens
  misc_RNA (1)...(19): siRNA sense strand
gugacaagucccgcuauga

SEQ ID NO: 60337 - RNA, 19 nt, Homo sapiens
  misc_RNA (1)...(19): siRNA sense strand
ggugcuuggcugccucuuu

SEQ ID NO: 60338 - RNA, 19 nt, Homo sapiens
  misc_RNA (1)...(19): siRNA sense strand
cuuuaugccuucaauacuc

SEQ ID NO: 60339 - RNA, 19 nt, Homo sapiens
  misc_RNA (1)...(19): siRNA sense strand
ccgcauugcacgcaucuuc

SEQ ID NO: 60340 - RNA, 19 nt, Homo sapiens
  misc_RNA (1)...(19): siRNA sense strand
ccugcuggguggugucuuc

SEQ ID NO: 60341 - RNA, 19 nt, Homo sapiens
  misc_RNA (1)...(19): siRNA sense strand
guuauuggcgguuccuaca

SEQ ID NO: 60342 - RNA, 19 nt, Homo sapiens
  misc_RNA (1)...(19): siRNA sense strand
uauuggcgguuccuacagu

SEQ ID NO: 60343 - RNA, 19 nt, Homo sapiens
  misc_RNA (1)...(19): siRNA sense strand
caacaaagaugauuacuug

SEQ ID NO: 60344 - RNA, 19 nt, Homo sapiens
  misc_RNA (1)...(19): siRNA sense strand
caacgaagcuaaguucaua

SEQ ID NO: 60345 - RNA, 19 nt, Homo sapiens
  misc_RNA (1)...(19): siRNA sense strand
gaaguuggguguucacauu

SEQ ID NO: 60346 - RNA, 19 nt, Homo sapiens
  misc_RNA (1)...(19): siRNA sense strand
gauacaacguguucaauuu

SEQ ID NO: 60347 - RNA, 19 nt, Homo sapiens
  misc_RNA (1)...(19): siRNA sense strand
gaccauaacuuucuaagga

SEQ ID NO: 60348 - RNA, 19 nt, Homo sapiens
  misc_RNA (1)...(19): siRNA sense strand
ggaagaaguuguacaagga

SEQ ID NO: 60349 - RNA, 19 nt, Homo sapiens
  misc_RNA (1)...(19): siRNA sense strand
gaagcuaaguucauagguu

SEQ ID NO: 60350 - RNA, 19 nt, Homo sapiens
  misc_RNA (1)...(19): siRNA sense strand
caaagaugauuacuugcua

SEQ ID NO: 60351 - RNA, 19 nt, Homo sapiens
  misc_RNA (1)...(19): siRNA sense strand
ggaugaagcugaguauaug

SEQ ID NO: 60352 - RNA, 19 nt, Homo sapiens
  misc_RNA (1)...(19): siRNA sense strand
gaguuuaccuguauggauu

SEQ ID NO: 60353 - RNA, 19 nt, Homo sapiens
  misc_RNA (1)...(19): siRNA sense strand
ggagagagauuaaaauaga

SEQ ID NO: 60354 - RNA, 19 nt, Homo sapiens
  misc_RNA (1)...(19): siRNA sense strand
gaacucugcuacaucuuau

SEQ ID NO: 60355 - RNA, 19 nt, Homo sapiens
  misc_RNA (1)...(19): siRNA sense strand
gaagccauguuguuugcua

SEQ ID NO: 60356 - RNA, 19 nt, Homo sapiens
  misc_RNA (1)...(19): siRNA sense strand
gagcaagaguccaagauca

SEQ ID NO: 60357 - RNA, 19 nt, Homo sapiens
  misc_RNA (1)...(19): siRNA sense strand
gguauacccuugcagagaa

SEQ ID NO: 60358 - RNA, 19 nt, Homo sapiens
  misc_RNA (1)...(19): siRNA sense strand
gaguauauguguccugaug

SEQ ID NO: 60359 - RNA, 19 nt, Homo sapiens
  misc_RNA (1)...(19): siRNA sense strand
gggaaacagucauccuaaa

SEQ ID NO: 60360 - RNA, 19 nt, Homo sapiens
  misc_RNA (1)...(19): siRNA sense strand
gaagacgccugggccauug

SEQ ID NO: 60361 - RNA, 19 nt, Homo sapiens
  misc_RNA (1)...(19): siRNA sense strand
gaugucugcugcuggauuu

SEQ ID NO: 60362 - RNA, 19 nt, Homo sapiens
  misc_RNA (1)...(19): siRNA sense strand
aaauguagguggaaaguau

SEQ ID NO: 60363 - RNA, 19 nt, Homo sapiens
  misc_RNA (1)...(19): siRNA sense strand
gcgccaaacucagugauaa

SEQ ID NO: 60364 - RNA, 19 nt, Homo sapiens
  misc_RNA (1)...(19): siRNA sense strand
acgaauaccuggcugauga

SEQ ID NO: 60365 - RNA, 19 nt, Homo sapiens
  misc_RNA (1)...(19): siRNA sense strand
gcugaugaguuuaccugua

SEQ ID NO: 60366 - RNA, 19 nt, Homo sapiens
  misc_RNA (1)...(19): siRNA sense strand
ucacugggcagaaaccuua

SEQ ID NO: 60367 - RNA, 19 nt, Homo sapiens
  misc_RNA (1)...(19): siRNA sense strand
aagcuaaguucauagguuu

SEQ ID NO: 60368 - RNA, 19 nt, Homo sapiens
  misc_RNA (1)...(19): siRNA sense strand
auaccuggcugaugaguuu

SEQ ID NO: 60369 - RNA, 19 nt, Homo sapiens
  misc_RNA (1)...(19): siRNA sense strand
caacacacccuuggucaaa

SEQ ID NO: 60370 - RNA, 19 nt, Homo sapiens
  misc_RNA (1)...(19): siRNA sense strand
ggagugaaguuggguguuc

SEQ ID NO: 60371 - RNA, 19 nt, Homo sapiens
  misc_RNA (1)...(19): siRNA sense strand
ggucuugggcuguuuguuu

SEQ ID NO: 60372 - RNA, 19 nt, Homo sapiens
  misc_RNA (1)...(19): siRNA sense strand
gauacauguucaagggaua

SEQ ID NO: 60373 - RNA, 19 nt, Homo sapiens
  misc_RNA (1)...(19): siRNA sense strand
auaagucgcgcuaugauua

SEQ ID NO: 60374 - RNA, 19 nt, Homo sapiens
  misc_RNA (1)...(19): siRNA sense strand
gacaucaagugacuacaga

SEQ ID NO: 60375 - RNA, 19 nt, Homo sapiens
  misc_RNA (1)...(19): siRNA sense strand
cgagaacucugcuacaucu

SEQ ID NO: 60376 - RNA, 19 nt, Homo sapiens
  misc_RNA (1)...(19): siRNA sense strand
aaacaucccacuucucauu

SEQ ID NO: 60377 - RNA, 19 nt, Homo sapiens
  misc_RNA (1)...(19): siRNA sense strand
agaccuaacuggaugcuau

SEQ ID NO: 60378 - RNA, 19 nt, Homo sapiens
  misc_RNA (1)...(19): siRNA sense strand
ggucauugguggcucuuau

SEQ ID NO: 60379 - RNA, 19 nt, Homo sapiens
  misc_RNA (1)...(19): siRNA sense strand
gaugaaaucaacaaagaug

SEQ ID NO: 60380 - RNA, 19 nt, Homo sapiens
  misc_RNA (1)...(19): siRNA sense strand
ccacgugcaucaucugguu

SEQ ID NO: 60381 - RNA, 19 nt, Homo sapiens
  misc_RNA (1)...(19): siRNA sense strand
gcacuggaacugaagaaug

SEQ ID NO: 60382 - RNA, 19 nt, Homo sapiens
  misc_RNA (1)...(19): siRNA sense strand
gaacugggaccacauacuc

SEQ ID NO: 60383 - RNA, 19 nt, Homo sapiens
  misc_RNA (1)...(19): siRNA sense strand
ugacaagacugcaaguucu

SEQ ID NO: 60384 - RNA, 19 nt, Homo sapiens
  misc_RNA (1)...(19): siRNA sense strand
gcagauagcauagucaagu

SEQ ID NO: 60385 - RNA, 19 nt, Homo sapiens
  misc_RNA (1)...(19): siRNA sense strand
caaauaaagaugcagauag

SEQ ID NO: 60386 - RNA, 19 nt, Homo sapiens
  misc_RNA (1)...(19): siRNA sense strand
gcugagaucuugcgcuucu

SEQ ID NO: 60387 - RNA, 19 nt, Homo sapiens
  misc_RNA (1)...(19): siRNA sense strand
gaaugugggcgaaucaaug

SEQ ID NO: 60388 - RNA, 19 nt, Homo sapiens
  misc_RNA (1)...(19): siRNA sense strand
agaagaauguugucacaca

SEQ ID NO: 60389 - RNA, 19 nt, Homo sapiens
  misc_RNA (1)...(19): siRNA sense strand
ccagaagaauguugucaca

SEQ ID NO: 60390 - RNA, 19 nt, Homo sapiens
  misc_RNA (1)...(19): siRNA sense strand
guucuuaccuuagcuuugu

SEQ ID NO: 60391 - RNA, 19 nt, Homo sapiens
  misc_RNA (1)...(19): siRNA sense strand
gaaaacaucccacuucuca

SEQ ID NO: 60392 - RNA, 19 nt, Homo sapiens
  misc_RNA (1)...(19): siRNA sense strand
caagggauaccuaugcauu

SEQ ID NO: 60393 - RNA, 19 nt, Homo sapiens
  misc_RNA (1)...(19): siRNA sense strand
gaaaccuuaucgcuagaug

SEQ ID NO: 60394 - RNA, 19 nt, Homo sapiens
  misc_RNA (1)...(19): siRNA sense strand
ccaaauaaagaugcagaua

SEQ ID NO: 60395 - RNA, 19 nt, Homo sapiens
  misc_RNA (1)...(19): siRNA sense strand
ggaagacgccugggccauu

SEQ ID NO: 60396 - RNA, 19 nt, Homo sapiens
  misc_RNA (1)...(19): siRNA sense strand
ccugugaacccuacgaaua

SEQ ID NO: 60397 - RNA, 19 nt, Homo sapiens
  misc_RNA (1)...(19): siRNA sense strand
uuauagcaguguuuccaua

SEQ ID NO: 60398 - RNA, 19 nt, Homo sapiens
  misc_RNA (1)...(19): siRNA sense strand
cagauagcauagucaaguu

SEQ ID NO: 60399 - RNA, 19 nt, Homo sapiens
  misc_RNA (1)...(19): siRNA sense strand
guauauguguccugaugga

SEQ ID NO: 60400 - RNA, 19 nt, Homo sapiens
  misc_RNA (1)...(19): siRNA sense strand
gauaagucgcgcuaugauu

SEQ ID NO: 60401 - RNA, 19 nt, Homo sapiens
  misc_RNA (1)...(19): siRNA sense strand
caaugaagaccgagggauu

SEQ ID NO: 60402 - RNA, 19 nt, Homo sapiens
  misc_RNA (1)...(19): siRNA sense strand
cugaugaguuuaccuguau

SEQ ID NO: 60403 - RNA, 19 nt, Homo sapiens
  misc_RNA (1)...(19): siRNA sense strand
gauccuaugccauucaaga

SEQ ID NO: 60404 - RNA, 19 nt, Homo sapiens
  misc_RNA (1)...(19): siRNA sense strand
ggagcaaucacuggaguuu

SEQ ID NO: 60405 - RNA, 19 nt, Homo sapiens
  misc_RNA (1)...(19): siRNA sense strand
ggaagugcccagaaaauuu

SEQ ID NO: 60406 - RNA, 19 nt, Homo sapiens
  misc_RNA (1)...(19): siRNA sense strand
gaagaaugugggcgaauca

SEQ ID NO: 60407 - RNA, 19 nt, Homo sapiens
  misc_RNA (1)...(19): siRNA sense strand
cacuggaacugaagaaugu

SEQ ID NO: 60408 - RNA, 19 nt, Homo sapiens
  misc_RNA (1)...(19): siRNA sense strand
aaauaaagaugcagauagc

SEQ ID NO: 60409 - RNA, 19 nt, Homo sapiens
  misc_RNA (1)...(19): siRNA sense strand
caacuucacggcuccauuc

SEQ ID NO: 60410 - RNA, 19 nt, Homo sapiens
  misc_RNA (1)...(19): siRNA sense strand
agaacucugcuacaucuua

SEQ ID NO: 60411 - RNA, 19 nt, Homo sapiens
  misc_RNA (1)...(19): siRNA sense strand
caaagauuccagcauguug

SEQ ID NO: 60412 - RNA, 19 nt, Homo sapiens
  misc_RNA (1)...(19): siRNA sense strand
gccaagccaucaccaguca

SEQ ID NO: 60413 - RNA, 19 nt, Homo sapiens
  misc_RNA (1)...(19): siRNA sense strand
uccgagaacuguugcagaa

SEQ ID NO: 60414 - RNA, 19 nt, Homo sapiens
  misc_RNA (1)...(19): siRNA sense strand
cgauacaacguguucaauu

SEQ ID NO: 60415 - RNA, 19 nt, Homo sapiens
  misc_RNA (1)...(19): siRNA sense strand
guuguuugcuauugaugaa

SEQ ID NO: 60416 - RNA, 19 nt, Homo sapiens
  misc_RNA (1)...(19): siRNA sense strand
acugcaaguucuuaccuua

SEQ ID NO: 60417 - RNA, 19 nt, Homo sapiens
  misc_RNA (1)...(19): siRNA sense strand
gauagcauagucaaguuug

SEQ ID NO: 60418 - RNA, 19 nt, Homo sapiens
  misc_RNA (1)...(19): siRNA sense strand
ccauguuguuugcuauuga

SEQ ID NO: 60419 - RNA, 19 nt, Homo sapiens
  misc_RNA (1)...(19): siRNA sense strand
ucucuuaccuacgauguga

SEQ ID NO: 60420 - RNA, 19 nt, Homo sapiens
  misc_RNA (1)...(19): siRNA sense strand
ggaaacagucauccuaaaa

SEQ ID NO: 60421 - RNA, 19 nt, Homo sapiens
  misc_RNA (1)...(19): siRNA sense strand
gcgggaaacagucauccua

SEQ ID NO: 60422 - RNA, 19 nt, Homo sapiens
  misc_RNA (1)...(19): siRNA sense strand
ggucugauccuggugcaaa

SEQ ID NO: 60423 - RNA, 19 nt, Homo sapiens
  misc_RNA (1)...(19): siRNA sense strand
gaagaaguuguacaaggau

SEQ ID NO: 60424 - RNA, 19 nt, Homo sapiens
  misc_RNA (1)...(19): siRNA sense strand
gcaagaguccaagaucaug

SEQ ID NO: 60425 - RNA, 19 nt, Homo sapiens
  misc_RNA (1)...(19): siRNA sense strand
ugaagaaugugggcgaauc

SEQ ID NO: 60426 - RNA, 19 nt, Homo sapiens
  misc_RNA (1)...(19): siRNA sense strand
uggaugaagcugaguauau

SEQ ID NO: 60427 - RNA, 19 nt, Homo sapiens
  misc_RNA (1)...(19): siRNA sense strand
gagaagcgggaaacaguca

SEQ ID NO: 60428 - RNA, 19 nt, Homo sapiens
  misc_RNA (1)...(19): siRNA sense strand
ggaguuccuucgcuaucug

SEQ ID NO: 60429 - RNA, 19 nt, Homo sapiens
  misc_RNA (1)...(19): siRNA sense strand
aguccaagaucauguuugu

SEQ ID NO: 60430 - RNA, 19 nt, Homo sapiens
  misc_RNA (1)...(19): siRNA sense strand
acgcggaagugcccagaaa

SEQ ID NO: 60431 - RNA, 19 nt, Homo sapiens
  misc_RNA (1)...(19): siRNA sense strand
gcauguugaucucucuuac

SEQ ID NO: 60432 - RNA, 19 nt, Homo sapiens
  misc_RNA (1)...(19): siRNA sense strand
cagagaagcgggaaacagu

SEQ ID NO: 60433 - RNA, 19 nt, Homo sapiens
  misc_RNA (1)...(19): siRNA sense strand
gccgagaacucugcuacau

SEQ ID NO: 60434 - RNA, 19 nt, Homo sapiens
  misc_RNA (1)...(19): siRNA sense strand
agaaguuguacaaggauua

SEQ ID NO: 60435 - RNA, 19 nt, Homo sapiens
  misc_RNA (1)...(19): siRNA sense strand
acaagcaccuggccaucga

SEQ ID NO: 60436 - RNA, 19 nt, Homo sapiens
  misc_RNA (1)...(19): siRNA sense strand
gaucuuaugcacuguguac

SEQ ID NO: 60437 - RNA, 19 nt, Homo sapiens
  misc_RNA (1)...(19): siRNA sense strand
ccaggcaccaggagguaua

SEQ ID NO: 60438 - RNA, 19 nt, Homo sapiens
  misc_RNA (1)...(19): siRNA sense strand
gaccaagacaaacugcauu

SEQ ID NO: 60439 - RNA, 19 nt, Homo sapiens
  misc_RNA (1)...(19): siRNA sense strand
guuggucacugggcagaaa

SEQ ID NO: 60440 - RNA, 19 nt, Homo sapiens
  misc_RNA (1)...(19): siRNA sense strand
caacccaaauaaagaugca

SEQ ID NO: 60441 - RNA, 19 nt, Homo sapiens
  misc_RNA (1)...(19): siRNA sense strand
ggccuuccucccuauauuu

SEQ ID NO: 60442 - RNA, 19 nt, Homo sapiens
  misc_RNA (1)...(19): siRNA sense strand
gucuugggcuguuuguuug

SEQ ID NO: 60443 - RNA, 19 nt, Homo sapiens
  misc_RNA (1)...(19): siRNA sense strand
gcacccagcugcuuaagua

SEQ ID NO: 60444 - RNA, 19 nt, Homo sapiens
  misc_RNA (1)...(19): siRNA sense strand
gcuaugacaucuaccaaua

SEQ ID NO: 60445 - RNA, 19 nt, Homo sapiens
  misc_RNA (1)...(19): siRNA sense strand
guggagaacuuaagaagga

SEQ ID NO: 60446 - RNA, 19 nt, Homo sapiens
  misc_RNA (1)...(19): siRNA sense strand
caacauccuucgccucuuc

SEQ ID NO: 60447 - RNA, 19 nt, Homo sapiens
  misc_RNA (1)...(19): siRNA sense strand
ccaacaaguucacgcagaa

SEQ ID NO: 60448 - RNA, 19 nt, Homo sapiens
  misc_RNA (1)...(19): siRNA sense strand
ccugugaccuucaaugaga

SEQ ID NO: 60449 - RNA, 19 nt, Homo sapiens
  misc_RNA (1)...(19): siRNA sense strand
gggcaucugugugugguuu

SEQ ID NO: 60450 - RNA, 19 nt, Homo sapiens
  misc_RNA (1)...(19): siRNA sense strand
caaacagacuuacgucacu

SEQ ID NO: 60451 - RNA, 19 nt, Homo sapiens
  misc_RNA (1)...(19): siRNA sense strand
caacagccgcuacgacuuc

SEQ ID NO: 60452 - RNA, 19 nt, Homo sapiens
  misc_RNA (1)...(19): siRNA sense strand
guaagacgugucccuauga

SEQ ID NO: 60453 - RNA, 19 nt, Homo sapiens
  misc_RNA (1)...(19): siRNA sense strand
gauggcacccagcugcuua

SEQ ID NO: 60454 - RNA, 19 nt, Homo sapiens
  misc_RNA (1)...(19): siRNA sense strand
gcagccacgucaagaagug

SEQ ID NO: 60455 - RNA, 19 nt, Homo sapiens
  misc_RNA (1)...(19): siRNA sense strand
gccaccaccuuccucauga

SEQ ID NO: 60456 - RNA, 19 nt, Homo sapiens
  misc_RNA (1)...(19): siRNA sense strand
gagggcagcuauggugaga

SEQ ID NO: 60457 - RNA, 19 nt, Homo sapiens
  misc_RNA (1)...(19): siRNA sense strand
ccaccugcaccuuagaaua

SEQ ID NO: 60458 - RNA, 19 nt, Homo sapiens
  misc_RNA (1)...(19): siRNA sense strand
ccagacaggccauuucuuc

SEQ ID NO: 60459 - RNA, 19 nt, Homo sapiens
  misc_RNA (1)...(19): siRNA sense strand
uguaagacgugucccuaug

SEQ ID NO: 60460 - RNA, 19 nt, Homo sapiens
  misc_RNA (1)...(19): siRNA sense strand
cccauuggcuucaccaugu

SEQ ID NO: 60461 - RNA, 19 nt, Homo sapiens
  misc_RNA (1)...(19): siRNA sense strand
gcgcauggacccuguagau

SEQ ID NO: 60462 - RNA, 19 nt, Homo sapiens
  misc_RNA (1)...(19): siRNA sense strand
caccaaccaugcaaucuag

SEQ ID NO: 60463 - RNA, 19 nt, Homo sapiens
  misc_RNA (1)...(19): siRNA sense strand
ggaacccugugaccuucaa

SEQ ID NO: 60464 - RNA, 19 nt, Homo sapiens
  misc_RNA (1)...(19): siRNA sense strand
gcaccaaccgugagcgaau

SEQ ID NO: 60465 - RNA, 19 nt, Homo sapiens
  misc_RNA (1)...(19): siRNA sense strand
agucugagcucugcgagaa

SEQ ID NO: 60466 - RNA, 19 nt, Homo sapiens
  misc_RNA (1)...(19): siRNA sense strand
ccauuggcuucaccaugua

SEQ ID NO: 60467 - RNA, 19 nt, Homo sapiens
  misc_RNA (1)...(19): siRNA sense strand
caaaggccacccucacaug

SEQ ID NO: 60468 - RNA, 19 nt, Homo sapiens
  misc_RNA (1)...(19): siRNA sense strand
gagcggaagaagacaguga

SEQ ID NO: 60469 - RNA, 19 nt, Homo sapiens
  misc_RNA (1)...(19): siRNA sense strand
caacggagaggccaagucu

SEQ ID NO: 60470 - RNA, 19 nt, Homo sapiens
  misc_RNA (1)...(19): siRNA sense strand
ugaauuccauccgcauaga

SEQ ID NO: 60471 - RNA, 19 nt, Homo sapiens
  misc_RNA (1)...(19): siRNA sense strand
ccagggcagucaucaucuu

SEQ ID NO: 60472 - RNA, 19 nt, Homo sapiens
  misc_RNA (1)...(19): siRNA sense strand
gaaggugcaguuugugauc

SEQ ID NO: 60473 - RNA, 19 nt, Homo sapiens
  misc_RNA (1)...(19): siRNA sense strand
gggaaggugcaguuuguga

SEQ ID NO: 60474 - RNA, 19 nt, Homo sapiens
  misc_RNA (1)...(19): siRNA sense strand
ugcaggcgcucaucgagaa

SEQ ID NO: 60475 - RNA, 19 nt, Homo sapiens
  misc_RNA (1)...(19): siRNA sense strand
gccgcacgcuggacaacaa

SEQ ID NO: 60476 - RNA, 19 nt, Homo sapiens
  misc_RNA (1)...(19): siRNA sense strand
acccggaccugcugccuaa

SEQ ID NO: 60477 - RNA, 19 nt, Homo sapiens
  misc_RNA (1)...(19): siRNA sense strand
aaacagacuuacgucacuu

SEQ ID NO: 60478 - RNA, 19 nt, Homo sapiens
  misc_RNA (1)...(19): siRNA sense strand
gcccaaagucuacaucauc

SEQ ID NO: 60479 - RNA, 19 nt, Homo sapiens
  misc_RNA (1)...(19): siRNA sense strand
gcaggcgaguucgacaaga

SEQ ID NO: 60480 - RNA, 19 nt, Homo sapiens
  misc_RNA (1)...(19): siRNA sense strand
gaccuucaaugagaaugga

SEQ ID NO: 60481 - RNA, 19 nt, Homo sapiens
  misc_RNA (1)...(19): siRNA sense strand
ggaaggugcaguuugugau

SEQ ID NO: 60482 - RNA, 19 nt, Homo sapiens
  misc_RNA (1)...(19): siRNA sense strand
gggcaggauucagcuuaug

SEQ ID NO: 60483 - RNA, 19 nt, Homo sapiens
  misc_RNA (1)...(19): siRNA sense strand
caucugguuugccgaguuc

SEQ ID NO: 60484 - RNA, 19 nt, Homo sapiens
  misc_RNA (1)...(19): siRNA sense strand
gcccucaaguggaacuaug

SEQ ID NO: 60485 - RNA, 19 nt, Homo sapiens
  misc_RNA (1)...(19): siRNA sense strand
ccgacaagcuguacaucca

SEQ ID NO: 60486 - RNA, 19 nt, Homo sapiens
  misc_RNA (1)...(19): siRNA sense strand
caccaaccgugagcgaauu

SEQ ID NO: 60487 - RNA, 19 nt, Homo sapiens
  misc_RNA (1)...(19): siRNA sense strand
gaagggcagccacgucaag

SEQ ID NO: 60488 - RNA, 19 nt, Homo sapiens
  misc_RNA (1)...(19): siRNA sense strand
caaccagacaggccauuuc

SEQ ID NO: 60489 - RNA, 19 nt, Homo sapiens
  misc_RNA (1)...(19): siRNA sense strand
gagcagucgcugaccuuug

SEQ ID NO: 60490 - RNA, 19 nt, Homo sapiens
  misc_RNA (1)...(19): siRNA sense strand
acaccaaccaugcaaucua

SEQ ID NO: 60491 - RNA, 19 nt, Homo sapiens
  misc_RNA (1)...(19): siRNA sense strand
agacuuacgucacuuacac

SEQ ID NO: 60492 - RNA, 19 nt, Homo sapiens
  misc_RNA (1)...(19): siRNA sense strand
caagcccuguggagaacuu

SEQ ID NO: 60493 - RNA, 19 nt, Homo sapiens
  misc_RNA (1)...(19): siRNA sense strand
gagcgaauugggcaggauu

SEQ ID NO: 60494 - RNA, 19 nt, Homo sapiens
  misc_RNA (1)...(19): siRNA sense strand
gaacgugugguggguguca

SEQ ID NO: 60495 - RNA, 19 nt, Homo sapiens
  misc_RNA (1)...(19): siRNA sense strand
ggagaacuuaagaaggaaa

SEQ ID NO: 60496 - RNA, 19 nt, Homo sapiens
  misc_RNA (1)...(19): siRNA sense strand
caccugcaccuuagaauag

SEQ ID NO: 60497 - RNA, 19 nt, Homo sapiens
  misc_RNA (1)...(19): siRNA sense strand
caggcgaguucgacaagau

SEQ ID NO: 60498 - RNA, 19 nt, Homo sapiens
  misc_RNA (1)...(19): siRNA sense strand
cgccagaccugagugacaa

SEQ ID NO: 60499 - RNA, 19 nt, Homo sapiens
  misc_RNA (1)...(19): siRNA sense strand
caugaauuccauccgcaua

SEQ ID NO: 60500 - RNA, 19 nt, Homo sapiens
  misc_RNA (1)...(19): siRNA sense strand
aaaggccacccucacauga

SEQ ID NO: 60501 - RNA, 19 nt, Homo sapiens
  misc_RNA (1)...(19): siRNA sense strand
gcccacccaucaucaccaa

SEQ ID NO: 60502 - RNA, 19 nt, Homo sapiens
  misc_RNA (1)...(19): siRNA sense strand
ggcaggauucagcuuauga

SEQ ID NO: 60503 - RNA, 19 nt, Homo sapiens
  misc_RNA (1)...(19): siRNA sense strand
gggcagucaucaucuuugc

SEQ ID NO: 60504 - RNA, 19 nt, Homo sapiens
  misc_RNA (1)...(19): siRNA sense strand
gaccugcugccuaacauca

SEQ ID NO: 60505 - RNA, 19 nt, Homo sapiens
  misc_RNA (1)...(19): siRNA sense strand
gcgcuggccaccaaacaga

SEQ ID NO: 60506 - RNA, 19 nt, Homo sapiens
  misc_RNA (1)...(19): siRNA sense strand
agcagucgcugaccuuugu

SEQ ID NO: 60507 - RNA, 19 nt, Homo sapiens
  misc_RNA (1)...(19): siRNA sense strand
caucguccgugcccucaag

SEQ ID NO: 60508 - RNA, 19 nt, Homo sapiens
  misc_RNA (1)...(19): siRNA sense strand
acggagaggccaagucuga

SEQ ID NO: 60509 - RNA, 19 nt, Homo sapiens
  misc_RNA (1)...(19): siRNA sense strand
cauccgaaacgucaacuuc

SEQ ID NO: 60510 - RNA, 19 nt, Homo sapiens
  misc_RNA (1)...(19): siRNA sense strand
ugugaucgaugccguguac

SEQ ID NO: 60511 - RNA, 19 nt, Homo sapiens
  misc_RNA (1)...(19): siRNA sense strand
gagcucggucuccaucaug

SEQ ID NO: 60512 - RNA, 19 nt, Homo sapiens
  misc_RNA (1)...(19): siRNA sense strand
caccauguccaacaaguuc

SEQ ID NO: 60513 - RNA, 19 nt, Homo sapiens
  misc_RNA (1)...(19): siRNA sense strand
ccucacagcuggccaucac

SEQ ID NO: 60514 - RNA, 19 nt, Homo sapiens
  misc_RNA (1)...(19): siRNA sense strand
gaacgccagggcagucauc

SEQ ID NO: 60515 - RNA, 19 nt, Homo sapiens
  misc_RNA (1)...(19): siRNA sense strand
gcaucugugugugguuugu

SEQ ID NO: 60516 - RNA, 19 nt, Homo sapiens
  misc_RNA (1)...(19): siRNA sense strand
ccucaaagccgucguuacg

SEQ ID NO: 60517 - RNA, 19 nt, Homo sapiens
  misc_RNA (1)...(19): siRNA sense strand
cuacaugcccaaagucuac

SEQ ID NO: 60518 - RNA, 19 nt, Homo sapiens
  misc_RNA (1)...(19): siRNA sense strand
ggggugugcucaaguguga

SEQ ID NO: 60519 - RNA, 19 nt, Homo sapiens
  misc_RNA (1)...(19): siRNA sense strand
ccaaaggccacccucacau

SEQ ID NO: 60520 - RNA, 19 nt, Homo sapiens
  misc_RNA (1)...(19): siRNA sense strand
gaccaccugcaccuuagaa

SEQ ID NO: 60521 - RNA, 19 nt, Homo sapiens
  misc_RNA (1)...(19): siRNA sense strand
gggcagccacgucaagaag

SEQ ID NO: 60522 - RNA, 19 nt, Homo sapiens
  misc_RNA (1)...(19): siRNA sense strand
caccguguaugccaucaag

SEQ ID NO: 60523 - RNA, 19 nt, Homo sapiens
  misc_RNA (1)...(19): siRNA sense strand
ccaccaccuuccucaugau

SEQ ID NO: 60524 - RNA, 19 nt, Homo sapiens
  misc_RNA (1)...(19): siRNA sense strand
uaagacgugucccuaugac

SEQ ID NO: 60525 - RNA, 19 nt, Homo sapiens
  misc_RNA (1)...(19): siRNA sense strand
uuaaguacauccgaaacgu

SEQ ID NO: 60526 - RNA, 19 nt, Homo sapiens
  misc_RNA (1)...(19): siRNA sense strand
cagggcagucaucaucuuu

SEQ ID NO: 60527 - RNA, 19 nt, Homo sapiens
  misc_RNA (1)...(19): siRNA sense strand
gaauuccauccgcauagau

SEQ ID NO: 60528 - RNA, 19 nt, Homo sapiens
  misc_RNA (1)...(19): siRNA sense strand
ccaccaaacagacuuacgu

SEQ ID NO: 60529 - RNA, 19 nt, Homo sapiens
  misc_RNA (1)...(19): siRNA sense strand
cggccaccauguccaacaa

SEQ ID NO: 60530 - RNA, 19 nt, Homo sapiens
  misc_RNA (1)...(19): siRNA sense strand
ugcccgagaccuucaauga

SEQ ID NO: 60531 - RNA, 19 nt, Homo sapiens
  misc_RNA (1)...(19): siRNA sense strand
ucucggaccugucgcucau

SEQ ID NO: 60532 - RNA, 19 nt, Homo sapiens
  misc_RNA (1)...(19): siRNA sense strand
ggcaagcccuguggagaac

SEQ ID NO: 60533 - RNA, 19 nt, Homo sapiens
  misc_RNA (1)...(19): siRNA sense strand
caagaccaaccgcaucuac

SEQ ID NO: 60534 - RNA, 19 nt, Homo sapiens
  misc_RNA (1)...(19): siRNA sense strand
acugaccaccugcaccuua

SEQ ID NO: 60535 - RNA, 19 nt, Homo sapiens
  misc_RNA (1)...(19): siRNA sense strand
ccaaccagacaggccauuu

SEQ ID NO: 60536 - RNA, 19 nt, Homo sapiens
  misc_RNA (1)...(19): siRNA sense strand
guucugggaggacaacuuc

SEQ ID NO: 60537 - RNA, 19 nt, Homo sapiens
  misc_RNA (1)...(19): siRNA sense strand
ccaccauguccaacaaguu

SEQ ID NO: 60538 - RNA, 19 nt, Homo sapiens
  misc_RNA (1)...(19): siRNA sense strand
gcaucuaccgcaucuucga

SEQ ID NO: 60539 - RNA, 19 nt, Homo sapiens
  misc_RNA (1)...(19): siRNA sense strand
ccgcaucuaccgcaucuuc

SEQ ID NO: 60540 - RNA, 19 nt, Homo sapiens
  misc_RNA (1)...(19): siRNA sense strand
agacaggccauuucuucug

SEQ ID NO: 60541 - RNA, 19 nt, Homo sapiens
  misc_RNA (1)...(19): siRNA sense strand
gccaccauguccaacaagu

SEQ ID NO: 60542 - RNA, 19 nt, Homo sapiens
  misc_RNA (1)...(19): siRNA sense strand
aauaccagcugcgcaacga

SEQ ID NO: 60543 - RNA, 19 nt, Homo sapiens
  misc_RNA (1)...(19): siRNA sense strand
acaagacucuguucaaaua

SEQ ID NO: 60544 - RNA, 19 nt, Homo sapiens
  misc_RNA (1)...(19): siRNA sense strand
cauaagagauucccucauu

SEQ ID NO: 60545 - RNA, 19 nt, Homo sapiens
  misc_RNA (1)...(19): siRNA sense strand
gaagucagcuguuguugga

SEQ ID NO: 60546 - RNA, 19 nt, Homo sapiens
  misc_RNA (1)...(19): siRNA sense strand
ccaaacagauuuacugcua

SEQ ID NO: 60547 - RNA, 19 nt, Homo sapiens
  misc_RNA (1)...(19): siRNA sense strand
ugaagaagcucacaaguca

SEQ ID NO: 60548 - RNA, 19 nt, Homo sapiens
  misc_RNA (1)...(19): siRNA sense strand
ccagaaauguuccagcuaa

SEQ ID NO: 60549 - RNA, 19 nt, Homo sapiens
  misc_RNA (1)...(19): siRNA sense strand
gagauucccucauuucuuc

SEQ ID NO: 60550 - RNA, 19 nt, Homo sapiens
  misc_RNA (1)...(19): siRNA sense strand
gcauugaguucauaagaga

SEQ ID NO: 60551 - RNA, 19 nt, Homo sapiens
  misc_RNA (1)...(19): siRNA sense strand
ccaaggcgcuguaugaugu

SEQ ID NO: 60552 - RNA, 19 nt, Homo sapiens
  misc_RNA (1)...(19): siRNA sense strand
ccaggaagguaugaaauaa

SEQ ID NO: 60553 - RNA, 19 nt, Homo sapiens
  misc_RNA (1)...(19): siRNA sense strand
guacacgaccugcauuaua

SEQ ID NO: 60554 - RNA, 19 nt, Homo sapiens
  misc_RNA (1)...(19): siRNA sense strand
gcagagcauugaguucaua

SEQ ID NO: 60555 - RNA, 19 nt, Homo sapiens
  misc_RNA (1)...(19): siRNA sense strand
uaacaaagaccaaccguau

SEQ ID NO: 60556 - RNA, 19 nt, Homo sapiens
  misc_RNA (1)...(19): siRNA sense strand
gaaggcaacuauggagaaa

SEQ ID NO: 60557 - RNA, 19 nt, Homo sapiens
  misc_RNA (1)...(19): siRNA sense strand
ugacaagacucuguucaaa

SEQ ID NO: 60558 - RNA, 19 nt, Homo sapiens
  misc_RNA (1)...(19): siRNA sense strand
caucaucguugcccucuuu

SEQ ID NO: 60559 - RNA, 19 nt, Homo sapiens
  misc_RNA (1)...(19): siRNA sense strand
gaugaaguaugguccaaga

SEQ ID NO: 60560 - RNA, 19 nt, Homo sapiens
  misc_RNA (1)...(19): siRNA sense strand
caacuggaccuauguauca

SEQ ID NO: 60561 - RNA, 19 nt, Homo sapiens
  misc_RNA (1)...(19): siRNA sense strand
acacugggcugugagauaa

SEQ ID NO: 60562 - RNA, 19 nt, Homo sapiens
  misc_RNA (1)...(19): siRNA sense strand
agggaacucugcuacauua

SEQ ID NO: 60563 - RNA, 19 nt, Homo sapiens
  misc_RNA (1)...(19): siRNA sense strand
uugauaagcugcugaagaa

SEQ ID NO: 60564 - RNA, 19 nt, Homo sapiens
  misc_RNA (1)...(19): siRNA sense strand
gcacacagaaggcaacuau

SEQ ID NO: 60565 - RNA, 19 nt, Homo sapiens
  misc_RNA (1)...(19): siRNA sense strand
gagauacgauccuauucga

SEQ ID NO: 60566 - RNA, 19 nt, Homo sapiens
  misc_RNA (1)...(19): siRNA sense strand
ggagaaugaguaugucuuu

SEQ ID NO: 60567 - RNA, 19 nt, Homo sapiens
  misc_RNA (1)...(19): siRNA sense strand
guaaggagaaugaguaugu

SEQ ID NO: 60568 - RNA, 19 nt, Homo sapiens
  misc_RNA (1)...(19): siRNA sense strand
gaaugaguaugucuuugau

SEQ ID NO: 60569 - RNA, 19 nt, Homo sapiens
  misc_RNA (1)...(19): siRNA sense strand
caagugguuugaugauuau

SEQ ID NO: 60570 - RNA, 19 nt, Homo sapiens
  misc_RNA (1)...(19): siRNA sense strand
gaagaagaucuguaccaaa

SEQ ID NO: 60571 - RNA, 19 nt, Homo sapiens
  misc_RNA (1)...(19): siRNA sense strand
gcccuaggcugcauguuug

SEQ ID NO: 60572 - RNA, 19 nt, Homo sapiens
  misc_RNA (1)...(19): siRNA sense strand
caacauaccucagauugcu

SEQ ID NO: 60573 - RNA, 19 nt, Homo sapiens
  misc_RNA (1)...(19): siRNA sense strand
gcuagugauugcuuucauu

SEQ ID NO: 60574 - RNA, 19 nt, Homo sapiens
  misc_RNA (1)...(19): siRNA sense strand
ggucuuggcccacugauga

SEQ ID NO: 60575 - RNA, 19 nt, Homo sapiens
  misc_RNA (1)...(19): siRNA sense strand
uggaaaggaucaauucaga

SEQ ID NO: 60576 - RNA, 19 nt, Homo sapiens
  misc_RNA (1)...(19): siRNA sense strand
uacacgaccugcauuauau

SEQ ID NO: 60577 - RNA, 19 nt, Homo sapiens
  misc_RNA (1)...(19): siRNA sense strand
gcaagaagaagaucuguac

SEQ ID NO: 60578 - RNA, 19 nt, Homo sapiens
  misc_RNA (1)...(19): siRNA sense strand
gaacagcaaauacaacaag

SEQ ID NO: 60579 - RNA, 19 nt, Homo sapiens
  misc_RNA (1)...(19): siRNA sense strand
gcauggaucugagugacaa

SEQ ID NO: 60580 - RNA, 19 nt, Homo sapiens
  misc_RNA (1)...(19): siRNA sense strand
guauaucgccuucacaaug

SEQ ID NO: 60581 - RNA, 19 nt, Homo sapiens
  misc_RNA (1)...(19): siRNA sense strand
gaaauguuccagcuaacuu

SEQ ID NO: 60582 - RNA, 19 nt, Homo sapiens
  misc_RNA (1)...(19): siRNA sense strand
caucguugcccucuuuaua

SEQ ID NO: 60583 - RNA, 19 nt, Homo sapiens
  misc_RNA (1)...(19): siRNA sense strand
ggagaagucagcuguuguu

SEQ ID NO: 60584 - RNA, 19 nt, Homo sapiens
  misc_RNA (1)...(19): siRNA sense strand
gagcauugaguucauaaga

SEQ ID NO: 60585 - RNA, 19 nt, Homo sapiens
  misc_RNA (1)...(19): siRNA sense strand
ugacagguaugaugugaca

SEQ ID NO: 60586 - RNA, 19 nt, Homo sapiens
  misc_RNA (1)...(19): siRNA sense strand
ggugagaggucugcugaug

SEQ ID NO: 60587 - RNA, 19 nt, Homo sapiens
  misc_RNA (1)...(19): siRNA sense strand
gaaguaugguccaagaaaa

SEQ ID NO: 60588 - RNA, 19 nt, Homo sapiens
  misc_RNA (1)...(19): siRNA sense strand
ccaaauaugacacucuuau

SEQ ID NO: 60589 - RNA, 19 nt, Homo sapiens
  misc_RNA (1)...(19): siRNA sense strand
ucaacgaggccaaguauau

SEQ ID NO: 60590 - RNA, 19 nt, Homo sapiens
  misc_RNA (1)...(19): siRNA sense strand
gagcuacucagcccuugua

SEQ ID NO: 60591 - RNA, 19 nt, Homo sapiens
  misc_RNA (1)...(19): siRNA sense strand
gaacucugcuacauuaucc

SEQ ID NO: 60592 - RNA, 19 nt, Homo sapiens
  misc_RNA (1)...(19): siRNA sense strand
gagaaugaguaugucuuug

SEQ ID NO: 60593 - RNA, 19 nt, Homo sapiens
  misc_RNA (1)...(19): siRNA sense strand
ggaugaugaugaaguaugg

SEQ ID NO: 60594 - RNA, 19 nt, Homo sapiens
  misc_RNA (1)...(19): siRNA sense strand
acaaagaccaaccguauug

SEQ ID NO: 60595 - RNA, 19 nt, Homo sapiens
  misc_RNA (1)...(19): siRNA sense strand
acuguagucuucaucauuu

SEQ ID NO: 60596 - RNA, 19 nt, Homo sapiens
  misc_RNA (1)...(19): siRNA sense strand
gagcagagcauugaguuca

SEQ ID NO: 60597 - RNA, 19 nt, Homo sapiens
  misc_RNA (1)...(19): siRNA sense strand
uauaucgccuucacaaugu

SEQ ID NO: 60598 - RNA, 19 nt, Homo sapiens
  misc_RNA (1)...(19): siRNA sense strand
gccaauugauggacggaaa

SEQ ID NO: 60599 - RNA, 19 nt, Homo sapiens
  misc_RNA (1)...(19): siRNA sense strand
gagaacagcaaauacaaca

SEQ ID NO: 60600 - RNA, 19 nt, Homo sapiens
  misc_RNA (1)...(19): siRNA sense strand
gggagcagagcuuugauaa

SEQ ID NO: 60601 - RNA, 19 nt, Homo sapiens
  misc_RNA (1)...(19): siRNA sense strand
ggagugcacaguccaguga

SEQ ID NO: 60602 - RNA, 19 nt, Homo sapiens
  misc_RNA (1)...(19): siRNA sense strand
ccacuuggauacaauggau

SEQ ID NO: 60603 - RNA, 19 nt, Homo sapiens
  misc_RNA (1)...(19): siRNA sense strand
gaagucuaccugaucugua

SEQ ID NO: 60604 - RNA, 19 nt, Homo sapiens
  misc_RNA (1)...(19): siRNA sense strand
aagaagaucuguaccaaaa

SEQ ID NO: 60605 - RNA, 19 nt, Homo sapiens
  misc_RNA (1)...(19): siRNA sense strand
agaagaagaucuguaccaa

SEQ ID NO: 60606 - RNA, 19 nt, Homo sapiens
  misc_RNA (1)...(19): siRNA sense strand
aauggaugaugaugaagua

SEQ ID NO: 60607 - RNA, 19 nt, Homo sapiens
  misc_RNA (1)...(19): siRNA sense strand
uugggacaauggagaauua

SEQ ID NO: 60608 - RNA, 19 nt, Homo sapiens
  misc_RNA (1)...(19): siRNA sense strand
aggaagguaugaaauaaug

SEQ ID NO: 60609 - RNA, 19 nt, Homo sapiens
  misc_RNA (1)...(19): siRNA sense strand
cauugcagcugugguguuu

SEQ ID NO: 60610 - RNA, 19 nt, Homo sapiens
  misc_RNA (1)...(19): siRNA sense strand
ucacgugggcccagaauga

SEQ ID NO: 60611 - RNA, 19 nt, Homo sapiens
  misc_RNA (1)...(19): siRNA sense strand
gcgaagcccaaacagauuu

SEQ ID NO: 60612 - RNA, 19 nt, Homo sapiens
  misc_RNA (1)...(19): siRNA sense strand
gcugacagguaugauguga

SEQ ID NO: 60613 - RNA, 19 nt, Homo sapiens
  misc_RNA (1)...(19): siRNA sense strand
aagucuaccugaucuguaa

SEQ ID NO: 60614 - RNA, 19 nt, Homo sapiens
  misc_RNA (1)...(19): siRNA sense strand
auaagagauucccucauuu

SEQ ID NO: 60615 - RNA, 19 nt, Homo sapiens
  misc_RNA (1)...(19): siRNA sense strand
cgagaagucuaccugaucu

SEQ ID NO: 60616 - RNA, 19 nt, Homo sapiens
  misc_RNA (1)...(19): siRNA sense strand
ugaaguaugguccaagaaa

SEQ ID NO: 60617 - RNA, 19 nt, Homo sapiens
  misc_RNA (1)...(19): siRNA sense strand
uaucagccgugcacacaga

SEQ ID NO: 60618 - RNA, 19 nt, Homo sapiens
  misc_RNA (1)...(19): siRNA sense strand
uaagagauucccucauuuc

SEQ ID NO: 60619 - RNA, 19 nt, Homo sapiens
  misc_RNA (1)...(19): siRNA sense strand
cgucgucucccaaauauga

SEQ ID NO: 60620 - RNA, 19 nt, Homo sapiens
  misc_RNA (1)...(19): siRNA sense strand
cuacucagcccuuguaaca

SEQ ID NO: 60621 - RNA, 19 nt, Homo sapiens
  misc_RNA (1)...(19): siRNA sense strand
guagucaaguccucaagca

SEQ ID NO: 60622 - RNA, 19 nt, Homo sapiens
  misc_RNA (1)...(19): siRNA sense strand
gaguaugucuuugaugagu

SEQ ID NO: 60623 - RNA, 19 nt, Homo sapiens
  misc_RNA (1)...(19): siRNA sense strand
ccuaugggcuccacaacau

SEQ ID NO: 60624 - RNA, 19 nt, Homo sapiens
  misc_RNA (1)...(19): siRNA sense strand
gcuccaaucucccgauguc

SEQ ID NO: 60625 - RNA, 19 nt, Homo sapiens
  misc_RNA (1)...(19): siRNA sense strand
gggucuagcgggagaauuu

SEQ ID NO: 60626 - RNA, 19 nt, Homo sapiens
  misc_RNA (1)...(19): siRNA sense strand
gcaaccagcauggaucuga

SEQ ID NO: 60627 - RNA, 19 nt, Homo sapiens
  misc_RNA (1)...(19): siRNA sense strand
gacaagacucuguucaaau

SEQ ID NO: 60628 - RNA, 19 nt, Homo sapiens
  misc_RNA (1)...(19): siRNA sense strand
ccacgaccaugacgaccuu

SEQ ID NO: 60629 - RNA, 19 nt, Homo sapiens
  misc_RNA (1)...(19): siRNA sense strand
gaacaguauggcauucaga

SEQ ID NO: 60630 - RNA, 19 nt, Homo sapiens
  misc_RNA (1)...(19): siRNA sense strand
ucagaucugugugcaguga

SEQ ID NO: 60631 - RNA, 19 nt, Homo sapiens
  misc_RNA (1)...(19): siRNA sense strand
guggauggcuccuccucuu

SEQ ID NO: 60632 - RNA, 19 nt, Homo sapiens
  misc_RNA (1)...(19): siRNA sense strand
gcagugaaccaugugagaa

SEQ ID NO: 60633 - RNA, 19 nt, Homo sapiens
  misc_RNA (1)...(19): siRNA sense strand
aaagcaacaucaucagauc

SEQ ID NO: 60634 - RNA, 19 nt, Homo sapiens
  misc_RNA (1)...(19): siRNA sense strand
uggcugggcugacagguau

SEQ ID NO: 60635 - RNA, 19 nt, Homo sapiens
  misc_RNA (1)...(19): siRNA sense strand
gaucaacgccaucuauucg

SEQ ID NO: 60636 - RNA, 19 nt, Homo sapiens
  misc_RNA (1)...(19): siRNA sense strand
ucagcgagcucaacuccau

SEQ ID NO: 60637 - RNA, 19 nt, Homo sapiens
  misc_RNA (1)...(19): siRNA sense strand
ugccugggcuacuuaugua

SEQ ID NO: 60638 - RNA, 19 nt, Homo sapiens
  misc_RNA (1)...(19): siRNA sense strand
augaguaugucuuugauga

SEQ ID NO: 60639 - RNA, 19 nt, Homo sapiens
  misc_RNA (1)...(19): siRNA sense strand
agaaugaguaugucuuuga

SEQ ID NO: 60640 - RNA, 19 nt, Homo sapiens
  misc_RNA (1)...(19): siRNA sense strand
ggacaauggagaauuaaaa

SEQ ID NO: 60641 - RNA, 19 nt, Homo sapiens
  misc_RNA (1)...(19): siRNA sense strand
ggcccuaggcugcauguuu

SEQ ID NO: 60642 - RNA, 19 nt, Homo sapiens
  misc_RNA (1)...(19): siRNA sense strand
ccaaacggccgucaucaag

SEQ ID NO: 60643 - RNA, 19 nt, Homo sapiens
  misc_RNA (1)...(19): siRNA sense strand
gcacugggauggaacuaug

SEQ ID NO: 60644 - RNA, 19 nt, Homo sapiens
  misc_RNA (1)...(19): siRNA sense strand
gguacgacaucuuccagua

SEQ ID NO: 60645 - RNA, 19 nt, Homo sapiens
  misc_RNA (1)...(19): siRNA sense strand
gggcaacuauggcgaaagu

SEQ ID NO: 60646 - RNA, 19 nt, Homo sapiens
  misc_RNA (1)...(19): siRNA sense strand
gccaagaccucacccaucu

SEQ ID NO: 60647 - RNA, 19 nt, Homo sapiens
  misc_RNA (1)...(19): siRNA sense strand
gagaacaaccgcaggaaca

SEQ ID NO: 60648 - RNA, 19 nt, Homo sapiens
  misc_RNA (1)...(19): siRNA sense strand
ggcggaugcuucugcagua

SEQ ID NO: 60649 - RNA, 19 nt, Homo sapiens
  misc_RNA (1)...(19): siRNA sense strand
caaaugcacaggcgaggaa

SEQ ID NO: 60650 - RNA, 19 nt, Homo sapiens
  misc_RNA (1)...(19): siRNA sense strand
cgacggauuugaccaguac

SEQ ID NO: 60651 - RNA, 19 nt, Homo sapiens
  misc_RNA (1)...(19): siRNA sense strand
guacaccaccugcaucauc

SEQ ID NO: 60652 - RNA, 19 nt, Homo sapiens
  misc_RNA (1)...(19): siRNA sense strand
aaaccuacgucauccucuu

SEQ ID NO: 60653 - RNA, 19 nt, Homo sapiens
  misc_RNA (1)...(19): siRNA sense strand
acagcgugauugacuauga

SEQ ID NO: 60654 - RNA, 19 nt, Homo sapiens
  misc_RNA (1)...(19): siRNA sense strand
gagggcaacuauggcgaaa

SEQ ID NO: 60655 - RNA, 19 nt, Homo sapiens
  misc_RNA (1)...(19): siRNA sense strand
caaggugcaguuugugauu

SEQ ID NO: 60656 - RNA, 19 nt, Homo sapiens
  misc_RNA (1)...(19): siRNA sense strand
cagcucagguacccaguca

SEQ ID NO: 60657 - RNA, 19 nt, Homo sapiens
  misc_RNA (1)...(19): siRNA sense strand
guugaggccuucguucaga

SEQ ID NO: 60658 - RNA, 19 nt, Homo sapiens
  misc_RNA (1)...(19): siRNA sense strand
gcucagguacccagucaga

SEQ ID NO: 60659 - RNA, 19 nt, Homo sapiens
  misc_RNA (1)...(19): siRNA sense strand
caaccugaccggccacuuc

SEQ ID NO: 60660 - RNA, 19 nt, Homo sapiens
  misc_RNA (1)...(19): siRNA sense strand
ucaccaagaccaaccguau

SEQ ID NO: 60661 - RNA, 19 nt, Homo sapiens
  misc_RNA (1)...(19): siRNA sense strand
augcagaggcccacaagua

SEQ ID NO: 60662 - RNA, 19 nt, Homo sapiens
  misc_RNA (1)...(19): siRNA sense strand
guaucuaccgcaucuuuga

SEQ ID NO: 60663 - RNA, 19 nt, Homo sapiens
  misc_RNA (1)...(19): siRNA sense strand
ccacacagcgugauugacu

SEQ ID NO: 60664 - RNA, 19 nt, Homo sapiens
  misc_RNA (1)...(19): siRNA sense strand
caacgugcugcgccuguuu

SEQ ID NO: 60665 - RNA, 19 nt, Homo sapiens
  misc_RNA (1)...(19): siRNA sense strand
gggccuccaucgacggauu

SEQ ID NO: 60666 - RNA, 19 nt, Homo sapiens
  misc_RNA (1)...(19): siRNA sense strand
gcaaggugcaguuugugau

SEQ ID NO: 60667 - RNA, 19 nt, Homo sapiens
  misc_RNA (1)...(19): siRNA sense strand
gaacaaccgcaggaacauc

SEQ ID NO: 60668 - RNA, 19 nt, Homo sapiens
  misc_RNA (1)...(19): siRNA sense strand
ugagggcacugggauggaa

SEQ ID NO: 60669 - RNA, 19 nt, Homo sapiens
  misc_RNA (1)...(19): siRNA sense strand
gggcagagacccucagacu

SEQ ID NO: 60670 - RNA, 19 nt, Homo sapiens
  misc_RNA (1)...(19): siRNA sense strand
gaaccaaagccaggagagu

SEQ ID NO: 60671 - RNA, 19 nt, Homo sapiens
  misc_RNA (1)...(19): siRNA sense strand
gcaaggugaucaggagacu

SEQ ID NO: 60672 - RNA, 19 nt, Homo sapiens
  misc_RNA (1)...(19): siRNA sense strand
ggaugcuucugcaguacau

SEQ ID NO: 60673 - RNA, 19 nt, Homo sapiens
  misc_RNA (1)...(19): siRNA sense strand
ccagucagcugaaaagauc

SEQ ID NO: 60674 - RNA, 19 nt, Homo sapiens
  misc_RNA (1)...(19): siRNA sense strand
ggauuugaccaguacuuca

SEQ ID NO: 60675 - RNA, 19 nt, Homo sapiens
  misc_RNA (1)...(19): siRNA sense strand
cacacagcgugauugacua

SEQ ID NO: 60676 - RNA, 19 nt, Homo sapiens
  misc_RNA (1)...(19): siRNA sense strand
ucagguacccagucagaug

SEQ ID NO: 60677 - RNA, 19 nt, Homo sapiens
  misc_RNA (1)...(19): siRNA sense strand
caggagaguucagcaaggu

SEQ ID NO: 60678 - RNA, 19 nt, Homo sapiens
  misc_RNA (1)...(19): siRNA sense strand
cccaucggcuucaccaugu

SEQ ID NO: 60679 - RNA, 19 nt, Homo sapiens
  misc_RNA (1)...(19): siRNA sense strand
gcacaguguacgccaucaa

SEQ ID NO: 60680 - RNA, 19 nt, Homo sapiens
  misc_RNA (1)...(19): siRNA sense strand
ccucacagcuggucaucac

SEQ ID NO: 60681 - RNA, 19 nt, Homo sapiens
  misc_RNA (1)...(19): siRNA sense strand
ggagggcaaggugcaguuu

SEQ ID NO: 60682 - RNA, 19 nt, Homo sapiens
  misc_RNA (1)...(19): siRNA sense strand
gaugauuccacccgcaaau

SEQ ID NO: 60683 - RNA, 19 nt, Homo sapiens
  misc_RNA (1)...(19): siRNA sense strand
cagagcagaaugugcagaa

SEQ ID NO: 60684 - RNA, 19 nt, Homo sapiens
  misc_RNA (1)...(19): siRNA sense strand
ugucggaucugucucucau

SEQ ID NO: 60685 - RNA, 19 nt, Homo sapiens
  misc_RNA (1)...(19): siRNA sense strand
ggcaaggugcaguuuguga

SEQ ID NO: 60686 - RNA, 19 nt, Homo sapiens
  misc_RNA (1)...(19): siRNA sense strand
agaaugugcagaagcgaaa

SEQ ID NO: 60687 - RNA, 19 nt, Homo sapiens
  misc_RNA (1)...(19): siRNA sense strand
cagguacccagucagauga

SEQ ID NO: 60688 - RNA, 19 nt, Homo sapiens
  misc_RNA (1)...(19): siRNA sense strand
ccaucggcuucaccaugua

SEQ ID NO: 60689 - RNA, 19 nt, Homo sapiens
  misc_RNA (1)...(19): siRNA sense strand
ccagaggggugcucaagug

SEQ ID NO: 60690 - RNA, 19 nt, Homo sapiens
  misc_RNA (1)...(19): siRNA sense strand
cacacgcuaugacuucuuc

SEQ ID NO: 60691 - RNA, 19 nt, Homo sapiens
  misc_RNA (1)...(19): siRNA sense strand
cucgaucccuggagaacaa

SEQ ID NO: 60692 - RNA, 19 nt, Homo sapiens
  misc_RNA (1)...(19): siRNA sense strand
caagaccaaccguaucuac

SEQ ID NO: 60693 - RNA, 19 nt, Homo sapiens
  misc_RNA (1)...(19): siRNA sense strand
gguacccagucagaugauu

SEQ ID NO: 60694 - RNA, 19 nt, Homo sapiens
  misc_RNA (1)...(19): siRNA sense strand
gauuugaccaguacuucau

SEQ ID NO: 60695 - RNA, 19 nt, Homo sapiens
  misc_RNA (1)...(19): siRNA sense strand
ccaacgugcugcgccuguu

SEQ ID NO: 60696 - RNA, 19 nt, Homo sapiens
  misc_RNA (1)...(19): siRNA sense strand
gcuacagccuccugcucau

SEQ ID NO: 60697 - RNA, 19 nt, Homo sapiens
  misc_RNA (1)...(19): siRNA sense strand
ucgacggauuugaccagua

SEQ ID NO: 60698 - RNA, 19 nt, Homo sapiens
  misc_RNA (1)...(19): siRNA sense strand
gaugcgguguaugccauug

SEQ ID NO: 60699 - RNA, 19 nt, Homo sapiens
  misc_RNA (1)...(19): siRNA sense strand
gccgaguucugggaagaga

SEQ ID NO: 60700 - RNA, 19 nt, Homo sapiens
  misc_RNA (1)...(19): siRNA sense strand
caucaucaucuuugccaau

SEQ ID NO: 60701 - RNA, 19 nt, Homo sapiens
  misc_RNA (1)...(19): siRNA sense strand
gugcucaagugcgacaugu

SEQ ID NO: 60702 - RNA, 19 nt, Homo sapiens
  misc_RNA (1)...(19): siRNA sense strand
ccguaucuaccgcaucuuu

SEQ ID NO: 60703 - RNA, 19 nt, Homo sapiens
  misc_RNA (1)...(19): siRNA sense strand
aaccguaucuaccgcaucu

SEQ ID NO: 60704 - RNA, 19 nt, Homo sapiens
  misc_RNA (1)...(19): siRNA sense strand
cgccaucaccuuccucaug

SEQ ID NO: 60705 - RNA, 19 nt, Homo sapiens
  misc_RNA (1)...(19): siRNA sense strand
guauugcccagucuaucaa

SEQ ID NO: 60706 - RNA, 19 nt, Homo sapiens
  misc_RNA (1)...(19): siRNA sense strand
aaggugcaguuugugauug

SEQ ID NO: 60707 - RNA, 19 nt, Homo sapiens
  misc_RNA (1)...(19): siRNA sense strand
guacccagucagaugauuc

SEQ ID NO: 60708 - RNA, 19 nt, Homo sapiens
  misc_RNA (1)...(19): siRNA sense strand
gggaagagaauuuuaacug

SEQ ID NO: 60709 - RNA, 19 nt, Homo sapiens
  misc_RNA (1)...(19): siRNA sense strand
ggguugaggccuucguuca

SEQ ID NO: 60710 - RNA, 19 nt, Homo sapiens
  misc_RNA (1)...(19): siRNA sense strand
ugcccagucuaucaagauu

SEQ ID NO: 60711 - RNA, 19 nt, Homo sapiens
  misc_RNA (1)...(19): siRNA sense strand
uguauugcccagucuauca

SEQ ID NO: 60712 - RNA, 19 nt, Homo sapiens
  misc_RNA (1)...(19): siRNA sense strand
gagggcaaggugcaguuug

SEQ ID NO: 60713 - RNA, 19 nt, Homo sapiens
  misc_RNA (1)...(19): siRNA sense strand
aaagaucuacauccagaca

SEQ ID NO: 60714 - RNA, 19 nt, Homo sapiens
  misc_RNA (1)...(19): siRNA sense strand
cgugauugacuaugaggaa

SEQ ID NO: 60715 - RNA, 19 nt, Homo sapiens
  misc_RNA (1)...(19): siRNA sense strand
cagcgugauugacuaugag

SEQ ID NO: 60716 - RNA, 19 nt, Homo sapiens
  misc_RNA (1)...(19): siRNA sense strand
acacagcgugauugacuau

SEQ ID NO: 60717 - RNA, 19 nt, Homo sapiens
  misc_RNA (1)...(19): siRNA sense strand
ugugauugaugcgguguau

SEQ ID NO: 60718 - RNA, 19 nt, Homo sapiens
  misc_RNA (1)...(19): siRNA sense strand
ggcuggaggccaugcugua

SEQ ID NO: 60719 - RNA, 19 nt, Homo sapiens
  misc_RNA (1)...(19): siRNA sense strand
gaaaguaguuggagugauu

SEQ ID NO: 60720 - RNA, 19 nt, Homo sapiens
  misc_RNA (1)...(19): siRNA sense strand
ggcaaucacuuccaguuua

SEQ ID NO: 60721 - RNA, 19 nt, Homo sapiens
  misc_RNA (1)...(19): siRNA sense strand
caaaagagcugaccaaguu

SEQ ID NO: 60722 - RNA, 19 nt, Homo sapiens
  misc_RNA (1)...(19): siRNA sense strand
gcaaucacuuccaguuuaa

SEQ ID NO: 60723 - RNA, 19 nt, Homo sapiens
  misc_RNA (1)...(19): siRNA sense strand
cagaagaaauguaugguuu

SEQ ID NO: 60724 - RNA, 19 nt, Homo sapiens
  misc_RNA (1)...(19): siRNA sense strand
gaaaagcucuacauacaaa

SEQ ID NO: 60725 - RNA, 19 nt, Homo sapiens
  misc_RNA (1)...(19): siRNA sense strand
caacagugaucccaaccua

SEQ ID NO: 60726 - RNA, 19 nt, Homo sapiens
  misc_RNA (1)...(19): siRNA sense strand
guuaugacaucuuucagua

SEQ ID NO: 60727 - RNA, 19 nt, Homo sapiens
  misc_RNA (1)...(19): siRNA sense strand
gcaaagacaggaccauuga

SEQ ID NO: 60728 - RNA, 19 nt, Homo sapiens
  misc_RNA (1)...(19): siRNA sense strand
gaacuucagcucaauauag

SEQ ID NO: 60729 - RNA, 19 nt, Homo sapiens
  misc_RNA (1)...(19): siRNA sense strand
agaaguugcugaaguauau

SEQ ID NO: 60730 - RNA, 19 nt, Homo sapiens
  misc_RNA (1)...(19): siRNA sense strand
ucacgcagauuuccaaaga

SEQ ID NO: 60731 - RNA, 19 nt, Homo sapiens
  misc_RNA (1)...(19): siRNA sense strand
ggauauagcauucuucuca

SEQ ID NO: 60732 - RNA, 19 nt, Homo sapiens
  misc_RNA (1)...(19): siRNA sense strand
uaaaggaguccgagagaua

SEQ ID NO: 60733 - RNA, 19 nt, Homo sapiens
  misc_RNA (1)...(19): siRNA sense strand
gcaugaagauaucgcagaa

SEQ ID NO: 60734 - RNA, 19 nt, Homo sapiens
  misc_RNA (1)...(19): siRNA sense strand
gaaaguguacaucaucauu

SEQ ID NO: 60735 - RNA, 19 nt, Homo sapiens
  misc_RNA (1)...(19): siRNA sense strand
gaucauugccaccaucuuu

SEQ ID NO: 60736 - RNA, 19 nt, Homo sapiens
  misc_RNA (1)...(19): siRNA sense strand
gaccagaggcccaaugaaa

SEQ ID NO: 60737 - RNA, 19 nt, Homo sapiens
  misc_RNA (1)...(19): siRNA sense strand
ggauuuaucgcauauuuga

SEQ ID NO: 60738 - RNA, 19 nt, Homo sapiens
  misc_RNA (1)...(19): siRNA sense strand
gaaaagauuccaacuauga

SEQ ID NO: 60739 - RNA, 19 nt, Homo sapiens
  misc_RNA (1)...(19): siRNA sense strand
gaaagaagacacagaaagg

SEQ ID NO: 60740 - RNA, 19 nt, Homo sapiens
  misc_RNA (1)...(19): siRNA sense strand
gaaggaaguuauggagaga

SEQ ID NO: 60741 - RNA, 19 nt, Homo sapiens
  misc_RNA (1)...(19): siRNA sense strand
gcccuaggcuggaauuaug

SEQ ID NO: 60742 - RNA, 19 nt, Homo sapiens
  misc_RNA (1)...(19): siRNA sense strand
guucucaagugugacauua

SEQ ID NO: 60743 - RNA, 19 nt, Homo sapiens
  misc_RNA (1)...(19): siRNA sense strand
uuacagaucuccaaaucau

SEQ ID NO: 60744 - RNA, 19 nt, Homo sapiens
  misc_RNA (1)...(19): siRNA sense strand
caucgaggcugucacacaa

SEQ ID NO: 60745 - RNA, 19 nt, Homo sapiens
  misc_RNA (1)...(19): siRNA sense strand
gaaaacaacagaagaaaug

SEQ ID NO: 60746 - RNA, 19 nt, Homo sapiens
  misc_RNA (1)...(19): siRNA sense strand
gcacaggacaggagagaau

SEQ ID NO: 60747 - RNA, 19 nt, Homo sapiens
  misc_RNA (1)...(19): siRNA sense strand
gaagaaauguaugguuugc

SEQ ID NO: 60748 - RNA, 19 nt, Homo sapiens
  misc_RNA (1)...(19): siRNA sense strand
gaugaacacaagacaauga

SEQ ID NO: 60749 - RNA, 19 nt, Homo sapiens
  misc_RNA (1)...(19): siRNA sense strand
gcaccagcaugaagauauc

SEQ ID NO: 60750 - RNA, 19 nt, Homo sapiens
  misc_RNA (1)...(19): siRNA sense strand
ggacaggagagaauuggaa

SEQ ID NO: 60751 - RNA, 19 nt, Homo sapiens
  misc_RNA (1)...(19): siRNA sense strand
ugaacucaauguccagaaa

SEQ ID NO: 60752 - RNA, 19 nt, Homo sapiens
  misc_RNA (1)...(19): siRNA sense strand
agacacagaucgcaaaugc

SEQ ID NO: 60753 - RNA, 19 nt, Homo sapiens
  misc_RNA (1)...(19): siRNA sense strand
caaacuaccacgcuuacaa

SEQ ID NO: 60754 - RNA, 19 nt, Homo sapiens
  misc_RNA (1)...(19): siRNA sense strand
cauuacagaucuccaaauc

SEQ ID NO: 60755 - RNA, 19 nt, Homo sapiens
  misc_RNA (1)...(19): siRNA sense strand
cgaaccggaugccaggaua

SEQ ID NO: 60756 - RNA, 19 nt, Homo sapiens
  misc_RNA (1)...(19): siRNA sense strand
ccagauuaguuaugcauca

SEQ ID NO: 60757 - RNA, 19 nt, Homo sapiens
  misc_RNA (1)...(19): siRNA sense strand
ugacgggcaucuuucuuug

SEQ ID NO: 60758 - RNA, 19 nt, Homo sapiens
  misc_RNA (1)...(19): siRNA sense strand
agacaggaccauugacuuu

SEQ ID NO: 60759 - RNA, 19 nt, Homo sapiens
  misc_RNA (1)...(19): siRNA sense strand
caacagaagaaauguaugg

SEQ ID NO: 60760 - RNA, 19 nt, Homo sapiens
  misc_RNA (1)...(19): siRNA sense strand
ucggauuuaucgcauauuu

SEQ ID NO: 60761 - RNA, 19 nt, Homo sapiens
  misc_RNA (1)...(19): siRNA sense strand
ugaaguauauacgcaaugu

SEQ ID NO: 60762 - RNA, 19 nt, Homo sapiens
  misc_RNA (1)...(19): siRNA sense strand
gauauagcauucuucucau

SEQ ID NO: 60763 - RNA, 19 nt, Homo sapiens
  misc_RNA (1)...(19): siRNA sense strand
acaggaccauugacuuuga

SEQ ID NO: 60764 - RNA, 19 nt, Homo sapiens
  misc_RNA (1)...(19): siRNA sense strand
ccauuggauucacuaugua

SEQ ID NO: 60765 - RNA, 19 nt, Homo sapiens
  misc_RNA (1)...(19): siRNA sense strand
gagaaagaagacacagaaa

SEQ ID NO: 60766 - RNA, 19 nt, Homo sapiens
  misc_RNA (1)...(19): siRNA sense strand
ccauugacuuugauagaau

SEQ ID NO: 60767 - RNA, 19 nt, Homo sapiens
  misc_RNA (1)...(19): siRNA sense strand
acacaaacccagugacaga

SEQ ID NO: 60768 - RNA, 19 nt, Homo sapiens
  misc_RNA (1)...(19): siRNA sense strand
uaacgaagccaagcccauu

SEQ ID NO: 60769 - RNA, 19 nt, Homo sapiens
  misc_RNA (1)...(19): siRNA sense strand
ccaacaucaucauagacua

SEQ ID NO: 60770 - RNA, 19 nt, Homo sapiens
  misc_RNA (1)...(19): siRNA sense strand
ggauauucccaucaucaaa

SEQ ID NO: 60771 - RNA, 19 nt, Homo sapiens
  misc_RNA (1)...(19): siRNA sense strand
guaccaguuugaugagaug

SEQ ID NO: 60772 - RNA, 19 nt, Homo sapiens
  misc_RNA (1)...(19): siRNA sense strand
guaaaggaguccgagagau

SEQ ID NO: 60773 - RNA, 19 nt, Homo sapiens
  misc_RNA (1)...(19): siRNA sense strand
cagacgaacuucagcucaa

SEQ ID NO: 60774 - RNA, 19 nt, Homo sapiens
  misc_RNA (1)...(19): siRNA sense strand
ggagagaauuggaaaagau

SEQ ID NO: 60775 - RNA, 19 nt, Homo sapiens
  misc_RNA (1)...(19): siRNA sense strand
gaccauugacuuugauaga

SEQ ID NO: 60776 - RNA, 19 nt, Homo sapiens
  misc_RNA (1)...(19): siRNA sense strand
cccauuggauucacuaugu

SEQ ID NO: 60777 - RNA, 19 nt, Homo sapiens
  misc_RNA (1)...(19): siRNA sense strand
ggaacuccuugcuguugga

SEQ ID NO: 60778 - RNA, 19 nt, Homo sapiens
  misc_RNA (1)...(19): siRNA sense strand
ugccaacgaugaggauaua

SEQ ID NO: 60779 - RNA, 19 nt, Homo sapiens
  misc_RNA (1)...(19): siRNA sense strand
uaaaggcccuaggcuggaa

SEQ ID NO: 60780 - RNA, 19 nt, Homo sapiens
  misc_RNA (1)...(19): siRNA sense strand
gcaguggacagacgaacuu

SEQ ID NO: 60781 - RNA, 19 nt, Homo sapiens
  misc_RNA (1)...(19): siRNA sense strand
uaaaguccaguucgugauu

SEQ ID NO: 60782 - RNA, 19 nt, Homo sapiens
  misc_RNA (1)...(19): siRNA sense strand
gaagacacagaucgcaaau

SEQ ID NO: 60783 - RNA, 19 nt, Homo sapiens
  misc_RNA (1)...(19): siRNA sense strand
caaagaccgagcucuguga

SEQ ID NO: 60784 - RNA, 19 nt, Homo sapiens
  misc_RNA (1)...(19): siRNA sense strand
agagaaagaagacacagaa

SEQ ID NO: 60785 - RNA, 19 nt, Homo sapiens
  misc_RNA (1)...(19): siRNA sense strand
gguaaaggaguccgagaga

SEQ ID NO: 60786 - RNA, 19 nt, Homo sapiens
  misc_RNA (1)...(19): siRNA sense strand
ccaacgaugaggauauaaa

SEQ ID NO: 60787 - RNA, 19 nt, Homo sapiens
  misc_RNA (1)...(19): siRNA sense strand
cggaaaagcucuacauaca

SEQ ID NO: 60788 - RNA, 19 nt, Homo sapiens
  misc_RNA (1)...(19): siRNA sense strand
ggaugcaccugggcguuau

SEQ ID NO: 60789 - RNA, 19 nt, Homo sapiens
  misc_RNA (1)...(19): siRNA sense strand
gggaugcaccugggcguua

SEQ ID NO: 60790 - RNA, 19 nt, Homo sapiens
  misc_RNA (1)...(19): siRNA sense strand
gcugaaguauauacgcaau

SEQ ID NO: 60791 - RNA, 19 nt, Homo sapiens
  misc_RNA (1)...(19): siRNA sense strand
gagaaaguaguuggaguga

SEQ ID NO: 60792 - RNA, 19 nt, Homo sapiens
  misc_RNA (1)...(19): siRNA sense strand
cacccaacaucaucauaga

SEQ ID NO: 60793 - RNA, 19 nt, Homo sapiens
  misc_RNA (1)...(19): siRNA sense strand
ggcgggaacucagcuaugu

SEQ ID NO: 60794 - RNA, 19 nt, Homo sapiens
  misc_RNA (1)...(19): siRNA sense strand
uggaccagaucaacaguga

SEQ ID NO: 60795 - RNA, 19 nt, Homo sapiens
  misc_RNA (1)...(19): siRNA sense strand
ccgaaaguguacaucauca

SEQ ID NO: 60796 - RNA, 19 nt, Homo sapiens
  misc_RNA (1)...(19): siRNA sense strand
caacaucacaacuggcaau

SEQ ID NO: 60797 - RNA, 19 nt, Homo sapiens
  misc_RNA (1)...(19): siRNA sense strand
cacccgagcuaagugauga

SEQ ID NO: 60798 - RNA, 19 nt, Homo sapiens
  misc_RNA (1)...(19): siRNA sense strand
auacaaacuaccacgcuua

SEQ ID NO: 60799 - RNA, 19 nt, Homo sapiens
  misc_RNA (1)...(19): siRNA sense strand
uaauaucaguucagcuucu

SEQ ID NO: 60800 - RNA, 19 nt, Homo sapiens
  misc_RNA (1)...(19): siRNA sense strand
gcagggcaagaaaucagua

SEQ ID NO: 60801 - RNA, 19 nt, Homo sapiens
  misc_RNA (1)...(19): siRNA sense strand
gcaccugggcguuaugaca

SEQ ID NO: 60802 - RNA, 19 nt, Homo sapiens
  misc_RNA (1)...(19): siRNA sense strand
gcaauguuaauuucaaugg

SEQ ID NO: 60803 - RNA, 19 nt, Homo sapiens
  misc_RNA (1)...(19): siRNA sense strand
gacaggagagaauuggaaa

SEQ ID NO: 60804 - RNA, 19 nt, Homo sapiens
  misc_RNA (1)...(19): siRNA sense strand
gaacagucgcuuacuuucg

SEQ ID NO: 60805 - RNA, 19 nt, Homo sapiens
  misc_RNA (1)...(19): siRNA sense strand
gaaguuauggagagaaagg

SEQ ID NO: 60806 - RNA, 19 nt, Homo sapiens
  misc_RNA (1)...(19): siRNA sense strand
caacgaugaggauauaaag

SEQ ID NO: 60807 - RNA, 19 nt, Homo sapiens
  misc_RNA (1)...(19): siRNA sense strand
uggcuugccuucauuccaa

SEQ ID NO: 60808 - RNA, 19 nt, Homo sapiens
  misc_RNA (1)...(19): siRNA sense strand
ucgaacagucgcuuacuuu

SEQ ID NO: 60809 - RNA, 19 nt, Homo sapiens
  misc_RNA (1)...(19): siRNA sense strand
ucucaagugugacauuaca

SEQ ID NO: 60810 - RNA, 19 nt, Homo sapiens
  misc_RNA (1)...(19): siRNA sense strand
agacuaugaugaacacaag

SEQ ID NO: 60811 - RNA, 19 nt, Homo sapiens
  misc_RNA (1)...(19): siRNA sense strand
uccaggcgcucauccagaa

SEQ ID NO: 60812 - RNA, 19 nt, Homo sapiens
  misc_RNA (1)...(19): siRNA sense strand
gagauacccgccucagugu

SEQ ID NO: 60813 - RNA, 19 nt, Homo sapiens
  misc_RNA (1)...(19): siRNA sense strand
gaaguugcugaaguauaua

SEQ ID NO: 60814 - RNA, 19 nt, Homo sapiens
  misc_RNA (1)...(19): siRNA sense strand
caaguuggccauuuucuuu

SEQ ID NO: 60815 - RNA, 19 nt, Homo sapiens
  misc_RNA (1)...(19): siRNA sense strand
acuaugagcaggaggguaa

SEQ ID NO: 60816 - RNA, 19 nt, Homo sapiens
  misc_RNA (1)...(19): siRNA sense strand
gguaugugcaucaguuaug

SEQ ID NO: 60817 - RNA, 19 nt, Homo sapiens
  misc_RNA (1)...(19): siRNA sense strand
gccaggauauucccaucau

SEQ ID NO: 60818 - RNA, 19 nt, Homo sapiens
  misc_RNA (1)...(19): siRNA sense strand
cuaccacgcuuacaaucuc

SEQ ID NO: 60819 - RNA, 19 nt, Homo sapiens
  misc_RNA (1)...(19): siRNA sense strand
gaaaguaguuggagugauu

SEQ ID NO: 60820 - RNA, 19 nt, Homo sapiens
  misc_RNA (1)...(19): siRNA sense strand
ggcaaucacuuccaguuua

SEQ ID NO: 60821 - RNA, 19 nt, Homo sapiens
  misc_RNA (1)...(19): siRNA sense strand
caaaagagcugaccaaguu

SEQ ID NO: 60822 - RNA, 19 nt, Homo sapiens
  misc_RNA (1)...(19): siRNA sense strand
gcaaucacuuccaguuuaa

SEQ ID NO: 60823 - RNA, 19 nt, Homo sapiens
  misc_RNA (1)...(19): siRNA sense strand
cagaagaaauguaugguuu

SEQ ID NO: 60824 - RNA, 19 nt, Homo sapiens
  misc_RNA (1)...(19): siRNA sense strand
gaaaagcucuacauacaaa

SEQ ID NO: 60825 - RNA, 19 nt, Homo sapiens
  misc_RNA (1)...(19): siRNA sense strand
caacagugaucccaaccua

SEQ ID NO: 60826 - RNA, 19 nt, Homo sapiens
  misc_RNA (1)...(19): siRNA sense strand
guuaugacaucuuucagua

SEQ ID NO: 60827 - RNA, 19 nt, Homo sapiens
  misc_RNA (1)...(19): siRNA sense strand
gcaaagacaggaccauuga

SEQ ID NO: 60828 - RNA, 19 nt, Homo sapiens
  misc_RNA (1)...(19): siRNA sense strand
gaacuucagcucaauauag

SEQ ID NO: 60829 - RNA, 19 nt, Homo sapiens
  misc_RNA (1)...(19): siRNA sense strand
agaaguugcugaaguauau

SEQ ID NO: 60830 - RNA, 19 nt, Homo sapiens
  misc_RNA (1)...(19): siRNA sense strand
ucacgcagauuuccaaaga

SEQ ID NO: 60831 - RNA, 19 nt, Homo sapiens
  misc_RNA (1)...(19): siRNA sense strand
ggauauagcauucuucuca

SEQ ID NO: 60832 - RNA, 19 nt, Homo sapiens
  misc_RNA (1)...(19): siRNA sense strand
uaaaggaguccgagagaua

SEQ ID NO: 60833 - RNA, 19 nt, Homo sapiens
  misc_RNA (1)...(19): siRNA sense strand
gcaugaagauaucgcagaa

SEQ ID NO: 60834 - RNA, 19 nt, Homo sapiens
  misc_RNA (1)...(19): siRNA sense strand
gaaaguguacaucaucauu

SEQ ID NO: 60835 - RNA, 19 nt, Homo sapiens
  misc_RNA (1)...(19): siRNA sense strand
gaucauugccaccaucuuu

SEQ ID NO: 60836 - RNA, 19 nt, Homo sapiens
  misc_RNA (1)...(19): siRNA sense strand
gaccagaggcccaaugaaa

SEQ ID NO: 60837 - RNA, 19 nt, Homo sapiens
  misc_RNA (1)...(19): siRNA sense strand
ggauuuaucgcauauuuga

SEQ ID NO: 60838 - RNA, 19 nt, Homo sapiens
  misc_RNA (1)...(19): siRNA sense strand
gaaaagauuccaacuauga

SEQ ID NO: 60839 - RNA, 19 nt, Homo sapiens
  misc_RNA (1)...(19): siRNA sense strand
gaaagaagacacagaaagg

SEQ ID NO: 60840 - RNA, 19 nt, Homo sapiens
  misc_RNA (1)...(19): siRNA sense strand
gaaggaaguuauggagaga

SEQ ID NO: 60841 - RNA, 19 nt, Homo sapiens
  misc_RNA (1)...(19): siRNA sense strand
gcccuaggcuggaauuaug

SEQ ID NO: 60842 - RNA, 19 nt, Homo sapiens
  misc_RNA (1)...(19): siRNA sense strand
guucucaagugugacauua

SEQ ID NO: 60843 - RNA, 19 nt, Homo sapiens
  misc_RNA (1)...(19): siRNA sense strand
uuacagaucuccaaaucau

SEQ ID NO: 60844 - RNA, 19 nt, Homo sapiens
  misc_RNA (1)...(19): siRNA sense strand
caucgaggcugucacacaa

SEQ ID NO: 60845 - RNA, 19 nt, Homo sapiens
  misc_RNA (1)...(19): siRNA sense strand
gaaaacaacagaagaaaug

SEQ ID NO: 60846 - RNA, 19 nt, Homo sapiens
  misc_RNA (1)...(19): siRNA sense strand
gcacaggacaggagagaau

SEQ ID NO: 60847 - RNA, 19 nt, Homo sapiens
  misc_RNA (1)...(19): siRNA sense strand
gaagaaauguaugguuugc

SEQ ID NO: 60848 - RNA, 19 nt, Homo sapiens
  misc_RNA (1)...(19): siRNA sense strand
gaugaacacaagacaauga

SEQ ID NO: 60849 - RNA, 19 nt, Homo sapiens
  misc_RNA (1)...(19): siRNA sense strand
gcaccagcaugaagauauc

SEQ ID NO: 60850 - RNA, 19 nt, Homo sapiens
  misc_RNA (1)...(19): siRNA sense strand
ggacaggagagaauuggaa

SEQ ID NO: 60851 - RNA, 19 nt, Homo sapiens
  misc_RNA (1)...(19): siRNA sense strand
ugaacucaauguccagaaa

SEQ ID NO: 60852 - RNA, 19 nt, Homo sapiens
  misc_RNA (1)...(19): siRNA sense strand
agacacagaucgcaaaugc

SEQ ID NO: 60853 - RNA, 19 nt, Homo sapiens
  misc_RNA (1)...(19): siRNA sense strand
caaacuaccacgcuuacaa

SEQ ID NO: 60854 - RNA, 19 nt, Homo sapiens
  misc_RNA (1)...(19): siRNA sense strand
cauuacagaucuccaaauc

SEQ ID NO: 60855 - RNA, 19 nt, Homo sapiens
  misc_RNA (1)...(19): siRNA sense strand
cgaaccggaugccaggaua

SEQ ID NO: 60856 - RNA, 19 nt, Homo sapiens
  misc_RNA (1)...(19): siRNA sense strand
ccagauuaguuaugcauca

SEQ ID NO: 60857 - RNA, 19 nt, Homo sapiens
  misc_RNA (1)...(19): siRNA sense strand
ugacgggcaucuuucuuug

SEQ ID NO: 60858 - RNA, 19 nt, Homo sapiens
  misc_RNA (1)...(19): siRNA sense strand
agacaggaccauugacuuu

SEQ ID NO: 60859 - RNA, 19 nt, Homo sapiens
  misc_RNA (1)...(19): siRNA sense strand
caacagaagaaauguaugg

SEQ ID NO: 60860 - RNA, 19 nt, Homo sapiens
  misc_RNA (1)...(19): siRNA sense strand
ucggauuuaucgcauauuu

SEQ ID NO: 60861 - RNA, 19 nt, Homo sapiens
  misc_RNA (1)...(19): siRNA sense strand
ugaaguauauacgcaaugu

SEQ ID NO: 60862 - RNA, 19 nt, Homo sapiens
  misc_RNA (1)...(19): siRNA sense strand
gauauagcauucuucucau

SEQ ID NO: 60863 - RNA, 19 nt, Homo sapiens
  misc_RNA (1)...(19): siRNA sense strand
acaggaccauugacuuuga

SEQ ID NO: 60864 - RNA, 19 nt, Homo sapiens
  misc_RNA (1)...(19): siRNA sense strand
ccauuggauucacuaugua

SEQ ID NO: 60865 - RNA, 19 nt, Homo sapiens
  misc_RNA (1)...(19): siRNA sense strand
gagaaagaagacacagaaa

SEQ ID NO: 60866 - RNA, 19 nt, Homo sapiens
  misc_RNA (1)...(19): siRNA sense strand
ccauugacuuugauagaau

SEQ ID NO: 60867 - RNA, 19 nt, Homo sapiens
  misc_RNA (1)...(19): siRNA sense strand
acacaaacccagugacaga

SEQ ID NO: 60868 - RNA, 19 nt, Homo sapiens
  misc_RNA (1)...(19): siRNA sense strand
uaacgaagccaagcccauu

SEQ ID NO: 60869 - RNA, 19 nt, Homo sapiens
  misc_RNA (1)...(19): siRNA sense strand
ccaacaucaucauagacua

SEQ ID NO: 60870 - RNA, 19 nt, Homo sapiens
  misc_RNA (1)...(19): siRNA sense strand
ggauauucccaucaucaaa

SEQ ID NO: 60871 - RNA, 19 nt, Homo sapiens
  misc_RNA (1)...(19): siRNA sense strand
guaccaguuugaugagaug

SEQ ID NO: 60872 - RNA, 19 nt, Homo sapiens
  misc_RNA (1)...(19): siRNA sense strand
guaaaggaguccgagagau

SEQ ID NO: 60873 - RNA, 19 nt, Homo sapiens
  misc_RNA (1)...(19): siRNA sense strand
cagacgaacuucagcucaa

SEQ ID NO: 60874 - RNA, 19 nt, Homo sapiens
  misc_RNA (1)...(19): siRNA sense strand
ggagagaauuggaaaagau

SEQ ID NO: 60875 - RNA, 19 nt, Homo sapiens
  misc_RNA (1)...(19): siRNA sense strand
gaccauugacuuugauaga

SEQ ID NO: 60876 - RNA, 19 nt, Homo sapiens
  misc_RNA (1)...(19): siRNA sense strand
cccauuggauucacuaugu

SEQ ID NO: 60877 - RNA, 19 nt, Homo sapiens
  misc_RNA (1)...(19): siRNA sense strand
ggaacuccuugcuguugga

SEQ ID NO: 60878 - RNA, 19 nt, Homo sapiens
  misc_RNA (1)...(19): siRNA sense strand
ugccaacgaugaggauaua

SEQ ID NO: 60879 - RNA, 19 nt, Homo sapiens
  misc_RNA (1)...(19): siRNA sense strand
uaaaggcccuaggcuggaa

SEQ ID NO: 60880 - RNA, 19 nt, Homo sapiens
  misc_RNA (1)...(19): siRNA sense strand
gcaguggacagacgaacuu

SEQ ID NO: 60881 - RNA, 19 nt, Homo sapiens
  misc_RNA (1)...(19): siRNA sense strand
uaaaguccaguucgugauu

SEQ ID NO: 60882 - RNA, 19 nt, Homo sapiens
  misc_RNA (1)...(19): siRNA sense strand
gaagacacagaucgcaaau

SEQ ID NO: 60883 - RNA, 19 nt, Homo sapiens
  misc_RNA (1)...(19): siRNA sense strand
caaagaccgagcucuguga

SEQ ID NO: 60884 - RNA, 19 nt, Homo sapiens
  misc_RNA (1)...(19): siRNA sense strand
agagaaagaagacacagaa

SEQ ID NO: 60885 - RNA, 19 nt, Homo sapiens
  misc_RNA (1)...(19): siRNA sense strand
gguaaaggaguccgagaga

SEQ ID NO: 60886 - RNA, 19 nt, Homo sapiens
  misc_RNA (1)...(19): siRNA sense strand
ccaacgaugaggauauaaa

SEQ ID NO: 60887 - RNA, 19 nt, Homo sapiens
  misc_RNA (1)...(19): siRNA sense strand
cggaaaagcucuacauaca

SEQ ID NO: 60888 - RNA, 19 nt, Homo sapiens
  misc_RNA (1)...(19): siRNA sense strand
ggaugcaccugggcguuau

SEQ ID NO: 60889 - RNA, 19 nt, Homo sapiens
  misc_RNA (1)...(19): siRNA sense strand
gggaugcaccugggcguua

SEQ ID NO: 60890 - RNA, 19 nt, Homo sapiens
  misc_RNA (1)...(19): siRNA sense strand
gcugaaguauauacgcaau

SEQ ID NO: 60891 - RNA, 19 nt, Homo sapiens
  misc_RNA (1)...(19): siRNA sense strand
gagaaaguaguuggaguga

SEQ ID NO: 60892 - RNA, 19 nt, Homo sapiens
  misc_RNA (1)...(19): siRNA sense strand
cacccaacaucaucauaga

SEQ ID NO: 60893 - RNA, 19 nt, Homo sapiens
  misc_RNA (1)...(19): siRNA sense strand
ggcgggaacucagcuaugu

SEQ ID NO: 60894 - RNA, 19 nt, Homo sapiens
  misc_RNA (1)...(19): siRNA sense strand
uggaccagaucaacaguga

SEQ ID NO: 60895 - RNA, 19 nt, Homo sapiens
  misc_RNA (1)...(19): siRNA sense strand
ccgaaaguguacaucauca

SEQ ID NO: 60896 - RNA, 19 nt, Homo sapiens
  misc_RNA (1)...(19): siRNA sense strand
caacaucacaacuggcaau

SEQ ID NO: 60897 - RNA, 19 nt, Homo sapiens
  misc_RNA (1)...(19): siRNA sense strand
cacccgagcuaagugauga

SEQ ID NO: 60898 - RNA, 19 nt, Homo sapiens
  misc_RNA (1)...(19): siRNA sense strand
auacaaacuaccacgcuua

SEQ ID NO: 60899 - RNA, 19 nt, Homo sapiens
  misc_RNA (1)...(19): siRNA sense strand
uaauaucaguucagcuucu

SEQ ID NO: 60900 - RNA, 19 nt, Homo sapiens
  misc_RNA (1)...(19): siRNA sense strand
gcagggcaagaaaucagua

SEQ ID NO: 60901 - RNA, 19 nt, Homo sapiens
  misc_RNA (1)...(19): siRNA sense strand
gcaccugggcguuaugaca

SEQ ID NO: 60902 - RNA, 19 nt, Homo sapiens
  misc_RNA (1)...(19): siRNA sense strand
gcaauguuaauuucaaugg

SEQ ID NO: 60903 - RNA, 19 nt, Homo sapiens
  misc_RNA (1)...(19): siRNA sense strand
gacaggagagaauuggaaa

SEQ ID NO: 60904 - RNA, 19 nt, Homo sapiens
  misc_RNA (1)...(19): siRNA sense strand
gaacagucgcuuacuuucg

SEQ ID NO: 60905 - RNA, 19 nt, Homo sapiens
  misc_RNA (1)...(19): siRNA sense strand
gaaguuauggagagaaagg

SEQ ID NO: 60906 - RNA, 19 nt, Homo sapiens
  misc_RNA (1)...(19): siRNA sense strand
caacgaugaggauauaaag

SEQ ID NO: 60907 - RNA, 19 nt, Homo sapiens
  misc_RNA (1)...(19): siRNA sense strand
uggcuugccuucauuccaa

SEQ ID NO: 60908 - RNA, 19 nt, Homo sapiens
  misc_RNA (1)...(19): siRNA sense strand
ucgaacagucgcuuacuuu

SEQ ID NO: 60909 - RNA, 19 nt, Homo sapiens
  misc_RNA (1)...(19): siRNA sense strand
ucucaagugugacauuaca

SEQ ID NO: 60910 - RNA, 19 nt, Homo sapiens
  misc_RNA (1)...(19): siRNA sense strand
agacuaugaugaacacaag

SEQ ID NO: 60911 - RNA, 19 nt, Homo sapiens
  misc_RNA (1)...(19): siRNA sense strand
uccaggcgcucauccagaa

SEQ ID NO: 60912 - RNA, 19 nt, Homo sapiens
  misc_RNA (1)...(19): siRNA sense strand
gagauacccgccucagugu

SEQ ID NO: 60913 - RNA, 19 nt, Homo sapiens
  misc_RNA (1)...(19): siRNA sense strand
gaaguugcugaaguauaua

SEQ ID NO: 60914 - RNA, 19 nt, Homo sapiens
  misc_RNA (1)...(19): siRNA sense strand
caaguuggccauuuucuuu

SEQ ID NO: 60915 - RNA, 19 nt, Homo sapiens
  misc_RNA (1)...(19): siRNA sense strand
acuaugagcaggaggguaa

SEQ ID NO: 60916 - RNA, 19 nt, Homo sapiens
  misc_RNA (1)...(19): siRNA sense strand
gguaugugcaucaguuaug

SEQ ID NO: 60917 - RNA, 19 nt, Homo sapiens
  misc_RNA (1)...(19): siRNA sense strand
gccaggauauucccaucau

SEQ ID NO: 60918 - RNA, 19 nt, Homo sapiens
  misc_RNA (1)...(19): siRNA sense strand
cuaccacgcuuacaaucuc

SEQ ID NO: 60919 - RNA, 19 nt, Homo sapiens
  misc_RNA (1)...(19): siRNA sense strand
gaaaguaguuggagugauu

SEQ ID NO: 60920 - RNA, 19 nt, Homo sapiens
  misc_RNA (1)...(19): siRNA sense strand
ggcaaucacuuccaguuua

SEQ ID NO: 60921 - RNA, 19 nt, Homo sapiens
  misc_RNA (1)...(19): siRNA sense strand
caaaagagcugaccaaguu

SEQ ID NO: 60922 - RNA, 19 nt, Homo sapiens
  misc_RNA (1)...(19): siRNA sense strand
gcaaucacuuccaguuuaa

SEQ ID NO: 60923 - RNA, 19 nt, Homo sapiens
  misc_RNA (1)...(19): siRNA sense strand
cagaagaaauguaugguuu

SEQ ID NO: 60924 - RNA, 19 nt, Homo sapiens
  misc_RNA (1)...(19): siRNA sense strand
gaaaagcucuacauacaaa

SEQ ID NO: 60925 - RNA, 19 nt, Homo sapiens
  misc_RNA (1)...(19): siRNA sense strand
caacagugaucccaaccua

SEQ ID NO: 60926 - RNA, 19 nt, Homo sapiens
  misc_RNA (1)...(19): siRNA sense strand
guuaugacaucuuucagua

SEQ ID NO: 60927 - RNA, 19 nt, Homo sapiens
  misc_RNA (1)...(19): siRNA sense strand
gcaaagacaggaccauuga

SEQ ID NO: 60928 - RNA, 19 nt, Homo sapiens
  misc_RNA (1)...(19): siRNA sense strand
gaacuucagcucaauauag

SEQ ID NO: 60929 - RNA, 19 nt, Homo sapiens
  misc_RNA (1)...(19): siRNA sense strand
agaaguugcugaaguauau

SEQ ID NO: 60930 - RNA, 19 nt, Homo sapiens
  misc_RNA (1)...(19): siRNA sense strand
ucacgcagauuuccaaaga

SEQ ID NO: 60931 - RNA, 19 nt, Homo sapiens
  misc_RNA (1)...(19): siRNA sense strand
ggauauagcauucuucuca

SEQ ID NO: 60932 - RNA, 19 nt, Homo sapiens
  misc_RNA (1)...(19): siRNA sense strand
uaaaggaguccgagagaua

SEQ ID NO: 60933 - RNA, 19 nt, Homo sapiens
  misc_RNA (1)...(19): siRNA sense strand
gcaugaagauaucgcagaa

SEQ ID NO: 60934 - RNA, 19 nt, Homo sapiens
  misc_RNA (1)...(19): siRNA sense strand
gaaaguguacaucaucauu

SEQ ID NO: 60935 - RNA, 19 nt, Homo sapiens
  misc_RNA (1)...(19): siRNA sense strand
gaucauugccaccaucuuu

SEQ ID NO: 60936 - RNA, 19 nt, Homo sapiens
  misc_RNA (1)...(19): siRNA sense strand
gaccagaggcccaaugaaa

SEQ ID NO: 60937 - RNA, 19 nt, Homo sapiens
  misc_RNA (1)...(19): siRNA sense strand
ggauuuaucgcauauuuga

SEQ ID NO: 60938 - RNA, 19 nt, Homo sapiens
  misc_RNA (1)...(19): siRNA sense strand
gaaaagauuccaacuauga

SEQ ID NO: 60939 - RNA, 19 nt, Homo sapiens
  misc_RNA (1)...(19): siRNA sense strand
gaaagaagacacagaaagg

SEQ ID NO: 60940 - RNA, 19 nt, Homo sapiens
  misc_RNA (1)...(19): siRNA sense strand
gaaggaaguuauggagaga

SEQ ID NO: 60941 - RNA, 19 nt, Homo sapiens
  misc_RNA (1)...(19): siRNA sense strand
gcccuaggcuggaauuaug

SEQ ID NO: 60942 - RNA, 19 nt, Homo sapiens
  misc_RNA (1)...(19): siRNA sense strand
guucucaagugugacauua

SEQ ID NO: 60943 - RNA, 19 nt, Homo sapiens
  misc_RNA (1)...(19): siRNA sense strand
uuacagaucuccaaaucau

SEQ ID NO: 60944 - RNA, 19 nt, Homo sapiens
  misc_RNA (1)...(19): siRNA sense strand
caucgaggcugucacacaa

SEQ ID NO: 60945 - RNA, 19 nt, Homo sapiens
  misc_RNA (1)...(19): siRNA sense strand
gaaaacaacagaagaaaug

SEQ ID NO: 60946 - RNA, 19 nt, Homo sapiens
  misc_RNA (1)...(19): siRNA sense strand
gcacaggacaggagagaau

SEQ ID NO: 60947 - RNA, 19 nt, Homo sapiens
  misc_RNA (1)...(19): siRNA sense strand
gaagaaauguaugguuugc

SEQ ID NO: 60948 - RNA, 19 nt, Homo sapiens
  misc_RNA (1)...(19): siRNA sense strand
gaugaacacaagacaauga

SEQ ID NO: 60949 - RNA, 19 nt, Homo sapiens
  misc_RNA (1)...(19): siRNA sense strand
gcaccagcaugaagauauc

SEQ ID NO: 60950 - RNA, 19 nt, Homo sapiens
  misc_RNA (1)...(19): siRNA sense strand
ggacaggagagaauuggaa

SEQ ID NO: 60951 - RNA, 19 nt, Homo sapiens
  misc_RNA (1)...(19): siRNA sense strand
ugaacucaauguccagaaa

SEQ ID NO: 60952 - RNA, 19 nt, Homo sapiens
  misc_RNA (1)...(19): siRNA sense strand
agacacagaucgcaaaugc

SEQ ID NO: 60953 - RNA, 19 nt, Homo sapiens
  misc_RNA (1)...(19): siRNA sense strand
caaacuaccacgcuuacaa

SEQ ID NO: 60954 - RNA, 19 nt, Homo sapiens
  misc_RNA (1)...(19): siRNA sense strand
cauuacagaucuccaaauc

SEQ ID NO: 60955 - RNA, 19 nt, Homo sapiens
  misc_RNA (1)...(19): siRNA sense strand
cgaaccggaugccaggaua

SEQ ID NO: 60956 - RNA, 19 nt, Homo sapiens
  misc_RNA (1)...(19): siRNA sense strand
ccagauuaguuaugcauca

SEQ ID NO: 60957 - RNA, 19 nt, Homo sapiens
  misc_RNA (1)...(19): siRNA sense strand
ugacgggcaucuuucuuug

SEQ ID NO: 60958 - RNA, 19 nt, Homo sapiens
  misc_RNA (1)...(19): siRNA sense strand
agacaggaccauugacuuu

SEQ ID NO: 60959 - RNA, 19 nt, Homo sapiens
  misc_RNA (1)...(19): siRNA sense strand
caacagaagaaauguaugg

SEQ ID NO: 60960 - RNA, 19 nt, Homo sapiens
  misc_RNA (1)...(19): siRNA sense strand
ucggauuuaucgcauauuu

SEQ ID NO: 60961 - RNA, 19 nt, Homo sapiens
  misc_RNA (1)...(19): siRNA sense strand
ugaaguauauacgcaaugu

SEQ ID NO: 60962 - RNA, 19 nt, Homo sapiens
  misc_RNA (1)...(19): siRNA sense strand
gauauagcauucuucucau

SEQ ID NO: 60963 - RNA, 19 nt, Homo sapiens
  misc_RNA (1)...(19): siRNA sense strand
acaggaccauugacuuuga

SEQ ID NO: 60964 - RNA, 19 nt, Homo sapiens
  misc_RNA (1)...(19): siRNA sense strand
ccauuggauucacuaugua

SEQ ID NO: 60965 - RNA, 19 nt, Homo sapiens
  misc_RNA (1)...(19): siRNA sense strand
gagaaagaagacacagaaa

SEQ ID NO: 60966 - RNA, 19 nt, Homo sapiens
  misc_RNA (1)...(19): siRNA sense strand
ccauugacuuugauagaau

SEQ ID NO: 60967 - RNA, 19 nt, Homo sapiens
  misc_RNA (1)...(19): siRNA sense strand
acacaaacccagugacaga

SEQ ID NO: 60968 - RNA, 19 nt, Homo sapiens
  misc_RNA (1)...(19): siRNA sense strand
uaacgaagccaagcccauu

SEQ ID NO: 60969 - RNA, 19 nt, Homo sapiens
  misc_RNA (1)...(19): siRNA sense strand
ccaacaucaucauagacua

SEQ ID NO: 60970 - RNA, 19 nt, Homo sapiens
  misc_RNA (1)...(19): siRNA sense strand
ggauauucccaucaucaaa

SEQ ID NO: 60971 - RNA, 19 nt, Homo sapiens
  misc_RNA (1)...(19): siRNA sense strand
guaccaguuugaugagaug

SEQ ID NO: 60972 - RNA, 19 nt, Homo sapiens
  misc_RNA (1)...(19): siRNA sense strand
guaaaggaguccgagagau

SEQ ID NO: 60973 - RNA, 19 nt, Homo sapiens
  misc_RNA (1)...(19): siRNA sense strand
cagacgaacuucagcucaa

SEQ ID NO: 60974 - RNA, 19 nt, Homo sapiens
  misc_RNA (1)...(19): siRNA sense strand
ggagagaauuggaaaagau

SEQ ID NO: 60975 - RNA, 19 nt, Homo sapiens
  misc_RNA (1)...(19): siRNA sense strand
gaccauugacuuugauaga

SEQ ID NO: 60976 - RNA, 19 nt, Homo sapiens
  misc_RNA (1)...(19): siRNA sense strand
cccauuggauucacuaugu

SEQ ID NO: 60977 - RNA, 19 nt, Homo sapiens
  misc_RNA (1)...(19): siRNA sense strand
ggaacuccuugcuguugga

SEQ ID NO: 60978 - RNA, 19 nt, Homo sapiens
  misc_RNA (1)...(19): siRNA sense strand
ugccaacgaugaggauaua

SEQ ID NO: 60979 - RNA, 19 nt, Homo sapiens
  misc_RNA (1)...(19): siRNA sense strand
uaaaggcccuaggcuggaa

SEQ ID NO: 60980 - RNA, 19 nt, Homo sapiens
  misc_RNA (1)...(19): siRNA sense strand
gcaguggacagacgaacuu

SEQ ID NO: 60981 - RNA, 19 nt, Homo sapiens
  misc_RNA (1)...(19): siRNA sense strand
uaaaguccaguucgugauu

SEQ ID NO: 60982 - RNA, 19 nt, Homo sapiens
  misc_RNA (1)...(19): siRNA sense strand
gaagacacagaucgcaaau

SEQ ID NO: 60983 - RNA, 19 nt, Homo sapiens
  misc_RNA (1)...(19): siRNA sense strand
caaagaccgagcucuguga

SEQ ID NO: 60984 - RNA, 19 nt, Homo sapiens
  misc_RNA (1)...(19): siRNA sense strand
agagaaagaagacacagaa

SEQ ID NO: 60985 - RNA, 19 nt, Homo sapiens
  misc_RNA (1)...(19): siRNA sense strand
gguaaaggaguccgagaga

SEQ ID NO: 60986 - RNA, 19 nt, Homo sapiens
  misc_RNA (1)...(19): siRNA sense strand
ccaacgaugaggauauaaa

SEQ ID NO: 60987 - RNA, 19 nt, Homo sapiens
  misc_RNA (1)...(19): siRNA sense strand
cggaaaagcucuacauaca

SEQ ID NO: 60988 - RNA, 19 nt, Homo sapiens
  misc_RNA (1)...(19): siRNA sense strand
ggaugcaccugggcguuau

SEQ ID NO: 60989 - RNA, 19 nt, Homo sapiens
  misc_RNA (1)...(19): siRNA sense strand
gggaugcaccugggcguua

SEQ ID NO: 60990 - RNA, 19 nt, Homo sapiens
  misc_RNA (1)...(19): siRNA sense strand
gcugaaguauauacgcaau

SEQ ID NO: 60991 - RNA, 19 nt, Homo sapiens
  misc_RNA (1)...(19): siRNA sense strand
gagaaaguaguuggaguga

SEQ ID NO: 60992 - RNA, 19 nt, Homo sapiens
  misc_RNA (1)...(19): siRNA sense strand
cacccaacaucaucauaga

SEQ ID NO: 60993 - RNA, 19 nt, Homo sapiens
  misc_RNA (1)...(19): siRNA sense strand
ggcgggaacucagcuaugu

SEQ ID NO: 60994 - RNA, 19 nt, Homo sapiens
  misc_RNA (1)...(19): siRNA sense strand
uggaccagaucaacaguga

SEQ ID NO: 60995 - RNA, 19 nt, Homo sapiens
  misc_RNA (1)...(19): siRNA sense strand
ccgaaaguguacaucauca

SEQ ID NO: 60996 - RNA, 19 nt, Homo sapiens
  misc_RNA (1)...(19): siRNA sense strand
caacaucacaacuggcaau

SEQ ID NO: 60997 - RNA, 19 nt, Homo sapiens
  misc_RNA (1)...(19): siRNA sense strand
cacccgagcuaagugauga

SEQ ID NO: 60998 - RNA, 19 nt, Homo sapiens
  misc_RNA (1)...(19): siRNA sense strand
auacaaacuaccacgcuua

SEQ ID NO: 60999 - RNA, 19 nt, Homo sapiens
  misc_RNA (1)...(19): siRNA sense strand
uaauaucaguucagcuucu

SEQ ID NO: 61000 - RNA, 19 nt, Homo sapiens
  misc_RNA (1)...(19): siRNA sense strand
gcagggcaagaaaucagua

SEQ ID NO: 61001 - RNA, 19 nt, Homo sapiens
  misc_RNA (1)...(19): siRNA sense strand
gcaccugggcguuaugaca

SEQ ID NO: 61002 - RNA, 19 nt, Homo sapiens
  misc_RNA (1)...(19): siRNA sense strand
gcaauguuaauuucaaugg

SEQ ID NO: 61003 - RNA, 19 nt, Homo sapiens
  misc_RNA (1)...(19): siRNA sense strand
gacaggagagaauuggaaa

SEQ ID NO: 61004 - RNA, 19 nt, Homo sapiens
  misc_RNA (1)...(19): siRNA sense strand
gaacagucgcuuacuuucg

SEQ ID NO: 61005 - RNA, 19 nt, Homo sapiens
  misc_RNA (1)...(19): siRNA sense strand
gaaguuauggagagaaagg

SEQ ID NO: 61006 - RNA, 19 nt, Homo sapiens
  misc_RNA (1)...(19): siRNA sense strand
caacgaugaggauauaaag

SEQ ID NO: 61007 - RNA, 19 nt, Homo sapiens
  misc_RNA (1)...(19): siRNA sense strand
uggcuugccuucauuccaa

SEQ ID NO: 61008 - RNA, 19 nt, Homo sapiens
  misc_RNA (1)...(19): siRNA sense strand
ucgaacagucgcuuacuuu

SEQ ID NO: 61009 - RNA, 19 nt, Homo sapiens
  misc_RNA (1)...(19): siRNA sense strand
ucucaagugugacauuaca

SEQ ID NO: 61010 - RNA, 19 nt, Homo sapiens
  misc_RNA (1)...(19): siRNA sense strand
agacuaugaugaacacaag

SEQ ID NO: 61011 - RNA, 19 nt, Homo sapiens
  misc_RNA (1)...(19): siRNA sense strand
uccaggcgcucauccagaa

SEQ ID NO: 61012 - RNA, 19 nt, Homo sapiens
  misc_RNA (1)...(19): siRNA sense strand
gagauacccgccucagugu

SEQ ID NO: 61013 - RNA, 19 nt, Homo sapiens
  misc_RNA (1)...(19): siRNA sense strand
gaaguugcugaaguauaua

SEQ ID NO: 61014 - RNA, 19 nt, Homo sapiens
  misc_RNA (1)...(19): siRNA sense strand
caaguuggccauuuucuuu

SEQ ID NO: 61015 - RNA, 19 nt, Homo sapiens
  misc_RNA (1)...(19): siRNA sense strand
acuaugagcaggaggguaa

SEQ ID NO: 61016 - RNA, 19 nt, Homo sapiens
  misc_RNA (1)...(19): siRNA sense strand
gguaugugcaucaguuaug

SEQ ID NO: 61017 - RNA, 19 nt, Homo sapiens
  misc_RNA (1)...(19): siRNA sense strand
gccaggauauucccaucau

SEQ ID NO: 61018 - RNA, 19 nt, Homo sapiens
  misc_RNA (1)...(19): siRNA sense strand
cuaccacgcuuacaaucuc

SEQ ID NO: 61019 - RNA, 19 nt, Homo sapiens
  misc_RNA (1)...(19): siRNA sense strand
ggaaagagcuacuugguua

SEQ ID NO: 61020 - RNA, 19 nt, Homo sapiens
  misc_RNA (1)...(19): siRNA sense strand
caagauuucuggcgucaua

SEQ ID NO: 61021 - RNA, 19 nt, Homo sapiens
  misc_RNA (1)...(19): siRNA sense strand
ccaaucagcuucaucuaaa

SEQ ID NO: 61022 - RNA, 19 nt, Homo sapiens
  misc_RNA (1)...(19): siRNA sense strand
ggaaagguccaauuuguaa

SEQ ID NO: 61023 - RNA, 19 nt, Homo sapiens
  misc_RNA (1)...(19): siRNA sense strand
gcagugggcucauagagaa

SEQ ID NO: 61024 - RNA, 19 nt, Homo sapiens
  misc_RNA (1)...(19): siRNA sense strand
gcacagggcuggagcgaau

SEQ ID NO: 61025 - RNA, 19 nt, Homo sapiens
  misc_RNA (1)...(19): siRNA sense strand
gcacugggauggaauuaug

SEQ ID NO: 61026 - RNA, 19 nt, Homo sapiens
  misc_RNA (1)...(19): siRNA sense strand
gaucagagacccaacauga

SEQ ID NO: 61027 - RNA, 19 nt, Homo sapiens
  misc_RNA (1)...(19): siRNA sense strand
ggaaggaaagguccaauuu

SEQ ID NO: 61028 - RNA, 19 nt, Homo sapiens
  misc_RNA (1)...(19): siRNA sense strand
gccgaacucuugccaauaa

SEQ ID NO: 61029 - RNA, 19 nt, Homo sapiens
  misc_RNA (1)...(19): siRNA sense strand
guuaugauaucuuccagua

SEQ ID NO: 61030 - RNA, 19 nt, Homo sapiens
  misc_RNA (1)...(19): siRNA sense strand
ggaaaugacagaccaaaug

SEQ ID NO: 61031 - RNA, 19 nt, Homo sapiens
  misc_RNA (1)...(19): siRNA sense strand
gaguuuaagugcuucagua

SEQ ID NO: 61032 - RNA, 19 nt, Homo sapiens
  misc_RNA (1)...(19): siRNA sense strand
ggaauuauguuucgacacu

SEQ ID NO: 61033 - RNA, 19 nt, Homo sapiens
  misc_RNA (1)...(19): siRNA sense strand
gaaagaugcuucggaugug

SEQ ID NO: 61034 - RNA, 19 nt, Homo sapiens
  misc_RNA (1)...(19): siRNA sense strand
accaagaccuggagaauuu

SEQ ID NO: 61035 - RNA, 19 nt, Homo sapiens
  misc_RNA (1)...(19): siRNA sense strand
caucaugguugcuaacauu

SEQ ID NO: 61036 - RNA, 19 nt, Homo sapiens
  misc_RNA (1)...(19): siRNA sense strand
gaaggaaagguccaauuug

SEQ ID NO: 61037 - RNA, 19 nt, Homo sapiens
  misc_RNA (1)...(19): siRNA sense strand
gaagugugcuaauggagau

SEQ ID NO: 61038 - RNA, 19 nt, Homo sapiens
  misc_RNA (1)...(19): siRNA sense strand
gaagaaaugugugguuugc

SEQ ID NO: 61039 - RNA, 19 nt, Homo sapiens
  misc_RNA (1)...(19): siRNA sense strand
ucugaucucucacucauuu

SEQ ID NO: 61040 - RNA, 19 nt, Homo sapiens
  misc_RNA (1)...(19): siRNA sense strand
ugacauuucugaucucuca

SEQ ID NO: 61041 - RNA, 19 nt, Homo sapiens
  misc_RNA (1)...(19): siRNA sense strand
ggacuuggcauguguuuca

SEQ ID NO: 61042 - RNA, 19 nt, Homo sapiens
  misc_RNA (1)...(19): siRNA sense strand
ggaacagucauauaaagaa

SEQ ID NO: 61043 - RNA, 19 nt, Homo sapiens
  misc_RNA (1)...(19): siRNA sense strand
caacauauaucaguuacag

SEQ ID NO: 61044 - RNA, 19 nt, Homo sapiens
  misc_RNA (1)...(19): siRNA sense strand
gauggucacuuguacuguu

SEQ ID NO: 61045 - RNA, 19 nt, Homo sapiens
  misc_RNA (1)...(19): siRNA sense strand
gagcuguccugugaacuuu

SEQ ID NO: 61046 - RNA, 19 nt, Homo sapiens
  misc_RNA (1)...(19): siRNA sense strand
uauaccaccugcaucauuu

SEQ ID NO: 61047 - RNA, 19 nt, Homo sapiens
  misc_RNA (1)...(19): siRNA sense strand
gaugugaagugugcuaaug

SEQ ID NO: 61048 - RNA, 19 nt, Homo sapiens
  misc_RNA (1)...(19): siRNA sense strand
gcaauugaccagauuaaca

SEQ ID NO: 61049 - RNA, 19 nt, Homo sapiens
  misc_RNA (1)...(19): siRNA sense strand
cagcaaucauucaaucuga

SEQ ID NO: 61050 - RNA, 19 nt, Homo sapiens
  misc_RNA (1)...(19): siRNA sense strand
gugcaggcauuaauagaga

SEQ ID NO: 61051 - RNA, 19 nt, Homo sapiens
  misc_RNA (1)...(19): siRNA sense strand
gagaugcuccuggacguua

SEQ ID NO: 61052 - RNA, 19 nt, Homo sapiens
  misc_RNA (1)...(19): siRNA sense strand
aaggaaagguccaauuugu

SEQ ID NO: 61053 - RNA, 19 nt, Homo sapiens
  misc_RNA (1)...(19): siRNA sense strand
gaaaaggaacagucauaua

SEQ ID NO: 61054 - RNA, 19 nt, Homo sapiens
  misc_RNA (1)...(19): siRNA sense strand
ucacucauuuguucacuug

SEQ ID NO: 61055 - RNA, 19 nt, Homo sapiens
  misc_RNA (1)...(19): siRNA sense strand
ugacagcacugggauggaa

SEQ ID NO: 61056 - RNA, 19 nt, Homo sapiens
  misc_RNA (1)...(19): siRNA sense strand
gaaaccaacacuuccucua

SEQ ID NO: 61057 - RNA, 19 nt, Homo sapiens
  misc_RNA (1)...(19): siRNA sense strand
gaaaugacagaccaaaugg

SEQ ID NO: 61058 - RNA, 19 nt, Homo sapiens
  misc_RNA (1)...(19): siRNA sense strand
caaagcaaacugauccaaa

SEQ ID NO: 61059 - RNA, 19 nt, Homo sapiens
  misc_RNA (1)...(19): siRNA sense strand
caaugaagccaaaccuauu

SEQ ID NO: 61060 - RNA, 19 nt, Homo sapiens
  misc_RNA (1)...(19): siRNA sense strand
aaagaucucugcccuggau

SEQ ID NO: 61061 - RNA, 19 nt, Homo sapiens
  misc_RNA (1)...(19): siRNA sense strand
gagcagugauuauguuugc

SEQ ID NO: 61062 - RNA, 19 nt, Homo sapiens
  misc_RNA (1)...(19): siRNA sense strand
ggccaugcuuuaugcaauu

SEQ ID NO: 61063 - RNA, 19 nt, Homo sapiens
  misc_RNA (1)...(19): siRNA sense strand
gcucaagugugacauuucu

SEQ ID NO: 61064 - RNA, 19 nt, Homo sapiens
  misc_RNA (1)...(19): siRNA sense strand
gacaugcagugggcucaua

SEQ ID NO: 61065 - RNA, 19 nt, Homo sapiens
  misc_RNA (1)...(19): siRNA sense strand
ggauuugaucgauacuuua

SEQ ID NO: 61066 - RNA, 19 nt, Homo sapiens
  misc_RNA (1)...(19): siRNA sense strand
gaaccaagaccuggagaau

SEQ ID NO: 61067 - RNA, 19 nt, Homo sapiens
  misc_RNA (1)...(19): siRNA sense strand
uggauuugaucgauacuuu

SEQ ID NO: 61068 - RNA, 19 nt, Homo sapiens
  misc_RNA (1)...(19): siRNA sense strand
gugagagucuugaaaccaa

SEQ ID NO: 61069 - RNA, 19 nt, Homo sapiens
  misc_RNA (1)...(19): siRNA sense strand
ccuauuggauuuaccaugu

SEQ ID NO: 61070 - RNA, 19 nt, Homo sapiens
  misc_RNA (1)...(19): siRNA sense strand
gacacuagauccagagaag

SEQ ID NO: 61071 - RNA, 19 nt, Homo sapiens
  misc_RNA (1)...(19): siRNA sense strand
gcuccuggacguuaugaua

SEQ ID NO: 61072 - RNA, 19 nt, Homo sapiens
  misc_RNA (1)...(19): siRNA sense strand
caauugaccagauuaacaa

SEQ ID NO: 61073 - RNA, 19 nt, Homo sapiens
  misc_RNA (1)...(19): siRNA sense strand
uuacagcaaucauucaauc

SEQ ID NO: 61074 - RNA, 19 nt, Homo sapiens
  misc_RNA (1)...(19): siRNA sense strand
ucucugcccuggauacauu

SEQ ID NO: 61075 - RNA, 19 nt, Homo sapiens
  misc_RNA (1)...(19): siRNA sense strand
ucgaagaaaugugugguuu

SEQ ID NO: 61076 - RNA, 19 nt, Homo sapiens
  misc_RNA (1)...(19): siRNA sense strand
ggagauuggugguguuugc

SEQ ID NO: 61077 - RNA, 19 nt, Homo sapiens
  misc_RNA (1)...(19): siRNA sense strand
uaagugauaacaccaggua

SEQ ID NO: 61078 - RNA, 19 nt, Homo sapiens
  misc_RNA (1)...(19): siRNA sense strand
gacuggaggccaugcuuua

SEQ ID NO: 61079 - RNA, 19 nt, Homo sapiens
  misc_RNA (1)...(19): siRNA sense strand
gcacuccugucacuuuuaa

SEQ ID NO: 61080 - RNA, 19 nt, Homo sapiens
  misc_RNA (1)...(19): siRNA sense strand
uaacaccagguaugacuuu

SEQ ID NO: 61081 - RNA, 19 nt, Homo sapiens
  misc_RNA (1)...(19): siRNA sense strand
uggauuggcucagauaguu

SEQ ID NO: 61082 - RNA, 19 nt, Homo sapiens
  misc_RNA (1)...(19): siRNA sense strand
caagacaacauauaucagu

SEQ ID NO: 61083 - RNA, 19 nt, Homo sapiens
  misc_RNA (1)...(19): siRNA sense strand
ccaccugcaucauuugguu

SEQ ID NO: 61084 - RNA, 19 nt, Homo sapiens
  misc_RNA (1)...(19): siRNA sense strand
ucccagagacuuucaauga

SEQ ID NO: 61085 - RNA, 19 nt, Homo sapiens
  misc_RNA (1)...(19): siRNA sense strand
gccaauaaucgaagaaaug

SEQ ID NO: 61086 - RNA, 19 nt, Homo sapiens
  misc_RNA (1)...(19): siRNA sense strand
caucaucauugacuaugga

SEQ ID NO: 61087 - RNA, 19 nt, Homo sapiens
  misc_RNA (1)...(19): siRNA sense strand
guguuugucugguuuguug

SEQ ID NO: 61088 - RNA, 19 nt, Homo sapiens
  misc_RNA (1)...(19): siRNA sense strand
gaucuccuuuccaacauca

SEQ ID NO: 61089 - RNA, 19 nt, Homo sapiens
  misc_RNA (1)...(19): siRNA sense strand
gugcucaagugugacauuu

SEQ ID NO: 61090 - RNA, 19 nt, Homo sapiens
  misc_RNA (1)...(19): siRNA sense strand
gaaagagcuacuugguuau

SEQ ID NO: 61091 - RNA, 19 nt, Homo sapiens
  misc_RNA (1)...(19): siRNA sense strand
gugauuauguuugccaaug

SEQ ID NO: 61092 - RNA, 19 nt, Homo sapiens
  misc_RNA (1)...(19): siRNA sense strand
ucacaaugaugcaaagaac

SEQ ID NO: 61093 - RNA, 19 nt, Homo sapiens
  misc_RNA (1)...(19): siRNA sense strand
cuaccaagacaacauauau

SEQ ID NO: 61094 - RNA, 19 nt, Homo sapiens
  misc_RNA (1)...(19): siRNA sense strand
ucuauaugcccaagguuua

SEQ ID NO: 61095 - RNA, 19 nt, Homo sapiens
  misc_RNA (1)...(19): siRNA sense strand
ucaaugaagccaaaccuau

SEQ ID NO: 61096 - RNA, 19 nt, Homo sapiens
  misc_RNA (1)...(19): siRNA sense strand
aaagagcuacuugguuaua

SEQ ID NO: 61097 - RNA, 19 nt, Homo sapiens
  misc_RNA (1)...(19): siRNA sense strand
gcucgggauucaucuuaug

SEQ ID NO: 61098 - RNA, 19 nt, Homo sapiens
  misc_RNA (1)...(19): siRNA sense strand
gauuggugguguuugcauu

SEQ ID NO: 61099 - RNA, 19 nt, Homo sapiens
  misc_RNA (1)...(19): siRNA sense strand
ucaccaagcccgacaagau

SEQ ID NO: 61100 - RNA, 19 nt, Homo sapiens
  misc_RNA (1)...(19): siRNA sense strand
agaaagaugcuucggaugu

SEQ ID NO: 61101 - RNA, 19 nt, Homo sapiens
  misc_RNA (1)...(19): siRNA sense strand
gagagcagcggacacuaga

SEQ ID NO: 61102 - RNA, 19 nt, Homo sapiens
  misc_RNA (1)...(19): siRNA sense strand
ggaccaaucagcuucaucu

SEQ ID NO: 61103 - RNA, 19 nt, Homo sapiens
  misc_RNA (1)...(19): siRNA sense strand
gggaaagagcuacuugguu

SEQ ID NO: 61104 - RNA, 19 nt, Homo sapiens
  misc_RNA (1)...(19): siRNA sense strand
ugauuauguuugccaauga

SEQ ID NO: 61105 - RNA, 19 nt, Homo sapiens
  misc_RNA (1)...(19): siRNA sense strand
caaaucagcuaugcaucca

SEQ ID NO: 61106 - RNA, 19 nt, Homo sapiens
  misc_RNA (1)...(19): siRNA sense strand
gacaacauauaucaguuac

SEQ ID NO: 61107 - RNA, 19 nt, Homo sapiens
  misc_RNA (1)...(19): siRNA sense strand
ugcccaagguuuauauuau

SEQ ID NO: 61108 - RNA, 19 nt, Homo sapiens
  misc_RNA (1)...(19): siRNA sense strand
guauaccaccugcaucauu

SEQ ID NO: 61109 - RNA, 19 nt, Homo sapiens
  misc_RNA (1)...(19): siRNA sense strand
gaugagcuguccugugaac

SEQ ID NO: 61110 - RNA, 19 nt, Homo sapiens
  misc_RNA (1)...(19): siRNA sense strand
gcugugaagguuacaacua

SEQ ID NO: 61111 - RNA, 19 nt, Homo sapiens
  misc_RNA (1)...(19): siRNA sense strand
uuuagaagccgaacucuug

SEQ ID NO: 61112 - RNA, 19 nt, Homo sapiens
  misc_RNA (1)...(19): siRNA sense strand
ucaaacgccugcuagaaac

SEQ ID NO: 61113 - RNA, 19 nt, Homo sapiens
  misc_RNA (1)...(19): siRNA sense strand
agagcuacuugguuauauu

SEQ ID NO: 61114 - RNA, 19 nt, Homo sapiens
  misc_RNA (1)...(19): siRNA sense strand
aaagcaaacugauccaaaa

SEQ ID NO: 61115 - RNA, 19 nt, Homo sapiens
  misc_RNA (1)...(19): siRNA sense strand
ggagagcagcggacacuag

SEQ ID NO: 61116 - RNA, 19 nt, Homo sapiens
  misc_RNA (1)...(19): siRNA sense strand
gcacagaguacaaagucau

SEQ ID NO: 61117 - RNA, 19 nt, Homo sapiens
  misc_RNA (1)...(19): siRNA sense strand
uggcauguguuucagcuau

SEQ ID NO: 61118 - RNA, 19 nt, Homo sapiens
  misc_RNA (1)...(19): siRNA sense strand
uuuaagugcuucaguaucu

SEQ ID NO: 61119 - RNA, 19 nt, Homo sapiens
  misc_RNA (1)...(19): siRNA sense strand
gaugagaaaucuuuagaag

SEQ ID NO: 61120 - RNA, 19 nt, Homo sapiens
  misc_RNA (1)...(19): siRNA sense strand
gaguagaguuugaagagaa

SEQ ID NO: 61121 - RNA, 19 nt, Homo sapiens
  misc_RNA (1)...(19): siRNA sense strand
gcaaauacaaccucuaugg

SEQ ID NO: 61122 - RNA, 19 nt, Homo sapiens
  misc_RNA (1)...(19): siRNA sense strand
uagaagguauagcagauuu

SEQ ID NO: 61123 - RNA, 19 nt, Homo sapiens
  misc_RNA (1)...(19): siRNA sense strand
cuacuucccugccuuugaa

SEQ ID NO: 61124 - RNA, 19 nt, Homo sapiens
  misc_RNA (1)...(19): siRNA sense strand
caaggaagccucccaugga

SEQ ID NO: 61125 - RNA, 19 nt, Homo sapiens
  misc_RNA (1)...(19): siRNA sense strand
ggaagccucccauggauga

SEQ ID NO: 61126 - RNA, 19 nt, Homo sapiens
  misc_RNA (1)...(19): siRNA sense strand
ggaguagaguuugaagaga

SEQ ID NO: 61127 - RNA, 19 nt, Homo sapiens
  misc_RNA (1)...(19): siRNA sense strand
caaggaagauuuucagguu

SEQ ID NO: 61128 - RNA, 19 nt, Homo sapiens
  misc_RNA (1)...(19): siRNA sense strand
ugguggaacuucucuacua

SEQ ID NO: 61129 - RNA, 19 nt, Homo sapiens
  misc_RNA (1)...(19): siRNA sense strand
cagcaaauacaaccucuau

SEQ ID NO: 61130 - RNA, 19 nt, Homo sapiens
  misc_RNA (1)...(19): siRNA sense strand
cagcuggaguagaguuuga

SEQ ID NO: 61131 - RNA, 19 nt, Homo sapiens
  misc_RNA (1)...(19): siRNA sense strand
ggaugagaaaucuuuagaa

SEQ ID NO: 61132 - RNA, 19 nt, Homo sapiens
  misc_RNA (1)...(19): siRNA sense strand
ccauggaugagaaaucuuu

SEQ ID NO: 61133 - RNA, 19 nt, Homo sapiens
  misc_RNA (1)...(19): siRNA sense strand
ggaagauuuucagguuuua

SEQ ID NO: 61134 - RNA, 19 nt, Homo sapiens
  misc_RNA (1)...(19): siRNA sense strand
ugauggauauuugauguuc

SEQ ID NO: 61135 - RNA, 19 nt, Homo sapiens
  misc_RNA (1)...(19): siRNA sense strand
gguggaacuucucuacuac

SEQ ID NO: 61136 - RNA, 19 nt, Homo sapiens
  misc_RNA (1)...(19): siRNA sense strand
uuggacaaguuaagaaaug

SEQ ID NO: 61137 - RNA, 19 nt, Homo sapiens
  misc_RNA (1)...(19): siRNA sense strand
uauagcagauuugggugaa

SEQ ID NO: 61138 - RNA, 19 nt, Homo sapiens
  misc_RNA (1)...(19): siRNA sense strand
gaagguauagcagauuugg

SEQ ID NO: 61139 - RNA, 19 nt, Homo sapiens
  misc_RNA (1)...(19): siRNA sense strand
gauuuggacaaguuaagaa

SEQ ID NO: 61140 - RNA, 19 nt, Homo sapiens
  misc_RNA (1)...(19): siRNA sense strand
aguagaguuugaagagaaa

SEQ ID NO: 61141 - RNA, 19 nt, Homo sapiens
  misc_RNA (1)...(19): siRNA sense strand
caaguuaagaaaugaugga

SEQ ID NO: 61142 - RNA, 19 nt, Homo sapiens
  misc_RNA (1)...(19): siRNA sense strand
aaggaagccucccauggau

SEQ ID NO: 61143 - RNA, 19 nt, Homo sapiens
  misc_RNA (1)...(19): siRNA sense strand
uggacaaguuaagaaauga

SEQ ID NO: 61144 - RNA, 19 nt, Homo sapiens
  misc_RNA (1)...(19): siRNA sense strand
ggacaaguuaagaaaugau

SEQ ID NO: 61145 - RNA, 19 nt, Homo sapiens
  misc_RNA (1)...(19): siRNA sense strand
gacaaguuaagaaaugaug

SEQ ID NO: 61146 - RNA, 19 nt, Homo sapiens
  misc_RNA (1)...(19): siRNA sense strand
gcuacuucccugccuuuga

SEQ ID NO: 61147 - RNA, 19 nt, Homo sapiens
  misc_RNA (1)...(19): siRNA sense strand
ggcugcagcuggaguagag

SEQ ID NO: 61148 - RNA, 19 nt, Homo sapiens
  misc_RNA (1)...(19): siRNA sense strand
cauggaugagaaaucuuua

SEQ ID NO: 61149 - RNA, 19 nt, Homo sapiens
  misc_RNA (1)...(19): siRNA sense strand
caaccucuaugggaaagac

SEQ ID NO: 61150 - RNA, 19 nt, Homo sapiens
  misc_RNA (1)...(19): siRNA sense strand
gcccugauugauauguaua

SEQ ID NO: 61151 - RNA, 19 nt, Homo sapiens
  misc_RNA (1)...(19): siRNA sense strand
ucccauggaugagaaaucu

SEQ ID NO: 61152 - RNA, 19 nt, Homo sapiens
  misc_RNA (1)...(19): siRNA sense strand
uggaugagaaaucuuuaga

SEQ ID NO: 61153 - RNA, 19 nt, Homo sapiens
  misc_RNA (1)...(19): siRNA sense strand
gaagaucucugccuacaug

SEQ ID NO: 61154 - RNA, 19 nt, Homo sapiens
  misc_RNA (1)...(19): siRNA sense strand
ugagagaaaccaaguauuu

SEQ ID NO: 61155 - RNA, 19 nt, Homo sapiens
  misc_RNA (1)...(19): siRNA sense strand
gagagaaaccaaguauuug

SEQ ID NO: 61156 - RNA, 19 nt, Homo sapiens
  misc_RNA (1)...(19): siRNA sense strand
caagaucaccuuuguggau

SEQ ID NO: 61157 - RNA, 19 nt, Homo sapiens
  misc_RNA (1)...(19): siRNA sense strand
aagcagccaugguuucuug

SEQ ID NO: 61158 - RNA, 19 nt, Homo sapiens
  misc_RNA (1)...(19): siRNA sense strand
gcagauucgcgaagacauu

SEQ ID NO: 61159 - RNA, 19 nt, Homo sapiens
  misc_RNA (1)...(19): siRNA sense strand
guaugcagcuggccaaacu

SEQ ID NO: 61160 - RNA, 19 nt, Homo sapiens
  misc_RNA (1)...(19): siRNA sense strand
gcgaagacauuuuggagaa

SEQ ID NO: 61161 - RNA, 19 nt, Homo sapiens
  misc_RNA (1)...(19): siRNA sense strand
uggccaaacucugcuauga

SEQ ID NO: 61162 - RNA, 19 nt, Homo sapiens
  misc_RNA (1)...(19): siRNA sense strand
agagaaaccaaguauuuga

SEQ ID NO: 61163 - RNA, 19 nt, Homo sapiens
  misc_RNA (1)...(19): siRNA sense strand
ggccuggacuuucccaauc

SEQ ID NO: 61164 - RNA, 19 nt, Homo sapiens
  misc_RNA (1)...(19): siRNA sense strand
gaucaccuuuguggauuuc

SEQ ID NO: 61165 - RNA, 19 nt, Homo sapiens
  misc_RNA (1)...(19): siRNA sense strand
aagaucaccuuuguggauu

SEQ ID NO: 61166 - RNA, 19 nt, Homo sapiens
  misc_RNA (1)...(19): siRNA sense strand
ggaagcagccaugguuucu

SEQ ID NO: 61167 - RNA, 19 nt, Homo sapiens
  misc_RNA (1)...(19): siRNA sense strand
cagauucgcgaagacauuu

SEQ ID NO: 61168 - RNA, 19 nt, Homo sapiens
  misc_RNA (1)...(19): siRNA sense strand
gagaaaccaaguauuugag

SEQ ID NO: 61169 - RNA, 19 nt, Homo sapiens
  misc_RNA (1)...(19): siRNA sense strand
gaucucugccuacaugaag

SEQ ID NO: 61170 - RNA, 19 nt, Homo sapiens
  misc_RNA (1)...(19): siRNA sense strand
caagcugggccuggacuuu

SEQ ID NO: 61171 - RNA, 19 nt, Homo sapiens
  misc_RNA (1)...(19): siRNA sense strand
gggaagcagccaugguuuc

SEQ ID NO: 61172 - RNA, 19 nt, Homo sapiens
  misc_RNA (1)...(19): siRNA sense strand
uuguggauuucaucgcuua

SEQ ID NO: 61173 - RNA, 19 nt, Homo sapiens
  misc_RNA (1)...(19): siRNA sense strand
uuugagggcuuggagaaga

SEQ ID NO: 61174 - RNA, 19 nt, Homo sapiens
  misc_RNA (1)...(19): siRNA sense strand
gagcagauucgcgaagaca

SEQ ID NO: 61175 - RNA, 19 nt, Homo sapiens
  misc_RNA (1)...(19): siRNA sense strand
augauguccuugagagaaa

SEQ ID NO: 61176 - RNA, 19 nt, Homo sapiens
  misc_RNA (1)...(19): siRNA sense strand
agaucaccuuuguggauuu

SEQ ID NO: 61177 - RNA, 19 nt, Homo sapiens
  misc_RNA (1)...(19): siRNA sense strand
ccaaucugcccuacuugau

SEQ ID NO: 61178 - RNA, 19 nt, Homo sapiens
  misc_RNA (1)...(19): siRNA sense strand
uaugauguccuugagagaa

SEQ ID NO: 61179 - RNA, 19 nt, Homo sapiens
  misc_RNA (1)...(19): siRNA sense strand
gaagcagccaugguuucuu

SEQ ID NO: 61180 - RNA, 19 nt, Homo sapiens
  misc_RNA (1)...(19): siRNA sense strand
ggagcagauucgcgaagac

SEQ ID NO: 61181 - RNA, 19 nt, Homo sapiens
  misc_RNA (1)...(19): siRNA sense strand
uggagaaccaguuuaugga

SEQ ID NO: 61182 - RNA, 19 nt, Homo sapiens
  misc_RNA (1)...(19): siRNA sense strand
uucccaaucugcccuacuu

SEQ ID NO: 61183 - RNA, 19 nt, Homo sapiens
  misc_RNA (1)...(19): siRNA sense strand
gaagaucucugccuacaug

SEQ ID NO: 61184 - RNA, 19 nt, Homo sapiens
  misc_RNA (1)...(19): siRNA sense strand
gaaagucagcuacauggaa

SEQ ID NO: 61185 - RNA, 19 nt, Homo sapiens
  misc_RNA (1)...(19): siRNA sense strand
gaagauucguguggacauu

SEQ ID NO: 61186 - RNA, 19 nt, Homo sapiens
  misc_RNA (1)...(19): siRNA sense strand
ugacaugaagcguauauuu

SEQ ID NO: 61187 - RNA, 19 nt, Homo sapiens
  misc_RNA (1)...(19): siRNA sense strand
gacaugaagcguauauuug

SEQ ID NO: 61188 - RNA, 19 nt, Homo sapiens
  misc_RNA (1)...(19): siRNA sense strand
caagaucaccuuuguggau

SEQ ID NO: 61189 - RNA, 19 nt, Homo sapiens
  misc_RNA (1)...(19): siRNA sense strand
cuacauggaacagcaaaua

SEQ ID NO: 61190 - RNA, 19 nt, Homo sapiens
  misc_RNA (1)...(19): siRNA sense strand
uugagaaacugaagccaaa

SEQ ID NO: 61191 - RNA, 19 nt, Homo sapiens
  misc_RNA (1)...(19): siRNA sense strand
uggauuuccuugccuauga

SEQ ID NO: 61192 - RNA, 19 nt, Homo sapiens
  misc_RNA (1)...(19): siRNA sense strand
ggacuucaucucccgcuuu

SEQ ID NO: 61193 - RNA, 19 nt, Homo sapiens
  misc_RNA (1)...(19): siRNA sense strand
ggaacucccugaaaagcua

SEQ ID NO: 61194 - RNA, 19 nt, Homo sapiens
  misc_RNA (1)...(19): siRNA sense strand
acaugaagcguauauuuga

SEQ ID NO: 61195 - RNA, 19 nt, Homo sapiens
  misc_RNA (1)...(19): siRNA sense strand
ggagacaagaucaccuuug

SEQ ID NO: 61196 - RNA, 19 nt, Homo sapiens
  misc_RNA (1)...(19): siRNA sense strand
gggaagcggccaugguuug

SEQ ID NO: 61197 - RNA, 19 nt, Homo sapiens
  misc_RNA (1)...(19): siRNA sense strand
ggccuggacuuucccaauc

SEQ ID NO: 61198 - RNA, 19 nt, Homo sapiens
  misc_RNA (1)...(19): siRNA sense strand
gacuucaucucccgcuuug

SEQ ID NO: 61199 - RNA, 19 nt, Homo sapiens
  misc_RNA (1)...(19): siRNA sense strand
caagcuauguggaaaagaa

SEQ ID NO: 61200 - RNA, 19 nt, Homo sapiens
  misc_RNA (1)...(19): siRNA sense strand
gacagaagaggagaagauu

SEQ ID NO: 61201 - RNA, 19 nt, Homo sapiens
  misc_RNA (1)...(19): siRNA sense strand
gaucaccuuuguggauuuc

SEQ ID NO: 61202 - RNA, 19 nt, Homo sapiens
  misc_RNA (1)...(19): siRNA sense strand
gcuuugaggguuugaagaa

SEQ ID NO: 61203 - RNA, 19 nt, Homo sapiens
  misc_RNA (1)...(19): siRNA sense strand
aagaucaccuuuguggauu

SEQ ID NO: 61204 - RNA, 19 nt, Homo sapiens
  misc_RNA (1)...(19): siRNA sense strand
aagaagaucucugccuaca

SEQ ID NO: 61205 - RNA, 19 nt, Homo sapiens
  misc_RNA (1)...(19): siRNA sense strand
ggauuuccuugccuaugau

SEQ ID NO: 61206 - RNA, 19 nt, Homo sapiens
  misc_RNA (1)...(19): siRNA sense strand
caugaaguccagccaauuc

SEQ ID NO: 61207 - RNA, 19 nt, Homo sapiens
  misc_RNA (1)...(19): siRNA sense strand
ggaaagucagcuacaugga

SEQ ID NO: 61208 - RNA, 19 nt, Homo sapiens
  misc_RNA (1)...(19): siRNA sense strand
acauggagcuggucagacu

SEQ ID NO: 61209 - RNA, 19 nt, Homo sapiens
  misc_RNA (1)...(19): siRNA sense strand
gacucaagcuauguggaaa

SEQ ID NO: 61210 - RNA, 19 nt, Homo sapiens
  misc_RNA (1)...(19): siRNA sense strand
auacacagacucaagcuau

SEQ ID NO: 61211 - RNA, 19 nt, Homo sapiens
  misc_RNA (1)...(19): siRNA sense strand
caagaucacccagagcaau

SEQ ID NO: 61212 - RNA, 19 nt, Homo sapiens
  misc_RNA (1)...(19): siRNA sense strand
uacaugaaguccagccaau

SEQ ID NO: 61213 - RNA, 19 nt, Homo sapiens
  misc_RNA (1)...(19): siRNA sense strand
agacagaagaggagaagau

SEQ ID NO: 61214 - RNA, 19 nt, Homo sapiens
  misc_RNA (1)...(19): siRNA sense strand
ugacccagauuuugagaaa

SEQ ID NO: 61215 - RNA, 19 nt, Homo sapiens
  misc_RNA (1)...(19): siRNA sense strand
gaucucugccuacaugaag

SEQ ID NO: 61216 - RNA, 19 nt, Homo sapiens
  misc_RNA (1)...(19): siRNA sense strand
caagcugggccuggacuuu

SEQ ID NO: 61217 - RNA, 19 nt, Homo sapiens
  misc_RNA (1)...(19): siRNA sense strand
uauuugagcccaagugcuu

SEQ ID NO: 61218 - RNA, 19 nt, Homo sapiens
  misc_RNA (1)...(19): siRNA sense strand
agacucaagcuauguggaa

SEQ ID NO: 61219 - RNA, 19 nt, Homo sapiens
  misc_RNA (1)...(19): siRNA sense strand
ccacauggagcuggucaga

SEQ ID NO: 61220 - RNA, 19 nt, Homo sapiens
  misc_RNA (1)...(19): siRNA sense strand
uuugaggguuugaagaaga

SEQ ID NO: 61221 - RNA, 19 nt, Homo sapiens
  misc_RNA (1)...(19): siRNA sense strand
uacacagacucaagcuaug

SEQ ID NO: 61222 - RNA, 19 nt, Homo sapiens
  misc_RNA (1)...(19): siRNA sense strand
cagaagaggagaagauucg

SEQ ID NO: 61223 - RNA, 19 nt, Homo sapiens
  misc_RNA (1)...(19): siRNA sense strand
ggagacagaagaggagaag

SEQ ID NO: 61224 - RNA, 19 nt, Homo sapiens
  misc_RNA (1)...(19): siRNA sense strand
uccgcuugcuccuggaaua

SEQ ID NO: 61225 - RNA, 19 nt, Homo sapiens
  misc_RNA (1)...(19): siRNA sense strand
caugaagcguauauuugag

SEQ ID NO: 61226 - RNA, 19 nt, Homo sapiens
  misc_RNA (1)...(19): siRNA sense strand
agaucaccuuuguggauuu

SEQ ID NO: 61227 - RNA, 19 nt, Homo sapiens
  misc_RNA (1)...(19): siRNA sense strand
gcuaugacccagauuuuga

SEQ ID NO: 61228 - RNA, 19 nt, Homo sapiens
  misc_RNA (1)...(19): siRNA sense strand
ccaaucugcccuacuugau

SEQ ID NO: 61229 - RNA, 19 nt, Homo sapiens
  misc_RNA (1)...(19): siRNA sense strand
caggagacaagaucaccuu

SEQ ID NO: 61230 - RNA, 19 nt, Homo sapiens
  misc_RNA (1)...(19): siRNA sense strand
uucccaaucugcccuacuu

SEQ ID NO: 61231 - RNA, 19 nt, Homo sapiens
  misc_RNA (1)...(19): siRNA sense strand
gggcaaggaugacuaugug

SEQ ID NO: 61232 - RNA, 19 nt, Homo sapiens
  misc_RNA (1)...(19): siRNA sense strand
gcaggagggcucacucaaa

SEQ ID NO: 61233 - RNA, 19 nt, Homo sapiens
  misc_RNA (1)...(19): siRNA sense strand
caggagggcucacucaaag

SEQ ID NO: 61234 - RNA, 19 nt, Homo sapiens
  misc_RNA (1)...(19): siRNA sense strand
gcaaggaugacuaugugaa

SEQ ID NO: 61235 - RNA, 19 nt, Homo sapiens
  misc_RNA (1)...(19): siRNA sense strand
ccuacaccguggucuauuu

SEQ ID NO: 61236 - RNA, 19 nt, Homo sapiens
  misc_RNA (1)...(19): siRNA sense strand
acggagaccucacccugua

SEQ ID NO: 61237 - RNA, 19 nt, Homo sapiens
  misc_RNA (1)...(19): siRNA sense strand
ccgggcaacugaagccuuu

SEQ ID NO: 61238 - RNA, 19 nt, Homo sapiens
  misc_RNA (1)...(19): siRNA sense strand
gcugauccaugagguccua

SEQ ID NO: 61239 - RNA, 19 nt, Homo sapiens
  misc_RNA (1)...(19): siRNA sense strand
caaagccuccugccuauac

SEQ ID NO: 61240 - RNA, 19 nt, Homo sapiens
  misc_RNA (1)...(19): siRNA sense strand
gaggcaagaccuucauugu

SEQ ID NO: 61241 - RNA, 19 nt, Homo sapiens
  misc_RNA (1)...(19): siRNA sense strand
ggaggcaagaccuucauug

SEQ ID NO: 61242 - RNA, 19 nt, Homo sapiens
  misc_RNA (1)...(19): siRNA sense strand
ugguggacauggugaauga

SEQ ID NO: 61243 - RNA, 19 nt, Homo sapiens
  misc_RNA (1)...(19): siRNA sense strand
ggaccuccgcugcaaauac

SEQ ID NO: 61244 - RNA, 19 nt, Homo sapiens
  misc_RNA (1)...(19): siRNA sense strand
cucaaagccuccugccuau

SEQ ID NO: 61245 - RNA, 19 nt, Homo sapiens
  misc_RNA (1)...(19): siRNA sense strand
cguggucuauuucccaguu

SEQ ID NO: 61246 - RNA, 19 nt, Homo sapiens
  misc_RNA (1)...(19): siRNA sense strand
caacugaagccuuuugaga

SEQ ID NO: 61247 - RNA, 19 nt, Homo sapiens
  misc_RNA (1)...(19): siRNA sense strand
acuacaaccugcuggacuu

SEQ ID NO: 61248 - RNA, 19 nt, Homo sapiens
  misc_RNA (1)...(19): siRNA sense strand
caaggaugacuaugugaag

SEQ ID NO: 61249 - RNA, 19 nt, Homo sapiens
  misc_RNA (1)...(19): siRNA sense strand
agacccugcugucccagaa

SEQ ID NO: 61250 - RNA, 19 nt, Homo sapiens
  misc_RNA (1)...(19): siRNA sense strand
ucaaagccuccugccuaua

SEQ ID NO: 61251 - RNA, 19 nt, Homo sapiens
  misc_RNA (1)...(19): siRNA sense strand
ccucaucuacaccaacuau

SEQ ID NO: 61252 - RNA, 19 nt, Homo sapiens
  misc_RNA (1)...(19): siRNA sense strand
caucaauggcaacgggaaa

SEQ ID NO: 61253 - RNA, 19 nt, Homo sapiens
  misc_RNA (1)...(19): siRNA sense strand
gauuaaaggucagcacuua

SEQ ID NO: 61254 - RNA, 19 nt, Homo sapiens
  misc_RNA (1)...(19): siRNA sense strand
gcacuuaagcgaugccuuu

SEQ ID NO: 61255 - RNA, 19 nt, Homo sapiens
  misc_RNA (1)...(19): siRNA sense strand
aauauaaggucccugacua

SEQ ID NO: 61256 - RNA, 19 nt, Homo sapiens
  misc_RNA (1)...(19): siRNA sense strand
gacccaagcuggccacaug

SEQ ID NO: 61257 - RNA, 19 nt, Homo sapiens
  misc_RNA (1)...(19): siRNA sense strand
cuccuuagcugaccucgua

SEQ ID NO: 61258 - RNA, 19 nt, Homo sapiens
  misc_RNA (1)...(19): siRNA sense strand
caucguggaucugauuaaa

SEQ ID NO: 61259 - RNA, 19 nt, Homo sapiens
  misc_RNA (1)...(19): siRNA sense strand
uaccugacgcgcaaauaua

SEQ ID NO: 61260 - RNA, 19 nt, Homo sapiens
  misc_RNA (1)...(19): siRNA sense strand
gcgcaucguggaucugauu

SEQ ID NO: 61261 - RNA, 19 nt, Homo sapiens
  misc_RNA (1)...(19): siRNA sense strand
ccauaaagcagaagcugau

SEQ ID NO: 61262 - RNA, 19 nt, Homo sapiens
  misc_RNA (1)...(19): siRNA sense strand
aaggugauguucccugugu

SEQ ID NO: 61263 - RNA, 19 nt, Homo sapiens
  misc_RNA (1)...(19): siRNA sense strand
agaacgacauucccuucga

SEQ ID NO: 61264 - RNA, 19 nt, Homo sapiens
  misc_RNA (1)...(19): siRNA sense strand
ccgcgcuguuuacaucuuu

SEQ ID NO: 61265 - RNA, 19 nt, Homo sapiens
  misc_RNA (1)...(19): siRNA sense strand
gcaucguggaucugauuaa

SEQ ID NO: 61266 - RNA, 19 nt, Homo sapiens
  misc_RNA (1)...(19): siRNA sense strand
cuaccugacgcgcaaauau

SEQ ID NO: 61267 - RNA, 19 nt, Homo sapiens
  misc_RNA (1)...(19): siRNA sense strand
ucguggaucugauuaaagg

SEQ ID NO: 61268 - RNA, 19 nt, Homo sapiens
  misc_RNA (1)...(19): siRNA sense strand
gugcccguguggaugagua

SEQ ID NO: 61269 - RNA, 19 nt, Homo sapiens
  misc_RNA (1)...(19): siRNA sense strand
acacgacucugcggagaag

SEQ ID NO: 61270 - RNA, 19 nt, Homo sapiens
  misc_RNA (1)...(19): siRNA sense strand
ggugauguucccuguguuc

SEQ ID NO: 61271 - RNA, 19 nt, Homo sapiens
  misc_RNA (1)...(19): siRNA sense strand
ccaagaagaacgacauucc

SEQ ID NO: 61272 - RNA, 19 nt, Homo sapiens
  misc_RNA (1)...(19): siRNA sense strand
gccaguaucuccccagaca

SEQ ID NO: 61273 - RNA, 19 nt, Homo sapiens
  misc_RNA (1)...(19): siRNA sense strand
ugcaguugcucgaggacaa

SEQ ID NO: 61274 - RNA, 19 nt, Homo sapiens
  misc_RNA (1)...(19): siRNA sense strand
gcucaaggauggugauuuc

SEQ ID NO: 61275 - RNA, 19 nt, Homo sapiens
  misc_RNA (1)...(19): siRNA sense strand
gccuagagcuguuucuuga

SEQ ID NO: 61276 - RNA, 19 nt, Homo sapiens
  misc_RNA (1)...(19): siRNA sense strand
gacacuggcugaucucaug

SEQ ID NO: 61277 - RNA, 19 nt, Homo sapiens
  misc_RNA (1)...(19): siRNA sense strand
gcccacagcaucaucuuga

SEQ ID NO: 61278 - RNA, 19 nt, Homo sapiens
  misc_RNA (1)...(19): siRNA sense strand
ugcaauggcuggaggacaa

SEQ ID NO: 61279 - RNA, 19 nt, Homo sapiens
  misc_RNA (1)...(19): siRNA sense strand
ggaaacugccgacgcucaa

SEQ ID NO: 61280 - RNA, 19 nt, Homo sapiens
  misc_RNA (1)...(19): siRNA sense strand
gcaacaggacugccaugga

SEQ ID NO: 61281 - RNA, 19 nt, Homo sapiens
  misc_RNA (1)...(19): siRNA sense strand
ucaaagggcagcacaagag

SEQ ID NO: 61282 - RNA, 19 nt, Homo sapiens
  misc_RNA (1)...(19): siRNA sense strand
cugcauccguggcaccuuu

SEQ ID NO: 61283 - RNA, 19 nt, Homo sapiens
  misc_RNA (1)...(19): siRNA sense strand
gaagaauggcauccccuua

SEQ ID NO: 61284 - RNA, 19 nt, Homo sapiens
  misc_RNA (1)...(19): siRNA sense strand
aaggaguucuugcagauca

SEQ ID NO: 61285 - RNA, 19 nt, Homo sapiens
  misc_RNA (1)...(19): siRNA sense strand
gcacaagagcaaggaguuc

SEQ ID NO: 61286 - RNA, 19 nt, Homo sapiens
  misc_RNA (1)...(19): siRNA sense strand
guggacgaguggaggcuuu

SEQ ID NO: 61287 - RNA, 19 nt, Homo sapiens
  misc_RNA (1)...(19): siRNA sense strand
gugcccguguucaugagua

SEQ ID NO: 61288 - RNA, 19 nt, Homo sapiens
  misc_RNA (1)...(19): siRNA sense strand
gagcugcgcaccguggauu

SEQ ID NO: 61289 - RNA, 19 nt, Homo sapiens
  misc_RNA (1)...(19): siRNA sense strand
ggccuagagcuguuucuug

SEQ ID NO: 61290 - RNA, 19 nt, Homo sapiens
  misc_RNA (1)...(19): siRNA sense strand
caagaaaacccucccaaca

SEQ ID NO: 61291 - RNA, 19 nt, Homo sapiens
  misc_RNA (1)...(19): siRNA sense strand
ggucaaagggcagcacaag

SEQ ID NO: 61292 - RNA, 19 nt, Homo sapiens
  misc_RNA (1)...(19): siRNA sense strand
aggcuaugcugcuucgaau

SEQ ID NO: 61293 - RNA, 19 nt, Homo sapiens
  misc_RNA (1)...(19): siRNA sense strand
gcucgugcccguguucaug

SEQ ID NO: 61294 - RNA, 19 nt, Homo sapiens
  misc_RNA (1)...(19): siRNA sense strand
gagaagguggaacgcaaca

SEQ ID NO: 61295 - RNA, 19 nt, Homo sapiens
  misc_RNA (1)...(19): siRNA sense strand
ucaaggauggugauuucau

SEQ ID NO: 61296 - RNA, 19 nt, Homo sapiens
  misc_RNA (1)...(19): siRNA sense strand
uuuccugggugcugagcua

SEQ ID NO: 61297 - RNA, 19 nt, Homo sapiens
  misc_RNA (1)...(19): siRNA sense strand
cguggcaccuuugguauac

SEQ ID NO: 61298 - RNA, 19 nt, Homo sapiens
  misc_RNA (1)...(19): siRNA sense strand
caagaaaccugcugcuaua

SEQ ID NO: 61299 - RNA, 19 nt, Homo sapiens
  misc_RNA (1)...(19): siRNA sense strand
gaaauuaugugcugcuuug

SEQ ID NO: 61300 - RNA, 19 nt, Homo sapiens
  misc_RNA (1)...(19): siRNA sense strand
gaaauaaccagaaauguga

SEQ ID NO: 61301 - RNA, 19 nt, Homo sapiens
  misc_RNA (1)...(19): siRNA sense strand
gaaugaagcuuugcccuuu

SEQ ID NO: 61302 - RNA, 19 nt, Homo sapiens
  misc_RNA (1)...(19): siRNA sense strand
gcagauacuucuaagguuu

SEQ ID NO: 61303 - RNA, 19 nt, Homo sapiens
  misc_RNA (1)...(19): siRNA sense strand
ugaagaaugucuacagaua

SEQ ID NO: 61304 - RNA, 19 nt, Homo sapiens
  misc_RNA (1)...(19): siRNA sense strand
ccagaaaugugauucagua

SEQ ID NO: 61305 - RNA, 19 nt, Homo sapiens
  misc_RNA (1)...(19): siRNA sense strand
aaacagagcuacauuugug

SEQ ID NO: 61306 - RNA, 19 nt, Homo sapiens
  misc_RNA (1)...(19): siRNA sense strand
caaggagcaugcaaagaua

SEQ ID NO: 61307 - RNA, 19 nt, Homo sapiens
  misc_RNA (1)...(19): siRNA sense strand
gaaaccugcugcuauaaau

SEQ ID NO: 61308 - RNA, 19 nt, Homo sapiens
  misc_RNA (1)...(19): siRNA sense strand
ggucagaaauaaccagaaa

SEQ ID NO: 61309 - RNA, 19 nt, Homo sapiens
  misc_RNA (1)...(19): siRNA sense strand
gaaaaucuguuguuuguga

SEQ ID NO: 61310 - RNA, 19 nt, Homo sapiens
  misc_RNA (1)...(19): siRNA sense strand
ugacagcacuagcagauuu

SEQ ID NO: 61311 - RNA, 19 nt, Homo sapiens
  misc_RNA (1)...(19): siRNA sense strand
gcauagccauccuguauau

SEQ ID NO: 61312 - RNA, 19 nt, Homo sapiens
  misc_RNA (1)...(19): siRNA sense strand
gaaaugugauucaguagag

SEQ ID NO: 61313 - RNA, 19 nt, Homo sapiens
  misc_RNA (1)...(19): siRNA sense strand
gugagaauguuauuggaua

SEQ ID NO: 61314 - RNA, 19 nt, Homo sapiens
  misc_RNA (1)...(19): siRNA sense strand
gaauuuacgucaacuugga

SEQ ID NO: 61315 - RNA, 19 nt, Homo sapiens
  misc_RNA (1)...(19): siRNA sense strand
gaagaucaauuuacaagac

SEQ ID NO: 61316 - RNA, 19 nt, Homo sapiens
  misc_RNA (1)...(19): siRNA sense strand
ccacagaggcuaugauuga

SEQ ID NO: 61317 - RNA, 19 nt, Homo sapiens
  misc_RNA (1)...(19): siRNA sense strand
gcagugacauuauaauucu

SEQ ID NO: 61318 - RNA, 19 nt, Homo sapiens
  misc_RNA (1)...(19): siRNA sense strand
ggucgaagaucaauuuaca

SEQ ID NO: 61319 - RNA, 19 nt, Homo sapiens
  misc_RNA (1)...(19): siRNA sense strand
gacaauaacacgaugcaua

SEQ ID NO: 61320 - RNA, 19 nt, Homo sapiens
  misc_RNA (1)...(19): siRNA sense strand
gaacaaguuauuacccuaa

SEQ ID NO: 61321 - RNA, 19 nt, Homo sapiens
  misc_RNA (1)...(19): siRNA sense strand
gaaaauguguccaagagaa

SEQ ID NO: 61322 - RNA, 19 nt, Homo sapiens
  misc_RNA (1)...(19): siRNA sense strand
gaaucuacacucucauuaa

SEQ ID NO: 61323 - RNA, 19 nt, Homo sapiens
  misc_RNA (1)...(19): siRNA sense strand
gacagaaucuacacucuca

SEQ ID NO: 61324 - RNA, 19 nt, Homo sapiens
  misc_RNA (1)...(19): siRNA sense strand
guacgucagcuugaaauua

SEQ ID NO: 61325 - RNA, 19 nt, Homo sapiens
  misc_RNA (1)...(19): siRNA sense strand
gaugcuagguguucaagga

SEQ ID NO: 61326 - RNA, 19 nt, Homo sapiens
  misc_RNA (1)...(19): siRNA sense strand
gacaguuacuuuccaagaa

SEQ ID NO: 61327 - RNA, 19 nt, Homo sapiens
  misc_RNA (1)...(19): siRNA sense strand
gaacaaacagagacagaau

SEQ ID NO: 61328 - RNA, 19 nt, Homo sapiens
  misc_RNA (1)...(19): siRNA sense strand
caagagaauugaaccaagu

SEQ ID NO: 61329 - RNA, 19 nt, Homo sapiens
  misc_RNA (1)...(19): siRNA sense strand
gaaagucccagacaauugu

SEQ ID NO: 61330 - RNA, 19 nt, Homo sapiens
  misc_RNA (1)...(19): siRNA sense strand
uaucacaucuccuguagug

SEQ ID NO: 61331 - RNA, 19 nt, Homo sapiens
  misc_RNA (1)...(19): siRNA sense strand
uagccauccuguauauuua

SEQ ID NO: 61332 - RNA, 19 nt, Homo sapiens
  misc_RNA (1)...(19): siRNA sense strand
guacagcagauacuucuaa

SEQ ID NO: 61333 - RNA, 19 nt, Homo sapiens
  misc_RNA (1)...(19): siRNA sense strand
cagcauggauauugaacaa

SEQ ID NO: 61334 - RNA, 19 nt, Homo sapiens
  misc_RNA (1)...(19): siRNA sense strand
gcauggauauugaacaagu

SEQ ID NO: 61335 - RNA, 19 nt, Homo sapiens
  misc_RNA (1)...(19): siRNA sense strand
gagcagugacauuauaauu

SEQ ID NO: 61336 - RNA, 19 nt, Homo sapiens
  misc_RNA (1)...(19): siRNA sense strand
ggauaaaccgagaaagaaa

SEQ ID NO: 61337 - RNA, 19 nt, Homo sapiens
  misc_RNA (1)...(19): siRNA sense strand
caacucacaggaugaagua

SEQ ID NO: 61338 - RNA, 19 nt, Homo sapiens
  misc_RNA (1)...(19): siRNA sense strand
gcaagcacauuagcaaagu

SEQ ID NO: 61339 - RNA, 19 nt, Homo sapiens
  misc_RNA (1)...(19): siRNA sense strand
guacaguugucauucacuu

SEQ ID NO: 61340 - RNA, 19 nt, Homo sapiens
  misc_RNA (1)...(19): siRNA sense strand
cuacauuugugguugguaa

SEQ ID NO: 61341 - RNA, 19 nt, Homo sapiens
  misc_RNA (1)...(19): siRNA sense strand
aaauauugcucguggaaug

SEQ ID NO: 61342 - RNA, 19 nt, Homo sapiens
  misc_RNA (1)...(19): siRNA sense strand
cuacagaaacuucauacaa

SEQ ID NO: 61343 - RNA, 19 nt, Homo sapiens
  misc_RNA (1)...(19): siRNA sense strand
uaagaucugugguuggaau

SEQ ID NO: 61344 - RNA, 19 nt, Homo sapiens
  misc_RNA (1)...(19): siRNA sense strand
cagccaagguugucagaga

SEQ ID NO: 61345 - RNA, 19 nt, Homo sapiens
  misc_RNA (1)...(19): siRNA sense strand
uacgucagcuugaaauuau

SEQ ID NO: 61346 - RNA, 19 nt, Homo sapiens
  misc_RNA (1)...(19): siRNA sense strand
cacaacaggucgaagauca

SEQ ID NO: 61347 - RNA, 19 nt, Homo sapiens
  misc_RNA (1)...(19): siRNA sense strand
gaucugugguuggaauuau

SEQ ID NO: 61348 - RNA, 19 nt, Homo sapiens
  misc_RNA (1)...(19): siRNA sense strand
ucgaaugcauggccucuuu

SEQ ID NO: 61349 - RNA, 19 nt, Homo sapiens
  misc_RNA (1)...(19): siRNA sense strand
gcugauccuucuccucaaa

SEQ ID NO: 61350 - RNA, 19 nt, Homo sapiens
  misc_RNA (1)...(19): siRNA sense strand
gggauaaaccgagaaagaa

SEQ ID NO: 61351 - RNA, 19 nt, Homo sapiens
  misc_RNA (1)...(19): siRNA sense strand
ucaaggagcaugcaaagau

SEQ ID NO: 61352 - RNA, 19 nt, Homo sapiens
  misc_RNA (1)...(19): siRNA sense strand
guacaucuucuuugaacaa

SEQ ID NO: 61353 - RNA, 19 nt, Homo sapiens
  misc_RNA (1)...(19): siRNA sense strand
uacagaaacuucauacaag

SEQ ID NO: 61354 - RNA, 19 nt, Homo sapiens
  misc_RNA (1)...(19): siRNA sense strand
uagcagauuugcacgucua

SEQ ID NO: 61355 - RNA, 19 nt, Homo sapiens
  misc_RNA (1)...(19): siRNA sense strand
gcacagaauguugguaguu

SEQ ID NO: 61356 - RNA, 19 nt, Homo sapiens
  misc_RNA (1)...(19): siRNA sense strand
aauaagaucugugguugga

SEQ ID NO: 61357 - RNA, 19 nt, Homo sapiens
  misc_RNA (1)...(19): siRNA sense strand
gaauugacaggcuugaaug

SEQ ID NO: 61358 - RNA, 19 nt, Homo sapiens
  misc_RNA (1)...(19): siRNA sense strand
ggucaacauuaacaagaau

SEQ ID NO: 61359 - RNA, 19 nt, Homo sapiens
  misc_RNA (1)...(19): siRNA sense strand
aauagaggcugcagagcaa

SEQ ID NO: 61360 - RNA, 19 nt, Homo sapiens
  misc_RNA (1)...(19): siRNA sense strand
gaaccuaugcuggucagaa

SEQ ID NO: 61361 - RNA, 19 nt, Homo sapiens
  misc_RNA (1)...(19): siRNA sense strand
ccucgaugcucuuguugaa

SEQ ID NO: 61362 - RNA, 19 nt, Homo sapiens
  misc_RNA (1)...(19): siRNA sense strand
aaagucacaugauucacaa

SEQ ID NO: 61363 - RNA, 19 nt, Homo sapiens
  misc_RNA (1)...(19): siRNA sense strand
ucacgaguauuucccugaa

SEQ ID NO: 61364 - RNA, 19 nt, Homo sapiens
  misc_RNA (1)...(19): siRNA sense strand
gaaccucggccuaaugaag

SEQ ID NO: 61365 - RNA, 19 nt, Homo sapiens
  misc_RNA (1)...(19): siRNA sense strand
ucagaaauaaccagaaaug

SEQ ID NO: 61366 - RNA, 19 nt, Homo sapiens
  misc_RNA (1)...(19): siRNA sense strand
agaauugaaccaaguguuu

SEQ ID NO: 61367 - RNA, 19 nt, Homo sapiens
  misc_RNA (1)...(19): siRNA sense strand
cagagggucaagaugauua

SEQ ID NO: 61368 - RNA, 19 nt, Homo sapiens
  misc_RNA (1)...(19): siRNA sense strand
ucaguacaguugucauuca

SEQ ID NO: 61369 - RNA, 19 nt, Homo sapiens
  misc_RNA (1)...(19): siRNA sense strand
acaagaaaccugcugcuau

SEQ ID NO: 61370 - RNA, 19 nt, Homo sapiens
  misc_RNA (1)...(19): siRNA sense strand
guuggaaacucugauggaa

SEQ ID NO: 61371 - RNA, 19 nt, Homo sapiens
  misc_RNA (1)...(19): siRNA sense strand
gagaucauccaguuaguca

SEQ ID NO: 61372 - RNA, 19 nt, Homo sapiens
  misc_RNA (1)...(19): siRNA sense strand
gaaugucuacagauacuug

SEQ ID NO: 61373 - RNA, 19 nt, Homo sapiens
  misc_RNA (1)...(19): siRNA sense strand
caucaguacuggugacaca

SEQ ID NO: 61374 - RNA, 19 nt, Homo sapiens
  misc_RNA (1)...(19): siRNA sense strand
gaaagaaaaguugagguua

SEQ ID NO: 61375 - RNA, 19 nt, Homo sapiens
  misc_RNA (1)...(19): siRNA sense strand
agaaauaaccagaaaugug

SEQ ID NO: 61376 - RNA, 19 nt, Homo sapiens
  misc_RNA (1)...(19): siRNA sense strand
aaacagagacagaaucuac

SEQ ID NO: 61377 - RNA, 19 nt, Homo sapiens
  misc_RNA (1)...(19): siRNA sense strand
ucgaugcucuuguugaaug

SEQ ID NO: 61378 - RNA, 19 nt, Homo sapiens
  misc_RNA (1)...(19): siRNA sense strand
gaaguaagggaaaauauug

SEQ ID NO: 61379 - RNA, 19 nt, Homo sapiens
  misc_RNA (1)...(19): siRNA sense strand
uuugagcagugacauuaua

SEQ ID NO: 61380 - RNA, 19 nt, Homo sapiens
  misc_RNA (1)...(19): siRNA sense strand
gagcaagcacauuagcaaa

SEQ ID NO: 61381 - RNA, 19 nt, Homo sapiens
  misc_RNA (1)...(19): siRNA sense strand
acacugaccaucugcauga

SEQ ID NO: 61382 - RNA, 19 nt, Homo sapiens
  misc_RNA (1)...(19): siRNA sense strand
ggacgcaaccuuuauaucc

SEQ ID NO: 61383 - RNA, 19 nt, Homo sapiens
  misc_RNA (1)...(19): siRNA sense strand
gaucauccaguuagucaau

SEQ ID NO: 61384 - RNA, 19 nt, Homo sapiens
  misc_RNA (1)...(19): siRNA sense strand
agagaaaggugcaaaauuc

SEQ ID NO: 61385 - RNA, 19 nt, Homo sapiens
  misc_RNA (1)...(19): siRNA sense strand
gaagaaugucuacagauac

SEQ ID NO: 61386 - RNA, 19 nt, Homo sapiens
  misc_RNA (1)...(19): siRNA sense strand
aaagaaagucccagacaau

SEQ ID NO: 61387 - RNA, 19 nt, Homo sapiens
  misc_RNA (1)...(19): siRNA sense strand
caaguuauuacccuaaguu

SEQ ID NO: 61388 - RNA, 19 nt, Homo sapiens
  misc_RNA (1)...(19): siRNA sense strand
ucucuaggcuugguucuug

SEQ ID NO: 61389 - RNA, 19 nt, Homo sapiens
  misc_RNA (1)...(19): siRNA sense strand
ccgcgagggucguccaauu

SEQ ID NO: 61390 - RNA, 19 nt, Homo sapiens
  misc_RNA (1)...(19): siRNA sense strand
gggaaccucggccuaauga

SEQ ID NO: 61391 - RNA, 19 nt, Homo sapiens
  misc_RNA (1)...(19): siRNA sense strand
gaggucaacauuaacaaga

SEQ ID NO: 61392 - RNA, 19 nt, Homo sapiens
  misc_RNA (1)...(19): siRNA sense strand
gguugucagagaaguauua

SEQ ID NO: 61393 - RNA, 19 nt, Homo sapiens
  misc_RNA (1)...(19): siRNA sense strand
gcuggacgcaaccuuuaua

SEQ ID NO: 61394 - RNA, 19 nt, Homo sapiens
  misc_RNA (1)...(19): siRNA sense strand
ugauaaaggaggcauuuga

SEQ ID NO: 61395 - RNA, 19 nt, Homo sapiens
  misc_RNA (1)...(19): siRNA sense strand
gaaggguucgcagugauaa

SEQ ID NO: 61396 - RNA, 19 nt, Homo sapiens
  misc_RNA (1)...(19): siRNA sense strand
aaacucugauggaaacuca

SEQ ID NO: 61397 - RNA, 19 nt, Homo sapiens
  misc_RNA (1)...(19): siRNA sense strand
aaugaagaaugucuacaga

SEQ ID NO: 61398 - RNA, 19 nt, Homo sapiens
  misc_RNA (1)...(19): siRNA sense strand
gcaaugagaacuucaagaa

SEQ ID NO: 61399 - RNA, 19 nt, Homo sapiens
  misc_RNA (1)...(19): siRNA sense strand
caagaacuguugcaaugaa

SEQ ID NO: 61400 - RNA, 19 nt, Homo sapiens
  misc_RNA (1)...(19): siRNA sense strand
ccaagaggaugauagagaa

SEQ ID NO: 61401 - RNA, 19 nt, Homo sapiens
  misc_RNA (1)...(19): siRNA sense strand
gagacagacuucuaugaug

SEQ ID NO: 61402 - RNA, 19 nt, Homo sapiens
  misc_RNA (1)...(19): siRNA sense strand
caagagaauucugcauauu

SEQ ID NO: 61403 - RNA, 19 nt, Homo sapiens
  misc_RNA (1)...(19): siRNA sense strand
aagaagacauucaagagaa

SEQ ID NO: 61404 - RNA, 19 nt, Homo sapiens
  misc_RNA (1)...(19): siRNA sense strand
ucaagagaauucugcauau

SEQ ID NO: 61405 - RNA, 19 nt, Homo sapiens
  misc_RNA (1)...(19): siRNA sense strand
gacaaacucuacugcuuuc

SEQ ID NO: 61406 - RNA, 19 nt, Homo sapiens
  misc_RNA (1)...(19): siRNA sense strand
agacagacuucuaugaugu

SEQ ID NO: 61407 - RNA, 19 nt, Homo sapiens
  misc_RNA (1)...(19): siRNA sense strand
caagaagacauucaagaga

SEQ ID NO: 61408 - RNA, 19 nt, Homo sapiens
  misc_RNA (1)...(19): siRNA sense strand
ucagguaccuuaaguaucg

SEQ ID NO: 61409 - RNA, 19 nt, Homo sapiens
  misc_RNA (1)...(19): siRNA sense strand
gggccugguuucucucuuu

SEQ ID NO: 61410 - RNA, 19 nt, Homo sapiens
  misc_RNA (1)...(19): siRNA sense strand
caauuccuccugccucuua

SEQ ID NO: 61411 - RNA, 19 nt, Homo sapiens
  misc_RNA (1)...(19): siRNA sense strand
ugacugccaucaucaacuu

SEQ ID NO: 61412 - RNA, 19 nt, Homo sapiens
  misc_RNA (1)...(19): siRNA sense strand
uacaucaacuccacacuga

SEQ ID NO: 61413 - RNA, 19 nt, Homo sapiens
  misc_RNA (1)...(19): siRNA sense strand
acacaggccuggauuacau

SEQ ID NO: 61414 - RNA, 19 nt, Homo sapiens
  misc_RNA (1)...(19): siRNA sense strand
guaucuggguugcacauga

SEQ ID NO: 61415 - RNA, 19 nt, Homo sapiens
  misc_RNA (1)...(19): siRNA sense strand
gagaugaaauccccaguug

SEQ ID NO: 61416 - RNA, 19 nt, Homo sapiens
  misc_RNA (1)...(19): siRNA sense strand
ugauagagaaguagacaaa

SEQ ID NO: 61417 - RNA, 19 nt, Homo sapiens
  misc_RNA (1)...(19): siRNA sense strand
agacaaacucuacugcuuu

SEQ ID NO: 61418 - RNA, 19 nt, Homo sapiens
  misc_RNA (1)...(19): siRNA sense strand
cuacaaggccguacgacaa

SEQ ID NO: 61419 - RNA, 19 nt, Homo sapiens
  misc_RNA (1)...(19): siRNA sense strand
agaggaugauagagaagua

SEQ ID NO: 61420 - RNA, 19 nt, Homo sapiens
  misc_RNA (1)...(19): siRNA sense strand
ucuaugaugucaccugguu

SEQ ID NO: 61421 - RNA, 19 nt, Homo sapiens
  misc_RNA (1)...(19): siRNA sense strand
ucugcuggaucccuuauuu

SEQ ID NO: 61422 - RNA, 19 nt, Homo sapiens
  misc_RNA (1)...(19): siRNA sense strand
gcacaugaaccgcgaaagg

SEQ ID NO: 61423 - RNA, 19 nt, Homo sapiens
  misc_RNA (1)...(19): siRNA sense strand
gccaagaggaugauagaga

SEQ ID NO: 61424 - RNA, 19 nt, Homo sapiens
  misc_RNA (1)...(19): siRNA sense strand
ucagauaccaccacagaga

SEQ ID NO: 61425 - RNA, 19 nt, Homo sapiens
  misc_RNA (1)...(19): siRNA sense strand
uagaagacaagauguguga

SEQ ID NO: 61426 - RNA, 19 nt, Homo sapiens
  misc_RNA (1)...(19): siRNA sense strand
uaucuggguugcacaugaa

SEQ ID NO: 61427 - RNA, 19 nt, Homo sapiens
  misc_RNA (1)...(19): siRNA sense strand
uggauuacaucaaguuuac

SEQ ID NO: 61428 - RNA, 19 nt, Homo sapiens
  misc_RNA (1)...(19): siRNA sense strand
gcuuuccacuugauauugu

SEQ ID NO: 61429 - RNA, 19 nt, Homo sapiens
  misc_RNA (1)...(19): siRNA sense strand
ucaaccugcuggugcugua

SEQ ID NO: 61430 - RNA, 19 nt, Homo sapiens
  misc_RNA (1)...(19): siRNA sense strand
accgggagcucaucaauag

SEQ ID NO: 61431 - RNA, 19 nt, Homo sapiens
  misc_RNA (1)...(19): siRNA sense strand
gccgagaggacaaguguga

SEQ ID NO: 61432 - RNA, 19 nt, Homo sapiens
  misc_RNA (1)...(19): siRNA sense strand
ggaguagcagggacuaugu

SEQ ID NO: 61433 - RNA, 19 nt, Homo sapiens
  misc_RNA (1)...(19): siRNA sense strand
gaucccuuauuucaucuuc

SEQ ID NO: 61434 - RNA, 19 nt, Homo sapiens
  misc_RNA (1)...(19): siRNA sense strand
ucaagaagacauucaagag

SEQ ID NO: 61435 - RNA, 19 nt, Homo sapiens
  misc_RNA (1)...(19): siRNA sense strand
ugagacagacuucuaugau

SEQ ID NO: 61436 - RNA, 19 nt, Homo sapiens
  misc_RNA (1)...(19): siRNA sense strand
cuggaucccuuauuucauc

SEQ ID NO: 61437 - RNA, 19 nt, Homo sapiens
  misc_RNA (1)...(19): siRNA sense strand
gaguagcagggacuaugua

SEQ ID NO: 61438 - RNA, 19 nt, Homo sapiens
  misc_RNA (1)...(19): siRNA sense strand
ccucagguaccuuaaguau

SEQ ID NO: 61439 - RNA, 19 nt, Homo sapiens
  misc_RNA (1)...(19): siRNA sense strand
agagacagcaccaggcaaa

SEQ ID NO: 61440 - RNA, 19 nt, Homo sapiens
  misc_RNA (1)...(19): siRNA sense strand
gcaccgggagcucaucaau

SEQ ID NO: 61441 - RNA, 19 nt, Homo sapiens
  misc_RNA (1)...(19): siRNA sense strand
ccaagaaaccagggaagga

SEQ ID NO: 61442 - RNA, 19 nt, Homo sapiens
  misc_RNA (1)...(19): siRNA sense strand
uaucauggcagccuucauc

SEQ ID NO: 61443 - RNA, 19 nt, Homo sapiens
  misc_RNA (1)...(19): siRNA sense strand
cuaacacaggccuggauua

SEQ ID NO: 61444 - RNA, 19 nt, Homo sapiens
  misc_RNA (1)...(19): siRNA sense strand
gaaaaggaagccaaaagau

SEQ ID NO: 61445 - RNA, 19 nt, Homo sapiens
  misc_RNA (1)...(19): siRNA sense strand
gugagacagacuucuauga

SEQ ID NO: 61446 - RNA, 19 nt, Homo sapiens
  misc_RNA (1)...(19): siRNA sense strand
caccgggagcucaucaaua

SEQ ID NO: 61447 - RNA, 19 nt, Homo sapiens
  misc_RNA (1)...(19): siRNA sense strand
uaacacaggccuggauuac

SEQ ID NO: 61448 - RNA, 19 nt, Homo sapiens
  misc_RNA (1)...(19): siRNA sense strand
ucacugggccguccucucu

SEQ ID NO: 61449 - RNA, 19 nt, Homo sapiens
  misc_RNA (1)...(19): siRNA sense strand
uucaagagaauucugcaua

SEQ ID NO: 61450 - RNA, 19 nt, Homo sapiens
  misc_RNA (1)...(19): siRNA sense strand
ggcuuuccauggacuaugu

SEQ ID NO: 61451 - RNA, 19 nt, Homo sapiens
  misc_RNA (1)...(19): siRNA sense strand
agcggaagcuccacacugu

SEQ ID NO: 61452 - RNA, 19 nt, Homo sapiens
  misc_RNA (1)...(19): siRNA sense strand
ccaggcaaaggcaaauuga

SEQ ID NO: 61453 - RNA, 19 nt, Homo sapiens
  misc_RNA (1)...(19): siRNA sense strand
gggaguagcagggacuaug

SEQ ID NO: 61454 - RNA, 19 nt, Homo sapiens
  misc_RNA (1)...(19): siRNA sense strand
cuacugcuuuccacuugau

SEQ ID NO: 61455 - RNA, 19 nt, Homo sapiens
  misc_RNA (1)...(19): siRNA sense strand
auagagaaguagacaaacu

SEQ ID NO: 61456 - RNA, 19 nt, Homo sapiens
  misc_RNA (1)...(19): siRNA sense strand
cagccaagaggaugauaga

SEQ ID NO: 61457 - RNA, 19 nt, Homo sapiens
  misc_RNA (1)...(19): siRNA sense strand
cgagaggacaagugugaga

SEQ ID NO: 61458 - RNA, 19 nt, Homo sapiens
  misc_RNA (1)...(19): siRNA sense strand
gcauucaagacaguaugua

SEQ ID NO: 61459 - RNA, 19 nt, Homo sapiens
  misc_RNA (1)...(19): siRNA sense strand
gggacuauguagccgucaa

SEQ ID NO: 61460 - RNA, 19 nt, Homo sapiens
  misc_RNA (1)...(19): siRNA sense strand
gaugauagagaaguagaca

SEQ ID NO: 61461 - RNA, 19 nt, Homo sapiens
  misc_RNA (1)...(19): siRNA sense strand
gucccucccuuccuucuca

SEQ ID NO: 61462 - RNA, 19 nt, Homo sapiens
  misc_RNA (1)...(19): siRNA sense strand
aggcuggaaucacuucaug

SEQ ID NO: 61463 - RNA, 19 nt, Homo sapiens
  misc_RNA (1)...(19): siRNA sense strand
acucagauaccaccacaga

SEQ ID NO: 61464 - RNA, 19 nt, Homo sapiens
  misc_RNA (1)...(19): siRNA sense strand
cgaacggacucagauacca

SEQ ID NO: 61465 - RNA, 19 nt, Homo sapiens
  misc_RNA (1)...(19): siRNA sense strand
gaagucaccaucccaaacc

SEQ ID NO: 61466 - RNA, 19 nt, Homo sapiens
  misc_RNA (1)...(19): siRNA sense strand
auaggucccucccuuccuu

SEQ ID NO: 61467 - RNA, 19 nt, Homo sapiens
  misc_RNA (1)...(19): siRNA sense strand
gaucuacaaggccguacga

SEQ ID NO: 61468 - RNA, 19 nt, Homo sapiens
  misc_RNA (1)...(19): siRNA sense strand
guggugguccugagcacua

SEQ ID NO: 61469 - RNA, 19 nt, Homo sapiens
  misc_RNA (1)...(19): siRNA sense strand
cuggauuacaucaaguuua

SEQ ID NO: 61470 - RNA, 19 nt, Homo sapiens
  misc_RNA (1)...(19): siRNA sense strand
gccagcacagcguccauuu

SEQ ID NO: 61471 - RNA, 19 nt, Homo sapiens
  misc_RNA (1)...(19): siRNA sense strand
ucccuuauuucaucuucuu

SEQ ID NO: 61472 - RNA, 19 nt, Homo sapiens
  misc_RNA (1)...(19): siRNA sense strand
gggagguucugaaaaggaa

SEQ ID NO: 61473 - RNA, 19 nt, Homo sapiens
  misc_RNA (1)...(19): siRNA sense strand
gcgccgagaggacaagugu

SEQ ID NO: 61474 - RNA, 19 nt, Homo sapiens
  misc_RNA (1)...(19): siRNA sense strand
gcuggaaucacuucaugca

SEQ ID NO: 61475 - RNA, 19 nt, Homo sapiens
  misc_RNA (1)...(19): siRNA sense strand
gcucaugcucugguucuau

SEQ ID NO: 61476 - RNA, 19 nt, Homo sapiens
  misc_RNA (1)...(19): siRNA sense strand
cacaugaaccgcgaaagga

SEQ ID NO: 61477 - RNA, 19 nt, Homo sapiens
  misc_RNA (1)...(19): siRNA sense strand
gcuccgcucgcauucaaga

SEQ ID NO: 61478 - RNA, 19 nt, Homo sapiens
  misc_RNA (1)...(19): siRNA sense strand
aggcuccgcucgcauucaa

SEQ ID NO: 61479 - RNA, 19 nt, Homo sapiens
  misc_RNA (1)...(19): siRNA sense strand
gcaccaggcaaaggcaaau

SEQ ID NO: 61480 - RNA, 19 nt, Homo sapiens
  misc_RNA (1)...(19): siRNA sense strand
gaaauccccaguugucuuc

SEQ ID NO: 61481 - RNA, 19 nt, Homo sapiens
  misc_RNA (1)...(19): siRNA sense strand
gguucuaugccaagaucua

SEQ ID NO: 61482 - RNA, 19 nt, Homo sapiens
  misc_RNA (1)...(19): siRNA sense strand
uuaaguaucguaccaagac

SEQ ID NO: 61483 - RNA, 19 nt, Homo sapiens
  misc_RNA (1)...(19): siRNA sense strand
ucucgaacggacucagaua

SEQ ID NO: 61484 - RNA, 19 nt, Homo sapiens
  misc_RNA (1)...(19): siRNA sense strand
ugaaaaggaagccaaaaga

SEQ ID NO: 61485 - RNA, 19 nt, Homo sapiens
  misc_RNA (1)...(19): siRNA sense strand
cucaugcucugguucuaug

SEQ ID NO: 61486 - RNA, 19 nt, Homo sapiens
  misc_RNA (1)...(19): siRNA sense strand
uaccuuaaguaucguacca

SEQ ID NO: 61487 - RNA, 19 nt, Homo sapiens
  misc_RNA (1)...(19): siRNA sense strand
acaguuggguuuuaucaug

SEQ ID NO: 61488 - RNA, 19 nt, Homo sapiens
  misc_RNA (1)...(19): siRNA sense strand
acaugaaccgcgaaaggaa

SEQ ID NO: 61489 - RNA, 19 nt, Homo sapiens
  misc_RNA (1)...(19): siRNA sense strand
cauucaagacaguauguau

SEQ ID NO: 61490 - RNA, 19 nt, Homo sapiens
  misc_RNA (1)...(19): siRNA sense strand
gaggagugggucuaacaca

SEQ ID NO: 61491 - RNA, 19 nt, Homo sapiens
  misc_RNA (1)...(19): siRNA sense strand
ggcaaggucuucugcaaua

SEQ ID NO: 61492 - RNA, 19 nt, Homo sapiens
  misc_RNA (1)...(19): siRNA sense strand
gcaaucauaccaccucuaa

SEQ ID NO: 61493 - RNA, 19 nt, Homo sapiens
  misc_RNA (1)...(19): siRNA sense strand
gcacaaagccacagugaca

SEQ ID NO: 61494 - RNA, 19 nt, Homo sapiens
  misc_RNA (1)...(19): siRNA sense strand
gcaaaguccaggucaauga

SEQ ID NO: 61495 - RNA, 19 nt, Homo sapiens
  misc_RNA (1)...(19): siRNA sense strand
gcacagccuccauucuuaa

SEQ ID NO: 61496 - RNA, 19 nt, Homo sapiens
  misc_RNA (1)...(19): siRNA sense strand
cgccaucucucuggucuua

SEQ ID NO: 61497 - RNA, 19 nt, Homo sapiens
  misc_RNA (1)...(19): siRNA sense strand
gcaauguggucgucugucu

SEQ ID NO: 61498 - RNA, 19 nt, Homo sapiens
  misc_RNA (1)...(19): siRNA sense strand
ccaagaggaucaaucacau

SEQ ID NO: 61499 - RNA, 19 nt, Homo sapiens
  misc_RNA (1)...(19): siRNA sense strand
aagaggaucaaucacauua

SEQ ID NO: 61500 - RNA, 19 nt, Homo sapiens
  misc_RNA (1)...(19): siRNA sense strand
gcaaggucuucugcaauau

SEQ ID NO: 61501 - RNA, 19 nt, Homo sapiens
  misc_RNA (1)...(19): siRNA sense strand
gagcacaaagccacaguga

SEQ ID NO: 61502 - RNA, 19 nt, Homo sapiens
  misc_RNA (1)...(19): siRNA sense strand
ugcacagccuccauucuua

SEQ ID NO: 61503 - RNA, 19 nt, Homo sapiens
  misc_RNA (1)...(19): siRNA sense strand
gcaaccugaccaauuguuu

SEQ ID NO: 61504 - RNA, 19 nt, Homo sapiens
  misc_RNA (1)...(19): siRNA sense strand
aaacuucucugagguccaa

SEQ ID NO: 61505 - RNA, 19 nt, Homo sapiens
  misc_RNA (1)...(19): siRNA sense strand
uggcacagccucuuccuuu

SEQ ID NO: 61506 - RNA, 19 nt, Homo sapiens
  misc_RNA (1)...(19): siRNA sense strand
ucaugugcaucaccuacua

SEQ ID NO: 61507 - RNA, 19 nt, Homo sapiens
  misc_RNA (1)...(19): siRNA sense strand
ugccaucaaugagguguua

SEQ ID NO: 61508 - RNA, 19 nt, Homo sapiens
  misc_RNA (1)...(19): siRNA sense strand
cuuaaccucuucaugauca

SEQ ID NO: 61509 - RNA, 19 nt, Homo sapiens
  misc_RNA (1)...(19): siRNA sense strand
caaaguccaggucaaugaa

SEQ ID NO: 61510 - RNA, 19 nt, Homo sapiens
  misc_RNA (1)...(19): siRNA sense strand
gaggaucaaucacauuagc

SEQ ID NO: 61511 - RNA, 19 nt, Homo sapiens
  misc_RNA (1)...(19): siRNA sense strand
caaccgcaacucccacaaa

SEQ ID NO: 61512 - RNA, 19 nt, Homo sapiens
  misc_RNA (1)...(19): siRNA sense strand
gcccuucucugccaucuac

SEQ ID NO: 61513 - RNA, 19 nt, Homo sapiens
  misc_RNA (1)...(19): siRNA sense strand
caagaggaucaaucacauu

SEQ ID NO: 61514 - RNA, 19 nt, Homo sapiens
  misc_RNA (1)...(19): siRNA sense strand
uggaugggcuggucaccuu

SEQ ID NO: 61515 - RNA, 19 nt, Homo sapiens
  misc_RNA (1)...(19): siRNA sense strand
ccaucucucuggucuuaau

SEQ ID NO: 61516 - RNA, 19 nt, Homo sapiens
  misc_RNA (1)...(19): siRNA sense strand
uaauuugggucaucuccau

SEQ ID NO: 61517 - RNA, 19 nt, Homo sapiens
  misc_RNA (1)...(19): siRNA sense strand
ggucuuaauuugggucauc

SEQ ID NO: 61518 - RNA, 19 nt, Homo sapiens
  misc_RNA (1)...(19): siRNA sense strand
gguguuagaagccaucguu

SEQ ID NO: 61519 - RNA, 19 nt, Homo sapiens
  misc_RNA (1)...(19): siRNA sense strand
aaucauaccaccucuaagu

SEQ ID NO: 61520 - RNA, 19 nt, Homo sapiens
  misc_RNA (1)...(19): siRNA sense strand
ccauuacccuguccuuucu

SEQ ID NO: 61521 - RNA, 19 nt, Homo sapiens
  misc_RNA (1)...(19): siRNA sense strand
uccgcaaccugaccaauug

SEQ ID NO: 61522 - RNA, 19 nt, Homo sapiens
  misc_RNA (1)...(19): siRNA sense strand
gccaagaggaucaaucaca

SEQ ID NO: 61523 - RNA, 19 nt, Homo sapiens
  misc_RNA (1)...(19): siRNA sense strand
auucuuaaccucuucauga

SEQ ID NO: 61524 - RNA, 19 nt, Homo sapiens
  misc_RNA (1)...(19): siRNA sense strand
gcaggaacgagaccagcaa

SEQ ID NO: 61525 - RNA, 19 nt, Homo sapiens
  misc_RNA (1)...(19): siRNA sense strand
caaccugaccaauuguuuc

SEQ ID NO: 61526 - RNA, 19 nt, Homo sapiens
  misc_RNA (1)...(19): siRNA sense strand
augcugcgcugaacagaga

SEQ ID NO: 61527 - RNA, 19 nt, Homo sapiens
  misc_RNA (1)...(19): siRNA sense strand
ucuaccagcuguccugcaa

SEQ ID NO: 61528 - RNA, 19 nt, Homo sapiens
  misc_RNA (1)...(19): siRNA sense strand
gcucugcacagccuccauu

SEQ ID NO: 61529 - RNA, 19 nt, Homo sapiens
  misc_RNA (1)...(19): siRNA sense strand
ucucucuggucuuaauuug

SEQ ID NO: 61530 - RNA, 19 nt, Homo sapiens
  misc_RNA (1)...(19): siRNA sense strand
ccaggcaacaggaagagaa

SEQ ID NO: 61531 - RNA, 19 nt, Homo sapiens
  misc_RNA (1)...(19): siRNA sense strand
gggagccacagacagguaa

SEQ ID NO: 61532 - RNA, 19 nt, Homo sapiens
  misc_RNA (1)...(19): siRNA sense strand
gggaucaggccaagaggau

SEQ ID NO: 61533 - RNA, 19 nt, Homo sapiens
  misc_RNA (1)...(19): siRNA sense strand
gaccgguacugcgcuguca

SEQ ID NO: 61534 - RNA, 19 nt, Homo sapiens
  misc_RNA (1)...(19): siRNA sense strand
gguguggagugggacagaa

SEQ ID NO: 61535 - RNA, 19 nt, Homo sapiens
  misc_RNA (1)...(19): siRNA sense strand
cugcacagccuccauucuu

SEQ ID NO: 61536 - RNA, 19 nt, Homo sapiens
  misc_RNA (1)...(19): siRNA sense strand
uaccagcuguccugcaagu

SEQ ID NO: 61537 - RNA, 19 nt, Homo sapiens
  misc_RNA (1)...(19): siRNA sense strand
gcacagccucuuccuuuug

SEQ ID NO: 61538 - RNA, 19 nt, Homo sapiens
  misc_RNA (1)...(19): siRNA sense strand
gcaugcaagaucaccauca

SEQ ID NO: 61539 - RNA, 19 nt, Homo sapiens
  misc_RNA (1)...(19): siRNA sense strand
ccugaccaauuguuucauc

SEQ ID NO: 61540 - RNA, 19 nt, Homo sapiens
  misc_RNA (1)...(19): siRNA sense strand
caaggucuucugcaauauc

SEQ ID NO: 61541 - RNA, 19 nt, Homo sapiens
  misc_RNA (1)...(19): siRNA sense strand
caucaaugagguguuagaa

SEQ ID NO: 61542 - RNA, 19 nt, Homo sapiens
  misc_RNA (1)...(19): siRNA sense strand
gugcaaaguccaggucaau

SEQ ID NO: 61543 - RNA, 19 nt, Homo sapiens
  misc_RNA (1)...(19): siRNA sense strand
ccaauggcacagccucuuc

SEQ ID NO: 61544 - RNA, 19 nt, Homo sapiens
  misc_RNA (1)...(19): siRNA sense strand
ggaaaugcauggcgaagau

SEQ ID NO: 61545 - RNA, 19 nt, Homo sapiens
  misc_RNA (1)...(19): siRNA sense strand
uaugcaaacucucucauua

SEQ ID NO: 61546 - RNA, 19 nt, Homo sapiens
  misc_RNA (1)...(19): siRNA sense strand
gauaaggugugcuugauca

SEQ ID NO: 61547 - RNA, 19 nt, Homo sapiens
  misc_RNA (1)...(19): siRNA sense strand
caccuuaccuccacucuuu

SEQ ID NO: 61548 - RNA, 19 nt, Homo sapiens
  misc_RNA (1)...(19): siRNA sense strand
ggaagagugugcaaaccuu

SEQ ID NO: 61549 - RNA, 19 nt, Homo sapiens
  misc_RNA (1)...(19): siRNA sense strand
gacuuuggcuauacgauuu

SEQ ID NO: 61550 - RNA, 19 nt, Homo sapiens
  misc_RNA (1)...(19): siRNA sense strand
gaagagugcugccaaacac

SEQ ID NO: 61551 - RNA, 19 nt, Homo sapiens
  misc_RNA (1)...(19): siRNA sense strand
gcuauacgauuuacucuac

SEQ ID NO: 61552 - RNA, 19 nt, Homo sapiens
  misc_RNA (1)...(19): siRNA sense strand
ggacuuuggcuauacgauu

SEQ ID NO: 61553 - RNA, 19 nt, Homo sapiens
  misc_RNA (1)...(19): siRNA sense strand
gugcaaaccuuucgagacu

SEQ ID NO: 61554 - RNA, 19 nt, Homo sapiens
  misc_RNA (1)...(19): siRNA sense strand
uagugaagcuccagaagga

SEQ ID NO: 61555 - RNA, 19 nt, Homo sapiens
  misc_RNA (1)...(19): siRNA sense strand
gggcucagaauguaaauga

SEQ ID NO: 61556 - RNA, 19 nt, Homo sapiens
  misc_RNA (1)...(19): siRNA sense strand
gaagagugugcaaaccuuu

SEQ ID NO: 61557 - RNA, 19 nt, Homo sapiens
  misc_RNA (1)...(19): siRNA sense strand
ccucaagcaugaaaggaaa

SEQ ID NO: 61558 - RNA, 19 nt, Homo sapiens
  misc_RNA (1)...(19): siRNA sense strand
cgagacuccucaagcauga

SEQ ID NO: 61559 - RNA, 19 nt, Homo sapiens
  misc_RNA (1)...(19): siRNA sense strand
gcaacugccugguggugau

SEQ ID NO: 61560 - RNA, 19 nt, Homo sapiens
  misc_RNA (1)...(19): siRNA sense strand
guggaucuuuggacacuuu

SEQ ID NO: 61561 - RNA, 19 nt, Homo sapiens
  misc_RNA (1)...(19): siRNA sense strand
gaugauaaggugugcuuga

SEQ ID NO: 61562 - RNA, 19 nt, Homo sapiens
  misc_RNA (1)...(19): siRNA sense strand
uggaugggcucagaaugua

SEQ ID NO: 61563 - RNA, 19 nt, Homo sapiens
  misc_RNA (1)...(19): siRNA sense strand
ggaagagugcugccaaaca

SEQ ID NO: 61564 - RNA, 19 nt, Homo sapiens
  misc_RNA (1)...(19): siRNA sense strand
caggaagagugcugccaaa

SEQ ID NO: 61565 - RNA, 19 nt, Homo sapiens
  misc_RNA (1)...(19): siRNA sense strand
agagagaccugaguuugug

SEQ ID NO: 61566 - RNA, 19 nt, Homo sapiens
  misc_RNA (1)...(19): siRNA sense strand
ucacaaggccccucacaua

SEQ ID NO: 61567 - RNA, 19 nt, Homo sapiens
  misc_RNA (1)...(19): siRNA sense strand
gcucagaauguaaaugaug

SEQ ID NO: 61568 - RNA, 19 nt, Homo sapiens
  misc_RNA (1)...(19): siRNA sense strand
gcuaggcuaugcaaacucu

SEQ ID NO: 61569 - RNA, 19 nt, Homo sapiens
  misc_RNA (1)...(19): siRNA sense strand
gaugggcucagaauguaaa

SEQ ID NO: 61570 - RNA, 19 nt, Homo sapiens
  misc_RNA (1)...(19): siRNA sense strand
ccagagagaccugaguuug

SEQ ID NO: 61571 - RNA, 19 nt, Homo sapiens
  misc_RNA (1)...(19): siRNA sense strand
aaacaucuccaucuuuaag

SEQ ID NO: 61572 - RNA, 19 nt, Homo sapiens
  misc_RNA (1)...(19): siRNA sense strand
gaaggagguggaagagugu

SEQ ID NO: 61573 - RNA, 19 nt, Homo sapiens
  misc_RNA (1)...(19): siRNA sense strand
ucauguacuaccagauuua

SEQ ID NO: 61574 - RNA, 19 nt, Homo sapiens
  misc_RNA (1)...(19): siRNA sense strand
ugaucagcauugacaggua

SEQ ID NO: 61575 - RNA, 19 nt, Homo sapiens
  misc_RNA (1)...(19): siRNA sense strand
cucagaauguaaaugauga

SEQ ID NO: 61576 - RNA, 19 nt, Homo sapiens
  misc_RNA (1)...(19): siRNA sense strand
cagagagaccugaguuugu

SEQ ID NO: 61577 - RNA, 19 nt, Homo sapiens
  misc_RNA (1)...(19): siRNA sense strand
acaaaaugcugacuacugu

SEQ ID NO: 61578 - RNA, 19 nt, Homo sapiens
  misc_RNA (1)...(19): siRNA sense strand
gcauagugaagcuccagaa

SEQ ID NO: 61579 - RNA, 19 nt, Homo sapiens
  misc_RNA (1)...(19): siRNA sense strand
guggagaggacauuucugu

SEQ ID NO: 61580 - RNA, 19 nt, Homo sapiens
  misc_RNA (1)...(19): siRNA sense strand
gccaguaccggaauaucaa

SEQ ID NO: 61581 - RNA, 19 nt, Homo sapiens
  misc_RNA (1)...(19): siRNA sense strand
gaaaugcauggcgaagaug

SEQ ID NO: 61582 - RNA, 19 nt, Homo sapiens
  misc_RNA (1)...(19): siRNA sense strand
ggaugggcucagaauguaa

SEQ ID NO: 61583 - RNA, 19 nt, Homo sapiens
  misc_RNA (1)...(19): siRNA sense strand
gcaccuccgcucuuuccuu

SEQ ID NO: 61584 - RNA, 19 nt, Homo sapiens
  misc_RNA (1)...(19): siRNA sense strand
cuaccgcaguggcauuuua

SEQ ID NO: 61585 - RNA, 19 nt, Homo sapiens
  misc_RNA (1)...(19): siRNA sense strand
ugcaaacucucucauuaac

SEQ ID NO: 61586 - RNA, 19 nt, Homo sapiens
  misc_RNA (1)...(19): siRNA sense strand
ucaucacgcugcugacgau

SEQ ID NO: 61587 - RNA, 19 nt, Homo sapiens
  misc_RNA (1)...(19): siRNA sense strand
ggccagagagaccugaguu

SEQ ID NO: 61588 - RNA, 19 nt, Homo sapiens
  misc_RNA (1)...(19): siRNA sense strand
cggcagagucgagaaaguu

SEQ ID NO: 61589 - RNA, 19 nt, Homo sapiens
  misc_RNA (1)...(19): siRNA sense strand
augcaaacucucucauuaa

SEQ ID NO: 61590 - RNA, 19 nt, Homo sapiens
  misc_RNA (1)...(19): siRNA sense strand
gggaaaugcauggcgaaga

SEQ ID NO: 61591 - RNA, 19 nt, Homo sapiens
  misc_RNA (1)...(19): siRNA sense strand
gccagagagaccugaguuu

SEQ ID NO: 61592 - RNA, 19 nt, Homo sapiens
  misc_RNA (1)...(19): siRNA sense strand
ugcacggccucgaucauga

SEQ ID NO: 61593 - RNA, 19 nt, Homo sapiens
  misc_RNA (1)...(19): siRNA sense strand
uuucauguacuaccagauu

SEQ ID NO: 61594 - RNA, 19 nt, Homo sapiens
  misc_RNA (1)...(19): siRNA sense strand
ugaauggcauagugaagcu

SEQ ID NO: 61595 - RNA, 19 nt, Homo sapiens
  misc_RNA (1)...(19): siRNA sense strand
uuucgagacuccucaagca

SEQ ID NO: 61596 - RNA, 19 nt, Homo sapiens
  misc_RNA (1)...(19): siRNA sense strand
gcccugaauggcauaguga

SEQ ID NO: 61597 - RNA, 19 nt, Homo sapiens
  misc_RNA (1)...(19): siRNA sense strand
cagcgucaccgaccucauc

SEQ ID NO: 61598 - RNA, 19 nt, Homo sapiens
  misc_RNA (1)...(19): siRNA sense strand
cagugccaguaccggaaua

SEQ ID NO: 61599 - RNA, 19 nt, Homo sapiens
  misc_RNA (1)...(19): siRNA sense strand
gaccugaggaccaccuauc

SEQ ID NO: 61600 - RNA, 19 nt, Homo sapiens
  misc_RNA (1)...(19): siRNA sense strand
gcauggcgaagaugauucu

SEQ ID NO: 61601 - RNA, 19 nt, Homo sapiens
  misc_RNA (1)...(19): siRNA sense strand
cuacggcagagucgagaaa

SEQ ID NO: 61602 - RNA, 19 nt, Homo sapiens
  misc_RNA (1)...(19): siRNA sense strand
ggcagagucgagaaaguug

SEQ ID NO: 61603 - RNA, 19 nt, Homo sapiens
  misc_RNA (1)...(19): siRNA sense strand
uucauguacuaccagauuu

SEQ ID NO: 61604 - RNA, 19 nt, Homo sapiens
  misc_RNA (1)...(19): siRNA sense strand
gcagagucgagaaaguugu

SEQ ID NO: 61605 - RNA, 19 nt, Homo sapiens
  misc_RNA (1)...(19): siRNA sense strand
cuaugcaaacucucucauu

SEQ ID NO: 61606 - RNA, 19 nt, Homo sapiens
  misc_RNA (1)...(19): siRNA sense strand
uauauaugccuucuucaac

SEQ ID NO: 61607 - RNA, 19 nt, Homo sapiens
  misc_RNA (1)...(19): siRNA sense strand
ggaaaugcauggcgaagau

SEQ ID NO: 61608 - RNA, 19 nt, Homo sapiens
  misc_RNA (1)...(19): siRNA sense strand
uaugcaaacucucucauua

SEQ ID NO: 61609 - RNA, 19 nt, Homo sapiens
  misc_RNA (1)...(19): siRNA sense strand
gauaaggugugcuugauca

SEQ ID NO: 61610 - RNA, 19 nt, Homo sapiens
  misc_RNA (1)...(19): siRNA sense strand
caccuuaccuccacucuuu

SEQ ID NO: 61611 - RNA, 19 nt, Homo sapiens
  misc_RNA (1)...(19): siRNA sense strand
ggaagagugugcaaaccuu

SEQ ID NO: 61612 - RNA, 19 nt, Homo sapiens
  misc_RNA (1)...(19): siRNA sense strand
gacuuuggcuauacgauuu

SEQ ID NO: 61613 - RNA, 19 nt, Homo sapiens
  misc_RNA (1)...(19): siRNA sense strand
gaagagugcugccaaacac

SEQ ID NO: 61614 - RNA, 19 nt, Homo sapiens
  misc_RNA (1)...(19): siRNA sense strand
gcuauacgauuuacucuac

SEQ ID NO: 61615 - RNA, 19 nt, Homo sapiens
  misc_RNA (1)...(19): siRNA sense strand
ggacuuuggcuauacgauu

SEQ ID NO: 61616 - RNA, 19 nt, Homo sapiens
  misc_RNA (1)...(19): siRNA sense strand
gugcaaaccuuucgagacu

SEQ ID NO: 61617 - RNA, 19 nt, Homo sapiens
  misc_RNA (1)...(19): siRNA sense strand
uagugaagcuccagaagga

SEQ ID NO: 61618 - RNA, 19 nt, Homo sapiens
  misc_RNA (1)...(19): siRNA sense strand
gggcucagaauguaaauga

SEQ ID NO: 61619 - RNA, 19 nt, Homo sapiens
  misc_RNA (1)...(19): siRNA sense strand
gaagagugugcaaaccuuu

SEQ ID NO: 61620 - RNA, 19 nt, Homo sapiens
  misc_RNA (1)...(19): siRNA sense strand
ccucaagcaugaaaggaaa

SEQ ID NO: 61621 - RNA, 19 nt, Homo sapiens
  misc_RNA (1)...(19): siRNA sense strand
cgagacuccucaagcauga

SEQ ID NO: 61622 - RNA, 19 nt, Homo sapiens
  misc_RNA (1)...(19): siRNA sense strand
gcaacugccugguggugau

SEQ ID NO: 61623 - RNA, 19 nt, Homo sapiens
  misc_RNA (1)...(19): siRNA sense strand
guggaucuuuggacacuuu

SEQ ID NO: 61624 - RNA, 19 nt, Homo sapiens
  misc_RNA (1)...(19): siRNA sense strand
gaugauaaggugugcuuga

SEQ ID NO: 61625 - RNA, 19 nt, Homo sapiens
  misc_RNA (1)...(19): siRNA sense strand
uggaugggcucagaaugua

SEQ ID NO: 61626 - RNA, 19 nt, Homo sapiens
  misc_RNA (1)...(19): siRNA sense strand
ggaagagugcugccaaaca

SEQ ID NO: 61627 - RNA, 19 nt, Homo sapiens
  misc_RNA (1)...(19): siRNA sense strand
caggaagagugcugccaaa

SEQ ID NO: 61628 - RNA, 19 nt, Homo sapiens
  misc_RNA (1)...(19): siRNA sense strand
agagagaccugaguuugug

SEQ ID NO: 61629 - RNA, 19 nt, Homo sapiens
  misc_RNA (1)...(19): siRNA sense strand
ucacaaggccccucacaua

SEQ ID NO: 61630 - RNA, 19 nt, Homo sapiens
  misc_RNA (1)...(19): siRNA sense strand
gcucagaauguaaaugaug

SEQ ID NO: 61631 - RNA, 19 nt, Homo sapiens
  misc_RNA (1)...(19): siRNA sense strand
gcuaggcuaugcaaacucu

SEQ ID NO: 61632 - RNA, 19 nt, Homo sapiens
  misc_RNA (1)...(19): siRNA sense strand
gaugggcucagaauguaaa

SEQ ID NO: 61633 - RNA, 19 nt, Homo sapiens
  misc_RNA (1)...(19): siRNA sense strand
ccagagagaccugaguuug

SEQ ID NO: 61634 - RNA, 19 nt, Homo sapiens
  misc_RNA (1)...(19): siRNA sense strand
aaacaucuccaucuuuaag

SEQ ID NO: 61635 - RNA, 19 nt, Homo sapiens
  misc_RNA (1)...(19): siRNA sense strand
gaaggagguggaagagugu

SEQ ID NO: 61636 - RNA, 19 nt, Homo sapiens
  misc_RNA (1)...(19): siRNA sense strand
ucauguacuaccagauuua

SEQ ID NO: 61637 - RNA, 19 nt, Homo sapiens
  misc_RNA (1)...(19): siRNA sense strand
ugaucagcauugacaggua

SEQ ID NO: 61638 - RNA, 19 nt, Homo sapiens
  misc_RNA (1)...(19): siRNA sense strand
cucagaauguaaaugauga

SEQ ID NO: 61639 - RNA, 19 nt, Homo sapiens
  misc_RNA (1)...(19): siRNA sense strand
cagagagaccugaguuugu

SEQ ID NO: 61640 - RNA, 19 nt, Homo sapiens
  misc_RNA (1)...(19): siRNA sense strand
acaaaaugcugacuacugu

SEQ ID NO: 61641 - RNA, 19 nt, Homo sapiens
  misc_RNA (1)...(19): siRNA sense strand
gcauagugaagcuccagaa

SEQ ID NO: 61642 - RNA, 19 nt, Homo sapiens
  misc_RNA (1)...(19): siRNA sense strand
guggagaggacauuucugu

SEQ ID NO: 61643 - RNA, 19 nt, Homo sapiens
  misc_RNA (1)...(19): siRNA sense strand
gccaguaccggaauaucaa

SEQ ID NO: 61644 - RNA, 19 nt, Homo sapiens
  misc_RNA (1)...(19): siRNA sense strand
gaaaugcauggcgaagaug

SEQ ID NO: 61645 - RNA, 19 nt, Homo sapiens
  misc_RNA (1)...(19): siRNA sense strand
ggaugggcucagaauguaa

SEQ ID NO: 61646 - RNA, 19 nt, Homo sapiens
  misc_RNA (1)...(19): siRNA sense strand
gcaccuccgcucuuuccuu

SEQ ID NO: 61647 - RNA, 19 nt, Homo sapiens
  misc_RNA (1)...(19): siRNA sense strand
cuaccgcaguggcauuuua

SEQ ID NO: 61648 - RNA, 19 nt, Homo sapiens
  misc_RNA (1)...(19): siRNA sense strand
ugcaaacucucucauuaac

SEQ ID NO: 61649 - RNA, 19 nt, Homo sapiens
  misc_RNA (1)...(19): siRNA sense strand
ucaucacgcugcugacgau

SEQ ID NO: 61650 - RNA, 19 nt, Homo sapiens
  misc_RNA (1)...(19): siRNA sense strand
ggccagagagaccugaguu

SEQ ID NO: 61651 - RNA, 19 nt, Homo sapiens
  misc_RNA (1)...(19): siRNA sense strand
cggcagagucgagaaaguu

SEQ ID NO: 61652 - RNA, 19 nt, Homo sapiens
  misc_RNA (1)...(19): siRNA sense strand
augcaaacucucucauuaa

SEQ ID NO: 61653 - RNA, 19 nt, Homo sapiens
  misc_RNA (1)...(19): siRNA sense strand
gggaaaugcauggcgaaga

SEQ ID NO: 61654 - RNA, 19 nt, Homo sapiens
  misc_RNA (1)...(19): siRNA sense strand
gccagagagaccugaguuu

SEQ ID NO: 61655 - RNA, 19 nt, Homo sapiens
  misc_RNA (1)...(19): siRNA sense strand
ugcacggccucgaucauga

SEQ ID NO: 61656 - RNA, 19 nt, Homo sapiens
  misc_RNA (1)...(19): siRNA sense strand
uuucauguacuaccagauu

SEQ ID NO: 61657 - RNA, 19 nt, Homo sapiens
  misc_RNA (1)...(19): siRNA sense strand
ugaauggcauagugaagcu

SEQ ID NO: 61658 - RNA, 19 nt, Homo sapiens
  misc_RNA (1)...(19): siRNA sense strand
uuucgagacuccucaagca

SEQ ID NO: 61659 - RNA, 19 nt, Homo sapiens
  misc_RNA (1)...(19): siRNA sense strand
gcccugaauggcauaguga

SEQ ID NO: 61660 - RNA, 19 nt, Homo sapiens
  misc_RNA (1)...(19): siRNA sense strand
cagcgucaccgaccucauc

SEQ ID NO: 61661 - RNA, 19 nt, Homo sapiens
  misc_RNA (1)...(19): siRNA sense strand
cagugccaguaccggaaua

SEQ ID NO: 61662 - RNA, 19 nt, Homo sapiens
  misc_RNA (1)...(19): siRNA sense strand
gaccugaggaccaccuauc

SEQ ID NO: 61663 - RNA, 19 nt, Homo sapiens
  misc_RNA (1)...(19): siRNA sense strand
gcauggcgaagaugauucu

SEQ ID NO: 61664 - RNA, 19 nt, Homo sapiens
  misc_RNA (1)...(19): siRNA sense strand
cuacggcagagucgagaaa

SEQ ID NO: 61665 - RNA, 19 nt, Homo sapiens
  misc_RNA (1)...(19): siRNA sense strand
ggcagagucgagaaaguug

SEQ ID NO: 61666 - RNA, 19 nt, Homo sapiens
  misc_RNA (1)...(19): siRNA sense strand
uucauguacuaccagauuu

SEQ ID NO: 61667 - RNA, 19 nt, Homo sapiens
  misc_RNA (1)...(19): siRNA sense strand
gcagagucgagaaaguugu

SEQ ID NO: 61668 - RNA, 19 nt, Homo sapiens
  misc_RNA (1)...(19): siRNA sense strand
cuaugcaaacucucucauu

SEQ ID NO: 61669 - RNA, 19 nt, Homo sapiens
  misc_RNA (1)...(19): siRNA sense strand
uauauaugccuucuucaac

SEQ ID NO: 61670 - RNA, 19 nt, Homo sapiens
  misc_RNA (1)...(19): siRNA sense strand
ggaaaugcauggcgaagau

SEQ ID NO: 61671 - RNA, 19 nt, Homo sapiens
  misc_RNA (1)...(19): siRNA sense strand
uaugcaaacucucucauua

SEQ ID NO: 61672 - RNA, 19 nt, Homo sapiens
  misc_RNA (1)...(19): siRNA sense strand
gauaaggugugcuugauca

SEQ ID NO: 61673 - RNA, 19 nt, Homo sapiens
  misc_RNA (1)...(19): siRNA sense strand
caccuuaccuccacucuuu

SEQ ID NO: 61674 - RNA, 19 nt, Homo sapiens
  misc_RNA (1)...(19): siRNA sense strand
ggaagagugugcaaaccuu

SEQ ID NO: 61675 - RNA, 19 nt, Homo sapiens
  misc_RNA (1)...(19): siRNA sense strand
gacuuuggcuauacgauuu

SEQ ID NO: 61676 - RNA, 19 nt, Homo sapiens
  misc_RNA (1)...(19): siRNA sense strand
gaagagugcugccaaacac

SEQ ID NO: 61677 - RNA, 19 nt, Homo sapiens
  misc_RNA (1)...(19): siRNA sense strand
gcuauacgauuuacucuac

SEQ ID NO: 61678 - RNA, 19 nt, Homo sapiens
  misc_RNA (1)...(19): siRNA sense strand
ggacuuuggcuauacgauu

SEQ ID NO: 61679 - RNA, 19 nt, Homo sapiens
  misc_RNA (1)...(19): siRNA sense strand
gugcaaaccuuucgagacu

SEQ ID NO: 61680 - RNA, 19 nt, Homo sapiens
  misc_RNA (1)...(19): siRNA sense strand
uagugaagcuccagaagga

SEQ ID NO: 61681 - RNA, 19 nt, Homo sapiens
  misc_RNA (1)...(19): siRNA sense strand
gggcucagaauguaaauga

SEQ ID NO: 61682 - RNA, 19 nt, Homo sapiens
  misc_RNA (1)...(19): siRNA sense strand
gaagagugugcaaaccuuu

SEQ ID NO: 61683 - RNA, 19 nt, Homo sapiens
  misc_RNA (1)...(19): siRNA sense strand
ccucaagcaugaaaggaaa

SEQ ID NO: 61684 - RNA, 19 nt, Homo sapiens
  misc_RNA (1)...(19): siRNA sense strand
cgagacuccucaagcauga

SEQ ID NO: 61685 - RNA, 19 nt, Homo sapiens
  misc_RNA (1)...(19): siRNA sense strand
gcaacugccugguggugau

SEQ ID NO: 61686 - RNA, 19 nt, Homo sapiens
  misc_RNA (1)...(19): siRNA sense strand
guggaucuuuggacacuuu

SEQ ID NO: 61687 - RNA, 19 nt, Homo sapiens
  misc_RNA (1)...(19): siRNA sense strand
gaugauaaggugugcuuga

SEQ ID NO: 61688 - RNA, 19 nt, Homo sapiens
  misc_RNA (1)...(19): siRNA sense strand
uggaugggcucagaaugua

SEQ ID NO: 61689 - RNA, 19 nt, Homo sapiens
  misc_RNA (1)...(19): siRNA sense strand
ggaagagugcugccaaaca

SEQ ID NO: 61690 - RNA, 19 nt, Homo sapiens
  misc_RNA (1)...(19): siRNA sense strand
caggaagagugcugccaaa

SEQ ID NO: 61691 - RNA, 19 nt, Homo sapiens
  misc_RNA (1)...(19): siRNA sense strand
agagagaccugaguuugug

SEQ ID NO: 61692 - RNA, 19 nt, Homo sapiens
  misc_RNA (1)...(19): siRNA sense strand
ucacaaggccccucacaua

SEQ ID NO: 61693 - RNA, 19 nt, Homo sapiens
  misc_RNA (1)...(19): siRNA sense strand
gcucagaauguaaaugaug

SEQ ID NO: 61694 - RNA, 19 nt, Homo sapiens
  misc_RNA (1)...(19): siRNA sense strand
gcuaggcuaugcaaacucu

SEQ ID NO: 61695 - RNA, 19 nt, Homo sapiens
  misc_RNA (1)...(19): siRNA sense strand
gaugggcucagaauguaaa

SEQ ID NO: 61696 - RNA, 19 nt, Homo sapiens
  misc_RNA (1)...(19): siRNA sense strand
ccagagagaccugaguuug

SEQ ID NO: 61697 - RNA, 19 nt, Homo sapiens
  misc_RNA (1)...(19): siRNA sense strand
aaacaucuccaucuuuaag

SEQ ID NO: 61698 - RNA, 19 nt, Homo sapiens
  misc_RNA (1)...(19): siRNA sense strand
gaaggagguggaagagugu

SEQ ID NO: 61699 - RNA, 19 nt, Homo sapiens
  misc_RNA (1)...(19): siRNA sense strand
ucauguacuaccagauuua

SEQ ID NO: 61700 - RNA, 19 nt, Homo sapiens
  misc_RNA (1)...(19): siRNA sense strand
ugaucagcauugacaggua

SEQ ID NO: 61701 - RNA, 19 nt, Homo sapiens
  misc_RNA (1)...(19): siRNA sense strand
cucagaauguaaaugauga

SEQ ID NO: 61702 - RNA, 19 nt, Homo sapiens
  misc_RNA (1)...(19): siRNA sense strand
cagagagaccugaguuugu

SEQ ID NO: 61703 - RNA, 19 nt, Homo sapiens
  misc_RNA (1)...(19): siRNA sense strand
gcauagugaagcuccagaa

SEQ ID NO: 61704 - RNA, 19 nt, Homo sapiens
  misc_RNA (1)...(19): siRNA sense strand
guggagaggacauuucugu

SEQ ID NO: 61705 - RNA, 19 nt, Homo sapiens
  misc_RNA (1)...(19): siRNA sense strand
gccaguaccggaauaucaa

SEQ ID NO: 61706 - RNA, 19 nt, Homo sapiens
  misc_RNA (1)...(19): siRNA sense strand
gaaaugcauggcgaagaug

SEQ ID NO: 61707 - RNA, 19 nt, Homo sapiens
  misc_RNA (1)...(19): siRNA sense strand
ggaugggcucagaauguaa

SEQ ID NO: 61708 - RNA, 19 nt, Homo sapiens
  misc_RNA (1)...(19): siRNA sense strand
gcaccuccgcucuuuccuu

SEQ ID NO: 61709 - RNA, 19 nt, Homo sapiens
  misc_RNA (1)...(19): siRNA sense strand
cuaccgcaguggcauuuua

SEQ ID NO: 61710 - RNA, 19 nt, Homo sapiens
  misc_RNA (1)...(19): siRNA sense strand
ugcaaacucucucauuaac

SEQ ID NO: 61711 - RNA, 19 nt, Homo sapiens
  misc_RNA (1)...(19): siRNA sense strand
ucaucacgcugcugacgau

SEQ ID NO: 61712 - RNA, 19 nt, Homo sapiens
  misc_RNA (1)...(19): siRNA sense strand
ggccagagagaccugaguu

SEQ ID NO: 61713 - RNA, 19 nt, Homo sapiens
  misc_RNA (1)...(19): siRNA sense strand
cggcagagucgagaaaguu

SEQ ID NO: 61714 - RNA, 19 nt, Homo sapiens
  misc_RNA (1)...(19): siRNA sense strand
augcaaacucucucauuaa

SEQ ID NO: 61715 - RNA, 19 nt, Homo sapiens
  misc_RNA (1)...(19): siRNA sense strand
gggaaaugcauggcgaaga

SEQ ID NO: 61716 - RNA, 19 nt, Homo sapiens
  misc_RNA (1)...(19): siRNA sense strand
gccagagagaccugaguuu

SEQ ID NO: 61717 - RNA, 19 nt, Homo sapiens
  misc_RNA (1)...(19): siRNA sense strand
ugcacggccucgaucauga

SEQ ID NO: 61718 - RNA, 19 nt, Homo sapiens
  misc_RNA (1)...(19): siRNA sense strand
uuucauguacuaccagauu

SEQ ID NO: 61719 - RNA, 19 nt, Homo sapiens
  misc_RNA (1)...(19): siRNA sense strand
ugaauggcauagugaagcu

SEQ ID NO: 61720 - RNA, 19 nt, Homo sapiens
  misc_RNA (1)...(19): siRNA sense strand
uuucgagacuccucaagca

SEQ ID NO: 61721 - RNA, 19 nt, Homo sapiens
  misc_RNA (1)...(19): siRNA sense strand
cagcgucaccgaccucauc

SEQ ID NO: 61722 - RNA, 19 nt, Homo sapiens
  misc_RNA (1)...(19): siRNA sense strand
cagugccaguaccggaaua

SEQ ID NO: 61723 - RNA, 19 nt, Homo sapiens
  misc_RNA (1)...(19): siRNA sense strand
gaccugaggaccaccuauc

SEQ ID NO: 61724 - RNA, 19 nt, Homo sapiens
  misc_RNA (1)...(19): siRNA sense strand
gcccugaauggcauaguga

SEQ ID NO: 61725 - RNA, 19 nt, Homo sapiens
  misc_RNA (1)...(19): siRNA sense strand
gcauggcgaagaugauucu

SEQ ID NO: 61726 - RNA, 19 nt, Homo sapiens
  misc_RNA (1)...(19): siRNA sense strand
cuacggcagagucgagaaa

SEQ ID NO: 61727 - RNA, 19 nt, Homo sapiens
  misc_RNA (1)...(19): siRNA sense strand
ggcagagucgagaaaguug

SEQ ID NO: 61728 - RNA, 19 nt, Homo sapiens
  misc_RNA (1)...(19): siRNA sense strand
uucauguacuaccagauuu

SEQ ID NO: 61729 - RNA, 19 nt, Homo sapiens
  misc_RNA (1)...(19): siRNA sense strand
gcagagucgagaaaguugu

SEQ ID NO: 61730 - RNA, 19 nt, Homo sapiens
  misc_RNA (1)...(19): siRNA sense strand
cuaugcaaacucucucauu

SEQ ID NO: 61731 - RNA, 19 nt, Homo sapiens
  misc_RNA (1)...(19): siRNA sense strand
uauauaugccuucuucaac

SEQ ID NO: 61732 - RNA, 19 nt, Homo sapiens
  misc_RNA (1)...(19): siRNA sense strand
gcaaugagacucugcacua

SEQ ID NO: 61733 - RNA, 19 nt, Homo sapiens
  misc_RNA (1)...(19): siRNA sense strand
gcaaguccuucaccauuga

SEQ ID NO: 61734 - RNA, 19 nt, Homo sapiens
  misc_RNA (1)...(19): siRNA sense strand
ucaaacaucucccaugaca

SEQ ID NO: 61735 - RNA, 19 nt, Homo sapiens
  misc_RNA (1)...(19): siRNA sense strand
ucucaaacaucucccauga

SEQ ID NO: 61736 - RNA, 19 nt, Homo sapiens
  misc_RNA (1)...(19): siRNA sense strand
ggcaaguccuucaccauug

SEQ ID NO: 61737 - RNA, 19 nt, Homo sapiens
  misc_RNA (1)...(19): siRNA sense strand
aagcaggagucaaugaauu

SEQ ID NO: 61738 - RNA, 19 nt, Homo sapiens
  misc_RNA (1)...(19): siRNA sense strand
ggaagcaggagucaaugaa

SEQ ID NO: 61739 - RNA, 19 nt, Homo sapiens
  misc_RNA (1)...(19): siRNA sense strand
cgaacaggcucaguggaaa

SEQ ID NO: 61740 - RNA, 19 nt, Homo sapiens
  misc_RNA (1)...(19): siRNA sense strand
gggcaaguccuucaccauu

SEQ ID NO: 61741 - RNA, 19 nt, Homo sapiens
  misc_RNA (1)...(19): siRNA sense strand
caaugagacucugcacuau

SEQ ID NO: 61742 - RNA, 19 nt, Homo sapiens
  misc_RNA (1)...(19): siRNA sense strand
ggcaacaucuuucacaaac

SEQ ID NO: 61743 - RNA, 19 nt, Homo sapiens
  misc_RNA (1)...(19): siRNA sense strand
gaucggaugagaagguauu

SEQ ID NO: 61744 - RNA, 19 nt, Homo sapiens
  misc_RNA (1)...(19): siRNA sense strand
caacaucuuucacaaacac

SEQ ID NO: 61745 - RNA, 19 nt, Homo sapiens
  misc_RNA (1)...(19): siRNA sense strand
gcaacaucuuucacaaaca

SEQ ID NO: 61746 - RNA, 19 nt, Homo sapiens
  misc_RNA (1)...(19): siRNA sense strand
gaagcaggagucaaugaau

SEQ ID NO: 61747 - RNA, 19 nt, Homo sapiens
  misc_RNA (1)...(19): siRNA sense strand
augagacucugcacuauga

SEQ ID NO: 61748 - RNA, 19 nt, Homo sapiens
  misc_RNA (1)...(19): siRNA sense strand
aaacauuacuuggucucaa

SEQ ID NO: 61749 - RNA, 19 nt, Homo sapiens
  misc_RNA (1)...(19): siRNA sense strand
aacauuacuuggucucaaa

SEQ ID NO: 61750 - RNA, 19 nt, Homo sapiens
  misc_RNA (1)...(19): siRNA sense strand
agaccucucuaaauaagau

SEQ ID NO: 61751 - RNA, 19 nt, Homo sapiens
  misc_RNA (1)...(19): siRNA sense strand
ugagaagguauucgaggua

SEQ ID NO: 61752 - RNA, 19 nt, Homo sapiens
  misc_RNA (1)...(19): siRNA sense strand
caucuguccugcucugcuu

SEQ ID NO: 61753 - RNA, 19 nt, Homo sapiens
  misc_RNA (1)...(19): siRNA sense strand
gggaagcaggagucaauga

SEQ ID NO: 61754 - RNA, 19 nt, Homo sapiens
  misc_RNA (1)...(19): siRNA sense strand
guacacgugaggccaaaga

SEQ ID NO: 61755 - RNA, 19 nt, Homo sapiens
  misc_RNA (1)...(19): siRNA sense strand
caggcucaguggaaacauu

SEQ ID NO: 61756 - RNA, 19 nt, Homo sapiens
  misc_RNA (1)...(19): siRNA sense strand
ucacgguggugucgguguu

SEQ ID NO: 61757 - RNA, 19 nt, Homo sapiens
  misc_RNA (1)...(19): siRNA sense strand
ggacagccucacccucuuc

SEQ ID NO: 61758 - RNA, 19 nt, Homo sapiens
  misc_RNA (1)...(19): siRNA sense strand
guggcaacaucuuucacaa

SEQ ID NO: 61759 - RNA, 19 nt, Homo sapiens
  misc_RNA (1)...(19): siRNA sense strand
ugacacugcaacccacuuu

SEQ ID NO: 61760 - RNA, 19 nt, Homo sapiens
  misc_RNA (1)...(19): siRNA sense strand
gaacaggcucaguggaaac

SEQ ID NO: 61761 - RNA, 19 nt, Homo sapiens
  misc_RNA (1)...(19): siRNA sense strand
gaaacauuacuuggucuca

SEQ ID NO: 61762 - RNA, 19 nt, Homo sapiens
  misc_RNA (1)...(19): siRNA sense strand
guccugcucugcuucaucu

SEQ ID NO: 61763 - RNA, 19 nt, Homo sapiens
  misc_RNA (1)...(19): siRNA sense strand
ggaggccacagccacauuc

SEQ ID NO: 61764 - RNA, 19 nt, Homo sapiens
  misc_RNA (1)...(19): siRNA sense strand
ucaguggaaacauuacuug

SEQ ID NO: 61765 - RNA, 19 nt, Homo sapiens
  misc_RNA (1)...(19): siRNA sense strand
aggcucaguggaaacauua

SEQ ID NO: 61766 - RNA, 19 nt, Homo sapiens
  misc_RNA (1)...(19): siRNA sense strand
uggcugugcuggacuugau

SEQ ID NO: 61767 - RNA, 19 nt, Homo sapiens
  misc_RNA (1)...(19): siRNA sense strand
ggauggccaccgcaacuuc

SEQ ID NO: 61768 - RNA, 19 nt, Homo sapiens
  misc_RNA (1)...(19): siRNA sense strand
aggagucaaugaauuccaa

SEQ ID NO: 61769 - RNA, 19 nt, Homo sapiens
  misc_RNA (1)...(19): siRNA sense strand
gaggauggccaccgcaacu

SEQ ID NO: 61770 - RNA, 19 nt, Homo sapiens
  misc_RNA (1)...(19): siRNA sense strand
uggcaacaucuuucacaaa

SEQ ID NO: 61771 - RNA, 19 nt, Homo sapiens
  misc_RNA (1)...(19): siRNA sense strand
gagacucugcacuaugaga

SEQ ID NO: 61772 - RNA, 19 nt, Homo sapiens
  misc_RNA (1)...(19): siRNA sense strand
caucuucggccagcacuug

SEQ ID NO: 61773 - RNA, 19 nt, Homo sapiens
  misc_RNA (1)...(19): siRNA sense strand
ccgggaagcaggagucaau

SEQ ID NO: 61774 - RNA, 19 nt, Homo sapiens
  misc_RNA (1)...(19): siRNA sense strand
acgaacaggcucaguggaa

SEQ ID NO: 61775 - RNA, 19 nt, Homo sapiens
  misc_RNA (1)...(19): siRNA sense strand
aggaucggaugagaaggua

SEQ ID NO: 61776 - RNA, 19 nt, Homo sapiens
  misc_RNA (1)...(19): siRNA sense strand
gguggcaacaucuuucaca

SEQ ID NO: 61777 - RNA, 19 nt, Homo sapiens
  misc_RNA (1)...(19): siRNA sense strand
caacgaagcuucugugaug

SEQ ID NO: 61778 - RNA, 19 nt, Homo sapiens
  misc_RNA (1)...(19): siRNA sense strand
ggaauaacauugcuucaga

SEQ ID NO: 61779 - RNA, 19 nt, Homo sapiens
  misc_RNA (1)...(19): siRNA sense strand
ggccagaaauggagaauaa

SEQ ID NO: 61780 - RNA, 19 nt, Homo sapiens
  misc_RNA (1)...(19): siRNA sense strand
gagagagccuccugugaaa

SEQ ID NO: 61781 - RNA, 19 nt, Homo sapiens
  misc_RNA (1)...(19): siRNA sense strand
gaagcacccuuuaagaaug

SEQ ID NO: 61782 - RNA, 19 nt, Homo sapiens
  misc_RNA (1)...(19): siRNA sense strand
ggagagaugucaugcaagu

SEQ ID NO: 61783 - RNA, 19 nt, Homo sapiens
  misc_RNA (1)...(19): siRNA sense strand
cggaagagcuggagacaga

SEQ ID NO: 61784 - RNA, 19 nt, Homo sapiens
  misc_RNA (1)...(19): siRNA sense strand
gcagacaccuacaacauca

SEQ ID NO: 61785 - RNA, 19 nt, Homo sapiens
  misc_RNA (1)...(19): siRNA sense strand
gcuggaaacucuucuacaa

SEQ ID NO: 61786 - RNA, 19 nt, Homo sapiens
  misc_RNA (1)...(19): siRNA sense strand
ggugaaagaugaaccugaa

SEQ ID NO: 61787 - RNA, 19 nt, Homo sapiens
  misc_RNA (1)...(19): siRNA sense strand
aaagugacguccugcauuu

SEQ ID NO: 61788 - RNA, 19 nt, Homo sapiens
  misc_RNA (1)...(19): siRNA sense strand
ugaccaaucucaaggauau

SEQ ID NO: 61789 - RNA, 19 nt, Homo sapiens
  misc_RNA (1)...(19): siRNA sense strand
ucaaggauauugggcuuua

SEQ ID NO: 61790 - RNA, 19 nt, Homo sapiens
  misc_RNA (1)...(19): siRNA sense strand
uuaagaaugucacagagua

SEQ ID NO: 61791 - RNA, 19 nt, Homo sapiens
  misc_RNA (1)...(19): siRNA sense strand
aaacaaagaccauugauuc

SEQ ID NO: 61792 - RNA, 19 nt, Homo sapiens
  misc_RNA (1)...(19): siRNA sense strand
caaagaccauugauucugu

SEQ ID NO: 61793 - RNA, 19 nt, Homo sapiens
  misc_RNA (1)...(19): siRNA sense strand
gaaaggaagcggagagaug

SEQ ID NO: 61794 - RNA, 19 nt, Homo sapiens
  misc_RNA (1)...(19): siRNA sense strand
caaccugaguuacuacauu

SEQ ID NO: 61795 - RNA, 19 nt, Homo sapiens
  misc_RNA (1)...(19): siRNA sense strand
ggagaauaauccaguccua

SEQ ID NO: 61796 - RNA, 19 nt, Homo sapiens
  misc_RNA (1)...(19): siRNA sense strand
ggaaacucuucuacaacua

SEQ ID NO: 61797 - RNA, 19 nt, Homo sapiens
  misc_RNA (1)...(19): siRNA sense strand
cuucagagcuggagaacuu

SEQ ID NO: 61798 - RNA, 19 nt, Homo sapiens
  misc_RNA (1)...(19): siRNA sense strand
gaaggucugugaggaagaa

SEQ ID NO: 61799 - RNA, 19 nt, Homo sapiens
  misc_RNA (1)...(19): siRNA sense strand
gaaagugacguccugcauu

SEQ ID NO: 61800 - RNA, 19 nt, Homo sapiens
  misc_RNA (1)...(19): siRNA sense strand
gcggagagaugucaugcaa

SEQ ID NO: 61801 - RNA, 19 nt, Homo sapiens
  misc_RNA (1)...(19): siRNA sense strand
ggaagcacccuuuaagaau

SEQ ID NO: 61802 - RNA, 19 nt, Homo sapiens
  misc_RNA (1)...(19): siRNA sense strand
gaagaaucgcaucaucaua

SEQ ID NO: 61803 - RNA, 19 nt, Homo sapiens
  misc_RNA (1)...(19): siRNA sense strand
gaaaccagaguggccauua

SEQ ID NO: 61804 - RNA, 19 nt, Homo sapiens
  misc_RNA (1)...(19): siRNA sense strand
ccaaggguguggugaaaga

SEQ ID NO: 61805 - RNA, 19 nt, Homo sapiens
  misc_RNA (1)...(19): siRNA sense strand
ucuaugagacagacuauua

SEQ ID NO: 61806 - RNA, 19 nt, Homo sapiens
  misc_RNA (1)...(19): siRNA sense strand
gaacuacacagcccggauu

SEQ ID NO: 61807 - RNA, 19 nt, Homo sapiens
  misc_RNA (1)...(19): siRNA sense strand
cagaguacccuuucuuuga

SEQ ID NO: 61808 - RNA, 19 nt, Homo sapiens
  misc_RNA (1)...(19): siRNA sense strand
ggaauggagugcuguaugc

SEQ ID NO: 61809 - RNA, 19 nt, Homo sapiens
  misc_RNA (1)...(19): siRNA sense strand
ggacucaguacgccguuua

SEQ ID NO: 61810 - RNA, 19 nt, Homo sapiens
  misc_RNA (1)...(19): siRNA sense strand
gauggagucuucaccacuu

SEQ ID NO: 61811 - RNA, 19 nt, Homo sapiens
  misc_RNA (1)...(19): siRNA sense strand
aaaccagaguggccauuaa

SEQ ID NO: 61812 - RNA, 19 nt, Homo sapiens
  misc_RNA (1)...(19): siRNA sense strand
aagaaucgcaucaucauaa

SEQ ID NO: 61813 - RNA, 19 nt, Homo sapiens
  misc_RNA (1)...(19): siRNA sense strand
ggacaagccagacaacugu

SEQ ID NO: 61814 - RNA, 19 nt, Homo sapiens
  misc_RNA (1)...(19): siRNA sense strand
gauggucuaugaaggaguu

SEQ ID NO: 61815 - RNA, 19 nt, Homo sapiens
  misc_RNA (1)...(19): siRNA sense strand
gacagacuauuaccggaaa

SEQ ID NO: 61816 - RNA, 19 nt, Homo sapiens
  misc_RNA (1)...(19): siRNA sense strand
gagaagaccaccaucaaca

SEQ ID NO: 61817 - RNA, 19 nt, Homo sapiens
  misc_RNA (1)...(19): siRNA sense strand
agaaggagcagaugacauu

SEQ ID NO: 61818 - RNA, 19 nt, Homo sapiens
  misc_RNA (1)...(19): siRNA sense strand
aaauacggaucacaaguug

SEQ ID NO: 61819 - RNA, 19 nt, Homo sapiens
  misc_RNA (1)...(19): siRNA sense strand
ucagauggccggagagauu

SEQ ID NO: 61820 - RNA, 19 nt, Homo sapiens
  misc_RNA (1)...(19): siRNA sense strand
caacacuggucaucaugga

SEQ ID NO: 61821 - RNA, 19 nt, Homo sapiens
  misc_RNA (1)...(19): siRNA sense strand
agugagaucuuguacauuc

SEQ ID NO: 61822 - RNA, 19 nt, Homo sapiens
  misc_RNA (1)...(19): siRNA sense strand
ccucaaggauggagucuuc

SEQ ID NO: 61823 - RNA, 19 nt, Homo sapiens
  misc_RNA (1)...(19): siRNA sense strand
gggagaagaucaccaugag

SEQ ID NO: 61824 - RNA, 19 nt, Homo sapiens
  misc_RNA (1)...(19): siRNA sense strand
gcacaauuacugcuccaaa

SEQ ID NO: 61825 - RNA, 19 nt, Homo sapiens
  misc_RNA (1)...(19): siRNA sense strand
agaaggaggaggcugaaua

SEQ ID NO: 61826 - RNA, 19 nt, Homo sapiens
  misc_RNA (1)...(19): siRNA sense strand
gaagaccaccaucaacaau

SEQ ID NO: 61827 - RNA, 19 nt, Homo sapiens
  misc_RNA (1)...(19): siRNA sense strand
gaucaucagcagcaucaaa

SEQ ID NO: 61828 - RNA, 19 nt, Homo sapiens
  misc_RNA (1)...(19): siRNA sense strand
ggggcgaucucaaaaguua

SEQ ID NO: 61829 - RNA, 19 nt, Homo sapiens
  misc_RNA (1)...(19): siRNA sense strand
gugggaggguuggugauua

SEQ ID NO: 61830 - RNA, 19 nt, Homo sapiens
  misc_RNA (1)...(19): siRNA sense strand
agaccaccaucaacaauga

SEQ ID NO: 61831 - RNA, 19 nt, Homo sapiens
  misc_RNA (1)...(19): siRNA sense strand
acagggaucucaucagcuu

SEQ ID NO: 61832 - RNA, 19 nt, Homo sapiens
  misc_RNA (1)...(19): siRNA sense strand
guccugacaugcuguuuga

SEQ ID NO: 61833 - RNA, 19 nt, Homo sapiens
  misc_RNA (1)...(19): siRNA sense strand
ggaguucaauugucaccau

SEQ ID NO: 61834 - RNA, 19 nt, Homo sapiens
  misc_RNA (1)...(19): siRNA sense strand
agagugagaucuuguacau

SEQ ID NO: 61835 - RNA, 19 nt, Homo sapiens
  misc_RNA (1)...(19): siRNA sense strand
gacagaguacccuuucuuu

SEQ ID NO: 61836 - RNA, 19 nt, Homo sapiens
  misc_RNA (1)...(19): siRNA sense strand
gacaugcuguuugaacuga

SEQ ID NO: 61837 - RNA, 19 nt, Homo sapiens
  misc_RNA (1)...(19): siRNA sense strand
caugguagccgaagauuuc

SEQ ID NO: 61838 - RNA, 19 nt, Homo sapiens
  misc_RNA (1)...(19): siRNA sense strand
gaacugucauuucuaaccu

SEQ ID NO: 61839 - RNA, 19 nt, Homo sapiens
  misc_RNA (1)...(19): siRNA sense strand
gauccuguguucuucuaug

SEQ ID NO: 61840 - RNA, 19 nt, Homo sapiens
  misc_RNA (1)...(19): siRNA sense strand
gaaggaggaggcugaauac

SEQ ID NO: 61841 - RNA, 19 nt, Homo sapiens
  misc_RNA (1)...(19): siRNA sense strand
ugagcaagaugauucagau

SEQ ID NO: 61842 - RNA, 19 nt, Homo sapiens
  misc_RNA (1)...(19): siRNA sense strand
gaugaccaaucucaaggau

SEQ ID NO: 61843 - RNA, 19 nt, Homo sapiens
  misc_RNA (1)...(19): siRNA sense strand
cucaucagcuucaccguuu

SEQ ID NO: 61844 - RNA, 19 nt, Homo sapiens
  misc_RNA (1)...(19): siRNA sense strand
ggagacagaguacccuuuc

SEQ ID NO: 61845 - RNA, 19 nt, Homo sapiens
  misc_RNA (1)...(19): siRNA sense strand
gagaucaucagcagcauca

SEQ ID NO: 61846 - RNA, 19 nt, Homo sapiens
  misc_RNA (1)...(19): siRNA sense strand
cgcaugugcuggcaguaua

SEQ ID NO: 61847 - RNA, 19 nt, Homo sapiens
  misc_RNA (1)...(19): siRNA sense strand
cguuugggauggucuauga

SEQ ID NO: 61848 - RNA, 19 nt, Homo sapiens
  misc_RNA (1)...(19): siRNA sense strand
gaccauugauucuguuacu

SEQ ID NO: 61849 - RNA, 19 nt, Homo sapiens
  misc_RNA (1)...(19): siRNA sense strand
cagauccuguguucuucua

SEQ ID NO: 61850 - RNA, 19 nt, Homo sapiens
  misc_RNA (1)...(19): siRNA sense strand
gagcagaguggauaacaag

SEQ ID NO: 61851 - RNA, 19 nt, Homo sapiens
  misc_RNA (1)...(19): siRNA sense strand
ugcuuucaaucccaaauua

SEQ ID NO: 61852 - RNA, 19 nt, Homo sapiens
  misc_RNA (1)...(19): siRNA sense strand
ucuguuaccucuccacugu

SEQ ID NO: 61853 - RNA, 19 nt, Homo sapiens
  misc_RNA (1)...(19): siRNA sense strand
aaaguuaucuccggucucu

SEQ ID NO: 61854 - RNA, 19 nt, Homo sapiens
  misc_RNA (1)...(19): siRNA sense strand
gugagaggauugaguuucu

SEQ ID NO: 61855 - RNA, 19 nt, Homo sapiens
  misc_RNA (1)...(19): siRNA sense strand
gcagaguggauaacaagga

SEQ ID NO: 61856 - RNA, 19 nt, Homo sapiens
  misc_RNA (1)...(19): siRNA sense strand
aggagaagccgauguguga

SEQ ID NO: 61857 - RNA, 19 nt, Homo sapiens
  misc_RNA (1)...(19): siRNA sense strand
ucaacaaugaguacaacua

SEQ ID NO: 61858 - RNA, 19 nt, Homo sapiens
  misc_RNA (1)...(19): siRNA sense strand
uugaggaggucacagagaa

SEQ ID NO: 61859 - RNA, 19 nt, Homo sapiens
  misc_RNA (1)...(19): siRNA sense strand
gcaucgaacuccucuucuc

SEQ ID NO: 61860 - RNA, 19 nt, Homo sapiens
  misc_RNA (1)...(19): siRNA sense strand
gagaagccgaugugugaga

SEQ ID NO: 61861 - RNA, 19 nt, Homo sapiens
  misc_RNA (1)...(19): siRNA sense strand
gguuggugauuaugcugua

SEQ ID NO: 61862 - RNA, 19 nt, Homo sapiens
  misc_RNA (1)...(19): siRNA sense strand
ccaacggcaaccugaguua

SEQ ID NO: 61863 - RNA, 19 nt, Homo sapiens
  misc_RNA (1)...(19): siRNA sense strand
gacauaaacaccaggaaca

SEQ ID NO: 61864 - RNA, 19 nt, Homo sapiens
  misc_RNA (1)...(19): siRNA sense strand
ggaauuacuccuucuacgu

SEQ ID NO: 61865 - RNA, 19 nt, Homo sapiens
  misc_RNA (1)...(19): siRNA sense strand
gcucagaugcuccaaggau

SEQ ID NO: 61866 - RNA, 19 nt, Homo sapiens
  misc_RNA (1)...(19): siRNA sense strand
ccacaaaccgcugccagaa

SEQ ID NO: 61867 - RNA, 19 nt, Homo sapiens
  misc_RNA (1)...(19): siRNA sense strand
caacuacgcccuggucauc

SEQ ID NO: 61868 - RNA, 19 nt, Homo sapiens
  misc_RNA (1)...(19): siRNA sense strand
gaucagcgagaaugugugu

SEQ ID NO: 61869 - RNA, 19 nt, Homo sapiens
  misc_RNA (1)...(19): siRNA sense strand
cgacggcaccaucgacauu

SEQ ID NO: 61870 - RNA, 19 nt, Homo sapiens
  misc_RNA (1)...(19): siRNA sense strand
acaaaccgcugccagaaaa

SEQ ID NO: 61871 - RNA, 19 nt, Homo sapiens
  misc_RNA (1)...(19): siRNA sense strand
caacaaugaguacaacuac

SEQ ID NO: 61872 - RNA, 19 nt, Homo sapiens
  misc_RNA (1)...(19): siRNA sense strand
gaaacucuucuacaacuac

SEQ ID NO: 61873 - RNA, 19 nt, Homo sapiens
  misc_RNA (1)...(19): siRNA sense strand
gacagacacucaggacaca

SEQ ID NO: 61874 - RNA, 19 nt, Homo sapiens
  misc_RNA (1)...(19): siRNA sense strand
gcaugugcuggcaguauaa

SEQ ID NO: 61875 - RNA, 19 nt, Homo sapiens
  misc_RNA (1)...(19): siRNA sense strand
ccgaagauuucacagucaa

SEQ ID NO: 61876 - RNA, 19 nt, Homo sapiens
  misc_RNA (1)...(19): siRNA sense strand
ccucaacgccaauaaguuc

SEQ ID NO: 61877 - RNA, 19 nt, Homo sapiens
  misc_RNA (1)...(19): siRNA sense strand
gaacacugaugccuacuug

SEQ ID NO: 61878 - RNA, 19 nt, Homo sapiens
  misc_RNA (1)...(19): siRNA sense strand
gaauggcacuucccaguuc

SEQ ID NO: 61879 - RNA, 19 nt, Homo sapiens
  misc_RNA (1)...(19): siRNA sense strand
ugaagaagguccugaagug

SEQ ID NO: 61880 - RNA, 19 nt, Homo sapiens
  misc_RNA (1)...(19): siRNA sense strand
gaggagacguccagaagug

SEQ ID NO: 61881 - RNA, 19 nt, Homo sapiens
  misc_RNA (1)...(19): siRNA sense strand
agaagguccugaaguguaa

SEQ ID NO: 61882 - RNA, 19 nt, Homo sapiens
  misc_RNA (1)...(19): siRNA sense strand
gagccaacaucuccugugu

SEQ ID NO: 61883 - RNA, 19 nt, Homo sapiens
  misc_RNA (1)...(19): siRNA sense strand
ggccauggcugaagaaggu

SEQ ID NO: 61884 - RNA, 19 nt, Homo sapiens
  misc_RNA (1)...(19): siRNA sense strand
gggaugaccugcugcucuu

SEQ ID NO: 61885 - RNA, 19 nt, Homo sapiens
  misc_RNA (1)...(19): siRNA sense strand
gcacuucccaguucacaug

SEQ ID NO: 61886 - RNA, 19 nt, Homo sapiens
  misc_RNA (1)...(19): siRNA sense strand
caacauaagcugggaaauc

SEQ ID NO: 61887 - RNA, 19 nt, Homo sapiens
  misc_RNA (1)...(19): siRNA sense strand
ccugagaucucgccacuag

SEQ ID NO: 61888 - RNA, 19 nt, Homo sapiens
  misc_RNA (1)...(19): siRNA sense strand
acccacagaugcaacauaa

SEQ ID NO: 61889 - RNA, 19 nt, Homo sapiens
  misc_RNA (1)...(19): siRNA sense strand
aaagacaccuggaguucga

SEQ ID NO: 61890 - RNA, 19 nt, Homo sapiens
  misc_RNA (1)...(19): siRNA sense strand
ccaagccucccacuacuuu

SEQ ID NO: 61891 - RNA, 19 nt, Homo sapiens
  misc_RNA (1)...(19): siRNA sense strand
gccaacaucuccugugucu

SEQ ID NO: 61892 - RNA, 19 nt, Homo sapiens
  misc_RNA (1)...(19): siRNA sense strand
agacggcgguggaaccaaa

SEQ ID NO: 61893 - RNA, 19 nt, Homo sapiens
  misc_RNA (1)...(19): siRNA sense strand
gaagaagguccugaagugu

SEQ ID NO: 61894 - RNA, 19 nt, Homo sapiens
  misc_RNA (1)...(19): siRNA sense strand
aagaagguccugaagugua

SEQ ID NO: 61895 - RNA, 19 nt, Homo sapiens
  misc_RNA (1)...(19): siRNA sense strand
ugagaucucgccacuagaa

SEQ ID NO: 61896 - RNA, 19 nt, Homo sapiens
  misc_RNA (1)...(19): siRNA sense strand
aacauaagcugggaaaucu

SEQ ID NO: 61897 - RNA, 19 nt, Homo sapiens
  misc_RNA (1)...(19): siRNA sense strand
ucacaugcuucuacaacuc

SEQ ID NO: 61898 - RNA, 19 nt, Homo sapiens
  misc_RNA (1)...(19): siRNA sense strand
ccagggagggagucaguuu

SEQ ID NO: 61899 - RNA, 19 nt, Homo sapiens
  misc_RNA (1)...(19): siRNA sense strand
ugagaaccuucgccugaug

SEQ ID NO: 61900 - RNA, 19 nt, Homo sapiens
  misc_RNA (1)...(19): siRNA sense strand
ugaaagacaccuggaguuc

SEQ ID NO: 61901 - RNA, 19 nt, Homo sapiens
  misc_RNA (1)...(19): siRNA sense strand
uuaguguacuugcugauca

SEQ ID NO: 61902 - RNA, 19 nt, Homo sapiens
  misc_RNA (1)...(19): siRNA sense strand
gguggaaccaaaccuguga

SEQ ID NO: 61903 - RNA, 19 nt, Homo sapiens
  misc_RNA (1)...(19): siRNA sense strand
guccagaaguggcucucuu

SEQ ID NO: 61904 - RNA, 19 nt, Homo sapiens
  misc_RNA (1)...(19): siRNA sense strand
ggaggagacguccagaagu

SEQ ID NO: 61905 - RNA, 19 nt, Homo sapiens
  misc_RNA (1)...(19): siRNA sense strand
gacccacagaugcaacaua

SEQ ID NO: 61906 - RNA, 19 nt, Homo sapiens
  misc_RNA (1)...(19): siRNA sense strand
gccagguguacuuuacuua

SEQ ID NO: 61907 - RNA, 19 nt, Homo sapiens
  misc_RNA (1)...(19): siRNA sense strand
cugaucaacugcaggaaca

SEQ ID NO: 61908 - RNA, 19 nt, Homo sapiens
  misc_RNA (1)...(19): siRNA sense strand
agacacccaguaugaguuu

SEQ ID NO: 61909 - RNA, 19 nt, Homo sapiens
  misc_RNA (1)...(19): siRNA sense strand
ucaagcagaagcaggaaug

SEQ ID NO: 61910 - RNA, 19 nt, Homo sapiens
  misc_RNA (1)...(19): siRNA sense strand
ugaauggcacuucccaguu

SEQ ID NO: 61911 - RNA, 19 nt, Homo sapiens
  misc_RNA (1)...(19): siRNA sense strand
ccacagaugcaacauaagc

SEQ ID NO: 61912 - RNA, 19 nt, Homo sapiens
  misc_RNA (1)...(19): siRNA sense strand
gaguucagggcccuuaaug

SEQ ID NO: 61913 - RNA, 19 nt, Homo sapiens
  misc_RNA (1)...(19): siRNA sense strand
ggaguucagggcccuuaau

SEQ ID NO: 61914 - RNA, 19 nt, Homo sapiens
  misc_RNA (1)...(19): siRNA sense strand
gagcccgcauccuuaagca

SEQ ID NO: 61915 - RNA, 19 nt, Homo sapiens
  misc_RNA (1)...(19): siRNA sense strand
ccaucucccuccaaguugu

SEQ ID NO: 61916 - RNA, 19 nt, Homo sapiens
  misc_RNA (1)...(19): siRNA sense strand
cggaugccuuggagauaga

SEQ ID NO: 61917 - RNA, 19 nt, Homo sapiens
  misc_RNA (1)...(19): siRNA sense strand
ccggaugccuuggagauag

SEQ ID NO: 61918 - RNA, 19 nt, Homo sapiens
  misc_RNA (1)...(19): siRNA sense strand
gccugagcccgcauccuua

SEQ ID NO: 61919 - RNA, 19 nt, Homo sapiens
  misc_RNA (1)...(19): siRNA sense strand
ccagacacccaguaugagu

SEQ ID NO: 61920 - RNA, 19 nt, Homo sapiens
  misc_RNA (1)...(19): siRNA sense strand
uguacuugcugaucaacug

SEQ ID NO: 61921 - RNA, 19 nt, Homo sapiens
  misc_RNA (1)...(19): siRNA sense strand
gcuucaucaucuuagugua

SEQ ID NO: 61922 - RNA, 19 nt, Homo sapiens
  misc_RNA (1)...(19): siRNA sense strand
ccugagcccgcauccuuaa

SEQ ID NO: 61923 - RNA, 19 nt, Homo sapiens
  misc_RNA (1)...(19): siRNA sense strand
guucagggcccuuaaugcu

SEQ ID NO: 61924 - RNA, 19 nt, Homo sapiens
  misc_RNA (1)...(19): siRNA sense strand
uaguguacuugcugaucaa

SEQ ID NO: 61925 - RNA, 19 nt, Homo sapiens
  misc_RNA (1)...(19): siRNA sense strand
ugccagguguacuuuacuu

SEQ ID NO: 61926 - RNA, 19 nt, Homo sapiens
  misc_RNA (1)...(19): siRNA sense strand
ccaguucacaugcuucuac

SEQ ID NO: 61927 - RNA, 19 nt, Homo sapiens
  misc_RNA (1)...(19): siRNA sense strand
acacugaugccuacuuguc

SEQ ID NO: 61928 - RNA, 19 nt, Homo sapiens
  misc_RNA (1)...(19): siRNA sense strand
gaagaaagacggagaguaa

SEQ ID NO: 61929 - RNA, 19 nt, Homo sapiens
  misc_RNA (1)...(19): siRNA sense strand
ccacagaaauucccacaag

SEQ ID NO: 61930 - RNA, 19 nt, Homo sapiens
  misc_RNA (1)...(19): siRNA sense strand
gagaguaaaccaauuccua

SEQ ID NO: 61931 - RNA, 19 nt, Homo sapiens
  misc_RNA (1)...(19): siRNA sense strand
caagugcauuggugaaaga

SEQ ID NO: 61932 - RNA, 19 nt, Homo sapiens
  misc_RNA (1)...(19): siRNA sense strand
gcacugcuuucuacucauc

SEQ ID NO: 61933 - RNA, 19 nt, Homo sapiens
  misc_RNA (1)...(19): siRNA sense strand
uagacuaccugcaagaguu

SEQ ID NO: 61934 - RNA, 19 nt, Homo sapiens
  misc_RNA (1)...(19): siRNA sense strand
uaaaccaauuccuagacua

SEQ ID NO: 61935 - RNA, 19 nt, Homo sapiens
  misc_RNA (1)...(19): siRNA sense strand
gaaauucccacaagugcau

SEQ ID NO: 61936 - RNA, 19 nt, Homo sapiens
  misc_RNA (1)...(19): siRNA sense strand
ucaucgaacucugcugaua

SEQ ID NO: 61937 - RNA, 19 nt, Homo sapiens
  misc_RNA (1)...(19): siRNA sense strand
ccaaugagacucugaggau

SEQ ID NO: 61938 - RNA, 19 nt, Homo sapiens
  misc_RNA (1)...(19): siRNA sense strand
caaugagacucugaggauu

SEQ ID NO: 61939 - RNA, 19 nt, Homo sapiens
  misc_RNA (1)...(19): siRNA sense strand
guaaaccaauuccuagacu

SEQ ID NO: 61940 - RNA, 19 nt, Homo sapiens
  misc_RNA (1)...(19): siRNA sense strand
gacggagaguaaaccaauu

SEQ ID NO: 61941 - RNA, 19 nt, Homo sapiens
  misc_RNA (1)...(19): siRNA sense strand
caacugugcacugaagaaa

SEQ ID NO: 61942 - RNA, 19 nt, Homo sapiens
  misc_RNA (1)...(19): siRNA sense strand
uggcacugcuuucuacuca

SEQ ID NO: 61943 - RNA, 19 nt, Homo sapiens
  misc_RNA (1)...(19): siRNA sense strand
gcugauagccaaugagacu

SEQ ID NO: 61944 - RNA, 19 nt, Homo sapiens
  misc_RNA (1)...(19): siRNA sense strand
gaguaaaccaauuccuaga

SEQ ID NO: 61945 - RNA, 19 nt, Homo sapiens
  misc_RNA (1)...(19): siRNA sense strand
caccaacugugcacugaag

SEQ ID NO: 61946 - RNA, 19 nt, Homo sapiens
  misc_RNA (1)...(19): siRNA sense strand
cacagaaauucccacaagu

SEQ ID NO: 61947 - RNA, 19 nt, Homo sapiens
  misc_RNA (1)...(19): siRNA sense strand
acugugcacugaagaaauc

SEQ ID NO: 61948 - RNA, 19 nt, Homo sapiens
  misc_RNA (1)...(19): siRNA sense strand
ccacaagugcauuggugaa

SEQ ID NO: 61949 - RNA, 19 nt, Homo sapiens
  misc_RNA (1)...(19): siRNA sense strand
acagaaauucccacaagug

SEQ ID NO: 61950 - RNA, 19 nt, Homo sapiens
  misc_RNA (1)...(19): siRNA sense strand
agacggagaguaaaccaau

SEQ ID NO: 61951 - RNA, 19 nt, Homo sapiens
  misc_RNA (1)...(19): siRNA sense strand
guggaaagacuauucaaaa

SEQ ID NO: 61952 - RNA, 19 nt, Homo sapiens
  misc_RNA (1)...(19): siRNA sense strand
uaggcacacuggagaguca

SEQ ID NO: 61953 - RNA, 19 nt, Homo sapiens
  misc_RNA (1)...(19): siRNA sense strand
ggauuccuguuccuguaca

SEQ ID NO: 61954 - RNA, 19 nt, Homo sapiens
  misc_RNA (1)...(19): siRNA sense strand
ggagcugccuacguguaug

SEQ ID NO: 61955 - RNA, 19 nt, Homo sapiens
  misc_RNA (1)...(19): siRNA sense strand
agaguuucuugguguaaug

SEQ ID NO: 61956 - RNA, 19 nt, Homo sapiens
  misc_RNA (1)...(19): siRNA sense strand
gaguggauaauagaaaguu

SEQ ID NO: 61957 - RNA, 19 nt, Homo sapiens
  misc_RNA (1)...(19): siRNA sense strand
caucgaacucugcugauag

SEQ ID NO: 61958 - RNA, 19 nt, Homo sapiens
  misc_RNA (1)...(19): siRNA sense strand
guggauaauagaaaguuga

SEQ ID NO: 61959 - RNA, 19 nt, Homo sapiens
  misc_RNA (1)...(19): siRNA sense strand
agaagaaagacggagagua

SEQ ID NO: 61960 - RNA, 19 nt, Homo sapiens
  misc_RNA (1)...(19): siRNA sense strand
aaaguguggagaagaaaga

SEQ ID NO: 61961 - RNA, 19 nt, Homo sapiens
  misc_RNA (1)...(19): siRNA sense strand
ccaacugugcacugaagaa

SEQ ID NO: 61962 - RNA, 19 nt, Homo sapiens
  misc_RNA (1)...(19): siRNA sense strand
gcauuugaguuugcuagcu

SEQ ID NO: 61963 - RNA, 19 nt, Homo sapiens
  misc_RNA (1)...(19): siRNA sense strand
agacuaccugcaagaguuu

SEQ ID NO: 61964 - RNA, 19 nt, Homo sapiens
  misc_RNA (1)...(19): siRNA sense strand
acaagugcauuggugaaag

SEQ ID NO: 61965 - RNA, 19 nt, Homo sapiens
  misc_RNA (1)...(19): siRNA sense strand
uguggaaagacuauucaaa

SEQ ID NO: 61966 - RNA, 19 nt, Homo sapiens
  misc_RNA (1)...(19): siRNA sense strand
cacaagugcauuggugaaa

SEQ ID NO: 61967 - RNA, 19 nt, Homo sapiens
  misc_RNA (1)...(19): siRNA sense strand
gaaagacggagaguaaacc

SEQ ID NO: 61968 - RNA, 19 nt, Homo sapiens
  misc_RNA (1)...(19): siRNA sense strand
gcaauugccugaauaauga

SEQ ID NO: 61969 - RNA, 19 nt, Homo sapiens
  misc_RNA (1)...(19): siRNA sense strand
gaacugcacuggccagguu

SEQ ID NO: 61970 - RNA, 19 nt, Homo sapiens
  misc_RNA (1)...(19): siRNA sense strand
guaaagauggcaaacaaua

SEQ ID NO: 61971 - RNA, 19 nt, Homo sapiens
  misc_RNA (1)...(19): siRNA sense strand
agacauaucugugaugcua

SEQ ID NO: 61972 - RNA, 19 nt, Homo sapiens
  misc_RNA (1)...(19): siRNA sense strand
gaauagcacuggugauuuu

SEQ ID NO: 61973 - RNA, 19 nt, Homo sapiens
  misc_RNA (1)...(19): siRNA sense strand
ggucagcaucgaucaauua

SEQ ID NO: 61974 - RNA, 19 nt, Homo sapiens
  misc_RNA (1)...(19): siRNA sense strand
gguagcaauugccugaaua

SEQ ID NO: 61975 - RNA, 19 nt, Homo sapiens
  misc_RNA (1)...(19): siRNA sense strand
ugaaagaaauugguagcaa

SEQ ID NO: 61976 - RNA, 19 nt, Homo sapiens
  misc_RNA (1)...(19): siRNA sense strand
cuaaagagacuauuacaag

SEQ ID NO: 61977 - RNA, 19 nt, Homo sapiens
  misc_RNA (1)...(19): siRNA sense strand
ggacagcaugaaagaaauu

SEQ ID NO: 61978 - RNA, 19 nt, Homo sapiens
  misc_RNA (1)...(19): siRNA sense strand
ugacuuguguuuccuaaag

SEQ ID NO: 61979 - RNA, 19 nt, Homo sapiens
  misc_RNA (1)...(19): siRNA sense strand
gagacuauuacaagagaua

SEQ ID NO: 61980 - RNA, 19 nt, Homo sapiens
  misc_RNA (1)...(19): siRNA sense strand
gcaaacaauaugagagugu

SEQ ID NO: 61981 - RNA, 19 nt, Homo sapiens
  misc_RNA (1)...(19): siRNA sense strand
gauauugaagguaaagaug

SEQ ID NO: 61982 - RNA, 19 nt, Homo sapiens
  misc_RNA (1)...(19): siRNA sense strand
aagagacuauuacaagaga

SEQ ID NO: 61983 - RNA, 19 nt, Homo sapiens
  misc_RNA (1)...(19): siRNA sense strand
gaaggcacaacaauacugu

SEQ ID NO: 61984 - RNA, 19 nt, Homo sapiens
  misc_RNA (1)...(19): siRNA sense strand
guagcaauugccugaauaa

SEQ ID NO: 61985 - RNA, 19 nt, Homo sapiens
  misc_RNA (1)...(19): siRNA sense strand
aaagauggcaaacaauaug

SEQ ID NO: 61986 - RNA, 19 nt, Homo sapiens
  misc_RNA (1)...(19): siRNA sense strand
agguaaagauggcaaacaa

SEQ ID NO: 61987 - RNA, 19 nt, Homo sapiens
  misc_RNA (1)...(19): siRNA sense strand
ucagaaggcacaacaauac

SEQ ID NO: 61988 - RNA, 19 nt, Homo sapiens
  misc_RNA (1)...(19): siRNA sense strand
gcucgcaaguugaggcaau

SEQ ID NO: 61989 - RNA, 19 nt, Homo sapiens
  misc_RNA (1)...(19): siRNA sense strand
gaagcccaaccaacaaaga

SEQ ID NO: 61990 - RNA, 19 nt, Homo sapiens
  misc_RNA (1)...(19): siRNA sense strand
aaguugaggcaauuucuua

SEQ ID NO: 61991 - RNA, 19 nt, Homo sapiens
  misc_RNA (1)...(19): siRNA sense strand
gcacuggccagguuaaagg

SEQ ID NO: 61992 - RNA, 19 nt, Homo sapiens
  misc_RNA (1)...(19): siRNA sense strand
gaucuccacuuauuaaaag

SEQ ID NO: 61993 - RNA, 19 nt, Homo sapiens
  misc_RNA (1)...(19): siRNA sense strand
caucugauugugauauuga

SEQ ID NO: 61994 - RNA, 19 nt, Homo sapiens
  misc_RNA (1)...(19): siRNA sense strand
ccugauccuuguucuguug

SEQ ID NO: 61995 - RNA, 19 nt, Homo sapiens
  misc_RNA (1)...(19): siRNA sense strand
caauaugagaguguucuaa

SEQ ID NO: 61996 - RNA, 19 nt, Homo sapiens
  misc_RNA (1)...(19): siRNA sense strand
gaaugacuuguguuuccua

SEQ ID NO: 61997 - RNA, 19 nt, Homo sapiens
  misc_RNA (1)...(19): siRNA sense strand
ugaauagcacuggugauuu

SEQ ID NO: 61998 - RNA, 19 nt, Homo sapiens
  misc_RNA (1)...(19): siRNA sense strand
uaucugugaugcuaauaag

SEQ ID NO: 61999 - RNA, 19 nt, Homo sapiens
  misc_RNA (1)...(19): siRNA sense strand
gacuuguguuuccuaaaga

SEQ ID NO: 62000 - RNA, 19 nt, Homo sapiens
  misc_RNA (1)...(19): siRNA sense strand
gggugaagcccaaccaaca

SEQ ID NO: 62001 - RNA, 19 nt, Homo sapiens
  misc_RNA (1)...(19): siRNA sense strand
ggugaagcccaaccaacaa

SEQ ID NO: 62002 - RNA, 19 nt, Homo sapiens
  misc_RNA (1)...(19): siRNA sense strand
gauggcaaacaauaugaga

SEQ ID NO: 62003 - RNA, 19 nt, Homo sapiens
  misc_RNA (1)...(19): siRNA sense strand
ugauuuugaucuccacuua

SEQ ID NO: 62004 - RNA, 19 nt, Homo sapiens
  misc_RNA (1)...(19): siRNA sense strand
gcaaguugaggcaauuucu

SEQ ID NO: 62005 - RNA, 19 nt, Homo sapiens
  misc_RNA (1)...(19): siRNA sense strand
acauaucugugaugcuaau

SEQ ID NO: 62006 - RNA, 19 nt, Homo sapiens
  misc_RNA (1)...(19): siRNA sense strand
gugaagcccaaccaacaaa

SEQ ID NO: 62007 - RNA, 19 nt, Homo sapiens
  misc_RNA (1)...(19): siRNA sense strand
gaugggcacuaaagaacac

SEQ ID NO: 62008 - RNA, 19 nt, Homo sapiens
  misc_RNA (1)...(19): siRNA sense strand
auaugagaguguucuaaug

SEQ ID NO: 62009 - RNA, 19 nt, Homo sapiens
  misc_RNA (1)...(19): siRNA sense strand
guugaggcaauuucuuaaa

SEQ ID NO: 62010 - RNA, 19 nt, Homo sapiens
  misc_RNA (1)...(19): siRNA sense strand
gcuaauaaggaagguaugu

SEQ ID NO: 62011 - RNA, 19 nt, Homo sapiens
  misc_RNA (1)...(19): siRNA sense strand
agguauaucuuuggacuuc

SEQ ID NO: 62012 - RNA, 19 nt, Homo sapiens
  misc_RNA (1)...(19): siRNA sense strand
aaugacuuguguuuccuaa

SEQ ID NO: 62013 - RNA, 19 nt, Homo sapiens
  misc_RNA (1)...(19): siRNA sense strand
gguaaagauggcaaacaau

SEQ ID NO: 62014 - RNA, 19 nt, Homo sapiens
  misc_RNA (1)...(19): siRNA sense strand
ccuaaagagacuauuacaa

SEQ ID NO: 62015 - RNA, 19 nt, Homo sapiens
  misc_RNA (1)...(19): siRNA sense strand
caaguugaggcaauuucuu

SEQ ID NO: 62016 - RNA, 19 nt, Homo sapiens
  misc_RNA (1)...(19): siRNA sense strand
uaugagaguguucuaaugg

SEQ ID NO: 62017 - RNA, 19 nt, Homo sapiens
  misc_RNA (1)...(19): siRNA sense strand
uuggacagcaugaaagaaa

SEQ ID NO: 62018 - RNA, 19 nt, Homo sapiens
  misc_RNA (1)...(19): siRNA sense strand
agcaauugccugaauaaug

SEQ ID NO: 62019 - RNA, 19 nt, Homo sapiens
  misc_RNA (1)...(19): siRNA sense strand
uggacagcaugaaagaaau

SEQ ID NO: 62020 - RNA, 19 nt, Homo sapiens
  misc_RNA (1)...(19): siRNA sense strand
aaagagacuauuacaagag

SEQ ID NO: 62021 - RNA, 19 nt, Homo sapiens
  misc_RNA (1)...(19): siRNA sense strand
cugaaugacuuguguuucc

SEQ ID NO: 62022 - RNA, 19 nt, Homo sapiens
  misc_RNA (1)...(19): siRNA sense strand
gcccaaccaacaaagaguu

SEQ ID NO: 62023 - RNA, 19 nt, Homo sapiens
  misc_RNA (1)...(19): siRNA sense strand
uucagaaggcacaacaaua

SEQ ID NO: 62024 - RNA, 19 nt, Homo sapiens
  misc_RNA (1)...(19): siRNA sense strand
augaauagcacuggugauu

SEQ ID NO: 62025 - RNA, 19 nt, Homo sapiens
  misc_RNA (1)...(19): siRNA sense strand
ucugugaugcuaauaagga

SEQ ID NO: 62026 - RNA, 19 nt, Homo sapiens
  misc_RNA (1)...(19): siRNA sense strand
ugguagcaauugccugaau

SEQ ID NO: 62027 - RNA, 19 nt, Homo sapiens
  misc_RNA (1)...(19): siRNA sense strand
ucaucugauugugauauug

SEQ ID NO: 62028 - RNA, 19 nt, Homo sapiens
  misc_RNA (1)...(19): siRNA sense strand
cuaauaaggaagguauguu

SEQ ID NO: 62029 - RNA, 19 nt, Homo sapiens
  misc_RNA (1)...(19): siRNA sense strand
gaacuuaacuuuccauguu

SEQ ID NO: 62030 - RNA, 19 nt, Homo sapiens
  misc_RNA (1)...(19): siRNA sense strand
gacaagaccuguaguaauu

SEQ ID NO: 62031 - RNA, 19 nt, Homo sapiens
  misc_RNA (1)...(19): siRNA sense strand
ggaguuauaucaacaguaa

SEQ ID NO: 62032 - RNA, 19 nt, Homo sapiens
  misc_RNA (1)...(19): siRNA sense strand
caacuugacugcaguauug

SEQ ID NO: 62033 - RNA, 19 nt, Homo sapiens
  misc_RNA (1)...(19): siRNA sense strand
gcauauauauucagcauug

SEQ ID NO: 62034 - RNA, 19 nt, Homo sapiens
  misc_RNA (1)...(19): siRNA sense strand
gcaaggugcuauuuauauu

SEQ ID NO: 62035 - RNA, 19 nt, Homo sapiens
  misc_RNA (1)...(19): siRNA sense strand
gaacgaaauuugacugugu

SEQ ID NO: 62036 - RNA, 19 nt, Homo sapiens
  misc_RNA (1)...(19): siRNA sense strand
gcagauggcuucucagauc

SEQ ID NO: 62037 - RNA, 19 nt, Homo sapiens
  misc_RNA (1)...(19): siRNA sense strand
gaucaucucucaaggauag

SEQ ID NO: 62038 - RNA, 19 nt, Homo sapiens
  misc_RNA (1)...(19): siRNA sense strand
caaauaaacugugaaguca

SEQ ID NO: 62039 - RNA, 19 nt, Homo sapiens
  misc_RNA (1)...(19): siRNA sense strand
gcauagaucuaacacuuug

SEQ ID NO: 62040 - RNA, 19 nt, Homo sapiens
  misc_RNA (1)...(19): siRNA sense strand
cagagugacuguagcaaua

SEQ ID NO: 62041 - RNA, 19 nt, Homo sapiens
  misc_RNA (1)...(19): siRNA sense strand
gaaauaagagcaacagguu

SEQ ID NO: 62042 - RNA, 19 nt, Homo sapiens
  misc_RNA (1)...(19): siRNA sense strand
uaucggagcuccacaagaa

SEQ ID NO: 62043 - RNA, 19 nt, Homo sapiens
  misc_RNA (1)...(19): siRNA sense strand
gaagagacaguuggaguua

SEQ ID NO: 62044 - RNA, 19 nt, Homo sapiens
  misc_RNA (1)...(19): siRNA sense strand
ugacaaauaugcugcaaga

SEQ ID NO: 62045 - RNA, 19 nt, Homo sapiens
  misc_RNA (1)...(19): siRNA sense strand
gaacacaucaagcauuuau

SEQ ID NO: 62046 - RNA, 19 nt, Homo sapiens
  misc_RNA (1)...(19): siRNA sense strand
ucaaagagugugugcauua

SEQ ID NO: 62047 - RNA, 19 nt, Homo sapiens
  misc_RNA (1)...(19): siRNA sense strand
uagaacacaucaagcauuu

SEQ ID NO: 62048 - RNA, 19 nt, Homo sapiens
  misc_RNA (1)...(19): siRNA sense strand
gcaaauaaacugugaaguc

SEQ ID NO: 62049 - RNA, 19 nt, Homo sapiens
  misc_RNA (1)...(19): siRNA sense strand
gugcauagaucuaacacuu

SEQ ID NO: 62050 - RNA, 19 nt, Homo sapiens
  misc_RNA (1)...(19): siRNA sense strand
gaacagaacugaguaaaag

SEQ ID NO: 62051 - RNA, 19 nt, Homo sapiens
  misc_RNA (1)...(19): siRNA sense strand
gaaauuugacuguguugaa

SEQ ID NO: 62052 - RNA, 19 nt, Homo sapiens
  misc_RNA (1)...(19): siRNA sense strand
ugaaugcaauggaaacaaa

SEQ ID NO: 62053 - RNA, 19 nt, Homo sapiens
  misc_RNA (1)...(19): siRNA sense strand
agagacaguuggaguuaua

SEQ ID NO: 62054 - RNA, 19 nt, Homo sapiens
  misc_RNA (1)...(19): siRNA sense strand
gaaggaagaguguuugugu

SEQ ID NO: 62055 - RNA, 19 nt, Homo sapiens
  misc_RNA (1)...(19): siRNA sense strand
cuguugaucucauauguua

SEQ ID NO: 62056 - RNA, 19 nt, Homo sapiens
  misc_RNA (1)...(19): siRNA sense strand
cagagaagcuaacuguaga

SEQ ID NO: 62057 - RNA, 19 nt, Homo sapiens
  misc_RNA (1)...(19): siRNA sense strand
ggacaagaccuguaguaau

SEQ ID NO: 62058 - RNA, 19 nt, Homo sapiens
  misc_RNA (1)...(19): siRNA sense strand
gcaaaucguuaaguauguu

SEQ ID NO: 62059 - RNA, 19 nt, Homo sapiens
  misc_RNA (1)...(19): siRNA sense strand
gaagaguguuuguguacau

SEQ ID NO: 62060 - RNA, 19 nt, Homo sapiens
  misc_RNA (1)...(19): siRNA sense strand
caaacguuauuucaccaua

SEQ ID NO: 62061 - RNA, 19 nt, Homo sapiens
  misc_RNA (1)...(19): siRNA sense strand
gaaacaaaccucguuggaa

SEQ ID NO: 62062 - RNA, 19 nt, Homo sapiens
  misc_RNA (1)...(19): siRNA sense strand
acaaaucuauccuacaaga

SEQ ID NO: 62063 - RNA, 19 nt, Homo sapiens
  misc_RNA (1)...(19): siRNA sense strand
ggaaauggacaaucuaaag

SEQ ID NO: 62064 - RNA, 19 nt, Homo sapiens
  misc_RNA (1)...(19): siRNA sense strand
gaagcuaacuguagaacac

SEQ ID NO: 62065 - RNA, 19 nt, Homo sapiens
  misc_RNA (1)...(19): siRNA sense strand
ugacaaugauggcuuugaa

SEQ ID NO: 62066 - RNA, 19 nt, Homo sapiens
  misc_RNA (1)...(19): siRNA sense strand
ggagaaugccacuuugaaa

SEQ ID NO: 62067 - RNA, 19 nt, Homo sapiens
  misc_RNA (1)...(19): siRNA sense strand
aagaauagcuccguguuau

SEQ ID NO: 62068 - RNA, 19 nt, Homo sapiens
  misc_RNA (1)...(19): siRNA sense strand
gcagagaagcuaacuguag

SEQ ID NO: 62069 - RNA, 19 nt, Homo sapiens
  misc_RNA (1)...(19): siRNA sense strand
gguaaggcauauauauuca

SEQ ID NO: 62070 - RNA, 19 nt, Homo sapiens
  misc_RNA (1)...(19): siRNA sense strand
ggaaauaaugguaccaaau

SEQ ID NO: 62071 - RNA, 19 nt, Homo sapiens
  misc_RNA (1)...(19): siRNA sense strand
caacuucauuuguguaugg

SEQ ID NO: 62072 - RNA, 19 nt, Homo sapiens
  misc_RNA (1)...(19): siRNA sense strand
ccaccaagauucuauuucu

SEQ ID NO: 62073 - RNA, 19 nt, Homo sapiens
  misc_RNA (1)...(19): siRNA sense strand
gaacagaaaggcagagucu

SEQ ID NO: 62074 - RNA, 19 nt, Homo sapiens
  misc_RNA (1)...(19): siRNA sense strand
uaauggcuauguagaugua

SEQ ID NO: 62075 - RNA, 19 nt, Homo sapiens
  misc_RNA (1)...(19): siRNA sense strand
uggaaagacuuguuuggaa

SEQ ID NO: 62076 - RNA, 19 nt, Homo sapiens
  misc_RNA (1)...(19): siRNA sense strand
caucaaagacccaaacguu

SEQ ID NO: 62077 - RNA, 19 nt, Homo sapiens
  misc_RNA (1)...(19): siRNA sense strand
acaaauaugcugcaagauu

SEQ ID NO: 62078 - RNA, 19 nt, Homo sapiens
  misc_RNA (1)...(19): siRNA sense strand
caacaugagcagauuggua

SEQ ID NO: 62079 - RNA, 19 nt, Homo sapiens
  misc_RNA (1)...(19): siRNA sense strand
gaagagaagcaaauaaacu

SEQ ID NO: 62080 - RNA, 19 nt, Homo sapiens
  misc_RNA (1)...(19): siRNA sense strand
gaauagcuccguguuauca

SEQ ID NO: 62081 - RNA, 19 nt, Homo sapiens
  misc_RNA (1)...(19): siRNA sense strand
gaaggacuacaucaucaaa

SEQ ID NO: 62082 - RNA, 19 nt, Homo sapiens
  misc_RNA (1)...(19): siRNA sense strand
gaacuaaacaaggaugaga

SEQ ID NO: 62083 - RNA, 19 nt, Homo sapiens
  misc_RNA (1)...(19): siRNA sense strand
agauaacucuggcguggua

SEQ ID NO: 62084 - RNA, 19 nt, Homo sapiens
  misc_RNA (1)...(19): siRNA sense strand
ggagaaccuuguggaaaga

SEQ ID NO: 62085 - RNA, 19 nt, Homo sapiens
  misc_RNA (1)...(19): siRNA sense strand
gaagagagagacaaucagu

SEQ ID NO: 62086 - RNA, 19 nt, Homo sapiens
  misc_RNA (1)...(19): siRNA sense strand
gaggaaauggacaaucuaa

SEQ ID NO: 62087 - RNA, 19 nt, Homo sapiens
  misc_RNA (1)...(19): siRNA sense strand
uugaauguguccuuguuua

SEQ ID NO: 62088 - RNA, 19 nt, Homo sapiens
  misc_RNA (1)...(19): siRNA sense strand
uaaacgaaguacagaggaa

SEQ ID NO: 62089 - RNA, 19 nt, Homo sapiens
  misc_RNA (1)...(19): siRNA sense strand
gaaguuccagguuacauug

SEQ ID NO: 62090 - RNA, 19 nt, Homo sapiens
  misc_RNA (1)...(19): siRNA sense strand
gggaaucuauaguuaaucu

SEQ ID NO: 62091 - RNA, 19 nt, Homo sapiens
  misc_RNA (1)...(19): siRNA sense strand
ggaaacaaaccucguugga

SEQ ID NO: 62092 - RNA, 19 nt, Homo sapiens
  misc_RNA (1)...(19): siRNA sense strand
caaugcagauggcuucuca

SEQ ID NO: 62093 - RNA, 19 nt, Homo sapiens
  misc_RNA (1)...(19): siRNA sense strand
gagcaguaaugaaugcaau

SEQ ID NO: 62094 - RNA, 19 nt, Homo sapiens
  misc_RNA (1)...(19): siRNA sense strand
uaucaacacuggcaauagu

SEQ ID NO: 62095 - RNA, 19 nt, Homo sapiens
  misc_RNA (1)...(19): siRNA sense strand
ggauagauauuagcuuucu

SEQ ID NO: 62096 - RNA, 19 nt, Homo sapiens
  misc_RNA (1)...(19): siRNA sense strand
gaaacgacucuacauguca

SEQ ID NO: 62097 - RNA, 19 nt, Homo sapiens
  misc_RNA (1)...(19): siRNA sense strand
ggacaaauugaugcagaua

SEQ ID NO: 62098 - RNA, 19 nt, Homo sapiens
  misc_RNA (1)...(19): siRNA sense strand
aaacgugcaugguggagaa

SEQ ID NO: 62099 - RNA, 19 nt, Homo sapiens
  misc_RNA (1)...(19): siRNA sense strand
gaaaauggauggccuucug

SEQ ID NO: 62100 - RNA, 19 nt, Homo sapiens
  misc_RNA (1)...(19): siRNA sense strand
cuauguagauguagcaguu

SEQ ID NO: 62101 - RNA, 19 nt, Homo sapiens
  misc_RNA (1)...(19): siRNA sense strand
aaacccaacuucauuugug

SEQ ID NO: 62102 - RNA, 19 nt, Homo sapiens
  misc_RNA (1)...(19): siRNA sense strand
ucaaagacccaaacguuau

SEQ ID NO: 62103 - RNA, 19 nt, Homo sapiens
  misc_RNA (1)...(19): siRNA sense strand
uaguauggcucccaauguu

SEQ ID NO: 62104 - RNA, 19 nt, Homo sapiens
  misc_RNA (1)...(19): siRNA sense strand
aaagaauagcuccguguua

SEQ ID NO: 62105 - RNA, 19 nt, Homo sapiens
  misc_RNA (1)...(19): siRNA sense strand
uaaacaaggaugagaaugu

SEQ ID NO: 62106 - RNA, 19 nt, Homo sapiens
  misc_RNA (1)...(19): siRNA sense strand
gagccaaauccaagaguaa

SEQ ID NO: 62107 - RNA, 19 nt, Homo sapiens
  misc_RNA (1)...(19): siRNA sense strand
agaagcaaauaaacuguga

SEQ ID NO: 62108 - RNA, 19 nt, Homo sapiens
  misc_RNA (1)...(19): siRNA sense strand
gaaagacuuguuuggaaga

SEQ ID NO: 62109 - RNA, 19 nt, Homo sapiens
  misc_RNA (1)...(19): siRNA sense strand
gcagauugguaaggcauau

SEQ ID NO: 62110 - RNA, 19 nt, Homo sapiens
  misc_RNA (1)...(19): siRNA sense strand
gagaaaauuuugcaucaug

SEQ ID NO: 62111 - RNA, 19 nt, Homo sapiens
  misc_RNA (1)...(19): siRNA sense strand
gauaagaggcuauuguacu

SEQ ID NO: 62112 - RNA, 19 nt, Homo sapiens
  misc_RNA (1)...(19): siRNA sense strand
caaagagugugugcauuag

SEQ ID NO: 62113 - RNA, 19 nt, Homo sapiens
  misc_RNA (1)...(19): siRNA sense strand
gcaguauuggcuauauaua

SEQ ID NO: 62114 - RNA, 19 nt, Homo sapiens
  misc_RNA (1)...(19): siRNA sense strand
gacucuacaugucaaacua

SEQ ID NO: 62115 - RNA, 19 nt, Homo sapiens
  misc_RNA (1)...(19): siRNA sense strand
guccucaugucaucaguaa

SEQ ID NO: 62116 - RNA, 19 nt, Homo sapiens
  misc_RNA (1)...(19): siRNA sense strand
guagaacacaucaagcauu

SEQ ID NO: 62117 - RNA, 19 nt, Homo sapiens
  misc_RNA (1)...(19): siRNA sense strand
ggcagagucuccaccaaga

SEQ ID NO: 62118 - RNA, 19 nt, Homo sapiens
  misc_RNA (1)...(19): siRNA sense strand
gggagacggugaugcuguu

SEQ ID NO: 62119 - RNA, 19 nt, Homo sapiens
  misc_RNA (1)...(19): siRNA sense strand
gauaauaauggcuauguag

SEQ ID NO: 62120 - RNA, 19 nt, Homo sapiens
  misc_RNA (1)...(19): siRNA sense strand
ggagaugaugcauaugaaa

SEQ ID NO: 62121 - RNA, 19 nt, Homo sapiens
  misc_RNA (1)...(19): siRNA sense strand
ggacuuauuguacuucugu

SEQ ID NO: 62122 - RNA, 19 nt, Homo sapiens
  misc_RNA (1)...(19): siRNA sense strand
caaagacccaaacguuauu

SEQ ID NO: 62123 - RNA, 19 nt, Homo sapiens
  misc_RNA (1)...(19): siRNA sense strand
gaauguugcgcauguucua

SEQ ID NO: 62124 - RNA, 19 nt, Homo sapiens
  misc_RNA (1)...(19): siRNA sense strand
gacuguagcaauaccuuua

SEQ ID NO: 62125 - RNA, 19 nt, Homo sapiens
  misc_RNA (1)...(19): siRNA sense strand
gugggucuuuauuucauua

SEQ ID NO: 62126 - RNA, 19 nt, Homo sapiens
  misc_RNA (1)...(19): siRNA sense strand
cagcaaaucguuaaguaug

SEQ ID NO: 62127 - RNA, 19 nt, Homo sapiens
  misc_RNA (1)...(19): siRNA sense strand
ugaaacgacucuacauguc

SEQ ID NO: 62128 - RNA, 19 nt, Homo sapiens
  misc_RNA (1)...(19): siRNA sense strand
guuuggaugugaacagaaa

SEQ ID NO: 62129 - RNA, 19 nt, Homo sapiens
  misc_RNA (1)...(19): siRNA sense strand
gcaagcaacuuauuucauu

SEQ ID NO: 62130 - RNA, 19 nt, Homo sapiens
  misc_RNA (1)...(19): siRNA sense strand
gcaauguggucaucaaaua

SEQ ID NO: 62131 - RNA, 19 nt, Homo sapiens
  misc_RNA (1)...(19): siRNA sense strand
gaaauugguugccacauga

SEQ ID NO: 62132 - RNA, 19 nt, Homo sapiens
  misc_RNA (1)...(19): siRNA sense strand
gaagagaaguguaaguguu

SEQ ID NO: 62133 - RNA, 19 nt, Homo sapiens
  misc_RNA (1)...(19): siRNA sense strand
ggagaaaggugaaauccaa

SEQ ID NO: 62134 - RNA, 19 nt, Homo sapiens
  misc_RNA (1)...(19): siRNA sense strand
ggagaagaauugaauguga

SEQ ID NO: 62135 - RNA, 19 nt, Homo sapiens
  misc_RNA (1)...(19): siRNA sense strand
uaaaggaguugauaugaga

SEQ ID NO: 62136 - RNA, 19 nt, Homo sapiens
  misc_RNA (1)...(19): siRNA sense strand
gaaaguggcacaccaaguu

SEQ ID NO: 62137 - RNA, 19 nt, Homo sapiens
  misc_RNA (1)...(19): siRNA sense strand
cuauaaaggugcugaguaa

SEQ ID NO: 62138 - RNA, 19 nt, Homo sapiens
  misc_RNA (1)...(19): siRNA sense strand
ggauguagcuuccauguac

SEQ ID NO: 62139 - RNA, 19 nt, Homo sapiens
  misc_RNA (1)...(19): siRNA sense strand
ggacauuccuugaagcaau

SEQ ID NO: 62140 - RNA, 19 nt, Homo sapiens
  misc_RNA (1)...(19): siRNA sense strand
ccggaacaauugccuauua

SEQ ID NO: 62141 - RNA, 19 nt, Homo sapiens
  misc_RNA (1)...(19): siRNA sense strand
caacuaggauugcguaugg

SEQ ID NO: 62142 - RNA, 19 nt, Homo sapiens
  misc_RNA (1)...(19): siRNA sense strand
caaagucgcugaguacaug

SEQ ID NO: 62143 - RNA, 19 nt, Homo sapiens
  misc_RNA (1)...(19): siRNA sense strand
gacacaagcacaauuuaua

SEQ ID NO: 62144 - RNA, 19 nt, Homo sapiens
  misc_RNA (1)...(19): siRNA sense strand
gaagcaauguggucaucaa

SEQ ID NO: 62145 - RNA, 19 nt, Homo sapiens
  misc_RNA (1)...(19): siRNA sense strand
ggucugugcuggcuauaaa

SEQ ID NO: 62146 - RNA, 19 nt, Homo sapiens
  misc_RNA (1)...(19): siRNA sense strand
gaacaccuaccgcuauaaa

SEQ ID NO: 62147 - RNA, 19 nt, Homo sapiens
  misc_RNA (1)...(19): siRNA sense strand
gguguuugcuauucaguuu

SEQ ID NO: 62148 - RNA, 19 nt, Homo sapiens
  misc_RNA (1)...(19): siRNA sense strand
guaaggaagagaaguguaa

SEQ ID NO: 62149 - RNA, 19 nt, Homo sapiens
  misc_RNA (1)...(19): siRNA sense strand
gaacaauugccuauuaaag

SEQ ID NO: 62150 - RNA, 19 nt, Homo sapiens
  misc_RNA (1)...(19): siRNA sense strand
acaccuuucucacaaauaa

SEQ ID NO: 62151 - RNA, 19 nt, Homo sapiens
  misc_RNA (1)...(19): siRNA sense strand
gguaaauauuccuuuggua

SEQ ID NO: 62152 - RNA, 19 nt, Homo sapiens
  misc_RNA (1)...(19): siRNA sense strand
ggagcaaccuggugucuac

SEQ ID NO: 62153 - RNA, 19 nt, Homo sapiens
  misc_RNA (1)...(19): siRNA sense strand
gcagaguaccggaacaauu

SEQ ID NO: 62154 - RNA, 19 nt, Homo sapiens
  misc_RNA (1)...(19): siRNA sense strand
gguaacaaaugaagaaugc

SEQ ID NO: 62155 - RNA, 19 nt, Homo sapiens
  misc_RNA (1)...(19): siRNA sense strand
cggaacaauugccuauuaa

SEQ ID NO: 62156 - RNA, 19 nt, Homo sapiens
  misc_RNA (1)...(19): siRNA sense strand
gcccaauacugccagauga

SEQ ID NO: 62157 - RNA, 19 nt, Homo sapiens
  misc_RNA (1)...(19): siRNA sense strand
gauacaccuuucucacaaa

SEQ ID NO: 62158 - RNA, 19 nt, Homo sapiens
  misc_RNA (1)...(19): siRNA sense strand
uuaaaggagugaauguuug

SEQ ID NO: 62159 - RNA, 19 nt, Homo sapiens
  misc_RNA (1)...(19): siRNA sense strand
guuaaaggagugaauguuu

SEQ ID NO: 62160 - RNA, 19 nt, Homo sapiens
  misc_RNA (1)...(19): siRNA sense strand
acaccaaagucgcugagua

SEQ ID NO: 62161 - RNA, 19 nt, Homo sapiens
  misc_RNA (1)...(19): siRNA sense strand
gguuagcaguguugaagaa

SEQ ID NO: 62162 - RNA, 19 nt, Homo sapiens
  misc_RNA (1)...(19): siRNA sense strand
cagaguaccggaacaauug

SEQ ID NO: 62163 - RNA, 19 nt, Homo sapiens
  misc_RNA (1)...(19): siRNA sense strand
gaaaaucgagucacaaaga

SEQ ID NO: 62164 - RNA, 19 nt, Homo sapiens
  misc_RNA (1)...(19): siRNA sense strand
agauucagguggucccuua

SEQ ID NO: 62165 - RNA, 19 nt, Homo sapiens
  misc_RNA (1)...(19): siRNA sense strand
caauaugccuaccuuccaa

SEQ ID NO: 62166 - RNA, 19 nt, Homo sapiens
  misc_RNA (1)...(19): siRNA sense strand
ccagcaaguucaaucaaug

SEQ ID NO: 62167 - RNA, 19 nt, Homo sapiens
  misc_RNA (1)...(19): siRNA sense strand
gcgcaucuauaguggcauu

SEQ ID NO: 62168 - RNA, 19 nt, Homo sapiens
  misc_RNA (1)...(19): siRNA sense strand
agaaauugguugccacaug

SEQ ID NO: 62169 - RNA, 19 nt, Homo sapiens
  misc_RNA (1)...(19): siRNA sense strand
gauaugagaggagucaauu

SEQ ID NO: 62170 - RNA, 19 nt, Homo sapiens
  misc_RNA (1)...(19): siRNA sense strand
uaacauucgcugccaguuu

SEQ ID NO: 62171 - RNA, 19 nt, Homo sapiens
  misc_RNA (1)...(19): siRNA sense strand
aaaccaauaugccuaccuu

SEQ ID NO: 62172 - RNA, 19 nt, Homo sapiens
  misc_RNA (1)...(19): siRNA sense strand
gcuauaaaggugcugagua

SEQ ID NO: 62173 - RNA, 19 nt, Homo sapiens
  misc_RNA (1)...(19): siRNA sense strand
ggaacaauugccuauuaaa

SEQ ID NO: 62174 - RNA, 19 nt, Homo sapiens
  misc_RNA (1)...(19): siRNA sense strand
ccugaacccugccauucua

SEQ ID NO: 62175 - RNA, 19 nt, Homo sapiens
  misc_RNA (1)...(19): siRNA sense strand
caagcacaauuuauaccaa

SEQ ID NO: 62176 - RNA, 19 nt, Homo sapiens
  misc_RNA (1)...(19): siRNA sense strand
caagggagcucugguuacu

SEQ ID NO: 62177 - RNA, 19 nt, Homo sapiens
  misc_RNA (1)...(19): siRNA sense strand
caaagaugauucgcuguca

SEQ ID NO: 62178 - RNA, 19 nt, Homo sapiens
  misc_RNA (1)...(19): siRNA sense strand
caaguucaaucaaugacau

SEQ ID NO: 62179 - RNA, 19 nt, Homo sapiens
  misc_RNA (1)...(19): siRNA sense strand
gagcucugguuacucuuug

SEQ ID NO: 62180 - RNA, 19 nt, Homo sapiens
  misc_RNA (1)...(19): siRNA sense strand
ucaagcaagcaacuuauuu

SEQ ID NO: 62181 - RNA, 19 nt, Homo sapiens
  misc_RNA (1)...(19): siRNA sense strand
gaggaacaccuaccgcuau

SEQ ID NO: 62182 - RNA, 19 nt, Homo sapiens
  misc_RNA (1)...(19): siRNA sense strand
gauggucugugcuggcuau

SEQ ID NO: 62183 - RNA, 19 nt, Homo sapiens
  misc_RNA (1)...(19): siRNA sense strand
ggugacacaagcacaauuu

SEQ ID NO: 62184 - RNA, 19 nt, Homo sapiens
  misc_RNA (1)...(19): siRNA sense strand
caauguggucaucaaauaa

SEQ ID NO: 62185 - RNA, 19 nt, Homo sapiens
  misc_RNA (1)...(19): siRNA sense strand
uccaggcuccuuugaauua

SEQ ID NO: 62186 - RNA, 19 nt, Homo sapiens
  misc_RNA (1)...(19): siRNA sense strand
gaugauucgcugucaguuu

SEQ ID NO: 62187 - RNA, 19 nt, Homo sapiens
  misc_RNA (1)...(19): siRNA sense strand
ccaacugccucuucuuuac

SEQ ID NO: 62188 - RNA, 19 nt, Homo sapiens
  misc_RNA (1)...(19): siRNA sense strand
ugacucaacucuaugaaaa

SEQ ID NO: 62189 - RNA, 19 nt, Homo sapiens
  misc_RNA (1)...(19): siRNA sense strand
ccaagguguuugcuauuca

SEQ ID NO: 62190 - RNA, 19 nt, Homo sapiens
  misc_RNA (1)...(19): siRNA sense strand
ggacuggauuuuagagaaa

SEQ ID NO: 62191 - RNA, 19 nt, Homo sapiens
  misc_RNA (1)...(19): siRNA sense strand
gaaggagaaaggugaaauc

SEQ ID NO: 62192 - RNA, 19 nt, Homo sapiens
  misc_RNA (1)...(19): siRNA sense strand
gugaauguuugccaagaga

SEQ ID NO: 62193 - RNA, 19 nt, Homo sapiens
  misc_RNA (1)...(19): siRNA sense strand
aaagauaguguuacaggaa

SEQ ID NO: 62194 - RNA, 19 nt, Homo sapiens
  misc_RNA (1)...(19): siRNA sense strand
cagaagggaaucaugauau

SEQ ID NO: 62195 - RNA, 19 nt, Homo sapiens
  misc_RNA (1)...(19): siRNA sense strand
agauacaccuuucucacaa

SEQ ID NO: 62196 - RNA, 19 nt, Homo sapiens
  misc_RNA (1)...(19): siRNA sense strand
ggaagagaaguguaagugu

SEQ ID NO: 62197 - RNA, 19 nt, Homo sapiens
  misc_RNA (1)...(19): siRNA sense strand
aggaacaccuaccgcuaua

SEQ ID NO: 62198 - RNA, 19 nt, Homo sapiens
  misc_RNA (1)...(19): siRNA sense strand
caagcaagcaacuuauuuc

SEQ ID NO: 62199 - RNA, 19 nt, Homo sapiens
  misc_RNA (1)...(19): siRNA sense strand
guacauggacuggauuuua

SEQ ID NO: 62200 - RNA, 19 nt, Homo sapiens
  misc_RNA (1)...(19): siRNA sense strand
ucagaagggaaucaugaua

SEQ ID NO: 62201 - RNA, 19 nt, Homo sapiens
  misc_RNA (1)...(19): siRNA sense strand
gaggaacaaacucuucuug

SEQ ID NO: 62202 - RNA, 19 nt, Homo sapiens
  misc_RNA (1)...(19): siRNA sense strand
gagugaauguuugccaaga

SEQ ID NO: 62203 - RNA, 19 nt, Homo sapiens
  misc_RNA (1)...(19): siRNA sense strand
gaagcccugugcccuuuca

SEQ ID NO: 62204 - RNA, 19 nt, Homo sapiens
  misc_RNA (1)...(19): siRNA sense strand
gaggagaagaauugaaugu

SEQ ID NO: 62205 - RNA, 19 nt, Homo sapiens
  misc_RNA (1)...(19): siRNA sense strand
gagacuugcacaaagauga

SEQ ID NO: 62206 - RNA, 19 nt, Homo sapiens
  misc_RNA (1)...(19): siRNA sense strand
ugagaggagucaauuuuaa

SEQ ID NO: 62207 - RNA, 19 nt, Homo sapiens
  misc_RNA (1)...(19): siRNA sense strand
agaagggaaucaugauauc

SEQ ID NO: 62208 - RNA, 19 nt, Homo sapiens
  misc_RNA (1)...(19): siRNA sense strand
cacaagggagcucugguua

SEQ ID NO: 62209 - RNA, 19 nt, Homo sapiens
  misc_RNA (1)...(19): siRNA sense strand
gaacaucuuccagcaucuu

SEQ ID NO: 62210 - RNA, 19 nt, Homo sapiens
  misc_RNA (1)...(19): siRNA sense strand
acacagagcagugauggaa

SEQ ID NO: 62211 - RNA, 19 nt, Homo sapiens
  misc_RNA (1)...(19): siRNA sense strand
aaaugaagaaugccagaaa

SEQ ID NO: 62212 - RNA, 19 nt, Homo sapiens
  misc_RNA (1)...(19): siRNA sense strand
aauaagugcuugccaucga

SEQ ID NO: 62213 - RNA, 19 nt, Homo sapiens
  misc_RNA (1)...(19): siRNA sense strand
gagaaaggugaaauccaaa

SEQ ID NO: 62214 - RNA, 19 nt, Homo sapiens
  misc_RNA (1)...(19): siRNA sense strand
ugacacaagcacaauuuau

SEQ ID NO: 62215 - RNA, 19 nt, Homo sapiens
  misc_RNA (1)...(19): siRNA sense strand
ucuuugagauuguguaaca

SEQ ID NO: 62216 - RNA, 19 nt, Homo sapiens
  misc_RNA (1)...(19): siRNA sense strand
ggagcucugguuacucuuu

SEQ ID NO: 62217 - RNA, 19 nt, Homo sapiens
  misc_RNA (1)...(19): siRNA sense strand
guucucagauguggauguu

SEQ ID NO: 62218 - RNA, 19 nt, Homo sapiens
  misc_RNA (1)...(19): siRNA sense strand
aagagaaguguaaguguuu

SEQ ID NO: 62219 - RNA, 19 nt, Homo sapiens
  misc_RNA (1)...(19): siRNA sense strand
uaaaggugcugaguaacgu

SEQ ID NO: 62220 - RNA, 19 nt, Homo sapiens
  misc_RNA (1)...(19): siRNA sense strand
cagcaaguucaaucaauga

SEQ ID NO: 62221 - RNA, 19 nt, Homo sapiens
  misc_RNA (1)...(19): siRNA sense strand
gggaaaagaugcuuguaag

SEQ ID NO: 62222 - RNA, 19 nt, Homo sapiens
  misc_RNA (1)...(19): siRNA sense strand
uaaagucucagaagggaau

SEQ ID NO: 62223 - RNA, 19 nt, Homo sapiens
  misc_RNA (1)...(19): siRNA sense strand
caucuauaguggcauuuua

SEQ ID NO: 62224 - RNA, 19 nt, Homo sapiens
  misc_RNA (1)...(19): siRNA sense strand
cagaugaggugcacauucc

SEQ ID NO: 62225 - RNA, 19 nt, Homo sapiens
  misc_RNA (1)...(19): siRNA sense strand
uauucaagcaagcaacuua

SEQ ID NO: 62226 - RNA, 19 nt, Homo sapiens
  misc_RNA (1)...(19): siRNA sense strand
gaaaacaccauaucuggau

SEQ ID NO: 62227 - RNA, 19 nt, Homo sapiens
  misc_RNA (1)...(19): siRNA sense strand
cauaugccacgcaaacauu

SEQ ID NO: 62228 - RNA, 19 nt, Homo sapiens
  misc_RNA (1)...(19): siRNA sense strand
cuugaaagauaguguuaca

SEQ ID NO: 62229 - RNA, 19 nt, Homo sapiens
  misc_RNA (1)...(19): siRNA sense strand
ccgcagcaccucugacugu

SEQ ID NO: 62230 - RNA, 19 nt, Homo sapiens
  misc_RNA (1)...(19): siRNA sense strand
cgucaacaccaccaucugu

SEQ ID NO: 62231 - RNA, 19 nt, Homo sapiens
  misc_RNA (1)...(19): siRNA sense strand
gaaggacgagguagcucua

SEQ ID NO: 62232 - RNA, 19 nt, Homo sapiens
  misc_RNA (1)...(19): siRNA sense strand
gaaggacgagguagcucua

SEQ ID NO: 62233 - RNA, 19 nt, Homo sapiens
  misc_RNA (1)...(19): siRNA sense strand
gaacugcagcgaguacuuc

SEQ ID NO: 62234 - RNA, 19 nt, Homo sapiens
  misc_RNA (1)...(19): siRNA sense strand
gccggcaucuucuuucaug

SEQ ID NO: 62235 - RNA, 19 nt, Homo sapiens
  misc_RNA (1)...(19): siRNA sense strand
gcgaguacuucccgcuguu

SEQ ID NO: 62236 - RNA, 19 nt, Homo sapiens
  misc_RNA (1)...(19): siRNA sense strand
cggcaucuucuuucaugaa

SEQ ID NO: 62237 - RNA, 19 nt, Homo sapiens
  misc_RNA (1)...(19): siRNA sense strand
ggaaucgugugacuaauaa

SEQ ID NO: 62238 - RNA, 19 nt, Homo sapiens
  misc_RNA (1)...(19): siRNA sense strand
gaagggaucugcaggaauc

SEQ ID NO: 62239 - RNA, 19 nt, Homo sapiens
  misc_RNA (1)...(19): siRNA sense strand
ugaagaggauaaugagaua

SEQ ID NO: 62240 - RNA, 19 nt, Homo sapiens
  misc_RNA (1)...(19): siRNA sense strand
aaacuuggauucucacuug

SEQ ID NO: 62241 - RNA, 19 nt, Homo sapiens
  misc_RNA (1)...(19): siRNA sense strand
gcaggaaucgugugacuaa

SEQ ID NO: 62242 - RNA, 19 nt, Homo sapiens
  misc_RNA (1)...(19): siRNA sense strand
ucugaaggcuugaguaauu

SEQ ID NO: 62243 - RNA, 19 nt, Homo sapiens
  misc_RNA (1)...(19): siRNA sense strand
ugacugaucuucuggacaa

SEQ ID NO: 62244 - RNA, 19 nt, Homo sapiens
  misc_RNA (1)...(19): siRNA sense strand
caugauaacccucaaauau

SEQ ID NO: 62245 - RNA, 19 nt, Homo sapiens
  misc_RNA (1)...(19): siRNA sense strand
ugauaacccucaaauaugu

SEQ ID NO: 62246 - RNA, 19 nt, Homo sapiens
  misc_RNA (1)...(19): siRNA sense strand
gaauauagucgaugaccuu

SEQ ID NO: 62247 - RNA, 19 nt, Homo sapiens
  misc_RNA (1)...(19): siRNA sense strand
ccaaaagacuacaugauaa

SEQ ID NO: 62248 - RNA, 19 nt, Homo sapiens
  misc_RNA (1)...(19): siRNA sense strand
ucacuaaauugguggcaaa

SEQ ID NO: 62249 - RNA, 19 nt, Homo sapiens
  misc_RNA (1)...(19): siRNA sense strand
acacaaacuuggauucuca

SEQ ID NO: 62250 - RNA, 19 nt, Homo sapiens
  misc_RNA (1)...(19): siRNA sense strand
gauucucacuugcauuuau

SEQ ID NO: 62251 - RNA, 19 nt, Homo sapiens
  misc_RNA (1)...(19): siRNA sense strand
gagagaguuucaagaagug

SEQ ID NO: 62252 - RNA, 19 nt, Homo sapiens
  misc_RNA (1)...(19): siRNA sense strand
ugugguuucuucaacauua

SEQ ID NO: 62253 - RNA, 19 nt, Homo sapiens
  misc_RNA (1)...(19): siRNA sense strand
gagagagaguuucaagaag

SEQ ID NO: 62254 - RNA, 19 nt, Homo sapiens
  misc_RNA (1)...(19): siRNA sense strand
ccagaacccaggcucuuua

SEQ ID NO: 62255 - RNA, 19 nt, Homo sapiens
  misc_RNA (1)...(19): siRNA sense strand
auaaguauguugcaagaga

SEQ ID NO: 62256 - RNA, 19 nt, Homo sapiens
  misc_RNA (1)...(19): siRNA sense strand
gaggauaaugagauaagua

SEQ ID NO: 62257 - RNA, 19 nt, Homo sapiens
  misc_RNA (1)...(19): siRNA sense strand
cuaaauugguggcaaaucu

SEQ ID NO: 62258 - RNA, 19 nt, Homo sapiens
  misc_RNA (1)...(19): siRNA sense strand
aaacucaucuaaggaucua

SEQ ID NO: 62259 - RNA, 19 nt, Homo sapiens
  misc_RNA (1)...(19): siRNA sense strand
ucacuugcauuuaucuuca

SEQ ID NO: 62260 - RNA, 19 nt, Homo sapiens
  misc_RNA (1)...(19): siRNA sense strand
gcgagaugguaguacaauu

SEQ ID NO: 62261 - RNA, 19 nt, Homo sapiens
  misc_RNA (1)...(19): siRNA sense strand
agagagaguuucaagaagu

SEQ ID NO: 62262 - RNA, 19 nt, Homo sapiens
  misc_RNA (1)...(19): siRNA sense strand
aacauuaaguccugagaaa

SEQ ID NO: 62263 - RNA, 19 nt, Homo sapiens
  misc_RNA (1)...(19): siRNA sense strand
cugaaggcuugaguaauua

SEQ ID NO: 62264 - RNA, 19 nt, Homo sapiens
  misc_RNA (1)...(19): siRNA sense strand
agagagagaguuucaagaa

SEQ ID NO: 62265 - RNA, 19 nt, Homo sapiens
  misc_RNA (1)...(19): siRNA sense strand
gauaagcgagaugguagua

SEQ ID NO: 62266 - RNA, 19 nt, Homo sapiens
  misc_RNA (1)...(19): siRNA sense strand
uaaguauguugcaagagaa

SEQ ID NO: 62267 - RNA, 19 nt, Homo sapiens
  misc_RNA (1)...(19): siRNA sense strand
gaagacacaaacuuggauu

SEQ ID NO: 62268 - RNA, 19 nt, Homo sapiens
  misc_RNA (1)...(19): siRNA sense strand
uaagcgagaugguaguaca

SEQ ID NO: 62269 - RNA, 19 nt, Homo sapiens
  misc_RNA (1)...(19): siRNA sense strand
gugauugugugguuucuuc

SEQ ID NO: 62270 - RNA, 19 nt, Homo sapiens
  misc_RNA (1)...(19): siRNA sense strand
cgagaugguaguacaauug

SEQ ID NO: 62271 - RNA, 19 nt, Homo sapiens
  misc_RNA (1)...(19): siRNA sense strand
agagaaagagagagaguuu

SEQ ID NO: 62272 - RNA, 19 nt, Homo sapiens
  misc_RNA (1)...(19): siRNA sense strand
uauagucgaugaccuugug

SEQ ID NO: 62273 - RNA, 19 nt, Homo sapiens
  misc_RNA (1)...(19): siRNA sense strand
cagcuugacugaucuucug

SEQ ID NO: 62274 - RNA, 19 nt, Homo sapiens
  misc_RNA (1)...(19): siRNA sense strand
agauaaguauguugcaaga

SEQ ID NO: 62275 - RNA, 19 nt, Homo sapiens
  misc_RNA (1)...(19): siRNA sense strand
gaacccaggcucuuuacuc

SEQ ID NO: 62276 - RNA, 19 nt, Homo sapiens
  misc_RNA (1)...(19): siRNA sense strand
cuucagcugcuccuauuua

SEQ ID NO: 62277 - RNA, 19 nt, Homo sapiens
  misc_RNA (1)...(19): siRNA sense strand
aaagaaaacucaucuaagg

SEQ ID NO: 62278 - RNA, 19 nt, Homo sapiens
  misc_RNA (1)...(19): siRNA sense strand
gaagaggauaaugagauaa

SEQ ID NO: 62279 - RNA, 19 nt, Homo sapiens
  misc_RNA (1)...(19): siRNA sense strand
caagggcaguugaaaauau

SEQ ID NO: 62280 - RNA, 19 nt, Homo sapiens
  misc_RNA (1)...(19): siRNA sense strand
gaugguaguacaauuguca

SEQ ID NO: 62281 - RNA, 19 nt, Homo sapiens
  misc_RNA (1)...(19): siRNA sense strand
cagcugcuccuauuuaauc

SEQ ID NO: 62282 - RNA, 19 nt, Homo sapiens
  misc_RNA (1)...(19): siRNA sense strand
caacauuaaguccugagaa

SEQ ID NO: 62283 - RNA, 19 nt, Homo sapiens
  misc_RNA (1)...(19): siRNA sense strand
ugagauaaguauguugcaa

SEQ ID NO: 62284 - RNA, 19 nt, Homo sapiens
  misc_RNA (1)...(19): siRNA sense strand
gagaugguaguacaauugu

SEQ ID NO: 62285 - RNA, 19 nt, Homo sapiens
  misc_RNA (1)...(19): siRNA sense strand
caucugaaacuagugauug

SEQ ID NO: 62286 - RNA, 19 nt, Homo sapiens
  misc_RNA (1)...(19): siRNA sense strand
aggaaucgugugacuaaua

SEQ ID NO: 62287 - RNA, 19 nt, Homo sapiens
  misc_RNA (1)...(19): siRNA sense strand
gugguuucuucaacauuaa

SEQ ID NO: 62288 - RNA, 19 nt, Homo sapiens
  misc_RNA (1)...(19): siRNA sense strand
gaaggcuugaguaauuauu

SEQ ID NO: 62289 - RNA, 19 nt, Homo sapiens
  misc_RNA (1)...(19): siRNA sense strand
ucgugugacuaauaaugua

SEQ ID NO: 62290 - RNA, 19 nt, Homo sapiens
  misc_RNA (1)...(19): siRNA sense strand
uggauucucacuugcauuu

SEQ ID NO: 62291 - RNA, 19 nt, Homo sapiens
  misc_RNA (1)...(19): siRNA sense strand
guaaaagacgucacuaaau

SEQ ID NO: 62292 - RNA, 19 nt, Homo sapiens
  misc_RNA (1)...(19): siRNA sense strand
gagaguuucaagaagugua

SEQ ID NO: 62293 - RNA, 19 nt, Homo sapiens
  misc_RNA (1)...(19): siRNA sense strand
uaaauugguggcaaaucuu

SEQ ID NO: 62294 - RNA, 19 nt, Homo sapiens
  misc_RNA (1)...(19): siRNA sense strand
gacacaaacuuggauucuc

SEQ ID NO: 62295 - RNA, 19 nt, Homo sapiens
  misc_RNA (1)...(19): siRNA sense strand
caagagaaagagagagagu

SEQ ID NO: 62296 - RNA, 19 nt, Homo sapiens
  misc_RNA (1)...(19): siRNA sense strand
guggagugcgucaaagaaa

SEQ ID NO: 62297 - RNA, 19 nt, Homo sapiens
  misc_RNA (1)...(19): siRNA sense strand
cuggacaaguuuucaaaua

SEQ ID NO: 62298 - RNA, 19 nt, Homo sapiens
  misc_RNA (1)...(19): siRNA sense strand
aaagagagagaguuucaag

SEQ ID NO: 62299 - RNA, 19 nt, Homo sapiens
  misc_RNA (1)...(19): siRNA sense strand
cuucaaggacuuuguagug

SEQ ID NO: 62300 - RNA, 19 nt, Homo sapiens
  misc_RNA (1)...(19): siRNA sense strand
cugaagggaucugcaggaa

SEQ ID NO: 62301 - RNA, 19 nt, Homo sapiens
  misc_RNA (1)...(19): siRNA sense strand
gccuuauacuggaagaaga

SEQ ID NO: 62302 - RNA, 19 nt, Homo sapiens
  misc_RNA (1)...(19): siRNA sense strand
uucagcugcuccuauuuaa

SEQ ID NO: 62303 - RNA, 19 nt, Homo sapiens
  misc_RNA (1)...(19): siRNA sense strand
gaagaagagacagccaagu

SEQ ID NO: 62304 - RNA, 19 nt, Homo sapiens
  misc_RNA (1)...(19): siRNA sense strand
ggauucucacuugcauuua

SEQ ID NO: 62305 - RNA, 19 nt, Homo sapiens
  misc_RNA (1)...(19): siRNA sense strand
gcaucugaaacuagugauu

SEQ ID NO: 62306 - RNA, 19 nt, Homo sapiens
  misc_RNA (1)...(19): siRNA sense strand
acaugauaacccucaaaua

SEQ ID NO: 62307 - RNA, 19 nt, Homo sapiens
  misc_RNA (1)...(19): siRNA sense strand
ccagcauuguuuucucuua

SEQ ID NO: 62308 - RNA, 19 nt, Homo sapiens
  misc_RNA (1)...(19): siRNA sense strand
gguggcaaaucuuccaaaa

SEQ ID NO: 62309 - RNA, 19 nt, Homo sapiens
  misc_RNA (1)...(19): siRNA sense strand
guauguugcaagagaaaga

SEQ ID NO: 62310 - RNA, 19 nt, Homo sapiens
  misc_RNA (1)...(19): siRNA sense strand
cugaucuucuggacaaguu

SEQ ID NO: 62311 - RNA, 19 nt, Homo sapiens
  misc_RNA (1)...(19): siRNA sense strand
uccaaaagacuacaugaua

SEQ ID NO: 62312 - RNA, 19 nt, Homo sapiens
  misc_RNA (1)...(19): siRNA sense strand
augauaacccucaaauaug

SEQ ID NO: 62313 - RNA, 19 nt, Homo sapiens
  misc_RNA (1)...(19): siRNA sense strand
aagaagagacagccaaguc

SEQ ID NO: 62314 - RNA, 19 nt, Homo sapiens
  misc_RNA (1)...(19): siRNA sense strand
uuucugaaggcuugaguaa

SEQ ID NO: 62315 - RNA, 19 nt, Homo sapiens
  misc_RNA (1)...(19): siRNA sense strand
ggauaaugagauaaguaug

SEQ ID NO: 62316 - RNA, 19 nt, Homo sapiens
  misc_RNA (1)...(19): siRNA sense strand
uaaugaagaggauaaugag

SEQ ID NO: 62317 - RNA, 19 nt, Homo sapiens
  misc_RNA (1)...(19): siRNA sense strand
auaauuggcuuugcuuuug

SEQ ID NO: 62318 - RNA, 19 nt, Homo sapiens
  misc_RNA (1)...(19): siRNA sense strand
caaacuuggauucucacuu

SEQ ID NO: 62319 - RNA, 19 nt, Homo sapiens
  misc_RNA (1)...(19): siRNA sense strand
ggagccuuauacuggaaga

SEQ ID NO: 62320 - RNA, 19 nt, Homo sapiens
  misc_RNA (1)...(19): siRNA sense strand
aagaagacacaaacuugga

SEQ ID NO: 62321 - RNA, 19 nt, Homo sapiens
  misc_RNA (1)...(19): siRNA sense strand
aaucgugugacuaauaaug

SEQ ID NO: 62322 - RNA, 19 nt, Homo sapiens
  misc_RNA (1)...(19): siRNA sense strand
uaucuucagcugcuccuau

SEQ ID NO: 62323 - RNA, 19 nt, Homo sapiens
  misc_RNA (1)...(19): siRNA sense strand
aagggcaguugaaaauaua

SEQ ID NO: 62324 - RNA, 19 nt, Homo sapiens
  misc_RNA (1)...(19): siRNA sense strand
aaagacgucacuaaauugg

SEQ ID NO: 62325 - RNA, 19 nt, Homo sapiens
  misc_RNA (1)...(19): siRNA sense strand
ggaaucgugugacuaauaa

SEQ ID NO: 62326 - RNA, 19 nt, Homo sapiens
  misc_RNA (1)...(19): siRNA sense strand
gaagggaucugcaggaauc

SEQ ID NO: 62327 - RNA, 19 nt, Homo sapiens
  misc_RNA (1)...(19): siRNA sense strand
ugaagaggauaaugagaua

SEQ ID NO: 62328 - RNA, 19 nt, Homo sapiens
  misc_RNA (1)...(19): siRNA sense strand
aaacuuggauucucacuug

SEQ ID NO: 62329 - RNA, 19 nt, Homo sapiens
  misc_RNA (1)...(19): siRNA sense strand
gcaggaaucgugugacuaa

SEQ ID NO: 62330 - RNA, 19 nt, Homo sapiens
  misc_RNA (1)...(19): siRNA sense strand
ucugaaggcuugaguaauu

SEQ ID NO: 62331 - RNA, 19 nt, Homo sapiens
  misc_RNA (1)...(19): siRNA sense strand
ugacugaucuucuggacaa

SEQ ID NO: 62332 - RNA, 19 nt, Homo sapiens
  misc_RNA (1)...(19): siRNA sense strand
caugauaacccucaaauau

SEQ ID NO: 62333 - RNA, 19 nt, Homo sapiens
  misc_RNA (1)...(19): siRNA sense strand
ugauaacccucaaauaugu

SEQ ID NO: 62334 - RNA, 19 nt, Homo sapiens
  misc_RNA (1)...(19): siRNA sense strand
gaauauagucgaugaccuu

SEQ ID NO: 62335 - RNA, 19 nt, Homo sapiens
  misc_RNA (1)...(19): siRNA sense strand
ccaaaagacuacaugauaa

SEQ ID NO: 62336 - RNA, 19 nt, Homo sapiens
  misc_RNA (1)...(19): siRNA sense strand
ucacuaaauugguggcaaa

SEQ ID NO: 62337 - RNA, 19 nt, Homo sapiens
  misc_RNA (1)...(19): siRNA sense strand
acacaaacuuggauucuca

SEQ ID NO: 62338 - RNA, 19 nt, Homo sapiens
  misc_RNA (1)...(19): siRNA sense strand
gauucucacuugcauuuau

SEQ ID NO: 62339 - RNA, 19 nt, Homo sapiens
  misc_RNA (1)...(19): siRNA sense strand
gagagaguuucaagaagug

SEQ ID NO: 62340 - RNA, 19 nt, Homo sapiens
  misc_RNA (1)...(19): siRNA sense strand
ugugguuucuucaacauua

SEQ ID NO: 62341 - RNA, 19 nt, Homo sapiens
  misc_RNA (1)...(19): siRNA sense strand
gagagagaguuucaagaag

SEQ ID NO: 62342 - RNA, 19 nt, Homo sapiens
  misc_RNA (1)...(19): siRNA sense strand
ccagaacccaggcucuuua

SEQ ID NO: 62343 - RNA, 19 nt, Homo sapiens
  misc_RNA (1)...(19): siRNA sense strand
auaaguauguugcaagaga

SEQ ID NO: 62344 - RNA, 19 nt, Homo sapiens
  misc_RNA (1)...(19): siRNA sense strand
gaggauaaugagauaagua

SEQ ID NO: 62345 - RNA, 19 nt, Homo sapiens
  misc_RNA (1)...(19): siRNA sense strand
cuaaauugguggcaaaucu

SEQ ID NO: 62346 - RNA, 19 nt, Homo sapiens
  misc_RNA (1)...(19): siRNA sense strand
aaacucaucuaaggaucua

SEQ ID NO: 62347 - RNA, 19 nt, Homo sapiens
  misc_RNA (1)...(19): siRNA sense strand
ucacuugcauuuaucuuca

SEQ ID NO: 62348 - RNA, 19 nt, Homo sapiens
  misc_RNA (1)...(19): siRNA sense strand
gcgagaugguaguacaauu

SEQ ID NO: 62349 - RNA, 19 nt, Homo sapiens
  misc_RNA (1)...(19): siRNA sense strand
agagagaguuucaagaagu

SEQ ID NO: 62350 - RNA, 19 nt, Homo sapiens
  misc_RNA (1)...(19): siRNA sense strand
aacauuaaguccugagaaa

SEQ ID NO: 62351 - RNA, 19 nt, Homo sapiens
  misc_RNA (1)...(19): siRNA sense strand
cugaaggcuugaguaauua

SEQ ID NO: 62352 - RNA, 19 nt, Homo sapiens
  misc_RNA (1)...(19): siRNA sense strand
agagagagaguuucaagaa

SEQ ID NO: 62353 - RNA, 19 nt, Homo sapiens
  misc_RNA (1)...(19): siRNA sense strand
gauaagcgagaugguagua

SEQ ID NO: 62354 - RNA, 19 nt, Homo sapiens
  misc_RNA (1)...(19): siRNA sense strand
uaaguauguugcaagagaa

SEQ ID NO: 62355 - RNA, 19 nt, Homo sapiens
  misc_RNA (1)...(19): siRNA sense strand
gaagacacaaacuuggauu

SEQ ID NO: 62356 - RNA, 19 nt, Homo sapiens
  misc_RNA (1)...(19): siRNA sense strand
uaagcgagaugguaguaca

SEQ ID NO: 62357 - RNA, 19 nt, Homo sapiens
  misc_RNA (1)...(19): siRNA sense strand
gugauugugugguuucuuc

SEQ ID NO: 62358 - RNA, 19 nt, Homo sapiens
  misc_RNA (1)...(19): siRNA sense strand
cgagaugguaguacaauug

SEQ ID NO: 62359 - RNA, 19 nt, Homo sapiens
  misc_RNA (1)...(19): siRNA sense strand
agagaaagagagagaguuu

SEQ ID NO: 62360 - RNA, 19 nt, Homo sapiens
  misc_RNA (1)...(19): siRNA sense strand
uauagucgaugaccuugug

SEQ ID NO: 62361 - RNA, 19 nt, Homo sapiens
  misc_RNA (1)...(19): siRNA sense strand
cagcuugacugaucuucug

SEQ ID NO: 62362 - RNA, 19 nt, Homo sapiens
  misc_RNA (1)...(19): siRNA sense strand
agauaaguauguugcaaga

SEQ ID NO: 62363 - RNA, 19 nt, Homo sapiens
  misc_RNA (1)...(19): siRNA sense strand
gaacccaggcucuuuacuc

SEQ ID NO: 62364 - RNA, 19 nt, Homo sapiens
  misc_RNA (1)...(19): siRNA sense strand
cuucagcugcuccuauuua

SEQ ID NO: 62365 - RNA, 19 nt, Homo sapiens
  misc_RNA (1)...(19): siRNA sense strand
aaagaaaacucaucuaagg

SEQ ID NO: 62366 - RNA, 19 nt, Homo sapiens
  misc_RNA (1)...(19): siRNA sense strand
gaagaggauaaugagauaa

SEQ ID NO: 62367 - RNA, 19 nt, Homo sapiens
  misc_RNA (1)...(19): siRNA sense strand
caagggcaguugaaaauau

SEQ ID NO: 62368 - RNA, 19 nt, Homo sapiens
  misc_RNA (1)...(19): siRNA sense strand
gaugguaguacaauuguca

SEQ ID NO: 62369 - RNA, 19 nt, Homo sapiens
  misc_RNA (1)...(19): siRNA sense strand
cagcugcuccuauuuaauc

SEQ ID NO: 62370 - RNA, 19 nt, Homo sapiens
  misc_RNA (1)...(19): siRNA sense strand
caacauuaaguccugagaa

SEQ ID NO: 62371 - RNA, 19 nt, Homo sapiens
  misc_RNA (1)...(19): siRNA sense strand
ugagauaaguauguugcaa

SEQ ID NO: 62372 - RNA, 19 nt, Homo sapiens
  misc_RNA (1)...(19): siRNA sense strand
gagaugguaguacaauugu

SEQ ID NO: 62373 - RNA, 19 nt, Homo sapiens
  misc_RNA (1)...(19): siRNA sense strand
caucugaaacuagugauug

SEQ ID NO: 62374 - RNA, 19 nt, Homo sapiens
  misc_RNA (1)...(19): siRNA sense strand
aggaaucgugugacuaaua

SEQ ID NO: 62375 - RNA, 19 nt, Homo sapiens
  misc_RNA (1)...(19): siRNA sense strand
gugguuucuucaacauuaa

SEQ ID NO: 62376 - RNA, 19 nt, Homo sapiens
  misc_RNA (1)...(19): siRNA sense strand
gaaggcuugaguaauuauu

SEQ ID NO: 62377 - RNA, 19 nt, Homo sapiens
  misc_RNA (1)...(19): siRNA sense strand
ucgugugacuaauaaugua

SEQ ID NO: 62378 - RNA, 19 nt, Homo sapiens
  misc_RNA (1)...(19): siRNA sense strand
uggauucucacuugcauuu

SEQ ID NO: 62379 - RNA, 19 nt, Homo sapiens
  misc_RNA (1)...(19): siRNA sense strand
guaaaagacgucacuaaau

SEQ ID NO: 62380 - RNA, 19 nt, Homo sapiens
  misc_RNA (1)...(19): siRNA sense strand
gagaguuucaagaagugua

SEQ ID NO: 62381 - RNA, 19 nt, Homo sapiens
  misc_RNA (1)...(19): siRNA sense strand
uaaauugguggcaaaucuu

SEQ ID NO: 62382 - RNA, 19 nt, Homo sapiens
  misc_RNA (1)...(19): siRNA sense strand
gacacaaacuuggauucuc

SEQ ID NO: 62383 - RNA, 19 nt, Homo sapiens
  misc_RNA (1)...(19): siRNA sense strand
caagagaaagagagagagu

SEQ ID NO: 62384 - RNA, 19 nt, Homo sapiens
  misc_RNA (1)...(19): siRNA sense strand
guggagugcgucaaagaaa

SEQ ID NO: 62385 - RNA, 19 nt, Homo sapiens
  misc_RNA (1)...(19): siRNA sense strand
cuggacaaguuuucaaaua

SEQ ID NO: 62386 - RNA, 19 nt, Homo sapiens
  misc_RNA (1)...(19): siRNA sense strand
aaagagagagaguuucaag

SEQ ID NO: 62387 - RNA, 19 nt, Homo sapiens
  misc_RNA (1)...(19): siRNA sense strand
cuucaaggacuuuguagug

SEQ ID NO: 62388 - RNA, 19 nt, Homo sapiens
  misc_RNA (1)...(19): siRNA sense strand
cugaagggaucugcaggaa

SEQ ID NO: 62389 - RNA, 19 nt, Homo sapiens
  misc_RNA (1)...(19): siRNA sense strand
gccuuauacuggaagaaga

SEQ ID NO: 62390 - RNA, 19 nt, Homo sapiens
  misc_RNA (1)...(19): siRNA sense strand
uucagcugcuccuauuuaa

SEQ ID NO: 62391 - RNA, 19 nt, Homo sapiens
  misc_RNA (1)...(19): siRNA sense strand
gaagaagagacagccaagu

SEQ ID NO: 62392 - RNA, 19 nt, Homo sapiens
  misc_RNA (1)...(19): siRNA sense strand
ggauucucacuugcauuua

SEQ ID NO: 62393 - RNA, 19 nt, Homo sapiens
  misc_RNA (1)...(19): siRNA sense strand
gcaucugaaacuagugauu

SEQ ID NO: 62394 - RNA, 19 nt, Homo sapiens
  misc_RNA (1)...(19): siRNA sense strand
acaugauaacccucaaaua

SEQ ID NO: 62395 - RNA, 19 nt, Homo sapiens
  misc_RNA (1)...(19): siRNA sense strand
ccagcauuguuuucucuua

SEQ ID NO: 62396 - RNA, 19 nt, Homo sapiens
  misc_RNA (1)...(19): siRNA sense strand
gguggcaaaucuuccaaaa

SEQ ID NO: 62397 - RNA, 19 nt, Homo sapiens
  misc_RNA (1)...(19): siRNA sense strand
guauguugcaagagaaaga

SEQ ID NO: 62398 - RNA, 19 nt, Homo sapiens
  misc_RNA (1)...(19): siRNA sense strand
cugaucuucuggacaaguu

SEQ ID NO: 62399 - RNA, 19 nt, Homo sapiens
  misc_RNA (1)...(19): siRNA sense strand
uccaaaagacuacaugaua

SEQ ID NO: 62400 - RNA, 19 nt, Homo sapiens
  misc_RNA (1)...(19): siRNA sense strand
augauaacccucaaauaug

SEQ ID NO: 62401 - RNA, 19 nt, Homo sapiens
  misc_RNA (1)...(19): siRNA sense strand
aagaagagacagccaaguc

SEQ ID NO: 62402 - RNA, 19 nt, Homo sapiens
  misc_RNA (1)...(19): siRNA sense strand
uuucugaaggcuugaguaa

SEQ ID NO: 62403 - RNA, 19 nt, Homo sapiens
  misc_RNA (1)...(19): siRNA sense strand
ggauaaugagauaaguaug

SEQ ID NO: 62404 - RNA, 19 nt, Homo sapiens
  misc_RNA (1)...(19): siRNA sense strand
uaaugaagaggauaaugag

SEQ ID NO: 62405 - RNA, 19 nt, Homo sapiens
  misc_RNA (1)...(19): siRNA sense strand
auaauuggcuuugcuuuug

SEQ ID NO: 62406 - RNA, 19 nt, Homo sapiens
  misc_RNA (1)...(19): siRNA sense strand
caaacuuggauucucacuu

SEQ ID NO: 62407 - RNA, 19 nt, Homo sapiens
  misc_RNA (1)...(19): siRNA sense strand
ggagccuuauacuggaaga

SEQ ID NO: 62408 - RNA, 19 nt, Homo sapiens
  misc_RNA (1)...(19): siRNA sense strand
aagaagacacaaacuugga

SEQ ID NO: 62409 - RNA, 19 nt, Homo sapiens
  misc_RNA (1)...(19): siRNA sense strand
aaucgugugacuaauaaug

SEQ ID NO: 62410 - RNA, 19 nt, Homo sapiens
  misc_RNA (1)...(19): siRNA sense strand
uaucuucagcugcuccuau

SEQ ID NO: 62411 - RNA, 19 nt, Homo sapiens
  misc_RNA (1)...(19): siRNA sense strand
aagggcaguugaaaauaua

SEQ ID NO: 62412 - RNA, 19 nt, Homo sapiens
  misc_RNA (1)...(19): siRNA sense strand
aaagacgucacuaaauugg

SEQ ID NO: 62413 - RNA, 19 nt, Homo sapiens
  misc_RNA (1)...(19): siRNA sense strand
gcagaaggcugacgucuau

SEQ ID NO: 62414 - RNA, 19 nt, Homo sapiens
  misc_RNA (1)...(19): siRNA sense strand
ccaaagagauuguccagaa

SEQ ID NO: 62415 - RNA, 19 nt, Homo sapiens
  misc_RNA (1)...(19): siRNA sense strand
ggaaucaccuucaucaugu

SEQ ID NO: 62416 - RNA, 19 nt, Homo sapiens
  misc_RNA (1)...(19): siRNA sense strand
ggacccaacugaaugaaga

SEQ ID NO: 62417 - RNA, 19 nt, Homo sapiens
  misc_RNA (1)...(19): siRNA sense strand
gaacacaaccugagcuaug

SEQ ID NO: 62418 - RNA, 19 nt, Homo sapiens
  misc_RNA (1)...(19): siRNA sense strand
gggagaaucugaccaaugg

SEQ ID NO: 62419 - RNA, 19 nt, Homo sapiens
  misc_RNA (1)...(19): siRNA sense strand
gaaagcugaugcuggagaa

SEQ ID NO: 62420 - RNA, 19 nt, Homo sapiens
  misc_RNA (1)...(19): siRNA sense strand
gggauuaugucuucuuuua

SEQ ID NO: 62421 - RNA, 19 nt, Homo sapiens
  misc_RNA (1)...(19): siRNA sense strand
gaggauggacuucgaauug

SEQ ID NO: 62422 - RNA, 19 nt, Homo sapiens
  misc_RNA (1)...(19): siRNA sense strand
uaugagagauguucaguuc

SEQ ID NO: 62423 - RNA, 19 nt, Homo sapiens
  misc_RNA (1)...(19): siRNA sense strand
ggagcuggcuagcauguug

SEQ ID NO: 62424 - RNA, 19 nt, Homo sapiens
  misc_RNA (1)...(19): siRNA sense strand
gaaauguugucgccaucaa

SEQ ID NO: 62425 - RNA, 19 nt, Homo sapiens
  misc_RNA (1)...(19): siRNA sense strand
cauagacccucccaacauu

SEQ ID NO: 62426 - RNA, 19 nt, Homo sapiens
  misc_RNA (1)...(19): siRNA sense strand
gcacaggaaucaccuucau

SEQ ID NO: 62427 - RNA, 19 nt, Homo sapiens
  misc_RNA (1)...(19): siRNA sense strand
guuuccagcuuccuaauuu

SEQ ID NO: 62428 - RNA, 19 nt, Homo sapiens
  misc_RNA (1)...(19): siRNA sense strand
gagcugagaagcagauuug

SEQ ID NO: 62429 - RNA, 19 nt, Homo sapiens
  misc_RNA (1)...(19): siRNA sense strand
ugagagauguucaguucaa

SEQ ID NO: 62430 - RNA, 19 nt, Homo sapiens
  misc_RNA (1)...(19): siRNA sense strand
caacaccggucacuucaag

SEQ ID NO: 62431 - RNA, 19 nt, Homo sapiens
  misc_RNA (1)...(19): siRNA sense strand
ggaaauaccagaucuuugc

SEQ ID NO: 62432 - RNA, 19 nt, Homo sapiens
  misc_RNA (1)...(19): siRNA sense strand
ugacagccaugcccucuau

SEQ ID NO: 62433 - RNA, 19 nt, Homo sapiens
  misc_RNA (1)...(19): siRNA sense strand
caacuuggacuggauguuu

SEQ ID NO: 62434 - RNA, 19 nt, Homo sapiens
  misc_RNA (1)...(19): siRNA sense strand
gacgacccauccugugaua

SEQ ID NO: 62435 - RNA, 19 nt, Homo sapiens
  misc_RNA (1)...(19): siRNA sense strand
gaugggauccugcuauaug

SEQ ID NO: 62436 - RNA, 19 nt, Homo sapiens
  misc_RNA (1)...(19): siRNA sense strand
caccagaaauugcucguau

SEQ ID NO: 62437 - RNA, 19 nt, Homo sapiens
  misc_RNA (1)...(19): siRNA sense strand
gcagugguccuuucuacuu

SEQ ID NO: 62438 - RNA, 19 nt, Homo sapiens
  misc_RNA (1)...(19): siRNA sense strand
gacuggauguuucguuauu

SEQ ID NO: 62439 - RNA, 19 nt, Homo sapiens
  misc_RNA (1)...(19): siRNA sense strand
uaacugggcugguugucau

SEQ ID NO: 62440 - RNA, 19 nt, Homo sapiens
  misc_RNA (1)...(19): siRNA sense strand
ccaacugaaugaagagcua

SEQ ID NO: 62441 - RNA, 19 nt, Homo sapiens
  misc_RNA (1)...(19): siRNA sense strand
gaaggcgccugcucugagu

SEQ ID NO: 62442 - RNA, 19 nt, Homo sapiens
  misc_RNA (1)...(19): siRNA sense strand
agaaggagcuggcuagcau

SEQ ID NO: 62443 - RNA, 19 nt, Homo sapiens
  misc_RNA (1)...(19): siRNA sense strand
ugccauaauugacaacuuu

SEQ ID NO: 62444 - RNA, 19 nt, Homo sapiens
  misc_RNA (1)...(19): siRNA sense strand
cgugggaguuuacaggaua

SEQ ID NO: 62445 - RNA, 19 nt, Homo sapiens
  misc_RNA (1)...(19): siRNA sense strand
uggacuggauguuucguua

SEQ ID NO: 62446 - RNA, 19 nt, Homo sapiens
  misc_RNA (1)...(19): siRNA sense strand
acgaagauaucacggugua

SEQ ID NO: 62447 - RNA, 19 nt, Homo sapiens
  misc_RNA (1)...(19): siRNA sense strand
cuacuucagugacauuguu

SEQ ID NO: 62448 - RNA, 19 nt, Homo sapiens
  misc_RNA (1)...(19): siRNA sense strand
ccaucaaacaugugaauaa

SEQ ID NO: 62449 - RNA, 19 nt, Homo sapiens
  misc_RNA (1)...(19): siRNA sense strand
ugacagcccaugggaaaua

SEQ ID NO: 62450 - RNA, 19 nt, Homo sapiens
  misc_RNA (1)...(19): siRNA sense strand
gcauagacccucccaacau

SEQ ID NO: 62451 - RNA, 19 nt, Homo sapiens
  misc_RNA (1)...(19): siRNA sense strand
caucaaacaugugaauaag

SEQ ID NO: 62452 - RNA, 19 nt, Homo sapiens
  misc_RNA (1)...(19): siRNA sense strand
caaagagauuguccagaag

SEQ ID NO: 62453 - RNA, 19 nt, Homo sapiens
  misc_RNA (1)...(19): siRNA sense strand
ggauggacuucgaauugug

SEQ ID NO: 62454 - RNA, 19 nt, Homo sapiens
  misc_RNA (1)...(19): siRNA sense strand
gaaucaccuucaucauguu

SEQ ID NO: 62455 - RNA, 19 nt, Homo sapiens
  misc_RNA (1)...(19): siRNA sense strand
gagaggccuuucagacugu

SEQ ID NO: 62456 - RNA, 19 nt, Homo sapiens
  misc_RNA (1)...(19): siRNA sense strand
ucguauggcccuagcauua

SEQ ID NO: 62457 - RNA, 19 nt, Homo sapiens
  misc_RNA (1)...(19): siRNA sense strand
ggaacaguaugccaauaac

SEQ ID NO: 62458 - RNA, 19 nt, Homo sapiens
  misc_RNA (1)...(19): siRNA sense strand
gaacaaugaccgagagacu

SEQ ID NO: 62459 - RNA, 19 nt, Homo sapiens
  misc_RNA (1)...(19): siRNA sense strand
gcugaaguccugaaugaga

SEQ ID NO: 62460 - RNA, 19 nt, Homo sapiens
  misc_RNA (1)...(19): siRNA sense strand
ccaucucacucgcuucauu

SEQ ID NO: 62461 - RNA, 19 nt, Homo sapiens
  misc_RNA (1)...(19): siRNA sense strand
gcaccagcauauuggacaa

SEQ ID NO: 62462 - RNA, 19 nt, Homo sapiens
  misc_RNA (1)...(19): siRNA sense strand
ugaccggccucacuacuuc

SEQ ID NO: 62463 - RNA, 19 nt, Homo sapiens
  misc_RNA (1)...(19): siRNA sense strand
gcugacgucuauagcuuug

SEQ ID NO: 62464 - RNA, 19 nt, Homo sapiens
  misc_RNA (1)...(19): siRNA sense strand
cgacccauccugugauaaa

SEQ ID NO: 62465 - RNA, 19 nt, Homo sapiens
  misc_RNA (1)...(19): siRNA sense strand
gaagcucugcucuaccaaa

SEQ ID NO: 62466 - RNA, 19 nt, Homo sapiens
  misc_RNA (1)...(19): siRNA sense strand
ggacuucgaauuguggaaa

SEQ ID NO: 62467 - RNA, 19 nt, Homo sapiens
  misc_RNA (1)...(19): siRNA sense strand
cugcuuugaugccauaauu

SEQ ID NO: 62468 - RNA, 19 nt, Homo sapiens
  misc_RNA (1)...(19): siRNA sense strand
augcugaaguccugaauga

SEQ ID NO: 62469 - RNA, 19 nt, Homo sapiens
  misc_RNA (1)...(19): siRNA sense strand
cuguauaccugcuuugaug

SEQ ID NO: 62470 - RNA, 19 nt, Homo sapiens
  misc_RNA (1)...(19): siRNA sense strand
gaaugagacaauacaggaa

SEQ ID NO: 62471 - RNA, 19 nt, Homo sapiens
  misc_RNA (1)...(19): siRNA sense strand
gcuggcugcuucuaugaug

SEQ ID NO: 62472 - RNA, 19 nt, Homo sapiens
  misc_RNA (1)...(19): siRNA sense strand
ugacauuguuggcuucaca

SEQ ID NO: 62473 - RNA, 19 nt, Homo sapiens
  misc_RNA (1)...(19): siRNA sense strand
gccagacuuuggacagauu

SEQ ID NO: 62474 - RNA, 19 nt, Homo sapiens
  misc_RNA (1)...(19): siRNA sense strand
gucuauagcuuugggauca

SEQ ID NO: 62475 - RNA, 19 nt, Homo sapiens
  misc_RNA (1)...(19): siRNA sense strand
ccaacugugugguggauag

SEQ ID NO: 62476 - RNA, 19 nt, Homo sapiens
  misc_RNA (1)...(19): siRNA sense strand
uaccagaucuuugccaaca

SEQ ID NO: 62477 - RNA, 19 nt, Homo sapiens
  misc_RNA (1)...(19): siRNA sense strand
gcuuugaugccauaauuga

SEQ ID NO: 62478 - RNA, 19 nt, Homo sapiens
  misc_RNA (1)...(19): siRNA sense strand
ugaccuguauaccugcuuu

SEQ ID NO: 62479 - RNA, 19 nt, Homo sapiens
  misc_RNA (1)...(19): siRNA sense strand
ccacaacagcauuauuuca

SEQ ID NO: 62480 - RNA, 19 nt, Homo sapiens
  misc_RNA (1)...(19): siRNA sense strand
acauuugcauugucacuga

SEQ ID NO: 62481 - RNA, 19 nt, Homo sapiens
  misc_RNA (1)...(19): siRNA sense strand
ugaauaagaagcgcauuga

SEQ ID NO: 62482 - RNA, 19 nt, Homo sapiens
  misc_RNA (1)...(19): siRNA sense strand
ggaggauggacuucgaauu

SEQ ID NO: 62483 - RNA, 19 nt, Homo sapiens
  misc_RNA (1)...(19): siRNA sense strand
agaugcaguuucuuccuuu

SEQ ID NO: 62484 - RNA, 19 nt, Homo sapiens
  misc_RNA (1)...(19): siRNA sense strand
cagaugaccggccucacua

SEQ ID NO: 62485 - RNA, 19 nt, Homo sapiens
  misc_RNA (1)...(19): siRNA sense strand
uagaugcaguuucuuccuu

SEQ ID NO: 62486 - RNA, 19 nt, Homo sapiens
  misc_RNA (1)...(19): siRNA sense strand
gaguuuacaggauauucua

SEQ ID NO: 62487 - RNA, 19 nt, Homo sapiens
  misc_RNA (1)...(19): siRNA sense strand
uuucaacccuggcaauugu

SEQ ID NO: 62488 - RNA, 19 nt, Homo sapiens
  misc_RNA (1)...(19): siRNA sense strand
gaagauaucacgguguaac

SEQ ID NO: 62489 - RNA, 19 nt, Homo sapiens
  misc_RNA (1)...(19): siRNA sense strand
cagcugaggcuacgcauag

SEQ ID NO: 62490 - RNA, 19 nt, Homo sapiens
  misc_RNA (1)...(19): siRNA sense strand
ucaacgccaugcaccagaa

SEQ ID NO: 62491 - RNA, 19 nt, Homo sapiens
  misc_RNA (1)...(19): siRNA sense strand
uggaacaguaugccaauaa

SEQ ID NO: 62492 - RNA, 19 nt, Homo sapiens
  misc_RNA (1)...(19): siRNA sense strand
gaccggacccaacugaaug

SEQ ID NO: 62493 - RNA, 19 nt, Homo sapiens
  misc_RNA (1)...(19): siRNA sense strand
ugauaaaacuccacuuuca

SEQ ID NO: 62494 - RNA, 19 nt, Homo sapiens
  misc_RNA (1)...(19): siRNA sense strand
agaaucgucugcugauaag

SEQ ID NO: 62495 - RNA, 19 nt, Homo sapiens
  misc_RNA (1)...(19): siRNA sense strand
augaugggauccugcuaua

SEQ ID NO: 62496 - RNA, 19 nt, Homo sapiens
  misc_RNA (1)...(19): siRNA sense strand
ggugaucacguaccgagaa

SEQ ID NO: 62497 - RNA, 19 nt, Homo sapiens
  misc_RNA (1)...(19): siRNA sense strand
gaaugaagagcuaguuuug

SEQ ID NO: 62498 - RNA, 19 nt, Homo sapiens
  misc_RNA (1)...(19): siRNA sense strand
acaacagcauuauuucauc

SEQ ID NO: 62499 - RNA, 19 nt, Homo sapiens
  misc_RNA (1)...(19): siRNA sense strand
gcauggccuuucuccacaa

SEQ ID NO: 62500 - RNA, 19 nt, Homo sapiens
  misc_RNA (1)...(19): siRNA sense strand
gagcaggccacccacuuca

SEQ ID NO: 62501 - RNA, 19 nt, Homo sapiens
  misc_RNA (1)...(19): siRNA sense strand
acaaugaccgagagacuga

SEQ ID NO: 62502 - RNA, 19 nt, Homo sapiens
  misc_RNA (1)...(19): siRNA sense strand
ugaccgagagacugacuuu

SEQ ID NO: 62503 - RNA, 19 nt, Homo sapiens
  misc_RNA (1)...(19): siRNA sense strand
uaccugcuuugaugccaua

SEQ ID NO: 62504 - RNA, 19 nt, Homo sapiens
  misc_RNA (1)...(19): siRNA sense strand
cagugguccuuucuacuug

SEQ ID NO: 62505 - RNA, 19 nt, Homo sapiens
  misc_RNA (1)...(19): siRNA sense strand
caacugcugaaccugauga

SEQ ID NO: 62506 - RNA, 19 nt, Homo sapiens
  misc_RNA (1)...(19): siRNA sense strand
ggacuggauguuucguuau

SEQ ID NO: 62507 - RNA, 19 nt, Homo sapiens
  misc_RNA (1)...(19): siRNA sense strand
gcaucaacuuggacuggau

SEQ ID NO: 62508 - RNA, 19 nt, Homo sapiens
  misc_RNA (1)...(19): siRNA sense strand
gggaaauaccagaucuuug

SEQ ID NO: 62509 - RNA, 19 nt, Homo sapiens
  misc_RNA (1)...(19): siRNA sense strand
acucagagcguuaucacaa

SEQ ID NO: 62510 - RNA, 19 nt, Homo sapiens
  misc_RNA (1)...(19): siRNA sense strand
cagcugagcggccagacuu

SEQ ID NO: 62511 - RNA, 19 nt, Homo sapiens
  misc_RNA (1)...(19): siRNA sense strand
ugccaucacuucugcuguu

SEQ ID NO: 62512 - RNA, 19 nt, Homo sapiens
  misc_RNA (1)...(19): siRNA sense strand
cuccacaacagcauuauuu

SEQ ID NO: 62513 - RNA, 19 nt, Homo sapiens
  misc_RNA (1)...(19): siRNA sense strand
gcagaaggcugacgucuau

SEQ ID NO: 62514 - RNA, 19 nt, Homo sapiens
  misc_RNA (1)...(19): siRNA sense strand
ccaaagagauuguccagaa

SEQ ID NO: 62515 - RNA, 19 nt, Homo sapiens
  misc_RNA (1)...(19): siRNA sense strand
gaacacugcuucucgaaug

SEQ ID NO: 62516 - RNA, 19 nt, Homo sapiens
  misc_RNA (1)...(19): siRNA sense strand
ggaaucaccuucaucaugu

SEQ ID NO: 62517 - RNA, 19 nt, Homo sapiens
  misc_RNA (1)...(19): siRNA sense strand
ggacccaacugaaugaaga

SEQ ID NO: 62518 - RNA, 19 nt, Homo sapiens
  misc_RNA (1)...(19): siRNA sense strand
gaacacaaccugagcuaug

SEQ ID NO: 62519 - RNA, 19 nt, Homo sapiens
  misc_RNA (1)...(19): siRNA sense strand
gggagaaucugaccaaugg

SEQ ID NO: 62520 - RNA, 19 nt, Homo sapiens
  misc_RNA (1)...(19): siRNA sense strand
gaaagcugaugcuggagaa

SEQ ID NO: 62521 - RNA, 19 nt, Homo sapiens
  misc_RNA (1)...(19): siRNA sense strand
gggauuaugucuucuuuua

SEQ ID NO: 62522 - RNA, 19 nt, Homo sapiens
  misc_RNA (1)...(19): siRNA sense strand
gaggauggacuucgaauug

SEQ ID NO: 62523 - RNA, 19 nt, Homo sapiens
  misc_RNA (1)...(19): siRNA sense strand
uaugagagauguucaguuc

SEQ ID NO: 62524 - RNA, 19 nt, Homo sapiens
  misc_RNA (1)...(19): siRNA sense strand
ggagcuggcuagcauguug

SEQ ID NO: 62525 - RNA, 19 nt, Homo sapiens
  misc_RNA (1)...(19): siRNA sense strand
gaaauguugucgccaucaa

SEQ ID NO: 62526 - RNA, 19 nt, Homo sapiens
  misc_RNA (1)...(19): siRNA sense strand
cauagacccucccaacauu

SEQ ID NO: 62527 - RNA, 19 nt, Homo sapiens
  misc_RNA (1)...(19): siRNA sense strand
gcacaggaaucaccuucau

SEQ ID NO: 62528 - RNA, 19 nt, Homo sapiens
  misc_RNA (1)...(19): siRNA sense strand
aaggaaagaugcgaacaua

SEQ ID NO: 62529 - RNA, 19 nt, Homo sapiens
  misc_RNA (1)...(19): siRNA sense strand
guuuccagcuuccuaauuu

SEQ ID NO: 62530 - RNA, 19 nt, Homo sapiens
  misc_RNA (1)...(19): siRNA sense strand
gagcugagaagcagauuug

SEQ ID NO: 62531 - RNA, 19 nt, Homo sapiens
  misc_RNA (1)...(19): siRNA sense strand
ugagagauguucaguucaa

SEQ ID NO: 62532 - RNA, 19 nt, Homo sapiens
  misc_RNA (1)...(19): siRNA sense strand
caacaccggucacuucaag

SEQ ID NO: 62533 - RNA, 19 nt, Homo sapiens
  misc_RNA (1)...(19): siRNA sense strand
ggaaauaccagaucuuugc

SEQ ID NO: 62534 - RNA, 19 nt, Homo sapiens
  misc_RNA (1)...(19): siRNA sense strand
ugacagccaugcccucuau

SEQ ID NO: 62535 - RNA, 19 nt, Homo sapiens
  misc_RNA (1)...(19): siRNA sense strand
caacuuggacuggauguuu

SEQ ID NO: 62536 - RNA, 19 nt, Homo sapiens
  misc_RNA (1)...(19): siRNA sense strand
gacgacccauccugugaua

SEQ ID NO: 62537 - RNA, 19 nt, Homo sapiens
  misc_RNA (1)...(19): siRNA sense strand
gaugggauccugcuauaug

SEQ ID NO: 62538 - RNA, 19 nt, Homo sapiens
  misc_RNA (1)...(19): siRNA sense strand
caccagaaauugcucguau

SEQ ID NO: 62539 - RNA, 19 nt, Homo sapiens
  misc_RNA (1)...(19): siRNA sense strand
gcagugguccuuucuacuu

SEQ ID NO: 62540 - RNA, 19 nt, Homo sapiens
  misc_RNA (1)...(19): siRNA sense strand
gacuggauguuucguuauu

SEQ ID NO: 62541 - RNA, 19 nt, Homo sapiens
  misc_RNA (1)...(19): siRNA sense strand
uaacugggcugguugucau

SEQ ID NO: 62542 - RNA, 19 nt, Homo sapiens
  misc_RNA (1)...(19): siRNA sense strand
ggaaagaugcgaacauacu

SEQ ID NO: 62543 - RNA, 19 nt, Homo sapiens
  misc_RNA (1)...(19): siRNA sense strand
ccaacugaaugaagagcua

SEQ ID NO: 62544 - RNA, 19 nt, Homo sapiens
  misc_RNA (1)...(19): siRNA sense strand
gaaggcgccugcucugagu

SEQ ID NO: 62545 - RNA, 19 nt, Homo sapiens
  misc_RNA (1)...(19): siRNA sense strand
agaaggagcuggcuagcau

SEQ ID NO: 62546 - RNA, 19 nt, Homo sapiens
  misc_RNA (1)...(19): siRNA sense strand
ugccauaauugacaacuuu

SEQ ID NO: 62547 - RNA, 19 nt, Homo sapiens
  misc_RNA (1)...(19): siRNA sense strand
gcgaacauacuggcucuua

SEQ ID NO: 62548 - RNA, 19 nt, Homo sapiens
  misc_RNA (1)...(19): siRNA sense strand
ccaaggaugcccuagauga

SEQ ID NO: 62549 - RNA, 19 nt, Homo sapiens
  misc_RNA (1)...(19): siRNA sense strand
cgugggaguuuacaggaua

SEQ ID NO: 62550 - RNA, 19 nt, Homo sapiens
  misc_RNA (1)...(19): siRNA sense strand
uggacuggauguuucguua

SEQ ID NO: 62551 - RNA, 19 nt, Homo sapiens
  misc_RNA (1)...(19): siRNA sense strand
acgaagauaucacggugua

SEQ ID NO: 62552 - RNA, 19 nt, Homo sapiens
  misc_RNA (1)...(19): siRNA sense strand
cuacuucagugacauuguu

SEQ ID NO: 62553 - RNA, 19 nt, Homo sapiens
  misc_RNA (1)...(19): siRNA sense strand
ccaucaaacaugugaauaa

SEQ ID NO: 62554 - RNA, 19 nt, Homo sapiens
  misc_RNA (1)...(19): siRNA sense strand
ugacagcccaugggaaaua

SEQ ID NO: 62555 - RNA, 19 nt, Homo sapiens
  misc_RNA (1)...(19): siRNA sense strand
gcauagacccucccaacau

SEQ ID NO: 62556 - RNA, 19 nt, Homo sapiens
  misc_RNA (1)...(19): siRNA sense strand
caucaaacaugugaauaag

SEQ ID NO: 62557 - RNA, 19 nt, Homo sapiens
  misc_RNA (1)...(19): siRNA sense strand
caaagagauuguccagaag

SEQ ID NO: 62558 - RNA, 19 nt, Homo sapiens
  misc_RNA (1)...(19): siRNA sense strand
ggauggacuucgaauugug

SEQ ID NO: 62559 - RNA, 19 nt, Homo sapiens
  misc_RNA (1)...(19): siRNA sense strand
gaaucaccuucaucauguu

SEQ ID NO: 62560 - RNA, 19 nt, Homo sapiens
  misc_RNA (1)...(19): siRNA sense strand
gagaggccuuucagacugu

SEQ ID NO: 62561 - RNA, 19 nt, Homo sapiens
  misc_RNA (1)...(19): siRNA sense strand
gaaagaugcgaacauacug

SEQ ID NO: 62562 - RNA, 19 nt, Homo sapiens
  misc_RNA (1)...(19): siRNA sense strand
caccaaggaugcccuagau

SEQ ID NO: 62563 - RNA, 19 nt, Homo sapiens
  misc_RNA (1)...(19): siRNA sense strand
ucguauggcccuagcauua

SEQ ID NO: 62564 - RNA, 19 nt, Homo sapiens
  misc_RNA (1)...(19): siRNA sense strand
ggaacaguaugccaauaac

SEQ ID NO: 62565 - RNA, 19 nt, Homo sapiens
  misc_RNA (1)...(19): siRNA sense strand
gaacaaugaccgagagacu

SEQ ID NO: 62566 - RNA, 19 nt, Homo sapiens
  misc_RNA (1)...(19): siRNA sense strand
gcugaaguccugaaugaga

SEQ ID NO: 62567 - RNA, 19 nt, Homo sapiens
  misc_RNA (1)...(19): siRNA sense strand
ccaucucacucgcuucauu

SEQ ID NO: 62568 - RNA, 19 nt, Homo sapiens
  misc_RNA (1)...(19): siRNA sense strand
gcuaggaugcuuccagcua

SEQ ID NO: 62569 - RNA, 19 nt, Homo sapiens
  misc_RNA (1)...(19): siRNA sense strand
gcaccagcauauuggacaa

SEQ ID NO: 62570 - RNA, 19 nt, Homo sapiens
  misc_RNA (1)...(19): siRNA sense strand
ugaccggccucacuacuuc

SEQ ID NO: 62571 - RNA, 19 nt, Homo sapiens
  misc_RNA (1)...(19): siRNA sense strand
gaacauacuggcucuuagg

SEQ ID NO: 62572 - RNA, 19 nt, Homo sapiens
  misc_RNA (1)...(19): siRNA sense strand
gcugacgucuauagcuuug

SEQ ID NO: 62573 - RNA, 19 nt, Homo sapiens
  misc_RNA (1)...(19): siRNA sense strand
cgacccauccugugauaaa

SEQ ID NO: 62574 - RNA, 19 nt, Homo sapiens
  misc_RNA (1)...(19): siRNA sense strand
gaagcucugcucuaccaaa

SEQ ID NO: 62575 - RNA, 19 nt, Homo sapiens
  misc_RNA (1)...(19): siRNA sense strand
ggacuucgaauuguggaaa

SEQ ID NO: 62576 - RNA, 19 nt, Homo sapiens
  misc_RNA (1)...(19): siRNA sense strand
cugcuuugaugccauaauu

SEQ ID NO: 62577 - RNA, 19 nt, Homo sapiens
  misc_RNA (1)...(19): siRNA sense strand
augcugaaguccugaauga

SEQ ID NO: 62578 - RNA, 19 nt, Homo sapiens
  misc_RNA (1)...(19): siRNA sense strand
uagaugagcuaggaugcuu

SEQ ID NO: 62579 - RNA, 19 nt, Homo sapiens
  misc_RNA (1)...(19): siRNA sense strand
cuguauaccugcuuugaug

SEQ ID NO: 62580 - RNA, 19 nt, Homo sapiens
  misc_RNA (1)...(19): siRNA sense strand
gaaugagacaauacaggaa

SEQ ID NO: 62581 - RNA, 19 nt, Homo sapiens
  misc_RNA (1)...(19): siRNA sense strand
gcuggcugcuucuaugaug

SEQ ID NO: 62582 - RNA, 19 nt, Homo sapiens
  misc_RNA (1)...(19): siRNA sense strand
ugacauuguuggcuucaca

SEQ ID NO: 62583 - RNA, 19 nt, Homo sapiens
  misc_RNA (1)...(19): siRNA sense strand
gccagacuuuggacagauu

SEQ ID NO: 62584 - RNA, 19 nt, Homo sapiens
  misc_RNA (1)...(19): siRNA sense strand
gucuauagcuuugggauca

SEQ ID NO: 62585 - RNA, 19 nt, Homo sapiens
  misc_RNA (1)...(19): siRNA sense strand
ccaacugugugguggauag

SEQ ID NO: 62586 - RNA, 19 nt, Homo sapiens
  misc_RNA (1)...(19): siRNA sense strand
uaccagaucuuugccaaca

SEQ ID NO: 62587 - RNA, 19 nt, Homo sapiens
  misc_RNA (1)...(19): siRNA sense strand
gaaaugaagggaaaaggaa

SEQ ID NO: 62588 - RNA, 19 nt, Homo sapiens
  misc_RNA (1)...(19): siRNA sense strand
gcuuugaugccauaauuga

SEQ ID NO: 62589 - RNA, 19 nt, Homo sapiens
  misc_RNA (1)...(19): siRNA sense strand
ugaccuguauaccugcuuu

SEQ ID NO: 62590 - RNA, 19 nt, Homo sapiens
  misc_RNA (1)...(19): siRNA sense strand
ccacaacagcauuauuuca

SEQ ID NO: 62591 - RNA, 19 nt, Homo sapiens
  misc_RNA (1)...(19): siRNA sense strand
acauuugcauugucacuga

SEQ ID NO: 62592 - RNA, 19 nt, Homo sapiens
  misc_RNA (1)...(19): siRNA sense strand
ugaauaagaagcgcauuga

SEQ ID NO: 62593 - RNA, 19 nt, Homo sapiens
  misc_RNA (1)...(19): siRNA sense strand
ggaggauggacuucgaauu

SEQ ID NO: 62594 - RNA, 19 nt, Homo sapiens
  misc_RNA (1)...(19): siRNA sense strand
agaugcaguuucuuccuuu

SEQ ID NO: 62595 - RNA, 19 nt, Homo sapiens
  misc_RNA (1)...(19): siRNA sense strand
uagaugcaguuucuuccuu

SEQ ID NO: 62596 - RNA, 19 nt, Homo sapiens
  misc_RNA (1)...(19): siRNA sense strand
cagaugaccggccucacua

SEQ ID NO: 62597 - RNA, 19 nt, Homo sapiens
  misc_RNA (1)...(19): siRNA sense strand
gaguuuacaggauauucua

SEQ ID NO: 62598 - RNA, 19 nt, Homo sapiens
  misc_RNA (1)...(19): siRNA sense strand
uuucaacccuggcaauugu

SEQ ID NO: 62599 - RNA, 19 nt, Homo sapiens
  misc_RNA (1)...(19): siRNA sense strand
gaagauaucacgguguaac

SEQ ID NO: 62600 - RNA, 19 nt, Homo sapiens
  misc_RNA (1)...(19): siRNA sense strand
gaagaugccccguuauugu

SEQ ID NO: 62601 - RNA, 19 nt, Homo sapiens
  misc_RNA (1)...(19): siRNA sense strand
cagcugaggcuacgcauag

SEQ ID NO: 62602 - RNA, 19 nt, Homo sapiens
  misc_RNA (1)...(19): siRNA sense strand
ucaacgccaugcaccagaa

SEQ ID NO: 62603 - RNA, 19 nt, Homo sapiens
  misc_RNA (1)...(19): siRNA sense strand
uggaacaguaugccaauaa

SEQ ID NO: 62604 - RNA, 19 nt, Homo sapiens
  misc_RNA (1)...(19): siRNA sense strand
gaccggacccaacugaaug

SEQ ID NO: 62605 - RNA, 19 nt, Homo sapiens
  misc_RNA (1)...(19): siRNA sense strand
ugauaaaacuccacuuuca

SEQ ID NO: 62606 - RNA, 19 nt, Homo sapiens
  misc_RNA (1)...(19): siRNA sense strand
agaaucgucugcugauaag

SEQ ID NO: 62607 - RNA, 19 nt, Homo sapiens
  misc_RNA (1)...(19): siRNA sense strand
augaugggauccugcuaua

SEQ ID NO: 62608 - RNA, 19 nt, Homo sapiens
  misc_RNA (1)...(19): siRNA sense strand
gcauggccuuucuccacaa

SEQ ID NO: 62609 - RNA, 19 nt, Homo sapiens
  misc_RNA (1)...(19): siRNA sense strand
cgaacauacuggcucuuag

SEQ ID NO: 62610 - RNA, 19 nt, Homo sapiens
  misc_RNA (1)...(19): siRNA sense strand
gucaagcgcugaagaucca

SEQ ID NO: 62611 - RNA, 19 nt, Homo sapiens
  misc_RNA (1)...(19): siRNA sense strand
gaaugaagagcuaguuuug

SEQ ID NO: 62612 - RNA, 19 nt, Homo sapiens
  misc_RNA (1)...(19): siRNA sense strand
acaacagcauuauuucauc

SEQ ID NO: 62613 - RNA, 19 nt, Homo sapiens
  misc_RNA (1)...(19): siRNA sense strand
cggaagagcugggcugcuu

SEQ ID NO: 62614 - RNA, 19 nt, Homo sapiens
  misc_RNA (1)...(19): siRNA sense strand
gaccuccgccugcuacauc

SEQ ID NO: 62615 - RNA, 19 nt, Homo sapiens
  misc_RNA (1)...(19): siRNA sense strand
ccugcuacauccagaacug

SEQ ID NO: 62616 - RNA, 19 nt, Homo sapiens
  misc_RNA (1)...(19): siRNA sense strand
gcugccaggaggagaacua

SEQ ID NO: 62617 - RNA, 19 nt, Homo sapiens
  misc_RNA (1)...(19): siRNA sense strand
gagcaacucguccuccuuu

SEQ ID NO: 62618 - RNA, 19 nt, Homo sapiens
  misc_RNA (1)...(19): siRNA sense strand
ggaucacgcuagcugucua

SEQ ID NO: 62619 - RNA, 19 nt, Homo sapiens
  misc_RNA (1)...(19): siRNA sense strand
gcgucaagcucaucuccaa

SEQ ID NO: 62620 - RNA, 19 nt, Homo sapiens
  misc_RNA (1)...(19): siRNA sense strand
gcuacggccuuaucagcuu

SEQ ID NO: 62621 - RNA, 19 nt, Homo sapiens
  misc_RNA (1)...(19): siRNA sense strand
cuuaucagcuucaagaucu

SEQ ID NO: 62622 - RNA, 19 nt, Homo sapiens
  misc_RNA (1)...(19): siRNA sense strand
gacaucaccuuccgcuucu

SEQ ID NO: 62623 - RNA, 19 nt, Homo sapiens
  misc_RNA (1)...(19): siRNA sense strand
cacgcuagcugucuacauc

SEQ ID NO: 62624 - RNA, 19 nt, Homo sapiens
  misc_RNA (1)...(19): siRNA sense strand
ggccuuaucagcuucaaga

SEQ ID NO: 62625 - RNA, 19 nt, Homo sapiens
  misc_RNA (1)...(19): siRNA sense strand
gcuggacgccuuucuucuu

SEQ ID NO: 62626 - RNA, 19 nt, Homo sapiens
  misc_RNA (1)...(19): siRNA sense strand
gcaacucguccuccuuugu

SEQ ID NO: 62627 - RNA, 19 nt, Homo sapiens
  misc_RNA (1)...(19): siRNA sense strand
gcacucgcgccucuucuuc

SEQ ID NO: 62628 - RNA, 19 nt, Homo sapiens
  misc_RNA (1)...(19): siRNA sense strand
gagagacgagugccagcaa

SEQ ID NO: 62629 - RNA, 19 nt, Homo sapiens
  misc_RNA (1)...(19): siRNA sense strand
agagacgagugccagcaaa

SEQ ID NO: 62630 - RNA, 19 nt, Homo sapiens
  misc_RNA (1)...(19): siRNA sense strand
gauccgcacggucaagaug

SEQ ID NO: 62631 - RNA, 19 nt, Homo sapiens
  misc_RNA (1)...(19): siRNA sense strand
caacucguccuccuuuguc

SEQ ID NO: 62632 - RNA, 19 nt, Homo sapiens
  misc_RNA (1)...(19): siRNA sense strand
gcaccacacgccagaagca

SEQ ID NO: 62633 - RNA, 19 nt, Homo sapiens
  misc_RNA (1)...(19): siRNA sense strand
gcagguggugggcauguuc

SEQ ID NO: 62634 - RNA, 19 nt, Homo sapiens
  misc_RNA (1)...(19): siRNA sense strand
ggacccaaggccuacauca

SEQ ID NO: 62635 - RNA, 19 nt, Homo sapiens
  misc_RNA (1)...(19): siRNA sense strand
ugugccgccuggucaagua

SEQ ID NO: 62636 - RNA, 19 nt, Homo sapiens
  misc_RNA (1)...(19): siRNA sense strand
ggacgccuuucuucuucgu

SEQ ID NO: 62637 - RNA, 19 nt, Homo sapiens
  misc_RNA (1)...(19): siRNA sense strand
cuggacgccuuucuucuuc

SEQ ID NO: 62638 - RNA, 19 nt, Homo sapiens
  misc_RNA (1)...(19): siRNA sense strand
cgccucuucuucuucauga

SEQ ID NO: 62639 - RNA, 19 nt, Homo sapiens
  misc_RNA (1)...(19): siRNA sense strand
ggaucuacaugcuguucac

SEQ ID NO: 62640 - RNA, 19 nt, Homo sapiens
  misc_RNA (1)...(19): siRNA sense strand
ucgcgccucuucuucuuca

SEQ ID NO: 62641 - RNA, 19 nt, Homo sapiens
  misc_RNA (1)...(19): siRNA sense strand
guucacgggccaccucuuc

SEQ ID NO: 62642 - RNA, 19 nt, Homo sapiens
  misc_RNA (1)...(19): siRNA sense strand
gcauguucgccuccaccua

SEQ ID NO: 62643 - RNA, 19 nt, Homo sapiens
  misc_RNA (1)...(19): siRNA sense strand
gugcuggacgccuuucuuc

SEQ ID NO: 62644 - RNA, 19 nt, Homo sapiens
  misc_RNA (1)...(19): siRNA sense strand
cgccgcaggugcacaucuu

SEQ ID NO: 62645 - RNA, 19 nt, Homo sapiens
  misc_RNA (1)...(19): siRNA sense strand
gaaggaaccuguacagaua

SEQ ID NO: 62646 - RNA, 19 nt, Homo sapiens
  misc_RNA (1)...(19): siRNA sense strand
gaauguagcuccagauaug

SEQ ID NO: 62647 - RNA, 19 nt, Homo sapiens
  misc_RNA (1)...(19): siRNA sense strand
uaaagaaggcccuguauua

SEQ ID NO: 62648 - RNA, 19 nt, Homo sapiens
  misc_RNA (1)...(19): siRNA sense strand
ccacauggcuugaguauag

SEQ ID NO: 62649 - RNA, 19 nt, Homo sapiens
  misc_RNA (1)...(19): siRNA sense strand
gaaagaggaugauggaagu

SEQ ID NO: 62650 - RNA, 19 nt, Homo sapiens
  misc_RNA (1)...(19): siRNA sense strand
guaaguggauacagaguaa

SEQ ID NO: 62651 - RNA, 19 nt, Homo sapiens
  misc_RNA (1)...(19): siRNA sense strand
ccaagaaccuguacaagga

SEQ ID NO: 62652 - RNA, 19 nt, Homo sapiens
  misc_RNA (1)...(19): siRNA sense strand
gcuuaaaccuugguaauuu

SEQ ID NO: 62653 - RNA, 19 nt, Homo sapiens
  misc_RNA (1)...(19): siRNA sense strand
gaugaaaugugcaacuuau

SEQ ID NO: 62654 - RNA, 19 nt, Homo sapiens
  misc_RNA (1)...(19): siRNA sense strand
ugagagagauuaagcauuc

SEQ ID NO: 62655 - RNA, 19 nt, Homo sapiens
  misc_RNA (1)...(19): siRNA sense strand
gaacaucgaucaguuaaaa

SEQ ID NO: 62656 - RNA, 19 nt, Homo sapiens
  misc_RNA (1)...(19): siRNA sense strand
aaagggaaguggaggcuua

SEQ ID NO: 62657 - RNA, 19 nt, Homo sapiens
  misc_RNA (1)...(19): siRNA sense strand
gcauugagguccaggaaau

SEQ ID NO: 62658 - RNA, 19 nt, Homo sapiens
  misc_RNA (1)...(19): siRNA sense strand
gguaguaaguggauacaga

SEQ ID NO: 62659 - RNA, 19 nt, Homo sapiens
  misc_RNA (1)...(19): siRNA sense strand
agaagaagaagaaguguua

SEQ ID NO: 62660 - RNA, 19 nt, Homo sapiens
  misc_RNA (1)...(19): siRNA sense strand
caaacuggauccaaacaau

SEQ ID NO: 62661 - RNA, 19 nt, Homo sapiens
  misc_RNA (1)...(19): siRNA sense strand
gaaauuggaacaucgauca

SEQ ID NO: 62662 - RNA, 19 nt, Homo sapiens
  misc_RNA (1)...(19): siRNA sense strand
gacauuucaugccauuaua

SEQ ID NO: 62663 - RNA, 19 nt, Homo sapiens
  misc_RNA (1)...(19): siRNA sense strand
gcauguaccuuaugauguc

SEQ ID NO: 62664 - RNA, 19 nt, Homo sapiens
  misc_RNA (1)...(19): siRNA sense strand
ccacagaggugaccauguc

SEQ ID NO: 62665 - RNA, 19 nt, Homo sapiens
  misc_RNA (1)...(19): siRNA sense strand
gguguuggauucagaguug

SEQ ID NO: 62666 - RNA, 19 nt, Homo sapiens
  misc_RNA (1)...(19): siRNA sense strand
gaggagagacuggaaguaa

SEQ ID NO: 62667 - RNA, 19 nt, Homo sapiens
  misc_RNA (1)...(19): siRNA sense strand
guacagauaaagccaauau

SEQ ID NO: 62668 - RNA, 19 nt, Homo sapiens
  misc_RNA (1)...(19): siRNA sense strand
gacagaagccacacacauu

SEQ ID NO: 62669 - RNA, 19 nt, Homo sapiens
  misc_RNA (1)...(19): siRNA sense strand
cuaaacaguccgauacaua

SEQ ID NO: 62670 - RNA, 19 nt, Homo sapiens
  misc_RNA (1)...(19): siRNA sense strand
aaacugacaccaaagaauu

SEQ ID NO: 62671 - RNA, 19 nt, Homo sapiens
  misc_RNA (1)...(19): siRNA sense strand
aaagaaggcccuguauuaa

SEQ ID NO: 62672 - RNA, 19 nt, Homo sapiens
  misc_RNA (1)...(19): siRNA sense strand
ggauuggccuggaguauac

SEQ ID NO: 62673 - RNA, 19 nt, Homo sapiens
  misc_RNA (1)...(19): siRNA sense strand
caaagguguuggauucaga

SEQ ID NO: 62674 - RNA, 19 nt, Homo sapiens
  misc_RNA (1)...(19): siRNA sense strand
agaaggcccuguauuaauc

SEQ ID NO: 62675 - RNA, 19 nt, Homo sapiens
  misc_RNA (1)...(19): siRNA sense strand
ccauuuagguaagguagua

SEQ ID NO: 62676 - RNA, 19 nt, Homo sapiens
  misc_RNA (1)...(19): siRNA sense strand
ggauacagaguaagaaaug

SEQ ID NO: 62677 - RNA, 19 nt, Homo sapiens
  misc_RNA (1)...(19): siRNA sense strand
gcacuggagccauuuaugu

SEQ ID NO: 62678 - RNA, 19 nt, Homo sapiens
  misc_RNA (1)...(19): siRNA sense strand
agaauaaccuggugauuuu

SEQ ID NO: 62679 - RNA, 19 nt, Homo sapiens
  misc_RNA (1)...(19): siRNA sense strand
cguaagggcuacagucgaa

SEQ ID NO: 62680 - RNA, 19 nt, Homo sapiens
  misc_RNA (1)...(19): siRNA sense strand
ccucacagcuuggcucuug

SEQ ID NO: 62681 - RNA, 19 nt, Homo sapiens
  misc_RNA (1)...(19): siRNA sense strand
gcagugaccaagagaaaga

SEQ ID NO: 62682 - RNA, 19 nt, Homo sapiens
  misc_RNA (1)...(19): siRNA sense strand
cgugaagucugauaugguu

SEQ ID NO: 62683 - RNA, 19 nt, Homo sapiens
  misc_RNA (1)...(19): siRNA sense strand
ggaccaagaaccuguacaa

SEQ ID NO: 62684 - RNA, 19 nt, Homo sapiens
  misc_RNA (1)...(19): siRNA sense strand
gaauuugugagagagauua

SEQ ID NO: 62685 - RNA, 19 nt, Homo sapiens
  misc_RNA (1)...(19): siRNA sense strand
caauaaagaaggcccugua

SEQ ID NO: 62686 - RNA, 19 nt, Homo sapiens
  misc_RNA (1)...(19): siRNA sense strand
aagaauaaccuggugauuu

SEQ ID NO: 62687 - RNA, 19 nt, Homo sapiens
  misc_RNA (1)...(19): siRNA sense strand
ggagagacuggaaguaaau

SEQ ID NO: 62688 - RNA, 19 nt, Homo sapiens
  misc_RNA (1)...(19): siRNA sense strand
gauaagauuccuuuacuac

SEQ ID NO: 62689 - RNA, 19 nt, Homo sapiens
  misc_RNA (1)...(19): siRNA sense strand
ggacagaagccacacacau

SEQ ID NO: 62690 - RNA, 19 nt, Homo sapiens
  misc_RNA (1)...(19): siRNA sense strand
gaaacuaccagaccauuuu

SEQ ID NO: 62691 - RNA, 19 nt, Homo sapiens
  misc_RNA (1)...(19): siRNA sense strand
gcuggcauguaccuuauga

SEQ ID NO: 62692 - RNA, 19 nt, Homo sapiens
  misc_RNA (1)...(19): siRNA sense strand
caccuugacugagaaauug

SEQ ID NO: 62693 - RNA, 19 nt, Homo sapiens
  misc_RNA (1)...(19): siRNA sense strand
aaacuggauccaaacaaua

SEQ ID NO: 62694 - RNA, 19 nt, Homo sapiens
  misc_RNA (1)...(19): siRNA sense strand
ggaauuauugggucacaga

SEQ ID NO: 62695 - RNA, 19 nt, Homo sapiens
  misc_RNA (1)...(19): siRNA sense strand
gaaaugugcaacuuauaca

SEQ ID NO: 62696 - RNA, 19 nt, Homo sapiens
  misc_RNA (1)...(19): siRNA sense strand
gauaaagccaauauucugu

SEQ ID NO: 62697 - RNA, 19 nt, Homo sapiens
  misc_RNA (1)...(19): siRNA sense strand
gaagcccacuuucugucuu

SEQ ID NO: 62698 - RNA, 19 nt, Homo sapiens
  misc_RNA (1)...(19): siRNA sense strand
ggaaguucaccuugacuga

SEQ ID NO: 62699 - RNA, 19 nt, Homo sapiens
  misc_RNA (1)...(19): siRNA sense strand
uaagauuccuuuacuacag

SEQ ID NO: 62700 - RNA, 19 nt, Homo sapiens
  misc_RNA (1)...(19): siRNA sense strand
gcaugucuuugccuauaga

SEQ ID NO: 62701 - RNA, 19 nt, Homo sapiens
  misc_RNA (1)...(19): siRNA sense strand
guggaaaguucaucacaca

SEQ ID NO: 62702 - RNA, 19 nt, Homo sapiens
  misc_RNA (1)...(19): siRNA sense strand
cagaauguagcuccagaua

SEQ ID NO: 62703 - RNA, 19 nt, Homo sapiens
  misc_RNA (1)...(19): siRNA sense strand
gagccagcauggauacugu

SEQ ID NO: 62704 - RNA, 19 nt, Homo sapiens
  misc_RNA (1)...(19): siRNA sense strand
ugaaggaaccuguacagau

SEQ ID NO: 62705 - RNA, 19 nt, Homo sapiens
  misc_RNA (1)...(19): siRNA sense strand
cagcaggauugugcaguuu

SEQ ID NO: 62706 - RNA, 19 nt, Homo sapiens
  misc_RNA (1)...(19): siRNA sense strand
caaguuuguuuaccagcaa

SEQ ID NO: 62707 - RNA, 19 nt, Homo sapiens
  misc_RNA (1)...(19): siRNA sense strand
caauucccgugaagucuga

SEQ ID NO: 62708 - RNA, 19 nt, Homo sapiens
  misc_RNA (1)...(19): siRNA sense strand
gcacgucuagugaugaaau

SEQ ID NO: 62709 - RNA, 19 nt, Homo sapiens
  misc_RNA (1)...(19): siRNA sense strand
gggcagugaccaagagaaa

SEQ ID NO: 62710 - RNA, 19 nt, Homo sapiens
  misc_RNA (1)...(19): siRNA sense strand
gcauucaucauuuggaaga

SEQ ID NO: 62711 - RNA, 19 nt, Homo sapiens
  misc_RNA (1)...(19): siRNA sense strand
ggaaaguucaucacacagu

SEQ ID NO: 62712 - RNA, 19 nt, Homo sapiens
  misc_RNA (1)...(19): siRNA sense strand
ccaagcaugcaguuucuuu

SEQ ID NO: 62713 - RNA, 19 nt, Homo sapiens
  misc_RNA (1)...(19): siRNA sense strand
gugaugaaaugugcaacuu

SEQ ID NO: 62714 - RNA, 19 nt, Homo sapiens
  misc_RNA (1)...(19): siRNA sense strand
guccaucacauguuacuuu

SEQ ID NO: 62715 - RNA, 19 nt, Homo sapiens
  misc_RNA (1)...(19): siRNA sense strand
auaccaggcuugcucuuug

SEQ ID NO: 62716 - RNA, 19 nt, Homo sapiens
  misc_RNA (1)...(19): siRNA sense strand
ccuacuggcugcaagaugu

SEQ ID NO: 62717 - RNA, 19 nt, Homo sapiens
  misc_RNA (1)...(19): siRNA sense strand
uacuguccaucacauguua

SEQ ID NO: 62718 - RNA, 19 nt, Homo sapiens
  misc_RNA (1)...(19): siRNA sense strand
gcgcaagcacuuugauaug

SEQ ID NO: 62719 - RNA, 19 nt, Homo sapiens
  misc_RNA (1)...(19): siRNA sense strand
gcuugaguauagauaaaga

SEQ ID NO: 62720 - RNA, 19 nt, Homo sapiens
  misc_RNA (1)...(19): siRNA sense strand
aaauaaugcugcaguacuc

SEQ ID NO: 62721 - RNA, 19 nt, Homo sapiens
  misc_RNA (1)...(19): siRNA sense strand
gcugcaagauguguauuca

SEQ ID NO: 62722 - RNA, 19 nt, Homo sapiens
  misc_RNA (1)...(19): siRNA sense strand
guaagguaguaaguggaua

SEQ ID NO: 62723 - RNA, 19 nt, Homo sapiens
  misc_RNA (1)...(19): siRNA sense strand
acagauaaagccaauauuc

SEQ ID NO: 62724 - RNA, 19 nt, Homo sapiens
  misc_RNA (1)...(19): siRNA sense strand
guggugaauucugacauuu

SEQ ID NO: 62725 - RNA, 19 nt, Homo sapiens
  misc_RNA (1)...(19): siRNA sense strand
gagaagaagaagaaguguu

SEQ ID NO: 62726 - RNA, 19 nt, Homo sapiens
  misc_RNA (1)...(19): siRNA sense strand
acacucaccauuuagguaa

SEQ ID NO: 62727 - RNA, 19 nt, Homo sapiens
  misc_RNA (1)...(19): siRNA sense strand
aggagagacuggaaguaaa

SEQ ID NO: 62728 - RNA, 19 nt, Homo sapiens
  misc_RNA (1)...(19): siRNA sense strand
gugaugaacuuuuccaaug

SEQ ID NO: 62729 - RNA, 19 nt, Homo sapiens
  misc_RNA (1)...(19): siRNA sense strand
aagcauucaucauuuggaa

SEQ ID NO: 62730 - RNA, 19 nt, Homo sapiens
  misc_RNA (1)...(19): siRNA sense strand
gaagucugauaugguuaug

SEQ ID NO: 62731 - RNA, 19 nt, Homo sapiens
  misc_RNA (1)...(19): siRNA sense strand
gguggcacgucuagugaug

SEQ ID NO: 62732 - RNA, 19 nt, Homo sapiens
  misc_RNA (1)...(19): siRNA sense strand
ugacauuucaugccauuau

SEQ ID NO: 62733 - RNA, 19 nt, Homo sapiens
  misc_RNA (1)...(19): siRNA sense strand
gagagacuggaaguaaaua

SEQ ID NO: 62734 - RNA, 19 nt, Homo sapiens
  misc_RNA (1)...(19): siRNA sense strand
cacuggaaguuacugguuu

SEQ ID NO: 62735 - RNA, 19 nt, Homo sapiens
  misc_RNA (1)...(19): siRNA sense strand
ggucggauccaguguuuua

SEQ ID NO: 62736 - RNA, 19 nt, Homo sapiens
  misc_RNA (1)...(19): siRNA sense strand
ggacucggaccaauugaag

SEQ ID NO: 62737 - RNA, 19 nt, Homo sapiens
  misc_RNA (1)...(19): siRNA sense strand
ugaugaaaugugcaacuua

SEQ ID NO: 62738 - RNA, 19 nt, Homo sapiens
  misc_RNA (1)...(19): siRNA sense strand
aguucacacucaccauuua

SEQ ID NO: 62739 - RNA, 19 nt, Homo sapiens
  misc_RNA (1)...(19): siRNA sense strand
uuugauaugccucaugaua

SEQ ID NO: 62740 - RNA, 19 nt, Homo sapiens
  misc_RNA (1)...(19): siRNA sense strand
ggaaguuacugguuuugug

SEQ ID NO: 62741 - RNA, 19 nt, Homo sapiens
  misc_RNA (1)...(19): siRNA sense strand
uggcuugaguauagauaaa

SEQ ID NO: 62742 - RNA, 19 nt, Homo sapiens
  misc_RNA (1)...(19): siRNA sense strand
guguggaaguucaccuuga

SEQ ID NO: 62743 - RNA, 19 nt, Homo sapiens
  misc_RNA (1)...(19): siRNA sense strand
aaucagaagaggaguauuc

SEQ ID NO: 62744 - RNA, 19 nt, Homo sapiens
  misc_RNA (1)...(19): siRNA sense strand
ucaccuugacugagaaauu

SEQ ID NO: 62745 - RNA, 19 nt, Homo sapiens
  misc_RNA (1)...(19): siRNA sense strand
gaaggaaccuguacagaua

SEQ ID NO: 62746 - RNA, 19 nt, Homo sapiens
  misc_RNA (1)...(19): siRNA sense strand
gaauguagcuccagauaug

SEQ ID NO: 62747 - RNA, 19 nt, Homo sapiens
  misc_RNA (1)...(19): siRNA sense strand
uaaagaaggcccuguauua

SEQ ID NO: 62748 - RNA, 19 nt, Homo sapiens
  misc_RNA (1)...(19): siRNA sense strand
ccacauggcuugaguauag

SEQ ID NO: 62749 - RNA, 19 nt, Homo sapiens
  misc_RNA (1)...(19): siRNA sense strand
gaaagaggaugauggaagu

SEQ ID NO: 62750 - RNA, 19 nt, Homo sapiens
  misc_RNA (1)...(19): siRNA sense strand
guaaguggauacagaguaa

SEQ ID NO: 62751 - RNA, 19 nt, Homo sapiens
  misc_RNA (1)...(19): siRNA sense strand
ccaagaaccuguacaagga

SEQ ID NO: 62752 - RNA, 19 nt, Homo sapiens
  misc_RNA (1)...(19): siRNA sense strand
gcuuaaaccuugguaauuu

SEQ ID NO: 62753 - RNA, 19 nt, Homo sapiens
  misc_RNA (1)...(19): siRNA sense strand
gaugaaaugugcaacuuau

SEQ ID NO: 62754 - RNA, 19 nt, Homo sapiens
  misc_RNA (1)...(19): siRNA sense strand
ugagagagauuaagcauuc

SEQ ID NO: 62755 - RNA, 19 nt, Homo sapiens
  misc_RNA (1)...(19): siRNA sense strand
gaacaucgaucaguuaaaa

SEQ ID NO: 62756 - RNA, 19 nt, Homo sapiens
  misc_RNA (1)...(19): siRNA sense strand
aaagggaaguggaggcuua

SEQ ID NO: 62757 - RNA, 19 nt, Homo sapiens
  misc_RNA (1)...(19): siRNA sense strand
gcauugagguccaggaaau

SEQ ID NO: 62758 - RNA, 19 nt, Homo sapiens
  misc_RNA (1)...(19): siRNA sense strand
gguaguaaguggauacaga

SEQ ID NO: 62759 - RNA, 19 nt, Homo sapiens
  misc_RNA (1)...(19): siRNA sense strand
agaagaagaagaaguguua

SEQ ID NO: 62760 - RNA, 19 nt, Homo sapiens
  misc_RNA (1)...(19): siRNA sense strand
caaacuggauccaaacaau

SEQ ID NO: 62761 - RNA, 19 nt, Homo sapiens
  misc_RNA (1)...(19): siRNA sense strand
gaaauuggaacaucgauca

SEQ ID NO: 62762 - RNA, 19 nt, Homo sapiens
  misc_RNA (1)...(19): siRNA sense strand
gacauuucaugccauuaua

SEQ ID NO: 62763 - RNA, 19 nt, Homo sapiens
  misc_RNA (1)...(19): siRNA sense strand
gcauguaccuuaugauguc

SEQ ID NO: 62764 - RNA, 19 nt, Homo sapiens
  misc_RNA (1)...(19): siRNA sense strand
ccacagaggugaccauguc

SEQ ID NO: 62765 - RNA, 19 nt, Homo sapiens
  misc_RNA (1)...(19): siRNA sense strand
gguguuggauucagaguug

SEQ ID NO: 62766 - RNA, 19 nt, Homo sapiens
  misc_RNA (1)...(19): siRNA sense strand
gaggagagacuggaaguaa

SEQ ID NO: 62767 - RNA, 19 nt, Homo sapiens
  misc_RNA (1)...(19): siRNA sense strand
guacagauaaagccaauau

SEQ ID NO: 62768 - RNA, 19 nt, Homo sapiens
  misc_RNA (1)...(19): siRNA sense strand
gacagaagccacacacauu

SEQ ID NO: 62769 - RNA, 19 nt, Homo sapiens
  misc_RNA (1)...(19): siRNA sense strand
cuaaacaguccgauacaua

SEQ ID NO: 62770 - RNA, 19 nt, Homo sapiens
  misc_RNA (1)...(19): siRNA sense strand
aaacugacaccaaagaauu

SEQ ID NO: 62771 - RNA, 19 nt, Homo sapiens
  misc_RNA (1)...(19): siRNA sense strand
aaagaaggcccuguauuaa

SEQ ID NO: 62772 - RNA, 19 nt, Homo sapiens
  misc_RNA (1)...(19): siRNA sense strand
ggauuggccuggaguauac

SEQ ID NO: 62773 - RNA, 19 nt, Homo sapiens
  misc_RNA (1)...(19): siRNA sense strand
caaagguguuggauucaga

SEQ ID NO: 62774 - RNA, 19 nt, Homo sapiens
  misc_RNA (1)...(19): siRNA sense strand
agaaggcccuguauuaauc

SEQ ID NO: 62775 - RNA, 19 nt, Homo sapiens
  misc_RNA (1)...(19): siRNA sense strand
ccauuuagguaagguagua

SEQ ID NO: 62776 - RNA, 19 nt, Homo sapiens
  misc_RNA (1)...(19): siRNA sense strand
ggauacagaguaagaaaug

SEQ ID NO: 62777 - RNA, 19 nt, Homo sapiens
  misc_RNA (1)...(19): siRNA sense strand
gcacuggagccauuuaugu

SEQ ID NO: 62778 - RNA, 19 nt, Homo sapiens
  misc_RNA (1)...(19): siRNA sense strand
agaauaaccuggugauuuu

SEQ ID NO: 62779 - RNA, 19 nt, Homo sapiens
  misc_RNA (1)...(19): siRNA sense strand
cguaagggcuacagucgaa

SEQ ID NO: 62780 - RNA, 19 nt, Homo sapiens
  misc_RNA (1)...(19): siRNA sense strand
ccucacagcuuggcucuug

SEQ ID NO: 62781 - RNA, 19 nt, Homo sapiens
  misc_RNA (1)...(19): siRNA sense strand
gcagugaccaagagaaaga

SEQ ID NO: 62782 - RNA, 19 nt, Homo sapiens
  misc_RNA (1)...(19): siRNA sense strand
cgugaagucugauaugguu

SEQ ID NO: 62783 - RNA, 19 nt, Homo sapiens
  misc_RNA (1)...(19): siRNA sense strand
ggaccaagaaccuguacaa

SEQ ID NO: 62784 - RNA, 19 nt, Homo sapiens
  misc_RNA (1)...(19): siRNA sense strand
gaauuugugagagagauua

SEQ ID NO: 62785 - RNA, 19 nt, Homo sapiens
  misc_RNA (1)...(19): siRNA sense strand
caauaaagaaggcccugua

SEQ ID NO: 62786 - RNA, 19 nt, Homo sapiens
  misc_RNA (1)...(19): siRNA sense strand
aagaauaaccuggugauuu

SEQ ID NO: 62787 - RNA, 19 nt, Homo sapiens
  misc_RNA (1)...(19): siRNA sense strand
ggagagacuggaaguaaau

SEQ ID NO: 62788 - RNA, 19 nt, Homo sapiens
  misc_RNA (1)...(19): siRNA sense strand
gauaagauuccuuuacuac

SEQ ID NO: 62789 - RNA, 19 nt, Homo sapiens
  misc_RNA (1)...(19): siRNA sense strand
ggacagaagccacacacau

SEQ ID NO: 62790 - RNA, 19 nt, Homo sapiens
  misc_RNA (1)...(19): siRNA sense strand
gaaacuaccagaccauuuu

SEQ ID NO: 62791 - RNA, 19 nt, Homo sapiens
  misc_RNA (1)...(19): siRNA sense strand
gcuggcauguaccuuauga

SEQ ID NO: 62792 - RNA, 19 nt, Homo sapiens
  misc_RNA (1)...(19): siRNA sense strand
caccuugacugagaaauug

SEQ ID NO: 62793 - RNA, 19 nt, Homo sapiens
  misc_RNA (1)...(19): siRNA sense strand
aaacuggauccaaacaaua

SEQ ID NO: 62794 - RNA, 19 nt, Homo sapiens
  misc_RNA (1)...(19): siRNA sense strand
ggaauuauugggucacaga

SEQ ID NO: 62795 - RNA, 19 nt, Homo sapiens
  misc_RNA (1)...(19): siRNA sense strand
gaaaugugcaacuuauaca

SEQ ID NO: 62796 - RNA, 19 nt, Homo sapiens
  misc_RNA (1)...(19): siRNA sense strand
gauaaagccaauauucugu

SEQ ID NO: 62797 - RNA, 19 nt, Homo sapiens
  misc_RNA (1)...(19): siRNA sense strand
gaagcccacuuucugucuu

SEQ ID NO: 62798 - RNA, 19 nt, Homo sapiens
  misc_RNA (1)...(19): siRNA sense strand
ggaaguucaccuugacuga

SEQ ID NO: 62799 - RNA, 19 nt, Homo sapiens
  misc_RNA (1)...(19): siRNA sense strand
uaagauuccuuuacuacag

SEQ ID NO: 62800 - RNA, 19 nt, Homo sapiens
  misc_RNA (1)...(19): siRNA sense strand
gcaugucuuugccuauaga

SEQ ID NO: 62801 - RNA, 19 nt, Homo sapiens
  misc_RNA (1)...(19): siRNA sense strand
guggaaaguucaucacaca

SEQ ID NO: 62802 - RNA, 19 nt, Homo sapiens
  misc_RNA (1)...(19): siRNA sense strand
cagaauguagcuccagaua

SEQ ID NO: 62803 - RNA, 19 nt, Homo sapiens
  misc_RNA (1)...(19): siRNA sense strand
gagccagcauggauacugu

SEQ ID NO: 62804 - RNA, 19 nt, Homo sapiens
  misc_RNA (1)...(19): siRNA sense strand
ugaaggaaccuguacagau

SEQ ID NO: 62805 - RNA, 19 nt, Homo sapiens
  misc_RNA (1)...(19): siRNA sense strand
cagcaggauugugcaguuu

SEQ ID NO: 62806 - RNA, 19 nt, Homo sapiens
  misc_RNA (1)...(19): siRNA sense strand
caaguuuguuuaccagcaa

SEQ ID NO: 62807 - RNA, 19 nt, Homo sapiens
  misc_RNA (1)...(19): siRNA sense strand
caauucccgugaagucuga

SEQ ID NO: 62808 - RNA, 19 nt, Homo sapiens
  misc_RNA (1)...(19): siRNA sense strand
gcacgucuagugaugaaau

SEQ ID NO: 62809 - RNA, 19 nt, Homo sapiens
  misc_RNA (1)...(19): siRNA sense strand
gggcagugaccaagagaaa

SEQ ID NO: 62810 - RNA, 19 nt, Homo sapiens
  misc_RNA (1)...(19): siRNA sense strand
gcauucaucauuuggaaga

SEQ ID NO: 62811 - RNA, 19 nt, Homo sapiens
  misc_RNA (1)...(19): siRNA sense strand
ggaaaguucaucacacagu

SEQ ID NO: 62812 - RNA, 19 nt, Homo sapiens
  misc_RNA (1)...(19): siRNA sense strand
ccaagcaugcaguuucuuu

SEQ ID NO: 62813 - RNA, 19 nt, Homo sapiens
  misc_RNA (1)...(19): siRNA sense strand
gugaugaaaugugcaacuu

SEQ ID NO: 62814 - RNA, 19 nt, Homo sapiens
  misc_RNA (1)...(19): siRNA sense strand
guccaucacauguuacuuu

SEQ ID NO: 62815 - RNA, 19 nt, Homo sapiens
  misc_RNA (1)...(19): siRNA sense strand
auaccaggcuugcucuuug

SEQ ID NO: 62816 - RNA, 19 nt, Homo sapiens
  misc_RNA (1)...(19): siRNA sense strand
ccuacuggcugcaagaugu

SEQ ID NO: 62817 - RNA, 19 nt, Homo sapiens
  misc_RNA (1)...(19): siRNA sense strand
uacuguccaucacauguua

SEQ ID NO: 62818 - RNA, 19 nt, Homo sapiens
  misc_RNA (1)...(19): siRNA sense strand
gcgcaagcacuuugauaug

SEQ ID NO: 62819 - RNA, 19 nt, Homo sapiens
  misc_RNA (1)...(19): siRNA sense strand
gcuugaguauagauaaaga

SEQ ID NO: 62820 - RNA, 19 nt, Homo sapiens
  misc_RNA (1)...(19): siRNA sense strand
aaauaaugcugcaguacuc

SEQ ID NO: 62821 - RNA, 19 nt, Homo sapiens
  misc_RNA (1)...(19): siRNA sense strand
gcugcaagauguguauuca

SEQ ID NO: 62822 - RNA, 19 nt, Homo sapiens
  misc_RNA (1)...(19): siRNA sense strand
guaagguaguaaguggaua

SEQ ID NO: 62823 - RNA, 19 nt, Homo sapiens
  misc_RNA (1)...(19): siRNA sense strand
acagauaaagccaauauuc

SEQ ID NO: 62824 - RNA, 19 nt, Homo sapiens
  misc_RNA (1)...(19): siRNA sense strand
guggugaauucugacauuu

SEQ ID NO: 62825 - RNA, 19 nt, Homo sapiens
  misc_RNA (1)...(19): siRNA sense strand
gagaagaagaagaaguguu

SEQ ID NO: 62826 - RNA, 19 nt, Homo sapiens
  misc_RNA (1)...(19): siRNA sense strand
acacucaccauuuagguaa

SEQ ID NO: 62827 - RNA, 19 nt, Homo sapiens
  misc_RNA (1)...(19): siRNA sense strand
aggagagacuggaaguaaa

SEQ ID NO: 62828 - RNA, 19 nt, Homo sapiens
  misc_RNA (1)...(19): siRNA sense strand
gugaugaacuuuuccaaug

SEQ ID NO: 62829 - RNA, 19 nt, Homo sapiens
  misc_RNA (1)...(19): siRNA sense strand
aagcauucaucauuuggaa

SEQ ID NO: 62830 - RNA, 19 nt, Homo sapiens
  misc_RNA (1)...(19): siRNA sense strand
gaagucugauaugguuaug

SEQ ID NO: 62831 - RNA, 19 nt, Homo sapiens
  misc_RNA (1)...(19): siRNA sense strand
gguggcacgucuagugaug

SEQ ID NO: 62832 - RNA, 19 nt, Homo sapiens
  misc_RNA (1)...(19): siRNA sense strand
ugacauuucaugccauuau

SEQ ID NO: 62833 - RNA, 19 nt, Homo sapiens
  misc_RNA (1)...(19): siRNA sense strand
gagagacuggaaguaaaua

SEQ ID NO: 62834 - RNA, 19 nt, Homo sapiens
  misc_RNA (1)...(19): siRNA sense strand
cacuggaaguuacugguuu

SEQ ID NO: 62835 - RNA, 19 nt, Homo sapiens
  misc_RNA (1)...(19): siRNA sense strand
ggucggauccaguguuuua

SEQ ID NO: 62836 - RNA, 19 nt, Homo sapiens
  misc_RNA (1)...(19): siRNA sense strand
ggacucggaccaauugaag

SEQ ID NO: 62837 - RNA, 19 nt, Homo sapiens
  misc_RNA (1)...(19): siRNA sense strand
ugaugaaaugugcaacuua

SEQ ID NO: 62838 - RNA, 19 nt, Homo sapiens
  misc_RNA (1)...(19): siRNA sense strand
aguucacacucaccauuua

SEQ ID NO: 62839 - RNA, 19 nt, Homo sapiens
  misc_RNA (1)...(19): siRNA sense strand
uuugauaugccucaugaua

SEQ ID NO: 62840 - RNA, 19 nt, Homo sapiens
  misc_RNA (1)...(19): siRNA sense strand
ggaaguuacugguuuugug

SEQ ID NO: 62841 - RNA, 19 nt, Homo sapiens
  misc_RNA (1)...(19): siRNA sense strand
uggcuugaguauagauaaa

SEQ ID NO: 62842 - RNA, 19 nt, Homo sapiens
  misc_RNA (1)...(19): siRNA sense strand
guguggaaguucaccuuga

SEQ ID NO: 62843 - RNA, 19 nt, Homo sapiens
  misc_RNA (1)...(19): siRNA sense strand
aaucagaagaggaguauuc

SEQ ID NO: 62844 - RNA, 19 nt, Homo sapiens
  misc_RNA (1)...(19): siRNA sense strand
ucaccuugacugagaaauu

SEQ ID NO: 62845 - RNA, 19 nt, Homo sapiens
  misc_RNA (1)...(19): siRNA sense strand
gaaggaaccuguacagaua

SEQ ID NO: 62846 - RNA, 19 nt, Homo sapiens
  misc_RNA (1)...(19): siRNA sense strand
gaauguagcuccagauaug

SEQ ID NO: 62847 - RNA, 19 nt, Homo sapiens
  misc_RNA (1)...(19): siRNA sense strand
uaaagaaggcccuguauua

SEQ ID NO: 62848 - RNA, 19 nt, Homo sapiens
  misc_RNA (1)...(19): siRNA sense strand
ccacauggcuugaguauag

SEQ ID NO: 62849 - RNA, 19 nt, Homo sapiens
  misc_RNA (1)...(19): siRNA sense strand
gaaagaggaugauggaagu

SEQ ID NO: 62850 - RNA, 19 nt, Homo sapiens
  misc_RNA (1)...(19): siRNA sense strand
guaaguggauacagaguaa

SEQ ID NO: 62851 - RNA, 19 nt, Homo sapiens
  misc_RNA (1)...(19): siRNA sense strand
ccaagaaccuguacaagga

SEQ ID NO: 62852 - RNA, 19 nt, Homo sapiens
  misc_RNA (1)...(19): siRNA sense strand
gcuuaaaccuugguaauuu

SEQ ID NO: 62853 - RNA, 19 nt, Homo sapiens
  misc_RNA (1)...(19): siRNA sense strand
gaugaaaugugcaacuuau

SEQ ID NO: 62854 - RNA, 19 nt, Homo sapiens
  misc_RNA (1)...(19): siRNA sense strand
ugagagagauuaagcauuc

SEQ ID NO: 62855 - RNA, 19 nt, Homo sapiens
  misc_RNA (1)...(19): siRNA sense strand
gaacaucgaucaguuaaaa

SEQ ID NO: 62856 - RNA, 19 nt, Homo sapiens
  misc_RNA (1)...(19): siRNA sense strand
aaagggaaguggaggcuua

SEQ ID NO: 62857 - RNA, 19 nt, Homo sapiens
  misc_RNA (1)...(19): siRNA sense strand
gcauugagguccaggaaau

SEQ ID NO: 62858 - RNA, 19 nt, Homo sapiens
  misc_RNA (1)...(19): siRNA sense strand
gguaguaaguggauacaga

SEQ ID NO: 62859 - RNA, 19 nt, Homo sapiens
  misc_RNA (1)...(19): siRNA sense strand
agaagaagaagaaguguua

SEQ ID NO: 62860 - RNA, 19 nt, Homo sapiens
  misc_RNA (1)...(19): siRNA sense strand
caaacuggauccaaacaau

SEQ ID NO: 62861 - RNA, 19 nt, Homo sapiens
  misc_RNA (1)...(19): siRNA sense strand
gaaauuggaacaucgauca

SEQ ID NO: 62862 - RNA, 19 nt, Homo sapiens
  misc_RNA (1)...(19): siRNA sense strand
gacauuucaugccauuaua

SEQ ID NO: 62863 - RNA, 19 nt, Homo sapiens
  misc_RNA (1)...(19): siRNA sense strand
gcauguaccuuaugauguc

SEQ ID NO: 62864 - RNA, 19 nt, Homo sapiens
  misc_RNA (1)...(19): siRNA sense strand
ccacagaggugaccauguc

SEQ ID NO: 62865 - RNA, 19 nt, Homo sapiens
  misc_RNA (1)...(19): siRNA sense strand
gguguuggauucagaguug

SEQ ID NO: 62866 - RNA, 19 nt, Homo sapiens
  misc_RNA (1)...(19): siRNA sense strand
gaggagagacuggaaguaa

SEQ ID NO: 62867 - RNA, 19 nt, Homo sapiens
  misc_RNA (1)...(19): siRNA sense strand
guacagauaaagccaauau

SEQ ID NO: 62868 - RNA, 19 nt, Homo sapiens
  misc_RNA (1)...(19): siRNA sense strand
gacagaagccacacacauu

SEQ ID NO: 62869 - RNA, 19 nt, Homo sapiens
  misc_RNA (1)...(19): siRNA sense strand
cuaaacaguccgauacaua

SEQ ID NO: 62870 - RNA, 19 nt, Homo sapiens
  misc_RNA (1)...(19): siRNA sense strand
aaacugacaccaaagaauu

SEQ ID NO: 62871 - RNA, 19 nt, Homo sapiens
  misc_RNA (1)...(19): siRNA sense strand
aaagaaggcccuguauuaa

SEQ ID NO: 62872 - RNA, 19 nt, Homo sapiens
  misc_RNA (1)...(19): siRNA sense strand
ggauuggccuggaguauac

SEQ ID NO: 62873 - RNA, 19 nt, Homo sapiens
  misc_RNA (1)...(19): siRNA sense strand
caaagguguuggauucaga

SEQ ID NO: 62874 - RNA, 19 nt, Homo sapiens
  misc_RNA (1)...(19): siRNA sense strand
agaaggcccuguauuaauc

SEQ ID NO: 62875 - RNA, 19 nt, Homo sapiens
  misc_RNA (1)...(19): siRNA sense strand
ccauuuagguaagguagua

SEQ ID NO: 62876 - RNA, 19 nt, Homo sapiens
  misc_RNA (1)...(19): siRNA sense strand
ggauacagaguaagaaaug

SEQ ID NO: 62877 - RNA, 19 nt, Homo sapiens
  misc_RNA (1)...(19): siRNA sense strand
gcacuggagccauuuaugu

SEQ ID NO: 62878 - RNA, 19 nt, Homo sapiens
  misc_RNA (1)...(19): siRNA sense strand
agaauaaccuggugauuuu

SEQ ID NO: 62879 - RNA, 19 nt, Homo sapiens
  misc_RNA (1)...(19): siRNA sense strand
cguaagggcuacagucgaa

SEQ ID NO: 62880 - RNA, 19 nt, Homo sapiens
  misc_RNA (1)...(19): siRNA sense strand
ccucacagcuuggcucuug

SEQ ID NO: 62881 - RNA, 19 nt, Homo sapiens
  misc_RNA (1)...(19): siRNA sense strand
gcagugaccaagagaaaga

SEQ ID NO: 62882 - RNA, 19 nt, Homo sapiens
  misc_RNA (1)...(19): siRNA sense strand
cgugaagucugauaugguu

SEQ ID NO: 62883 - RNA, 19 nt, Homo sapiens
  misc_RNA (1)...(19): siRNA sense strand
ggaccaagaaccuguacaa

SEQ ID NO: 62884 - RNA, 19 nt, Homo sapiens
  misc_RNA (1)...(19): siRNA sense strand
gaauuugugagagagauua

SEQ ID NO: 62885 - RNA, 19 nt, Homo sapiens
  misc_RNA (1)...(19): siRNA sense strand
caauaaagaaggcccugua

SEQ ID NO: 62886 - RNA, 19 nt, Homo sapiens
  misc_RNA (1)...(19): siRNA sense strand
aagaauaaccuggugauuu

SEQ ID NO: 62887 - RNA, 19 nt, Homo sapiens
  misc_RNA (1)...(19): siRNA sense strand
ggagagacuggaaguaaau

SEQ ID NO: 62888 - RNA, 19 nt, Homo sapiens
  misc_RNA (1)...(19): siRNA sense strand
gauaagauuccuuuacuac

SEQ ID NO: 62889 - RNA, 19 nt, Homo sapiens
  misc_RNA (1)...(19): siRNA sense strand
ggacagaagccacacacau

SEQ ID NO: 62890 - RNA, 19 nt, Homo sapiens
  misc_RNA (1)...(19): siRNA sense strand
gaaacuaccagaccauuuu

SEQ ID NO: 62891 - RNA, 19 nt, Homo sapiens
  misc_RNA (1)...(19): siRNA sense strand
gcuggcauguaccuuauga

SEQ ID NO: 62892 - RNA, 19 nt, Homo sapiens
  misc_RNA (1)...(19): siRNA sense strand
caccuugacugagaaauug

SEQ ID NO: 62893 - RNA, 19 nt, Homo sapiens
  misc_RNA (1)...(19): siRNA sense strand
aaacuggauccaaacaaua

SEQ ID NO: 62894 - RNA, 19 nt, Homo sapiens
  misc_RNA (1)...(19): siRNA sense strand
ggaauuauugggucacaga

SEQ ID NO: 62895 - RNA, 19 nt, Homo sapiens
  misc_RNA (1)...(19): siRNA sense strand
gaaaugugcaacuuauaca

SEQ ID NO: 62896 - RNA, 19 nt, Homo sapiens
  misc_RNA (1)...(19): siRNA sense strand
gauaaagccaauauucugu

SEQ ID NO: 62897 - RNA, 19 nt, Homo sapiens
  misc_RNA (1)...(19): siRNA sense strand
gaagcccacuuucugucuu

SEQ ID NO: 62898 - RNA, 19 nt, Homo sapiens
  misc_RNA (1)...(19): siRNA sense strand
ggaaguucaccuugacuga

SEQ ID NO: 62899 - RNA, 19 nt, Homo sapiens
  misc_RNA (1)...(19): siRNA sense strand
uaagauuccuuuacuacag

SEQ ID NO: 62900 - RNA, 19 nt, Homo sapiens
  misc_RNA (1)...(19): siRNA sense strand
gcaugucuuugccuauaga

SEQ ID NO: 62901 - RNA, 19 nt, Homo sapiens
  misc_RNA (1)...(19): siRNA sense strand
guggaaaguucaucacaca

SEQ ID NO: 62902 - RNA, 19 nt, Homo sapiens
  misc_RNA (1)...(19): siRNA sense strand
cagaauguagcuccagaua

SEQ ID NO: 62903 - RNA, 19 nt, Homo sapiens
  misc_RNA (1)...(19): siRNA sense strand
gagccagcauggauacugu

SEQ ID NO: 62904 - RNA, 19 nt, Homo sapiens
  misc_RNA (1)...(19): siRNA sense strand
ugaaggaaccuguacagau

SEQ ID NO: 62905 - RNA, 19 nt, Homo sapiens
  misc_RNA (1)...(19): siRNA sense strand
cagcaggauugugcaguuu

SEQ ID NO: 62906 - RNA, 19 nt, Homo sapiens
  misc_RNA (1)...(19): siRNA sense strand
caaguuuguuuaccagcaa

SEQ ID NO: 62907 - RNA, 19 nt, Homo sapiens
  misc_RNA (1)...(19): siRNA sense strand
caauucccgugaagucuga

SEQ ID NO: 62908 - RNA, 19 nt, Homo sapiens
  misc_RNA (1)...(19): siRNA sense strand
gcacgucuagugaugaaau

SEQ ID NO: 62909 - RNA, 19 nt, Homo sapiens
  misc_RNA (1)...(19): siRNA sense strand
gggcagugaccaagagaaa

SEQ ID NO: 62910 - RNA, 19 nt, Homo sapiens
  misc_RNA (1)...(19): siRNA sense strand
gcauucaucauuuggaaga

SEQ ID NO: 62911 - RNA, 19 nt, Homo sapiens
  misc_RNA (1)...(19): siRNA sense strand
ggaaaguucaucacacagu

SEQ ID NO: 62912 - RNA, 19 nt, Homo sapiens
  misc_RNA (1)...(19): siRNA sense strand
ccaagcaugcaguuucuuu

SEQ ID NO: 62913 - RNA, 19 nt, Homo sapiens
  misc_RNA (1)...(19): siRNA sense strand
gugaugaaaugugcaacuu

SEQ ID NO: 62914 - RNA, 19 nt, Homo sapiens
  misc_RNA (1)...(19): siRNA sense strand
guccaucacauguuacuuu

SEQ ID NO: 62915 - RNA, 19 nt, Homo sapiens
  misc_RNA (1)...(19): siRNA sense strand
auaccaggcuugcucuuug

SEQ ID NO: 62916 - RNA, 19 nt, Homo sapiens
  misc_RNA (1)...(19): siRNA sense strand
ccuacuggcugcaagaugu

SEQ ID NO: 62917 - RNA, 19 nt, Homo sapiens
  misc_RNA (1)...(19): siRNA sense strand
uacuguccaucacauguua

SEQ ID NO: 62918 - RNA, 19 nt, Homo sapiens
  misc_RNA (1)...(19): siRNA sense strand
gcgcaagcacuuugauaug

SEQ ID NO: 62919 - RNA, 19 nt, Homo sapiens
  misc_RNA (1)...(19): siRNA sense strand
gcuugaguauagauaaaga

SEQ ID NO: 62920 - RNA, 19 nt, Homo sapiens
  misc_RNA (1)...(19): siRNA sense strand
aaauaaugcugcaguacuc

SEQ ID NO: 62921 - RNA, 19 nt, Homo sapiens
  misc_RNA (1)...(19): siRNA sense strand
gcugcaagauguguauuca

SEQ ID NO: 62922 - RNA, 19 nt, Homo sapiens
  misc_RNA (1)...(19): siRNA sense strand
guaagguaguaaguggaua

SEQ ID NO: 62923 - RNA, 19 nt, Homo sapiens
  misc_RNA (1)...(19): siRNA sense strand
acagauaaagccaauauuc

SEQ ID NO: 62924 - RNA, 19 nt, Homo sapiens
  misc_RNA (1)...(19): siRNA sense strand
guggugaauucugacauuu

SEQ ID NO: 62925 - RNA, 19 nt, Homo sapiens
  misc_RNA (1)...(19): siRNA sense strand
gagaagaagaagaaguguu

SEQ ID NO: 62926 - RNA, 19 nt, Homo sapiens
  misc_RNA (1)...(19): siRNA sense strand
acacucaccauuuagguaa

SEQ ID NO: 62927 - RNA, 19 nt, Homo sapiens
  misc_RNA (1)...(19): siRNA sense strand
aggagagacuggaaguaaa

SEQ ID NO: 62928 - RNA, 19 nt, Homo sapiens
  misc_RNA (1)...(19): siRNA sense strand
gugaugaacuuuuccaaug

SEQ ID NO: 62929 - RNA, 19 nt, Homo sapiens
  misc_RNA (1)...(19): siRNA sense strand
aagcauucaucauuuggaa

SEQ ID NO: 62930 - RNA, 19 nt, Homo sapiens
  misc_RNA (1)...(19): siRNA sense strand
gaagucugauaugguuaug

SEQ ID NO: 62931 - RNA, 19 nt, Homo sapiens
  misc_RNA (1)...(19): siRNA sense strand
gguggcacgucuagugaug

SEQ ID NO: 62932 - RNA, 19 nt, Homo sapiens
  misc_RNA (1)...(19): siRNA sense strand
ugacauuucaugccauuau

SEQ ID NO: 62933 - RNA, 19 nt, Homo sapiens
  misc_RNA (1)...(19): siRNA sense strand
gagagacuggaaguaaaua

SEQ ID NO: 62934 - RNA, 19 nt, Homo sapiens
  misc_RNA (1)...(19): siRNA sense strand
cacuggaaguuacugguuu

SEQ ID NO: 62935 - RNA, 19 nt, Homo sapiens
  misc_RNA (1)...(19): siRNA sense strand
ggucggauccaguguuuua

SEQ ID NO: 62936 - RNA, 19 nt, Homo sapiens
  misc_RNA (1)...(19): siRNA sense strand
ggacucggaccaauugaag

SEQ ID NO: 62937 - RNA, 19 nt, Homo sapiens
  misc_RNA (1)...(19): siRNA sense strand
ugaugaaaugugcaacuua

SEQ ID NO: 62938 - RNA, 19 nt, Homo sapiens
  misc_RNA (1)...(19): siRNA sense strand
aguucacacucaccauuua

SEQ ID NO: 62939 - RNA, 19 nt, Homo sapiens
  misc_RNA (1)...(19): siRNA sense strand
uuugauaugccucaugaua

SEQ ID NO: 62940 - RNA, 19 nt, Homo sapiens
  misc_RNA (1)...(19): siRNA sense strand
ggaaguuacugguuuugug

SEQ ID NO: 62941 - RNA, 19 nt, Homo sapiens
  misc_RNA (1)...(19): siRNA sense strand
uggcuugaguauagauaaa

SEQ ID NO: 62942 - RNA, 19 nt, Homo sapiens
  misc_RNA (1)...(19): siRNA sense strand
guguggaaguucaccuuga

SEQ ID NO: 62943 - RNA, 19 nt, Homo sapiens
  misc_RNA (1)...(19): siRNA sense strand
aaucagaagaggaguauuc

SEQ ID NO: 62944 - RNA, 19 nt, Homo sapiens
  misc_RNA (1)...(19): siRNA sense strand
ucaccuugacugagaaauu

SEQ ID NO: 62945 - RNA, 19 nt, Homo sapiens
  misc_RNA (1)...(19): siRNA sense strand
gaaggaaccuguacagaua

SEQ ID NO: 62946 - RNA, 19 nt, Homo sapiens
  misc_RNA (1)...(19): siRNA sense strand
gaauguagcuccagauaug

SEQ ID NO: 62947 - RNA, 19 nt, Homo sapiens
  misc_RNA (1)...(19): siRNA sense strand
uaaagaaggcccuguauua

SEQ ID NO: 62948 - RNA, 19 nt, Homo sapiens
  misc_RNA (1)...(19): siRNA sense strand
ccacauggcuugaguauag

SEQ ID NO: 62949 - RNA, 19 nt, Homo sapiens
  misc_RNA (1)...(19): siRNA sense strand
gaaagaggaugauggaagu

SEQ ID NO: 62950 - RNA, 19 nt, Homo sapiens
  misc_RNA (1)...(19): siRNA sense strand
guaaguggauacagaguaa

SEQ ID NO: 62951 - RNA, 19 nt, Homo sapiens
  misc_RNA (1)...(19): siRNA sense strand
ccaagaaccuguacaagga

SEQ ID NO: 62952 - RNA, 19 nt, Homo sapiens
  misc_RNA (1)...(19): siRNA sense strand
gcuuaaaccuugguaauuu

SEQ ID NO: 62953 - RNA, 19 nt, Homo sapiens
  misc_RNA (1)...(19): siRNA sense strand
gaugaaaugugcaacuuau

SEQ ID NO: 62954 - RNA, 19 nt, Homo sapiens
  misc_RNA (1)...(19): siRNA sense strand
ugagagagauuaagcauuc

SEQ ID NO: 62955 - RNA, 19 nt, Homo sapiens
  misc_RNA (1)...(19): siRNA sense strand
gaacaucgaucaguuaaaa

SEQ ID NO: 62956 - RNA, 19 nt, Homo sapiens
  misc_RNA (1)...(19): siRNA sense strand
aaagggaaguggaggcuua

SEQ ID NO: 62957 - RNA, 19 nt, Homo sapiens
  misc_RNA (1)...(19): siRNA sense strand
gcauugagguccaggaaau

SEQ ID NO: 62958 - RNA, 19 nt, Homo sapiens
  misc_RNA (1)...(19): siRNA sense strand
gguaguaaguggauacaga

SEQ ID NO: 62959 - RNA, 19 nt, Homo sapiens
  misc_RNA (1)...(19): siRNA sense strand
agaagaagaagaaguguua

SEQ ID NO: 62960 - RNA, 19 nt, Homo sapiens
  misc_RNA (1)...(19): siRNA sense strand
caaacuggauccaaacaau

SEQ ID NO: 62961 - RNA, 19 nt, Homo sapiens
  misc_RNA (1)...(19): siRNA sense strand
gaaauuggaacaucgauca

SEQ ID NO: 62962 - RNA, 19 nt, Homo sapiens
  misc_RNA (1)...(19): siRNA sense strand
gacauuucaugccauuaua

SEQ ID NO: 62963 - RNA, 19 nt, Homo sapiens
  misc_RNA (1)...(19): siRNA sense strand
gcauguaccuuaugauguc

SEQ ID NO: 62964 - RNA, 19 nt, Homo sapiens
  misc_RNA (1)...(19): siRNA sense strand
ccacagaggugaccauguc

SEQ ID NO: 62965 - RNA, 19 nt, Homo sapiens
  misc_RNA (1)...(19): siRNA sense strand
gguguuggauucagaguug

SEQ ID NO: 62966 - RNA, 19 nt, Homo sapiens
  misc_RNA (1)...(19): siRNA sense strand
gaggagagacuggaaguaa

SEQ ID NO: 62967 - RNA, 19 nt, Homo sapiens
  misc_RNA (1)...(19): siRNA sense strand
guacagauaaagccaauau

SEQ ID NO: 62968 - RNA, 19 nt, Homo sapiens
  misc_RNA (1)...(19): siRNA sense strand
gacagaagccacacacauu

SEQ ID NO: 62969 - RNA, 19 nt, Homo sapiens
  misc_RNA (1)...(19): siRNA sense strand
cuaaacaguccgauacaua

SEQ ID NO: 62970 - RNA, 19 nt, Homo sapiens
  misc_RNA (1)...(19): siRNA sense strand
aaacugacaccaaagaauu

SEQ ID NO: 62971 - RNA, 19 nt, Homo sapiens
  misc_RNA (1)...(19): siRNA sense strand
aaagaaggcccuguauuaa

SEQ ID NO: 62972 - RNA, 19 nt, Homo sapiens
  misc_RNA (1)...(19): siRNA sense strand
ggauuggccuggaguauac

SEQ ID NO: 62973 - RNA, 19 nt, Homo sapiens
  misc_RNA (1)...(19): siRNA sense strand
caaagguguuggauucaga

SEQ ID NO: 62974 - RNA, 19 nt, Homo sapiens
  misc_RNA (1)...(19): siRNA sense strand
agaaggcccuguauuaauc

SEQ ID NO: 62975 - RNA, 19 nt, Homo sapiens
  misc_RNA (1)...(19): siRNA sense strand
ccauuuagguaagguagua

SEQ ID NO: 62976 - RNA, 19 nt, Homo sapiens
  misc_RNA (1)...(19): siRNA sense strand
ggauacagaguaagaaaug

SEQ ID NO: 62977 - RNA, 19 nt, Homo sapiens
  misc_RNA (1)...(19): siRNA sense strand
gcacuggagccauuuaugu

SEQ ID NO: 62978 - RNA, 19 nt, Homo sapiens
  misc_RNA (1)...(19): siRNA sense strand
agaauaaccuggugauuuu

SEQ ID NO: 62979 - RNA, 19 nt, Homo sapiens
  misc_RNA (1)...(19): siRNA sense strand
cguaagggcuacagucgaa

SEQ ID NO: 62980 - RNA, 19 nt, Homo sapiens
  misc_RNA (1)...(19): siRNA sense strand
ccucacagcuuggcucuug

SEQ ID NO: 62981 - RNA, 19 nt, Homo sapiens
  misc_RNA (1)...(19): siRNA sense strand
gcagugaccaagagaaaga

SEQ ID NO: 62982 - RNA, 19 nt, Homo sapiens
  misc_RNA (1)...(19): siRNA sense strand
cgugaagucugauaugguu

SEQ ID NO: 62983 - RNA, 19 nt, Homo sapiens
  misc_RNA (1)...(19): siRNA sense strand
ggaccaagaaccuguacaa

SEQ ID NO: 62984 - RNA, 19 nt, Homo sapiens
  misc_RNA (1)...(19): siRNA sense strand
gaauuugugagagagauua

SEQ ID NO: 62985 - RNA, 19 nt, Homo sapiens
  misc_RNA (1)...(19): siRNA sense strand
caauaaagaaggcccugua

SEQ ID NO: 62986 - RNA, 19 nt, Homo sapiens
  misc_RNA (1)...(19): siRNA sense strand
aagaauaaccuggugauuu

SEQ ID NO: 62987 - RNA, 19 nt, Homo sapiens
  misc_RNA (1)...(19): siRNA sense strand
ggagagacuggaaguaaau

SEQ ID NO: 62988 - RNA, 19 nt, Homo sapiens
  misc_RNA (1)...(19): siRNA sense strand
gauaagauuccuuuacuac

SEQ ID NO: 62989 - RNA, 19 nt, Homo sapiens
  misc_RNA (1)...(19): siRNA sense strand
ggacagaagccacacacau

SEQ ID NO: 62990 - RNA, 19 nt, Homo sapiens
  misc_RNA (1)...(19): siRNA sense strand
gaaacuaccagaccauuuu

SEQ ID NO: 62991 - RNA, 19 nt, Homo sapiens
  misc_RNA (1)...(19): siRNA sense strand
gcuggcauguaccuuauga

SEQ ID NO: 62992 - RNA, 19 nt, Homo sapiens
  misc_RNA (1)...(19): siRNA sense strand
caccuugacugagaaauug

SEQ ID NO: 62993 - RNA, 19 nt, Homo sapiens
  misc_RNA (1)...(19): siRNA sense strand
aaacuggauccaaacaaua

SEQ ID NO: 62994 - RNA, 19 nt, Homo sapiens
  misc_RNA (1)...(19): siRNA sense strand
ggaauuauugggucacaga

SEQ ID NO: 62995 - RNA, 19 nt, Homo sapiens
  misc_RNA (1)...(19): siRNA sense strand
gaaaugugcaacuuauaca

SEQ ID NO: 62996 - RNA, 19 nt, Homo sapiens
  misc_RNA (1)...(19): siRNA sense strand
gauaaagccaauauucugu

SEQ ID NO: 62997 - RNA, 19 nt, Homo sapiens
  misc_RNA (1)...(19): siRNA sense strand
gaagcccacuuucugucuu

SEQ ID NO: 62998 - RNA, 19 nt, Homo sapiens
  misc_RNA (1)...(19): siRNA sense strand
ggaaguucaccuugacuga

SEQ ID NO: 62999 - RNA, 19 nt, Homo sapiens
  misc_RNA (1)...(19): siRNA sense strand
uaagauuccuuuacuacag

SEQ ID NO: 63000 - RNA, 19 nt, Homo sapiens
  misc_RNA (1)...(19): siRNA sense strand
gcaugucuuugccuauaga

SEQ ID NO: 63001 - RNA, 19 nt, Homo sapiens
  misc_RNA (1)...(19): siRNA sense strand
guggaaaguucaucacaca

SEQ ID NO: 63002 - RNA, 19 nt, Homo sapiens
  misc_RNA (1)...(19): siRNA sense strand
cagaauguagcuccagaua

SEQ ID NO: 63003 - RNA, 19 nt, Homo sapiens
  misc_RNA (1)...(19): siRNA sense strand
gagccagcauggauacugu

SEQ ID NO: 63004 - RNA, 19 nt, Homo sapiens
  misc_RNA (1)...(19): siRNA sense strand
ugaaggaaccuguacagau

SEQ ID NO: 63005 - RNA, 19 nt, Homo sapiens
  misc_RNA (1)...(19): siRNA sense strand
cagcaggauugugcaguuu

SEQ ID NO: 63006 - RNA, 19 nt, Homo sapiens
  misc_RNA (1)...(19): siRNA sense strand
caaguuuguuuaccagcaa

SEQ ID NO: 63007 - RNA, 19 nt, Homo sapiens
  misc_RNA (1)...(19): siRNA sense strand
caauucccgugaagucuga

SEQ ID NO: 63008 - RNA, 19 nt, Homo sapiens
  misc_RNA (1)...(19): siRNA sense strand
gcacgucuagugaugaaau

SEQ ID NO: 63009 - RNA, 19 nt, Homo sapiens
  misc_RNA (1)...(19): siRNA sense strand
gggcagugaccaagagaaa

SEQ ID NO: 63010 - RNA, 19 nt, Homo sapiens
  misc_RNA (1)...(19): siRNA sense strand
gcauucaucauuuggaaga

SEQ ID NO: 63011 - RNA, 19 nt, Homo sapiens
  misc_RNA (1)...(19): siRNA sense strand
ggaaaguucaucacacagu

SEQ ID NO: 63012 - RNA, 19 nt, Homo sapiens
  misc_RNA (1)...(19): siRNA sense strand
ccaagcaugcaguuucuuu

SEQ ID NO: 63013 - RNA, 19 nt, Homo sapiens
  misc_RNA (1)...(19): siRNA sense strand
gugaugaaaugugcaacuu

SEQ ID NO: 63014 - RNA, 19 nt, Homo sapiens
  misc_RNA (1)...(19): siRNA sense strand
guccaucacauguuacuuu

SEQ ID NO: 63015 - RNA, 19 nt, Homo sapiens
  misc_RNA (1)...(19): siRNA sense strand
auaccaggcuugcucuuug

SEQ ID NO: 63016 - RNA, 19 nt, Homo sapiens
  misc_RNA (1)...(19): siRNA sense strand
ccuacuggcugcaagaugu

SEQ ID NO: 63017 - RNA, 19 nt, Homo sapiens
  misc_RNA (1)...(19): siRNA sense strand
uacuguccaucacauguua

SEQ ID NO: 63018 - RNA, 19 nt, Homo sapiens
  misc_RNA (1)...(19): siRNA sense strand
gcgcaagcacuuugauaug

SEQ ID NO: 63019 - RNA, 19 nt, Homo sapiens
  misc_RNA (1)...(19): siRNA sense strand
gcuugaguauagauaaaga

SEQ ID NO: 63020 - RNA, 19 nt, Homo sapiens
  misc_RNA (1)...(19): siRNA sense strand
aaauaaugcugcaguacuc

SEQ ID NO: 63021 - RNA, 19 nt, Homo sapiens
  misc_RNA (1)...(19): siRNA sense strand
gcugcaagauguguauuca

SEQ ID NO: 63022 - RNA, 19 nt, Homo sapiens
  misc_RNA (1)...(19): siRNA sense strand
guaagguaguaaguggaua

SEQ ID NO: 63023 - RNA, 19 nt, Homo sapiens
  misc_RNA (1)...(19): siRNA sense strand
acagauaaagccaauauuc

SEQ ID NO: 63024 - RNA, 19 nt, Homo sapiens
  misc_RNA (1)...(19): siRNA sense strand
guggugaauucugacauuu

SEQ ID NO: 63025 - RNA, 19 nt, Homo sapiens
  misc_RNA (1)...(19): siRNA sense strand
gagaagaagaagaaguguu

SEQ ID NO: 63026 - RNA, 19 nt, Homo sapiens
  misc_RNA (1)...(19): siRNA sense strand
acacucaccauuuagguaa

SEQ ID NO: 63027 - RNA, 19 nt, Homo sapiens
  misc_RNA (1)...(19): siRNA sense strand
aggagagacuggaaguaaa

SEQ ID NO: 63028 - RNA, 19 nt, Homo sapiens
  misc_RNA (1)...(19): siRNA sense strand
gugaugaacuuuuccaaug

SEQ ID NO: 63029 - RNA, 19 nt, Homo sapiens
  misc_RNA (1)...(19): siRNA sense strand
aagcauucaucauuuggaa

SEQ ID NO: 63030 - RNA, 19 nt, Homo sapiens
  misc_RNA (1)...(19): siRNA sense strand
gaagucugauaugguuaug

SEQ ID NO: 63031 - RNA, 19 nt, Homo sapiens
  misc_RNA (1)...(19): siRNA sense strand
gguggcacgucuagugaug

SEQ ID NO: 63032 - RNA, 19 nt, Homo sapiens
  misc_RNA (1)...(19): siRNA sense strand
ugacauuucaugccauuau

SEQ ID NO: 63033 - RNA, 19 nt, Homo sapiens
  misc_RNA (1)...(19): siRNA sense strand
gagagacuggaaguaaaua

SEQ ID NO: 63034 - RNA, 19 nt, Homo sapiens
  misc_RNA (1)...(19): siRNA sense strand
cacuggaaguuacugguuu

SEQ ID NO: 63035 - RNA, 19 nt, Homo sapiens
  misc_RNA (1)...(19): siRNA sense strand
ggucggauccaguguuuua

SEQ ID NO: 63036 - RNA, 19 nt, Homo sapiens
  misc_RNA (1)...(19): siRNA sense strand
ggacucggaccaauugaag

SEQ ID NO: 63037 - RNA, 19 nt, Homo sapiens
  misc_RNA (1)...(19): siRNA sense strand
ugaugaaaugugcaacuua

SEQ ID NO: 63038 - RNA, 19 nt, Homo sapiens
  misc_RNA (1)...(19): siRNA sense strand
aguucacacucaccauuua

SEQ ID NO: 63039 - RNA, 19 nt, Homo sapiens
  misc_RNA (1)...(19): siRNA sense strand
uuugauaugccucaugaua

SEQ ID NO: 63040 - RNA, 19 nt, Homo sapiens
  misc_RNA (1)...(19): siRNA sense strand
ggaaguuacugguuuugug

SEQ ID NO: 63041 - RNA, 19 nt, Homo sapiens
  misc_RNA (1)...(19): siRNA sense strand
uggcuugaguauagauaaa

SEQ ID NO: 63042 - RNA, 19 nt, Homo sapiens
  misc_RNA (1)...(19): siRNA sense strand
guguggaaguucaccuuga

SEQ ID NO: 63043 - RNA, 19 nt, Homo sapiens
  misc_RNA (1)...(19): siRNA sense strand
aaucagaagaggaguauuc

SEQ ID NO: 63044 - RNA, 19 nt, Homo sapiens
  misc_RNA (1)...(19): siRNA sense strand
ucaccuugacugagaaauu

SEQ ID NO: 63045 - RNA, 19 nt, Homo sapiens
  misc_RNA (1)...(19): siRNA sense strand
gaaagcagaugaagccuau

SEQ ID NO: 63046 - RNA, 19 nt, Homo sapiens
  misc_RNA (1)...(19): siRNA sense strand
ggacuucacugccaccuuu

SEQ ID NO: 63047 - RNA, 19 nt, Homo sapiens
  misc_RNA (1)...(19): siRNA sense strand
gcaagacgcugcacaucaa

SEQ ID NO: 63048 - RNA, 19 nt, Homo sapiens
  misc_RNA (1)...(19): siRNA sense strand
gagcugaugugguggaugu

SEQ ID NO: 63049 - RNA, 19 nt, Homo sapiens
  misc_RNA (1)...(19): siRNA sense strand
gcucuaagguacugaagga

SEQ ID NO: 63050 - RNA, 19 nt, Homo sapiens
  misc_RNA (1)...(19): siRNA sense strand
ggaacauccugcaccugua

SEQ ID NO: 63051 - RNA, 19 nt, Homo sapiens
  misc_RNA (1)...(19): siRNA sense strand
acacagaggugcccaugga

SEQ ID NO: 63052 - RNA, 19 nt, Homo sapiens
  misc_RNA (1)...(19): siRNA sense strand
caaagagaauggcauggau

SEQ ID NO: 63053 - RNA, 19 nt, Homo sapiens
  misc_RNA (1)...(19): siRNA sense strand
gguggaggcugccaucuca

SEQ ID NO: 63054 - RNA, 19 nt, Homo sapiens
  misc_RNA (1)...(19): siRNA sense strand
caagaucgcagaggaguuu

SEQ ID NO: 63055 - RNA, 19 nt, Homo sapiens
  misc_RNA (1)...(19): siRNA sense strand
gcaacucggacguguauga

SEQ ID NO: 63056 - RNA, 19 nt, Homo sapiens
  misc_RNA (1)...(19): siRNA sense strand
gcacaucccagacaucauc

SEQ ID NO: 63057 - RNA, 19 nt, Homo sapiens
  misc_RNA (1)...(19): siRNA sense strand
agaggcaggucuucuuuga

SEQ ID NO: 63058 - RNA, 19 nt, Homo sapiens
  misc_RNA (1)...(19): siRNA sense strand
acgaggagcuggaggagaa

SEQ ID NO: 63059 - RNA, 19 nt, Homo sapiens
  misc_RNA (1)...(19): siRNA sense strand
gccaugcgcuuccuguaug

SEQ ID NO: 63060 - RNA, 19 nt, Homo sapiens
  misc_RNA (1)...(19): siRNA sense strand
aguauaagcccaucaagaa

SEQ ID NO: 63061 - RNA, 19 nt, Homo sapiens
  misc_RNA (1)...(19): siRNA sense strand
gaguauaagcccaucaaga

SEQ ID NO: 63062 - RNA, 19 nt, Homo sapiens
  misc_RNA (1)...(19): siRNA sense strand
gcuacggguuccucucuga

SEQ ID NO: 63063 - RNA, 19 nt, Homo sapiens
  misc_RNA (1)...(19): siRNA sense strand
guauaagcccaucaagaaa

SEQ ID NO: 63064 - RNA, 19 nt, Homo sapiens
  misc_RNA (1)...(19): siRNA sense strand
caacguggucuucaaguuc

SEQ ID NO: 63065 - RNA, 19 nt, Homo sapiens
  misc_RNA (1)...(19): siRNA sense strand
uggagaaguucaucgagaa

SEQ ID NO: 63066 - RNA, 19 nt, Homo sapiens
  misc_RNA (1)...(19): siRNA sense strand
gcaugaggcccacgaguuc

SEQ ID NO: 63067 - RNA, 19 nt, Homo sapiens
  misc_RNA (1)...(19): siRNA sense strand
ucagcaagcucuucagcau

SEQ ID NO: 63068 - RNA, 19 nt, Homo sapiens
  misc_RNA (1)...(19): siRNA sense strand
ccauggagcgcguguuuga

SEQ ID NO: 63069 - RNA, 19 nt, Homo sapiens
  misc_RNA (1)...(19): siRNA sense strand
ccaaggagaacaacguaga

SEQ ID NO: 63070 - RNA, 19 nt, Homo sapiens
  misc_RNA (1)...(19): siRNA sense strand
ggagaucaccgacguagac

SEQ ID NO: 63071 - RNA, 19 nt, Homo sapiens
  misc_RNA (1)...(19): siRNA sense strand
ucugugaaguggccaaaga

SEQ ID NO: 63072 - RNA, 19 nt, Homo sapiens
  misc_RNA (1)...(19): siRNA sense strand
cccaaaagcuguugcacua

SEQ ID NO: 63073 - RNA, 19 nt, Homo sapiens
  misc_RNA (1)...(19): siRNA sense strand
cuaaacaggugggcuacga

SEQ ID NO: 63074 - RNA, 19 nt, Homo sapiens
  misc_RNA (1)...(19): siRNA sense strand
ccagaggcaggucuucuuu

SEQ ID NO: 63075 - RNA, 19 nt, Homo sapiens
  misc_RNA (1)...(19): siRNA sense strand
ugaaguggccaaagagaau

SEQ ID NO: 63076 - RNA, 19 nt, Homo sapiens
  misc_RNA (1)...(19): siRNA sense strand
acaacguggucuucaaguu

SEQ ID NO: 63077 - RNA, 19 nt, Homo sapiens
  misc_RNA (1)...(19): siRNA sense strand
agaaugugcucaacaacca

SEQ ID NO: 63078 - RNA, 19 nt, Homo sapiens
  misc_RNA (1)...(19): siRNA sense strand
ucaucaagguggccaagga

SEQ ID NO: 63079 - RNA, 19 nt, Homo sapiens
  misc_RNA (1)...(19): siRNA sense strand
gcugggcgaucucaucaag

SEQ ID NO: 63080 - RNA, 19 nt, Homo sapiens
  misc_RNA (1)...(19): siRNA sense strand
ggaugucuuccguguguuu

SEQ ID NO: 63081 - RNA, 19 nt, Homo sapiens
  misc_RNA (1)...(19): siRNA sense strand
gagauugccauccgugugu

SEQ ID NO: 63082 - RNA, 19 nt, Homo sapiens
  misc_RNA (1)...(19): siRNA sense strand
gcacggcaagcacuacuuc

SEQ ID NO: 63083 - RNA, 19 nt, Homo sapiens
  misc_RNA (1)...(19): siRNA sense strand
caccagcgacucugugaaa

SEQ ID NO: 63084 - RNA, 19 nt, Homo sapiens
  misc_RNA (1)...(19): siRNA sense strand
gaacauccugcaccuguac

SEQ ID NO: 63085 - RNA, 19 nt, Homo sapiens
  misc_RNA (1)...(19): siRNA sense strand
ggagaacaacguagaugca

SEQ ID NO: 63086 - RNA, 19 nt, Homo sapiens
  misc_RNA (1)...(19): siRNA sense strand
gcccauggagcgcguguuu

SEQ ID NO: 63087 - RNA, 19 nt, Homo sapiens
  misc_RNA (1)...(19): siRNA sense strand
ggaccaguaugggaacauc

SEQ ID NO: 63088 - RNA, 19 nt, Homo sapiens
  misc_RNA (1)...(19): siRNA sense strand
ugaggguggugcacagcua

SEQ ID NO: 63089 - RNA, 19 nt, Homo sapiens
  misc_RNA (1)...(19): siRNA sense strand
gcaagguucaugugaccaa

SEQ ID NO: 63090 - RNA, 19 nt, Homo sapiens
  misc_RNA (1)...(19): siRNA sense strand
gcacggccaccaugaaguc

SEQ ID NO: 63091 - RNA, 19 nt, Homo sapiens
  misc_RNA (1)...(19): siRNA sense strand
caggagaacauccgcauca

SEQ ID NO: 63092 - RNA, 19 nt, Homo sapiens
  misc_RNA (1)...(19): siRNA sense strand
ggacaugacacuggaaggu

SEQ ID NO: 63093 - RNA, 19 nt, Homo sapiens
  misc_RNA (1)...(19): siRNA sense strand
ggcaagacgcugcacauca

SEQ ID NO: 63094 - RNA, 19 nt, Homo sapiens
  misc_RNA (1)...(19): siRNA sense strand
gugacgcccuccuccaaga

SEQ ID NO: 63095 - RNA, 19 nt, Homo sapiens
  misc_RNA (1)...(19): siRNA sense strand
gagaauggcauggaugucu

SEQ ID NO: 63096 - RNA, 19 nt, Homo sapiens
  misc_RNA (1)...(19): siRNA sense strand
ccaaagagaauggcaugga

SEQ ID NO: 63097 - RNA, 19 nt, Homo sapiens
  misc_RNA (1)...(19): siRNA sense strand
ugcagaaugugcucaacaa

SEQ ID NO: 63098 - RNA, 19 nt, Homo sapiens
  misc_RNA (1)...(19): siRNA sense strand
ccugaauacucgccucuuc

SEQ ID NO: 63099 - RNA, 19 nt, Homo sapiens
  misc_RNA (1)...(19): siRNA sense strand
ggacuccccuggacacaga

SEQ ID NO: 63100 - RNA, 19 nt, Homo sapiens
  misc_RNA (1)...(19): siRNA sense strand
gcgcacccacgaucucaaa

SEQ ID NO: 63101 - RNA, 19 nt, Homo sapiens
  misc_RNA (1)...(19): siRNA sense strand
gccggaagaugugcucuca

SEQ ID NO: 63102 - RNA, 19 nt, Homo sapiens
  misc_RNA (1)...(19): siRNA sense strand
gcagggguccgguuuauug

SEQ ID NO: 63103 - RNA, 19 nt, Homo sapiens
  misc_RNA (1)...(19): siRNA sense strand
gcucucagcagcuauguac

SEQ ID NO: 63104 - RNA, 19 nt, Homo sapiens
  misc_RNA (1)...(19): siRNA sense strand
ugucugggaugacuucaca

SEQ ID NO: 63105 - RNA, 19 nt, Homo sapiens
  misc_RNA (1)...(19): siRNA sense strand
ucaacuacuugcccaacau

SEQ ID NO: 63106 - RNA, 19 nt, Homo sapiens
  misc_RNA (1)...(19): siRNA sense strand
agaauggcauggaugucuu

SEQ ID NO: 63107 - RNA, 19 nt, Homo sapiens
  misc_RNA (1)...(19): siRNA sense strand
ccagaagguggucgagauu

SEQ ID NO: 63108 - RNA, 19 nt, Homo sapiens
  misc_RNA (1)...(19): siRNA sense strand
ggccaaggagaacaacgua

SEQ ID NO: 63109 - RNA, 19 nt, Homo sapiens
  misc_RNA (1)...(19): siRNA sense strand
gcgcguguuugacuacagu

SEQ ID NO: 63110 - RNA, 19 nt, Homo sapiens
  misc_RNA (1)...(19): siRNA sense strand
cugugaaacucgcuaaaca

SEQ ID NO: 63111 - RNA, 19 nt, Homo sapiens
  misc_RNA (1)...(19): siRNA sense strand
cagaagugguccgcaagau

SEQ ID NO: 63112 - RNA, 19 nt, Homo sapiens
  misc_RNA (1)...(19): siRNA sense strand
caacucggacguguaugaa

SEQ ID NO: 63113 - RNA, 19 nt, Homo sapiens
  misc_RNA (1)...(19): siRNA sense strand
gaaguggccaaagagaaug

SEQ ID NO: 63114 - RNA, 19 nt, Homo sapiens
  misc_RNA (1)...(19): siRNA sense strand
gcugugggcuacaccaacu

SEQ ID NO: 63115 - RNA, 19 nt, Homo sapiens
  misc_RNA (1)...(19): siRNA sense strand
ccaugcgcuuccuguauga

SEQ ID NO: 63116 - RNA, 19 nt, Homo sapiens
  misc_RNA (1)...(19): siRNA sense strand
gugaaguggccaaagagaa

SEQ ID NO: 63117 - RNA, 19 nt, Homo sapiens
  misc_RNA (1)...(19): siRNA sense strand
ucccagacaucaucaaggu

SEQ ID NO: 63118 - RNA, 19 nt, Homo sapiens
  misc_RNA (1)...(19): siRNA sense strand
caacuacuugcccaacaug

SEQ ID NO: 63119 - RNA, 19 nt, Homo sapiens
  misc_RNA (1)...(19): siRNA sense strand
ggacgugaagggccagauc

SEQ ID NO: 63120 - RNA, 19 nt, Homo sapiens
  misc_RNA (1)...(19): siRNA sense strand
gcccacgaguucuccaaca

SEQ ID NO: 63121 - RNA, 19 nt, Homo sapiens
  misc_RNA (1)...(19): siRNA sense strand
ugcaggcacuggagaagga

SEQ ID NO: 63122 - RNA, 19 nt, Homo sapiens
  misc_RNA (1)...(19): siRNA sense strand
ggacguguaugaaaaugag

SEQ ID NO: 63123 - RNA, 19 nt, Homo sapiens
  misc_RNA (1)...(19): siRNA sense strand
gauuccaugucugggauga

SEQ ID NO: 63124 - RNA, 19 nt, Homo sapiens
  misc_RNA (1)...(19): siRNA sense strand
gggcgcuguuuguggagaa

SEQ ID NO: 63125 - RNA, 19 nt, Homo sapiens
  misc_RNA (1)...(19): siRNA sense strand
cgauguguuugcccacuuc

SEQ ID NO: 63126 - RNA, 19 nt, Homo sapiens
  misc_RNA (1)...(19): siRNA sense strand
caaggagaacaacguagau

SEQ ID NO: 63127 - RNA, 19 nt, Homo sapiens
  misc_RNA (1)...(19): siRNA sense strand
uggaggcugccaucucaua

SEQ ID NO: 63128 - RNA, 19 nt, Homo sapiens
  misc_RNA (1)...(19): siRNA sense strand
uauaagcccaucaagaaag

SEQ ID NO: 63129 - RNA, 19 nt, Homo sapiens
  misc_RNA (1)...(19): siRNA sense strand
ggccaacagaggugagauu

SEQ ID NO: 63130 - RNA, 19 nt, Homo sapiens
  misc_RNA (1)...(19): siRNA sense strand
cagcgacucugugaaacuc

SEQ ID NO: 63131 - RNA, 19 nt, Homo sapiens
  misc_RNA (1)...(19): siRNA sense strand
acaucgaggugcagaucuu

SEQ ID NO: 63132 - RNA, 19 nt, Homo sapiens
  misc_RNA (1)...(19): siRNA sense strand
gcucaacaaccagcaguuc

SEQ ID NO: 63133 - RNA, 19 nt, Homo sapiens
  misc_RNA (1)...(19): siRNA sense strand
caagacgcugcacaucaaa

SEQ ID NO: 63134 - RNA, 19 nt, Homo sapiens
  misc_RNA (1)...(19): siRNA sense strand
ucaagguggccaaggagaa

SEQ ID NO: 63135 - RNA, 19 nt, Homo sapiens
  misc_RNA (1)...(19): siRNA sense strand
gaauggcauggaugucuuc

SEQ ID NO: 63136 - RNA, 19 nt, Homo sapiens
  misc_RNA (1)...(19): siRNA sense strand
ccagaagugguccgcaaga

SEQ ID NO: 63137 - RNA, 19 nt, Homo sapiens
  misc_RNA (1)...(19): siRNA sense strand
gcagcugcgguccaucuug

SEQ ID NO: 63138 - RNA, 19 nt, Homo sapiens
  misc_RNA (1)...(19): siRNA sense strand
auaagcccaucaagaaagu

SEQ ID NO: 63139 - RNA, 19 nt, Homo sapiens
  misc_RNA (1)...(19): siRNA sense strand
cuggauagccugaauacuc

SEQ ID NO: 63140 - RNA, 19 nt, Homo sapiens
  misc_RNA (1)...(19): siRNA sense strand
ccagaugcaccggcagaaa

SEQ ID NO: 63141 - RNA, 19 nt, Homo sapiens
  misc_RNA (1)...(19): siRNA sense strand
ggucaagaaggccuaugug

SEQ ID NO: 63142 - RNA, 19 nt, Homo sapiens
  misc_RNA (1)...(19): siRNA sense strand
uggcaacucggacguguau

SEQ ID NO: 63143 - RNA, 19 nt, Homo sapiens
  misc_RNA (1)...(19): siRNA sense strand
gcucagugccaugaagaug

SEQ ID NO: 63144 - RNA, 19 nt, Homo sapiens
  misc_RNA (1)...(19): siRNA sense strand
ggacacccaggccaugaag

SEQ ID NO: 63145 - RNA, 19 nt, Homo sapiens
  misc_RNA (1)...(19): siRNA sense strand
gaaagcagaugaagccuau

SEQ ID NO: 63146 - RNA, 19 nt, Homo sapiens
  misc_RNA (1)...(19): siRNA sense strand
ggacuucacugccaccuuu

SEQ ID NO: 63147 - RNA, 19 nt, Homo sapiens
  misc_RNA (1)...(19): siRNA sense strand
gcaagacgcugcacaucaa

SEQ ID NO: 63148 - RNA, 19 nt, Homo sapiens
  misc_RNA (1)...(19): siRNA sense strand
gagcugaugugguggaugu

SEQ ID NO: 63149 - RNA, 19 nt, Homo sapiens
  misc_RNA (1)...(19): siRNA sense strand
gcucuaagguacugaagga

SEQ ID NO: 63150 - RNA, 19 nt, Homo sapiens
  misc_RNA (1)...(19): siRNA sense strand
ggaacauccugcaccugua

SEQ ID NO: 63151 - RNA, 19 nt, Homo sapiens
  misc_RNA (1)...(19): siRNA sense strand
acacagaggugcccaugga

SEQ ID NO: 63152 - RNA, 19 nt, Homo sapiens
  misc_RNA (1)...(19): siRNA sense strand
caaagagaauggcauggau

SEQ ID NO: 63153 - RNA, 19 nt, Homo sapiens
  misc_RNA (1)...(19): siRNA sense strand
gguggaggcugccaucuca

SEQ ID NO: 63154 - RNA, 19 nt, Homo sapiens
  misc_RNA (1)...(19): siRNA sense strand
caagaucgcagaggaguuu

SEQ ID NO: 63155 - RNA, 19 nt, Homo sapiens
  misc_RNA (1)...(19): siRNA sense strand
gcaacucggacguguauga

SEQ ID NO: 63156 - RNA, 19 nt, Homo sapiens
  misc_RNA (1)...(19): siRNA sense strand
gcacaucccagacaucauc

SEQ ID NO: 63157 - RNA, 19 nt, Homo sapiens
  misc_RNA (1)...(19): siRNA sense strand
agaggcaggucuucuuuga

SEQ ID NO: 63158 - RNA, 19 nt, Homo sapiens
  misc_RNA (1)...(19): siRNA sense strand
acgaggagcuggaggagaa

SEQ ID NO: 63159 - RNA, 19 nt, Homo sapiens
  misc_RNA (1)...(19): siRNA sense strand
gccaugcgcuuccuguaug

SEQ ID NO: 63160 - RNA, 19 nt, Homo sapiens
  misc_RNA (1)...(19): siRNA sense strand
aguauaagcccaucaagaa

SEQ ID NO: 63161 - RNA, 19 nt, Homo sapiens
  misc_RNA (1)...(19): siRNA sense strand
gaguauaagcccaucaaga

SEQ ID NO: 63162 - RNA, 19 nt, Homo sapiens
  misc_RNA (1)...(19): siRNA sense strand
gcuacggguuccucucuga

SEQ ID NO: 63163 - RNA, 19 nt, Homo sapiens
  misc_RNA (1)...(19): siRNA sense strand
guauaagcccaucaagaaa

SEQ ID NO: 63164 - RNA, 19 nt, Homo sapiens
  misc_RNA (1)...(19): siRNA sense strand
caacguggucuucaaguuc

SEQ ID NO: 63165 - RNA, 19 nt, Homo sapiens
  misc_RNA (1)...(19): siRNA sense strand
uggagaaguucaucgagaa

SEQ ID NO: 63166 - RNA, 19 nt, Homo sapiens
  misc_RNA (1)...(19): siRNA sense strand
gcaugaggcccacgaguuc

SEQ ID NO: 63167 - RNA, 19 nt, Homo sapiens
  misc_RNA (1)...(19): siRNA sense strand
ucagcaagcucuucagcau

SEQ ID NO: 63168 - RNA, 19 nt, Homo sapiens
  misc_RNA (1)...(19): siRNA sense strand
ccauggagcgcguguuuga

SEQ ID NO: 63169 - RNA, 19 nt, Homo sapiens
  misc_RNA (1)...(19): siRNA sense strand
ccaaggagaacaacguaga

SEQ ID NO: 63170 - RNA, 19 nt, Homo sapiens
  misc_RNA (1)...(19): siRNA sense strand
ggagaucaccgacguagac

SEQ ID NO: 63171 - RNA, 19 nt, Homo sapiens
  misc_RNA (1)...(19): siRNA sense strand
ucugugaaguggccaaaga

SEQ ID NO: 63172 - RNA, 19 nt, Homo sapiens
  misc_RNA (1)...(19): siRNA sense strand
cccaaaagcuguugcacua

SEQ ID NO: 63173 - RNA, 19 nt, Homo sapiens
  misc_RNA (1)...(19): siRNA sense strand
cuaaacaggugggcuacga

SEQ ID NO: 63174 - RNA, 19 nt, Homo sapiens
  misc_RNA (1)...(19): siRNA sense strand
ccagaggcaggucuucuuu

SEQ ID NO: 63175 - RNA, 19 nt, Homo sapiens
  misc_RNA (1)...(19): siRNA sense strand
ugaaguggccaaagagaau

SEQ ID NO: 63176 - RNA, 19 nt, Homo sapiens
  misc_RNA (1)...(19): siRNA sense strand
acaacguggucuucaaguu

SEQ ID NO: 63177 - RNA, 19 nt, Homo sapiens
  misc_RNA (1)...(19): siRNA sense strand
agaaugugcucaacaacca

SEQ ID NO: 63178 - RNA, 19 nt, Homo sapiens
  misc_RNA (1)...(19): siRNA sense strand
ucaucaagguggccaagga

SEQ ID NO: 63179 - RNA, 19 nt, Homo sapiens
  misc_RNA (1)...(19): siRNA sense strand
gcugggcgaucucaucaag

SEQ ID NO: 63180 - RNA, 19 nt, Homo sapiens
  misc_RNA (1)...(19): siRNA sense strand
ggaugucuuccguguguuu

SEQ ID NO: 63181 - RNA, 19 nt, Homo sapiens
  misc_RNA (1)...(19): siRNA sense strand
gagauugccauccgugugu

SEQ ID NO: 63182 - RNA, 19 nt, Homo sapiens
  misc_RNA (1)...(19): siRNA sense strand
gcacggcaagcacuacuuc

SEQ ID NO: 63183 - RNA, 19 nt, Homo sapiens
  misc_RNA (1)...(19): siRNA sense strand
caccagcgacucugugaaa

SEQ ID NO: 63184 - RNA, 19 nt, Homo sapiens
  misc_RNA (1)...(19): siRNA sense strand
gaacauccugcaccuguac

SEQ ID NO: 63185 - RNA, 19 nt, Homo sapiens
  misc_RNA (1)...(19): siRNA sense strand
ggagaacaacguagaugca

SEQ ID NO: 63186 - RNA, 19 nt, Homo sapiens
  misc_RNA (1)...(19): siRNA sense strand
gcccauggagcgcguguuu

SEQ ID NO: 63187 - RNA, 19 nt, Homo sapiens
  misc_RNA (1)...(19): siRNA sense strand
ggaccaguaugggaacauc

SEQ ID NO: 63188 - RNA, 19 nt, Homo sapiens
  misc_RNA (1)...(19): siRNA sense strand
ugaggguggugcacagcua

SEQ ID NO: 63189 - RNA, 19 nt, Homo sapiens
  misc_RNA (1)...(19): siRNA sense strand
gcaagguucaugugaccaa

SEQ ID NO: 63190 - RNA, 19 nt, Homo sapiens
  misc_RNA (1)...(19): siRNA sense strand
gcacggccaccaugaaguc

SEQ ID NO: 63191 - RNA, 19 nt, Homo sapiens
  misc_RNA (1)...(19): siRNA sense strand
caggagaacauccgcauca

SEQ ID NO: 63192 - RNA, 19 nt, Homo sapiens
  misc_RNA (1)...(19): siRNA sense strand
ggacaugacacuggaaggu

SEQ ID NO: 63193 - RNA, 19 nt, Homo sapiens
  misc_RNA (1)...(19): siRNA sense strand
ggcaagacgcugcacauca

SEQ ID NO: 63194 - RNA, 19 nt, Homo sapiens
  misc_RNA (1)...(19): siRNA sense strand
gugacgcccuccuccaaga

SEQ ID NO: 63195 - RNA, 19 nt, Homo sapiens
  misc_RNA (1)...(19): siRNA sense strand
gagaauggcauggaugucu

SEQ ID NO: 63196 - RNA, 19 nt, Homo sapiens
  misc_RNA (1)...(19): siRNA sense strand
ccaaagagaauggcaugga

SEQ ID NO: 63197 - RNA, 19 nt, Homo sapiens
  misc_RNA (1)...(19): siRNA sense strand
ugcagaaugugcucaacaa

SEQ ID NO: 63198 - RNA, 19 nt, Homo sapiens
  misc_RNA (1)...(19): siRNA sense strand
ccugaauacucgccucuuc

SEQ ID NO: 63199 - RNA, 19 nt, Homo sapiens
  misc_RNA (1)...(19): siRNA sense strand
ggacuccccuggacacaga

SEQ ID NO: 63200 - RNA, 19 nt, Homo sapiens
  misc_RNA (1)...(19): siRNA sense strand
gcgcacccacgaucucaaa

SEQ ID NO: 63201 - RNA, 19 nt, Homo sapiens
  misc_RNA (1)...(19): siRNA sense strand
gccggaagaugugcucuca

SEQ ID NO: 63202 - RNA, 19 nt, Homo sapiens
  misc_RNA (1)...(19): siRNA sense strand
gcagggguccgguuuauug

SEQ ID NO: 63203 - RNA, 19 nt, Homo sapiens
  misc_RNA (1)...(19): siRNA sense strand
gcucucagcagcuauguac

SEQ ID NO: 63204 - RNA, 19 nt, Homo sapiens
  misc_RNA (1)...(19): siRNA sense strand
ugucugggaugacuucaca

SEQ ID NO: 63205 - RNA, 19 nt, Homo sapiens
  misc_RNA (1)...(19): siRNA sense strand
ucaacuacuugcccaacau

SEQ ID NO: 63206 - RNA, 19 nt, Homo sapiens
  misc_RNA (1)...(19): siRNA sense strand
agaauggcauggaugucuu

SEQ ID NO: 63207 - RNA, 19 nt, Homo sapiens
  misc_RNA (1)...(19): siRNA sense strand
ccagaagguggucgagauu

SEQ ID NO: 63208 - RNA, 19 nt, Homo sapiens
  misc_RNA (1)...(19): siRNA sense strand
ggccaaggagaacaacgua

SEQ ID NO: 63209 - RNA, 19 nt, Homo sapiens
  misc_RNA (1)...(19): siRNA sense strand
gcgcguguuugacuacagu

SEQ ID NO: 63210 - RNA, 19 nt, Homo sapiens
  misc_RNA (1)...(19): siRNA sense strand
cugugaaacucgcuaaaca

SEQ ID NO: 63211 - RNA, 19 nt, Homo sapiens
  misc_RNA (1)...(19): siRNA sense strand
cagaagugguccgcaagau

SEQ ID NO: 63212 - RNA, 19 nt, Homo sapiens
  misc_RNA (1)...(19): siRNA sense strand
caacucggacguguaugaa

SEQ ID NO: 63213 - RNA, 19 nt, Homo sapiens
  misc_RNA (1)...(19): siRNA sense strand
gaaguggccaaagagaaug

SEQ ID NO: 63214 - RNA, 19 nt, Homo sapiens
  misc_RNA (1)...(19): siRNA sense strand
gcugugggcuacaccaacu

SEQ ID NO: 63215 - RNA, 19 nt, Homo sapiens
  misc_RNA (1)...(19): siRNA sense strand
ccaugcgcuuccuguauga

SEQ ID NO: 63216 - RNA, 19 nt, Homo sapiens
  misc_RNA (1)...(19): siRNA sense strand
gugaaguggccaaagagaa

SEQ ID NO: 63217 - RNA, 19 nt, Homo sapiens
  misc_RNA (1)...(19): siRNA sense strand
ucccagacaucaucaaggu

SEQ ID NO: 63218 - RNA, 19 nt, Homo sapiens
  misc_RNA (1)...(19): siRNA sense strand
caacuacuugcccaacaug

SEQ ID NO: 63219 - RNA, 19 nt, Homo sapiens
  misc_RNA (1)...(19): siRNA sense strand
ggacgugaagggccagauc

SEQ ID NO: 63220 - RNA, 19 nt, Homo sapiens
  misc_RNA (1)...(19): siRNA sense strand
gcccacgaguucuccaaca

SEQ ID NO: 63221 - RNA, 19 nt, Homo sapiens
  misc_RNA (1)...(19): siRNA sense strand
ugcaggcacuggagaagga

SEQ ID NO: 63222 - RNA, 19 nt, Homo sapiens
  misc_RNA (1)...(19): siRNA sense strand
ggacguguaugaaaaugag

SEQ ID NO: 63223 - RNA, 19 nt, Homo sapiens
  misc_RNA (1)...(19): siRNA sense strand
gauuccaugucugggauga

SEQ ID NO: 63224 - RNA, 19 nt, Homo sapiens
  misc_RNA (1)...(19): siRNA sense strand
gggcgcuguuuguggagaa

SEQ ID NO: 63225 - RNA, 19 nt, Homo sapiens
  misc_RNA (1)...(19): siRNA sense strand
cgauguguuugcccacuuc

SEQ ID NO: 63226 - RNA, 19 nt, Homo sapiens
  misc_RNA (1)...(19): siRNA sense strand
caaggagaacaacguagau

SEQ ID NO: 63227 - RNA, 19 nt, Homo sapiens
  misc_RNA (1)...(19): siRNA sense strand
uggaggcugccaucucaua

SEQ ID NO: 63228 - RNA, 19 nt, Homo sapiens
  misc_RNA (1)...(19): siRNA sense strand
uauaagcccaucaagaaag

SEQ ID NO: 63229 - RNA, 19 nt, Homo sapiens
  misc_RNA (1)...(19): siRNA sense strand
ggccaacagaggugagauu

SEQ ID NO: 63230 - RNA, 19 nt, Homo sapiens
  misc_RNA (1)...(19): siRNA sense strand
cagcgacucugugaaacuc

SEQ ID NO: 63231 - RNA, 19 nt, Homo sapiens
  misc_RNA (1)...(19): siRNA sense strand
acaucgaggugcagaucuu

SEQ ID NO: 63232 - RNA, 19 nt, Homo sapiens
  misc_RNA (1)...(19): siRNA sense strand
gcucaacaaccagcaguuc

SEQ ID NO: 63233 - RNA, 19 nt, Homo sapiens
  misc_RNA (1)...(19): siRNA sense strand
caagacgcugcacaucaaa

SEQ ID NO: 63234 - RNA, 19 nt, Homo sapiens
  misc_RNA (1)...(19): siRNA sense strand
ucaagguggccaaggagaa

SEQ ID NO: 63235 - RNA, 19 nt, Homo sapiens
  misc_RNA (1)...(19): siRNA sense strand
gaauggcauggaugucuuc

SEQ ID NO: 63236 - RNA, 19 nt, Homo sapiens
  misc_RNA (1)...(19): siRNA sense strand
ccagaagugguccgcaaga

SEQ ID NO: 63237 - RNA, 19 nt, Homo sapiens
  misc_RNA (1)...(19): siRNA sense strand
gcagcugcgguccaucuug

SEQ ID NO: 63238 - RNA, 19 nt, Homo sapiens
  misc_RNA (1)...(19): siRNA sense strand
auaagcccaucaagaaagu

SEQ ID NO: 63239 - RNA, 19 nt, Homo sapiens
  misc_RNA (1)...(19): siRNA sense strand
cuggauagccugaauacuc

SEQ ID NO: 63240 - RNA, 19 nt, Homo sapiens
  misc_RNA (1)...(19): siRNA sense strand
ccagaugcaccggcagaaa

SEQ ID NO: 63241 - RNA, 19 nt, Homo sapiens
  misc_RNA (1)...(19): siRNA sense strand
ggucaagaaggccuaugug

SEQ ID NO: 63242 - RNA, 19 nt, Homo sapiens
  misc_RNA (1)...(19): siRNA sense strand
uggcaacucggacguguau

SEQ ID NO: 63243 - RNA, 19 nt, Homo sapiens
  misc_RNA (1)...(19): siRNA sense strand
gcucagugccaugaagaug

SEQ ID NO: 63244 - RNA, 19 nt, Homo sapiens
  misc_RNA (1)...(19): siRNA sense strand
ggacacccaggccaugaag

SEQ ID NO: 63245 - RNA, 19 nt, Homo sapiens
  misc_RNA (1)...(19): siRNA sense strand
gaaggaggcucaugucaga

SEQ ID NO: 63246 - RNA, 19 nt, Homo sapiens
  misc_RNA (1)...(19): siRNA sense strand
gaagugcugugaaauagau

SEQ ID NO: 63247 - RNA, 19 nt, Homo sapiens
  misc_RNA (1)...(19): siRNA sense strand
acaccaagguuaccaacua

SEQ ID NO: 63248 - RNA, 19 nt, Homo sapiens
  misc_RNA (1)...(19): siRNA sense strand
gcugggaagugcugugaaa

SEQ ID NO: 63249 - RNA, 19 nt, Homo sapiens
  misc_RNA (1)...(19): siRNA sense strand
gggaagugcugugaaauag

SEQ ID NO: 63250 - RNA, 19 nt, Homo sapiens
  misc_RNA (1)...(19): siRNA sense strand
ggaauuccaugauccugau

SEQ ID NO: 63251 - RNA, 19 nt, Homo sapiens
  misc_RNA (1)...(19): siRNA sense strand
ggaaguacagcucagaguu

SEQ ID NO: 63252 - RNA, 19 nt, Homo sapiens
  misc_RNA (1)...(19): siRNA sense strand
gaaguacagcucagaguuc

SEQ ID NO: 63253 - RNA, 19 nt, Homo sapiens
  misc_RNA (1)...(19): siRNA sense strand
aaacccagaucgagacuca

SEQ ID NO: 63254 - RNA, 19 nt, Homo sapiens
  misc_RNA (1)...(19): siRNA sense strand
gcccuguacuucucagauu

SEQ ID NO: 63255 - RNA, 19 nt, Homo sapiens
  misc_RNA (1)...(19): siRNA sense strand
gcagcgagccaagguguuu

SEQ ID NO: 63256 - RNA, 19 nt, Homo sapiens
  misc_RNA (1)...(19): siRNA sense strand
ccaacuaccuagacuggau

SEQ ID NO: 63257 - RNA, 19 nt, Homo sapiens
  misc_RNA (1)...(19): siRNA sense strand
cugcacaucacaacauuua

SEQ ID NO: 63258 - RNA, 19 nt, Homo sapiens
  misc_RNA (1)...(19): siRNA sense strand
gaacagucaccgacaacau

SEQ ID NO: 63259 - RNA, 19 nt, Homo sapiens
  misc_RNA (1)...(19): siRNA sense strand
gcucugagggaaacaguga

SEQ ID NO: 63260 - RNA, 19 nt, Homo sapiens
  misc_RNA (1)...(19): siRNA sense strand
uuacuuaacagaacaguca

SEQ ID NO: 63261 - RNA, 19 nt, Homo sapiens
  misc_RNA (1)...(19): siRNA sense strand
ugggaagugcugugaaaua

SEQ ID NO: 63262 - RNA, 19 nt, Homo sapiens
  misc_RNA (1)...(19): siRNA sense strand
gcacaucacaacauuuacu

SEQ ID NO: 63263 - RNA, 19 nt, Homo sapiens
  misc_RNA (1)...(19): siRNA sense strand
ggaagugcugugaaauaga

SEQ ID NO: 63264 - RNA, 19 nt, Homo sapiens
  misc_RNA (1)...(19): siRNA sense strand
ggccugggcaaacauaauu

SEQ ID NO: 63265 - RNA, 19 nt, Homo sapiens
  misc_RNA (1)...(19): siRNA sense strand
acagaacagucaccgacaa

SEQ ID NO: 63266 - RNA, 19 nt, Homo sapiens
  misc_RNA (1)...(19): siRNA sense strand
aaccacaacuacugcagaa

SEQ ID NO: 63267 - RNA, 19 nt, Homo sapiens
  misc_RNA (1)...(19): siRNA sense strand
guggagcagucuucguuuc

SEQ ID NO: 63268 - RNA, 19 nt, Homo sapiens
  misc_RNA (1)...(19): siRNA sense strand
gaacgauggccgcaugacu

SEQ ID NO: 63269 - RNA, 19 nt, Homo sapiens
  misc_RNA (1)...(19): siRNA sense strand
acucaaagcccuggugcua

SEQ ID NO: 63270 - RNA, 19 nt, Homo sapiens
  misc_RNA (1)...(19): siRNA sense strand
gcccuggugcuacgucuuu

SEQ ID NO: 63271 - RNA, 19 nt, Homo sapiens
  misc_RNA (1)...(19): siRNA sense strand
cagaagaggagccagaucu

SEQ ID NO: 63272 - RNA, 19 nt, Homo sapiens
  misc_RNA (1)...(19): siRNA sense strand
caacuaccuagacuggauu

SEQ ID NO: 63273 - RNA, 19 nt, Homo sapiens
  misc_RNA (1)...(19): siRNA sense strand
gaccagggcaucagcuaca

SEQ ID NO: 63274 - RNA, 19 nt, Homo sapiens
  misc_RNA (1)...(19): siRNA sense strand
gauaggcaagguuuacaca

SEQ ID NO: 63275 - RNA, 19 nt, Homo sapiens
  misc_RNA (1)...(19): siRNA sense strand
ccacaacuacugcagaaac

SEQ ID NO: 63276 - RNA, 19 nt, Homo sapiens
  misc_RNA (1)...(19): siRNA sense strand
gaauuccaugauccugaua

SEQ ID NO: 63277 - RNA, 19 nt, Homo sapiens
  misc_RNA (1)...(19): siRNA sense strand
cccuguacuucucagauuu

SEQ ID NO: 63278 - RNA, 19 nt, Homo sapiens
  misc_RNA (1)...(19): siRNA sense strand
caccaagguuaccaacuac

SEQ ID NO: 63279 - RNA, 19 nt, Homo sapiens
  misc_RNA (1)...(19): siRNA sense strand
guguggagcagucuucguu

SEQ ID NO: 63280 - RNA, 19 nt, Homo sapiens
  misc_RNA (1)...(19): siRNA sense strand
ugacugcuacuuugggaau

SEQ ID NO: 63281 - RNA, 19 nt, Homo sapiens
  misc_RNA (1)...(19): siRNA sense strand
uagacuggauucgugacaa

SEQ ID NO: 63282 - RNA, 19 nt, Homo sapiens
  misc_RNA (1)...(19): siRNA sense strand
gccugggcaaacauaauua

SEQ ID NO: 63283 - RNA, 19 nt, Homo sapiens
  misc_RNA (1)...(19): siRNA sense strand
gaagugcugugaaauagau

SEQ ID NO: 63284 - RNA, 19 nt, Homo sapiens
  misc_RNA (1)...(19): siRNA sense strand
gcugggaagugcugugaaa

SEQ ID NO: 63285 - RNA, 19 nt, Homo sapiens
  misc_RNA (1)...(19): siRNA sense strand
gggaagugcugugaaauag

SEQ ID NO: 63286 - RNA, 19 nt, Homo sapiens
  misc_RNA (1)...(19): siRNA sense strand
ggaauuccaugauccugau

SEQ ID NO: 63287 - RNA, 19 nt, Homo sapiens
  misc_RNA (1)...(19): siRNA sense strand
ggccuugucuccuuucuau

SEQ ID NO: 63288 - RNA, 19 nt, Homo sapiens
  misc_RNA (1)...(19): siRNA sense strand
ggaaguacagcucagaguu

SEQ ID NO: 63289 - RNA, 19 nt, Homo sapiens
  misc_RNA (1)...(19): siRNA sense strand
gaaguacagcucagaguuc

SEQ ID NO: 63290 - RNA, 19 nt, Homo sapiens
  misc_RNA (1)...(19): siRNA sense strand
aaacccagaucgagacuca

SEQ ID NO: 63291 - RNA, 19 nt, Homo sapiens
  misc_RNA (1)...(19): siRNA sense strand
gcccuguacuucucagauu

SEQ ID NO: 63292 - RNA, 19 nt, Homo sapiens
  misc_RNA (1)...(19): siRNA sense strand
gcagcgagccaagguguuu

SEQ ID NO: 63293 - RNA, 19 nt, Homo sapiens
  misc_RNA (1)...(19): siRNA sense strand
caugaggccuugucuccuu

SEQ ID NO: 63294 - RNA, 19 nt, Homo sapiens
  misc_RNA (1)...(19): siRNA sense strand
gcucugagggaaacaguga

SEQ ID NO: 63295 - RNA, 19 nt, Homo sapiens
  misc_RNA (1)...(19): siRNA sense strand
ugggaagugcugugaaaua

SEQ ID NO: 63296 - RNA, 19 nt, Homo sapiens
  misc_RNA (1)...(19): siRNA sense strand
ggaagugcugugaaauaga

SEQ ID NO: 63297 - RNA, 19 nt, Homo sapiens
  misc_RNA (1)...(19): siRNA sense strand
ggccugggcaaacauaauu

SEQ ID NO: 63298 - RNA, 19 nt, Homo sapiens
  misc_RNA (1)...(19): siRNA sense strand
aaccacaacuacugcagaa

SEQ ID NO: 63299 - RNA, 19 nt, Homo sapiens
  misc_RNA (1)...(19): siRNA sense strand
guggagcagucuucguuuc

SEQ ID NO: 63300 - RNA, 19 nt, Homo sapiens
  misc_RNA (1)...(19): siRNA sense strand
acucaaagcccuggugcua

SEQ ID NO: 63301 - RNA, 19 nt, Homo sapiens
  misc_RNA (1)...(19): siRNA sense strand
gcccuggugcuacgucuuu

SEQ ID NO: 63302 - RNA, 19 nt, Homo sapiens
  misc_RNA (1)...(19): siRNA sense strand
gaccagggcaucagcuaca

SEQ ID NO: 63303 - RNA, 19 nt, Homo sapiens
  misc_RNA (1)...(19): siRNA sense strand
cagaagaggagccagaucu

SEQ ID NO: 63304 - RNA, 19 nt, Homo sapiens
  misc_RNA (1)...(19): siRNA sense strand
gauaggcaagguuuacaca

SEQ ID NO: 63305 - RNA, 19 nt, Homo sapiens
  misc_RNA (1)...(19): siRNA sense strand
ccacaacuacugcagaaac

SEQ ID NO: 63306 - RNA, 19 nt, Homo sapiens
  misc_RNA (1)...(19): siRNA sense strand
gaauuccaugauccugaua

SEQ ID NO: 63307 - RNA, 19 nt, Homo sapiens
  misc_RNA (1)...(19): siRNA sense strand
cccuguacuucucagauuu

SEQ ID NO: 63308 - RNA, 19 nt, Homo sapiens
  misc_RNA (1)...(19): siRNA sense strand
ugacugcuacuuugggaau

SEQ ID NO: 63309 - RNA, 19 nt, Homo sapiens
  misc_RNA (1)...(19): siRNA sense strand
guguggagcagucuucguu

SEQ ID NO: 63310 - RNA, 19 nt, Homo sapiens
  misc_RNA (1)...(19): siRNA sense strand
ccuugucuccuuucuauuc

SEQ ID NO: 63311 - RNA, 19 nt, Homo sapiens
  misc_RNA (1)...(19): siRNA sense strand
gccugggcaaacauaauua

SEQ ID NO: 63312 - RNA, 19 nt, Homo sapiens
  misc_RNA (1)...(19): siRNA sense strand
gaaggaggcucaugucaga

SEQ ID NO: 63313 - RNA, 19 nt, Homo sapiens
  misc_RNA (1)...(19): siRNA sense strand
gaagugcugugaaauagau

SEQ ID NO: 63314 - RNA, 19 nt, Homo sapiens
  misc_RNA (1)...(19): siRNA sense strand
acaccaagguuaccaacua

SEQ ID NO: 63315 - RNA, 19 nt, Homo sapiens
  misc_RNA (1)...(19): siRNA sense strand
gcugggaagugcugugaaa

SEQ ID NO: 63316 - RNA, 19 nt, Homo sapiens
  misc_RNA (1)...(19): siRNA sense strand
gggaagugcugugaaauag

SEQ ID NO: 63317 - RNA, 19 nt, Homo sapiens
  misc_RNA (1)...(19): siRNA sense strand
ggaauuccaugauccugau

SEQ ID NO: 63318 - RNA, 19 nt, Homo sapiens
  misc_RNA (1)...(19): siRNA sense strand
ggaaguacagcucagaguu

SEQ ID NO: 63319 - RNA, 19 nt, Homo sapiens
  misc_RNA (1)...(19): siRNA sense strand
gaaguacagcucagaguuc

SEQ ID NO: 63320 - RNA, 19 nt, Homo sapiens
  misc_RNA (1)...(19): siRNA sense strand
aaacccagaucgagacuca

SEQ ID NO: 63321 - RNA, 19 nt, Homo sapiens
  misc_RNA (1)...(19): siRNA sense strand
gcccuguacuucucagauu

SEQ ID NO: 63322 - RNA, 19 nt, Homo sapiens
  misc_RNA (1)...(19): siRNA sense strand
gcagcgagccaagguguuu

SEQ ID NO: 63323 - RNA, 19 nt, Homo sapiens
  misc_RNA (1)...(19): siRNA sense strand
ccaacuaccuagacuggau

SEQ ID NO: 63324 - RNA, 19 nt, Homo sapiens
  misc_RNA (1)...(19): siRNA sense strand
cugcacaucacaacauuua

SEQ ID NO: 63325 - RNA, 19 nt, Homo sapiens
  misc_RNA (1)...(19): siRNA sense strand
gaacagucaccgacaacau

SEQ ID NO: 63326 - RNA, 19 nt, Homo sapiens
  misc_RNA (1)...(19): siRNA sense strand
gcucugagggaaacaguga

SEQ ID NO: 63327 - RNA, 19 nt, Homo sapiens
  misc_RNA (1)...(19): siRNA sense strand
uuacuuaacagaacaguca

SEQ ID NO: 63328 - RNA, 19 nt, Homo sapiens
  misc_RNA (1)...(19): siRNA sense strand
ugggaagugcugugaaaua

SEQ ID NO: 63329 - RNA, 19 nt, Homo sapiens
  misc_RNA (1)...(19): siRNA sense strand
gcacaucacaacauuuacu

SEQ ID NO: 63330 - RNA, 19 nt, Homo sapiens
  misc_RNA (1)...(19): siRNA sense strand
ggaagugcugugaaauaga

SEQ ID NO: 63331 - RNA, 19 nt, Homo sapiens
  misc_RNA (1)...(19): siRNA sense strand
ggccugggcaaacauaauu

SEQ ID NO: 63332 - RNA, 19 nt, Homo sapiens
  misc_RNA (1)...(19): siRNA sense strand
acagaacagucaccgacaa

SEQ ID NO: 63333 - RNA, 19 nt, Homo sapiens
  misc_RNA (1)...(19): siRNA sense strand
aaccacaacuacugcagaa

SEQ ID NO: 63334 - RNA, 19 nt, Homo sapiens
  misc_RNA (1)...(19): siRNA sense strand
guggagcagucuucguuuc

SEQ ID NO: 63335 - RNA, 19 nt, Homo sapiens
  misc_RNA (1)...(19): siRNA sense strand
gaacgauggccgcaugacu

SEQ ID NO: 63336 - RNA, 19 nt, Homo sapiens
  misc_RNA (1)...(19): siRNA sense strand
acucaaagcccuggugcua

SEQ ID NO: 63337 - RNA, 19 nt, Homo sapiens
  misc_RNA (1)...(19): siRNA sense strand
gcccuggugcuacgucuuu

SEQ ID NO: 63338 - RNA, 19 nt, Homo sapiens
  misc_RNA (1)...(19): siRNA sense strand
cagaagaggagccagaucu

SEQ ID NO: 63339 - RNA, 19 nt, Homo sapiens
  misc_RNA (1)...(19): siRNA sense strand
caacuaccuagacuggauu

SEQ ID NO: 63340 - RNA, 19 nt, Homo sapiens
  misc_RNA (1)...(19): siRNA sense strand
gaccagggcaucagcuaca

SEQ ID NO: 63341 - RNA, 19 nt, Homo sapiens
  misc_RNA (1)...(19): siRNA sense strand
gauaggcaagguuuacaca

SEQ ID NO: 63342 - RNA, 19 nt, Homo sapiens
  misc_RNA (1)...(19): siRNA sense strand
ccacaacuacugcagaaac

SEQ ID NO: 63343 - RNA, 19 nt, Homo sapiens
  misc_RNA (1)...(19): siRNA sense strand
gaauuccaugauccugaua

SEQ ID NO: 63344 - RNA, 19 nt, Homo sapiens
  misc_RNA (1)...(19): siRNA sense strand
cccuguacuucucagauuu

SEQ ID NO: 63345 - RNA, 19 nt, Homo sapiens
  misc_RNA (1)...(19): siRNA sense strand
caccaagguuaccaacuac

SEQ ID NO: 63346 - RNA, 19 nt, Homo sapiens
  misc_RNA (1)...(19): siRNA sense strand
guguggagcagucuucguu

SEQ ID NO: 63347 - RNA, 19 nt, Homo sapiens
  misc_RNA (1)...(19): siRNA sense strand
ugacugcuacuuugggaau

SEQ ID NO: 63348 - RNA, 19 nt, Homo sapiens
  misc_RNA (1)...(19): siRNA sense strand
uagacuggauucgugacaa

SEQ ID NO: 63349 - RNA, 19 nt, Homo sapiens
  misc_RNA (1)...(19): siRNA sense strand
gccugggcaaacauaauua

SEQ ID NO: 63350 - RNA, 19 nt, Homo sapiens
  misc_RNA (1)...(19): siRNA sense strand
ggccaaaccuuaugaauuu

SEQ ID NO: 63351 - RNA, 19 nt, Homo sapiens
  misc_RNA (1)...(19): siRNA sense strand
gaagaaacaugcaaaggaa

SEQ ID NO: 63352 - RNA, 19 nt, Homo sapiens
  misc_RNA (1)...(19): siRNA sense strand
gaaagagacuugccaugaa

SEQ ID NO: 63353 - RNA, 19 nt, Homo sapiens
  misc_RNA (1)...(19): siRNA sense strand
guaauucucuccuuugaaa

SEQ ID NO: 63354 - RNA, 19 nt, Homo sapiens
  misc_RNA (1)...(19): siRNA sense strand
caaggaagcuguugcaaau

SEQ ID NO: 63355 - RNA, 19 nt, Homo sapiens
  misc_RNA (1)...(19): siRNA sense strand
gaagacacaugcaauugaa

SEQ ID NO: 63356 - RNA, 19 nt, Homo sapiens
  misc_RNA (1)...(19): siRNA sense strand
ccacuaauauccauccaua

SEQ ID NO: 63357 - RNA, 19 nt, Homo sapiens
  misc_RNA (1)...(19): siRNA sense strand
gaauagcuguguaugauga

SEQ ID NO: 63358 - RNA, 19 nt, Homo sapiens
  misc_RNA (1)...(19): siRNA sense strand
gcacagaucuagugaacau

SEQ ID NO: 63359 - RNA, 19 nt, Homo sapiens
  misc_RNA (1)...(19): siRNA sense strand
gaagucgacucaugagaaa

SEQ ID NO: 63360 - RNA, 19 nt, Homo sapiens
  misc_RNA (1)...(19): siRNA sense strand
caagaaagguauugaacuu

SEQ ID NO: 63361 - RNA, 19 nt, Homo sapiens
  misc_RNA (1)...(19): siRNA sense strand
gagaauagcuguguaugau

SEQ ID NO: 63362 - RNA, 19 nt, Homo sapiens
  misc_RNA (1)...(19): siRNA sense strand
ccaaagaaauggaucaguu

SEQ ID NO: 63363 - RNA, 19 nt, Homo sapiens
  misc_RNA (1)...(19): siRNA sense strand
guaauugucucgaaaugaa

SEQ ID NO: 63364 - RNA, 19 nt, Homo sapiens
  misc_RNA (1)...(19): siRNA sense strand
ggaaguaauugucucgaaa

SEQ ID NO: 63365 - RNA, 19 nt, Homo sapiens
  misc_RNA (1)...(19): siRNA sense strand
gcugaaaccugaaguugaa

SEQ ID NO: 63366 - RNA, 19 nt, Homo sapiens
  misc_RNA (1)...(19): siRNA sense strand
gauggaagcuggagaaucu

SEQ ID NO: 63367 - RNA, 19 nt, Homo sapiens
  misc_RNA (1)...(19): siRNA sense strand
gaagaacgcaauauucauu

SEQ ID NO: 63368 - RNA, 19 nt, Homo sapiens
  misc_RNA (1)...(19): siRNA sense strand
ggaccuggcugucuugaga

SEQ ID NO: 63369 - RNA, 19 nt, Homo sapiens
  misc_RNA (1)...(19): siRNA sense strand
gcagauguguugaacuuga

SEQ ID NO: 63370 - RNA, 19 nt, Homo sapiens
  misc_RNA (1)...(19): siRNA sense strand
gaguuuggcuucuuucuga

SEQ ID NO: 63371 - RNA, 19 nt, Homo sapiens
  misc_RNA (1)...(19): siRNA sense strand
gaugaaggcuuacuugaag

SEQ ID NO: 63372 - RNA, 19 nt, Homo sapiens
  misc_RNA (1)...(19): siRNA sense strand
ugagggaaauaaaccauua

SEQ ID NO: 63373 - RNA, 19 nt, Homo sapiens
  misc_RNA (1)...(19): siRNA sense strand
gauccucgauugaaugaaa

SEQ ID NO: 63374 - RNA, 19 nt, Homo sapiens
  misc_RNA (1)...(19): siRNA sense strand
gaagaaagaaagagacuug

SEQ ID NO: 63375 - RNA, 19 nt, Homo sapiens
  misc_RNA (1)...(19): siRNA sense strand
ggucagaaaugaucaauac

SEQ ID NO: 63376 - RNA, 19 nt, Homo sapiens
  misc_RNA (1)...(19): siRNA sense strand
gaacucgcaugguuaugaa

SEQ ID NO: 63377 - RNA, 19 nt, Homo sapiens
  misc_RNA (1)...(19): siRNA sense strand
gcaaauaucaacaguacaa

SEQ ID NO: 63378 - RNA, 19 nt, Homo sapiens
  misc_RNA (1)...(19): siRNA sense strand
gaaaaucacugcagcaaau

SEQ ID NO: 63379 - RNA, 19 nt, Homo sapiens
  misc_RNA (1)...(19): siRNA sense strand
ucacaaaucuaaggucaaa

SEQ ID NO: 63380 - RNA, 19 nt, Homo sapiens
  misc_RNA (1)...(19): siRNA sense strand
ugacaugccucaagaaaca

SEQ ID NO: 63381 - RNA, 19 nt, Homo sapiens
  misc_RNA (1)...(19): siRNA sense strand
gaacccaacugccucuuca

SEQ ID NO: 63382 - RNA, 19 nt, Homo sapiens
  misc_RNA (1)...(19): siRNA sense strand
aaagcaauguguacagaua

SEQ ID NO: 63383 - RNA, 19 nt, Homo sapiens
  misc_RNA (1)...(19): siRNA sense strand
gaccaagaaccaauaauaa

SEQ ID NO: 63384 - RNA, 19 nt, Homo sapiens
  misc_RNA (1)...(19): siRNA sense strand
ccaaugacaugccucaaga

SEQ ID NO: 63385 - RNA, 19 nt, Homo sapiens
  misc_RNA (1)...(19): siRNA sense strand
caaggaaacugcauuuguc

SEQ ID NO: 63386 - RNA, 19 nt, Homo sapiens
  misc_RNA (1)...(19): siRNA sense strand
guaauuacaugccucagau

SEQ ID NO: 63387 - RNA, 19 nt, Homo sapiens
  misc_RNA (1)...(19): siRNA sense strand
aguacaagauguccaaaua

SEQ ID NO: 63388 - RNA, 19 nt, Homo sapiens
  misc_RNA (1)...(19): siRNA sense strand
guaugaaccugaugaagau

SEQ ID NO: 63389 - RNA, 19 nt, Homo sapiens
  misc_RNA (1)...(19): siRNA sense strand
gaucgaaagugcugaccaa

SEQ ID NO: 63390 - RNA, 19 nt, Homo sapiens
  misc_RNA (1)...(19): siRNA sense strand
aaagagaagucgacucaug

SEQ ID NO: 63391 - RNA, 19 nt, Homo sapiens
  misc_RNA (1)...(19): siRNA sense strand
acaaaggaauggucagaaa

SEQ ID NO: 63392 - RNA, 19 nt, Homo sapiens
  misc_RNA (1)...(19): siRNA sense strand
guuuagaacuuuaccaaga

SEQ ID NO: 63393 - RNA, 19 nt, Homo sapiens
  misc_RNA (1)...(19): siRNA sense strand
gcaaagccaucagccaaga

SEQ ID NO: 63394 - RNA, 19 nt, Homo sapiens
  misc_RNA (1)...(19): siRNA sense strand
ucaauccaguuuacaauga

SEQ ID NO: 63395 - RNA, 19 nt, Homo sapiens
  misc_RNA (1)...(19): siRNA sense strand
cgaaggagaugcagcagau

SEQ ID NO: 63396 - RNA, 19 nt, Homo sapiens
  misc_RNA (1)...(19): siRNA sense strand
agaaauggaucaguugaaa

SEQ ID NO: 63397 - RNA, 19 nt, Homo sapiens
  misc_RNA (1)...(19): siRNA sense strand
aaagagagcagaccaaaug

SEQ ID NO: 63398 - RNA, 19 nt, Homo sapiens
  misc_RNA (1)...(19): siRNA sense strand
gcagaagaacgcaauauuc

SEQ ID NO: 63399 - RNA, 19 nt, Homo sapiens
  misc_RNA (1)...(19): siRNA sense strand
gaaccaauaauaacucaug

SEQ ID NO: 63400 - RNA, 19 nt, Homo sapiens
  misc_RNA (1)...(19): siRNA sense strand
gaaauuggaagccgagaug

SEQ ID NO: 63401 - RNA, 19 nt, Homo sapiens
  misc_RNA (1)...(19): siRNA sense strand
ggaugaguuuggcuucuuu

SEQ ID NO: 63402 - RNA, 19 nt, Homo sapiens
  misc_RNA (1)...(19): siRNA sense strand
ccaaugaccucaaaagaaa

SEQ ID NO: 63403 - RNA, 19 nt, Homo sapiens
  misc_RNA (1)...(19): siRNA sense strand
cagcaaauaucaacaguac

SEQ ID NO: 63404 - RNA, 19 nt, Homo sapiens
  misc_RNA (1)...(19): siRNA sense strand
cgaaagugcugaccaagag

SEQ ID NO: 63405 - RNA, 19 nt, Homo sapiens
  misc_RNA (1)...(19): siRNA sense strand
gaaagguauugaacuuauc

SEQ ID NO: 63406 - RNA, 19 nt, Homo sapiens
  misc_RNA (1)...(19): siRNA sense strand
uaucguggaugcuuuauca

SEQ ID NO: 63407 - RNA, 19 nt, Homo sapiens
  misc_RNA (1)...(19): siRNA sense strand
gagauaucguggaugcuuu

SEQ ID NO: 63408 - RNA, 19 nt, Homo sapiens
  misc_RNA (1)...(19): siRNA sense strand
aagaaacacuggaugaaau

SEQ ID NO: 63409 - RNA, 19 nt, Homo sapiens
  misc_RNA (1)...(19): siRNA sense strand
cagcaacaguaguaugaaa

SEQ ID NO: 63410 - RNA, 19 nt, Homo sapiens
  misc_RNA (1)...(19): siRNA sense strand
gcuugaacaucuagaauuc

SEQ ID NO: 63411 - RNA, 19 nt, Homo sapiens
  misc_RNA (1)...(19): siRNA sense strand
uaaagaaacagcagaagga

SEQ ID NO: 63412 - RNA, 19 nt, Homo sapiens
  misc_RNA (1)...(19): siRNA sense strand
gcagaucauugagauguau

SEQ ID NO: 63413 - RNA, 19 nt, Homo sapiens
  misc_RNA (1)...(19): siRNA sense strand
aaucuuggcugcucuugaa

SEQ ID NO: 63414 - RNA, 19 nt, Homo sapiens
  misc_RNA (1)...(19): siRNA sense strand
agaaggcaaugaagaagaa

SEQ ID NO: 63415 - RNA, 19 nt, Homo sapiens
  misc_RNA (1)...(19): siRNA sense strand
cgacacauuucccuucgaa

SEQ ID NO: 63416 - RNA, 19 nt, Homo sapiens
  misc_RNA (1)...(19): siRNA sense strand
gaucaaucauacacaacuu

SEQ ID NO: 63417 - RNA, 19 nt, Homo sapiens
  misc_RNA (1)...(19): siRNA sense strand
gcacaccaggcuaagauuu

SEQ ID NO: 63418 - RNA, 19 nt, Homo sapiens
  misc_RNA (1)...(19): siRNA sense strand
gauaacaacaagcugauug

SEQ ID NO: 63419 - RNA, 19 nt, Homo sapiens
  misc_RNA (1)...(19): siRNA sense strand
ccacugacaccauacguaa

SEQ ID NO: 63420 - RNA, 19 nt, Homo sapiens
  misc_RNA (1)...(19): siRNA sense strand
guucuucccauaacacuua

SEQ ID NO: 63421 - RNA, 19 nt, Homo sapiens
  misc_RNA (1)...(19): siRNA sense strand
guagaaggccugagaucaa

SEQ ID NO: 63422 - RNA, 19 nt, Homo sapiens
  misc_RNA (1)...(19): siRNA sense strand
caagaaacacuggaugaaa

SEQ ID NO: 63423 - RNA, 19 nt, Homo sapiens
  misc_RNA (1)...(19): siRNA sense strand
ccaacugccucuucaaagu

SEQ ID NO: 63424 - RNA, 19 nt, Homo sapiens
  misc_RNA (1)...(19): siRNA sense strand
gggaaguaauugucucgaa

SEQ ID NO: 63425 - RNA, 19 nt, Homo sapiens
  misc_RNA (1)...(19): siRNA sense strand
ccugauggauuuggagaua

SEQ ID NO: 63426 - RNA, 19 nt, Homo sapiens
  misc_RNA (1)...(19): siRNA sense strand
gcucacuacuucaucaguu

SEQ ID NO: 63427 - RNA, 19 nt, Homo sapiens
  misc_RNA (1)...(19): siRNA sense strand
cuagaucguuuagaacuuu

SEQ ID NO: 63428 - RNA, 19 nt, Homo sapiens
  misc_RNA (1)...(19): siRNA sense strand
ggccugagaucaaucauac

SEQ ID NO: 63429 - RNA, 19 nt, Homo sapiens
  misc_RNA (1)...(19): siRNA sense strand
cuagaaugcucccucauca

SEQ ID NO: 63430 - RNA, 19 nt, Homo sapiens
  misc_RNA (1)...(19): siRNA sense strand
gaagcaguccaaagaaaug

SEQ ID NO: 63431 - RNA, 19 nt, Homo sapiens
  misc_RNA (1)...(19): siRNA sense strand
gcacagcacacaaaggaau

SEQ ID NO: 63432 - RNA, 19 nt, Homo sapiens
  misc_RNA (1)...(19): siRNA sense strand
gagagcagaccaaaugaga

SEQ ID NO: 63433 - RNA, 19 nt, Homo sapiens
  misc_RNA (1)...(19): siRNA sense strand
cagaagaacgcaauauuca

SEQ ID NO: 63434 - RNA, 19 nt, Homo sapiens
  misc_RNA (1)...(19): siRNA sense strand
guccaaauauugcgaagau

SEQ ID NO: 63435 - RNA, 19 nt, Homo sapiens
  misc_RNA (1)...(19): siRNA sense strand
gaacugacacaaaagauuu

SEQ ID NO: 63436 - RNA, 19 nt, Homo sapiens
  misc_RNA (1)...(19): siRNA sense strand
ugagaucaaucauacacaa

SEQ ID NO: 63437 - RNA, 19 nt, Homo sapiens
  misc_RNA (1)...(19): siRNA sense strand
ggaaagaaugaugaaauug

SEQ ID NO: 63438 - RNA, 19 nt, Homo sapiens
  misc_RNA (1)...(19): siRNA sense strand
caaagaaauggaucaguug

SEQ ID NO: 63439 - RNA, 19 nt, Homo sapiens
  misc_RNA (1)...(19): siRNA sense strand
gcagaugaaggcuuacuug

SEQ ID NO: 63440 - RNA, 19 nt, Homo sapiens
  misc_RNA (1)...(19): siRNA sense strand
uauaacaaacggcaaauga

SEQ ID NO: 63441 - RNA, 19 nt, Homo sapiens
  misc_RNA (1)...(19): siRNA sense strand
gaacauuugcaucgggaaa

SEQ ID NO: 63442 - RNA, 19 nt, Homo sapiens
  misc_RNA (1)...(19): siRNA sense strand
ggaauggucagaaaugauc

SEQ ID NO: 63443 - RNA, 19 nt, Homo sapiens
  misc_RNA (1)...(19): siRNA sense strand
gaaguaauugucucgaaau

SEQ ID NO: 63444 - RNA, 19 nt, Homo sapiens
  misc_RNA (1)...(19): siRNA sense strand
gccaaaccuuaugaauuua

SEQ ID NO: 63445 - RNA, 19 nt, Homo sapiens
  misc_RNA (1)...(19): siRNA sense strand
guacaagauguccaaauau

SEQ ID NO: 63446 - RNA, 19 nt, Homo sapiens
  misc_RNA (1)...(19): siRNA sense strand
gaaaagcaauguguacaga

SEQ ID NO: 63447 - RNA, 19 nt, Homo sapiens
  misc_RNA (1)...(19): siRNA sense strand
cuuccuagaucguuuagaa

SEQ ID NO: 63448 - RNA, 19 nt, Homo sapiens
  misc_RNA (1)...(19): siRNA sense strand
caacaccgccaaagcaaau

SEQ ID NO: 63449 - RNA, 19 nt, Homo sapiens
  misc_RNA (1)...(19): siRNA sense strand
caacuacgcccagccugua

SEQ ID NO: 63450 - RNA, 19 nt, Homo sapiens
  misc_RNA (1)...(19): siRNA sense strand
ggccaaaccuuaugaauuu

SEQ ID NO: 63451 - RNA, 19 nt, Homo sapiens
  misc_RNA (1)...(19): siRNA sense strand
gaagaaacaugcaaaggaa

SEQ ID NO: 63452 - RNA, 19 nt, Homo sapiens
  misc_RNA (1)...(19): siRNA sense strand
gaaagagacuugccaugaa

SEQ ID NO: 63453 - RNA, 19 nt, Homo sapiens
  misc_RNA (1)...(19): siRNA sense strand
guaauucucuccuuugaaa

SEQ ID NO: 63454 - RNA, 19 nt, Homo sapiens
  misc_RNA (1)...(19): siRNA sense strand
caaggaagcuguugcaaau

SEQ ID NO: 63455 - RNA, 19 nt, Homo sapiens
  misc_RNA (1)...(19): siRNA sense strand
gaagacacaugcaauugaa

SEQ ID NO: 63456 - RNA, 19 nt, Homo sapiens
  misc_RNA (1)...(19): siRNA sense strand
ccacuaauauccauccaua

SEQ ID NO: 63457 - RNA, 19 nt, Homo sapiens
  misc_RNA (1)...(19): siRNA sense strand
gaauagcuguguaugauga

SEQ ID NO: 63458 - RNA, 19 nt, Homo sapiens
  misc_RNA (1)...(19): siRNA sense strand
gcacagaucuagugaacau

SEQ ID NO: 63459 - RNA, 19 nt, Homo sapiens
  misc_RNA (1)...(19): siRNA sense strand
gaagucgacucaugagaaa

SEQ ID NO: 63460 - RNA, 19 nt, Homo sapiens
  misc_RNA (1)...(19): siRNA sense strand
caagaaagguauugaacuu

SEQ ID NO: 63461 - RNA, 19 nt, Homo sapiens
  misc_RNA (1)...(19): siRNA sense strand
gagaauagcuguguaugau

SEQ ID NO: 63462 - RNA, 19 nt, Homo sapiens
  misc_RNA (1)...(19): siRNA sense strand
ccaaagaaauggaucaguu

SEQ ID NO: 63463 - RNA, 19 nt, Homo sapiens
  misc_RNA (1)...(19): siRNA sense strand
guaauugucucgaaaugaa

SEQ ID NO: 63464 - RNA, 19 nt, Homo sapiens
  misc_RNA (1)...(19): siRNA sense strand
ggaaguaauugucucgaaa

SEQ ID NO: 63465 - RNA, 19 nt, Homo sapiens
  misc_RNA (1)...(19): siRNA sense strand
gcugaaaccugaaguugaa

SEQ ID NO: 63466 - RNA, 19 nt, Homo sapiens
  misc_RNA (1)...(19): siRNA sense strand
gauggaagcuggagaaucu

SEQ ID NO: 63467 - RNA, 19 nt, Homo sapiens
  misc_RNA (1)...(19): siRNA sense strand
gaagaacgcaauauucauu

SEQ ID NO: 63468 - RNA, 19 nt, Homo sapiens
  misc_RNA (1)...(19): siRNA sense strand
ggaccuggcugucuugaga

SEQ ID NO: 63469 - RNA, 19 nt, Homo sapiens
  misc_RNA (1)...(19): siRNA sense strand
gcagauguguugaacuuga

SEQ ID NO: 63470 - RNA, 19 nt, Homo sapiens
  misc_RNA (1)...(19): siRNA sense strand
gaguuuggcuucuuucuga

SEQ ID NO: 63471 - RNA, 19 nt, Homo sapiens
  misc_RNA (1)...(19): siRNA sense strand
gaugaaggcuuacuugaag

SEQ ID NO: 63472 - RNA, 19 nt, Homo sapiens
  misc_RNA (1)...(19): siRNA sense strand
ugagggaaauaaaccauua

SEQ ID NO: 63473 - RNA, 19 nt, Homo sapiens
  misc_RNA (1)...(19): siRNA sense strand
gauccucgauugaaugaaa

SEQ ID NO: 63474 - RNA, 19 nt, Homo sapiens
  misc_RNA (1)...(19): siRNA sense strand
gaagaaagaaagagacuug

SEQ ID NO: 63475 - RNA, 19 nt, Homo sapiens
  misc_RNA (1)...(19): siRNA sense strand
ggucagaaaugaucaauac

SEQ ID NO: 63476 - RNA, 19 nt, Homo sapiens
  misc_RNA (1)...(19): siRNA sense strand
gaacucgcaugguuaugaa

SEQ ID NO: 63477 - RNA, 19 nt, Homo sapiens
  misc_RNA (1)...(19): siRNA sense strand
gcaaauaucaacaguacaa

SEQ ID NO: 63478 - RNA, 19 nt, Homo sapiens
  misc_RNA (1)...(19): siRNA sense strand
gaaaaucacugcagcaaau

SEQ ID NO: 63479 - RNA, 19 nt, Homo sapiens
  misc_RNA (1)...(19): siRNA sense strand
ucacaaaucuaaggucaaa

SEQ ID NO: 63480 - RNA, 19 nt, Homo sapiens
  misc_RNA (1)...(19): siRNA sense strand
ugacaugccucaagaaaca

SEQ ID NO: 63481 - RNA, 19 nt, Homo sapiens
  misc_RNA (1)...(19): siRNA sense strand
gaacccaacugccucuuca

SEQ ID NO: 63482 - RNA, 19 nt, Homo sapiens
  misc_RNA (1)...(19): siRNA sense strand
aaagcaauguguacagaua

SEQ ID NO: 63483 - RNA, 19 nt, Homo sapiens
  misc_RNA (1)...(19): siRNA sense strand
gaccaagaaccaauaauaa

SEQ ID NO: 63484 - RNA, 19 nt, Homo sapiens
  misc_RNA (1)...(19): siRNA sense strand
ccaaugacaugccucaaga

SEQ ID NO: 63485 - RNA, 19 nt, Homo sapiens
  misc_RNA (1)...(19): siRNA sense strand
caaggaaacugcauuuguc

SEQ ID NO: 63486 - RNA, 19 nt, Homo sapiens
  misc_RNA (1)...(19): siRNA sense strand
guaauuacaugccucagau

SEQ ID NO: 63487 - RNA, 19 nt, Homo sapiens
  misc_RNA (1)...(19): siRNA sense strand
aguacaagauguccaaaua

SEQ ID NO: 63488 - RNA, 19 nt, Homo sapiens
  misc_RNA (1)...(19): siRNA sense strand
guaugaaccugaugaagau

SEQ ID NO: 63489 - RNA, 19 nt, Homo sapiens
  misc_RNA (1)...(19): siRNA sense strand
gaucgaaagugcugaccaa

SEQ ID NO: 63490 - RNA, 19 nt, Homo sapiens
  misc_RNA (1)...(19): siRNA sense strand
aaagagaagucgacucaug

SEQ ID NO: 63491 - RNA, 19 nt, Homo sapiens
  misc_RNA (1)...(19): siRNA sense strand
acaaaggaauggucagaaa

SEQ ID NO: 63492 - RNA, 19 nt, Homo sapiens
  misc_RNA (1)...(19): siRNA sense strand
guuuagaacuuuaccaaga

SEQ ID NO: 63493 - RNA, 19 nt, Homo sapiens
  misc_RNA (1)...(19): siRNA sense strand
gcaaagccaucagccaaga

SEQ ID NO: 63494 - RNA, 19 nt, Homo sapiens
  misc_RNA (1)...(19): siRNA sense strand
ucaauccaguuuacaauga

SEQ ID NO: 63495 - RNA, 19 nt, Homo sapiens
  misc_RNA (1)...(19): siRNA sense strand
cgaaggagaugcagcagau

SEQ ID NO: 63496 - RNA, 19 nt, Homo sapiens
  misc_RNA (1)...(19): siRNA sense strand
agaaauggaucaguugaaa

SEQ ID NO: 63497 - RNA, 19 nt, Homo sapiens
  misc_RNA (1)...(19): siRNA sense strand
aaagagagcagaccaaaug

SEQ ID NO: 63498 - RNA, 19 nt, Homo sapiens
  misc_RNA (1)...(19): siRNA sense strand
gcagaagaacgcaauauuc

SEQ ID NO: 63499 - RNA, 19 nt, Homo sapiens
  misc_RNA (1)...(19): siRNA sense strand
gaaccaauaauaacucaug

SEQ ID NO: 63500 - RNA, 19 nt, Homo sapiens
  misc_RNA (1)...(19): siRNA sense strand
gaaauuggaagccgagaug

SEQ ID NO: 63501 - RNA, 19 nt, Homo sapiens
  misc_RNA (1)...(19): siRNA sense strand
ggaugaguuuggcuucuuu

SEQ ID NO: 63502 - RNA, 19 nt, Homo sapiens
  misc_RNA (1)...(19): siRNA sense strand
ccaaugaccucaaaagaaa

SEQ ID NO: 63503 - RNA, 19 nt, Homo sapiens
  misc_RNA (1)...(19): siRNA sense strand
cagcaaauaucaacaguac

SEQ ID NO: 63504 - RNA, 19 nt, Homo sapiens
  misc_RNA (1)...(19): siRNA sense strand
cgaaagugcugaccaagag

SEQ ID NO: 63505 - RNA, 19 nt, Homo sapiens
  misc_RNA (1)...(19): siRNA sense strand
gaaagguauugaacuuauc

SEQ ID NO: 63506 - RNA, 19 nt, Homo sapiens
  misc_RNA (1)...(19): siRNA sense strand
uaucguggaugcuuuauca

SEQ ID NO: 63507 - RNA, 19 nt, Homo sapiens
  misc_RNA (1)...(19): siRNA sense strand
gagauaucguggaugcuuu

SEQ ID NO: 63508 - RNA, 19 nt, Homo sapiens
  misc_RNA (1)...(19): siRNA sense strand
aagaaacacuggaugaaau

SEQ ID NO: 63509 - RNA, 19 nt, Homo sapiens
  misc_RNA (1)...(19): siRNA sense strand
gcuugaacaucuagaauuc

SEQ ID NO: 63510 - RNA, 19 nt, Homo sapiens
  misc_RNA (1)...(19): siRNA sense strand
uaaagaaacagcagaagga

SEQ ID NO: 63511 - RNA, 19 nt, Homo sapiens
  misc_RNA (1)...(19): siRNA sense strand
gcagaucauugagauguau

SEQ ID NO: 63512 - RNA, 19 nt, Homo sapiens
  misc_RNA (1)...(19): siRNA sense strand
aaucuuggcugcucuugaa

SEQ ID NO: 63513 - RNA, 19 nt, Homo sapiens
  misc_RNA (1)...(19): siRNA sense strand
agaaggcaaugaagaagaa

SEQ ID NO: 63514 - RNA, 19 nt, Homo sapiens
  misc_RNA (1)...(19): siRNA sense strand
cgacacauuucccuucgaa

SEQ ID NO: 63515 - RNA, 19 nt, Homo sapiens
  misc_RNA (1)...(19): siRNA sense strand
gaucaaucauacacaacuu

SEQ ID NO: 63516 - RNA, 19 nt, Homo sapiens
  misc_RNA (1)...(19): siRNA sense strand
gcacaccaggcuaagauuu

SEQ ID NO: 63517 - RNA, 19 nt, Homo sapiens
  misc_RNA (1)...(19): siRNA sense strand
gauaacaacaagcugauug

SEQ ID NO: 63518 - RNA, 19 nt, Homo sapiens
  misc_RNA (1)...(19): siRNA sense strand
ccacugacaccauacguaa

SEQ ID NO: 63519 - RNA, 19 nt, Homo sapiens
  misc_RNA (1)...(19): siRNA sense strand
guucuucccauaacacuua

SEQ ID NO: 63520 - RNA, 19 nt, Homo sapiens
  misc_RNA (1)...(19): siRNA sense strand
guagaaggccugagaucaa

SEQ ID NO: 63521 - RNA, 19 nt, Homo sapiens
  misc_RNA (1)...(19): siRNA sense strand
caagaaacacuggaugaaa

SEQ ID NO: 63522 - RNA, 19 nt, Homo sapiens
  misc_RNA (1)...(19): siRNA sense strand
ccaacugccucuucaaagu

SEQ ID NO: 63523 - RNA, 19 nt, Homo sapiens
  misc_RNA (1)...(19): siRNA sense strand
gggaaguaauugucucgaa

SEQ ID NO: 63524 - RNA, 19 nt, Homo sapiens
  misc_RNA (1)...(19): siRNA sense strand
ccugauggauuuggagaua

SEQ ID NO: 63525 - RNA, 19 nt, Homo sapiens
  misc_RNA (1)...(19): siRNA sense strand
gcucacuacuucaucaguu

SEQ ID NO: 63526 - RNA, 19 nt, Homo sapiens
  misc_RNA (1)...(19): siRNA sense strand
cuagaucguuuagaacuuu

SEQ ID NO: 63527 - RNA, 19 nt, Homo sapiens
  misc_RNA (1)...(19): siRNA sense strand
ggccugagaucaaucauac

SEQ ID NO: 63528 - RNA, 19 nt, Homo sapiens
  misc_RNA (1)...(19): siRNA sense strand
cuagaaugcucccucauca

SEQ ID NO: 63529 - RNA, 19 nt, Homo sapiens
  misc_RNA (1)...(19): siRNA sense strand
gaagcaguccaaagaaaug

SEQ ID NO: 63530 - RNA, 19 nt, Homo sapiens
  misc_RNA (1)...(19): siRNA sense strand
gcacagcacacaaaggaau

SEQ ID NO: 63531 - RNA, 19 nt, Homo sapiens
  misc_RNA (1)...(19): siRNA sense strand
gagagcagaccaaaugaga

SEQ ID NO: 63532 - RNA, 19 nt, Homo sapiens
  misc_RNA (1)...(19): siRNA sense strand
cagaagaacgcaauauuca

SEQ ID NO: 63533 - RNA, 19 nt, Homo sapiens
  misc_RNA (1)...(19): siRNA sense strand
guccaaauauugcgaagau

SEQ ID NO: 63534 - RNA, 19 nt, Homo sapiens
  misc_RNA (1)...(19): siRNA sense strand
gaacugacacaaaagauuu

SEQ ID NO: 63535 - RNA, 19 nt, Homo sapiens
  misc_RNA (1)...(19): siRNA sense strand
ugagaucaaucauacacaa

SEQ ID NO: 63536 - RNA, 19 nt, Homo sapiens
  misc_RNA (1)...(19): siRNA sense strand
ggaaagaaugaugaaauug

SEQ ID NO: 63537 - RNA, 19 nt, Homo sapiens
  misc_RNA (1)...(19): siRNA sense strand
caaagaaauggaucaguug

SEQ ID NO: 63538 - RNA, 19 nt, Homo sapiens
  misc_RNA (1)...(19): siRNA sense strand
gcagaugaaggcuuacuug

SEQ ID NO: 63539 - RNA, 19 nt, Homo sapiens
  misc_RNA (1)...(19): siRNA sense strand
uauaacaaacggcaaauga

SEQ ID NO: 63540 - RNA, 19 nt, Homo sapiens
  misc_RNA (1)...(19): siRNA sense strand
gaacauuugcaucgggaaa

SEQ ID NO: 63541 - RNA, 19 nt, Homo sapiens
  misc_RNA (1)...(19): siRNA sense strand
ggaauggucagaaaugauc

SEQ ID NO: 63542 - RNA, 19 nt, Homo sapiens
  misc_RNA (1)...(19): siRNA sense strand
gaaguaauugucucgaaau

SEQ ID NO: 63543 - RNA, 19 nt, Homo sapiens
  misc_RNA (1)...(19): siRNA sense strand
gccaaaccuuaugaauuua

SEQ ID NO: 63544 - RNA, 19 nt, Homo sapiens
  misc_RNA (1)...(19): siRNA sense strand
guacaagauguccaaauau

SEQ ID NO: 63545 - RNA, 19 nt, Homo sapiens
  misc_RNA (1)...(19): siRNA sense strand
gaaaagcaauguguacaga

SEQ ID NO: 63546 - RNA, 19 nt, Homo sapiens
  misc_RNA (1)...(19): siRNA sense strand
acagaucuagugaacauua

SEQ ID NO: 63547 - RNA, 19 nt, Homo sapiens
  misc_RNA (1)...(19): siRNA sense strand
caacaccgccaaagcaaau

SEQ ID NO: 63548 - RNA, 19 nt, Homo sapiens
  misc_RNA (1)...(19): siRNA sense strand
caacuacgcccagccugua

SEQ ID NO: 63549 - RNA, 19 nt, Homo sapiens
  misc_RNA (1)...(19): siRNA sense strand
cuuccuagaucguuuagaa

SEQ ID NO: 63550 - RNA, 19 nt, Homo sapiens
  misc_RNA (1)...(19): siRNA sense strand
gcaagaagcuggugauugu

SEQ ID NO: 63551 - RNA, 19 nt, Homo sapiens
  misc_RNA (1)...(19): siRNA sense strand
gcuaaagguuccaagauua

SEQ ID NO: 63552 - RNA, 19 nt, Homo sapiens
  misc_RNA (1)...(19): siRNA sense strand
agaaaucccugucugaaua

SEQ ID NO: 63553 - RNA, 19 nt, Homo sapiens
  misc_RNA (1)...(19): siRNA sense strand
gagaagaaguuccgcuuug

SEQ ID NO: 63554 - RNA, 19 nt, Homo sapiens
  misc_RNA (1)...(19): siRNA sense strand
gacuugaacugcaucuuua

SEQ ID NO: 63555 - RNA, 19 nt, Homo sapiens
  misc_RNA (1)...(19): siRNA sense strand
caacaucuccuacuuauuc

SEQ ID NO: 63556 - RNA, 19 nt, Homo sapiens
  misc_RNA (1)...(19): siRNA sense strand
ugacagacuucaagaacua

SEQ ID NO: 63557 - RNA, 19 nt, Homo sapiens
  misc_RNA (1)...(19): siRNA sense strand
gcagagaagugcaaguaug

SEQ ID NO: 63558 - RNA, 19 nt, Homo sapiens
  misc_RNA (1)...(19): siRNA sense strand
uaauagaggucaucgagaa

SEQ ID NO: 63559 - RNA, 19 nt, Homo sapiens
  misc_RNA (1)...(19): siRNA sense strand
gaacagcgaugagaacaag

SEQ ID NO: 63560 - RNA, 19 nt, Homo sapiens
  misc_RNA (1)...(19): siRNA sense strand
gaaggugacugccaacaca

SEQ ID NO: 63561 - RNA, 19 nt, Homo sapiens
  misc_RNA (1)...(19): siRNA sense strand
gggaggagauggacaacaa

SEQ ID NO: 63562 - RNA, 19 nt, Homo sapiens
  misc_RNA (1)...(19): siRNA sense strand
caacacagccaucuacuau

SEQ ID NO: 63563 - RNA, 19 nt, Homo sapiens
  misc_RNA (1)...(19): siRNA sense strand
caucauaccuggucacauc

SEQ ID NO: 63564 - RNA, 19 nt, Homo sapiens
  misc_RNA (1)...(19): siRNA sense strand
acacagccaucuacuauga

SEQ ID NO: 63565 - RNA, 19 nt, Homo sapiens
  misc_RNA (1)...(19): siRNA sense strand
gugaaugucuacuaugaaa

SEQ ID NO: 63566 - RNA, 19 nt, Homo sapiens
  misc_RNA (1)...(19): siRNA sense strand
ugacaucacucgccucuuc

SEQ ID NO: 63567 - RNA, 19 nt, Homo sapiens
  misc_RNA (1)...(19): siRNA sense strand
caggugaaccgcauucuua

SEQ ID NO: 63568 - RNA, 19 nt, Homo sapiens
  misc_RNA (1)...(19): siRNA sense strand
ccaaagacuccuucgcuua

SEQ ID NO: 63569 - RNA, 19 nt, Homo sapiens
  misc_RNA (1)...(19): siRNA sense strand
uuaaggagcucaucaacau

SEQ ID NO: 63570 - RNA, 19 nt, Homo sapiens
  misc_RNA (1)...(19): siRNA sense strand
gggugaaugucuacuauga

SEQ ID NO: 63571 - RNA, 19 nt, Homo sapiens
  misc_RNA (1)...(19): siRNA sense strand
caagauggaugaugauguc

SEQ ID NO: 63572 - RNA, 19 nt, Homo sapiens
  misc_RNA (1)...(19): siRNA sense strand
ugaacugcaucuuuaauga

SEQ ID NO: 63573 - RNA, 19 nt, Homo sapiens
  misc_RNA (1)...(19): siRNA sense strand
ggucauugcugucguugga

SEQ ID NO: 63574 - RNA, 19 nt, Homo sapiens
  misc_RNA (1)...(19): siRNA sense strand
ccaacaugcugacagauau

SEQ ID NO: 63575 - RNA, 19 nt, Homo sapiens
  misc_RNA (1)...(19): siRNA sense strand
gaaguuccgcuuugauuau

SEQ ID NO: 63576 - RNA, 19 nt, Homo sapiens
  misc_RNA (1)...(19): siRNA sense strand
gggaugagaugaacuugca

SEQ ID NO: 63577 - RNA, 19 nt, Homo sapiens
  misc_RNA (1)...(19): siRNA sense strand
gaaugucuacuaugaaaug

SEQ ID NO: 63578 - RNA, 19 nt, Homo sapiens
  misc_RNA (1)...(19): siRNA sense strand
gcaagcggauuccauuugg

SEQ ID NO: 63579 - RNA, 19 nt, Homo sapiens
  misc_RNA (1)...(19): siRNA sense strand
caucgagggucauacuauu

SEQ ID NO: 63580 - RNA, 19 nt, Homo sapiens
  misc_RNA (1)...(19): siRNA sense strand
gagauugaguccaaguuca

SEQ ID NO: 63581 - RNA, 19 nt, Homo sapiens
  misc_RNA (1)...(19): siRNA sense strand
caacaucacccagcuauuc

SEQ ID NO: 63582 - RNA, 19 nt, Homo sapiens
  misc_RNA (1)...(19): siRNA sense strand
ucacagcagugcgcaaauu

SEQ ID NO: 63583 - RNA, 19 nt, Homo sapiens
  misc_RNA (1)...(19): siRNA sense strand
gaucaggaaugggugaaug

SEQ ID NO: 63584 - RNA, 19 nt, Homo sapiens
  misc_RNA (1)...(19): siRNA sense strand
caacaaggcuuuugagaag

SEQ ID NO: 63585 - RNA, 19 nt, Homo sapiens
  misc_RNA (1)...(19): siRNA sense strand
caaaucuucucccucauca

SEQ ID NO: 63586 - RNA, 19 nt, Homo sapiens
  misc_RNA (1)...(19): siRNA sense strand
gugaagacaaugaaaguuu

SEQ ID NO: 63587 - RNA, 19 nt, Homo sapiens
  misc_RNA (1)...(19): siRNA sense strand
caacuauagucccacauca

SEQ ID NO: 63588 - RNA, 19 nt, Homo sapiens
  misc_RNA (1)...(19): siRNA sense strand
gcuuugaccuccugcuuga

SEQ ID NO: 63589 - RNA, 19 nt, Homo sapiens
  misc_RNA (1)...(19): siRNA sense strand
ggacacaggaccacucaug

SEQ ID NO: 63590 - RNA, 19 nt, Homo sapiens
  misc_RNA (1)...(19): siRNA sense strand
gaaccugccacccagauga

SEQ ID NO: 63591 - RNA, 19 nt, Homo sapiens
  misc_RNA (1)...(19): siRNA sense strand
ugaugaaccuccugauguu

SEQ ID NO: 63592 - RNA, 19 nt, Homo sapiens
  misc_RNA (1)...(19): siRNA sense strand
acgaggaucugaccaaaga

SEQ ID NO: 63593 - RNA, 19 nt, Homo sapiens
  misc_RNA (1)...(19): siRNA sense strand
gauggaugaugaugucuuc

SEQ ID NO: 63594 - RNA, 19 nt, Homo sapiens
  misc_RNA (1)...(19): siRNA sense strand
cgacuugaacugcaucuuu

SEQ ID NO: 63595 - RNA, 19 nt, Homo sapiens
  misc_RNA (1)...(19): siRNA sense strand
gcugagagagccaaggaua

SEQ ID NO: 63596 - RNA, 19 nt, Homo sapiens
  misc_RNA (1)...(19): siRNA sense strand
gacggaggguggcaucaaa

SEQ ID NO: 63597 - RNA, 19 nt, Homo sapiens
  misc_RNA (1)...(19): siRNA sense strand
gaaccgcauucuuaacgau

SEQ ID NO: 63598 - RNA, 19 nt, Homo sapiens
  misc_RNA (1)...(19): siRNA sense strand
gcaaauucaccaagagaga

SEQ ID NO: 63599 - RNA, 19 nt, Homo sapiens
  misc_RNA (1)...(19): siRNA sense strand
ccacccagaugaccuugaa

SEQ ID NO: 63600 - RNA, 19 nt, Homo sapiens
  misc_RNA (1)...(19): siRNA sense strand
uaacaucucccaggucauu

SEQ ID NO: 63601 - RNA, 19 nt, Homo sapiens
  misc_RNA (1)...(19): siRNA sense strand
gacauucagaacacuauua

SEQ ID NO: 63602 - RNA, 19 nt, Homo sapiens
  misc_RNA (1)...(19): siRNA sense strand
acccaaagaucaaggauau

SEQ ID NO: 63603 - RNA, 19 nt, Homo sapiens
  misc_RNA (1)...(19): siRNA sense strand
uggacaagauggaugauga

SEQ ID NO: 63604 - RNA, 19 nt, Homo sapiens
  misc_RNA (1)...(19): siRNA sense strand
gaaccuggcuacgcuuaag

SEQ ID NO: 63605 - RNA, 19 nt, Homo sapiens
  misc_RNA (1)...(19): siRNA sense strand
ggagauggacaacaaguuc

SEQ ID NO: 63606 - RNA, 19 nt, Homo sapiens
  misc_RNA (1)...(19): siRNA sense strand
agucagugauggugaagua

SEQ ID NO: 63607 - RNA, 19 nt, Homo sapiens
  misc_RNA (1)...(19): siRNA sense strand
cagaaaaucuuccacauca

SEQ ID NO: 63608 - RNA, 19 nt, Homo sapiens
  misc_RNA (1)...(19): siRNA sense strand
ucagaacacuauuaagaag

SEQ ID NO: 63609 - RNA, 19 nt, Homo sapiens
  misc_RNA (1)...(19): siRNA sense strand
caaccagucccaacuauag

SEQ ID NO: 63610 - RNA, 19 nt, Homo sapiens
  misc_RNA (1)...(19): siRNA sense strand
gaacugcaucuuuaaugau

SEQ ID NO: 63611 - RNA, 19 nt, Homo sapiens
  misc_RNA (1)...(19): siRNA sense strand
cggaugaacugaagcgaau

SEQ ID NO: 63612 - RNA, 19 nt, Homo sapiens
  misc_RNA (1)...(19): siRNA sense strand
ccacuaugcuggugugucu

SEQ ID NO: 63613 - RNA, 19 nt, Homo sapiens
  misc_RNA (1)...(19): siRNA sense strand
agaagaaguuccgcuuuga

SEQ ID NO: 63614 - RNA, 19 nt, Homo sapiens
  misc_RNA (1)...(19): siRNA sense strand
acacaugucuacgaccuuu

SEQ ID NO: 63615 - RNA, 19 nt, Homo sapiens
  misc_RNA (1)...(19): siRNA sense strand
caacuucacccagcuauuc

SEQ ID NO: 63616 - RNA, 19 nt, Homo sapiens
  misc_RNA (1)...(19): siRNA sense strand
uugaauaccuuccacuaug

SEQ ID NO: 63617 - RNA, 19 nt, Homo sapiens
  misc_RNA (1)...(19): siRNA sense strand
ggcagacguuugagaauca

SEQ ID NO: 63618 - RNA, 19 nt, Homo sapiens
  misc_RNA (1)...(19): siRNA sense strand
ccaagguggugguggagaa

SEQ ID NO: 63619 - RNA, 19 nt, Homo sapiens
  misc_RNA (1)...(19): siRNA sense strand
aaucuucucccucaucaua

SEQ ID NO: 63620 - RNA, 19 nt, Homo sapiens
  misc_RNA (1)...(19): siRNA sense strand
agaagcggcucacacaugu

SEQ ID NO: 63621 - RNA, 19 nt, Homo sapiens
  misc_RNA (1)...(19): siRNA sense strand
ucaucaacauuuccaagaa

SEQ ID NO: 63622 - RNA, 19 nt, Homo sapiens
  misc_RNA (1)...(19): siRNA sense strand
cuaaagguuccaagauuaa

SEQ ID NO: 63623 - RNA, 19 nt, Homo sapiens
  misc_RNA (1)...(19): siRNA sense strand
ccaaacaugugcaggaaac

SEQ ID NO: 63624 - RNA, 19 nt, Homo sapiens
  misc_RNA (1)...(19): siRNA sense strand
accuuucgcuugaaucuua

SEQ ID NO: 63625 - RNA, 19 nt, Homo sapiens
  misc_RNA (1)...(19): siRNA sense strand
aauggaagcacguuaauga

SEQ ID NO: 63626 - RNA, 19 nt, Homo sapiens
  misc_RNA (1)...(19): siRNA sense strand
ggacauuguuaucuucaac

SEQ ID NO: 63627 - RNA, 19 nt, Homo sapiens
  misc_RNA (1)...(19): siRNA sense strand
cccaacaucuccuacuuau

SEQ ID NO: 63628 - RNA, 19 nt, Homo sapiens
  misc_RNA (1)...(19): siRNA sense strand
aagcuacucuccaacauca

SEQ ID NO: 63629 - RNA, 19 nt, Homo sapiens
  misc_RNA (1)...(19): siRNA sense strand
gcaggaaacaugacagagu

SEQ ID NO: 63630 - RNA, 19 nt, Homo sapiens
  misc_RNA (1)...(19): siRNA sense strand
agacagacaacaagaagaa

SEQ ID NO: 63631 - RNA, 19 nt, Homo sapiens
  misc_RNA (1)...(19): siRNA sense strand
ccaagaagcggcucacaca

SEQ ID NO: 63632 - RNA, 19 nt, Homo sapiens
  misc_RNA (1)...(19): siRNA sense strand
cgacaucacccagcuauuc

SEQ ID NO: 63633 - RNA, 19 nt, Homo sapiens
  misc_RNA (1)...(19): siRNA sense strand
ccacaucacccagcuauuc

SEQ ID NO: 63634 - RNA, 19 nt, Homo sapiens
  misc_RNA (1)...(19): siRNA sense strand
gcagauugcugaaaagauc

SEQ ID NO: 63635 - RNA, 19 nt, Homo sapiens
  misc_RNA (1)...(19): siRNA sense strand
agaaguuccgcuuugauua

SEQ ID NO: 63636 - RNA, 19 nt, Homo sapiens
  misc_RNA (1)...(19): siRNA sense strand
ucaugggcauccuguguaa

SEQ ID NO: 63637 - RNA, 19 nt, Homo sapiens
  misc_RNA (1)...(19): siRNA sense strand
ugacgaggaucugaccaaa

SEQ ID NO: 63638 - RNA, 19 nt, Homo sapiens
  misc_RNA (1)...(19): siRNA sense strand
caacaaguucgguguggaa

SEQ ID NO: 63639 - RNA, 19 nt, Homo sapiens
  misc_RNA (1)...(19): siRNA sense strand
guucuggccuagagcugua

SEQ ID NO: 63640 - RNA, 19 nt, Homo sapiens
  misc_RNA (1)...(19): siRNA sense strand
caacgucaccugccuacga

SEQ ID NO: 63641 - RNA, 19 nt, Homo sapiens
  misc_RNA (1)...(19): siRNA sense strand
gcaaguauggcauggagau

SEQ ID NO: 63642 - RNA, 19 nt, Homo sapiens
  misc_RNA (1)...(19): siRNA sense strand
ucacggugcugggcauuga

SEQ ID NO: 63643 - RNA, 19 nt, Homo sapiens
  misc_RNA (1)...(19): siRNA sense strand
ugagagagccaaggauauu

SEQ ID NO: 63644 - RNA, 19 nt, Homo sapiens
  misc_RNA (1)...(19): siRNA sense strand
cagaugaccuugaauaccu

SEQ ID NO: 63645 - RNA, 19 nt, Homo sapiens
  misc_RNA (1)...(19): siRNA sense strand
gcuuaagccuuccaacaag

SEQ ID NO: 63646 - RNA, 19 nt, Homo sapiens
  misc_RNA (1)...(19): siRNA sense strand
cgagaaggcacacaacaau

SEQ ID NO: 63647 - RNA, 19 nt, Homo sapiens
  misc_RNA (1)...(19): siRNA sense strand
ggccaagcaggacguaaua

SEQ ID NO: 63648 - RNA, 19 nt, Homo sapiens
  misc_RNA (1)...(19): siRNA sense strand
gcaaaucuucucccucauc

SEQ ID NO: 63649 - RNA, 19 nt, Homo sapiens
  misc_RNA (1)...(19): siRNA sense strand
aggaagaggugguggacaa

SEQ ID NO: 63650 - RNA, 19 nt, Homo sapiens
  misc_RNA (1)...(19): siRNA sense strand
gaaaugagguccuguacaa

SEQ ID NO: 63651 - RNA, 19 nt, Homo sapiens
  misc_RNA (1)...(19): siRNA sense strand
ggaagacgcuccuccuaua

SEQ ID NO: 63652 - RNA, 19 nt, Homo sapiens
  misc_RNA (1)...(19): siRNA sense strand
gacaacagcuggauucuuu

SEQ ID NO: 63653 - RNA, 19 nt, Homo sapiens
  misc_RNA (1)...(19): siRNA sense strand
gaucaugucuugagaauuc

SEQ ID NO: 63654 - RNA, 19 nt, Homo sapiens
  misc_RNA (1)...(19): siRNA sense strand
gcacagaaauuuauugauc

SEQ ID NO: 63655 - RNA, 19 nt, Homo sapiens
  misc_RNA (1)...(19): siRNA sense strand
gcaagaaguucccaucauu

SEQ ID NO: 63656 - RNA, 19 nt, Homo sapiens
  misc_RNA (1)...(19): siRNA sense strand
ggaacgagauugucagauu

SEQ ID NO: 63657 - RNA, 19 nt, Homo sapiens
  misc_RNA (1)...(19): siRNA sense strand
gaagcaugcuggauuguaa

SEQ ID NO: 63658 - RNA, 19 nt, Homo sapiens
  misc_RNA (1)...(19): siRNA sense strand
gauauuugcugaaguuuga

SEQ ID NO: 63659 - RNA, 19 nt, Homo sapiens
  misc_RNA (1)...(19): siRNA sense strand
ggaagacucuguuaucaug

SEQ ID NO: 63660 - RNA, 19 nt, Homo sapiens
  misc_RNA (1)...(19): siRNA sense strand
ccaagacaguugcauaaua

SEQ ID NO: 63661 - RNA, 19 nt, Homo sapiens
  misc_RNA (1)...(19): siRNA sense strand
uaaagaaggugaagaacaa

SEQ ID NO: 63662 - RNA, 19 nt, Homo sapiens
  misc_RNA (1)...(19): siRNA sense strand
gcacuaaauuucauugguu

SEQ ID NO: 63663 - RNA, 19 nt, Homo sapiens
  misc_RNA (1)...(19): siRNA sense strand
gaacgagauugucagauug

SEQ ID NO: 63664 - RNA, 19 nt, Homo sapiens
  misc_RNA (1)...(19): siRNA sense strand
gaaaugcucccucauguug

SEQ ID NO: 63665 - RNA, 19 nt, Homo sapiens
  misc_RNA (1)...(19): siRNA sense strand
gcaagaagcaugcuggauu

SEQ ID NO: 63666 - RNA, 19 nt, Homo sapiens
  misc_RNA (1)...(19): siRNA sense strand
ggaugaugaugguuugaua

SEQ ID NO: 63667 - RNA, 19 nt, Homo sapiens
  misc_RNA (1)...(19): siRNA sense strand
agaaagaaguagcuuauug

SEQ ID NO: 63668 - RNA, 19 nt, Homo sapiens
  misc_RNA (1)...(19): siRNA sense strand
ugacagagaucacuaugga

SEQ ID NO: 63669 - RNA, 19 nt, Homo sapiens
  misc_RNA (1)...(19): siRNA sense strand
gaaguucccaucauuauug

SEQ ID NO: 63670 - RNA, 19 nt, Homo sapiens
  misc_RNA (1)...(19): siRNA sense strand
gaguguagaucaugucuug

SEQ ID NO: 63671 - RNA, 19 nt, Homo sapiens
  misc_RNA (1)...(19): siRNA sense strand
aaacacggaucauaucuga

SEQ ID NO: 63672 - RNA, 19 nt, Homo sapiens
  misc_RNA (1)...(19): siRNA sense strand
caagaagcaugcuggauug

SEQ ID NO: 63673 - RNA, 19 nt, Homo sapiens
  misc_RNA (1)...(19): siRNA sense strand
gaggguagaucucgugaug

SEQ ID NO: 63674 - RNA, 19 nt, Homo sapiens
  misc_RNA (1)...(19): siRNA sense strand
guaguggaguauauugaua

SEQ ID NO: 63675 - RNA, 19 nt, Homo sapiens
  misc_RNA (1)...(19): siRNA sense strand
ccugguggcuauuucauua

SEQ ID NO: 63676 - RNA, 19 nt, Homo sapiens
  misc_RNA (1)...(19): siRNA sense strand
auacaugguucauagguua

SEQ ID NO: 63677 - RNA, 19 nt, Homo sapiens
  misc_RNA (1)...(19): siRNA sense strand
caagaaguucccaucauua

SEQ ID NO: 63678 - RNA, 19 nt, Homo sapiens
  misc_RNA (1)...(19): siRNA sense strand
gauuauggcuaucaucuca

SEQ ID NO: 63679 - RNA, 19 nt, Homo sapiens
  misc_RNA (1)...(19): siRNA sense strand
gaaagaaguagcuuauugu

SEQ ID NO: 63680 - RNA, 19 nt, Homo sapiens
  misc_RNA (1)...(19): siRNA sense strand
gaagaggcauauugaccaa

SEQ ID NO: 63681 - RNA, 19 nt, Homo sapiens
  misc_RNA (1)...(19): siRNA sense strand
caagacaguugcauaauac

SEQ ID NO: 63682 - RNA, 19 nt, Homo sapiens
  misc_RNA (1)...(19): siRNA sense strand
gaagaaccgccacgauauu

SEQ ID NO: 63683 - RNA, 19 nt, Homo sapiens
  misc_RNA (1)...(19): siRNA sense strand
uggaguaucucagguguua

SEQ ID NO: 63684 - RNA, 19 nt, Homo sapiens
  misc_RNA (1)...(19): siRNA sense strand
ggagaaagaaguagcuuau

SEQ ID NO: 63685 - RNA, 19 nt, Homo sapiens
  misc_RNA (1)...(19): siRNA sense strand
acaaagaacaggagucuaa

SEQ ID NO: 63686 - RNA, 19 nt, Homo sapiens
  misc_RNA (1)...(19): siRNA sense strand
gagaugauguuauuauagg

SEQ ID NO: 63687 - RNA, 19 nt, Homo sapiens
  misc_RNA (1)...(19): siRNA sense strand
guucauguuugcaaucuuu

SEQ ID NO: 63688 - RNA, 19 nt, Homo sapiens
  misc_RNA (1)...(19): siRNA sense strand
uaacaagggugaaauuggu

SEQ ID NO: 63689 - RNA, 19 nt, Homo sapiens
  misc_RNA (1)...(19): siRNA sense strand
caaugaagcuagauuaagg

SEQ ID NO: 63690 - RNA, 19 nt, Homo sapiens
  misc_RNA (1)...(19): siRNA sense strand
cauaucagguucauguuug

SEQ ID NO: 63691 - RNA, 19 nt, Homo sapiens
  misc_RNA (1)...(19): siRNA sense strand
gcggaucuaugcacagaaa

SEQ ID NO: 63692 - RNA, 19 nt, Homo sapiens
  misc_RNA (1)...(19): siRNA sense strand
ugaagcauaugguggauga

SEQ ID NO: 63693 - RNA, 19 nt, Homo sapiens
  misc_RNA (1)...(19): siRNA sense strand
gacaagaggauaugccuuu

SEQ ID NO: 63694 - RNA, 19 nt, Homo sapiens
  misc_RNA (1)...(19): siRNA sense strand
caucauacacuggauauaa

SEQ ID NO: 63695 - RNA, 19 nt, Homo sapiens
  misc_RNA (1)...(19): siRNA sense strand
guagaccacuucugauugu

SEQ ID NO: 63696 - RNA, 19 nt, Homo sapiens
  misc_RNA (1)...(19): siRNA sense strand
cgacagagauauuuuagaa

SEQ ID NO: 63697 - RNA, 19 nt, Homo sapiens
  misc_RNA (1)...(19): siRNA sense strand
ggugaugccacuccauuua

SEQ ID NO: 63698 - RNA, 19 nt, Homo sapiens
  misc_RNA (1)...(19): siRNA sense strand
gacuauuggucacuuaauu

SEQ ID NO: 63699 - RNA, 19 nt, Homo sapiens
  misc_RNA (1)...(19): siRNA sense strand
cugcuugcauucuuauuua

SEQ ID NO: 63700 - RNA, 19 nt, Homo sapiens
  misc_RNA (1)...(19): siRNA sense strand
gagaugauggaaaugguua

SEQ ID NO: 63701 - RNA, 19 nt, Homo sapiens
  misc_RNA (1)...(19): siRNA sense strand
acauaaagaucccgaacaa

SEQ ID NO: 63702 - RNA, 19 nt, Homo sapiens
  misc_RNA (1)...(19): siRNA sense strand
gagaaaggcuugguuagac

SEQ ID NO: 63703 - RNA, 19 nt, Homo sapiens
  misc_RNA (1)...(19): siRNA sense strand
aagaacaacuucagacuca

SEQ ID NO: 63704 - RNA, 19 nt, Homo sapiens
  misc_RNA (1)...(19): siRNA sense strand
uaccauauaucaagcaaga

SEQ ID NO: 63705 - RNA, 19 nt, Homo sapiens
  misc_RNA (1)...(19): siRNA sense strand
ccaauuauguugcggucaa

SEQ ID NO: 63706 - RNA, 19 nt, Homo sapiens
  misc_RNA (1)...(19): siRNA sense strand
gcuuauuguuccacauaua

SEQ ID NO: 63707 - RNA, 19 nt, Homo sapiens
  misc_RNA (1)...(19): siRNA sense strand
caccaaugaugcccaauga

SEQ ID NO: 63708 - RNA, 19 nt, Homo sapiens
  misc_RNA (1)...(19): siRNA sense strand
uaugguggaugauaagauu

SEQ ID NO: 63709 - RNA, 19 nt, Homo sapiens
  misc_RNA (1)...(19): siRNA sense strand
gaagguaucggcuaacaag

SEQ ID NO: 63710 - RNA, 19 nt, Homo sapiens
  misc_RNA (1)...(19): siRNA sense strand
ggaagaagaaacagugaug

SEQ ID NO: 63711 - RNA, 19 nt, Homo sapiens
  misc_RNA (1)...(19): siRNA sense strand
aaagaucccgaacaacuua

SEQ ID NO: 63712 - RNA, 19 nt, Homo sapiens
  misc_RNA (1)...(19): siRNA sense strand
gaagaauggaguauggaaa

SEQ ID NO: 63713 - RNA, 19 nt, Homo sapiens
  misc_RNA (1)...(19): siRNA sense strand
gaucuaugcacagaaauuu

SEQ ID NO: 63714 - RNA, 19 nt, Homo sapiens
  misc_RNA (1)...(19): siRNA sense strand
uggcaacucuaccauauau

SEQ ID NO: 63715 - RNA, 19 nt, Homo sapiens
  misc_RNA (1)...(19): siRNA sense strand
gauacaugguucauagguu

SEQ ID NO: 63716 - RNA, 19 nt, Homo sapiens
  misc_RNA (1)...(19): siRNA sense strand
gcuaucaucucagaggaaa

SEQ ID NO: 63717 - RNA, 19 nt, Homo sapiens
  misc_RNA (1)...(19): siRNA sense strand
gguacgcucuguuaggauu

SEQ ID NO: 63718 - RNA, 19 nt, Homo sapiens
  misc_RNA (1)...(19): siRNA sense strand
uggcccauguucucuauua

SEQ ID NO: 63719 - RNA, 19 nt, Homo sapiens
  misc_RNA (1)...(19): siRNA sense strand
ugaagaagaggcauauuga

SEQ ID NO: 63720 - RNA, 19 nt, Homo sapiens
  misc_RNA (1)...(19): siRNA sense strand
gaugcaggccguauuugua

SEQ ID NO: 63721 - RNA, 19 nt, Homo sapiens
  misc_RNA (1)...(19): siRNA sense strand
gaaauugagacgucagaug

SEQ ID NO: 63722 - RNA, 19 nt, Homo sapiens
  misc_RNA (1)...(19): siRNA sense strand
gguggcuauuucauuauua

SEQ ID NO: 63723 - RNA, 19 nt, Homo sapiens
  misc_RNA (1)...(19): siRNA sense strand
ggagaaauggaacgagauu

SEQ ID NO: 63724 - RNA, 19 nt, Homo sapiens
  misc_RNA (1)...(19): siRNA sense strand
ggagacaaauuugcuaguc

SEQ ID NO: 63725 - RNA, 19 nt, Homo sapiens
  misc_RNA (1)...(19): siRNA sense strand
acagucaccuugccugaaa

SEQ ID NO: 63726 - RNA, 19 nt, Homo sapiens
  misc_RNA (1)...(19): siRNA sense strand
acgacaagcuggaugauga

SEQ ID NO: 63727 - RNA, 19 nt, Homo sapiens
  misc_RNA (1)...(19): siRNA sense strand
gaaaggauuuuaacuugga

SEQ ID NO: 63728 - RNA, 19 nt, Homo sapiens
  misc_RNA (1)...(19): siRNA sense strand
gcaacucuaccauauauca

SEQ ID NO: 63729 - RNA, 19 nt, Homo sapiens
  misc_RNA (1)...(19): siRNA sense strand
aaacagugaugcuugcaau

SEQ ID NO: 63730 - RNA, 19 nt, Homo sapiens
  misc_RNA (1)...(19): siRNA sense strand
gacgagaaaggcuugguua

SEQ ID NO: 63731 - RNA, 19 nt, Homo sapiens
  misc_RNA (1)...(19): siRNA sense strand
ggagcaaagccugguguua

SEQ ID NO: 63732 - RNA, 19 nt, Homo sapiens
  misc_RNA (1)...(19): siRNA sense strand
aagauucacucucgugcua

SEQ ID NO: 63733 - RNA, 19 nt, Homo sapiens
  misc_RNA (1)...(19): siRNA sense strand
uaccagcguuugaagcaua

SEQ ID NO: 63734 - RNA, 19 nt, Homo sapiens
  misc_RNA (1)...(19): siRNA sense strand
caaauuugcuagucgacau

SEQ ID NO: 63735 - RNA, 19 nt, Homo sapiens
  misc_RNA (1)...(19): siRNA sense strand
caggaagacucuguuauca

SEQ ID NO: 63736 - RNA, 19 nt, Homo sapiens
  misc_RNA (1)...(19): siRNA sense strand
uuaaagaagugcggaucua

SEQ ID NO: 63737 - RNA, 19 nt, Homo sapiens
  misc_RNA (1)...(19): siRNA sense strand
gaauuugcuuaaagaagug

SEQ ID NO: 63738 - RNA, 19 nt, Homo sapiens
  misc_RNA (1)...(19): siRNA sense strand
gcauucuuauuuagaggua

SEQ ID NO: 63739 - RNA, 19 nt, Homo sapiens
  misc_RNA (1)...(19): siRNA sense strand
caagaagagugcuauuggu

SEQ ID NO: 63740 - RNA, 19 nt, Homo sapiens
  misc_RNA (1)...(19): siRNA sense strand
cagcaggcaucaacucaau

SEQ ID NO: 63741 - RNA, 19 nt, Homo sapiens
  misc_RNA (1)...(19): siRNA sense strand
caacuuaugaacacccuaa

SEQ ID NO: 63742 - RNA, 19 nt, Homo sapiens
  misc_RNA (1)...(19): siRNA sense strand
cacgauauuugcugaaguu

SEQ ID NO: 63743 - RNA, 19 nt, Homo sapiens
  misc_RNA (1)...(19): siRNA sense strand
cggaugaggauaugcaaua

SEQ ID NO: 63744 - RNA, 19 nt, Homo sapiens
  misc_RNA (1)...(19): siRNA sense strand
gcaggcaucaacucaauug

SEQ ID NO: 63745 - RNA, 19 nt, Homo sapiens
  misc_RNA (1)...(19): siRNA sense strand
aagaaaugcucccucaugu

SEQ ID NO: 63746 - RNA, 19 nt, Homo sapiens
  misc_RNA (1)...(19): siRNA sense strand
gaauguugcacuaaauuuc

SEQ ID NO: 63747 - RNA, 19 nt, Homo sapiens
  misc_RNA (1)...(19): siRNA sense strand
gcaauaugaugaggaugau

SEQ ID NO: 63748 - RNA, 19 nt, Homo sapiens
  misc_RNA (1)...(19): siRNA sense strand
ucucaaccaucuccaauuc

SEQ ID NO: 63749 - RNA, 19 nt, Homo sapiens
  misc_RNA (1)...(19): siRNA sense strand
gcaaugacuccagaugauu

SEQ ID NO: 63750 - RNA, 19 nt, Homo sapiens
  misc_RNA (1)...(19): siRNA sense strand
gcaaauggcuggagaguua

SEQ ID NO: 63751 - RNA, 19 nt, Homo sapiens
  misc_RNA (1)...(19): siRNA sense strand
ggaaacggcugaagaauua

SEQ ID NO: 63752 - RNA, 19 nt, Homo sapiens
  misc_RNA (1)...(19): siRNA sense strand
gaagcacggugacaucuuu

SEQ ID NO: 63753 - RNA, 19 nt, Homo sapiens
  misc_RNA (1)...(19): siRNA sense strand
gcggagagcucgagaguau

SEQ ID NO: 63754 - RNA, 19 nt, Homo sapiens
  misc_RNA (1)...(19): siRNA sense strand
ccacucagcugaugucuuc

SEQ ID NO: 63755 - RNA, 19 nt, Homo sapiens
  misc_RNA (1)...(19): siRNA sense strand
ggugacaucuuuacuauac

SEQ ID NO: 63756 - RNA, 19 nt, Homo sapiens
  misc_RNA (1)...(19): siRNA sense strand
caacagcaucaaacaauuu

SEQ ID NO: 63757 - RNA, 19 nt, Homo sapiens
  misc_RNA (1)...(19): siRNA sense strand
ucacgaggaugaaggagaa

SEQ ID NO: 63758 - RNA, 19 nt, Homo sapiens
  misc_RNA (1)...(19): siRNA sense strand
gcugaagaauuacaacaug

SEQ ID NO: 63759 - RNA, 19 nt, Homo sapiens
  misc_RNA (1)...(19): siRNA sense strand
gaucagagaagaaagacuu

SEQ ID NO: 63760 - RNA, 19 nt, Homo sapiens
  misc_RNA (1)...(19): siRNA sense strand
ggaugaaacugacucuucu

SEQ ID NO: 63761 - RNA, 19 nt, Homo sapiens
  misc_RNA (1)...(19): siRNA sense strand
gggaaacggcugaagaauu

SEQ ID NO: 63762 - RNA, 19 nt, Homo sapiens
  misc_RNA (1)...(19): siRNA sense strand
ccggcuaccugacucuuua

SEQ ID NO: 63763 - RNA, 19 nt, Homo sapiens
  misc_RNA (1)...(19): siRNA sense strand
gaccacaugugcaguguca

SEQ ID NO: 63764 - RNA, 19 nt, Homo sapiens
  misc_RNA (1)...(19): siRNA sense strand
ucaacagcaucaaacaauu

SEQ ID NO: 63765 - RNA, 19 nt, Homo sapiens
  misc_RNA (1)...(19): siRNA sense strand
cgaccacucucccacagaa

SEQ ID NO: 63766 - RNA, 19 nt, Homo sapiens
  misc_RNA (1)...(19): siRNA sense strand
ccagagagacccagaaauc

SEQ ID NO: 63767 - RNA, 19 nt, Homo sapiens
  misc_RNA (1)...(19): siRNA sense strand
gcagguaugucaccguucu

SEQ ID NO: 63768 - RNA, 19 nt, Homo sapiens
  misc_RNA (1)...(19): siRNA sense strand
cuacacagacccagaggua

SEQ ID NO: 63769 - RNA, 19 nt, Homo sapiens
  misc_RNA (1)...(19): siRNA sense strand
cagaagccauguauaccaa

SEQ ID NO: 63770 - RNA, 19 nt, Homo sapiens
  misc_RNA (1)...(19): siRNA sense strand
gcaccaggcucgacuucca

SEQ ID NO: 63771 - RNA, 19 nt, Homo sapiens
  misc_RNA (1)...(19): siRNA sense strand
caacgcagauguggagauc

SEQ ID NO: 63772 - RNA, 19 nt, Homo sapiens
  misc_RNA (1)...(19): siRNA sense strand
ucacagaagccauguauac

SEQ ID NO: 63773 - RNA, 19 nt, Homo sapiens
  misc_RNA (1)...(19): siRNA sense strand
caucuuuacuauacugguu

SEQ ID NO: 63774 - RNA, 19 nt, Homo sapiens
  misc_RNA (1)...(19): siRNA sense strand
ccacaugugcagugucaaa

SEQ ID NO: 63775 - RNA, 19 nt, Homo sapiens
  misc_RNA (1)...(19): siRNA sense strand
gaugggaaacggcugaaga

SEQ ID NO: 63776 - RNA, 19 nt, Homo sapiens
  misc_RNA (1)...(19): siRNA sense strand
acacagacccagagguauu

SEQ ID NO: 63777 - RNA, 19 nt, Homo sapiens
  misc_RNA (1)...(19): siRNA sense strand
agagagacccagaaaucua

SEQ ID NO: 63778 - RNA, 19 nt, Homo sapiens
  misc_RNA (1)...(19): siRNA sense strand
ggagaucccugaguuugac

SEQ ID NO: 63779 - RNA, 19 nt, Homo sapiens
  misc_RNA (1)...(19): siRNA sense strand
ugacaucuuuacuauacug

SEQ ID NO: 63780 - RNA, 19 nt, Homo sapiens
  misc_RNA (1)...(19): siRNA sense strand
ggagaagcacggugacauc

SEQ ID NO: 63781 - RNA, 19 nt, Homo sapiens
  misc_RNA (1)...(19): siRNA sense strand
ggguaugccuuggacuuug

SEQ ID NO: 63782 - RNA, 19 nt, Homo sapiens
  misc_RNA (1)...(19): siRNA sense strand
acccagaaaucuacacaga

SEQ ID NO: 63783 - RNA, 19 nt, Homo sapiens
  misc_RNA (1)...(19): siRNA sense strand
acggugacaucuuuacuau

SEQ ID NO: 63784 - RNA, 19 nt, Homo sapiens
  misc_RNA (1)...(19): siRNA sense strand
ggucaacagcaucaaacaa

SEQ ID NO: 63785 - RNA, 19 nt, Homo sapiens
  misc_RNA (1)...(19): siRNA sense strand
gagagacccagaaaucuac

SEQ ID NO: 63786 - RNA, 19 nt, Homo sapiens
  misc_RNA (1)...(19): siRNA sense strand
gucaacagcaucaaacaau

SEQ ID NO: 63787 - RNA, 19 nt, Homo sapiens
  misc_RNA (1)...(19): siRNA sense strand
ggaguuaugcggucaacag

SEQ ID NO: 63788 - RNA, 19 nt, Homo sapiens
  misc_RNA (1)...(19): siRNA sense strand
gguaugccuuggacuuugg

SEQ ID NO: 63789 - RNA, 19 nt, Homo sapiens
  misc_RNA (1)...(19): siRNA sense strand
gcuccaggcacucacagaa

SEQ ID NO: 63790 - RNA, 19 nt, Homo sapiens
  misc_RNA (1)...(19): siRNA sense strand
gauagcgugcugagugaga

SEQ ID NO: 63791 - RNA, 19 nt, Homo sapiens
  misc_RNA (1)...(19): siRNA sense strand
gcucgagaguauccuuugg

SEQ ID NO: 63792 - RNA, 19 nt, Homo sapiens
  misc_RNA (1)...(19): siRNA sense strand
gagcucgagaguauccuuu

SEQ ID NO: 63793 - RNA, 19 nt, Homo sapiens
  misc_RNA (1)...(19): siRNA sense strand
uugauagcgugcugaguga

SEQ ID NO: 63794 - RNA, 19 nt, Homo sapiens
  misc_RNA (1)...(19): siRNA sense strand
agacccagagguauuuaaa

SEQ ID NO: 63795 - RNA, 19 nt, Homo sapiens
  misc_RNA (1)...(19): siRNA sense strand
guggagaucccugaguuug

SEQ ID NO: 63796 - RNA, 19 nt, Homo sapiens
  misc_RNA (1)...(19): siRNA sense strand
gagcugaucaacgcagaug

SEQ ID NO: 63797 - RNA, 19 nt, Homo sapiens
  misc_RNA (1)...(19): siRNA sense strand
agaugggucuccucgacuu

SEQ ID NO: 63798 - RNA, 19 nt, Homo sapiens
  misc_RNA (1)...(19): siRNA sense strand
guacggcuucggucugaug

SEQ ID NO: 63799 - RNA, 19 nt, Homo sapiens
  misc_RNA (1)...(19): siRNA sense strand
gagcaaauggcuggagagu

SEQ ID NO: 63800 - RNA, 19 nt, Homo sapiens
  misc_RNA (1)...(19): siRNA sense strand
ccaugccuaugccaucuuc

SEQ ID NO: 63801 - RNA, 19 nt, Homo sapiens
  misc_RNA (1)...(19): siRNA sense strand
cuccugcucuuccuucuca

SEQ ID NO: 63802 - RNA, 19 nt, Homo sapiens
  misc_RNA (1)...(19): siRNA sense strand
gcugaucaacgcagaugug

SEQ ID NO: 63803 - RNA, 19 nt, Homo sapiens
  misc_RNA (1)...(19): siRNA sense strand
cacagacccagagguauuu

SEQ ID NO: 63804 - RNA, 19 nt, Homo sapiens
  misc_RNA (1)...(19): siRNA sense strand
gagaagcacggugacaucu

SEQ ID NO: 63805 - RNA, 19 nt, Homo sapiens
  misc_RNA (1)...(19): siRNA sense strand
cacggugacaucuuuacua

SEQ ID NO: 63806 - RNA, 19 nt, Homo sapiens
  misc_RNA (1)...(19): siRNA sense strand
gaaaaggccaggaugaaac

SEQ ID NO: 63807 - RNA, 19 nt, Homo sapiens
  misc_RNA (1)...(19): siRNA sense strand
gacccagagguauuuaaau

SEQ ID NO: 63808 - RNA, 19 nt, Homo sapiens
  misc_RNA (1)...(19): siRNA sense strand
gaugaaaaggccaggauga

SEQ ID NO: 63809 - RNA, 19 nt, Homo sapiens
  misc_RNA (1)...(19): siRNA sense strand
gggacaaggaccacaugug

SEQ ID NO: 63810 - RNA, 19 nt, Homo sapiens
  misc_RNA (1)...(19): siRNA sense strand
cuucaucacccgcgagguu

SEQ ID NO: 63811 - RNA, 19 nt, Homo sapiens
  misc_RNA (1)...(19): siRNA sense strand
acucacagaagccauguau

SEQ ID NO: 63812 - RNA, 19 nt, Homo sapiens
  misc_RNA (1)...(19): siRNA sense strand
ggagagcucgagaguaucc

SEQ ID NO: 63813 - RNA, 19 nt, Homo sapiens
  misc_RNA (1)...(19): siRNA sense strand
ggaggagauggguguguca

SEQ ID NO: 63814 - RNA, 19 nt, Homo sapiens
  misc_RNA (1)...(19): siRNA sense strand
ggaauuguauggagacauu

SEQ ID NO: 63815 - RNA, 19 nt, Homo sapiens
  misc_RNA (1)...(19): siRNA sense strand
gaggugggcuuuaacauug

SEQ ID NO: 63816 - RNA, 19 nt, Homo sapiens
  misc_RNA (1)...(19): siRNA sense strand
acagugcgcuccaaccuua

SEQ ID NO: 63817 - RNA, 19 nt, Homo sapiens
  misc_RNA (1)...(19): siRNA sense strand
cagcagaguuggaggaauu

SEQ ID NO: 63818 - RNA, 19 nt, Homo sapiens
  misc_RNA (1)...(19): siRNA sense strand
ggaccuggcuccggaauuc

SEQ ID NO: 63819 - RNA, 19 nt, Homo sapiens
  misc_RNA (1)...(19): siRNA sense strand
ggagauggcagcagaguug

SEQ ID NO: 63820 - RNA, 19 nt, Homo sapiens
  misc_RNA (1)...(19): siRNA sense strand
gcaccaaccucauguuugc

SEQ ID NO: 63821 - RNA, 19 nt, Homo sapiens
  misc_RNA (1)...(19): siRNA sense strand
ccacauuuauggagacaau

SEQ ID NO: 63822 - RNA, 19 nt, Homo sapiens
  misc_RNA (1)...(19): siRNA sense strand
ccucauguuugccuucuuu

SEQ ID NO: 63823 - RNA, 19 nt, Homo sapiens
  misc_RNA (1)...(19): siRNA sense strand
caagaccugucccuacguu

SEQ ID NO: 63824 - RNA, 19 nt, Homo sapiens
  misc_RNA (1)...(19): siRNA sense strand
gaaucccuguuguuacuau

SEQ ID NO: 63825 - RNA, 19 nt, Homo sapiens
  misc_RNA (1)...(19): siRNA sense strand
ucuccaacgugagcuauua

SEQ ID NO: 63826 - RNA, 19 nt, Homo sapiens
  misc_RNA (1)...(19): siRNA sense strand
gcagcugaguggcuauuuc

SEQ ID NO: 63827 - RNA, 19 nt, Homo sapiens
  misc_RNA (1)...(19): siRNA sense strand
uaucaacugcggcucuuua

SEQ ID NO: 63828 - RNA, 19 nt, Homo sapiens
  misc_RNA (1)...(19): siRNA sense strand
gcuguucgguguccaguuc

SEQ ID NO: 63829 - RNA, 19 nt, Homo sapiens
  misc_RNA (1)...(19): siRNA sense strand
ggugcuggauggagaaaug

SEQ ID NO: 63830 - RNA, 19 nt, Homo sapiens
  misc_RNA (1)...(19): siRNA sense strand
caacucagcacaugacuac

SEQ ID NO: 63831 - RNA, 19 nt, Homo sapiens
  misc_RNA (1)...(19): siRNA sense strand
gggagaguaugauagagau

SEQ ID NO: 63832 - RNA, 19 nt, Homo sapiens
  misc_RNA (1)...(19): siRNA sense strand
gcauugccauggaguucaa

SEQ ID NO: 63833 - RNA, 19 nt, Homo sapiens
  misc_RNA (1)...(19): siRNA sense strand
ccaaagggaagaagcaguu

SEQ ID NO: 63834 - RNA, 19 nt, Homo sapiens
  misc_RNA (1)...(19): siRNA sense strand
gaaccaaagggaagaagca

SEQ ID NO: 63835 - RNA, 19 nt, Homo sapiens
  misc_RNA (1)...(19): siRNA sense strand
cgaggugggcuuuaacauu

SEQ ID NO: 63836 - RNA, 19 nt, Homo sapiens
  misc_RNA (1)...(19): siRNA sense strand
gcggcgaggugggcuuuaa

SEQ ID NO: 63837 - RNA, 19 nt, Homo sapiens
  misc_RNA (1)...(19): siRNA sense strand
gugaaucccuguuguuacu

SEQ ID NO: 63838 - RNA, 19 nt, Homo sapiens
  misc_RNA (1)...(19): siRNA sense strand
cagugaaucccuguuguua

SEQ ID NO: 63839 - RNA, 19 nt, Homo sapiens
  misc_RNA (1)...(19): siRNA sense strand
gagaguaugauagagauug

SEQ ID NO: 63840 - RNA, 19 nt, Homo sapiens
  misc_RNA (1)...(19): siRNA sense strand
aagaagcaguugccagaug

SEQ ID NO: 63841 - RNA, 19 nt, Homo sapiens
  misc_RNA (1)...(19): siRNA sense strand
gaagaggcgccuguguuga

SEQ ID NO: 63842 - RNA, 19 nt, Homo sapiens
  misc_RNA (1)...(19): siRNA sense strand
caacugcggcucuuuaagg

SEQ ID NO: 63843 - RNA, 19 nt, Homo sapiens
  misc_RNA (1)...(19): siRNA sense strand
gcauguggcuguggauguc

SEQ ID NO: 63844 - RNA, 19 nt, Homo sapiens
  misc_RNA (1)...(19): siRNA sense strand
uagaagaggcgccuguguu

SEQ ID NO: 63845 - RNA, 19 nt, Homo sapiens
  misc_RNA (1)...(19): siRNA sense strand
agaagaggcgccuguguug

SEQ ID NO: 63846 - RNA, 19 nt, Homo sapiens
  misc_RNA (1)...(19): siRNA sense strand
ccucugugccuaaagauug

SEQ ID NO: 63847 - RNA, 19 nt, Homo sapiens
  misc_RNA (1)...(19): siRNA sense strand
gcuuuaacauugucaagac

SEQ ID NO: 63848 - RNA, 19 nt, Homo sapiens
  misc_RNA (1)...(19): siRNA sense strand
aaagugccauccaaacucu

SEQ ID NO: 63849 - RNA, 19 nt, Homo sapiens
  misc_RNA (1)...(19): siRNA sense strand
ggaguucaaccaucucuac

SEQ ID NO: 63850 - RNA, 19 nt, Homo sapiens
  misc_RNA (1)...(19): siRNA sense strand
cugcagcccuucaaugagu

SEQ ID NO: 63851 - RNA, 19 nt, Homo sapiens
  misc_RNA (1)...(19): siRNA sense strand
aagcuggucugccucaaca

SEQ ID NO: 63852 - RNA, 19 nt, Homo sapiens
  misc_RNA (1)...(19): siRNA sense strand
ccaaggcaccaaccucaug

SEQ ID NO: 63853 - RNA, 19 nt, Homo sapiens
  misc_RNA (1)...(19): siRNA sense strand
acacuucacccaccaguuc

SEQ ID NO: 63854 - RNA, 19 nt, Homo sapiens
  misc_RNA (1)...(19): siRNA sense strand
uuccugggcucaugcugua

SEQ ID NO: 63855 - RNA, 19 nt, Homo sapiens
  misc_RNA (1)...(19): siRNA sense strand
gccagugaaucccuguugu

SEQ ID NO: 63856 - RNA, 19 nt, Homo sapiens
  misc_RNA (1)...(19): siRNA sense strand
ucaagacggccacacugaa

SEQ ID NO: 63857 - RNA, 19 nt, Homo sapiens
  misc_RNA (1)...(19): siRNA sense strand
cuauuacacucguauucug

SEQ ID NO: 63858 - RNA, 19 nt, Homo sapiens
  misc_RNA (1)...(19): siRNA sense strand
caacgugagcuauuacacu

SEQ ID NO: 63859 - RNA, 19 nt, Homo sapiens
  misc_RNA (1)...(19): siRNA sense strand
caagacggccacacugaag

SEQ ID NO: 63860 - RNA, 19 nt, Homo sapiens
  misc_RNA (1)...(19): siRNA sense strand
ccagugaaucccuguuguu

SEQ ID NO: 63861 - RNA, 19 nt, Homo sapiens
  misc_RNA (1)...(19): siRNA sense strand
ggagucucuugcucugguu

SEQ ID NO: 63862 - RNA, 19 nt, Homo sapiens
  misc_RNA (1)...(19): siRNA sense strand
ccacacccaugggaaccaa

SEQ ID NO: 63863 - RNA, 19 nt, Homo sapiens
  misc_RNA (1)...(19): siRNA sense strand
ccauccaaacucuaucuuu

SEQ ID NO: 63864 - RNA, 19 nt, Homo sapiens
  misc_RNA (1)...(19): siRNA sense strand
cagaguuggaggaauugua

SEQ ID NO: 63865 - RNA, 19 nt, Homo sapiens
  misc_RNA (1)...(19): siRNA sense strand
gaagaagcaguugccagau

SEQ ID NO: 63866 - RNA, 19 nt, Homo sapiens
  misc_RNA (1)...(19): siRNA sense strand
ggagguguuugggcugcuu

SEQ ID NO: 63867 - RNA, 19 nt, Homo sapiens
  misc_RNA (1)...(19): siRNA sense strand
ggaagccgagcacauuugg

SEQ ID NO: 63868 - RNA, 19 nt, Homo sapiens
  misc_RNA (1)...(19): siRNA sense strand
gcagcagaguuggaggaau

SEQ ID NO: 63869 - RNA, 19 nt, Homo sapiens
  misc_RNA (1)...(19): siRNA sense strand
gaaaagugccauccaaacu

SEQ ID NO: 63870 - RNA, 19 nt, Homo sapiens
  misc_RNA (1)...(19): siRNA sense strand
agaguuggaggaauuguau

SEQ ID NO: 63871 - RNA, 19 nt, Homo sapiens
  misc_RNA (1)...(19): siRNA sense strand
gagcuauuacacucguauu

SEQ ID NO: 63872 - RNA, 19 nt, Homo sapiens
  misc_RNA (1)...(19): siRNA sense strand
gucaagacggccacacuga

SEQ ID NO: 63873 - RNA, 19 nt, Homo sapiens
  misc_RNA (1)...(19): siRNA sense strand
ggagaguaugauagagauu

SEQ ID NO: 63874 - RNA, 19 nt, Homo sapiens
  misc_RNA (1)...(19): siRNA sense strand
guagaagaggcgccugugu

SEQ ID NO: 63875 - RNA, 19 nt, Homo sapiens
  misc_RNA (1)...(19): siRNA sense strand
ccaauaccgcaaccgcauu

SEQ ID NO: 63876 - RNA, 19 nt, Homo sapiens
  misc_RNA (1)...(19): siRNA sense strand
ucugggaguuugucaaugc

SEQ ID NO: 63877 - RNA, 19 nt, Homo sapiens
  misc_RNA (1)...(19): siRNA sense strand
guucugggaguuugucaau

SEQ ID NO: 63878 - RNA, 19 nt, Homo sapiens
  misc_RNA (1)...(19): siRNA sense strand
caaggcaccaaccucaugu

SEQ ID NO: 63879 - RNA, 19 nt, Homo sapiens
  misc_RNA (1)...(19): siRNA sense strand
gcuauuacacucguauucu

SEQ ID NO: 63880 - RNA, 19 nt, Homo sapiens
  misc_RNA (1)...(19): siRNA sense strand
ggcaccaaccucauguuug

SEQ ID NO: 63881 - RNA, 19 nt, Homo sapiens
  misc_RNA (1)...(19): siRNA sense strand
uacaucagcugggagucuu

SEQ ID NO: 63882 - RNA, 19 nt, Homo sapiens
  misc_RNA (1)...(19): siRNA sense strand
caaagggaagaagcaguug

SEQ ID NO: 63883 - RNA, 19 nt, Homo sapiens
  misc_RNA (1)...(19): siRNA sense strand
gaggaauuguauggagaca

SEQ ID NO: 63884 - RNA, 19 nt, Homo sapiens
  misc_RNA (1)...(19): siRNA sense strand
aagaggcgccuguguugau

SEQ ID NO: 63885 - RNA, 19 nt, Homo sapiens
  misc_RNA (1)...(19): siRNA sense strand
ggaauuguauggagacauu

SEQ ID NO: 63886 - RNA, 19 nt, Homo sapiens
  misc_RNA (1)...(19): siRNA sense strand
gaggugggcuuuaacauug

SEQ ID NO: 63887 - RNA, 19 nt, Homo sapiens
  misc_RNA (1)...(19): siRNA sense strand
acagugcgcuccaaccuua

SEQ ID NO: 63888 - RNA, 19 nt, Homo sapiens
  misc_RNA (1)...(19): siRNA sense strand
cagcagaguuggaggaauu

SEQ ID NO: 63889 - RNA, 19 nt, Homo sapiens
  misc_RNA (1)...(19): siRNA sense strand
ggaccuggcuccggaauuc

SEQ ID NO: 63890 - RNA, 19 nt, Homo sapiens
  misc_RNA (1)...(19): siRNA sense strand
ggagauggcagcagaguug

SEQ ID NO: 63891 - RNA, 19 nt, Homo sapiens
  misc_RNA (1)...(19): siRNA sense strand
gcaccaaccucauguuugc

SEQ ID NO: 63892 - RNA, 19 nt, Homo sapiens
  misc_RNA (1)...(19): siRNA sense strand
ccacauuuauggagacaau

SEQ ID NO: 63893 - RNA, 19 nt, Homo sapiens
  misc_RNA (1)...(19): siRNA sense strand
ccucauguuugccuucuuu

SEQ ID NO: 63894 - RNA, 19 nt, Homo sapiens
  misc_RNA (1)...(19): siRNA sense strand
caagaccugucccuacguu

SEQ ID NO: 63895 - RNA, 19 nt, Homo sapiens
  misc_RNA (1)...(19): siRNA sense strand
gaaucccuguuguuacuau

SEQ ID NO: 63896 - RNA, 19 nt, Homo sapiens
  misc_RNA (1)...(19): siRNA sense strand
ucuccaacgugagcuauua

SEQ ID NO: 63897 - RNA, 19 nt, Homo sapiens
  misc_RNA (1)...(19): siRNA sense strand
gcagcugaguggcuauuuc

SEQ ID NO: 63898 - RNA, 19 nt, Homo sapiens
  misc_RNA (1)...(19): siRNA sense strand
uaucaacugcggcucuuua

SEQ ID NO: 63899 - RNA, 19 nt, Homo sapiens
  misc_RNA (1)...(19): siRNA sense strand
gcuguucgguguccaguuc

SEQ ID NO: 63900 - RNA, 19 nt, Homo sapiens
  misc_RNA (1)...(19): siRNA sense strand
ggugcuggauggagaaaug

SEQ ID NO: 63901 - RNA, 19 nt, Homo sapiens
  misc_RNA (1)...(19): siRNA sense strand
caacucagcacaugacuac

SEQ ID NO: 63902 - RNA, 19 nt, Homo sapiens
  misc_RNA (1)...(19): siRNA sense strand
gggagaguaugauagagau

SEQ ID NO: 63903 - RNA, 19 nt, Homo sapiens
  misc_RNA (1)...(19): siRNA sense strand
gcauugccauggaguucaa

SEQ ID NO: 63904 - RNA, 19 nt, Homo sapiens
  misc_RNA (1)...(19): siRNA sense strand
ccaaagggaagaagcaguu

SEQ ID NO: 63905 - RNA, 19 nt, Homo sapiens
  misc_RNA (1)...(19): siRNA sense strand
gaaccaaagggaagaagca

SEQ ID NO: 63906 - RNA, 19 nt, Homo sapiens
  misc_RNA (1)...(19): siRNA sense strand
cgaggugggcuuuaacauu

SEQ ID NO: 63907 - RNA, 19 nt, Homo sapiens
  misc_RNA (1)...(19): siRNA sense strand
gcggcgaggugggcuuuaa

SEQ ID NO: 63908 - RNA, 19 nt, Homo sapiens
  misc_RNA (1)...(19): siRNA sense strand
gugaaucccuguuguuacu

SEQ ID NO: 63909 - RNA, 19 nt, Homo sapiens
  misc_RNA (1)...(19): siRNA sense strand
cagugaaucccuguuguua

SEQ ID NO: 63910 - RNA, 19 nt, Homo sapiens
  misc_RNA (1)...(19): siRNA sense strand
gagaguaugauagagauug

SEQ ID NO: 63911 - RNA, 19 nt, Homo sapiens
  misc_RNA (1)...(19): siRNA sense strand
aagaagcaguugccagaug

SEQ ID NO: 63912 - RNA, 19 nt, Homo sapiens
  misc_RNA (1)...(19): siRNA sense strand
gaagaggcgccuguguuga

SEQ ID NO: 63913 - RNA, 19 nt, Homo sapiens
  misc_RNA (1)...(19): siRNA sense strand
caacugcggcucuuuaagg

SEQ ID NO: 63914 - RNA, 19 nt, Homo sapiens
  misc_RNA (1)...(19): siRNA sense strand
gcauguggcuguggauguc

SEQ ID NO: 63915 - RNA, 19 nt, Homo sapiens
  misc_RNA (1)...(19): siRNA sense strand
uagaagaggcgccuguguu

SEQ ID NO: 63916 - RNA, 19 nt, Homo sapiens
  misc_RNA (1)...(19): siRNA sense strand
agaagaggcgccuguguug

SEQ ID NO: 63917 - RNA, 19 nt, Homo sapiens
  misc_RNA (1)...(19): siRNA sense strand
ccucugugccuaaagauug

SEQ ID NO: 63918 - RNA, 19 nt, Homo sapiens
  misc_RNA (1)...(19): siRNA sense strand
gcuuuaacauugucaagac

SEQ ID NO: 63919 - RNA, 19 nt, Homo sapiens
  misc_RNA (1)...(19): siRNA sense strand
aaagugccauccaaacucu

SEQ ID NO: 63920 - RNA, 19 nt, Homo sapiens
  misc_RNA (1)...(19): siRNA sense strand
ggaguucaaccaucucuac

SEQ ID NO: 63921 - RNA, 19 nt, Homo sapiens
  misc_RNA (1)...(19): siRNA sense strand
cugcagcccuucaaugagu

SEQ ID NO: 63922 - RNA, 19 nt, Homo sapiens
  misc_RNA (1)...(19): siRNA sense strand
aagcuggucugccucaaca

SEQ ID NO: 63923 - RNA, 19 nt, Homo sapiens
  misc_RNA (1)...(19): siRNA sense strand
ccaaggcaccaaccucaug

SEQ ID NO: 63924 - RNA, 19 nt, Homo sapiens
  misc_RNA (1)...(19): siRNA sense strand
acacuucacccaccaguuc

SEQ ID NO: 63925 - RNA, 19 nt, Homo sapiens
  misc_RNA (1)...(19): siRNA sense strand
uuccugggcucaugcugua

SEQ ID NO: 63926 - RNA, 19 nt, Homo sapiens
  misc_RNA (1)...(19): siRNA sense strand
gccagugaaucccuguugu

SEQ ID NO: 63927 - RNA, 19 nt, Homo sapiens
  misc_RNA (1)...(19): siRNA sense strand
ucaagacggccacacugaa

SEQ ID NO: 63928 - RNA, 19 nt, Homo sapiens
  misc_RNA (1)...(19): siRNA sense strand
cuauuacacucguauucug

SEQ ID NO: 63929 - RNA, 19 nt, Homo sapiens
  misc_RNA (1)...(19): siRNA sense strand
caacgugagcuauuacacu

SEQ ID NO: 63930 - RNA, 19 nt, Homo sapiens
  misc_RNA (1)...(19): siRNA sense strand
caagacggccacacugaag

SEQ ID NO: 63931 - RNA, 19 nt, Homo sapiens
  misc_RNA (1)...(19): siRNA sense strand
ccagugaaucccuguuguu

SEQ ID NO: 63932 - RNA, 19 nt, Homo sapiens
  misc_RNA (1)...(19): siRNA sense strand
ggagucucuugcucugguu

SEQ ID NO: 63933 - RNA, 19 nt, Homo sapiens
  misc_RNA (1)...(19): siRNA sense strand
ccacacccaugggaaccaa

SEQ ID NO: 63934 - RNA, 19 nt, Homo sapiens
  misc_RNA (1)...(19): siRNA sense strand
ccauccaaacucuaucuuu

SEQ ID NO: 63935 - RNA, 19 nt, Homo sapiens
  misc_RNA (1)...(19): siRNA sense strand
cagaguuggaggaauugua

SEQ ID NO: 63936 - RNA, 19 nt, Homo sapiens
  misc_RNA (1)...(19): siRNA sense strand
gaagaagcaguugccagau

SEQ ID NO: 63937 - RNA, 19 nt, Homo sapiens
  misc_RNA (1)...(19): siRNA sense strand
ggagguguuugggcugcuu

SEQ ID NO: 63938 - RNA, 19 nt, Homo sapiens
  misc_RNA (1)...(19): siRNA sense strand
ggaagccgagcacauuugg

SEQ ID NO: 63939 - RNA, 19 nt, Homo sapiens
  misc_RNA (1)...(19): siRNA sense strand
gcagcagaguuggaggaau

SEQ ID NO: 63940 - RNA, 19 nt, Homo sapiens
  misc_RNA (1)...(19): siRNA sense strand
gaaaagugccauccaaacu

SEQ ID NO: 63941 - RNA, 19 nt, Homo sapiens
  misc_RNA (1)...(19): siRNA sense strand
agaguuggaggaauuguau

SEQ ID NO: 63942 - RNA, 19 nt, Homo sapiens
  misc_RNA (1)...(19): siRNA sense strand
gagcuauuacacucguauu

SEQ ID NO: 63943 - RNA, 19 nt, Homo sapiens
  misc_RNA (1)...(19): siRNA sense strand
gucaagacggccacacuga

SEQ ID NO: 63944 - RNA, 19 nt, Homo sapiens
  misc_RNA (1)...(19): siRNA sense strand
ggagaguaugauagagauu

SEQ ID NO: 63945 - RNA, 19 nt, Homo sapiens
  misc_RNA (1)...(19): siRNA sense strand
guagaagaggcgccugugu

SEQ ID NO: 63946 - RNA, 19 nt, Homo sapiens
  misc_RNA (1)...(19): siRNA sense strand
ccaauaccgcaaccgcauu

SEQ ID NO: 63947 - RNA, 19 nt, Homo sapiens
  misc_RNA (1)...(19): siRNA sense strand
ucugggaguuugucaaugc

SEQ ID NO: 63948 - RNA, 19 nt, Homo sapiens
  misc_RNA (1)...(19): siRNA sense strand
guucugggaguuugucaau

SEQ ID NO: 63949 - RNA, 19 nt, Homo sapiens
  misc_RNA (1)...(19): siRNA sense strand
caaggcaccaaccucaugu

SEQ ID NO: 63950 - RNA, 19 nt, Homo sapiens
  misc_RNA (1)...(19): siRNA sense strand
gcuauuacacucguauucu

SEQ ID NO: 63951 - RNA, 19 nt, Homo sapiens
  misc_RNA (1)...(19): siRNA sense strand
ggcaccaaccucauguuug

SEQ ID NO: 63952 - RNA, 19 nt, Homo sapiens
  misc_RNA (1)...(19): siRNA sense strand
uacaucagcugggagucuu

SEQ ID NO: 63953 - RNA, 19 nt, Homo sapiens
  misc_RNA (1)...(19): siRNA sense strand
caaagggaagaagcaguug

SEQ ID NO: 63954 - RNA, 19 nt, Homo sapiens
  misc_RNA (1)...(19): siRNA sense strand
gaggaauuguauggagaca

SEQ ID NO: 63955 - RNA, 19 nt, Homo sapiens
  misc_RNA (1)...(19): siRNA sense strand
aagaggcgccuguguugau

SEQ ID NO: 63956 - RNA, 19 nt, Homo sapiens
  misc_RNA (1)...(19): siRNA sense strand
ggaaaugucugcagaguug

SEQ ID NO: 63957 - RNA, 19 nt, Homo sapiens
  misc_RNA (1)...(19): siRNA sense strand
ggacuuauggguaauguua

SEQ ID NO: 63958 - RNA, 19 nt, Homo sapiens
  misc_RNA (1)...(19): siRNA sense strand
ugaaaggacuuauggguaa

SEQ ID NO: 63959 - RNA, 19 nt, Homo sapiens
  misc_RNA (1)...(19): siRNA sense strand
caucaacacugccucaauu

SEQ ID NO: 63960 - RNA, 19 nt, Homo sapiens
  misc_RNA (1)...(19): siRNA sense strand
gaaauuugacccagaacua

SEQ ID NO: 63961 - RNA, 19 nt, Homo sapiens
  misc_RNA (1)...(19): siRNA sense strand
ggaauuacccaguuuguug

SEQ ID NO: 63962 - RNA, 19 nt, Homo sapiens
  misc_RNA (1)...(19): siRNA sense strand
gauaauugauggagagaug

SEQ ID NO: 63963 - RNA, 19 nt, Homo sapiens
  misc_RNA (1)...(19): siRNA sense strand
caaaugagauuguggaaaa

SEQ ID NO: 63964 - RNA, 19 nt, Homo sapiens
  misc_RNA (1)...(19): siRNA sense strand
gcacuucacgcaucaguuu

SEQ ID NO: 63965 - RNA, 19 nt, Homo sapiens
  misc_RNA (1)...(19): siRNA sense strand
acagugcacuacauacuua

SEQ ID NO: 63966 - RNA, 19 nt, Homo sapiens
  misc_RNA (1)...(19): siRNA sense strand
gagagacuauuaagauugu

SEQ ID NO: 63967 - RNA, 19 nt, Homo sapiens
  misc_RNA (1)...(19): siRNA sense strand
gauugaagauuaugugcaa

SEQ ID NO: 63968 - RNA, 19 nt, Homo sapiens
  misc_RNA (1)...(19): siRNA sense strand
gaccagagcaggcagauga

SEQ ID NO: 63969 - RNA, 19 nt, Homo sapiens
  misc_RNA (1)...(19): siRNA sense strand
gaaacccacuccaaacaca

SEQ ID NO: 63970 - RNA, 19 nt, Homo sapiens
  misc_RNA (1)...(19): siRNA sense strand
gaucuacccuccucaaguc

SEQ ID NO: 63971 - RNA, 19 nt, Homo sapiens
  misc_RNA (1)...(19): siRNA sense strand
ucaaauucaugaccagaaa

SEQ ID NO: 63972 - RNA, 19 nt, Homo sapiens
  misc_RNA (1)...(19): siRNA sense strand
caugauguuugcauucuuu

SEQ ID NO: 63973 - RNA, 19 nt, Homo sapiens
  misc_RNA (1)...(19): siRNA sense strand
ccugacaccuuucaaauuc

SEQ ID NO: 63974 - RNA, 19 nt, Homo sapiens
  misc_RNA (1)...(19): siRNA sense strand
gaugauguaugccacaauc

SEQ ID NO: 63975 - RNA, 19 nt, Homo sapiens
  misc_RNA (1)...(19): siRNA sense strand
gcaaacgcuuuaugcugaa

SEQ ID NO: 63976 - RNA, 19 nt, Homo sapiens
  misc_RNA (1)...(19): siRNA sense strand
gcaggcagaugaaauacca

SEQ ID NO: 63977 - RNA, 19 nt, Homo sapiens
  misc_RNA (1)...(19): siRNA sense strand
ggagagacuauuaagauug

SEQ ID NO: 63978 - RNA, 19 nt, Homo sapiens
  misc_RNA (1)...(19): siRNA sense strand
caacuuacaaugcugacua

SEQ ID NO: 63979 - RNA, 19 nt, Homo sapiens
  misc_RNA (1)...(19): siRNA sense strand
ugauaucaaucccacagua

SEQ ID NO: 63980 - RNA, 19 nt, Homo sapiens
  misc_RNA (1)...(19): siRNA sense strand
aaaccgagguguauguaug

SEQ ID NO: 63981 - RNA, 19 nt, Homo sapiens
  misc_RNA (1)...(19): siRNA sense strand
aaacacagugcacuacaua

SEQ ID NO: 63982 - RNA, 19 nt, Homo sapiens
  misc_RNA (1)...(19): siRNA sense strand
ggcuaucacuucaaacuga

SEQ ID NO: 63983 - RNA, 19 nt, Homo sapiens
  misc_RNA (1)...(19): siRNA sense strand
ucguauugcugcugaauuu

SEQ ID NO: 63984 - RNA, 19 nt, Homo sapiens
  misc_RNA (1)...(19): siRNA sense strand
gugaaacucuggcuagaca

SEQ ID NO: 63985 - RNA, 19 nt, Homo sapiens
  misc_RNA (1)...(19): siRNA sense strand
gaaauacaacuaucaacag

SEQ ID NO: 63986 - RNA, 19 nt, Homo sapiens
  misc_RNA (1)...(19): siRNA sense strand
gaaguggguuuucaaauca

SEQ ID NO: 63987 - RNA, 19 nt, Homo sapiens
  misc_RNA (1)...(19): siRNA sense strand
uuuggaacguugugaauaa

SEQ ID NO: 63988 - RNA, 19 nt, Homo sapiens
  misc_RNA (1)...(19): siRNA sense strand
gaaaggacuuauggguaau

SEQ ID NO: 63989 - RNA, 19 nt, Homo sapiens
  misc_RNA (1)...(19): siRNA sense strand
gaauuacccaguuuguuga

SEQ ID NO: 63990 - RNA, 19 nt, Homo sapiens
  misc_RNA (1)...(19): siRNA sense strand
gaccagaaauacaacuauc

SEQ ID NO: 63991 - RNA, 19 nt, Homo sapiens
  misc_RNA (1)...(19): siRNA sense strand
gcagcuuccugauucaaau

SEQ ID NO: 63992 - RNA, 19 nt, Homo sapiens
  misc_RNA (1)...(19): siRNA sense strand
caacaaacaauuccaguac

SEQ ID NO: 63993 - RNA, 19 nt, Homo sapiens
  misc_RNA (1)...(19): siRNA sense strand
gcaccauucuccuugaaag

SEQ ID NO: 63994 - RNA, 19 nt, Homo sapiens
  misc_RNA (1)...(19): siRNA sense strand
gagcaccauucuccuugaa

SEQ ID NO: 63995 - RNA, 19 nt, Homo sapiens
  misc_RNA (1)...(19): siRNA sense strand
gcugaagcccuaugaauca

SEQ ID NO: 63996 - RNA, 19 nt, Homo sapiens
  misc_RNA (1)...(19): siRNA sense strand
ucaagucccugagcaucua

SEQ ID NO: 63997 - RNA, 19 nt, Homo sapiens
  misc_RNA (1)...(19): siRNA sense strand
caguauaagugcgauugua

SEQ ID NO: 63998 - RNA, 19 nt, Homo sapiens
  misc_RNA (1)...(19): siRNA sense strand
cuacauacuuacccacuuc

SEQ ID NO: 63999 - RNA, 19 nt, Homo sapiens
  misc_RNA (1)...(19): siRNA sense strand
gcucagccauacagcaaau

SEQ ID NO: 64000 - RNA, 19 nt, Homo sapiens
  misc_RNA (1)...(19): siRNA sense strand
ugaagaacuuacaggagaa

SEQ ID NO: 64001 - RNA, 19 nt, Homo sapiens
  misc_RNA (1)...(19): siRNA sense strand
uaucacaggcuuccauuga

SEQ ID NO: 64002 - RNA, 19 nt, Homo sapiens
  misc_RNA (1)...(19): siRNA sense strand
caaacacagugcacuacau

SEQ ID NO: 64003 - RNA, 19 nt, Homo sapiens
  misc_RNA (1)...(19): siRNA sense strand
gaauuuaacacccucuauc

SEQ ID NO: 64004 - RNA, 19 nt, Homo sapiens
  misc_RNA (1)...(19): siRNA sense strand
gggguggacuuaaaucaua

SEQ ID NO: 64005 - RNA, 19 nt, Homo sapiens
  misc_RNA (1)...(19): siRNA sense strand
gaacguugugaauaacauu

SEQ ID NO: 64006 - RNA, 19 nt, Homo sapiens
  misc_RNA (1)...(19): siRNA sense strand
guauugcugcugaauuuaa

SEQ ID NO: 64007 - RNA, 19 nt, Homo sapiens
  misc_RNA (1)...(19): siRNA sense strand
aagauuaugugcaacacuu

SEQ ID NO: 64008 - RNA, 19 nt, Homo sapiens
  misc_RNA (1)...(19): siRNA sense strand
cgaaaugcaauuaugaguu

SEQ ID NO: 64009 - RNA, 19 nt, Homo sapiens
  misc_RNA (1)...(19): siRNA sense strand
ggaacguugugaauaacau

SEQ ID NO: 64010 - RNA, 19 nt, Homo sapiens
  misc_RNA (1)...(19): siRNA sense strand
uaggagagacuauuaagau

SEQ ID NO: 64011 - RNA, 19 nt, Homo sapiens
  misc_RNA (1)...(19): siRNA sense strand
acaagcaggcuaauacuga

SEQ ID NO: 64012 - RNA, 19 nt, Homo sapiens
  misc_RNA (1)...(19): siRNA sense strand
agagcaggcagaugaaaua

SEQ ID NO: 64013 - RNA, 19 nt, Homo sapiens
  misc_RNA (1)...(19): siRNA sense strand
uaaaagaacguucgacuga

SEQ ID NO: 64014 - RNA, 19 nt, Homo sapiens
  misc_RNA (1)...(19): siRNA sense strand
ccagauccagagcucauua

SEQ ID NO: 64015 - RNA, 19 nt, Homo sapiens
  misc_RNA (1)...(19): siRNA sense strand
ucaauucagucucucaucu

SEQ ID NO: 64016 - RNA, 19 nt, Homo sapiens
  misc_RNA (1)...(19): siRNA sense strand
ugccuggucugaugaugua

SEQ ID NO: 64017 - RNA, 19 nt, Homo sapiens
  misc_RNA (1)...(19): siRNA sense strand
uggguaauguuauauguuc

SEQ ID NO: 64018 - RNA, 19 nt, Homo sapiens
  misc_RNA (1)...(19): siRNA sense strand
gauuugaccaguauaagug

SEQ ID NO: 64019 - RNA, 19 nt, Homo sapiens
  misc_RNA (1)...(19): siRNA sense strand
ucaacaaacaauuccagua

SEQ ID NO: 64020 - RNA, 19 nt, Homo sapiens
  misc_RNA (1)...(19): siRNA sense strand
caagcaggcuaauacugau

SEQ ID NO: 64021 - RNA, 19 nt, Homo sapiens
  misc_RNA (1)...(19): siRNA sense strand
cagcguaaacugcgccuuu

SEQ ID NO: 64022 - RNA, 19 nt, Homo sapiens
  misc_RNA (1)...(19): siRNA sense strand
gaagaacuuacaggagaaa

SEQ ID NO: 64023 - RNA, 19 nt, Homo sapiens
  misc_RNA (1)...(19): siRNA sense strand
aggagagacuauuaagauu

SEQ ID NO: 64024 - RNA, 19 nt, Homo sapiens
  misc_RNA (1)...(19): siRNA sense strand
gaauguuccacccgcagua

SEQ ID NO: 64025 - RNA, 19 nt, Homo sapiens
  misc_RNA (1)...(19): siRNA sense strand
gaagcacucuauggugaca

SEQ ID NO: 64026 - RNA, 19 nt, Homo sapiens
  misc_RNA (1)...(19): siRNA sense strand
gaguaccgcaaacgcuuua

SEQ ID NO: 64027 - RNA, 19 nt, Homo sapiens
  misc_RNA (1)...(19): siRNA sense strand
ugacauccagaucacauuu

SEQ ID NO: 64028 - RNA, 19 nt, Homo sapiens
  misc_RNA (1)...(19): siRNA sense strand
ccagaaauacaacuaucaa

SEQ ID NO: 64029 - RNA, 19 nt, Homo sapiens
  misc_RNA (1)...(19): siRNA sense strand
aaacaauuccaguaccaaa

SEQ ID NO: 64030 - RNA, 19 nt, Homo sapiens
  misc_RNA (1)...(19): siRNA sense strand
ggagaaaacugcucaacac

SEQ ID NO: 64031 - RNA, 19 nt, Homo sapiens
  misc_RNA (1)...(19): siRNA sense strand
guaugagugugggauuuga

SEQ ID NO: 64032 - RNA, 19 nt, Homo sapiens
  misc_RNA (1)...(19): siRNA sense strand
cagaugaaauaccagucuu

SEQ ID NO: 64033 - RNA, 19 nt, Homo sapiens
  misc_RNA (1)...(19): siRNA sense strand
aacauucccuuccuucgaa

SEQ ID NO: 64034 - RNA, 19 nt, Homo sapiens
  misc_RNA (1)...(19): siRNA sense strand
acauccagaucacauuuga

SEQ ID NO: 64035 - RNA, 19 nt, Homo sapiens
  misc_RNA (1)...(19): siRNA sense strand
ggauuugaccaguauaagu

SEQ ID NO: 64036 - RNA, 19 nt, Homo sapiens
  misc_RNA (1)...(19): siRNA sense strand
ccagacaagcaggcuaaua

SEQ ID NO: 64037 - RNA, 19 nt, Homo sapiens
  misc_RNA (1)...(19): siRNA sense strand
uaacauucccuuccuucga

SEQ ID NO: 64038 - RNA, 19 nt, Homo sapiens
  misc_RNA (1)...(19): siRNA sense strand
gcugucccuuuacuucauu

SEQ ID NO: 64039 - RNA, 19 nt, Homo sapiens
  misc_RNA (1)...(19): siRNA sense strand
ggguggacuuaaaucauau

SEQ ID NO: 64040 - RNA, 19 nt, Homo sapiens
  misc_RNA (1)...(19): siRNA sense strand
gcgggaacacaacagagua

SEQ ID NO: 64041 - RNA, 19 nt, Homo sapiens
  misc_RNA (1)...(19): siRNA sense strand
gcagaugaaauaccagucu

SEQ ID NO: 64042 - RNA, 19 nt, Homo sapiens
  misc_RNA (1)...(19): siRNA sense strand
cagacaagcaggcuaauac

SEQ ID NO: 64043 - RNA, 19 nt, Homo sapiens
  misc_RNA (1)...(19): siRNA sense strand
acugaaauuugacccagaa

SEQ ID NO: 64044 - RNA, 19 nt, Homo sapiens
  misc_RNA (1)...(19): siRNA sense strand
uaucaaucccacaguacua

SEQ ID NO: 64045 - RNA, 19 nt, Homo sapiens
  misc_RNA (1)...(19): siRNA sense strand
acaaacaauuccaguacca

SEQ ID NO: 64046 - RNA, 19 nt, Homo sapiens
  misc_RNA (1)...(19): siRNA sense strand
gaacuacuuuucaacaaac

SEQ ID NO: 64047 - RNA, 19 nt, Homo sapiens
  misc_RNA (1)...(19): siRNA sense strand
gcgcucagccauacagcaa

SEQ ID NO: 64048 - RNA, 19 nt, Homo sapiens
  misc_RNA (1)...(19): siRNA sense strand
gauuguacccggacaggau

SEQ ID NO: 64049 - RNA, 19 nt, Homo sapiens
  misc_RNA (1)...(19): siRNA sense strand
gccugacaccuuucaaauu

SEQ ID NO: 64050 - RNA, 19 nt, Homo sapiens
  misc_RNA (1)...(19): siRNA sense strand
uaauugauggagagaugua

SEQ ID NO: 64051 - RNA, 19 nt, Homo sapiens
  misc_RNA (1)...(19): siRNA sense strand
gagacuauuaagauuguga

SEQ ID NO: 64052 - RNA, 19 nt, Homo sapiens
  misc_RNA (1)...(19): siRNA sense strand
ugugggauuugaccaguau

SEQ ID NO: 64053 - RNA, 19 nt, Homo sapiens
  misc_RNA (1)...(19): siRNA sense strand
ucauucaccaggcaaauug

SEQ ID NO: 64054 - RNA, 19 nt, Homo sapiens
  misc_RNA (1)...(19): siRNA sense strand
ugacaccuuucaaauucau

SEQ ID NO: 64055 - RNA, 19 nt, Homo sapiens
  misc_RNA (1)...(19): siRNA sense strand
caucugcaauaacgugaag

SEQ ID NO: 64056 - RNA, 19 nt, Homo sapiens
  misc_RNA (1)...(19): siRNA sense strand
ggaaauggaugacacagaa

SEQ ID NO: 64057 - RNA, 19 nt, Homo sapiens
  misc_RNA (1)...(19): siRNA sense strand
gcagaaguauucagaagaa

SEQ ID NO: 64058 - RNA, 19 nt, Homo sapiens
  misc_RNA (1)...(19): siRNA sense strand
caaagaaucugucaggaau

SEQ ID NO: 64059 - RNA, 19 nt, Homo sapiens
  misc_RNA (1)...(19): siRNA sense strand
gaacucagaugcacaaugc

SEQ ID NO: 64060 - RNA, 19 nt, Homo sapiens
  misc_RNA (1)...(19): siRNA sense strand
cagcaagccucacauguuu

SEQ ID NO: 64061 - RNA, 19 nt, Homo sapiens
  misc_RNA (1)...(19): siRNA sense strand
guaaauacaccacgaauuc

SEQ ID NO: 64062 - RNA, 19 nt, Homo sapiens
  misc_RNA (1)...(19): siRNA sense strand
gcacagagagcuaugaaau

SEQ ID NO: 64063 - RNA, 19 nt, Homo sapiens
  misc_RNA (1)...(19): siRNA sense strand
gcacaaugcuggauuuggu

SEQ ID NO: 64064 - RNA, 19 nt, Homo sapiens
  misc_RNA (1)...(19): siRNA sense strand
acagagagcuaugaaauga

SEQ ID NO: 64065 - RNA, 19 nt, Homo sapiens
  misc_RNA (1)...(19): siRNA sense strand
ccaaccagcuccugccuuu

SEQ ID NO: 64066 - RNA, 19 nt, Homo sapiens
  misc_RNA (1)...(19): siRNA sense strand
gccaccaagugcauuauua

SEQ ID NO: 64067 - RNA, 19 nt, Homo sapiens
  misc_RNA (1)...(19): siRNA sense strand
gaacaagacaccaugacuu

SEQ ID NO: 64068 - RNA, 19 nt, Homo sapiens
  misc_RNA (1)...(19): siRNA sense strand
ggaaugacaggaacaagaa

SEQ ID NO: 64069 - RNA, 19 nt, Homo sapiens
  misc_RNA (1)...(19): siRNA sense strand
gcacaguccuagcaucuca

SEQ ID NO: 64070 - RNA, 19 nt, Homo sapiens
  misc_RNA (1)...(19): siRNA sense strand
gaccaucgcagaccaaauu

SEQ ID NO: 64071 - RNA, 19 nt, Homo sapiens
  misc_RNA (1)...(19): siRNA sense strand
ccaagugcauuauuaagau

SEQ ID NO: 64072 - RNA, 19 nt, Homo sapiens
  misc_RNA (1)...(19): siRNA sense strand
aagaaaugcuggagaauuc

SEQ ID NO: 64073 - RNA, 19 nt, Homo sapiens
  misc_RNA (1)...(19): siRNA sense strand
gaugcacaaugcuggauuu

SEQ ID NO: 64074 - RNA, 19 nt, Homo sapiens
  misc_RNA (1)...(19): siRNA sense strand
cgagauaagaacuguguua

SEQ ID NO: 64075 - RNA, 19 nt, Homo sapiens
  misc_RNA (1)...(19): siRNA sense strand
uuaauaaagucaccaggaa

SEQ ID NO: 64076 - RNA, 19 nt, Homo sapiens
  misc_RNA (1)...(19): siRNA sense strand
guaauuaccuugaaaaugg

SEQ ID NO: 64077 - RNA, 19 nt, Homo sapiens
  misc_RNA (1)...(19): siRNA sense strand
ccucacauguuuccaaaga

SEQ ID NO: 64078 - RNA, 19 nt, Homo sapiens
  misc_RNA (1)...(19): siRNA sense strand
ggagaauucugaaggacau

SEQ ID NO: 64079 - RNA, 19 nt, Homo sapiens
  misc_RNA (1)...(19): siRNA sense strand
caagaaaugcuggagaauu

SEQ ID NO: 64080 - RNA, 19 nt, Homo sapiens
  misc_RNA (1)...(19): siRNA sense strand
ucacagagaagauccgaaa

SEQ ID NO: 64081 - RNA, 19 nt, Homo sapiens
  misc_RNA (1)...(19): siRNA sense strand
gaacacagcagagcacagu

SEQ ID NO: 64082 - RNA, 19 nt, Homo sapiens
  misc_RNA (1)...(19): siRNA sense strand
gaccuuguguucaccuuug

SEQ ID NO: 64083 - RNA, 19 nt, Homo sapiens
  misc_RNA (1)...(19): siRNA sense strand
agucaccacucgugcaaua

SEQ ID NO: 64084 - RNA, 19 nt, Homo sapiens
  misc_RNA (1)...(19): siRNA sense strand
ccaaagaaucugucaggaa

SEQ ID NO: 64085 - RNA, 19 nt, Homo sapiens
  misc_RNA (1)...(19): siRNA sense strand
ugaaaugacagcugaguug

SEQ ID NO: 64086 - RNA, 19 nt, Homo sapiens
  misc_RNA (1)...(19): siRNA sense strand
ccaccaagugcauuauuaa

SEQ ID NO: 64087 - RNA, 19 nt, Homo sapiens
  misc_RNA (1)...(19): siRNA sense strand
uuauuaagaucguggaguu

SEQ ID NO: 64088 - RNA, 19 nt, Homo sapiens
  misc_RNA (1)...(19): siRNA sense strand
aagaaucugucaggaauga

SEQ ID NO: 64089 - RNA, 19 nt, Homo sapiens
  misc_RNA (1)...(19): siRNA sense strand
ucacagaucuccguagcau

SEQ ID NO: 64090 - RNA, 19 nt, Homo sapiens
  misc_RNA (1)...(19): siRNA sense strand
ucacauguuuccaaagauc

SEQ ID NO: 64091 - RNA, 19 nt, Homo sapiens
  misc_RNA (1)...(19): siRNA sense strand
gaucguggaguuugcuaaa

SEQ ID NO: 64092 - RNA, 19 nt, Homo sapiens
  misc_RNA (1)...(19): siRNA sense strand
gcuggagaauucugaagga

SEQ ID NO: 64093 - RNA, 19 nt, Homo sapiens
  misc_RNA (1)...(19): siRNA sense strand
gaaauggaugacacagaaa

SEQ ID NO: 64094 - RNA, 19 nt, Homo sapiens
  misc_RNA (1)...(19): siRNA sense strand
ggccuuacccuaaaucgaa

SEQ ID NO: 64095 - RNA, 19 nt, Homo sapiens
  misc_RNA (1)...(19): siRNA sense strand
cuggacauccugauucuua

SEQ ID NO: 64096 - RNA, 19 nt, Homo sapiens
  misc_RNA (1)...(19): siRNA sense strand
aagcaagaaugcacagaga

SEQ ID NO: 64097 - RNA, 19 nt, Homo sapiens
  misc_RNA (1)...(19): siRNA sense strand
ccagcaagccucacauguu

SEQ ID NO: 64098 - RNA, 19 nt, Homo sapiens
  misc_RNA (1)...(19): siRNA sense strand
ucagacggccuuacccuaa

SEQ ID NO: 64099 - RNA, 19 nt, Homo sapiens
  misc_RNA (1)...(19): siRNA sense strand
ccgaaaagcucaccaggaa

SEQ ID NO: 64100 - RNA, 19 nt, Homo sapiens
  misc_RNA (1)...(19): siRNA sense strand
cagacggccuuacccuaaa

SEQ ID NO: 64101 - RNA, 19 nt, Homo sapiens
  misc_RNA (1)...(19): siRNA sense strand
gguaaauacaccacgaauu

SEQ ID NO: 64102 - RNA, 19 nt, Homo sapiens
  misc_RNA (1)...(19): siRNA sense strand
gugggaauguccaaagaau

SEQ ID NO: 64103 - RNA, 19 nt, Homo sapiens
  misc_RNA (1)...(19): siRNA sense strand
ucacccagcucaguggaaa

SEQ ID NO: 64104 - RNA, 19 nt, Homo sapiens
  misc_RNA (1)...(19): siRNA sense strand
gcuccugccuuuggaaaug

SEQ ID NO: 64105 - RNA, 19 nt, Homo sapiens
  misc_RNA (1)...(19): siRNA sense strand
gauuugguccucugacuga

SEQ ID NO: 64106 - RNA, 19 nt, Homo sapiens
  misc_RNA (1)...(19): siRNA sense strand
gaaucgaugccaauacugu

SEQ ID NO: 64107 - RNA, 19 nt, Homo sapiens
  misc_RNA (1)...(19): siRNA sense strand
gugcagagcguguaauuac

SEQ ID NO: 64108 - RNA, 19 nt, Homo sapiens
  misc_RNA (1)...(19): siRNA sense strand
ucugccagcuggguaaaua

SEQ ID NO: 64109 - RNA, 19 nt, Homo sapiens
  misc_RNA (1)...(19): siRNA sense strand
gaagugggaauguccaaag

SEQ ID NO: 64110 - RNA, 19 nt, Homo sapiens
  misc_RNA (1)...(19): siRNA sense strand
agagagcuaugaaaugaca

SEQ ID NO: 64111 - RNA, 19 nt, Homo sapiens
  misc_RNA (1)...(19): siRNA sense strand
aacaagacaccaugacuuu

SEQ ID NO: 64112 - RNA, 19 nt, Homo sapiens
  misc_RNA (1)...(19): siRNA sense strand
cagcugaguuggacgaucu

SEQ ID NO: 64113 - RNA, 19 nt, Homo sapiens
  misc_RNA (1)...(19): siRNA sense strand
gggaauguccaaagaaucu

SEQ ID NO: 64114 - RNA, 19 nt, Homo sapiens
  misc_RNA (1)...(19): siRNA sense strand
gcagagcacaguccuagca

SEQ ID NO: 64115 - RNA, 19 nt, Homo sapiens
  misc_RNA (1)...(19): siRNA sense strand
caagugcauuauuaagauc

SEQ ID NO: 64116 - RNA, 19 nt, Homo sapiens
  misc_RNA (1)...(19): siRNA sense strand
ccaccucucauucaagaaa

SEQ ID NO: 64117 - RNA, 19 nt, Homo sapiens
  misc_RNA (1)...(19): siRNA sense strand
gcguguaauuaccuugaaa

SEQ ID NO: 64118 - RNA, 19 nt, Homo sapiens
  misc_RNA (1)...(19): siRNA sense strand
ugacugaccuuguguucac

SEQ ID NO: 64119 - RNA, 19 nt, Homo sapiens
  misc_RNA (1)...(19): siRNA sense strand
agaauuugcaccagguaua

SEQ ID NO: 64120 - RNA, 19 nt, Homo sapiens
  misc_RNA (1)...(19): siRNA sense strand
gcuaaacgucugccugguu

SEQ ID NO: 64121 - RNA, 19 nt, Homo sapiens
  misc_RNA (1)...(19): siRNA sense strand
ccagaagugcuuugaagug

SEQ ID NO: 64122 - RNA, 19 nt, Homo sapiens
  misc_RNA (1)...(19): siRNA sense strand
gagcguguaauuaccuuga

SEQ ID NO: 64123 - RNA, 19 nt, Homo sapiens
  misc_RNA (1)...(19): siRNA sense strand
caagacaccaugacuuucu

SEQ ID NO: 64124 - RNA, 19 nt, Homo sapiens
  misc_RNA (1)...(19): siRNA sense strand
gaaugacaggaacaagaaa

SEQ ID NO: 64125 - RNA, 19 nt, Homo sapiens
  misc_RNA (1)...(19): siRNA sense strand
ccgcagaaguauucagaag

SEQ ID NO: 64126 - RNA, 19 nt, Homo sapiens
  misc_RNA (1)...(19): siRNA sense strand
gaaauuccuggaucaaugc

SEQ ID NO: 64127 - RNA, 19 nt, Homo sapiens
  misc_RNA (1)...(19): siRNA sense strand
ucucagugccaucugcuua

SEQ ID NO: 64128 - RNA, 19 nt, Homo sapiens
  misc_RNA (1)...(19): siRNA sense strand
ggacauccugauucuuaga

SEQ ID NO: 64129 - RNA, 19 nt, Homo sapiens
  misc_RNA (1)...(19): siRNA sense strand
ccaggaaucgaugccaaua

SEQ ID NO: 64130 - RNA, 19 nt, Homo sapiens
  misc_RNA (1)...(19): siRNA sense strand
gagcacaguccuagcaucu

SEQ ID NO: 64131 - RNA, 19 nt, Homo sapiens
  misc_RNA (1)...(19): siRNA sense strand
uucaagaaaugcuggagaa

SEQ ID NO: 64132 - RNA, 19 nt, Homo sapiens
  misc_RNA (1)...(19): siRNA sense strand
ugagggauguaagggcuuu

SEQ ID NO: 64133 - RNA, 19 nt, Homo sapiens
  misc_RNA (1)...(19): siRNA sense strand
acagaucuccguagcauca

SEQ ID NO: 64134 - RNA, 19 nt, Homo sapiens
  misc_RNA (1)...(19): siRNA sense strand
uaagcuacaagaaccauug

SEQ ID NO: 64135 - RNA, 19 nt, Homo sapiens
  misc_RNA (1)...(19): siRNA sense strand
ucaccgagauaagaacugu

SEQ ID NO: 64136 - RNA, 19 nt, Homo sapiens
  misc_RNA (1)...(19): siRNA sense strand
gaauuccagugcugaccau

SEQ ID NO: 64137 - RNA, 19 nt, Homo sapiens
  misc_RNA (1)...(19): siRNA sense strand
aagcucaccaggaaacuuu

SEQ ID NO: 64138 - RNA, 19 nt, Homo sapiens
  misc_RNA (1)...(19): siRNA sense strand
ggugcagagcguguaauua

SEQ ID NO: 64139 - RNA, 19 nt, Homo sapiens
  misc_RNA (1)...(19): siRNA sense strand
ugccaccucucauucaaga

SEQ ID NO: 64140 - RNA, 19 nt, Homo sapiens
  misc_RNA (1)...(19): siRNA sense strand
gaaaugcuggagaauucug

SEQ ID NO: 64141 - RNA, 19 nt, Homo sapiens
  misc_RNA (1)...(19): siRNA sense strand
ggaucaaugccaccucuca

SEQ ID NO: 64142 - RNA, 19 nt, Homo sapiens
  misc_RNA (1)...(19): siRNA sense strand
acacuugucaccgagauaa

SEQ ID NO: 64143 - RNA, 19 nt, Homo sapiens
  misc_RNA (1)...(19): siRNA sense strand
agacuucgaagcaagaaug

SEQ ID NO: 64144 - RNA, 19 nt, Homo sapiens
  misc_RNA (1)...(19): siRNA sense strand
uaaaggugcagagcgugua

SEQ ID NO: 64145 - RNA, 19 nt, Homo sapiens
  misc_RNA (1)...(19): siRNA sense strand
uaauaaagucaccaggaau

SEQ ID NO: 64146 - RNA, 19 nt, Homo sapiens
  misc_RNA (1)...(19): siRNA sense strand
ccagaacaagacaccauga

SEQ ID NO: 64147 - RNA, 19 nt, Homo sapiens
  misc_RNA (1)...(19): siRNA sense strand
gaauuugcaccagguauac

SEQ ID NO: 64148 - RNA, 19 nt, Homo sapiens
  misc_RNA (1)...(19): siRNA sense strand
cacagagagcuaugaaaug

SEQ ID NO: 64149 - RNA, 19 nt, Homo sapiens
  misc_RNA (1)...(19): siRNA sense strand
gaauucugaaggacaugaa

SEQ ID NO: 64150 - RNA, 19 nt, Homo sapiens
  misc_RNA (1)...(19): siRNA sense strand
gaauguccaaagaaucugu

SEQ ID NO: 64151 - RNA, 19 nt, Homo sapiens
  misc_RNA (1)...(19): siRNA sense strand
acaagaaccauugcuggaa

SEQ ID NO: 64152 - RNA, 19 nt, Homo sapiens
  misc_RNA (1)...(19): siRNA sense strand
agacggccuuacccuaaau

SEQ ID NO: 64153 - RNA, 19 nt, Homo sapiens
  misc_RNA (1)...(19): siRNA sense strand
aagugggaauguccaaaga

SEQ ID NO: 64154 - RNA, 19 nt, Homo sapiens
  misc_RNA (1)...(19): siRNA sense strand
ucagugccaucugcuuaau

SEQ ID NO: 64155 - RNA, 19 nt, Homo sapiens
  misc_RNA (1)...(19): siRNA sense strand
cuccagaagugcuuugaag

SEQ ID NO: 64156 - RNA, 19 nt, Homo sapiens
  misc_RNA (1)...(19): siRNA sense strand
ggaaauggaugacacagaa

SEQ ID NO: 64157 - RNA, 19 nt, Homo sapiens
  misc_RNA (1)...(19): siRNA sense strand
caaagaaucugucaggaau

SEQ ID NO: 64158 - RNA, 19 nt, Homo sapiens
  misc_RNA (1)...(19): siRNA sense strand
gaacucagaugcacaaugc

SEQ ID NO: 64159 - RNA, 19 nt, Homo sapiens
  misc_RNA (1)...(19): siRNA sense strand
cagcaagccucacauguuu

SEQ ID NO: 64160 - RNA, 19 nt, Homo sapiens
  misc_RNA (1)...(19): siRNA sense strand
guaaauacaccacgaauuc

SEQ ID NO: 64161 - RNA, 19 nt, Homo sapiens
  misc_RNA (1)...(19): siRNA sense strand
gcacagagagcuaugaaau

SEQ ID NO: 64162 - RNA, 19 nt, Homo sapiens
  misc_RNA (1)...(19): siRNA sense strand
gcacaaugcuggauuuggu

SEQ ID NO: 64163 - RNA, 19 nt, Homo sapiens
  misc_RNA (1)...(19): siRNA sense strand
acagagagcuaugaaauga

SEQ ID NO: 64164 - RNA, 19 nt, Homo sapiens
  misc_RNA (1)...(19): siRNA sense strand
ccaaccagcuccugccuuu

SEQ ID NO: 64165 - RNA, 19 nt, Homo sapiens
  misc_RNA (1)...(19): siRNA sense strand
gccaccaagugcauuauua

SEQ ID NO: 64166 - RNA, 19 nt, Homo sapiens
  misc_RNA (1)...(19): siRNA sense strand
gaacaagacaccaugacuu

SEQ ID NO: 64167 - RNA, 19 nt, Homo sapiens
  misc_RNA (1)...(19): siRNA sense strand
ggaaugacaggaacaagaa

SEQ ID NO: 64168 - RNA, 19 nt, Homo sapiens
  misc_RNA (1)...(19): siRNA sense strand
gcacaguccuagcaucuca

SEQ ID NO: 64169 - RNA, 19 nt, Homo sapiens
  misc_RNA (1)...(19): siRNA sense strand
gaccaucgcagaccaaauu

SEQ ID NO: 64170 - RNA, 19 nt, Homo sapiens
  misc_RNA (1)...(19): siRNA sense strand
ccaagugcauuauuaagau

SEQ ID NO: 64171 - RNA, 19 nt, Homo sapiens
  misc_RNA (1)...(19): siRNA sense strand
aagaaaugcuggagaauuc

SEQ ID NO: 64172 - RNA, 19 nt, Homo sapiens
  misc_RNA (1)...(19): siRNA sense strand
gaugcacaaugcuggauuu

SEQ ID NO: 64173 - RNA, 19 nt, Homo sapiens
  misc_RNA (1)...(19): siRNA sense strand
cgagauaagaacuguguua

SEQ ID NO: 64174 - RNA, 19 nt, Homo sapiens
  misc_RNA (1)...(19): siRNA sense strand
uuaauaaagucaccaggaa

SEQ ID NO: 64175 - RNA, 19 nt, Homo sapiens
  misc_RNA (1)...(19): siRNA sense strand
guaauuaccuugaaaaugg

SEQ ID NO: 64176 - RNA, 19 nt, Homo sapiens
  misc_RNA (1)...(19): siRNA sense strand
ccucacauguuuccaaaga

SEQ ID NO: 64177 - RNA, 19 nt, Homo sapiens
  misc_RNA (1)...(19): siRNA sense strand
ggagaauucugaaggacau

SEQ ID NO: 64178 - RNA, 19 nt, Homo sapiens
  misc_RNA (1)...(19): siRNA sense strand
caagaaaugcuggagaauu

SEQ ID NO: 64179 - RNA, 19 nt, Homo sapiens
  misc_RNA (1)...(19): siRNA sense strand
ucacagagaagauccgaaa

SEQ ID NO: 64180 - RNA, 19 nt, Homo sapiens
  misc_RNA (1)...(19): siRNA sense strand
gaacacagcagagcacagu

SEQ ID NO: 64181 - RNA, 19 nt, Homo sapiens
  misc_RNA (1)...(19): siRNA sense strand
gaccuuguguucaccuuug

SEQ ID NO: 64182 - RNA, 19 nt, Homo sapiens
  misc_RNA (1)...(19): siRNA sense strand
agucaccacucgugcaaua

SEQ ID NO: 64183 - RNA, 19 nt, Homo sapiens
  misc_RNA (1)...(19): siRNA sense strand
ccaaagaaucugucaggaa

SEQ ID NO: 64184 - RNA, 19 nt, Homo sapiens
  misc_RNA (1)...(19): siRNA sense strand
ugaaaugacagcugaguug

SEQ ID NO: 64185 - RNA, 19 nt, Homo sapiens
  misc_RNA (1)...(19): siRNA sense strand
ccaccaagugcauuauuaa

SEQ ID NO: 64186 - RNA, 19 nt, Homo sapiens
  misc_RNA (1)...(19): siRNA sense strand
uuauuaagaucguggaguu

SEQ ID NO: 64187 - RNA, 19 nt, Homo sapiens
  misc_RNA (1)...(19): siRNA sense strand
aagaaucugucaggaauga

SEQ ID NO: 64188 - RNA, 19 nt, Homo sapiens
  misc_RNA (1)...(19): siRNA sense strand
ucacagaucuccguagcau

SEQ ID NO: 64189 - RNA, 19 nt, Homo sapiens
  misc_RNA (1)...(19): siRNA sense strand
ucacauguuuccaaagauc

SEQ ID NO: 64190 - RNA, 19 nt, Homo sapiens
  misc_RNA (1)...(19): siRNA sense strand
gaucguggaguuugcuaaa

SEQ ID NO: 64191 - RNA, 19 nt, Homo sapiens
  misc_RNA (1)...(19): siRNA sense strand
gcuggagaauucugaagga

SEQ ID NO: 64192 - RNA, 19 nt, Homo sapiens
  misc_RNA (1)...(19): siRNA sense strand
gaaauggaugacacagaaa

SEQ ID NO: 64193 - RNA, 19 nt, Homo sapiens
  misc_RNA (1)...(19): siRNA sense strand
ggccuuacccuaaaucgaa

SEQ ID NO: 64194 - RNA, 19 nt, Homo sapiens
  misc_RNA (1)...(19): siRNA sense strand
cuggacauccugauucuua

SEQ ID NO: 64195 - RNA, 19 nt, Homo sapiens
  misc_RNA (1)...(19): siRNA sense strand
aagcaagaaugcacagaga

SEQ ID NO: 64196 - RNA, 19 nt, Homo sapiens
  misc_RNA (1)...(19): siRNA sense strand
ccagcaagccucacauguu

SEQ ID NO: 64197 - RNA, 19 nt, Homo sapiens
  misc_RNA (1)...(19): siRNA sense strand
ucagacggccuuacccuaa

SEQ ID NO: 64198 - RNA, 19 nt, Homo sapiens
  misc_RNA (1)...(19): siRNA sense strand
ccgaaaagcucaccaggaa

SEQ ID NO: 64199 - RNA, 19 nt, Homo sapiens
  misc_RNA (1)...(19): siRNA sense strand
cagacggccuuacccuaaa

SEQ ID NO: 64200 - RNA, 19 nt, Homo sapiens
  misc_RNA (1)...(19): siRNA sense strand
gguaaauacaccacgaauu

SEQ ID NO: 64201 - RNA, 19 nt, Homo sapiens
  misc_RNA (1)...(19): siRNA sense strand
gauuugguccucugacuga

SEQ ID NO: 64202 - RNA, 19 nt, Homo sapiens
  misc_RNA (1)...(19): siRNA sense strand
ucacccagcucaguggaaa

SEQ ID NO: 64203 - RNA, 19 nt, Homo sapiens
  misc_RNA (1)...(19): siRNA sense strand
gcuccugccuuuggaaaug

SEQ ID NO: 64204 - RNA, 19 nt, Homo sapiens
  misc_RNA (1)...(19): siRNA sense strand
gugggaauguccaaagaau

SEQ ID NO: 64205 - RNA, 19 nt, Homo sapiens
  misc_RNA (1)...(19): siRNA sense strand
gaaucgaugccaauacugu

SEQ ID NO: 64206 - RNA, 19 nt, Homo sapiens
  misc_RNA (1)...(19): siRNA sense strand
gugcagagcguguaauuac

SEQ ID NO: 64207 - RNA, 19 nt, Homo sapiens
  misc_RNA (1)...(19): siRNA sense strand
gaagugggaauguccaaag

SEQ ID NO: 64208 - RNA, 19 nt, Homo sapiens
  misc_RNA (1)...(19): siRNA sense strand
ucugccagcuggguaaaua

SEQ ID NO: 64209 - RNA, 19 nt, Homo sapiens
  misc_RNA (1)...(19): siRNA sense strand
agagagcuaugaaaugaca

SEQ ID NO: 64210 - RNA, 19 nt, Homo sapiens
  misc_RNA (1)...(19): siRNA sense strand
aacaagacaccaugacuuu

SEQ ID NO: 64211 - RNA, 19 nt, Homo sapiens
  misc_RNA (1)...(19): siRNA sense strand
cagcugaguuggacgaucu

SEQ ID NO: 64212 - RNA, 19 nt, Homo sapiens
  misc_RNA (1)...(19): siRNA sense strand
gggaauguccaaagaaucu

SEQ ID NO: 64213 - RNA, 19 nt, Homo sapiens
  misc_RNA (1)...(19): siRNA sense strand
gcagagcacaguccuagca

SEQ ID NO: 64214 - RNA, 19 nt, Homo sapiens
  misc_RNA (1)...(19): siRNA sense strand
caagugcauuauuaagauc

SEQ ID NO: 64215 - RNA, 19 nt, Homo sapiens
  misc_RNA (1)...(19): siRNA sense strand
ccaccucucauucaagaaa

SEQ ID NO: 64216 - RNA, 19 nt, Homo sapiens
  misc_RNA (1)...(19): siRNA sense strand
gcguguaauuaccuugaaa

SEQ ID NO: 64217 - RNA, 19 nt, Homo sapiens
  misc_RNA (1)...(19): siRNA sense strand
ugacugaccuuguguucac

SEQ ID NO: 64218 - RNA, 19 nt, Homo sapiens
  misc_RNA (1)...(19): siRNA sense strand
agaauuugcaccagguaua

SEQ ID NO: 64219 - RNA, 19 nt, Homo sapiens
  misc_RNA (1)...(19): siRNA sense strand
gcuaaacgucugccugguu

SEQ ID NO: 64220 - RNA, 19 nt, Homo sapiens
  misc_RNA (1)...(19): siRNA sense strand
caagacaccaugacuuucu

SEQ ID NO: 64221 - RNA, 19 nt, Homo sapiens
  misc_RNA (1)...(19): siRNA sense strand
gagcguguaauuaccuuga

SEQ ID NO: 64222 - RNA, 19 nt, Homo sapiens
  misc_RNA (1)...(19): siRNA sense strand
gaaugacaggaacaagaaa

SEQ ID NO: 64223 - RNA, 19 nt, Homo sapiens
  misc_RNA (1)...(19): siRNA sense strand
ccagaagugcuuugaagug

SEQ ID NO: 64224 - RNA, 19 nt, Homo sapiens
  misc_RNA (1)...(19): siRNA sense strand
ggacauccugauucuuaga

SEQ ID NO: 64225 - RNA, 19 nt, Homo sapiens
  misc_RNA (1)...(19): siRNA sense strand
gaaauuccuggaucaaugc

SEQ ID NO: 64226 - RNA, 19 nt, Homo sapiens
  misc_RNA (1)...(19): siRNA sense strand
ucucagugccaucugcuua

SEQ ID NO: 64227 - RNA, 19 nt, Homo sapiens
  misc_RNA (1)...(19): siRNA sense strand
uucaagaaaugcuggagaa

SEQ ID NO: 64228 - RNA, 19 nt, Homo sapiens
  misc_RNA (1)...(19): siRNA sense strand
gagcacaguccuagcaucu

SEQ ID NO: 64229 - RNA, 19 nt, Homo sapiens
  misc_RNA (1)...(19): siRNA sense strand
ccaggaaucgaugccaaua

SEQ ID NO: 64230 - RNA, 19 nt, Homo sapiens
  misc_RNA (1)...(19): siRNA sense strand
gaauuccagugcugaccau

SEQ ID NO: 64231 - RNA, 19 nt, Homo sapiens
  misc_RNA (1)...(19): siRNA sense strand
acagaucuccguagcauca

SEQ ID NO: 64232 - RNA, 19 nt, Homo sapiens
  misc_RNA (1)...(19): siRNA sense strand
uaagcuacaagaaccauug

SEQ ID NO: 64233 - RNA, 19 nt, Homo sapiens
  misc_RNA (1)...(19): siRNA sense strand
ucaccgagauaagaacugu

SEQ ID NO: 64234 - RNA, 19 nt, Homo sapiens
  misc_RNA (1)...(19): siRNA sense strand
aagcucaccaggaaacuuu

SEQ ID NO: 64235 - RNA, 19 nt, Homo sapiens
  misc_RNA (1)...(19): siRNA sense strand
ggugcagagcguguaauua

SEQ ID NO: 64236 - RNA, 19 nt, Homo sapiens
  misc_RNA (1)...(19): siRNA sense strand
ugccaccucucauucaaga

SEQ ID NO: 64237 - RNA, 19 nt, Homo sapiens
  misc_RNA (1)...(19): siRNA sense strand
gaaaugcuggagaauucug

SEQ ID NO: 64238 - RNA, 19 nt, Homo sapiens
  misc_RNA (1)...(19): siRNA sense strand
ggaucaaugccaccucuca

SEQ ID NO: 64239 - RNA, 19 nt, Homo sapiens
  misc_RNA (1)...(19): siRNA sense strand
acacuugucaccgagauaa

SEQ ID NO: 64240 - RNA, 19 nt, Homo sapiens
  misc_RNA (1)...(19): siRNA sense strand
gaauuugcaccagguauac

SEQ ID NO: 64241 - RNA, 19 nt, Homo sapiens
  misc_RNA (1)...(19): siRNA sense strand
uaauaaagucaccaggaau

SEQ ID NO: 64242 - RNA, 19 nt, Homo sapiens
  misc_RNA (1)...(19): siRNA sense strand
uaaaggugcagagcgugua

SEQ ID NO: 64243 - RNA, 19 nt, Homo sapiens
  misc_RNA (1)...(19): siRNA sense strand
agacuucgaagcaagaaug

SEQ ID NO: 64244 - RNA, 19 nt, Homo sapiens
  misc_RNA (1)...(19): siRNA sense strand
ccagaacaagacaccauga

SEQ ID NO: 64245 - RNA, 19 nt, Homo sapiens
  misc_RNA (1)...(19): siRNA sense strand
gaauguccaaagaaucugu

SEQ ID NO: 64246 - RNA, 19 nt, Homo sapiens
  misc_RNA (1)...(19): siRNA sense strand
gaauucugaaggacaugaa

SEQ ID NO: 64247 - RNA, 19 nt, Homo sapiens
  misc_RNA (1)...(19): siRNA sense strand
acaagaaccauugcuggaa

SEQ ID NO: 64248 - RNA, 19 nt, Homo sapiens
  misc_RNA (1)...(19): siRNA sense strand
agacggccuuacccuaaau

SEQ ID NO: 64249 - RNA, 19 nt, Homo sapiens
  misc_RNA (1)...(19): siRNA sense strand
cacagagagcuaugaaaug

SEQ ID NO: 64250 - RNA, 19 nt, Homo sapiens
  misc_RNA (1)...(19): siRNA sense strand
ucagugccaucugcuuaau

SEQ ID NO: 64251 - RNA, 19 nt, Homo sapiens
  misc_RNA (1)...(19): siRNA sense strand
cuccagaagugcuuugaag

SEQ ID NO: 64252 - RNA, 19 nt, Homo sapiens
  misc_RNA (1)...(19): siRNA sense strand
aagugggaauguccaaaga

SEQ ID NO: 64253 - RNA, 19 nt, Homo sapiens
  misc_RNA (1)...(19): siRNA sense strand
aggaaucgaugccaauacu

SEQ ID NO: 64254 - RNA, 19 nt, Homo sapiens
  misc_RNA (1)...(19): siRNA sense strand
gacaaaaguagauaagcua

SEQ ID NO: 64255 - RNA, 19 nt, Homo sapiens
  misc_RNA (1)...(19): siRNA sense strand
gaucaaugccaccucucau

SEQ ID NO: 64256 - RNA, 19 nt, Homo sapiens
  misc_RNA (1)...(19): siRNA sense strand
gcaaaggaauucuucagua

SEQ ID NO: 64257 - RNA, 19 nt, Homo sapiens
  misc_RNA (1)...(19): siRNA sense strand
gcacagaaauaguggagua

SEQ ID NO: 64258 - RNA, 19 nt, Homo sapiens
  misc_RNA (1)...(19): siRNA sense strand
caaagaaaguguucaguga

SEQ ID NO: 64259 - RNA, 19 nt, Homo sapiens
  misc_RNA (1)...(19): siRNA sense strand
gaacacacauacgacuuua

SEQ ID NO: 64260 - RNA, 19 nt, Homo sapiens
  misc_RNA (1)...(19): siRNA sense strand
uaugagggcucuccaguua

SEQ ID NO: 64261 - RNA, 19 nt, Homo sapiens
  misc_RNA (1)...(19): siRNA sense strand
agacugggauguauuauuu

SEQ ID NO: 64262 - RNA, 19 nt, Homo sapiens
  misc_RNA (1)...(19): siRNA sense strand
caaaggaauucuucaguau

SEQ ID NO: 64263 - RNA, 19 nt, Homo sapiens
  misc_RNA (1)...(19): siRNA sense strand
ugagagaggugcuuucauu

SEQ ID NO: 64264 - RNA, 19 nt, Homo sapiens
  misc_RNA (1)...(19): siRNA sense strand
gcacaaagaaacaaagaaa

SEQ ID NO: 64265 - RNA, 19 nt, Homo sapiens
  misc_RNA (1)...(19): siRNA sense strand
uggaagaccucuauaacua

SEQ ID NO: 64266 - RNA, 19 nt, Homo sapiens
  misc_RNA (1)...(19): siRNA sense strand
caauaaagaucgccugaau

SEQ ID NO: 64267 - RNA, 19 nt, Homo sapiens
  misc_RNA (1)...(19): siRNA sense strand
gcugaaagaccacaacaua

SEQ ID NO: 64268 - RNA, 19 nt, Homo sapiens
  misc_RNA (1)...(19): siRNA sense strand
gaaguuggcugaagucacu

SEQ ID NO: 64269 - RNA, 19 nt, Homo sapiens
  misc_RNA (1)...(19): siRNA sense strand
gcagaucuuugaaacuauu

SEQ ID NO: 64270 - RNA, 19 nt, Homo sapiens
  misc_RNA (1)...(19): siRNA sense strand
uaugaaagaugacagcauu

SEQ ID NO: 64271 - RNA, 19 nt, Homo sapiens
  misc_RNA (1)...(19): siRNA sense strand
aagcagaucuuugaaacua

SEQ ID NO: 64272 - RNA, 19 nt, Homo sapiens
  misc_RNA (1)...(19): siRNA sense strand
ugaauaagcagaucuuuga

SEQ ID NO: 64273 - RNA, 19 nt, Homo sapiens
  misc_RNA (1)...(19): siRNA sense strand
gcugcaaccuugacuacua

SEQ ID NO: 64274 - RNA, 19 nt, Homo sapiens
  misc_RNA (1)...(19): siRNA sense strand
gaagaacacaggaaaggaa

SEQ ID NO: 64275 - RNA, 19 nt, Homo sapiens
  misc_RNA (1)...(19): siRNA sense strand
ggacuggucuuugaugugu

SEQ ID NO: 64276 - RNA, 19 nt, Homo sapiens
  misc_RNA (1)...(19): siRNA sense strand
gagcagggcccauacgaaa

SEQ ID NO: 64277 - RNA, 19 nt, Homo sapiens
  misc_RNA (1)...(19): siRNA sense strand
ugaaacgaguggagacuaa

SEQ ID NO: 64278 - RNA, 19 nt, Homo sapiens
  misc_RNA (1)...(19): siRNA sense strand
ccaauccaguucacucuaa

SEQ ID NO: 64279 - RNA, 19 nt, Homo sapiens
  misc_RNA (1)...(19): siRNA sense strand
gagaguauauaacaacaca

SEQ ID NO: 64280 - RNA, 19 nt, Homo sapiens
  misc_RNA (1)...(19): siRNA sense strand
aaucaggacuggucuuuga

SEQ ID NO: 64281 - RNA, 19 nt, Homo sapiens
  misc_RNA (1)...(19): siRNA sense strand
gaauccagaagcuuuguua

SEQ ID NO: 64282 - RNA, 19 nt, Homo sapiens
  misc_RNA (1)...(19): siRNA sense strand
gaagaccucuauaacuaca

SEQ ID NO: 64283 - RNA, 19 nt, Homo sapiens
  misc_RNA (1)...(19): siRNA sense strand
gagaggugcuuucauugau

SEQ ID NO: 64284 - RNA, 19 nt, Homo sapiens
  misc_RNA (1)...(19): siRNA sense strand
uaccagaaauuccugauga

SEQ ID NO: 64285 - RNA, 19 nt, Homo sapiens
  misc_RNA (1)...(19): siRNA sense strand
uaacaacacagcuagauau

SEQ ID NO: 64286 - RNA, 19 nt, Homo sapiens
  misc_RNA (1)...(19): siRNA sense strand
uguaaauccucacuuauug

SEQ ID NO: 64287 - RNA, 19 nt, Homo sapiens
  misc_RNA (1)...(19): siRNA sense strand
gaaagaccacaacauaugu

SEQ ID NO: 64288 - RNA, 19 nt, Homo sapiens
  misc_RNA (1)...(19): siRNA sense strand
ggaauucuucaguaugaua

SEQ ID NO: 64289 - RNA, 19 nt, Homo sapiens
  misc_RNA (1)...(19): siRNA sense strand
cguauaugcucuacaaaga

SEQ ID NO: 64290 - RNA, 19 nt, Homo sapiens
  misc_RNA (1)...(19): siRNA sense strand
caguggaacuagauacuuu

SEQ ID NO: 64291 - RNA, 19 nt, Homo sapiens
  misc_RNA (1)...(19): siRNA sense strand
ugaagacugggauguauua

SEQ ID NO: 64292 - RNA, 19 nt, Homo sapiens
  misc_RNA (1)...(19): siRNA sense strand
ucacuaguaugcacuucua

SEQ ID NO: 64293 - RNA, 19 nt, Homo sapiens
  misc_RNA (1)...(19): siRNA sense strand
uaaagaagaacacaggaaa

SEQ ID NO: 64294 - RNA, 19 nt, Homo sapiens
  misc_RNA (1)...(19): siRNA sense strand
gagaggugguuuacucaug

SEQ ID NO: 64295 - RNA, 19 nt, Homo sapiens
  misc_RNA (1)...(19): siRNA sense strand
gcauugaaggcauuuauga

SEQ ID NO: 64296 - RNA, 19 nt, Homo sapiens
  misc_RNA (1)...(19): siRNA sense strand
ugaagucacuaaagucguu

SEQ ID NO: 64297 - RNA, 19 nt, Homo sapiens
  misc_RNA (1)...(19): siRNA sense strand
uaagucugcuggaggaauu

SEQ ID NO: 64298 - RNA, 19 nt, Homo sapiens
  misc_RNA (1)...(19): siRNA sense strand
ucagugaugugauggaaga

SEQ ID NO: 64299 - RNA, 19 nt, Homo sapiens
  misc_RNA (1)...(19): siRNA sense strand
aaggaauucuucaguauga

SEQ ID NO: 64300 - RNA, 19 nt, Homo sapiens
  misc_RNA (1)...(19): siRNA sense strand
aagaugagguugcuguuug

SEQ ID NO: 64301 - RNA, 19 nt, Homo sapiens
  misc_RNA (1)...(19): siRNA sense strand
gagaggaauuugagaaacu

SEQ ID NO: 64302 - RNA, 19 nt, Homo sapiens
  misc_RNA (1)...(19): siRNA sense strand
ugaaagaccacaacauaug

SEQ ID NO: 64303 - RNA, 19 nt, Homo sapiens
  misc_RNA (1)...(19): siRNA sense strand
gaagaucaauggaaaagug

SEQ ID NO: 64304 - RNA, 19 nt, Homo sapiens
  misc_RNA (1)...(19): siRNA sense strand
ucaggagaauuucagauug

SEQ ID NO: 64305 - RNA, 19 nt, Homo sapiens
  misc_RNA (1)...(19): siRNA sense strand
ccaguucacucuaaauaag

SEQ ID NO: 64306 - RNA, 19 nt, Homo sapiens
  misc_RNA (1)...(19): siRNA sense strand
ccaagaacgagucauguuu

SEQ ID NO: 64307 - RNA, 19 nt, Homo sapiens
  misc_RNA (1)...(19): siRNA sense strand
caagauggcagcugagaga

SEQ ID NO: 64308 - RNA, 19 nt, Homo sapiens
  misc_RNA (1)...(19): siRNA sense strand
gaccugaagcaacuuuaua

SEQ ID NO: 64309 - RNA, 19 nt, Homo sapiens
  misc_RNA (1)...(19): siRNA sense strand
cuagagcggucuuauuugu

SEQ ID NO: 64310 - RNA, 19 nt, Homo sapiens
  misc_RNA (1)...(19): siRNA sense strand
ugcaauggcucuauucaga

SEQ ID NO: 64311 - RNA, 19 nt, Homo sapiens
  misc_RNA (1)...(19): siRNA sense strand
guuauggacucaauaugga

SEQ ID NO: 64312 - RNA, 19 nt, Homo sapiens
  misc_RNA (1)...(19): siRNA sense strand
gaaagaugacagcauugaa

SEQ ID NO: 64313 - RNA, 19 nt, Homo sapiens
  misc_RNA (1)...(19): siRNA sense strand
acaauuacuucggcuuuaa

SEQ ID NO: 64314 - RNA, 19 nt, Homo sapiens
  misc_RNA (1)...(19): siRNA sense strand
gaaagagcaaccagcagaa

SEQ ID NO: 64315 - RNA, 19 nt, Homo sapiens
  misc_RNA (1)...(19): siRNA sense strand
gcauuuagacaucuuugaa

SEQ ID NO: 64316 - RNA, 19 nt, Homo sapiens
  misc_RNA (1)...(19): siRNA sense strand
cuacuaagcacccugacua

SEQ ID NO: 64317 - RNA, 19 nt, Homo sapiens
  misc_RNA (1)...(19): siRNA sense strand
ggacuaauggcaauuccaa

SEQ ID NO: 64318 - RNA, 19 nt, Homo sapiens
  misc_RNA (1)...(19): siRNA sense strand
ugacagcauugaaggcauu

SEQ ID NO: 64319 - RNA, 19 nt, Homo sapiens
  misc_RNA (1)...(19): siRNA sense strand
ccacaacuuucuagcuguu

SEQ ID NO: 64320 - RNA, 19 nt, Homo sapiens
  misc_RNA (1)...(19): siRNA sense strand
ccacaaagaagacauugau

SEQ ID NO: 64321 - RNA, 19 nt, Homo sapiens
  misc_RNA (1)...(19): siRNA sense strand
agaccucuauaacuacaua

SEQ ID NO: 64322 - RNA, 19 nt, Homo sapiens
  misc_RNA (1)...(19): siRNA sense strand
cagaucaccaugaaaguaa

SEQ ID NO: 64323 - RNA, 19 nt, Homo sapiens
  misc_RNA (1)...(19): siRNA sense strand
caggagaauuucagauugu

SEQ ID NO: 64324 - RNA, 19 nt, Homo sapiens
  misc_RNA (1)...(19): siRNA sense strand
caagaacgagucauguuug

SEQ ID NO: 64325 - RNA, 19 nt, Homo sapiens
  misc_RNA (1)...(19): siRNA sense strand
acacauacgacuuuaagaa

SEQ ID NO: 64326 - RNA, 19 nt, Homo sapiens
  misc_RNA (1)...(19): siRNA sense strand
caauuccaauggccuugua

SEQ ID NO: 64327 - RNA, 19 nt, Homo sapiens
  misc_RNA (1)...(19): siRNA sense strand
cgccugaauucugcuauua

SEQ ID NO: 64328 - RNA, 19 nt, Homo sapiens
  misc_RNA (1)...(19): siRNA sense strand
augcagcaauugaaacaua

SEQ ID NO: 64329 - RNA, 19 nt, Homo sapiens
  misc_RNA (1)...(19): siRNA sense strand
uacaauuacuucggcuuua

SEQ ID NO: 64330 - RNA, 19 nt, Homo sapiens
  misc_RNA (1)...(19): siRNA sense strand
aagaaaguguucagugaug

SEQ ID NO: 64331 - RNA, 19 nt, Homo sapiens
  misc_RNA (1)...(19): siRNA sense strand
gaaccugggaaccaucaaa

SEQ ID NO: 64332 - RNA, 19 nt, Homo sapiens
  misc_RNA (1)...(19): siRNA sense strand
ccuggagccuuggcauuua

SEQ ID NO: 64333 - RNA, 19 nt, Homo sapiens
  misc_RNA (1)...(19): siRNA sense strand
auaaagaucgccugaauuc

SEQ ID NO: 64334 - RNA, 19 nt, Homo sapiens
  misc_RNA (1)...(19): siRNA sense strand
agagaugaaugucugaugu

SEQ ID NO: 64335 - RNA, 19 nt, Homo sapiens
  misc_RNA (1)...(19): siRNA sense strand
gaggugcuuucauugauca

SEQ ID NO: 64336 - RNA, 19 nt, Homo sapiens
  misc_RNA (1)...(19): siRNA sense strand
guaaauccucacuuauuga

SEQ ID NO: 64337 - RNA, 19 nt, Homo sapiens
  misc_RNA (1)...(19): siRNA sense strand
ccaaggagcagggcccaua

SEQ ID NO: 64338 - RNA, 19 nt, Homo sapiens
  misc_RNA (1)...(19): siRNA sense strand
ggucguguccgcaaaguug

SEQ ID NO: 64339 - RNA, 19 nt, Homo sapiens
  misc_RNA (1)...(19): siRNA sense strand
guauauaacaacacagcua

SEQ ID NO: 64340 - RNA, 19 nt, Homo sapiens
  misc_RNA (1)...(19): siRNA sense strand
gugcauugauuucuaaguc

SEQ ID NO: 64341 - RNA, 19 nt, Homo sapiens
  misc_RNA (1)...(19): siRNA sense strand
agagcggucuuauuuguug

SEQ ID NO: 64342 - RNA, 19 nt, Homo sapiens
  misc_RNA (1)...(19): siRNA sense strand
ucucuaacuugcacaaaga

SEQ ID NO: 64343 - RNA, 19 nt, Homo sapiens
  misc_RNA (1)...(19): siRNA sense strand
gagugcagaagcccaguua

SEQ ID NO: 64344 - RNA, 19 nt, Homo sapiens
  misc_RNA (1)...(19): siRNA sense strand
guccgaaacuugaauaaaa

SEQ ID NO: 64345 - RNA, 19 nt, Homo sapiens
  misc_RNA (1)...(19): siRNA sense strand
cuaaagucguuguccgaaa

SEQ ID NO: 64346 - RNA, 19 nt, Homo sapiens
  misc_RNA (1)...(19): siRNA sense strand
caaagaagacauugaugca

SEQ ID NO: 64347 - RNA, 19 nt, Homo sapiens
  misc_RNA (1)...(19): siRNA sense strand
agacaucuuugaauuccuu

SEQ ID NO: 64348 - RNA, 19 nt, Homo sapiens
  misc_RNA (1)...(19): siRNA sense strand
gaagagaaggagaggaaca

SEQ ID NO: 64349 - RNA, 19 nt, Homo sapiens
  misc_RNA (1)...(19): siRNA sense strand
ggagaauuucagauuguaa

SEQ ID NO: 64350 - RNA, 19 nt, Homo sapiens
  misc_RNA (1)...(19): siRNA sense strand
ggaauguuacuccuacaga

SEQ ID NO: 64351 - RNA, 19 nt, Homo sapiens
  misc_RNA (1)...(19): siRNA sense strand
uuaagaaguuggcugaagu

SEQ ID NO: 64352 - RNA, 19 nt, Homo sapiens
  misc_RNA (1)...(19): siRNA sense strand
caucagaacacacauacga

SEQ ID NO: 64353 - RNA, 19 nt, Homo sapiens
  misc_RNA (1)...(19): siRNA sense strand
ugagguugcuguuuguaau

SEQ ID NO: 64354 - RNA, 19 nt, Homo sapiens
  misc_RNA (1)...(19): siRNA sense strand
gcuuugguaugccaucauu

SEQ ID NO: 64355 - RNA, 19 nt, Homo sapiens
  misc_RNA (1)...(19): siRNA sense strand
gggagaggaauuugagaaa

SEQ ID NO: 64356 - RNA, 19 nt, Homo sapiens
  misc_RNA (1)...(19): siRNA sense strand
uagcagagaugaggguuua

SEQ ID NO: 64357 - RNA, 19 nt, Homo sapiens
  misc_RNA (1)...(19): siRNA sense strand
gcacucuaaugaagcaaua

SEQ ID NO: 64358 - RNA, 19 nt, Homo sapiens
  misc_RNA (1)...(19): siRNA sense strand
ggagagaguaagagaaaua

SEQ ID NO: 64359 - RNA, 19 nt, Homo sapiens
  misc_RNA (1)...(19): siRNA sense strand
gggaugaauugcacucuaa

SEQ ID NO: 64360 - RNA, 19 nt, Homo sapiens
  misc_RNA (1)...(19): siRNA sense strand
ggacaaagaggcuaccuau

SEQ ID NO: 64361 - RNA, 19 nt, Homo sapiens
  misc_RNA (1)...(19): siRNA sense strand
gagaacccauuugacuuua

SEQ ID NO: 64362 - RNA, 19 nt, Homo sapiens
  misc_RNA (1)...(19): siRNA sense strand
gaauugcacucuaaugaag

SEQ ID NO: 64363 - RNA, 19 nt, Homo sapiens
  misc_RNA (1)...(19): siRNA sense strand
ggagugaugucaaguccaa

SEQ ID NO: 64364 - RNA, 19 nt, Homo sapiens
  misc_RNA (1)...(19): siRNA sense strand
ucaaacaccugguacacaa

SEQ ID NO: 64365 - RNA, 19 nt, Homo sapiens
  misc_RNA (1)...(19): siRNA sense strand
gaacccauuugacuuuaug

SEQ ID NO: 64366 - RNA, 19 nt, Homo sapiens
  misc_RNA (1)...(19): siRNA sense strand
gaagagaguaggcgaguau

SEQ ID NO: 64367 - RNA, 19 nt, Homo sapiens
  misc_RNA (1)...(19): siRNA sense strand
gaggagagaguaagagaaa

SEQ ID NO: 64368 - RNA, 19 nt, Homo sapiens
  misc_RNA (1)...(19): siRNA sense strand
gaagcccgcuguuucuaug

SEQ ID NO: 64369 - RNA, 19 nt, Homo sapiens
  misc_RNA (1)...(19): siRNA sense strand
gcgauggcauaguaaauga

SEQ ID NO: 64370 - RNA, 19 nt, Homo sapiens
  misc_RNA (1)...(19): siRNA sense strand
cauaaaagaucccaaagaa

SEQ ID NO: 64371 - RNA, 19 nt, Homo sapiens
  misc_RNA (1)...(19): siRNA sense strand
gaaacgaugccuuguguca

SEQ ID NO: 64372 - RNA, 19 nt, Homo sapiens
  misc_RNA (1)...(19): siRNA sense strand
gaacuuauuagcagagaug

SEQ ID NO: 64373 - RNA, 19 nt, Homo sapiens
  misc_RNA (1)...(19): siRNA sense strand
caaagaggcuaccuauggu

SEQ ID NO: 64374 - RNA, 19 nt, Homo sapiens
  misc_RNA (1)...(19): siRNA sense strand
ggagaauauuucacuggaa

SEQ ID NO: 64375 - RNA, 19 nt, Homo sapiens
  misc_RNA (1)...(19): siRNA sense strand
gccaagaaguucagauuac

SEQ ID NO: 64376 - RNA, 19 nt, Homo sapiens
  misc_RNA (1)...(19): siRNA sense strand
gggaauuucucuucaaugc

SEQ ID NO: 64377 - RNA, 19 nt, Homo sapiens
  misc_RNA (1)...(19): siRNA sense strand
gaguagagaacccauuuga

SEQ ID NO: 64378 - RNA, 19 nt, Homo sapiens
  misc_RNA (1)...(19): siRNA sense strand
ggagcgauuuagccaagaa

SEQ ID NO: 64379 - RNA, 19 nt, Homo sapiens
  misc_RNA (1)...(19): siRNA sense strand
agcaagcgauggcauagua

SEQ ID NO: 64380 - RNA, 19 nt, Homo sapiens
  misc_RNA (1)...(19): siRNA sense strand
ccaagaaguucagauuaca

SEQ ID NO: 64381 - RNA, 19 nt, Homo sapiens
  misc_RNA (1)...(19): siRNA sense strand
ccacggagccgaaaacuaa

SEQ ID NO: 64382 - RNA, 19 nt, Homo sapiens
  misc_RNA (1)...(19): siRNA sense strand
gagagaguaagagaaauaa

SEQ ID NO: 64383 - RNA, 19 nt, Homo sapiens
  misc_RNA (1)...(19): siRNA sense strand
acaaagaggcuaccuaugg

SEQ ID NO: 64384 - RNA, 19 nt, Homo sapiens
  misc_RNA (1)...(19): siRNA sense strand
aaagggaauuucucuucaa

SEQ ID NO: 64385 - RNA, 19 nt, Homo sapiens
  misc_RNA (1)...(19): siRNA sense strand
guagagaacccauuugacu

SEQ ID NO: 64386 - RNA, 19 nt, Homo sapiens
  misc_RNA (1)...(19): siRNA sense strand
caagaaacgaggacugaug

SEQ ID NO: 64387 - RNA, 19 nt, Homo sapiens
  misc_RNA (1)...(19): siRNA sense strand
agagaacccauuugacuuu

SEQ ID NO: 64388 - RNA, 19 nt, Homo sapiens
  misc_RNA (1)...(19): siRNA sense strand
cagaguagagaacccauuu

SEQ ID NO: 64389 - RNA, 19 nt, Homo sapiens
  misc_RNA (1)...(19): siRNA sense strand
cuuggaugcugacuucuaa

SEQ ID NO: 64390 - RNA, 19 nt, Homo sapiens
  misc_RNA (1)...(19): siRNA sense strand
gauggcauaguaaaugaaa

SEQ ID NO: 64391 - RNA, 19 nt, Homo sapiens
  misc_RNA (1)...(19): siRNA sense strand
ucugaaauguauagucuuc

SEQ ID NO: 64392 - RNA, 19 nt, Homo sapiens
  misc_RNA (1)...(19): siRNA sense strand
ggaugggagugaugucaag

SEQ ID NO: 64393 - RNA, 19 nt, Homo sapiens
  misc_RNA (1)...(19): siRNA sense strand
uaucccauguucuggcuuu

SEQ ID NO: 64394 - RNA, 19 nt, Homo sapiens
  misc_RNA (1)...(19): siRNA sense strand
cauuugacuuuauggagaa

SEQ ID NO: 64395 - RNA, 19 nt, Homo sapiens
  misc_RNA (1)...(19): siRNA sense strand
ugaauugcacucuaaugaa

SEQ ID NO: 64396 - RNA, 19 nt, Homo sapiens
  misc_RNA (1)...(19): siRNA sense strand
uucuauggcuuccaaauug

SEQ ID NO: 64397 - RNA, 19 nt, Homo sapiens
  misc_RNA (1)...(19): siRNA sense strand
gaaguucagauuacagaag

SEQ ID NO: 64398 - RNA, 19 nt, Homo sapiens
  misc_RNA (1)...(19): siRNA sense strand
gcaagcgauggcauaguaa

SEQ ID NO: 64399 - RNA, 19 nt, Homo sapiens
  misc_RNA (1)...(19): siRNA sense strand
ucaaugcuguucggauaga

SEQ ID NO: 64400 - RNA, 19 nt, Homo sapiens
  misc_RNA (1)...(19): siRNA sense strand
uaccuuggaugcugacuuc

SEQ ID NO: 64401 - RNA, 19 nt, Homo sapiens
  misc_RNA (1)...(19): siRNA sense strand
uugaaacgaugccuugugu

SEQ ID NO: 64402 - RNA, 19 nt, Homo sapiens
  misc_RNA (1)...(19): siRNA sense strand
ugaacguguuguagccuuu

SEQ ID NO: 64403 - RNA, 19 nt, Homo sapiens
  misc_RNA (1)...(19): siRNA sense strand
ugaaacccgaggagagaua

SEQ ID NO: 64404 - RNA, 19 nt, Homo sapiens
  misc_RNA (1)...(19): siRNA sense strand
ggaggagagaguaagagaa

SEQ ID NO: 64405 - RNA, 19 nt, Homo sapiens
  misc_RNA (1)...(19): siRNA sense strand
uaaaagaucccaaagaaag

SEQ ID NO: 64406 - RNA, 19 nt, Homo sapiens
  misc_RNA (1)...(19): siRNA sense strand
ucgauauucuggcucaaga

SEQ ID NO: 64407 - RNA, 19 nt, Homo sapiens
  misc_RNA (1)...(19): siRNA sense strand
uagcaagguuuucagagua

SEQ ID NO: 64408 - RNA, 19 nt, Homo sapiens
  misc_RNA (1)...(19): siRNA sense strand
agaugaggguuuacacugu

SEQ ID NO: 64409 - RNA, 19 nt, Homo sapiens
  misc_RNA (1)...(19): siRNA sense strand
gagccgcugcugagagaaa

SEQ ID NO: 64410 - RNA, 19 nt, Homo sapiens
  misc_RNA (1)...(19): siRNA sense strand
gaauauuucacuggaagga

SEQ ID NO: 64411 - RNA, 19 nt, Homo sapiens
  misc_RNA (1)...(19): siRNA sense strand
caagcgauggcauaguaaa

SEQ ID NO: 64412 - RNA, 19 nt, Homo sapiens
  misc_RNA (1)...(19): siRNA sense strand
uaucagaggaugggaguga

SEQ ID NO: 64413 - RNA, 19 nt, Homo sapiens
  misc_RNA (1)...(19): siRNA sense strand
agacagacuuaugcuggaa

SEQ ID NO: 64414 - RNA, 19 nt, Homo sapiens
  misc_RNA (1)...(19): siRNA sense strand
gaugaauugcacucuaaug

SEQ ID NO: 64415 - RNA, 19 nt, Homo sapiens
  misc_RNA (1)...(19): siRNA sense strand
uagccaagaaguucagauu

SEQ ID NO: 64416 - RNA, 19 nt, Homo sapiens
  misc_RNA (1)...(19): siRNA sense strand
gcgauuuagccaagaaguu

SEQ ID NO: 64417 - RNA, 19 nt, Homo sapiens
  misc_RNA (1)...(19): siRNA sense strand
ugggaugaauugcacucua

SEQ ID NO: 64418 - RNA, 19 nt, Homo sapiens
  misc_RNA (1)...(19): siRNA sense strand
aagggaauuucucuucaau

SEQ ID NO: 64419 - RNA, 19 nt, Homo sapiens
  misc_RNA (1)...(19): siRNA sense strand
gcagagaugaggguuuaca

SEQ ID NO: 64420 - RNA, 19 nt, Homo sapiens
  misc_RNA (1)...(19): siRNA sense strand
agaagagaguaggcgagua

SEQ ID NO: 64421 - RNA, 19 nt, Homo sapiens
  misc_RNA (1)...(19): siRNA sense strand
uagagaacccauuugacuu

SEQ ID NO: 64422 - RNA, 19 nt, Homo sapiens
  misc_RNA (1)...(19): siRNA sense strand
gaaacccgaggagagauau

SEQ ID NO: 64423 - RNA, 19 nt, Homo sapiens
  misc_RNA (1)...(19): siRNA sense strand
gaacguguuguagccuuug

SEQ ID NO: 64424 - RNA, 19 nt, Homo sapiens
  misc_RNA (1)...(19): siRNA sense strand
ucacuggaaggaaagacua

SEQ ID NO: 64425 - RNA, 19 nt, Homo sapiens
  misc_RNA (1)...(19): siRNA sense strand
cgauuuagccaagaaguuc

SEQ ID NO: 64426 - RNA, 19 nt, Homo sapiens
  misc_RNA (1)...(19): siRNA sense strand
caaacaccugguacacaaa

SEQ ID NO: 64427 - RNA, 19 nt, Homo sapiens
  misc_RNA (1)...(19): siRNA sense strand
uugcuugccugauguucaa

SEQ ID NO: 64428 - RNA, 19 nt, Homo sapiens
  misc_RNA (1)...(19): siRNA sense strand
aaacuugguggagcgauuu

SEQ ID NO: 64429 - RNA, 19 nt, Homo sapiens
  misc_RNA (1)...(19): siRNA sense strand
gggacaaagaggcuaccua

SEQ ID NO: 64430 - RNA, 19 nt, Homo sapiens
  misc_RNA (1)...(19): siRNA sense strand
uggaaaacauacauucuga

SEQ ID NO: 64431 - RNA, 19 nt, Homo sapiens
  misc_RNA (1)...(19): siRNA sense strand
agccaagaaguucagauua

SEQ ID NO: 64432 - RNA, 19 nt, Homo sapiens
  misc_RNA (1)...(19): siRNA sense strand
gucuucuuauugacacuua

SEQ ID NO: 64433 - RNA, 19 nt, Homo sapiens
  misc_RNA (1)...(19): siRNA sense strand
cccaucgaguaccaugaua

SEQ ID NO: 64434 - RNA, 19 nt, Homo sapiens
  misc_RNA (1)...(19): siRNA sense strand
agaacccauuugacuuuau

SEQ ID NO: 64435 - RNA, 19 nt, Homo sapiens
  misc_RNA (1)...(19): siRNA sense strand
augaauugcacucuaauga

SEQ ID NO: 64436 - RNA, 19 nt, Homo sapiens
  misc_RNA (1)...(19): siRNA sense strand
gacaaagaggcuaccuaug

SEQ ID NO: 64437 - RNA, 19 nt, Homo sapiens
  misc_RNA (1)...(19): siRNA sense strand
gaggaugggagugauguca

SEQ ID NO: 64438 - RNA, 19 nt, Homo sapiens
  misc_RNA (1)...(19): siRNA sense strand
gcagaggcuuccuuuugga

SEQ ID NO: 64439 - RNA, 19 nt, Homo sapiens
  misc_RNA (1)...(19): siRNA sense strand
gcagcaagcgauggcauag

SEQ ID NO: 64440 - RNA, 19 nt, Homo sapiens
  misc_RNA (1)...(19): siRNA sense strand
aagaaguucagauuacaga

SEQ ID NO: 64441 - RNA, 19 nt, Homo sapiens
  misc_RNA (1)...(19): siRNA sense strand
caucgaguaccaugauauc

SEQ ID NO: 64442 - RNA, 19 nt, Homo sapiens
  misc_RNA (1)...(19): siRNA sense strand
ggaugaauugcacucuaau

SEQ ID NO: 64443 - RNA, 19 nt, Homo sapiens
  misc_RNA (1)...(19): siRNA sense strand
caaaccaucggaggagaga

SEQ ID NO: 64444 - RNA, 19 nt, Homo sapiens
  misc_RNA (1)...(19): siRNA sense strand
acugaugccuggccucaca

SEQ ID NO: 64445 - RNA, 19 nt, Homo sapiens
  misc_RNA (1)...(19): siRNA sense strand
uaccuauggugaacguguu

SEQ ID NO: 64446 - RNA, 19 nt, Homo sapiens
  misc_RNA (1)...(19): siRNA sense strand
agccuuugcugcaguggaa

SEQ ID NO: 64447 - RNA, 19 nt, Homo sapiens
  misc_RNA (1)...(19): siRNA sense strand
ccugaaacccgaggagaga

SEQ ID NO: 64448 - RNA, 19 nt, Homo sapiens
  misc_RNA (1)...(19): siRNA sense strand
gaggguuuacacugugauu

SEQ ID NO: 64449 - RNA, 19 nt, Homo sapiens
  misc_RNA (1)...(19): siRNA sense strand
gaugccuggccucacauuu

SEQ ID NO: 64450 - RNA, 19 nt, Homo sapiens
  misc_RNA (1)...(19): siRNA sense strand
gaggcuaccuauggugaac

SEQ ID NO: 64451 - RNA, 19 nt, Homo sapiens
  misc_RNA (1)...(19): siRNA sense strand
gagaguaggcgaguaucag

SEQ ID NO: 64452 - RNA, 19 nt, Homo sapiens
  misc_RNA (1)...(19): siRNA sense strand
caaugcuguucggauagaa

SEQ ID NO: 64453 - RNA, 19 nt, Homo sapiens
  misc_RNA (1)...(19): siRNA sense strand
ggaguaucaucuuggguua

SEQ ID NO: 64454 - RNA, 19 nt, Homo sapiens
  misc_RNA (1)...(19): siRNA sense strand
caucuuggguuacugcaua

SEQ ID NO: 64455 - RNA, 19 nt, Homo sapiens
  misc_RNA (1)...(19): siRNA sense strand
cuacauauguuaccagaau

SEQ ID NO: 64456 - RNA, 19 nt, Homo sapiens
  misc_RNA (1)...(19): siRNA sense strand
gaucuucacuguuaucuac

SEQ ID NO: 64457 - RNA, 19 nt, Homo sapiens
  misc_RNA (1)...(19): siRNA sense strand
ggagaagauugucaggaaa

SEQ ID NO: 64458 - RNA, 19 nt, Homo sapiens
  misc_RNA (1)...(19): siRNA sense strand
gcagggacgugaaggaaau

SEQ ID NO: 64459 - RNA, 19 nt, Homo sapiens
  misc_RNA (1)...(19): siRNA sense strand
ggucaucaccugcuucuuu

SEQ ID NO: 64460 - RNA, 19 nt, Homo sapiens
  misc_RNA (1)...(19): siRNA sense strand
augcugaucuucacuguua

SEQ ID NO: 64461 - RNA, 19 nt, Homo sapiens
  misc_RNA (1)...(19): siRNA sense strand
gccaucaucuucuuucuga

SEQ ID NO: 64462 - RNA, 19 nt, Homo sapiens
  misc_RNA (1)...(19): siRNA sense strand
ggaaugaagaugugucuga

SEQ ID NO: 64463 - RNA, 19 nt, Homo sapiens
  misc_RNA (1)...(19): siRNA sense strand
gguguucucuucuacuuga

SEQ ID NO: 64464 - RNA, 19 nt, Homo sapiens
  misc_RNA (1)...(19): siRNA sense strand
gagcuucguuucgggauuu

SEQ ID NO: 64465 - RNA, 19 nt, Homo sapiens
  misc_RNA (1)...(19): siRNA sense strand
gcauaggaaccucaucuuu

SEQ ID NO: 64466 - RNA, 19 nt, Homo sapiens
  misc_RNA (1)...(19): siRNA sense strand
ccacauauauagcuuaucg

SEQ ID NO: 64467 - RNA, 19 nt, Homo sapiens
  misc_RNA (1)...(19): siRNA sense strand
ggaaccucaucuuucauuu

SEQ ID NO: 64468 - RNA, 19 nt, Homo sapiens
  misc_RNA (1)...(19): siRNA sense strand
gcaagaagguggauuuccu

SEQ ID NO: 64469 - RNA, 19 nt, Homo sapiens
  misc_RNA (1)...(19): siRNA sense strand
ccagaaacaccaacagaaa

SEQ ID NO: 64470 - RNA, 19 nt, Homo sapiens
  misc_RNA (1)...(19): siRNA sense strand
gaugaggaaugaagaugug

SEQ ID NO: 64471 - RNA, 19 nt, Homo sapiens
  misc_RNA (1)...(19): siRNA sense strand
gaaacccaauuggcagaaa

SEQ ID NO: 64472 - RNA, 19 nt, Homo sapiens
  misc_RNA (1)...(19): siRNA sense strand
ugaagcugcuggaggagua

SEQ ID NO: 64473 - RNA, 19 nt, Homo sapiens
  misc_RNA (1)...(19): siRNA sense strand
uggagaagauugucaggaa

SEQ ID NO: 64474 - RNA, 19 nt, Homo sapiens
  misc_RNA (1)...(19): siRNA sense strand
ugucugagguggccaaaga

SEQ ID NO: 64475 - RNA, 19 nt, Homo sapiens
  misc_RNA (1)...(19): siRNA sense strand
ugacagccaccuucccuua

SEQ ID NO: 64476 - RNA, 19 nt, Homo sapiens
  misc_RNA (1)...(19): siRNA sense strand
gaaccucaucuuucauuug

SEQ ID NO: 64477 - RNA, 19 nt, Homo sapiens
  misc_RNA (1)...(19): siRNA sense strand
ggacaguaccaccgaaaug

SEQ ID NO: 64478 - RNA, 19 nt, Homo sapiens
  misc_RNA (1)...(19): siRNA sense strand
ccgcuugaaugcuguguaa

SEQ ID NO: 64479 - RNA, 19 nt, Homo sapiens
  misc_RNA (1)...(19): siRNA sense strand
caacaacugcuaccaagau

SEQ ID NO: 64480 - RNA, 19 nt, Homo sapiens
  misc_RNA (1)...(19): siRNA sense strand
acaacaaguucaacaacaa

SEQ ID NO: 64481 - RNA, 19 nt, Homo sapiens
  misc_RNA (1)...(19): siRNA sense strand
acagccaccuucccuuaua

SEQ ID NO: 64482 - RNA, 19 nt, Homo sapiens
  misc_RNA (1)...(19): siRNA sense strand
ucacggcugugcuggauga

SEQ ID NO: 64483 - RNA, 19 nt, Homo sapiens
  misc_RNA (1)...(19): siRNA sense strand
uuacauugcuuccuacuac

SEQ ID NO: 64484 - RNA, 19 nt, Homo sapiens
  misc_RNA (1)...(19): siRNA sense strand
uggcugagaugaggaauga

SEQ ID NO: 64485 - RNA, 19 nt, Homo sapiens
  misc_RNA (1)...(19): siRNA sense strand
caacaacaacugcuaccaa

SEQ ID NO: 64486 - RNA, 19 nt, Homo sapiens
  misc_RNA (1)...(19): siRNA sense strand
caacugcaccaauuacuuc

SEQ ID NO: 64487 - RNA, 19 nt, Homo sapiens
  misc_RNA (1)...(19): siRNA sense strand
auaggaaccucaucuuuca

SEQ ID NO: 64488 - RNA, 19 nt, Homo sapiens
  misc_RNA (1)...(19): siRNA sense strand
gaucacggcugugcuggau

SEQ ID NO: 64489 - RNA, 19 nt, Homo sapiens
  misc_RNA (1)...(19): siRNA sense strand
agacgacgcccuugaauuc

SEQ ID NO: 64490 - RNA, 19 nt, Homo sapiens
  misc_RNA (1)...(19): siRNA sense strand
ucaaagggauugguuaugc

SEQ ID NO: 64491 - RNA, 19 nt, Homo sapiens
  misc_RNA (1)...(19): siRNA sense strand
agaaacaccaacagaaauu

SEQ ID NO: 64492 - RNA, 19 nt, Homo sapiens
  misc_RNA (1)...(19): siRNA sense strand
gagacgacgcccuugaauu

SEQ ID NO: 64493 - RNA, 19 nt, Homo sapiens
  misc_RNA (1)...(19): siRNA sense strand
cagaucuucuucucucuug

SEQ ID NO: 64494 - RNA, 19 nt, Homo sapiens
  misc_RNA (1)...(19): siRNA sense strand
ggaugcauuucaauaugga

SEQ ID NO: 64495 - RNA, 19 nt, Homo sapiens
  misc_RNA (1)...(19): siRNA sense strand
cauaggaaccucaucuuuc

SEQ ID NO: 64496 - RNA, 19 nt, Homo sapiens
  misc_RNA (1)...(19): siRNA sense strand
gcaacugcaccaauuacuu

SEQ ID NO: 64497 - RNA, 19 nt, Homo sapiens
  misc_RNA (1)...(19): siRNA sense strand
caccuucccuuauaucauc

SEQ ID NO: 64498 - RNA, 19 nt, Homo sapiens
  misc_RNA (1)...(19): siRNA sense strand
gucaucaccugcuucuuug

SEQ ID NO: 64499 - RNA, 19 nt, Homo sapiens
  misc_RNA (1)...(19): siRNA sense strand
guacucagcaguuccaagu

SEQ ID NO: 64500 - RNA, 19 nt, Homo sapiens
  misc_RNA (1)...(19): siRNA sense strand
gcuaucagcgugugaagau

SEQ ID NO: 64501 - RNA, 19 nt, Homo sapiens
  misc_RNA (1)...(19): siRNA sense strand
gugugaagauggagaagau

SEQ ID NO: 64502 - RNA, 19 nt, Homo sapiens
  misc_RNA (1)...(19): siRNA sense strand
cagaagcgauagccaacau

SEQ ID NO: 64503 - RNA, 19 nt, Homo sapiens
  misc_RNA (1)...(19): siRNA sense strand
ucacagugcucgguuacau

SEQ ID NO: 64504 - RNA, 19 nt, Homo sapiens
  misc_RNA (1)...(19): siRNA sense strand
cggcugugcuggaugaguu

SEQ ID NO: 64505 - RNA, 19 nt, Homo sapiens
  misc_RNA (1)...(19): siRNA sense strand
ggccaucagcccucuguuu

SEQ ID NO: 64506 - RNA, 19 nt, Homo sapiens
  misc_RNA (1)...(19): siRNA sense strand
gaaacaccaacagaaauuc

SEQ ID NO: 64507 - RNA, 19 nt, Homo sapiens
  misc_RNA (1)...(19): siRNA sense strand
uacaacaaguucaacaaca

SEQ ID NO: 64508 - RNA, 19 nt, Homo sapiens
  misc_RNA (1)...(19): siRNA sense strand
cagaaacaccaacagaaau

SEQ ID NO: 64509 - RNA, 19 nt, Homo sapiens
  misc_RNA (1)...(19): siRNA sense strand
gaugacacacggcacucua

SEQ ID NO: 64510 - RNA, 19 nt, Homo sapiens
  misc_RNA (1)...(19): siRNA sense strand
cagccaccuucccuuauau

SEQ ID NO: 64511 - RNA, 19 nt, Homo sapiens
  misc_RNA (1)...(19): siRNA sense strand
gcauuucaauauggaggaa

SEQ ID NO: 64512 - RNA, 19 nt, Homo sapiens
  misc_RNA (1)...(19): siRNA sense strand
ggagacgacgcccuugaau

SEQ ID NO: 64513 - RNA, 19 nt, Homo sapiens
  misc_RNA (1)...(19): siRNA sense strand
acuggcaacugcaccaauu

SEQ ID NO: 64514 - RNA, 19 nt, Homo sapiens
  misc_RNA (1)...(19): siRNA sense strand
ucuauggcaucacucaguu

SEQ ID NO: 64515 - RNA, 19 nt, Homo sapiens
  misc_RNA (1)...(19): siRNA sense strand
gggcuuggacagcacguuu

SEQ ID NO: 64516 - RNA, 19 nt, Homo sapiens
  misc_RNA (1)...(19): siRNA sense strand
gaaaacggaguucuacaga

SEQ ID NO: 64517 - RNA, 19 nt, Homo sapiens
  misc_RNA (1)...(19): siRNA sense strand
cgacgcccuugaauucuca

SEQ ID NO: 64518 - RNA, 19 nt, Homo sapiens
  misc_RNA (1)...(19): siRNA sense strand
gugaagauggagaagauug

SEQ ID NO: 64519 - RNA, 19 nt, Homo sapiens
  misc_RNA (1)...(19): siRNA sense strand
ggagggguguucucuucua

SEQ ID NO: 64520 - RNA, 19 nt, Homo sapiens
  misc_RNA (1)...(19): siRNA sense strand
uaccucaucuccuccuuca

SEQ ID NO: 64521 - RNA, 19 nt, Homo sapiens
  misc_RNA (1)...(19): siRNA sense strand
ggacauuuaaagagcguau

SEQ ID NO: 64522 - RNA, 19 nt, Homo sapiens
  misc_RNA (1)...(19): siRNA sense strand
uuucuccuguucaucauuu

SEQ ID NO: 64523 - RNA, 19 nt, Homo sapiens
  misc_RNA (1)...(19): siRNA sense strand
ugaacugcaugacgagcuu

SEQ ID NO: 64524 - RNA, 19 nt, Homo sapiens
  misc_RNA (1)...(19): siRNA sense strand
gcuacaacaaguucaacaa

SEQ ID NO: 64525 - RNA, 19 nt, Homo sapiens
  misc_RNA (1)...(19): siRNA sense strand
cuacgacuuuuccaauaua

SEQ ID NO: 64526 - RNA, 19 nt, Homo sapiens
  misc_RNA (1)...(19): siRNA sense strand
gccaucagcccucuguuuc

SEQ ID NO: 64527 - RNA, 19 nt, Homo sapiens
  misc_RNA (1)...(19): siRNA sense strand
gagaugaggaaugaagaug

SEQ ID NO: 64528 - RNA, 19 nt, Homo sapiens
  misc_RNA (1)...(19): siRNA sense strand
gcgcuauacuaccucaucu

SEQ ID NO: 64529 - RNA, 19 nt, Homo sapiens
  misc_RNA (1)...(19): siRNA sense strand
uauauagcuuaucgguuga

SEQ ID NO: 64530 - RNA, 19 nt, Homo sapiens
  misc_RNA (1)...(19): siRNA sense strand
ucccuuauaucauccuuuc

SEQ ID NO: 64531 - RNA, 19 nt, Homo sapiens
  misc_RNA (1)...(19): siRNA sense strand
caucauugccuuuuacauu

SEQ ID NO: 64532 - RNA, 19 nt, Homo sapiens
  misc_RNA (1)...(19): siRNA sense strand
ucacuccagggacauuuaa

SEQ ID NO: 64533 - RNA, 19 nt, Homo sapiens
  misc_RNA (1)...(19): siRNA sense strand
cagcuggcccucugcauca

SEQ ID NO: 64534 - RNA, 19 nt, Homo sapiens
  misc_RNA (1)...(19): siRNA sense strand
gauuugucaucuucacagu

SEQ ID NO: 64535 - RNA, 19 nt, Homo sapiens
  misc_RNA (1)...(19): siRNA sense strand
aaaguggaguccgggcaaa

SEQ ID NO: 64536 - RNA, 19 nt, Homo sapiens
  misc_RNA (1)...(19): siRNA sense strand
caucagcccucuguuucuc

SEQ ID NO: 64537 - RNA, 19 nt, Homo sapiens
  misc_RNA (1)...(19): siRNA sense strand
ggucccagccuccucuuca

SEQ ID NO: 64538 - RNA, 19 nt, Homo sapiens
  misc_RNA (1)...(19): siRNA sense strand
caauggguacucagcaguu

SEQ ID NO: 64539 - RNA, 19 nt, Homo sapiens
  misc_RNA (1)...(19): siRNA sense strand
gacagccaccuucccuuau

SEQ ID NO: 64540 - RNA, 19 nt, Homo sapiens
  misc_RNA (1)...(19): siRNA sense strand
ccucaucuuucauuugcau

SEQ ID NO: 64541 - RNA, 19 nt, Homo sapiens
  misc_RNA (1)...(19): siRNA sense strand
gaagauggagaagauuguc

SEQ ID NO: 64542 - RNA, 19 nt, Homo sapiens
  misc_RNA (1)...(19): siRNA sense strand
guucaucauuugcaguuuu

SEQ ID NO: 64543 - RNA, 19 nt, Homo sapiens
  misc_RNA (1)...(19): siRNA sense strand
uaaucacgcugggcuugga

SEQ ID NO: 64544 - RNA, 19 nt, Homo sapiens
  misc_RNA (1)...(19): siRNA sense strand
gagaagauugucaggaaaa

SEQ ID NO: 64545 - RNA, 19 nt, Homo sapiens
  misc_RNA (1)...(19): siRNA sense strand
uggaugcauuucaauaugg

SEQ ID NO: 64546 - RNA, 19 nt, Homo sapiens
  misc_RNA (1)...(19): siRNA sense strand
gggccuacguggugaagcu

SEQ ID NO: 64547 - RNA, 19 nt, Homo sapiens
  misc_RNA (1)...(19): siRNA sense strand
gccagcguccacuuucuuu

SEQ ID NO: 64548 - RNA, 19 nt, Homo sapiens
  misc_RNA (1)...(19): siRNA sense strand
gcugagaugaggaaugaag

SEQ ID NO: 64549 - RNA, 19 nt, Homo sapiens
  misc_RNA (1)...(19): siRNA sense strand
guuaucuacuucagcaucu

SEQ ID NO: 64550 - RNA, 19 nt, Homo sapiens
  misc_RNA (1)...(19): siRNA sense strand
gacaguaccaccgaaaugg

SEQ ID NO: 64551 - RNA, 19 nt, Homo sapiens
  misc_RNA (1)...(19): siRNA sense strand
cuucaucacguaugcagaa

SEQ ID NO: 64552 - RNA, 19 nt, Homo sapiens
  misc_RNA (1)...(19): siRNA sense strand
aaccucaucuuucauuugc

SEQ ID NO: 64553 - RNA, 19 nt, Homo sapiens
  misc_RNA (1)...(19): siRNA sense strand
gcaacacacuugucauuua

SEQ ID NO: 64554 - RNA, 19 nt, Homo sapiens
  misc_RNA (1)...(19): siRNA sense strand
agacagagccguacuauga

SEQ ID NO: 64555 - RNA, 19 nt, Homo sapiens
  misc_RNA (1)...(19): siRNA sense strand
caacacacuugucauuuau

SEQ ID NO: 64556 - RNA, 19 nt, Homo sapiens
  misc_RNA (1)...(19): siRNA sense strand
ggaagaagucugagaagaa

SEQ ID NO: 64557 - RNA, 19 nt, Homo sapiens
  misc_RNA (1)...(19): siRNA sense strand
cgagugggcuccucuaaga

SEQ ID NO: 64558 - RNA, 19 nt, Homo sapiens
  misc_RNA (1)...(19): siRNA sense strand
gaagaagucugagaagaag

SEQ ID NO: 64559 - RNA, 19 nt, Homo sapiens
  misc_RNA (1)...(19): siRNA sense strand
ggacaaaucccggcugaau

SEQ ID NO: 64560 - RNA, 19 nt, Homo sapiens
  misc_RNA (1)...(19): siRNA sense strand
agaagcagcugcaccauca

SEQ ID NO: 64561 - RNA, 19 nt, Homo sapiens
  misc_RNA (1)...(19): siRNA sense strand
acacaggguucaucaucua

SEQ ID NO: 64562 - RNA, 19 nt, Homo sapiens
  misc_RNA (1)...(19): siRNA sense strand
agaagaaggucacccgaau

SEQ ID NO: 64563 - RNA, 19 nt, Homo sapiens
  misc_RNA (1)...(19): siRNA sense strand
uauccuauaugccuucuug

SEQ ID NO: 64564 - RNA, 19 nt, Homo sapiens
  misc_RNA (1)...(19): siRNA sense strand
caucuacacuuucauucug

SEQ ID NO: 64565 - RNA, 19 nt, Homo sapiens
  misc_RNA (1)...(19): siRNA sense strand
acaaaucccggcugaauga

SEQ ID NO: 64566 - RNA, 19 nt, Homo sapiens
  misc_RNA (1)...(19): siRNA sense strand
caucuugcccaucaugaua

SEQ ID NO: 64567 - RNA, 19 nt, Homo sapiens
  misc_RNA (1)...(19): siRNA sense strand
uuaaaggcauguuugacuu

SEQ ID NO: 64568 - RNA, 19 nt, Homo sapiens
  misc_RNA (1)...(19): siRNA sense strand
uggcuucccuucuacauau

SEQ ID NO: 64569 - RNA, 19 nt, Homo sapiens
  misc_RNA (1)...(19): siRNA sense strand
gaagaaggucacccgaaug

SEQ ID NO: 64570 - RNA, 19 nt, Homo sapiens
  misc_RNA (1)...(19): siRNA sense strand
gugccaacccuauccuaua

SEQ ID NO: 64571 - RNA, 19 nt, Homo sapiens
  misc_RNA (1)...(19): siRNA sense strand
uauaugccuucuugucuga

SEQ ID NO: 64572 - RNA, 19 nt, Homo sapiens
  misc_RNA (1)...(19): siRNA sense strand
guacacaggguucaucauc

SEQ ID NO: 64573 - RNA, 19 nt, Homo sapiens
  misc_RNA (1)...(19): siRNA sense strand
acuaugaccugacaagcaa

SEQ ID NO: 64574 - RNA, 19 nt, Homo sapiens
  misc_RNA (1)...(19): siRNA sense strand
ggcuauccauuccauuuga

SEQ ID NO: 64575 - RNA, 19 nt, Homo sapiens
  misc_RNA (1)...(19): siRNA sense strand
ugccaacccuauccuauau

SEQ ID NO: 64576 - RNA, 19 nt, Homo sapiens
  misc_RNA (1)...(19): siRNA sense strand
acacacuugucauuuaugu

SEQ ID NO: 64577 - RNA, 19 nt, Homo sapiens
  misc_RNA (1)...(19): siRNA sense strand
ugaagaccaucaccaacau

SEQ ID NO: 64578 - RNA, 19 nt, Homo sapiens
  misc_RNA (1)...(19): siRNA sense strand
gaagaccaucaccaacauu

SEQ ID NO: 64579 - RNA, 19 nt, Homo sapiens
  misc_RNA (1)...(19): siRNA sense strand
caucaucuacacuuucauu

SEQ ID NO: 64580 - RNA, 19 nt, Homo sapiens
  misc_RNA (1)...(19): siRNA sense strand
acaguaagcaggacaaauc

SEQ ID NO: 64581 - RNA, 19 nt, Homo sapiens
  misc_RNA (1)...(19): siRNA sense strand
caacuggccaggugaaucu

SEQ ID NO: 64582 - RNA, 19 nt, Homo sapiens
  misc_RNA (1)...(19): siRNA sense strand
guccucacauucaucuauu

SEQ ID NO: 64583 - RNA, 19 nt, Homo sapiens
  misc_RNA (1)...(19): siRNA sense strand
cgugguggcugucuucauc

SEQ ID NO: 64584 - RNA, 19 nt, Homo sapiens
  misc_RNA (1)...(19): siRNA sense strand
cuaagaggaagaagucuga

SEQ ID NO: 64585 - RNA, 19 nt, Homo sapiens
  misc_RNA (1)...(19): siRNA sense strand
aaggugaaguccucuggaa

SEQ ID NO: 64586 - RNA, 19 nt, Homo sapiens
  misc_RNA (1)...(19): siRNA sense strand
gacaaaucccggcugaaug

SEQ ID NO: 64587 - RNA, 19 nt, Homo sapiens
  misc_RNA (1)...(19): siRNA sense strand
ucaaucaguucaccagcau

SEQ ID NO: 64588 - RNA, 19 nt, Homo sapiens
  misc_RNA (1)...(19): siRNA sense strand
ggugaaguccucuggaauc

SEQ ID NO: 64589 - RNA, 19 nt, Homo sapiens
  misc_RNA (1)...(19): siRNA sense strand
ggcaacacacuugucauuu

SEQ ID NO: 64590 - RNA, 19 nt, Homo sapiens
  misc_RNA (1)...(19): siRNA sense strand
uuugcuaccuguucauuau

SEQ ID NO: 64591 - RNA, 19 nt, Homo sapiens
  misc_RNA (1)...(19): siRNA sense strand
acacuugucauuuauguca

SEQ ID NO: 64592 - RNA, 19 nt, Homo sapiens
  misc_RNA (1)...(19): siRNA sense strand
uuuguggucugcaucauug

SEQ ID NO: 64593 - RNA, 19 nt, Homo sapiens
  misc_RNA (1)...(19): siRNA sense strand
gggagcggagugacaguaa

SEQ ID NO: 64594 - RNA, 19 nt, Homo sapiens
  misc_RNA (1)...(19): siRNA sense strand
ucugcuggcuucccuucua

SEQ ID NO: 64595 - RNA, 19 nt, Homo sapiens
  misc_RNA (1)...(19): siRNA sense strand
aggaagaagucugagaaga

SEQ ID NO: 64596 - RNA, 19 nt, Homo sapiens
  misc_RNA (1)...(19): siRNA sense strand
gaccaucaccaacauuuac

SEQ ID NO: 64597 - RNA, 19 nt, Homo sapiens
  misc_RNA (1)...(19): siRNA sense strand
gguucaucaucuacacuuu

SEQ ID NO: 64598 - RNA, 19 nt, Homo sapiens
  misc_RNA (1)...(19): siRNA sense strand
agaccaucaccaacauuua

SEQ ID NO: 64599 - RNA, 19 nt, Homo sapiens
  misc_RNA (1)...(19): siRNA sense strand
uggcaacacacuugucauu

SEQ ID NO: 64600 - RNA, 19 nt, Homo sapiens
  misc_RNA (1)...(19): siRNA sense strand
agaggaagaagucugagaa

SEQ ID NO: 64601 - RNA, 19 nt, Homo sapiens
  misc_RNA (1)...(19): siRNA sense strand
ggagcggagugacaguaag

SEQ ID NO: 64602 - RNA, 19 nt, Homo sapiens
  misc_RNA (1)...(19): siRNA sense strand
caaccuggccaucgcagau

SEQ ID NO: 64603 - RNA, 19 nt, Homo sapiens
  misc_RNA (1)...(19): siRNA sense strand
ccuccaaaccaguaucuga

SEQ ID NO: 64604 - RNA, 19 nt, Homo sapiens
  misc_RNA (1)...(19): siRNA sense strand
cggccaagaugaucaccau

SEQ ID NO: 64605 - RNA, 19 nt, Homo sapiens
  misc_RNA (1)...(19): siRNA sense strand
caacaccucaaaccagaca

SEQ ID NO: 64606 - RNA, 19 nt, Homo sapiens
  misc_RNA (1)...(19): siRNA sense strand
cuggucaucuugcccauca

SEQ ID NO: 64607 - RNA, 19 nt, Homo sapiens
  misc_RNA (1)...(19): siRNA sense strand
ccaacccuauccuauaugc

SEQ ID NO: 64608 - RNA, 19 nt, Homo sapiens
  misc_RNA (1)...(19): siRNA sense strand
aagaccaucaccaacauuu

SEQ ID NO: 64609 - RNA, 19 nt, Homo sapiens
  misc_RNA (1)...(19): siRNA sense strand
ucuugcccaucaugauaua

SEQ ID NO: 64610 - RNA, 19 nt, Homo sapiens
  misc_RNA (1)...(19): siRNA sense strand
ugucuuugcuaccuguuca

SEQ ID NO: 64611 - RNA, 19 nt, Homo sapiens
  misc_RNA (1)...(19): siRNA sense strand
gcaguccucacauucaucu

SEQ ID NO: 64612 - RNA, 19 nt, Homo sapiens
  misc_RNA (1)...(19): siRNA sense strand
gccguacuaugaccugaca

SEQ ID NO: 64613 - RNA, 19 nt, Homo sapiens
  misc_RNA (1)...(19): siRNA sense strand
ccagacagagccguacuau

SEQ ID NO: 64614 - RNA, 19 nt, Homo sapiens
  misc_RNA (1)...(19): siRNA sense strand
gaggaagaagucugagaag

SEQ ID NO: 64615 - RNA, 19 nt, Homo sapiens
  misc_RNA (1)...(19): siRNA sense strand
ucaguucaccagcaucuuc

SEQ ID NO: 64616 - RNA, 19 nt, Homo sapiens
  misc_RNA (1)...(19): siRNA sense strand
ucaccaacauuuacauccu

SEQ ID NO: 64617 - RNA, 19 nt, Homo sapiens
  misc_RNA (1)...(19): siRNA sense strand
ucaauggaagccacacaug

SEQ ID NO: 64618 - RNA, 19 nt, Homo sapiens
  misc_RNA (1)...(19): siRNA sense strand
aaggugagcggcacagaug

SEQ ID NO: 64619 - RNA, 19 nt, Homo sapiens
  misc_RNA (1)...(19): siRNA sense strand
ccuccgcuaugccaagaug

SEQ ID NO: 64620 - RNA, 19 nt, Homo sapiens
  misc_RNA (1)...(19): siRNA sense strand
ucauuaucaucaaggugaa

SEQ ID NO: 64621 - RNA, 19 nt, Homo sapiens
  misc_RNA (1)...(19): siRNA sense strand
ggucaucuugcccaucaug

SEQ ID NO: 64622 - RNA, 19 nt, Homo sapiens
  misc_RNA (1)...(19): siRNA sense strand
ucucucugcuggucaucuu

SEQ ID NO: 64623 - RNA, 19 nt, Homo sapiens
  misc_RNA (1)...(19): siRNA sense strand
caaggugagcggcacagau

SEQ ID NO: 64624 - RNA, 19 nt, Homo sapiens
  misc_RNA (1)...(19): siRNA sense strand
cuacauauucaacguuucu

SEQ ID NO: 64625 - RNA, 19 nt, Homo sapiens
  misc_RNA (1)...(19): siRNA sense strand
guucaucaucuacacuuuc

SEQ ID NO: 64626 - RNA, 19 nt, Homo sapiens
  misc_RNA (1)...(19): siRNA sense strand
gcagcugcaccaucaacug

SEQ ID NO: 64627 - RNA, 19 nt, Homo sapiens
  misc_RNA (1)...(19): siRNA sense strand
caacauuuacauccucaac

SEQ ID NO: 64628 - RNA, 19 nt, Homo sapiens
  misc_RNA (1)...(19): siRNA sense strand
aggcauguuugacuuugug

SEQ ID NO: 64629 - RNA, 19 nt, Homo sapiens
  misc_RNA (1)...(19): siRNA sense strand
gccggguggucaugacugu

SEQ ID NO: 64630 - RNA, 19 nt, Homo sapiens
  misc_RNA (1)...(19): siRNA sense strand
guaacucgcuggucaucua

SEQ ID NO: 64631 - RNA, 19 nt, Homo sapiens
  misc_RNA (1)...(19): siRNA sense strand
ggacaugcuucauccauca

SEQ ID NO: 64632 - RNA, 19 nt, Homo sapiens
  misc_RNA (1)...(19): siRNA sense strand
cgaggagccugccuucuuu

SEQ ID NO: 64633 - RNA, 19 nt, Homo sapiens
  misc_RNA (1)...(19): siRNA sense strand
gagccggcuucaucaucua

SEQ ID NO: 64634 - RNA, 19 nt, Homo sapiens
  misc_RNA (1)...(19): siRNA sense strand
agacugaggaggaggauga

SEQ ID NO: 64635 - RNA, 19 nt, Homo sapiens
  misc_RNA (1)...(19): siRNA sense strand
ccaguucaccagcauauuc

SEQ ID NO: 64636 - RNA, 19 nt, Homo sapiens
  misc_RNA (1)...(19): siRNA sense strand
ccgaggagccugccuucuu

SEQ ID NO: 64637 - RNA, 19 nt, Homo sapiens
  misc_RNA (1)...(19): siRNA sense strand
agaacgcccuguccuacug

SEQ ID NO: 64638 - RNA, 19 nt, Homo sapiens
  misc_RNA (1)...(19): siRNA sense strand
cgagccggcuucaucaucu

SEQ ID NO: 64639 - RNA, 19 nt, Homo sapiens
  misc_RNA (1)...(19): siRNA sense strand
caaccaguucaccagcaua

SEQ ID NO: 64640 - RNA, 19 nt, Homo sapiens
  misc_RNA (1)...(19): siRNA sense strand
gcagaguggccagcaagga

SEQ ID NO: 64641 - RNA, 19 nt, Homo sapiens
  misc_RNA (1)...(19): siRNA sense strand
ccgacgagcucuucaugcu

SEQ ID NO: 64642 - RNA, 19 nt, Homo sapiens
  misc_RNA (1)...(19): siRNA sense strand
uggugggccugcuggguaa

SEQ ID NO: 64643 - RNA, 19 nt, Homo sapiens
  misc_RNA (1)...(19): siRNA sense strand
ccagcagaguggccagcaa

SEQ ID NO: 64644 - RNA, 19 nt, Homo sapiens
  misc_RNA (1)...(19): siRNA sense strand
gcgcugcccuaugccaaca

SEQ ID NO: 64645 - RNA, 19 nt, Homo sapiens
  misc_RNA (1)...(19): siRNA sense strand
ucaaccaguucaccagcau

SEQ ID NO: 64646 - RNA, 19 nt, Homo sapiens
  misc_RNA (1)...(19): siRNA sense strand
ucugcuggaugcccuucua

SEQ ID NO: 64647 - RNA, 19 nt, Homo sapiens
  misc_RNA (1)...(19): siRNA sense strand
gcccuucagucaccaacgu

SEQ ID NO: 64648 - RNA, 19 nt, Homo sapiens
  misc_RNA (1)...(19): siRNA sense strand
gcaacgcccuggucaucuu

SEQ ID NO: 64649 - RNA, 19 nt, Homo sapiens
  misc_RNA (1)...(19): siRNA sense strand
gauggucguggucgucuuu

SEQ ID NO: 64650 - RNA, 19 nt, Homo sapiens
  misc_RNA (1)...(19): siRNA sense strand
ucaaccacgugucccuuau

SEQ ID NO: 64651 - RNA, 19 nt, Homo sapiens
  misc_RNA (1)...(19): siRNA sense strand
gucaaccacgugucccuua

SEQ ID NO: 64652 - RNA, 19 nt, Homo sapiens
  misc_RNA (1)...(19): siRNA sense strand
ucgacggccucaacauguu

SEQ ID NO: 64653 - RNA, 19 nt, Homo sapiens
  misc_RNA (1)...(19): siRNA sense strand
ccgacgagcucuucaugcu

SEQ ID NO: 64654 - RNA, 19 nt, Homo sapiens
  misc_RNA (1)...(19): siRNA sense strand
ucugcuggaugccuuucua

SEQ ID NO: 64655 - RNA, 19 nt, Homo sapiens
  misc_RNA (1)...(19): siRNA sense strand
ucaccagcgucuucugucu

SEQ ID NO: 64656 - RNA, 19 nt, Homo sapiens
  misc_RNA (1)...(19): siRNA sense strand
gcaggcgcucggagaagaa

SEQ ID NO: 64657 - RNA, 19 nt, Homo sapiens
  misc_RNA (1)...(19): siRNA sense strand
uggccaagcucaucaaccu

SEQ ID NO: 64658 - RNA, 19 nt, Homo sapiens
  misc_RNA (1)...(19): siRNA sense strand
ggucguggucgucuuugug

SEQ ID NO: 64659 - RNA, 19 nt, Homo sapiens
  misc_RNA (1)...(19): siRNA sense strand
ggaagcccugcaaccagaa

SEQ ID NO: 64660 - RNA, 19 nt, Homo sapiens
  misc_RNA (1)...(19): siRNA sense strand
caggaccaccaccuucuga

SEQ ID NO: 64661 - RNA, 19 nt, Homo sapiens
  misc_RNA (1)...(19): siRNA sense strand
ggaacacgcuggucaucua

SEQ ID NO: 64662 - RNA, 19 nt, Homo sapiens
  misc_RNA (1)...(19): siRNA sense strand
gauguuggcugcccuucuu

SEQ ID NO: 64663 - RNA, 19 nt, Homo sapiens
  misc_RNA (1)...(19): siRNA sense strand
ucaccaacaucuacauucu

SEQ ID NO: 64664 - RNA, 19 nt, Homo sapiens
  misc_RNA (1)...(19): siRNA sense strand
gugcugcgcuucgccaaga

SEQ ID NO: 64665 - RNA, 19 nt, Homo sapiens
  misc_RNA (1)...(19): siRNA sense strand
ugaagaccgucaccaacau

SEQ ID NO: 64666 - RNA, 19 nt, Homo sapiens
  misc_RNA (1)...(19): siRNA sense strand
ucaaccaguucaccagugu

SEQ ID NO: 64667 - RNA, 19 nt, Homo sapiens
  misc_RNA (1)...(19): siRNA sense strand
caacaucuacauucucaac

SEQ ID NO: 64668 - RNA, 19 nt, Homo sapiens
  misc_RNA (1)...(19): siRNA sense strand
gaagaccgucaccaacauc

SEQ ID NO: 64669 - RNA, 19 nt, Homo sapiens
  misc_RNA (1)...(19): siRNA sense strand
accaacaucuacauucuca

SEQ ID NO: 64670 - RNA, 19 nt, Homo sapiens
  misc_RNA (1)...(19): siRNA sense strand
gaacacgcuggucaucuac

SEQ ID NO: 64671 - RNA, 19 nt, Homo sapiens
  misc_RNA (1)...(19): siRNA sense strand
cuuccucucugacaacuuc

SEQ ID NO: 64672 - RNA, 19 nt, Homo sapiens
  misc_RNA (1)...(19): siRNA sense strand
ccaguucaccagugucuuc

SEQ ID NO: 64673 - RNA, 19 nt, Homo sapiens
  misc_RNA (1)...(19): siRNA sense strand
gcgccgucuucaucaucua

SEQ ID NO: 64674 - RNA, 19 nt, Homo sapiens
  misc_RNA (1)...(19): siRNA sense strand
gaccgucaccaacaucuac

SEQ ID NO: 64675 - RNA, 19 nt, Homo sapiens
  misc_RNA (1)...(19): siRNA sense strand
ucaaggagaugaagaagaa

SEQ ID NO: 64676 - RNA, 19 nt, Homo sapiens
  misc_RNA (1)...(19): siRNA sense strand
gcgcuucgaugcggacuau

SEQ ID NO: 64677 - RNA, 19 nt, Homo sapiens
  misc_RNA (1)...(19): siRNA sense strand
gcacccacccuguucucua

SEQ ID NO: 64678 - RNA, 19 nt, Homo sapiens
  misc_RNA (1)...(19): siRNA sense strand
agaagaacccuaugaccaa

SEQ ID NO: 64679 - RNA, 19 nt, Homo sapiens
  misc_RNA (1)...(19): siRNA sense strand
augaagacaugaaggagaa

SEQ ID NO: 64680 - RNA, 19 nt, Homo sapiens
  misc_RNA (1)...(19): siRNA sense strand
gaaguucauggucggagaa

SEQ ID NO: 64681 - RNA, 19 nt, Homo sapiens
  misc_RNA (1)...(19): siRNA sense strand
agaacccuaugaccaacua

SEQ ID NO: 64682 - RNA, 19 nt, Homo sapiens
  misc_RNA (1)...(19): siRNA sense strand
acacgucguucaaggagau

SEQ ID NO: 64683 - RNA, 19 nt, Homo sapiens
  misc_RNA (1)...(19): siRNA sense strand
gggacagcuuccuggagaa

SEQ ID NO: 64684 - RNA, 19 nt, Homo sapiens
  misc_RNA (1)...(19): siRNA sense strand
guucauggucggagaagug

SEQ ID NO: 64685 - RNA, 19 nt, Homo sapiens
  misc_RNA (1)...(19): siRNA sense strand
gcagaaugagcgcuucgau

SEQ ID NO: 64686 - RNA, 19 nt, Homo sapiens
  misc_RNA (1)...(19): siRNA sense strand
ucaccguggcgcagaauga

SEQ ID NO: 64687 - RNA, 19 nt, Homo sapiens
  misc_RNA (1)...(19): siRNA sense strand
uucucuaccucuucuauga

SEQ ID NO: 64688 - RNA, 19 nt, Homo sapiens
  misc_RNA (1)...(19): siRNA sense strand
aaaagauccuggaguuugu

SEQ ID NO: 64689 - RNA, 19 nt, Homo sapiens
  misc_RNA (1)...(19): siRNA sense strand
cacccacccuguucucuac

SEQ ID NO: 64690 - RNA, 19 nt, Homo sapiens
  misc_RNA (1)...(19): siRNA sense strand
ucuaugaagacaugaagga

SEQ ID NO: 64691 - RNA, 19 nt, Homo sapiens
  misc_RNA (1)...(19): siRNA sense strand
gaugaagaagaacccuaug

SEQ ID NO: 64692 - RNA, 19 nt, Homo sapiens
  misc_RNA (1)...(19): siRNA sense strand
ucaaggagaugaagaagaa

SEQ ID NO: 64693 - RNA, 19 nt, Homo sapiens
  misc_RNA (1)...(19): siRNA sense strand
gcgcuucgaugcggacuau

SEQ ID NO: 64694 - RNA, 19 nt, Homo sapiens
  misc_RNA (1)...(19): siRNA sense strand
gcacccacccuguucucua

SEQ ID NO: 64695 - RNA, 19 nt, Homo sapiens
  misc_RNA (1)...(19): siRNA sense strand
agaagaacccuaugaccaa

SEQ ID NO: 64696 - RNA, 19 nt, Homo sapiens
  misc_RNA (1)...(19): siRNA sense strand
augaagacaugaaggagaa

SEQ ID NO: 64697 - RNA, 19 nt, Homo sapiens
  misc_RNA (1)...(19): siRNA sense strand
gaaguucauggucggagaa

SEQ ID NO: 64698 - RNA, 19 nt, Homo sapiens
  misc_RNA (1)...(19): siRNA sense strand
agaacccuaugaccaacua

SEQ ID NO: 64699 - RNA, 19 nt, Homo sapiens
  misc_RNA (1)...(19): siRNA sense strand
acacgucguucaaggagau

SEQ ID NO: 64700 - RNA, 19 nt, Homo sapiens
  misc_RNA (1)...(19): siRNA sense strand
gggacagcuuccuggagaa

SEQ ID NO: 64701 - RNA, 19 nt, Homo sapiens
  misc_RNA (1)...(19): siRNA sense strand
guucauggucggagaagug

SEQ ID NO: 64702 - RNA, 19 nt, Homo sapiens
  misc_RNA (1)...(19): siRNA sense strand
gcagaaugagcgcuucgau

SEQ ID NO: 64703 - RNA, 19 nt, Homo sapiens
  misc_RNA (1)...(19): siRNA sense strand
ucaccguggcgcagaauga

SEQ ID NO: 64704 - RNA, 19 nt, Homo sapiens
  misc_RNA (1)...(19): siRNA sense strand
uucucuaccucuucuauga

SEQ ID NO: 64705 - RNA, 19 nt, Homo sapiens
  misc_RNA (1)...(19): siRNA sense strand
aaaagauccuggaguuugu

SEQ ID NO: 64706 - RNA, 19 nt, Homo sapiens
  misc_RNA (1)...(19): siRNA sense strand
cacccacccuguucucuac

SEQ ID NO: 64707 - RNA, 19 nt, Homo sapiens
  misc_RNA (1)...(19): siRNA sense strand
ucuaugaagacaugaagga

SEQ ID NO: 64708 - RNA, 19 nt, Homo sapiens
  misc_RNA (1)...(19): siRNA sense strand
gaugaagaagaacccuaug

SEQ ID NO: 64709 - RNA, 19 nt, Homo sapiens
  misc_RNA (1)...(19): siRNA sense strand
ucaaggagaugaagaagaa

SEQ ID NO: 64710 - RNA, 19 nt, Homo sapiens
  misc_RNA (1)...(19): siRNA sense strand
gcgcuucgaugcggacuau

SEQ ID NO: 64711 - RNA, 19 nt, Homo sapiens
  misc_RNA (1)...(19): siRNA sense strand
gcacccacccuguucucua

SEQ ID NO: 64712 - RNA, 19 nt, Homo sapiens
  misc_RNA (1)...(19): siRNA sense strand
agaagaacccuaugaccaa

SEQ ID NO: 64713 - RNA, 19 nt, Homo sapiens
  misc_RNA (1)...(19): siRNA sense strand
augaagacaugaaggagaa

SEQ ID NO: 64714 - RNA, 19 nt, Homo sapiens
  misc_RNA (1)...(19): siRNA sense strand
gaaguucauggucggagaa

SEQ ID NO: 64715 - RNA, 19 nt, Homo sapiens
  misc_RNA (1)...(19): siRNA sense strand
agaacccuaugaccaacua

SEQ ID NO: 64716 - RNA, 19 nt, Homo sapiens
  misc_RNA (1)...(19): siRNA sense strand
acacgucguucaaggagau

SEQ ID NO: 64717 - RNA, 19 nt, Homo sapiens
  misc_RNA (1)...(19): siRNA sense strand
gggacagcuuccuggagaa

SEQ ID NO: 64718 - RNA, 19 nt, Homo sapiens
  misc_RNA (1)...(19): siRNA sense strand
guucauggucggagaagug

SEQ ID NO: 64719 - RNA, 19 nt, Homo sapiens
  misc_RNA (1)...(19): siRNA sense strand
gcagaaugagcgcuucgau

SEQ ID NO: 64720 - RNA, 19 nt, Homo sapiens
  misc_RNA (1)...(19): siRNA sense strand
ucaccguggcgcagaauga

SEQ ID NO: 64721 - RNA, 19 nt, Homo sapiens
  misc_RNA (1)...(19): siRNA sense strand
uucucuaccucuucuauga

SEQ ID NO: 64722 - RNA, 19 nt, Homo sapiens
  misc_RNA (1)...(19): siRNA sense strand
aaaagauccuggaguuugu

SEQ ID NO: 64723 - RNA, 19 nt, Homo sapiens
  misc_RNA (1)...(19): siRNA sense strand
cacccacccuguucucuac

SEQ ID NO: 64724 - RNA, 19 nt, Homo sapiens
  misc_RNA (1)...(19): siRNA sense strand
ucuaugaagacaugaagga

SEQ ID NO: 64725 - RNA, 19 nt, Homo sapiens
  misc_RNA (1)...(19): siRNA sense strand
gaugaagaagaacccuaug

SEQ ID NO: 64726 - RNA, 19 nt, Homo sapiens
  misc_RNA (1)...(19): siRNA sense strand
ucaaggagaugaagaagaa

SEQ ID NO: 64727 - RNA, 19 nt, Homo sapiens
  misc_RNA (1)...(19): siRNA sense strand
gcgcuucgaugcggacuau

SEQ ID NO: 64728 - RNA, 19 nt, Homo sapiens
  misc_RNA (1)...(19): siRNA sense strand
gcacccacccuguucucua

SEQ ID NO: 64729 - RNA, 19 nt, Homo sapiens
  misc_RNA (1)...(19): siRNA sense strand
agaagaacccuaugaccaa

SEQ ID NO: 64730 - RNA, 19 nt, Homo sapiens
  misc_RNA (1)...(19): siRNA sense strand
augaagacaugaaggagaa

SEQ ID NO: 64731 - RNA, 19 nt, Homo sapiens
  misc_RNA (1)...(19): siRNA sense strand
gaaguucauggucggagaa

SEQ ID NO: 64732 - RNA, 19 nt, Homo sapiens
  misc_RNA (1)...(19): siRNA sense strand
agaacccuaugaccaacua

SEQ ID NO: 64733 - RNA, 19 nt, Homo sapiens
  misc_RNA (1)...(19): siRNA sense strand
acacgucguucaaggagau

SEQ ID NO: 64734 - RNA, 19 nt, Homo sapiens
  misc_RNA (1)...(19): siRNA sense strand
gggacagcuuccuggagaa

SEQ ID NO: 64735 - RNA, 19 nt, Homo sapiens
  misc_RNA (1)...(19): siRNA sense strand
guucauggucggagaagug

SEQ ID NO: 64736 - RNA, 19 nt, Homo sapiens
  misc_RNA (1)...(19): siRNA sense strand
gcagaaugagcgcuucgau

SEQ ID NO: 64737 - RNA, 19 nt, Homo sapiens
  misc_RNA (1)...(19): siRNA sense strand
ucaccguggcgcagaauga

SEQ ID NO: 64738 - RNA, 19 nt, Homo sapiens
  misc_RNA (1)...(19): siRNA sense strand
uucucuaccucuucuauga

SEQ ID NO: 64739 - RNA, 19 nt, Homo sapiens
  misc_RNA (1)...(19): siRNA sense strand
aaaagauccuggaguuugu

SEQ ID NO: 64740 - RNA, 19 nt, Homo sapiens
  misc_RNA (1)...(19): siRNA sense strand
cacccacccuguucucuac

SEQ ID NO: 64741 - RNA, 19 nt, Homo sapiens
  misc_RNA (1)...(19): siRNA sense strand
ucuaugaagacaugaagga

SEQ ID NO: 64742 - RNA, 19 nt, Homo sapiens
  misc_RNA (1)...(19): siRNA sense strand
gaugaagaagaacccuaug

SEQ ID NO: 64743 - RNA, 19 nt, Homo sapiens
  misc_RNA (1)...(19): siRNA sense strand
ucaaggagaugaagaagaa

SEQ ID NO: 64744 - RNA, 19 nt, Homo sapiens
  misc_RNA (1)...(19): siRNA sense strand
gcgcuucgaugcggacuau

SEQ ID NO: 64745 - RNA, 19 nt, Homo sapiens
  misc_RNA (1)...(19): siRNA sense strand
gcacccacccuguucucua

SEQ ID NO: 64746 - RNA, 19 nt, Homo sapiens
  misc_RNA (1)...(19): siRNA sense strand
agaagaacccuaugaccaa

SEQ ID NO: 64747 - RNA, 19 nt, Homo sapiens
  misc_RNA (1)...(19): siRNA sense strand
augaagacaugaaggagaa

SEQ ID NO: 64748 - RNA, 19 nt, Homo sapiens
  misc_RNA (1)...(19): siRNA sense strand
gaaguucauggucggagaa

SEQ ID NO: 64749 - RNA, 19 nt, Homo sapiens
  misc_RNA (1)...(19): siRNA sense strand
agaacccuaugaccaacua

SEQ ID NO: 64750 - RNA, 19 nt, Homo sapiens
  misc_RNA (1)...(19): siRNA sense strand
acacgucguucaaggagau

SEQ ID NO: 64751 - RNA, 19 nt, Homo sapiens
  misc_RNA (1)...(19): siRNA sense strand
gggacagcuuccuggagaa

SEQ ID NO: 64752 - RNA, 19 nt, Homo sapiens
  misc_RNA (1)...(19): siRNA sense strand
guucauggucggagaagug

SEQ ID NO: 64753 - RNA, 19 nt, Homo sapiens
  misc_RNA (1)...(19): siRNA sense strand
gcagaaugagcgcuucgau

SEQ ID NO: 64754 - RNA, 19 nt, Homo sapiens
  misc_RNA (1)...(19): siRNA sense strand
ucaccguggcgcagaauga

SEQ ID NO: 64755 - RNA, 19 nt, Homo sapiens
  misc_RNA (1)...(19): siRNA sense strand
uucucuaccucuucuauga

SEQ ID NO: 64756 - RNA, 19 nt, Homo sapiens
  misc_RNA (1)...(19): siRNA sense strand
aaaagauccuggaguuugu

SEQ ID NO: 64757 - RNA, 19 nt, Homo sapiens
  misc_RNA (1)...(19): siRNA sense strand
cacccacccuguucucuac

SEQ ID NO: 64758 - RNA, 19 nt, Homo sapiens
  misc_RNA (1)...(19): siRNA sense strand
ucuaugaagacaugaagga

SEQ ID NO: 64759 - RNA, 19 nt, Homo sapiens
  misc_RNA (1)...(19): siRNA sense strand
gaugaagaagaacccuaug

SEQ ID NO: 64760 - RNA, 19 nt, Homo sapiens
  misc_RNA (1)...(19): siRNA sense strand
ucaaggagaugaagaagaa

SEQ ID NO: 64761 - RNA, 19 nt, Homo sapiens
  misc_RNA (1)...(19): siRNA sense strand
guucauggcuggagaagug

SEQ ID NO: 64762 - RNA, 19 nt, Homo sapiens
  misc_RNA (1)...(19): siRNA sense strand
ucaccgagcucccaucuuc

SEQ ID NO: 64763 - RNA, 19 nt, Homo sapiens
  misc_RNA (1)...(19): siRNA sense strand
gggucccgcucaucaagua

SEQ ID NO: 64764 - RNA, 19 nt, Homo sapiens
  misc_RNA (1)...(19): siRNA sense strand
gcgcuucgaugcggacuau

SEQ ID NO: 64765 - RNA, 19 nt, Homo sapiens
  misc_RNA (1)...(19): siRNA sense strand
gcacccacccuguucucua

SEQ ID NO: 64766 - RNA, 19 nt, Homo sapiens
  misc_RNA (1)...(19): siRNA sense strand
ccacauggccaaaguguac

SEQ ID NO: 64767 - RNA, 19 nt, Homo sapiens
  misc_RNA (1)...(19): siRNA sense strand
agaagaacccuaugaccaa

SEQ ID NO: 64768 - RNA, 19 nt, Homo sapiens
  misc_RNA (1)...(19): siRNA sense strand
augaagacaugaaggagaa

SEQ ID NO: 64769 - RNA, 19 nt, Homo sapiens
  misc_RNA (1)...(19): siRNA sense strand
ccucagggauggagacucu

SEQ ID NO: 64770 - RNA, 19 nt, Homo sapiens
  misc_RNA (1)...(19): siRNA sense strand
gaaguucauggcuggagaa

SEQ ID NO: 64771 - RNA, 19 nt, Homo sapiens
  misc_RNA (1)...(19): siRNA sense strand
agaacccuaugaccaacua

SEQ ID NO: 64772 - RNA, 19 nt, Homo sapiens
  misc_RNA (1)...(19): siRNA sense strand
gaaggucaagguggucuau

SEQ ID NO: 64773 - RNA, 19 nt, Homo sapiens
  misc_RNA (1)...(19): siRNA sense strand
acacgucguucaaggagau

SEQ ID NO: 64774 - RNA, 19 nt, Homo sapiens
  misc_RNA (1)...(19): siRNA sense strand
ggucaagguggucuauguu

SEQ ID NO: 64775 - RNA, 19 nt, Homo sapiens
  misc_RNA (1)...(19): siRNA sense strand
cuggagaaguguccuaugg

SEQ ID NO: 64776 - RNA, 19 nt, Homo sapiens
  misc_RNA (1)...(19): siRNA sense strand
gcggugaccuggaaaagug

SEQ ID NO: 64777 - RNA, 19 nt, Homo sapiens
  misc_RNA (1)...(19): siRNA sense strand
gcagaaugagcgcuucgau

SEQ ID NO: 64778 - RNA, 19 nt, Homo sapiens
  misc_RNA (1)...(19): siRNA sense strand
ucaccguggcgcagaauga

SEQ ID NO: 64779 - RNA, 19 nt, Homo sapiens
  misc_RNA (1)...(19): siRNA sense strand
gagcugauccaggacaucu

SEQ ID NO: 64780 - RNA, 19 nt, Homo sapiens
  misc_RNA (1)...(19): siRNA sense strand
uucucuaccucuucuauga

SEQ ID NO: 64781 - RNA, 19 nt, Homo sapiens
  misc_RNA (1)...(19): siRNA sense strand
cgggugcccuuccuugagu

SEQ ID NO: 64782 - RNA, 19 nt, Homo sapiens
  misc_RNA (1)...(19): siRNA sense strand
aaaagauccuggaguuugu

SEQ ID NO: 64783 - RNA, 19 nt, Homo sapiens
  misc_RNA (1)...(19): siRNA sense strand
gcucaucaaguacuuugca

SEQ ID NO: 64784 - RNA, 19 nt, Homo sapiens
  misc_RNA (1)...(19): siRNA sense strand
cacccacccuguucucuac

SEQ ID NO: 64785 - RNA, 19 nt, Homo sapiens
  misc_RNA (1)...(19): siRNA sense strand
gucaagguggucuauguug

SEQ ID NO: 64786 - RNA, 19 nt, Homo sapiens
  misc_RNA (1)...(19): siRNA sense strand
gaugaagaagaacccuaug

SEQ ID NO: 64787 - RNA, 19 nt, Homo sapiens
  misc_RNA (1)...(19): siRNA sense strand
ucuaugaagacaugaagga

SEQ ID NO: 64788 - RNA, 19 nt, Homo sapiens
  misc_RNA (1)...(19): siRNA sense strand
ucaaggagaugaagaagaa

SEQ ID NO: 64789 - RNA, 19 nt, Homo sapiens
  misc_RNA (1)...(19): siRNA sense strand
guucauggcuggagaagug

SEQ ID NO: 64790 - RNA, 19 nt, Homo sapiens
  misc_RNA (1)...(19): siRNA sense strand
ucaccgagcucccaucuuc

SEQ ID NO: 64791 - RNA, 19 nt, Homo sapiens
  misc_RNA (1)...(19): siRNA sense strand
gggucccgcucaucaagua

SEQ ID NO: 64792 - RNA, 19 nt, Homo sapiens
  misc_RNA (1)...(19): siRNA sense strand
gcgcuucgaugcggacuau

SEQ ID NO: 64793 - RNA, 19 nt, Homo sapiens
  misc_RNA (1)...(19): siRNA sense strand
gcacccacccuguucucua

SEQ ID NO: 64794 - RNA, 19 nt, Homo sapiens
  misc_RNA (1)...(19): siRNA sense strand
ccacauggccaaaguguac

SEQ ID NO: 64795 - RNA, 19 nt, Homo sapiens
  misc_RNA (1)...(19): siRNA sense strand
agaagaacccuaugaccaa

SEQ ID NO: 64796 - RNA, 19 nt, Homo sapiens
  misc_RNA (1)...(19): siRNA sense strand
augaagacaugaaggagaa

SEQ ID NO: 64797 - RNA, 19 nt, Homo sapiens
  misc_RNA (1)...(19): siRNA sense strand
ccucagggauggagacucu

SEQ ID NO: 64798 - RNA, 19 nt, Homo sapiens
  misc_RNA (1)...(19): siRNA sense strand
gaaguucauggcuggagaa

SEQ ID NO: 64799 - RNA, 19 nt, Homo sapiens
  misc_RNA (1)...(19): siRNA sense strand
agaacccuaugaccaacua

SEQ ID NO: 64800 - RNA, 19 nt, Homo sapiens
  misc_RNA (1)...(19): siRNA sense strand
gaaggucaagguggucuau

SEQ ID NO: 64801 - RNA, 19 nt, Homo sapiens
  misc_RNA (1)...(19): siRNA sense strand
acacgucguucaaggagau

SEQ ID NO: 64802 - RNA, 19 nt, Homo sapiens
  misc_RNA (1)...(19): siRNA sense strand
ggucaagguggucuauguu

SEQ ID NO: 64803 - RNA, 19 nt, Homo sapiens
  misc_RNA (1)...(19): siRNA sense strand
cuggagaaguguccuaugg

SEQ ID NO: 64804 - RNA, 19 nt, Homo sapiens
  misc_RNA (1)...(19): siRNA sense strand
gcggugaccuggaaaagug

SEQ ID NO: 64805 - RNA, 19 nt, Homo sapiens
  misc_RNA (1)...(19): siRNA sense strand
gcagaaugagcgcuucgau

SEQ ID NO: 64806 - RNA, 19 nt, Homo sapiens
  misc_RNA (1)...(19): siRNA sense strand
ucaccguggcgcagaauga

SEQ ID NO: 64807 - RNA, 19 nt, Homo sapiens
  misc_RNA (1)...(19): siRNA sense strand
gagcugauccaggacaucu

SEQ ID NO: 64808 - RNA, 19 nt, Homo sapiens
  misc_RNA (1)...(19): siRNA sense strand
uucucuaccucuucuauga

SEQ ID NO: 64809 - RNA, 19 nt, Homo sapiens
  misc_RNA (1)...(19): siRNA sense strand
cgggugcccuuccuugagu

SEQ ID NO: 64810 - RNA, 19 nt, Homo sapiens
  misc_RNA (1)...(19): siRNA sense strand
aaaagauccuggaguuugu

SEQ ID NO: 64811 - RNA, 19 nt, Homo sapiens
  misc_RNA (1)...(19): siRNA sense strand
gcucaucaaguacuuugca

SEQ ID NO: 64812 - RNA, 19 nt, Homo sapiens
  misc_RNA (1)...(19): siRNA sense strand
cacccacccuguucucuac

SEQ ID NO: 64813 - RNA, 19 nt, Homo sapiens
  misc_RNA (1)...(19): siRNA sense strand
gucaagguggucuauguug

SEQ ID NO: 64814 - RNA, 19 nt, Homo sapiens
  misc_RNA (1)...(19): siRNA sense strand
gaugaagaagaacccuaug

SEQ ID NO: 64815 - RNA, 19 nt, Homo sapiens
  misc_RNA (1)...(19): siRNA sense strand
ucuaugaagacaugaagga

SEQ ID NO: 64816 - RNA, 19 nt, Homo sapiens
  misc_RNA (1)...(19): siRNA sense strand
cgucggauguuuauuguua

SEQ ID NO: 64817 - RNA, 19 nt, Homo sapiens
  misc_RNA (1)...(19): siRNA sense strand
gaaccgagacgaacugaau

SEQ ID NO: 64818 - RNA, 19 nt, Homo sapiens
  misc_RNA (1)...(19): siRNA sense strand
gaaaugguacuccacauca

SEQ ID NO: 64819 - RNA, 19 nt, Homo sapiens
  misc_RNA (1)...(19): siRNA sense strand
gcaauuacaccacagaugu

SEQ ID NO: 64820 - RNA, 19 nt, Homo sapiens
  misc_RNA (1)...(19): siRNA sense strand
gcaagcguuucuucgaauu

SEQ ID NO: 64821 - RNA, 19 nt, Homo sapiens
  misc_RNA (1)...(19): siRNA sense strand
guugagaacuucaguaacu

SEQ ID NO: 64822 - RNA, 19 nt, Homo sapiens
  misc_RNA (1)...(19): siRNA sense strand
ggauguacccgccagcuuu

SEQ ID NO: 64823 - RNA, 19 nt, Homo sapiens
  misc_RNA (1)...(19): siRNA sense strand
gagaacuucaguaacuuua

SEQ ID NO: 64824 - RNA, 19 nt, Homo sapiens
  misc_RNA (1)...(19): siRNA sense strand
gaaguuaggccucagacau

SEQ ID NO: 64825 - RNA, 19 nt, Homo sapiens
  misc_RNA (1)...(19): siRNA sense strand
gaagagaggcggagagacu

SEQ ID NO: 64826 - RNA, 19 nt, Homo sapiens
  misc_RNA (1)...(19): siRNA sense strand
cagaggugcuacugcaauu

SEQ ID NO: 64827 - RNA, 19 nt, Homo sapiens
  misc_RNA (1)...(19): siRNA sense strand
ggucgucggauguuuauug

SEQ ID NO: 64828 - RNA, 19 nt, Homo sapiens
  misc_RNA (1)...(19): siRNA sense strand
caagccuucuccuuucauu

SEQ ID NO: 64829 - RNA, 19 nt, Homo sapiens
  misc_RNA (1)...(19): siRNA sense strand
gaggaucccuuugugaaac

SEQ ID NO: 64830 - RNA, 19 nt, Homo sapiens
  misc_RNA (1)...(19): siRNA sense strand
gcagcuagaauccaaaucu

SEQ ID NO: 64831 - RNA, 19 nt, Homo sapiens
  misc_RNA (1)...(19): siRNA sense strand
caauaagaaccgagacgaa

SEQ ID NO: 64832 - RNA, 19 nt, Homo sapiens
  misc_RNA (1)...(19): siRNA sense strand
ucaccaacacacuuucuuu

SEQ ID NO: 64833 - RNA, 19 nt, Homo sapiens
  misc_RNA (1)...(19): siRNA sense strand
gagagacuuccuccaaaug

SEQ ID NO: 64834 - RNA, 19 nt, Homo sapiens
  misc_RNA (1)...(19): siRNA sense strand
cuuaucauuuccauccaua

SEQ ID NO: 64835 - RNA, 19 nt, Homo sapiens
  misc_RNA (1)...(19): siRNA sense strand
ugagagagguagacguuuu

SEQ ID NO: 64836 - RNA, 19 nt, Homo sapiens
  misc_RNA (1)...(19): siRNA sense strand
ccaaauggagcucagaaag

SEQ ID NO: 64837 - RNA, 19 nt, Homo sapiens
  misc_RNA (1)...(19): siRNA sense strand
aauggugucuauaucaaga

SEQ ID NO: 64838 - RNA, 19 nt, Homo sapiens
  misc_RNA (1)...(19): siRNA sense strand
cugcaagcguuucuucgaa

SEQ ID NO: 64839 - RNA, 19 nt, Homo sapiens
  misc_RNA (1)...(19): siRNA sense strand
ucucuuggcccuccugaaa

SEQ ID NO: 64840 - RNA, 19 nt, Homo sapiens
  misc_RNA (1)...(19): siRNA sense strand
uaacuuuaccaacagaaug

SEQ ID NO: 64841 - RNA, 19 nt, Homo sapiens
  misc_RNA (1)...(19): siRNA sense strand
cagcuagaauccaaaucug

SEQ ID NO: 64842 - RNA, 19 nt, Homo sapiens
  misc_RNA (1)...(19): siRNA sense strand
gcccugaugucugcuuuca

SEQ ID NO: 64843 - RNA, 19 nt, Homo sapiens
  misc_RNA (1)...(19): siRNA sense strand
guacuccacaucagcauuc

SEQ ID NO: 64844 - RNA, 19 nt, Homo sapiens
  misc_RNA (1)...(19): siRNA sense strand
gagacuuccuccaaauggu

SEQ ID NO: 64845 - RNA, 19 nt, Homo sapiens
  misc_RNA (1)...(19): siRNA sense strand
ugagaacuucaguaacuuu

SEQ ID NO: 64846 - RNA, 19 nt, Homo sapiens
  misc_RNA (1)...(19): siRNA sense strand
cacaucagcauucucaaga

SEQ ID NO: 64847 - RNA, 19 nt, Homo sapiens
  misc_RNA (1)...(19): siRNA sense strand
uauccugguuuuacucuua

SEQ ID NO: 64848 - RNA, 19 nt, Homo sapiens
  misc_RNA (1)...(19): siRNA sense strand
ggagaaguuaggccucaga

SEQ ID NO: 64849 - RNA, 19 nt, Homo sapiens
  misc_RNA (1)...(19): siRNA sense strand
gguguugguugagaacuuc

SEQ ID NO: 64850 - RNA, 19 nt, Homo sapiens
  misc_RNA (1)...(19): siRNA sense strand
ugaggaucccuuugugaaa

SEQ ID NO: 64851 - RNA, 19 nt, Homo sapiens
  misc_RNA (1)...(19): siRNA sense strand
cagccaagccugcgaccuu

SEQ ID NO: 64852 - RNA, 19 nt, Homo sapiens
  misc_RNA (1)...(19): siRNA sense strand
ucccaagccuucuccuuuc

SEQ ID NO: 64853 - RNA, 19 nt, Homo sapiens
  misc_RNA (1)...(19): siRNA sense strand
caucagcauucucaagacu

SEQ ID NO: 64854 - RNA, 19 nt, Homo sapiens
  misc_RNA (1)...(19): siRNA sense strand
caaauggagcucagaaagc

SEQ ID NO: 64855 - RNA, 19 nt, Homo sapiens
  misc_RNA (1)...(19): siRNA sense strand
gcccggauuuugcccaaua

SEQ ID NO: 64856 - RNA, 19 nt, Homo sapiens
  misc_RNA (1)...(19): siRNA sense strand
cugaaaagcugaacgagau

SEQ ID NO: 64857 - RNA, 19 nt, Homo sapiens
  misc_RNA (1)...(19): siRNA sense strand
aagcagguguugguugaga

SEQ ID NO: 64858 - RNA, 19 nt, Homo sapiens
  misc_RNA (1)...(19): siRNA sense strand
gaucaagcagguguugguu

SEQ ID NO: 64859 - RNA, 19 nt, Homo sapiens
  misc_RNA (1)...(19): siRNA sense strand
cauuggaaacuugacauuu

SEQ ID NO: 64860 - RNA, 19 nt, Homo sapiens
  misc_RNA (1)...(19): siRNA sense strand
cagaauggcgucggguuug

SEQ ID NO: 64861 - RNA, 19 nt, Homo sapiens
  misc_RNA (1)...(19): siRNA sense strand
ucuuggcccuccugaaaug

SEQ ID NO: 64862 - RNA, 19 nt, Homo sapiens
  misc_RNA (1)...(19): siRNA sense strand
gccaaauggagcucagaaa

SEQ ID NO: 64863 - RNA, 19 nt, Homo sapiens
  misc_RNA (1)...(19): siRNA sense strand
gguccuggaugcccgacau

SEQ ID NO: 64864 - RNA, 19 nt, Homo sapiens
  misc_RNA (1)...(19): siRNA sense strand
ggccuuugacuguggauga

SEQ ID NO: 64865 - RNA, 19 nt, Homo sapiens
  misc_RNA (1)...(19): siRNA sense strand
agccagacaugaucaagca

SEQ ID NO: 64866 - RNA, 19 nt, Homo sapiens
  misc_RNA (1)...(19): siRNA sense strand
ccaugggcgugcaagacuu

SEQ ID NO: 64867 - RNA, 19 nt, Homo sapiens
  misc_RNA (1)...(19): siRNA sense strand
ggauuuugcccaauaagaa

SEQ ID NO: 64868 - RNA, 19 nt, Homo sapiens
  misc_RNA (1)...(19): siRNA sense strand
ugaaaugguacuccacauc

SEQ ID NO: 64869 - RNA, 19 nt, Homo sapiens
  misc_RNA (1)...(19): siRNA sense strand
acagaauggcgucggguuu

SEQ ID NO: 64870 - RNA, 19 nt, Homo sapiens
  misc_RNA (1)...(19): siRNA sense strand
ccacaucagcauucucaag

SEQ ID NO: 64871 - RNA, 19 nt, Homo sapiens
  misc_RNA (1)...(19): siRNA sense strand
gcucagaaagcuguaugga

SEQ ID NO: 64872 - RNA, 19 nt, Homo sapiens
  misc_RNA (1)...(19): siRNA sense strand
cccgccagcuuucagauuc

SEQ ID NO: 64873 - RNA, 19 nt, Homo sapiens
  misc_RNA (1)...(19): siRNA sense strand
gauguacccgccagcuuuc

SEQ ID NO: 64874 - RNA, 19 nt, Homo sapiens
  misc_RNA (1)...(19): siRNA sense strand
ccagaggugcuacugcaau

SEQ ID NO: 64875 - RNA, 19 nt, Homo sapiens
  misc_RNA (1)...(19): siRNA sense strand
ugguugagaacuucaguaa

SEQ ID NO: 64876 - RNA, 19 nt, Homo sapiens
  misc_RNA (1)...(19): siRNA sense strand
gauggaagccuugggguuu

SEQ ID NO: 64877 - RNA, 19 nt, Homo sapiens
  misc_RNA (1)...(19): siRNA sense strand
gugcccugaugucugcuuu

SEQ ID NO: 64878 - RNA, 19 nt, Homo sapiens
  misc_RNA (1)...(19): siRNA sense strand
auccaaaucugcccuaggu

SEQ ID NO: 64879 - RNA, 19 nt, Homo sapiens
  misc_RNA (1)...(19): siRNA sense strand
ucugagagagguagacguu

SEQ ID NO: 64880 - RNA, 19 nt, Homo sapiens
  misc_RNA (1)...(19): siRNA sense strand
cugaggaucccuuugugaa

SEQ ID NO: 64881 - RNA, 19 nt, Homo sapiens
  misc_RNA (1)...(19): siRNA sense strand
gaggugcuacugcaauuac

SEQ ID NO: 64882 - RNA, 19 nt, Homo sapiens
  misc_RNA (1)...(19): siRNA sense strand
gucgucggauguuuauugu

SEQ ID NO: 64883 - RNA, 19 nt, Homo sapiens
  misc_RNA (1)...(19): siRNA sense strand
cccaagccuucuccuuuca

SEQ ID NO: 64884 - RNA, 19 nt, Homo sapiens
  misc_RNA (1)...(19): siRNA sense strand
aacccugacugccaagaga

SEQ ID NO: 64885 - RNA, 19 nt, Homo sapiens
  misc_RNA (1)...(19): siRNA sense strand
aaucaucaccaacacacuu

SEQ ID NO: 64886 - RNA, 19 nt, Homo sapiens
  misc_RNA (1)...(19): siRNA sense strand
uaagaaccgagacgaacug

SEQ ID NO: 64887 - RNA, 19 nt, Homo sapiens
  misc_RNA (1)...(19): siRNA sense strand
ugcaagcguuucuucgaau

SEQ ID NO: 64888 - RNA, 19 nt, Homo sapiens
  misc_RNA (1)...(19): siRNA sense strand
caugggcgugcaagacuuu

SEQ ID NO: 64889 - RNA, 19 nt, Homo sapiens
  misc_RNA (1)...(19): siRNA sense strand
aaucugcccuagguccaaa

SEQ ID NO: 64890 - RNA, 19 nt, Homo sapiens
  misc_RNA (1)...(19): siRNA sense strand
cgucggauguuuauuguua

SEQ ID NO: 64891 - RNA, 19 nt, Homo sapiens
  misc_RNA (1)...(19): siRNA sense strand
gaaccgagacgaacugaau

SEQ ID NO: 64892 - RNA, 19 nt, Homo sapiens
  misc_RNA (1)...(19): siRNA sense strand
gaaaugguacuccacauca

SEQ ID NO: 64893 - RNA, 19 nt, Homo sapiens
  misc_RNA (1)...(19): siRNA sense strand
gcaauuacaccacagaugu

SEQ ID NO: 64894 - RNA, 19 nt, Homo sapiens
  misc_RNA (1)...(19): siRNA sense strand
gcaagcguuucuucgaauu

SEQ ID NO: 64895 - RNA, 19 nt, Homo sapiens
  misc_RNA (1)...(19): siRNA sense strand
guugagaacuucaguaacu

SEQ ID NO: 64896 - RNA, 19 nt, Homo sapiens
  misc_RNA (1)...(19): siRNA sense strand
ggauguacccgccagcuuu

SEQ ID NO: 64897 - RNA, 19 nt, Homo sapiens
  misc_RNA (1)...(19): siRNA sense strand
gagaacuucaguaacuuua

SEQ ID NO: 64898 - RNA, 19 nt, Homo sapiens
  misc_RNA (1)...(19): siRNA sense strand
gaaguuaggccucagacau

SEQ ID NO: 64899 - RNA, 19 nt, Homo sapiens
  misc_RNA (1)...(19): siRNA sense strand
gaagagaggcggagagacu

SEQ ID NO: 64900 - RNA, 19 nt, Homo sapiens
  misc_RNA (1)...(19): siRNA sense strand
cagaggugcuacugcaauu

SEQ ID NO: 64901 - RNA, 19 nt, Homo sapiens
  misc_RNA (1)...(19): siRNA sense strand
ggucgucggauguuuauug

SEQ ID NO: 64902 - RNA, 19 nt, Homo sapiens
  misc_RNA (1)...(19): siRNA sense strand
caagccuucuccuuucauu

SEQ ID NO: 64903 - RNA, 19 nt, Homo sapiens
  misc_RNA (1)...(19): siRNA sense strand
gaggaucccuuugugaaac

SEQ ID NO: 64904 - RNA, 19 nt, Homo sapiens
  misc_RNA (1)...(19): siRNA sense strand
caauaagaaccgagacgaa

SEQ ID NO: 64905 - RNA, 19 nt, Homo sapiens
  misc_RNA (1)...(19): siRNA sense strand
ucaccaacacacuuucuuu

SEQ ID NO: 64906 - RNA, 19 nt, Homo sapiens
  misc_RNA (1)...(19): siRNA sense strand
gagagacuuccuccaaaug

SEQ ID NO: 64907 - RNA, 19 nt, Homo sapiens
  misc_RNA (1)...(19): siRNA sense strand
cuuaucauuuccauccaua

SEQ ID NO: 64908 - RNA, 19 nt, Homo sapiens
  misc_RNA (1)...(19): siRNA sense strand
ugagagagguagacguuuu

SEQ ID NO: 64909 - RNA, 19 nt, Homo sapiens
  misc_RNA (1)...(19): siRNA sense strand
ucucuuggcccuccugaaa

SEQ ID NO: 64910 - RNA, 19 nt, Homo sapiens
  misc_RNA (1)...(19): siRNA sense strand
cugcaagcguuucuucgaa

SEQ ID NO: 64911 - RNA, 19 nt, Homo sapiens
  misc_RNA (1)...(19): siRNA sense strand
uaacuuuaccaacagaaug

SEQ ID NO: 64912 - RNA, 19 nt, Homo sapiens
  misc_RNA (1)...(19): siRNA sense strand
ccaaauggagcucagaaag

SEQ ID NO: 64913 - RNA, 19 nt, Homo sapiens
  misc_RNA (1)...(19): siRNA sense strand
gcccugaugucugcuuuca

SEQ ID NO: 64914 - RNA, 19 nt, Homo sapiens
  misc_RNA (1)...(19): siRNA sense strand
guacuccacaucagcauuc

SEQ ID NO: 64915 - RNA, 19 nt, Homo sapiens
  misc_RNA (1)...(19): siRNA sense strand
gagacuuccuccaaauggu

SEQ ID NO: 64916 - RNA, 19 nt, Homo sapiens
  misc_RNA (1)...(19): siRNA sense strand
ugagaacuucaguaacuuu

SEQ ID NO: 64917 - RNA, 19 nt, Homo sapiens
  misc_RNA (1)...(19): siRNA sense strand
cacaucagcauucucaaga

SEQ ID NO: 64918 - RNA, 19 nt, Homo sapiens
  misc_RNA (1)...(19): siRNA sense strand
uauccugguuuuacucuua

SEQ ID NO: 64919 - RNA, 19 nt, Homo sapiens
  misc_RNA (1)...(19): siRNA sense strand
ggagaaguuaggccucaga

SEQ ID NO: 64920 - RNA, 19 nt, Homo sapiens
  misc_RNA (1)...(19): siRNA sense strand
gguguugguugagaacuuc

SEQ ID NO: 64921 - RNA, 19 nt, Homo sapiens
  misc_RNA (1)...(19): siRNA sense strand
ugaggaucccuuugugaaa

SEQ ID NO: 64922 - RNA, 19 nt, Homo sapiens
  misc_RNA (1)...(19): siRNA sense strand
cagccaagccugcgaccuu

SEQ ID NO: 64923 - RNA, 19 nt, Homo sapiens
  misc_RNA (1)...(19): siRNA sense strand
ucccaagccuucuccuuuc

SEQ ID NO: 64924 - RNA, 19 nt, Homo sapiens
  misc_RNA (1)...(19): siRNA sense strand
caucagcauucucaagacu

SEQ ID NO: 64925 - RNA, 19 nt, Homo sapiens
  misc_RNA (1)...(19): siRNA sense strand
caaauggagcucagaaagc

SEQ ID NO: 64926 - RNA, 19 nt, Homo sapiens
  misc_RNA (1)...(19): siRNA sense strand
gcccggauuuugcccaaua

SEQ ID NO: 64927 - RNA, 19 nt, Homo sapiens
  misc_RNA (1)...(19): siRNA sense strand
cugaaaagcugaacgagau

SEQ ID NO: 64928 - RNA, 19 nt, Homo sapiens
  misc_RNA (1)...(19): siRNA sense strand
aagcagguguugguugaga

SEQ ID NO: 64929 - RNA, 19 nt, Homo sapiens
  misc_RNA (1)...(19): siRNA sense strand
gaucaagcagguguugguu

SEQ ID NO: 64930 - RNA, 19 nt, Homo sapiens
  misc_RNA (1)...(19): siRNA sense strand
cauuggaaacuugacauuu

SEQ ID NO: 64931 - RNA, 19 nt, Homo sapiens
  misc_RNA (1)...(19): siRNA sense strand
ucuuggcccuccugaaaug

SEQ ID NO: 64932 - RNA, 19 nt, Homo sapiens
  misc_RNA (1)...(19): siRNA sense strand
cagaauggcgucggguuug

SEQ ID NO: 64933 - RNA, 19 nt, Homo sapiens
  misc_RNA (1)...(19): siRNA sense strand
gccaaauggagcucagaaa

SEQ ID NO: 64934 - RNA, 19 nt, Homo sapiens
  misc_RNA (1)...(19): siRNA sense strand
gguccuggaugcccgacau

SEQ ID NO: 64935 - RNA, 19 nt, Homo sapiens
  misc_RNA (1)...(19): siRNA sense strand
ggccuuugacuguggauga

SEQ ID NO: 64936 - RNA, 19 nt, Homo sapiens
  misc_RNA (1)...(19): siRNA sense strand
agccagacaugaucaagca

SEQ ID NO: 64937 - RNA, 19 nt, Homo sapiens
  misc_RNA (1)...(19): siRNA sense strand
ccaugggcgugcaagacuu

SEQ ID NO: 64938 - RNA, 19 nt, Homo sapiens
  misc_RNA (1)...(19): siRNA sense strand
ggauuuugcccaauaagaa

SEQ ID NO: 64939 - RNA, 19 nt, Homo sapiens
  misc_RNA (1)...(19): siRNA sense strand
ugaaaugguacuccacauc

SEQ ID NO: 64940 - RNA, 19 nt, Homo sapiens
  misc_RNA (1)...(19): siRNA sense strand
ccacaucagcauucucaag

SEQ ID NO: 64941 - RNA, 19 nt, Homo sapiens
  misc_RNA (1)...(19): siRNA sense strand
acagaauggcgucggguuu

SEQ ID NO: 64942 - RNA, 19 nt, Homo sapiens
  misc_RNA (1)...(19): siRNA sense strand
gcucagaaagcuguaugga

SEQ ID NO: 64943 - RNA, 19 nt, Homo sapiens
  misc_RNA (1)...(19): siRNA sense strand
cccgccagcuuucagauuc

SEQ ID NO: 64944 - RNA, 19 nt, Homo sapiens
  misc_RNA (1)...(19): siRNA sense strand
gauguacccgccagcuuuc

SEQ ID NO: 64945 - RNA, 19 nt, Homo sapiens
  misc_RNA (1)...(19): siRNA sense strand
ccagaggugcuacugcaau

SEQ ID NO: 64946 - RNA, 19 nt, Homo sapiens
  misc_RNA (1)...(19): siRNA sense strand
ugguugagaacuucaguaa

SEQ ID NO: 64947 - RNA, 19 nt, Homo sapiens
  misc_RNA (1)...(19): siRNA sense strand
gauggaagccuugggguuu

SEQ ID NO: 64948 - RNA, 19 nt, Homo sapiens
  misc_RNA (1)...(19): siRNA sense strand
gugcccugaugucugcuuu

SEQ ID NO: 64949 - RNA, 19 nt, Homo sapiens
  misc_RNA (1)...(19): siRNA sense strand
ucugagagagguagacguu

SEQ ID NO: 64950 - RNA, 19 nt, Homo sapiens
  misc_RNA (1)...(19): siRNA sense strand
cugaggaucccuuugugaa

SEQ ID NO: 64951 - RNA, 19 nt, Homo sapiens
  misc_RNA (1)...(19): siRNA sense strand
gaggugcuacugcaauuac

SEQ ID NO: 64952 - RNA, 19 nt, Homo sapiens
  misc_RNA (1)...(19): siRNA sense strand
gucgucggauguuuauugu

SEQ ID NO: 64953 - RNA, 19 nt, Homo sapiens
  misc_RNA (1)...(19): siRNA sense strand
aacccugacugccaagaga

SEQ ID NO: 64954 - RNA, 19 nt, Homo sapiens
  misc_RNA (1)...(19): siRNA sense strand
aaucaucaccaacacacuu

SEQ ID NO: 64955 - RNA, 19 nt, Homo sapiens
  misc_RNA (1)...(19): siRNA sense strand
uaagaaccgagacgaacug

SEQ ID NO: 64956 - RNA, 19 nt, Homo sapiens
  misc_RNA (1)...(19): siRNA sense strand
ugcaagcguuucuucgaau

SEQ ID NO: 64957 - RNA, 19 nt, Homo sapiens
  misc_RNA (1)...(19): siRNA sense strand
cccaagccuucuccuuuca

SEQ ID NO: 64958 - RNA, 19 nt, Homo sapiens
  misc_RNA (1)...(19): siRNA sense strand
caugggcgugcaagacuuu

SEQ ID NO: 64959 - RNA, 19 nt, Homo sapiens
  misc_RNA (1)...(19): siRNA sense strand
gagcuugccuugauuauac

SEQ ID NO: 64960 - RNA, 19 nt, Homo sapiens
  misc_RNA (1)...(19): siRNA sense strand
gaaggcaguuuaaagaaca

SEQ ID NO: 64961 - RNA, 19 nt, Homo sapiens
  misc_RNA (1)...(19): siRNA sense strand
ggucuuaccugcccugaug

SEQ ID NO: 64962 - RNA, 19 nt, Homo sapiens
  misc_RNA (1)...(19): siRNA sense strand
gaugaaggcaguuuaaaga

SEQ ID NO: 64963 - RNA, 19 nt, Homo sapiens
  misc_RNA (1)...(19): siRNA sense strand
gagguucgcuggagcaaau

SEQ ID NO: 64964 - RNA, 19 nt, Homo sapiens
  misc_RNA (1)...(19): siRNA sense strand
ccaaggagcugguaguuac

SEQ ID NO: 64965 - RNA, 19 nt, Homo sapiens
  misc_RNA (1)...(19): siRNA sense strand
gugaagaagagucuaauaa

SEQ ID NO: 64966 - RNA, 19 nt, Homo sapiens
  misc_RNA (1)...(19): siRNA sense strand
gcuaaaugguucugucuuc

SEQ ID NO: 64967 - RNA, 19 nt, Homo sapiens
  misc_RNA (1)...(19): siRNA sense strand
ucauauaucuccgucaauu

SEQ ID NO: 64968 - RNA, 19 nt, Homo sapiens
  misc_RNA (1)...(19): siRNA sense strand
gcagaugaaggcaguuuaa

SEQ ID NO: 64969 - RNA, 19 nt, Homo sapiens
  misc_RNA (1)...(19): siRNA sense strand
ggagagcuugccuugauua

SEQ ID NO: 64970 - RNA, 19 nt, Homo sapiens
  misc_RNA (1)...(19): siRNA sense strand
gcucugaccugugugaaga

SEQ ID NO: 64971 - RNA, 19 nt, Homo sapiens
  misc_RNA (1)...(19): siRNA sense strand
ucagguaacuucaacaucu

SEQ ID NO: 64972 - RNA, 19 nt, Homo sapiens
  misc_RNA (1)...(19): siRNA sense strand
auacaaugauccagucaaa

SEQ ID NO: 64973 - RNA, 19 nt, Homo sapiens
  misc_RNA (1)...(19): siRNA sense strand
ugacuggaauugccaacaa

SEQ ID NO: 64974 - RNA, 19 nt, Homo sapiens
  misc_RNA (1)...(19): siRNA sense strand
cgggagagcuugccuugau

SEQ ID NO: 64975 - RNA, 19 nt, Homo sapiens
  misc_RNA (1)...(19): siRNA sense strand
caaugucacugugcuaaau

SEQ ID NO: 64976 - RNA, 19 nt, Homo sapiens
  misc_RNA (1)...(19): siRNA sense strand
aaaccucuguugaauacaa

SEQ ID NO: 64977 - RNA, 19 nt, Homo sapiens
  misc_RNA (1)...(19): siRNA sense strand
ccaacaaacucugaauaca

SEQ ID NO: 64978 - RNA, 19 nt, Homo sapiens
  misc_RNA (1)...(19): siRNA sense strand
agaagagucuaauaaaugg

SEQ ID NO: 64979 - RNA, 19 nt, Homo sapiens
  misc_RNA (1)...(19): siRNA sense strand
aaccagcgcugucaauguu

SEQ ID NO: 64980 - RNA, 19 nt, Homo sapiens
  misc_RNA (1)...(19): siRNA sense strand
gaaccagcgcugucaaugu

SEQ ID NO: 64981 - RNA, 19 nt, Homo sapiens
  misc_RNA (1)...(19): siRNA sense strand
gcacuccccugacuaacua

SEQ ID NO: 64982 - RNA, 19 nt, Homo sapiens
  misc_RNA (1)...(19): siRNA sense strand
caaggagcauucagcaauc

SEQ ID NO: 64983 - RNA, 19 nt, Homo sapiens
  misc_RNA (1)...(19): siRNA sense strand
gggagagcuugccuugauu

SEQ ID NO: 64984 - RNA, 19 nt, Homo sapiens
  misc_RNA (1)...(19): siRNA sense strand
aaucauauaucuccgucaa

SEQ ID NO: 64985 - RNA, 19 nt, Homo sapiens
  misc_RNA (1)...(19): siRNA sense strand
auacagugcucacggaaau

SEQ ID NO: 64986 - RNA, 19 nt, Homo sapiens
  misc_RNA (1)...(19): siRNA sense strand
gcagaucaaagcagaugaa

SEQ ID NO: 64987 - RNA, 19 nt, Homo sapiens
  misc_RNA (1)...(19): siRNA sense strand
gggccuaugugccaacaau

SEQ ID NO: 64988 - RNA, 19 nt, Homo sapiens
  misc_RNA (1)...(19): siRNA sense strand
ggcccuauaucaccuguau

SEQ ID NO: 64989 - RNA, 19 nt, Homo sapiens
  misc_RNA (1)...(19): siRNA sense strand
gaaaagauucugucugaga

SEQ ID NO: 64990 - RNA, 19 nt, Homo sapiens
  misc_RNA (1)...(19): siRNA sense strand
cauauaucuccgucaauua

SEQ ID NO: 64991 - RNA, 19 nt, Homo sapiens
  misc_RNA (1)...(19): siRNA sense strand
gacuggaauugccaacaaa

SEQ ID NO: 64992 - RNA, 19 nt, Homo sapiens
  misc_RNA (1)...(19): siRNA sense strand
ggagaaagcccagaaaaug

SEQ ID NO: 64993 - RNA, 19 nt, Homo sapiens
  misc_RNA (1)...(19): siRNA sense strand
ucaaggagcauucagcaau

SEQ ID NO: 64994 - RNA, 19 nt, Homo sapiens
  misc_RNA (1)...(19): siRNA sense strand
ccucaaacuuguuggaauc

SEQ ID NO: 64995 - RNA, 19 nt, Homo sapiens
  misc_RNA (1)...(19): siRNA sense strand
caacaaacucugaauacag

SEQ ID NO: 64996 - RNA, 19 nt, Homo sapiens
  misc_RNA (1)...(19): siRNA sense strand
caauuacucugugagaauc

SEQ ID NO: 64997 - RNA, 19 nt, Homo sapiens
  misc_RNA (1)...(19): siRNA sense strand
uaaaaccucuguugaauac

SEQ ID NO: 64998 - RNA, 19 nt, Homo sapiens
  misc_RNA (1)...(19): siRNA sense strand
aacaaacucugaauacagu

SEQ ID NO: 64999 - RNA, 19 nt, Homo sapiens
  misc_RNA (1)...(19): siRNA sense strand
caaaagaugauccaacaaa

SEQ ID NO: 65000 - RNA, 19 nt, Homo sapiens
  misc_RNA (1)...(19): siRNA sense strand
cuacucaaccgccgaaguu

SEQ ID NO: 65001 - RNA, 19 nt, Homo sapiens
  misc_RNA (1)...(19): siRNA sense strand
ucgacaagcuagaaaauaa

SEQ ID NO: 65002 - RNA, 19 nt, Homo sapiens
  misc_RNA (1)...(19): siRNA sense strand
gccaaggagcugguaguua

SEQ ID NO: 65003 - RNA, 19 nt, Homo sapiens
  misc_RNA (1)...(19): siRNA sense strand
ugaaggcaguuuaaagaac

SEQ ID NO: 65004 - RNA, 19 nt, Homo sapiens
  misc_RNA (1)...(19): siRNA sense strand
gagaaagcccagaaaauga

SEQ ID NO: 65005 - RNA, 19 nt, Homo sapiens
  misc_RNA (1)...(19): siRNA sense strand
ugugacaccuccugacuca

SEQ ID NO: 65006 - RNA, 19 nt, Homo sapiens
  misc_RNA (1)...(19): siRNA sense strand
cugaugagccuauaacugu

SEQ ID NO: 65007 - RNA, 19 nt, Homo sapiens
  misc_RNA (1)...(19): siRNA sense strand
uaccugcccugaugggaaa

SEQ ID NO: 65008 - RNA, 19 nt, Homo sapiens
  misc_RNA (1)...(19): siRNA sense strand
gguagccaguucucaguag

SEQ ID NO: 65009 - RNA, 19 nt, Homo sapiens
  misc_RNA (1)...(19): siRNA sense strand
gccuaugugccaacaauaa

SEQ ID NO: 65010 - RNA, 19 nt, Homo sapiens
  misc_RNA (1)...(19): siRNA sense strand
aaaagcagauugucagaug

SEQ ID NO: 65011 - RNA, 19 nt, Homo sapiens
  misc_RNA (1)...(19): siRNA sense strand
ucaauuacucugugagaau

SEQ ID NO: 65012 - RNA, 19 nt, Homo sapiens
  misc_RNA (1)...(19): siRNA sense strand
caugcaggcccucuuugua

SEQ ID NO: 65013 - RNA, 19 nt, Homo sapiens
  misc_RNA (1)...(19): siRNA sense strand
guagccaguucucaguaga

SEQ ID NO: 65014 - RNA, 19 nt, Homo sapiens
  misc_RNA (1)...(19): siRNA sense strand
uaaaugggcagaucaaagc

SEQ ID NO: 65015 - RNA, 19 nt, Homo sapiens
  misc_RNA (1)...(19): siRNA sense strand
gaugagccuauaacuguga

SEQ ID NO: 65016 - RNA, 19 nt, Homo sapiens
  misc_RNA (1)...(19): siRNA sense strand
ggaauugccaacaaacucu

SEQ ID NO: 65017 - RNA, 19 nt, Homo sapiens
  misc_RNA (1)...(19): siRNA sense strand
ggaaccagcgcugucaaug

SEQ ID NO: 65018 - RNA, 19 nt, Homo sapiens
  misc_RNA (1)...(19): siRNA sense strand
agaccuucuuggauauuaa

SEQ ID NO: 65019 - RNA, 19 nt, Homo sapiens
  misc_RNA (1)...(19): siRNA sense strand
gagcauucagcaauccaaa

SEQ ID NO: 65020 - RNA, 19 nt, Homo sapiens
  misc_RNA (1)...(19): siRNA sense strand
ucuaauaaaugggcagauc

SEQ ID NO: 65021 - RNA, 19 nt, Homo sapiens
  misc_RNA (1)...(19): siRNA sense strand
cagcucagccuggacguuu

SEQ ID NO: 65022 - RNA, 19 nt, Homo sapiens
  misc_RNA (1)...(19): siRNA sense strand
caaugauccagucaaacua

SEQ ID NO: 65023 - RNA, 19 nt, Homo sapiens
  misc_RNA (1)...(19): siRNA sense strand
cacggaaauuucucaagga

SEQ ID NO: 65024 - RNA, 19 nt, Homo sapiens
  misc_RNA (1)...(19): siRNA sense strand
gauccaaacccugaugcaa

SEQ ID NO: 65025 - RNA, 19 nt, Homo sapiens
  misc_RNA (1)...(19): siRNA sense strand
uaauaaaugggcagaucaa

SEQ ID NO: 65026 - RNA, 19 nt, Homo sapiens
  misc_RNA (1)...(19): siRNA sense strand
gauggagaaagcccagaaa

SEQ ID NO: 65027 - RNA, 19 nt, Homo sapiens
  misc_RNA (1)...(19): siRNA sense strand
gucaauuacucugugagaa

SEQ ID NO: 65028 - RNA, 19 nt, Homo sapiens
  misc_RNA (1)...(19): siRNA sense strand
aaagaugauccaacaaauc

SEQ ID NO: 65029 - RNA, 19 nt, Homo sapiens
  misc_RNA (1)...(19): siRNA sense strand
gccaacaaacucugaauac

SEQ ID NO: 65030 - RNA, 19 nt, Homo sapiens
  misc_RNA (1)...(19): siRNA sense strand
caacuaugcgagauuugug

SEQ ID NO: 65031 - RNA, 19 nt, Homo sapiens
  misc_RNA (1)...(19): siRNA sense strand
aagcagauugucagaugua

SEQ ID NO: 65032 - RNA, 19 nt, Homo sapiens
  misc_RNA (1)...(19): siRNA sense strand
ucugugagaaucaaugaaa

SEQ ID NO: 65033 - RNA, 19 nt, Homo sapiens
  misc_RNA (1)...(19): siRNA sense strand
ugaccugugugaagaagag

SEQ ID NO: 65034 - RNA, 19 nt, Homo sapiens
  misc_RNA (1)...(19): siRNA sense strand
gaaaacuacauccgccuaa

SEQ ID NO: 65035 - RNA, 19 nt, Homo sapiens
  misc_RNA (1)...(19): siRNA sense strand
cgagauuugugagguaagu

SEQ ID NO: 65036 - RNA, 19 nt, Homo sapiens
  misc_RNA (1)...(19): siRNA sense strand
gauccaacaaaucaaauac

SEQ ID NO: 65037 - RNA, 19 nt, Homo sapiens
  misc_RNA (1)...(19): siRNA sense strand
ccaaugucacugugcuaaa

SEQ ID NO: 65038 - RNA, 19 nt, Homo sapiens
  misc_RNA (1)...(19): siRNA sense strand
ugacaccuccugacucaca

SEQ ID NO: 65039 - RNA, 19 nt, Homo sapiens
  misc_RNA (1)...(19): siRNA sense strand
acaaugauccagucaaacu

SEQ ID NO: 65040 - RNA, 19 nt, Homo sapiens
  misc_RNA (1)...(19): siRNA sense strand
agccaguucucaguagaua

SEQ ID NO: 65041 - RNA, 19 nt, Homo sapiens
  misc_RNA (1)...(19): siRNA sense strand
ccuugugucuguucaaugg

SEQ ID NO: 65042 - RNA, 19 nt, Homo sapiens
  misc_RNA (1)...(19): siRNA sense strand
gaauacaaugauccaguca

SEQ ID NO: 65043 - RNA, 19 nt, Homo sapiens
  misc_RNA (1)...(19): siRNA sense strand
gcuuugggaguaugucgua

SEQ ID NO: 65044 - RNA, 19 nt, Homo sapiens
  misc_RNA (1)...(19): siRNA sense strand
aaagcagauugucagaugu

SEQ ID NO: 65045 - RNA, 19 nt, Homo sapiens
  misc_RNA (1)...(19): siRNA sense strand
gcugaugagccuauaacug

SEQ ID NO: 65046 - RNA, 19 nt, Homo sapiens
  misc_RNA (1)...(19): siRNA sense strand
gcaggcccucuuuguauca

SEQ ID NO: 65047 - RNA, 19 nt, Homo sapiens
  misc_RNA (1)...(19): siRNA sense strand
cagaugaaggcaguuuaaa

SEQ ID NO: 65048 - RNA, 19 nt, Homo sapiens
  misc_RNA (1)...(19): siRNA sense strand
gggcagaucaaagcagaug

SEQ ID NO: 65049 - RNA, 19 nt, Homo sapiens
  misc_RNA (1)...(19): siRNA sense strand
aaauauggaagcacacaau

SEQ ID NO: 65050 - RNA, 19 nt, Homo sapiens
  misc_RNA (1)...(19): siRNA sense strand
ugugaagaagagucuaaua

SEQ ID NO: 65051 - RNA, 19 nt, Homo sapiens
  misc_RNA (1)...(19): siRNA sense strand
ugccaacaauaaugacaga

SEQ ID NO: 65052 - RNA, 19 nt, Homo sapiens
  misc_RNA (1)...(19): siRNA sense strand
uaugugccaacaauaauga

SEQ ID NO: 65053 - RNA, 19 nt, Homo sapiens
  misc_RNA (1)...(19): siRNA sense strand
gcccagaaaaugaaugaua

SEQ ID NO: 65054 - RNA, 19 nt, Homo sapiens
  misc_RNA (1)...(19): siRNA sense strand
gacucacaaucauauaucu

SEQ ID NO: 65055 - RNA, 19 nt, Homo sapiens
  misc_RNA (1)...(19): siRNA sense strand
acagugcucacggaaauuu

SEQ ID NO: 65056 - RNA, 19 nt, Homo sapiens
  misc_RNA (1)...(19): siRNA sense strand
agccaacuaugcgagauuu

SEQ ID NO: 65057 - RNA, 19 nt, Homo sapiens
  misc_RNA (1)...(19): siRNA sense strand
ccagcgcugucaauguugu

SEQ ID NO: 65058 - RNA, 19 nt, Homo sapiens
  misc_RNA (1)...(19): siRNA sense strand
ggccuugugucuguucaau

SEQ ID NO: 65059 - RNA, 19 nt, Homo sapiens
  misc_RNA (1)...(19): siRNA sense strand
ggaaggaccugcuguuuaa

SEQ ID NO: 65060 - RNA, 19 nt, Homo sapiens
  misc_RNA (1)...(19): siRNA sense strand
gauaguggcuuccagauga

SEQ ID NO: 65061 - RNA, 19 nt, Homo sapiens
  misc_RNA (1)...(19): siRNA sense strand
gaagaaagccuccuaccuu

SEQ ID NO: 65062 - RNA, 19 nt, Homo sapiens
  misc_RNA (1)...(19): siRNA sense strand
guucagagaugacacagua

SEQ ID NO: 65063 - RNA, 19 nt, Homo sapiens
  misc_RNA (1)...(19): siRNA sense strand
ggaagccgguagaugaaua

SEQ ID NO: 65064 - RNA, 19 nt, Homo sapiens
  misc_RNA (1)...(19): siRNA sense strand
gagcuuggauggaggguuu

SEQ ID NO: 65065 - RNA, 19 nt, Homo sapiens
  misc_RNA (1)...(19): siRNA sense strand
agaaagcaguggccaauuu

SEQ ID NO: 65066 - RNA, 19 nt, Homo sapiens
  misc_RNA (1)...(19): siRNA sense strand
gcuccacccuuaaccaaua

SEQ ID NO: 65067 - RNA, 19 nt, Homo sapiens
  misc_RNA (1)...(19): siRNA sense strand
ccacagacuuucuauuaug

SEQ ID NO: 65068 - RNA, 19 nt, Homo sapiens
  misc_RNA (1)...(19): siRNA sense strand
gcagaaaacuacaauaaga

SEQ ID NO: 65069 - RNA, 19 nt, Homo sapiens
  misc_RNA (1)...(19): siRNA sense strand
gggaaggaccugcuguuua

SEQ ID NO: 65070 - RNA, 19 nt, Homo sapiens
  misc_RNA (1)...(19): siRNA sense strand
gaucaaccacugcagauuu

SEQ ID NO: 65071 - RNA, 19 nt, Homo sapiens
  misc_RNA (1)...(19): siRNA sense strand
cugcagauuugaugaauuu

SEQ ID NO: 65072 - RNA, 19 nt, Homo sapiens
  misc_RNA (1)...(19): siRNA sense strand
gucaagcacucgacuauau

SEQ ID NO: 65073 - RNA, 19 nt, Homo sapiens
  misc_RNA (1)...(19): siRNA sense strand
gaaaauagaguguguauca

SEQ ID NO: 65074 - RNA, 19 nt, Homo sapiens
  misc_RNA (1)...(19): siRNA sense strand
gggcuaagaaucugaauga

SEQ ID NO: 65075 - RNA, 19 nt, Homo sapiens
  misc_RNA (1)...(19): siRNA sense strand
gagaugacacaguauguuu

SEQ ID NO: 65076 - RNA, 19 nt, Homo sapiens
  misc_RNA (1)...(19): siRNA sense strand
gacagaaacacauaugaaa

SEQ ID NO: 65077 - RNA, 19 nt, Homo sapiens
  misc_RNA (1)...(19): siRNA sense strand
gcuaagaaucugaaugaaa

SEQ ID NO: 65078 - RNA, 19 nt, Homo sapiens
  misc_RNA (1)...(19): siRNA sense strand
gaacauccccauaggcuua

SEQ ID NO: 65079 - RNA, 19 nt, Homo sapiens
  misc_RNA (1)...(19): siRNA sense strand
guaaaccucuugagaaagc

SEQ ID NO: 65080 - RNA, 19 nt, Homo sapiens
  misc_RNA (1)...(19): siRNA sense strand
gcccaggucccuucucaua

SEQ ID NO: 65081 - RNA, 19 nt, Homo sapiens
  misc_RNA (1)...(19): siRNA sense strand
ggauggaugccaagaugua

SEQ ID NO: 65082 - RNA, 19 nt, Homo sapiens
  misc_RNA (1)...(19): siRNA sense strand
gaucaugaauggagaagcu

SEQ ID NO: 65083 - RNA, 19 nt, Homo sapiens
  misc_RNA (1)...(19): siRNA sense strand
ggccaaacuucaugacaga

SEQ ID NO: 65084 - RNA, 19 nt, Homo sapiens
  misc_RNA (1)...(19): siRNA sense strand
ucaggugucugguugagaa

SEQ ID NO: 65085 - RNA, 19 nt, Homo sapiens
  misc_RNA (1)...(19): siRNA sense strand
caggauggaugccaagaug

SEQ ID NO: 65086 - RNA, 19 nt, Homo sapiens
  misc_RNA (1)...(19): siRNA sense strand
ggaugcagguuugguguau

SEQ ID NO: 65087 - RNA, 19 nt, Homo sapiens
  misc_RNA (1)...(19): siRNA sense strand
ggccugcucuacaauaaga

SEQ ID NO: 65088 - RNA, 19 nt, Homo sapiens
  misc_RNA (1)...(19): siRNA sense strand
gaaagccuccuaccuugau

SEQ ID NO: 65089 - RNA, 19 nt, Homo sapiens
  misc_RNA (1)...(19): siRNA sense strand
cuacauagcgggcaagugu

SEQ ID NO: 65090 - RNA, 19 nt, Homo sapiens
  misc_RNA (1)...(19): siRNA sense strand
acgagaggcucaaguguga

SEQ ID NO: 65091 - RNA, 19 nt, Homo sapiens
  misc_RNA (1)...(19): siRNA sense strand
acguaaaccucuugagaaa

SEQ ID NO: 65092 - RNA, 19 nt, Homo sapiens
  misc_RNA (1)...(19): siRNA sense strand
caacagcagcaccuauuug

SEQ ID NO: 65093 - RNA, 19 nt, Homo sapiens
  misc_RNA (1)...(19): siRNA sense strand
ggagauguggccuuuguga

SEQ ID NO: 65094 - RNA, 19 nt, Homo sapiens
  misc_RNA (1)...(19): siRNA sense strand
cagcagagaccaccgaaga

SEQ ID NO: 65095 - RNA, 19 nt, Homo sapiens
  misc_RNA (1)...(19): siRNA sense strand
ccacguaaaccucuugaga

SEQ ID NO: 65096 - RNA, 19 nt, Homo sapiens
  misc_RNA (1)...(19): siRNA sense strand
ggacucugcccacggguuu

SEQ ID NO: 65097 - RNA, 19 nt, Homo sapiens
  misc_RNA (1)...(19): siRNA sense strand
gcacucgacuauauuugag

SEQ ID NO: 65098 - RNA, 19 nt, Homo sapiens
  misc_RNA (1)...(19): siRNA sense strand
gacacuggaugcagguuug

SEQ ID NO: 65099 - RNA, 19 nt, Homo sapiens
  misc_RNA (1)...(19): siRNA sense strand
gcacuuuccguagaccuua

SEQ ID NO: 65100 - RNA, 19 nt, Homo sapiens
  misc_RNA (1)...(19): siRNA sense strand
ugacagaaacacauaugaa

SEQ ID NO: 65101 - RNA, 19 nt, Homo sapiens
  misc_RNA (1)...(19): siRNA sense strand
cagcagcaccuauuuggaa

SEQ ID NO: 65102 - RNA, 19 nt, Homo sapiens
  misc_RNA (1)...(19): siRNA sense strand
cuauucagcucuccucaug

SEQ ID NO: 65103 - RNA, 19 nt, Homo sapiens
  misc_RNA (1)...(19): siRNA sense strand
agauguaccugggcuauga

SEQ ID NO: 65104 - RNA, 19 nt, Homo sapiens
  misc_RNA (1)...(19): siRNA sense strand
uagcaguggugaagaaauc

SEQ ID NO: 65105 - RNA, 19 nt, Homo sapiens
  misc_RNA (1)...(19): siRNA sense strand
caagcacucgacuauauuu

SEQ ID NO: 65106 - RNA, 19 nt, Homo sapiens
  misc_RNA (1)...(19): siRNA sense strand
gacuauauuugagaacuug

SEQ ID NO: 65107 - RNA, 19 nt, Homo sapiens
  misc_RNA (1)...(19): siRNA sense strand
gccgguagaugaauacaag

SEQ ID NO: 65108 - RNA, 19 nt, Homo sapiens
  misc_RNA (1)...(19): siRNA sense strand
cgacuauauuugagaacuu

SEQ ID NO: 65109 - RNA, 19 nt, Homo sapiens
  misc_RNA (1)...(19): siRNA sense strand
ugacugcucgggcaacuuu

SEQ ID NO: 65110 - RNA, 19 nt, Homo sapiens
  misc_RNA (1)...(19): siRNA sense strand
cacaagauauuacgucaac

SEQ ID NO: 65111 - RNA, 19 nt, Homo sapiens
  misc_RNA (1)...(19): siRNA sense strand
ccaugggccugcucuacaa

SEQ ID NO: 65112 - RNA, 19 nt, Homo sapiens
  misc_RNA (1)...(19): siRNA sense strand
guaccugggcuaugaguau

SEQ ID NO: 65113 - RNA, 19 nt, Homo sapiens
  misc_RNA (1)...(19): siRNA sense strand
uggaggguuugucuacaua

SEQ ID NO: 65114 - RNA, 19 nt, Homo sapiens
  misc_RNA (1)...(19): siRNA sense strand
uguaugggcucaggccuaa

SEQ ID NO: 65115 - RNA, 19 nt, Homo sapiens
  misc_RNA (1)...(19): siRNA sense strand
gagcgauaauugugaggau

SEQ ID NO: 65116 - RNA, 19 nt, Homo sapiens
  misc_RNA (1)...(19): siRNA sense strand
cgaagcggaugcugugaca

SEQ ID NO: 65117 - RNA, 19 nt, Homo sapiens
  misc_RNA (1)...(19): siRNA sense strand
ggauguggccuuugucaag

SEQ ID NO: 65118 - RNA, 19 nt, Homo sapiens
  misc_RNA (1)...(19): siRNA sense strand
auccacagacuuucuauua

SEQ ID NO: 65119 - RNA, 19 nt, Homo sapiens
  misc_RNA (1)...(19): siRNA sense strand
aagaggauccacagacuuu

SEQ ID NO: 65120 - RNA, 19 nt, Homo sapiens
  misc_RNA (1)...(19): siRNA sense strand
gaguugcugugccuugaug

SEQ ID NO: 65121 - RNA, 19 nt, Homo sapiens
  misc_RNA (1)...(19): siRNA sense strand
gaugaaugcaagccuguga

SEQ ID NO: 65122 - RNA, 19 nt, Homo sapiens
  misc_RNA (1)...(19): siRNA sense strand
ccaaacuucaugacagaaa

SEQ ID NO: 65123 - RNA, 19 nt, Homo sapiens
  misc_RNA (1)...(19): siRNA sense strand
gaauaugucaaggcuguug

SEQ ID NO: 65124 - RNA, 19 nt, Homo sapiens
  misc_RNA (1)...(19): siRNA sense strand
ggaccaguaugagcugcuu

SEQ ID NO: 65125 - RNA, 19 nt, Homo sapiens
  misc_RNA (1)...(19): siRNA sense strand
ucgccaagaucaugaaugg

SEQ ID NO: 65126 - RNA, 19 nt, Homo sapiens
  misc_RNA (1)...(19): siRNA sense strand
gcaaagacaaaucaaaaga

SEQ ID NO: 65127 - RNA, 19 nt, Homo sapiens
  misc_RNA (1)...(19): siRNA sense strand
ggauaguggcuuccagaug

SEQ ID NO: 65128 - RNA, 19 nt, Homo sapiens
  misc_RNA (1)...(19): siRNA sense strand
ggaagcaacguaacugacu

SEQ ID NO: 65129 - RNA, 19 nt, Homo sapiens
  misc_RNA (1)...(19): siRNA sense strand
agauguggccuuugugaaa

SEQ ID NO: 65130 - RNA, 19 nt, Homo sapiens
  misc_RNA (1)...(19): siRNA sense strand
caccagaggcaggguauuu

SEQ ID NO: 65131 - RNA, 19 nt, Homo sapiens
  misc_RNA (1)...(19): siRNA sense strand
aauaagagcgauaauugug

SEQ ID NO: 65132 - RNA, 19 nt, Homo sapiens
  misc_RNA (1)...(19): siRNA sense strand
gacuuucuauuaugcuguu

SEQ ID NO: 65133 - RNA, 19 nt, Homo sapiens
  misc_RNA (1)...(19): siRNA sense strand
ugucaaggcuguugguaac

SEQ ID NO: 65134 - RNA, 19 nt, Homo sapiens
  misc_RNA (1)...(19): siRNA sense strand
gcaagaaguccugccauac

SEQ ID NO: 65135 - RNA, 19 nt, Homo sapiens
  misc_RNA (1)...(19): siRNA sense strand
gaccucaccugggacaauc

SEQ ID NO: 65136 - RNA, 19 nt, Homo sapiens
  misc_RNA (1)...(19): siRNA sense strand
gagcaugaggccacuaagu

SEQ ID NO: 65137 - RNA, 19 nt, Homo sapiens
  misc_RNA (1)...(19): siRNA sense strand
ucugggagcuucucaacca

SEQ ID NO: 65138 - RNA, 19 nt, Homo sapiens
  misc_RNA (1)...(19): siRNA sense strand
uaggcuuacuuuacuguga

SEQ ID NO: 65139 - RNA, 19 nt, Homo sapiens
  misc_RNA (1)...(19): siRNA sense strand
ucaacagcagcaccuauuu

SEQ ID NO: 65140 - RNA, 19 nt, Homo sapiens
  misc_RNA (1)...(19): siRNA sense strand
gagaaagcaguggccaauu

SEQ ID NO: 65141 - RNA, 19 nt, Homo sapiens
  misc_RNA (1)...(19): siRNA sense strand
cacguaaaccucuugagaa

SEQ ID NO: 65142 - RNA, 19 nt, Homo sapiens
  misc_RNA (1)...(19): siRNA sense strand
gcagaguucuaugggucaa

SEQ ID NO: 65143 - RNA, 19 nt, Homo sapiens
  misc_RNA (1)...(19): siRNA sense strand
gauguggccuuugugaaac

SEQ ID NO: 65144 - RNA, 19 nt, Homo sapiens
  misc_RNA (1)...(19): siRNA sense strand
gagauguggccuuugugaa

SEQ ID NO: 65145 - RNA, 19 nt, Homo sapiens
  misc_RNA (1)...(19): siRNA sense strand
gauggaggguuugucuaca

SEQ ID NO: 65146 - RNA, 19 nt, Homo sapiens
  misc_RNA (1)...(19): siRNA sense strand
gaagacugcaucgccaaga

SEQ ID NO: 65147 - RNA, 19 nt, Homo sapiens
  misc_RNA (1)...(19): siRNA sense strand
uccacagacuuucuauuau

SEQ ID NO: 65148 - RNA, 19 nt, Homo sapiens
  misc_RNA (1)...(19): siRNA sense strand
ccagcugugucaacugugu

SEQ ID NO: 65149 - RNA, 19 nt, Homo sapiens
  misc_RNA (1)...(19): siRNA sense strand
guggucacacggaaagaua

SEQ ID NO: 65150 - RNA, 19 nt, Homo sapiens
  misc_RNA (1)...(19): siRNA sense strand
ccaacaacaaagagggaua

SEQ ID NO: 65151 - RNA, 19 nt, Homo sapiens
  misc_RNA (1)...(19): siRNA sense strand
ccuccuaccuugauugcau

SEQ ID NO: 65152 - RNA, 19 nt, Homo sapiens
  misc_RNA (1)...(19): siRNA sense strand
ggauggaggguuugucuac

SEQ ID NO: 65153 - RNA, 19 nt, Homo sapiens
  misc_RNA (1)...(19): siRNA sense strand
ucaagcacucgacuauauu

SEQ ID NO: 65154 - RNA, 19 nt, Homo sapiens
  misc_RNA (1)...(19): siRNA sense strand
gagaggcucaagugugaug

SEQ ID NO: 65155 - RNA, 19 nt, Homo sapiens
  misc_RNA (1)...(19): siRNA sense strand
caaacuucaugacagaaac

SEQ ID NO: 65156 - RNA, 19 nt, Homo sapiens
  misc_RNA (1)...(19): siRNA sense strand
gucaacagcagcaccuauu

SEQ ID NO: 65157 - RNA, 19 nt, Homo sapiens
  misc_RNA (1)...(19): siRNA sense strand
ccacugcagauuugaugaa

SEQ ID NO: 65158 - RNA, 19 nt, Homo sapiens
  misc_RNA (1)...(19): siRNA sense strand
ugggccugcucuacaauaa

SEQ ID NO: 65159 - RNA, 19 nt, Homo sapiens
  misc_RNA (1)...(19): siRNA sense strand
cgacuucgcucuuccaguu

SEQ ID NO: 65160 - RNA, 19 nt, Homo sapiens
  misc_RNA (1)...(19): siRNA sense strand
caagccagcuccacaaugg

SEQ ID NO: 65161 - RNA, 19 nt, Homo sapiens
  misc_RNA (1)...(19): siRNA sense strand
gcacaugccggcucagaga

SEQ ID NO: 65162 - RNA, 19 nt, Homo sapiens
  misc_RNA (1)...(19): siRNA sense strand
caucagacguggugugcaa

SEQ ID NO: 65163 - RNA, 19 nt, Homo sapiens
  misc_RNA (1)...(19): siRNA sense strand
ggugaacugugucaucaug

SEQ ID NO: 65164 - RNA, 19 nt, Homo sapiens
  misc_RNA (1)...(19): siRNA sense strand
agccuugggucuacuaaua

SEQ ID NO: 65165 - RNA, 19 nt, Homo sapiens
  misc_RNA (1)...(19): siRNA sense strand
gcaaaagucuucuguacca

SEQ ID NO: 65166 - RNA, 19 nt, Homo sapiens
  misc_RNA (1)...(19): siRNA sense strand
ucacuugccugccgauaag

SEQ ID NO: 65167 - RNA, 19 nt, Homo sapiens
  misc_RNA (1)...(19): siRNA sense strand
uaauaggaguggugaacug

SEQ ID NO: 65168 - RNA, 19 nt, Homo sapiens
  misc_RNA (1)...(19): siRNA sense strand
agaauacuaugaccagaca

SEQ ID NO: 65169 - RNA, 19 nt, Homo sapiens
  misc_RNA (1)...(19): siRNA sense strand
guggugaacugugucauca

SEQ ID NO: 65170 - RNA, 19 nt, Homo sapiens
  misc_RNA (1)...(19): siRNA sense strand
caucaugacccaggugaaa

SEQ ID NO: 65171 - RNA, 19 nt, Homo sapiens
  misc_RNA (1)...(19): siRNA sense strand
caugccggcucagagaaua

SEQ ID NO: 65172 - RNA, 19 nt, Homo sapiens
  misc_RNA (1)...(19): siRNA sense strand
accaggaacugaaacauca

SEQ ID NO: 65173 - RNA, 19 nt, Homo sapiens
  misc_RNA (1)...(19): siRNA sense strand
gaccagacagcucagaugu

SEQ ID NO: 65174 - RNA, 19 nt, Homo sapiens
  misc_RNA (1)...(19): siRNA sense strand
gcaccgggagcucagauuc

SEQ ID NO: 65175 - RNA, 19 nt, Homo sapiens
  misc_RNA (1)...(19): siRNA sense strand
gaccaggaacugaaacauc

SEQ ID NO: 65176 - RNA, 19 nt, Homo sapiens
  misc_RNA (1)...(19): siRNA sense strand
uaggaguggugaacugugu

SEQ ID NO: 65177 - RNA, 19 nt, Homo sapiens
  misc_RNA (1)...(19): siRNA sense strand
ggccagaccaggaacugaa

SEQ ID NO: 65178 - RNA, 19 nt, Homo sapiens
  misc_RNA (1)...(19): siRNA sense strand
ccagugcguuggacagaag

SEQ ID NO: 65179 - RNA, 19 nt, Homo sapiens
  misc_RNA (1)...(19): siRNA sense strand
aagccaaggugccucacuu

SEQ ID NO: 65180 - RNA, 19 nt, Homo sapiens
  misc_RNA (1)...(19): siRNA sense strand
gcucagagaauacuaugac

SEQ ID NO: 65181 - RNA, 19 nt, Homo sapiens
  misc_RNA (1)...(19): siRNA sense strand
gccuugggucuacuaauaa

SEQ ID NO: 65182 - RNA, 19 nt, Homo sapiens
  misc_RNA (1)...(19): siRNA sense strand
agggagcacuggcgacuuc

SEQ ID NO: 65183 - RNA, 19 nt, Homo sapiens
  misc_RNA (1)...(19): siRNA sense strand
ccuugugccugcagagaga

SEQ ID NO: 65184 - RNA, 19 nt, Homo sapiens
  misc_RNA (1)...(19): siRNA sense strand
gccagugcguuggacagaa

SEQ ID NO: 65185 - RNA, 19 nt, Homo sapiens
  misc_RNA (1)...(19): siRNA sense strand
acaaugggagacacagauu

SEQ ID NO: 65186 - RNA, 19 nt, Homo sapiens
  misc_RNA (1)...(19): siRNA sense strand
gcucugaccagguggaaac

SEQ ID NO: 65187 - RNA, 19 nt, Homo sapiens
  misc_RNA (1)...(19): siRNA sense strand
caacacacgcagccaacuc

SEQ ID NO: 65188 - RNA, 19 nt, Homo sapiens
  misc_RNA (1)...(19): siRNA sense strand
cugaccagguggaaacuca

SEQ ID NO: 65189 - RNA, 19 nt, Homo sapiens
  misc_RNA (1)...(19): siRNA sense strand
ccacaaugggagacacaga

SEQ ID NO: 65190 - RNA, 19 nt, Homo sapiens
  misc_RNA (1)...(19): siRNA sense strand
ccuugggucuacuaauaau

SEQ ID NO: 65191 - RNA, 19 nt, Homo sapiens
  misc_RNA (1)...(19): siRNA sense strand
ggaguggugaacuguguca

SEQ ID NO: 65192 - RNA, 19 nt, Homo sapiens
  misc_RNA (1)...(19): siRNA sense strand
ccaagccagcuccacaaug

SEQ ID NO: 65193 - RNA, 19 nt, Homo sapiens
  misc_RNA (1)...(19): siRNA sense strand
gccagaccaggaacugaaa

SEQ ID NO: 65194 - RNA, 19 nt, Homo sapiens
  misc_RNA (1)...(19): siRNA sense strand
gaacaaagcugguguauca

SEQ ID NO: 65195 - RNA, 19 nt, Homo sapiens
  misc_RNA (1)...(19): siRNA sense strand
ggaaagaaauugccuguaa

SEQ ID NO: 65196 - RNA, 19 nt, Homo sapiens
  misc_RNA (1)...(19): siRNA sense strand
gaacaagcauugaugauga

SEQ ID NO: 65197 - RNA, 19 nt, Homo sapiens
  misc_RNA (1)...(19): siRNA sense strand
cuacaaagcuuaacaauca

SEQ ID NO: 65198 - RNA, 19 nt, Homo sapiens
  misc_RNA (1)...(19): siRNA sense strand
gaacuuuccuucuacagua

SEQ ID NO: 65199 - RNA, 19 nt, Homo sapiens
  misc_RNA (1)...(19): siRNA sense strand
gcacguggauuauguggua

SEQ ID NO: 65200 - RNA, 19 nt, Homo sapiens
  misc_RNA (1)...(19): siRNA sense strand
ggacacagguauauaaaga

SEQ ID NO: 65201 - RNA, 19 nt, Homo sapiens
  misc_RNA (1)...(19): siRNA sense strand
gaaaggcauuccaguagua

SEQ ID NO: 65202 - RNA, 19 nt, Homo sapiens
  misc_RNA (1)...(19): siRNA sense strand
gaaauugccuguaaaugga

SEQ ID NO: 65203 - RNA, 19 nt, Homo sapiens
  misc_RNA (1)...(19): siRNA sense strand
gaaagaaauugccuguaaa

SEQ ID NO: 65204 - RNA, 19 nt, Homo sapiens
  misc_RNA (1)...(19): siRNA sense strand
gcaguuauguagaucuuua

SEQ ID NO: 65205 - RNA, 19 nt, Homo sapiens
  misc_RNA (1)...(19): siRNA sense strand
gaaguugucuguugagaga

SEQ ID NO: 65206 - RNA, 19 nt, Homo sapiens
  misc_RNA (1)...(19): siRNA sense strand
gaauuuggcucagaacuuu

SEQ ID NO: 65207 - RNA, 19 nt, Homo sapiens
  misc_RNA (1)...(19): siRNA sense strand
ccagaucuguccaaauuua

SEQ ID NO: 65208 - RNA, 19 nt, Homo sapiens
  misc_RNA (1)...(19): siRNA sense strand
gauccugaaucuaacauua

SEQ ID NO: 65209 - RNA, 19 nt, Homo sapiens
  misc_RNA (1)...(19): siRNA sense strand
gaaagcaucuggcucugaa

SEQ ID NO: 65210 - RNA, 19 nt, Homo sapiens
  misc_RNA (1)...(19): siRNA sense strand
gagaauaggucaaagaaag

SEQ ID NO: 65211 - RNA, 19 nt, Homo sapiens
  misc_RNA (1)...(19): siRNA sense strand
gaaaaugacugaagagaaa

SEQ ID NO: 65212 - RNA, 19 nt, Homo sapiens
  misc_RNA (1)...(19): siRNA sense strand
caagaugguucucacauaa

SEQ ID NO: 65213 - RNA, 19 nt, Homo sapiens
  misc_RNA (1)...(19): siRNA sense strand
agaaacagcuugcaaagaa

SEQ ID NO: 65214 - RNA, 19 nt, Homo sapiens
  misc_RNA (1)...(19): siRNA sense strand
ggaaaggcaucgcaucuug

SEQ ID NO: 65215 - RNA, 19 nt, Homo sapiens
  misc_RNA (1)...(19): siRNA sense strand
gauaagaacaugacuugua

SEQ ID NO: 65216 - RNA, 19 nt, Homo sapiens
  misc_RNA (1)...(19): siRNA sense strand
guacaaaguuuacaguaga

SEQ ID NO: 65217 - RNA, 19 nt, Homo sapiens
  misc_RNA (1)...(19): siRNA sense strand
caaagaaguugucuguuga

SEQ ID NO: 65218 - RNA, 19 nt, Homo sapiens
  misc_RNA (1)...(19): siRNA sense strand
ucaaagaaguugucuguug

SEQ ID NO: 65219 - RNA, 19 nt, Homo sapiens
  misc_RNA (1)...(19): siRNA sense strand
cagauaaaguuccaaguaa

SEQ ID NO: 65220 - RNA, 19 nt, Homo sapiens
  misc_RNA (1)...(19): siRNA sense strand
uaagaaguguucaucagua

SEQ ID NO: 65221 - RNA, 19 nt, Homo sapiens
  misc_RNA (1)...(19): siRNA sense strand
gaagaagauugaugacaga

SEQ ID NO: 65222 - RNA, 19 nt, Homo sapiens
  misc_RNA (1)...(19): siRNA sense strand
agacucagcugaauaagaa

SEQ ID NO: 65223 - RNA, 19 nt, Homo sapiens
  misc_RNA (1)...(19): siRNA sense strand
gaaacuagcacaagcagaa

SEQ ID NO: 65224 - RNA, 19 nt, Homo sapiens
  misc_RNA (1)...(19): siRNA sense strand
aagcagacauggaugaaua

SEQ ID NO: 65225 - RNA, 19 nt, Homo sapiens
  misc_RNA (1)...(19): siRNA sense strand
gaugauaguuccuccgauu

SEQ ID NO: 65226 - RNA, 19 nt, Homo sapiens
  misc_RNA (1)...(19): siRNA sense strand
gaagauuacacaugcauaa

SEQ ID NO: 65227 - RNA, 19 nt, Homo sapiens
  misc_RNA (1)...(19): siRNA sense strand
cgaaagaccuaaauacaca

SEQ ID NO: 65228 - RNA, 19 nt, Homo sapiens
  misc_RNA (1)...(19): siRNA sense strand
gaacuuggacacagguaua

SEQ ID NO: 65229 - RNA, 19 nt, Homo sapiens
  misc_RNA (1)...(19): siRNA sense strand
uaaagcaucucccauaaca

SEQ ID NO: 65230 - RNA, 19 nt, Homo sapiens
  misc_RNA (1)...(19): siRNA sense strand
gaaagugauuuggaagaaa

SEQ ID NO: 65231 - RNA, 19 nt, Homo sapiens
  misc_RNA (1)...(19): siRNA sense strand
ccagagagguuaugaaucu

SEQ ID NO: 65232 - RNA, 19 nt, Homo sapiens
  misc_RNA (1)...(19): siRNA sense strand
ugggaugucugaagaaaua

SEQ ID NO: 65233 - RNA, 19 nt, Homo sapiens
  misc_RNA (1)...(19): siRNA sense strand
aaccagaucuguccaaauu

SEQ ID NO: 65234 - RNA, 19 nt, Homo sapiens
  misc_RNA (1)...(19): siRNA sense strand
cagcuaaauuugacaguaa

SEQ ID NO: 65235 - RNA, 19 nt, Homo sapiens
  misc_RNA (1)...(19): siRNA sense strand
guuaaagcaucucccauaa

SEQ ID NO: 65236 - RNA, 19 nt, Homo sapiens
  misc_RNA (1)...(19): siRNA sense strand
gcaauuaaagguaaaguug

SEQ ID NO: 65237 - RNA, 19 nt, Homo sapiens
  misc_RNA (1)...(19): siRNA sense strand
ggacagaaacacaguagaa

SEQ ID NO: 65238 - RNA, 19 nt, Homo sapiens
  misc_RNA (1)...(19): siRNA sense strand
ugaacugggugaaauuuaa

SEQ ID NO: 65239 - RNA, 19 nt, Homo sapiens
  misc_RNA (1)...(19): siRNA sense strand
ucaagaugguucucacaua

SEQ ID NO: 65240 - RNA, 19 nt, Homo sapiens
  misc_RNA (1)...(19): siRNA sense strand
ggaaaaccgucuucagaua

SEQ ID NO: 65241 - RNA, 19 nt, Homo sapiens
  misc_RNA (1)...(19): siRNA sense strand
uuacagagcuuccaguuag

SEQ ID NO: 65242 - RNA, 19 nt, Homo sapiens
  misc_RNA (1)...(19): siRNA sense strand
uaaaaggccugcuuauuaa

SEQ ID NO: 65243 - RNA, 19 nt, Homo sapiens
  misc_RNA (1)...(19): siRNA sense strand
gaagaagacacaacuugaa

SEQ ID NO: 65244 - RNA, 19 nt, Homo sapiens
  misc_RNA (1)...(19): siRNA sense strand
guaagaagaagauugauga

SEQ ID NO: 65245 - RNA, 19 nt, Homo sapiens
  misc_RNA (1)...(19): siRNA sense strand
guucauuacuccuauugua

SEQ ID NO: 65246 - RNA, 19 nt, Homo sapiens
  misc_RNA (1)...(19): siRNA sense strand
gaagauguaggaaugaauu

SEQ ID NO: 65247 - RNA, 19 nt, Homo sapiens
  misc_RNA (1)...(19): siRNA sense strand
gaaacagacagauaaaguu

SEQ ID NO: 65248 - RNA, 19 nt, Homo sapiens
  misc_RNA (1)...(19): siRNA sense strand
gaagaugauucagcuaaau

SEQ ID NO: 65249 - RNA, 19 nt, Homo sapiens
  misc_RNA (1)...(19): siRNA sense strand
gaagaugaauuuguuccuu

SEQ ID NO: 65250 - RNA, 19 nt, Homo sapiens
  misc_RNA (1)...(19): siRNA sense strand
gaaccuaugcuaaauggaa

SEQ ID NO: 65251 - RNA, 19 nt, Homo sapiens
  misc_RNA (1)...(19): siRNA sense strand
gaugaugacuauugugaau

SEQ ID NO: 65252 - RNA, 19 nt, Homo sapiens
  misc_RNA (1)...(19): siRNA sense strand
gggagacucugccaaauca

SEQ ID NO: 65253 - RNA, 19 nt, Homo sapiens
  misc_RNA (1)...(19): siRNA sense strand
gcacugaccugggugaaca

SEQ ID NO: 65254 - RNA, 19 nt, Homo sapiens
  misc_RNA (1)...(19): siRNA sense strand
uggaugggcuuguaaacua

SEQ ID NO: 65255 - RNA, 19 nt, Homo sapiens
  misc_RNA (1)...(19): siRNA sense strand
gaucauaugggaugucuga

SEQ ID NO: 65256 - RNA, 19 nt, Homo sapiens
  misc_RNA (1)...(19): siRNA sense strand
gucagaaacugccaacaaa

SEQ ID NO: 65257 - RNA, 19 nt, Homo sapiens
  misc_RNA (1)...(19): siRNA sense strand
gaaacagcuugcaaagaau

SEQ ID NO: 65258 - RNA, 19 nt, Homo sapiens
  misc_RNA (1)...(19): siRNA sense strand
gaagaggcauugacuccau

SEQ ID NO: 65259 - RNA, 19 nt, Homo sapiens
  misc_RNA (1)...(19): siRNA sense strand
gaagauugaugacagaaaa

SEQ ID NO: 65260 - RNA, 19 nt, Homo sapiens
  misc_RNA (1)...(19): siRNA sense strand
uaacauccaguaacuauga

SEQ ID NO: 65261 - RNA, 19 nt, Homo sapiens
  misc_RNA (1)...(19): siRNA sense strand
caaagaaagugaagaaacg

SEQ ID NO: 65262 - RNA, 19 nt, Homo sapiens
  misc_RNA (1)...(19): siRNA sense strand
gaagaacugauuaaacaga

SEQ ID NO: 65263 - RNA, 19 nt, Homo sapiens
  misc_RNA (1)...(19): siRNA sense strand
uauaaaggauuggguacua

SEQ ID NO: 65264 - RNA, 19 nt, Homo sapiens
  misc_RNA (1)...(19): siRNA sense strand
cagaaagccuggaaaauaa

SEQ ID NO: 65265 - RNA, 19 nt, Homo sapiens
  misc_RNA (1)...(19): siRNA sense strand
gggucaaggucauguuuaa

SEQ ID NO: 65266 - RNA, 19 nt, Homo sapiens
  misc_RNA (1)...(19): siRNA sense strand
agaagaagaugauguugau

SEQ ID NO: 65267 - RNA, 19 nt, Homo sapiens
  misc_RNA (1)...(19): siRNA sense strand
cuaaagaagcaaaggaaua

SEQ ID NO: 65268 - RNA, 19 nt, Homo sapiens
  misc_RNA (1)...(19): siRNA sense strand
aaucaaagguauucccaaa

SEQ ID NO: 65269 - RNA, 19 nt, Homo sapiens
  misc_RNA (1)...(19): siRNA sense strand
uaaagcagccucuaauugu

SEQ ID NO: 65270 - RNA, 19 nt, Homo sapiens
  misc_RNA (1)...(19): siRNA sense strand
aaugaaagaugggauguuu

SEQ ID NO: 65271 - RNA, 19 nt, Homo sapiens
  misc_RNA (1)...(19): siRNA sense strand
gaaaguuauucaugagcuu

SEQ ID NO: 65272 - RNA, 19 nt, Homo sapiens
  misc_RNA (1)...(19): siRNA sense strand
gcugcaagcccucguuaua

SEQ ID NO: 65273 - RNA, 19 nt, Homo sapiens
  misc_RNA (1)...(19): siRNA sense strand
cauaugggaugucugaaga

SEQ ID NO: 65274 - RNA, 19 nt, Homo sapiens
  misc_RNA (1)...(19): siRNA sense strand
gguguaugaugaagaugua

SEQ ID NO: 65275 - RNA, 19 nt, Homo sapiens
  misc_RNA (1)...(19): siRNA sense strand
agacaaugcccucaccuua

SEQ ID NO: 65276 - RNA, 19 nt, Homo sapiens
  misc_RNA (1)...(19): siRNA sense strand
ggauuuagcggcauuuguu

SEQ ID NO: 65277 - RNA, 19 nt, Homo sapiens
  misc_RNA (1)...(19): siRNA sense strand
cagaaacacaguagaaauu

SEQ ID NO: 65278 - RNA, 19 nt, Homo sapiens
  misc_RNA (1)...(19): siRNA sense strand
agucaguggugaaauauuu

SEQ ID NO: 65279 - RNA, 19 nt, Homo sapiens
  misc_RNA (1)...(19): siRNA sense strand
guaaacuacccaacuauga

SEQ ID NO: 65280 - RNA, 19 nt, Homo sapiens
  misc_RNA (1)...(19): siRNA sense strand
caaacuggaugaugcuaau

SEQ ID NO: 65281 - RNA, 19 nt, Homo sapiens
  misc_RNA (1)...(19): siRNA sense strand
gacaauaaacagagggaua

SEQ ID NO: 65282 - RNA, 19 nt, Homo sapiens
  misc_RNA (1)...(19): siRNA sense strand
acaccuacaucaucuggua

SEQ ID NO: 65283 - RNA, 19 nt, Homo sapiens
  misc_RNA (1)...(19): siRNA sense strand
gaaacacaguagaaauuac

SEQ ID NO: 65284 - RNA, 19 nt, Homo sapiens
  misc_RNA (1)...(19): siRNA sense strand
gagccugagugguauauuc

SEQ ID NO: 65285 - RNA, 19 nt, Homo sapiens
  misc_RNA (1)...(19): siRNA sense strand
uugcugagaugucggcuua

SEQ ID NO: 65286 - RNA, 19 nt, Homo sapiens
  misc_RNA (1)...(19): siRNA sense strand
ugaugaagauguaggaaug

SEQ ID NO: 65287 - RNA, 19 nt, Homo sapiens
  misc_RNA (1)...(19): siRNA sense strand
gcaagaaaccgaagaagac

SEQ ID NO: 65288 - RNA, 19 nt, Homo sapiens
  misc_RNA (1)...(19): siRNA sense strand
gaagucagaagaugauuca

SEQ ID NO: 65289 - RNA, 19 nt, Homo sapiens
  misc_RNA (1)...(19): siRNA sense strand
uuggaaaucucuucucauu

SEQ ID NO: 65290 - RNA, 19 nt, Homo sapiens
  misc_RNA (1)...(19): siRNA sense strand
caaucaagcccguuucauu

SEQ ID NO: 65291 - RNA, 19 nt, Homo sapiens
  misc_RNA (1)...(19): siRNA sense strand
gaagaugaugcugccauua

SEQ ID NO: 65292 - RNA, 19 nt, Homo sapiens
  misc_RNA (1)...(19): siRNA sense strand
acgggaagcuucucauaaa

SEQ ID NO: 65293 - RNA, 19 nt, Homo sapiens
  misc_RNA (1)...(19): siRNA sense strand
uagaucaaguuguugguaa

SEQ ID NO: 65294 - RNA, 19 nt, Homo sapiens
  misc_RNA (1)...(19): siRNA sense strand
gaacaccaauauuacaguu

SEQ ID NO: 65295 - RNA, 19 nt, Homo sapiens
  misc_RNA (1)...(19): siRNA sense strand
gaauaccgcuggcccuuug

SEQ ID NO: 65296 - RNA, 19 nt, Homo sapiens
  misc_RNA (1)...(19): siRNA sense strand
acucaaaccuuucaacaaa

SEQ ID NO: 65297 - RNA, 19 nt, Homo sapiens
  misc_RNA (1)...(19): siRNA sense strand
gaacaaaccaagaaaugau

SEQ ID NO: 65298 - RNA, 19 nt, Homo sapiens
  misc_RNA (1)...(19): siRNA sense strand
auacgugacuguagaauug

SEQ ID NO: 65299 - RNA, 19 nt, Homo sapiens
  misc_RNA (1)...(19): siRNA sense strand
caucauacgugacuguaga

SEQ ID NO: 65300 - RNA, 19 nt, Homo sapiens
  misc_RNA (1)...(19): siRNA sense strand
ccaagaugauugucccaaa

SEQ ID NO: 65301 - RNA, 19 nt, Homo sapiens
  misc_RNA (1)...(19): siRNA sense strand
uauacuggguuuccuguuu

SEQ ID NO: 65302 - RNA, 19 nt, Homo sapiens
  misc_RNA (1)...(19): siRNA sense strand
gcuauaauccaucgaaaug

SEQ ID NO: 65303 - RNA, 19 nt, Homo sapiens
  misc_RNA (1)...(19): siRNA sense strand
ugucaugauuccuacuuua

SEQ ID NO: 65304 - RNA, 19 nt, Homo sapiens
  misc_RNA (1)...(19): siRNA sense strand
gaagaacaaaccaagaaau

SEQ ID NO: 65305 - RNA, 19 nt, Homo sapiens
  misc_RNA (1)...(19): siRNA sense strand
aaagucaccugcaucauca

SEQ ID NO: 65306 - RNA, 19 nt, Homo sapiens
  misc_RNA (1)...(19): siRNA sense strand
ggugauagucauuuacuuu

SEQ ID NO: 65307 - RNA, 19 nt, Homo sapiens
  misc_RNA (1)...(19): siRNA sense strand
uggaaggcauaauuacaua

SEQ ID NO: 65308 - RNA, 19 nt, Homo sapiens
  misc_RNA (1)...(19): siRNA sense strand
gcuaguguguuucuacuca

SEQ ID NO: 65309 - RNA, 19 nt, Homo sapiens
  misc_RNA (1)...(19): siRNA sense strand
ccuguacgcuaguguguuu

SEQ ID NO: 65310 - RNA, 19 nt, Homo sapiens
  misc_RNA (1)...(19): siRNA sense strand
ucacgugucucagcauuga

SEQ ID NO: 65311 - RNA, 19 nt, Homo sapiens
  misc_RNA (1)...(19): siRNA sense strand
acaccaauauuacaguuug

SEQ ID NO: 65312 - RNA, 19 nt, Homo sapiens
  misc_RNA (1)...(19): siRNA sense strand
cuaaagaaggcuuaugaaa

SEQ ID NO: 65313 - RNA, 19 nt, Homo sapiens
  misc_RNA (1)...(19): siRNA sense strand
cagaagaacaaaccaagaa

SEQ ID NO: 65314 - RNA, 19 nt, Homo sapiens
  misc_RNA (1)...(19): siRNA sense strand
ucucaacucuucuacugaa

SEQ ID NO: 65315 - RNA, 19 nt, Homo sapiens
  misc_RNA (1)...(19): siRNA sense strand
caaagucaccugcaucauc

SEQ ID NO: 65316 - RNA, 19 nt, Homo sapiens
  misc_RNA (1)...(19): siRNA sense strand
uuacugacuuugccacuau

SEQ ID NO: 65317 - RNA, 19 nt, Homo sapiens
  misc_RNA (1)...(19): siRNA sense strand
ucaccugcaucaucauuug

SEQ ID NO: 65318 - RNA, 19 nt, Homo sapiens
  misc_RNA (1)...(19): siRNA sense strand
caagaugauugucccaaag

SEQ ID NO: 65319 - RNA, 19 nt, Homo sapiens
  misc_RNA (1)...(19): siRNA sense strand
cuacacagcuauggaauac

SEQ ID NO: 65320 - RNA, 19 nt, Homo sapiens
  misc_RNA (1)...(19): siRNA sense strand
auaugaagcugaagacugu

SEQ ID NO: 65321 - RNA, 19 nt, Homo sapiens
  misc_RNA (1)...(19): siRNA sense strand
gaaacagcuugguggugau

SEQ ID NO: 65322 - RNA, 19 nt, Homo sapiens
  misc_RNA (1)...(19): siRNA sense strand
aagcuggaaggcauaauua

SEQ ID NO: 65323 - RNA, 19 nt, Homo sapiens
  misc_RNA (1)...(19): siRNA sense strand
cagcuauaauccaucgaaa

SEQ ID NO: 65324 - RNA, 19 nt, Homo sapiens
  misc_RNA (1)...(19): siRNA sense strand
caugauuccuacuuuauac

SEQ ID NO: 65325 - RNA, 19 nt, Homo sapiens
  misc_RNA (1)...(19): siRNA sense strand
gaucgauaccuggcuauug

SEQ ID NO: 65326 - RNA, 19 nt, Homo sapiens
  misc_RNA (1)...(19): siRNA sense strand
ggaauaccgcuggcccuuu

SEQ ID NO: 65327 - RNA, 19 nt, Homo sapiens
  misc_RNA (1)...(19): siRNA sense strand
guaagcucauccaccaaga

SEQ ID NO: 65328 - RNA, 19 nt, Homo sapiens
  misc_RNA (1)...(19): siRNA sense strand
caguuugugcuuuccauua

SEQ ID NO: 65329 - RNA, 19 nt, Homo sapiens
  misc_RNA (1)...(19): siRNA sense strand
gcuggcccuuuggcaauua

SEQ ID NO: 65330 - RNA, 19 nt, Homo sapiens
  misc_RNA (1)...(19): siRNA sense strand
acuaugggcugucuacaca

SEQ ID NO: 65331 - RNA, 19 nt, Homo sapiens
  misc_RNA (1)...(19): siRNA sense strand
aaaucccacucaaaccuuu

SEQ ID NO: 65332 - RNA, 19 nt, Homo sapiens
  misc_RNA (1)...(19): siRNA sense strand
gcaauugugcuuuucuuuu

SEQ ID NO: 65333 - RNA, 19 nt, Homo sapiens
  misc_RNA (1)...(19): siRNA sense strand
aagaacaaaccaagaaaug

SEQ ID NO: 65334 - RNA, 19 nt, Homo sapiens
  misc_RNA (1)...(19): siRNA sense strand
ggaaggcauaauuacauau

SEQ ID NO: 65335 - RNA, 19 nt, Homo sapiens
  misc_RNA (1)...(19): siRNA sense strand
cuacugaagaugguauuaa

SEQ ID NO: 65336 - RNA, 19 nt, Homo sapiens
  misc_RNA (1)...(19): siRNA sense strand
gugggaauauuuggaaaca

SEQ ID NO: 65337 - RNA, 19 nt, Homo sapiens
  misc_RNA (1)...(19): siRNA sense strand
agaacaaaccaagaaauga

SEQ ID NO: 65338 - RNA, 19 nt, Homo sapiens
  misc_RNA (1)...(19): siRNA sense strand
gaaauucagaagaacaaac

SEQ ID NO: 65339 - RNA, 19 nt, Homo sapiens
  misc_RNA (1)...(19): siRNA sense strand
gacuguagaauugcagaua

SEQ ID NO: 65340 - RNA, 19 nt, Homo sapiens
  misc_RNA (1)...(19): siRNA sense strand
uggguuuccuguuuccuuu

SEQ ID NO: 65341 - RNA, 19 nt, Homo sapiens
  misc_RNA (1)...(19): siRNA sense strand
ccacucaaaccuuucaaca

SEQ ID NO: 65342 - RNA, 19 nt, Homo sapiens
  misc_RNA (1)...(19): siRNA sense strand
cuguagaauugcagauauu

SEQ ID NO: 65343 - RNA, 19 nt, Homo sapiens
  misc_RNA (1)...(19): siRNA sense strand
caccaaauauucacuuuuc

SEQ ID NO: 65344 - RNA, 19 nt, Homo sapiens
  misc_RNA (1)...(19): siRNA sense strand
aaagcuggaaggcauaauu

SEQ ID NO: 65345 - RNA, 19 nt, Homo sapiens
  misc_RNA (1)...(19): siRNA sense strand
ugagaacaccaauauuaca

SEQ ID NO: 65346 - RNA, 19 nt, Homo sapiens
  misc_RNA (1)...(19): siRNA sense strand
cagauaauguaagcucauc

SEQ ID NO: 65347 - RNA, 19 nt, Homo sapiens
  misc_RNA (1)...(19): siRNA sense strand
caaaucccacucaaaccuu

SEQ ID NO: 65348 - RNA, 19 nt, Homo sapiens
  misc_RNA (1)...(19): siRNA sense strand
agaagaacaaaccaagaaa

SEQ ID NO: 65349 - RNA, 19 nt, Homo sapiens
  misc_RNA (1)...(19): siRNA sense strand
uauuacaguuugugcuuuc

SEQ ID NO: 65350 - RNA, 19 nt, Homo sapiens
  misc_RNA (1)...(19): siRNA sense strand
gagaacaccaauauuacag

SEQ ID NO: 65351 - RNA, 19 nt, Homo sapiens
  misc_RNA (1)...(19): siRNA sense strand
guacgcuaguguguuucua

SEQ ID NO: 65352 - RNA, 19 nt, Homo sapiens
  misc_RNA (1)...(19): siRNA sense strand
gccaaagucaccugcauca

SEQ ID NO: 65353 - RNA, 19 nt, Homo sapiens
  misc_RNA (1)...(19): siRNA sense strand
ugguggugauagucauuua

SEQ ID NO: 65354 - RNA, 19 nt, Homo sapiens
  misc_RNA (1)...(19): siRNA sense strand
uagaauugcagauauugug

SEQ ID NO: 65355 - RNA, 19 nt, Homo sapiens
  misc_RNA (1)...(19): siRNA sense strand
acuguagaauugcagauau

SEQ ID NO: 65356 - RNA, 19 nt, Homo sapiens
  misc_RNA (1)...(19): siRNA sense strand
gauucaacuaggcaucaua

SEQ ID NO: 65357 - RNA, 19 nt, Homo sapiens
  misc_RNA (1)...(19): siRNA sense strand
gcuggaaggcauaauuaca

SEQ ID NO: 65358 - RNA, 19 nt, Homo sapiens
  misc_RNA (1)...(19): siRNA sense strand
aaacagcuugguggugaua

SEQ ID NO: 65359 - RNA, 19 nt, Homo sapiens
  misc_RNA (1)...(19): siRNA sense strand
auacuggguuuccuguuuc

SEQ ID NO: 65360 - RNA, 19 nt, Homo sapiens
  misc_RNA (1)...(19): siRNA sense strand
ccaaagcuggaaggcauaa

SEQ ID NO: 65361 - RNA, 19 nt, Homo sapiens
  misc_RNA (1)...(19): siRNA sense strand
cccaccaaauauucacuuu

SEQ ID NO: 65362 - RNA, 19 nt, Homo sapiens
  misc_RNA (1)...(19): siRNA sense strand
ucagaagaacaaaccaaga

SEQ ID NO: 65363 - RNA, 19 nt, Homo sapiens
  misc_RNA (1)...(19): siRNA sense strand
cauuaugagucccaaaauu

SEQ ID NO: 65364 - RNA, 19 nt, Homo sapiens
  misc_RNA (1)...(19): siRNA sense strand
aguuugugcuuuccauuau

SEQ ID NO: 65365 - RNA, 19 nt, Homo sapiens
  misc_RNA (1)...(19): siRNA sense strand
cauacgugacuguagaauu

SEQ ID NO: 65366 - RNA, 19 nt, Homo sapiens
  misc_RNA (1)...(19): siRNA sense strand
ucacuuuucuggauguauu

SEQ ID NO: 65367 - RNA, 19 nt, Homo sapiens
  misc_RNA (1)...(19): siRNA sense strand
cccuaaagaaggcuuauga

SEQ ID NO: 65368 - RNA, 19 nt, Homo sapiens
  misc_RNA (1)...(19): siRNA sense strand
uuugugcuuuccauuauga

SEQ ID NO: 65369 - RNA, 19 nt, Homo sapiens
  misc_RNA (1)...(19): siRNA sense strand
ucuacacagcuauggaaua

SEQ ID NO: 65370 - RNA, 19 nt, Homo sapiens
  misc_RNA (1)...(19): siRNA sense strand
gauaauguaagcucaucca

SEQ ID NO: 65371 - RNA, 19 nt, Homo sapiens
  misc_RNA (1)...(19): siRNA sense strand
ccuaaagaaggcuuaugaa

SEQ ID NO: 65372 - RNA, 19 nt, Homo sapiens
  misc_RNA (1)...(19): siRNA sense strand
ccaguuugccagcuauaau

SEQ ID NO: 65373 - RNA, 19 nt, Homo sapiens
  misc_RNA (1)...(19): siRNA sense strand
gucaugauuccuacuuuau

SEQ ID NO: 65374 - RNA, 19 nt, Homo sapiens
  misc_RNA (1)...(19): siRNA sense strand
auucucaacucuucuacug

SEQ ID NO: 65375 - RNA, 19 nt, Homo sapiens
  misc_RNA (1)...(19): siRNA sense strand
guagaauugcagauauugu

SEQ ID NO: 65376 - RNA, 19 nt, Homo sapiens
  misc_RNA (1)...(19): siRNA sense strand
ccagcuauaauccaucgaa

SEQ ID NO: 65377 - RNA, 19 nt, Homo sapiens
  misc_RNA (1)...(19): siRNA sense strand
aucgauaccuggcuauugu

SEQ ID NO: 65378 - RNA, 19 nt, Homo sapiens
  misc_RNA (1)...(19): siRNA sense strand
acucacgugucucagcauu

SEQ ID NO: 65379 - RNA, 19 nt, Homo sapiens
  misc_RNA (1)...(19): siRNA sense strand
aagaaggcuuaugaaauuc

SEQ ID NO: 65380 - RNA, 19 nt, Homo sapiens
  misc_RNA (1)...(19): siRNA sense strand
ucucagcauugaucgauac

SEQ ID NO: 65381 - RNA, 19 nt, Homo sapiens
  misc_RNA (1)...(19): siRNA sense strand
uagccaaagucaccugcau

SEQ ID NO: 65382 - RNA, 19 nt, Homo sapiens
  misc_RNA (1)...(19): siRNA sense strand
gaauauuuggaaacagcuu

SEQ ID NO: 65383 - RNA, 19 nt, Homo sapiens
  misc_RNA (1)...(19): siRNA sense strand
uuuggaaggcccuaaagaa

SEQ ID NO: 65384 - RNA, 19 nt, Homo sapiens
  misc_RNA (1)...(19): siRNA sense strand
gggcugggccugaccaaaa

SEQ ID NO: 65385 - RNA, 19 nt, Homo sapiens
  misc_RNA (1)...(19): siRNA sense strand
gauuccuacuuuauacagu

SEQ ID NO: 65386 - RNA, 19 nt, Homo sapiens
  misc_RNA (1)...(19): siRNA sense strand
uaagcucauccaccaagaa

SEQ ID NO: 65387 - RNA, 19 nt, Homo sapiens
  misc_RNA (1)...(19): siRNA sense strand
ccaaaucccacucaaaccu

SEQ ID NO: 65388 - RNA, 19 nt, Homo sapiens
  misc_RNA (1)...(19): siRNA sense strand
uuuaacaauugccugaauc

SEQ ID NO: 65389 - RNA, 19 nt, Homo sapiens
  misc_RNA (1)...(19): siRNA sense strand
acaaaccaagaaaugauga

SEQ ID NO: 65390 - RNA, 19 nt, Homo sapiens
  misc_RNA (1)...(19): siRNA sense strand
ucugaucauucuuacaagu

SEQ ID NO: 65391 - RNA, 19 nt, Homo sapiens
  misc_RNA (1)...(19): siRNA sense strand
gcgucaguuucaaccugua

SEQ ID NO: 65392 - RNA, 19 nt, Homo sapiens
  misc_RNA (1)...(19): siRNA sense strand
guuugugcuuuccauuaug

SEQ ID NO: 65393 - RNA, 19 nt, Homo sapiens
  misc_RNA (1)...(19): siRNA sense strand
gaacaccaauauuacaguu

SEQ ID NO: 65394 - RNA, 19 nt, Homo sapiens
  misc_RNA (1)...(19): siRNA sense strand
gaauaccgcuggcccuuug

SEQ ID NO: 65395 - RNA, 19 nt, Homo sapiens
  misc_RNA (1)...(19): siRNA sense strand
acucaaaccuuucaacaaa

SEQ ID NO: 65396 - RNA, 19 nt, Homo sapiens
  misc_RNA (1)...(19): siRNA sense strand
gaacaaaccaagaaaugau

SEQ ID NO: 65397 - RNA, 19 nt, Homo sapiens
  misc_RNA (1)...(19): siRNA sense strand
auacgugacuguagaauug

SEQ ID NO: 65398 - RNA, 19 nt, Homo sapiens
  misc_RNA (1)...(19): siRNA sense strand
caucauacgugacuguaga

SEQ ID NO: 65399 - RNA, 19 nt, Homo sapiens
  misc_RNA (1)...(19): siRNA sense strand
ccaagaugauugucccaaa

SEQ ID NO: 65400 - RNA, 19 nt, Homo sapiens
  misc_RNA (1)...(19): siRNA sense strand
uauacuggguuuccuguuu

SEQ ID NO: 65401 - RNA, 19 nt, Homo sapiens
  misc_RNA (1)...(19): siRNA sense strand
gcuauaauccaucgaaaug

SEQ ID NO: 65402 - RNA, 19 nt, Homo sapiens
  misc_RNA (1)...(19): siRNA sense strand
ugucaugauuccuacuuua

SEQ ID NO: 65403 - RNA, 19 nt, Homo sapiens
  misc_RNA (1)...(19): siRNA sense strand
gaagaacaaaccaagaaau

SEQ ID NO: 65404 - RNA, 19 nt, Homo sapiens
  misc_RNA (1)...(19): siRNA sense strand
aaagucaccugcaucauca

SEQ ID NO: 65405 - RNA, 19 nt, Homo sapiens
  misc_RNA (1)...(19): siRNA sense strand
ggugauagucauuuacuuu

SEQ ID NO: 65406 - RNA, 19 nt, Homo sapiens
  misc_RNA (1)...(19): siRNA sense strand
uggaaggcauaauuacaua

SEQ ID NO: 65407 - RNA, 19 nt, Homo sapiens
  misc_RNA (1)...(19): siRNA sense strand
gcuaguguguuucuacuca

SEQ ID NO: 65408 - RNA, 19 nt, Homo sapiens
  misc_RNA (1)...(19): siRNA sense strand
ccuguacgcuaguguguuu

SEQ ID NO: 65409 - RNA, 19 nt, Homo sapiens
  misc_RNA (1)...(19): siRNA sense strand
ucacgugucucagcauuga

SEQ ID NO: 65410 - RNA, 19 nt, Homo sapiens
  misc_RNA (1)...(19): siRNA sense strand
acaccaauauuacaguuug

SEQ ID NO: 65411 - RNA, 19 nt, Homo sapiens
  misc_RNA (1)...(19): siRNA sense strand
cuaaagaaggcuuaugaaa

SEQ ID NO: 65412 - RNA, 19 nt, Homo sapiens
  misc_RNA (1)...(19): siRNA sense strand
cagaagaacaaaccaagaa

SEQ ID NO: 65413 - RNA, 19 nt, Homo sapiens
  misc_RNA (1)...(19): siRNA sense strand
ucucaacucuucuacugaa

SEQ ID NO: 65414 - RNA, 19 nt, Homo sapiens
  misc_RNA (1)...(19): siRNA sense strand
caaagucaccugcaucauc

SEQ ID NO: 65415 - RNA, 19 nt, Homo sapiens
  misc_RNA (1)...(19): siRNA sense strand
uuacugacuuugccacuau

SEQ ID NO: 65416 - RNA, 19 nt, Homo sapiens
  misc_RNA (1)...(19): siRNA sense strand
ucaccugcaucaucauuug

SEQ ID NO: 65417 - RNA, 19 nt, Homo sapiens
  misc_RNA (1)...(19): siRNA sense strand
caagaugauugucccaaag

SEQ ID NO: 65418 - RNA, 19 nt, Homo sapiens
  misc_RNA (1)...(19): siRNA sense strand
cuacacagcuauggaauac

SEQ ID NO: 65419 - RNA, 19 nt, Homo sapiens
  misc_RNA (1)...(19): siRNA sense strand
auaugaagcugaagacugu

SEQ ID NO: 65420 - RNA, 19 nt, Homo sapiens
  misc_RNA (1)...(19): siRNA sense strand
gaaacagcuugguggugau

SEQ ID NO: 65421 - RNA, 19 nt, Homo sapiens
  misc_RNA (1)...(19): siRNA sense strand
aagcuggaaggcauaauua

SEQ ID NO: 65422 - RNA, 19 nt, Homo sapiens
  misc_RNA (1)...(19): siRNA sense strand
cagcuauaauccaucgaaa

SEQ ID NO: 65423 - RNA, 19 nt, Homo sapiens
  misc_RNA (1)...(19): siRNA sense strand
caugauuccuacuuuauac

SEQ ID NO: 65424 - RNA, 19 nt, Homo sapiens
  misc_RNA (1)...(19): siRNA sense strand
gaucgauaccuggcuauug

SEQ ID NO: 65425 - RNA, 19 nt, Homo sapiens
  misc_RNA (1)...(19): siRNA sense strand
ggaauaccgcuggcccuuu

SEQ ID NO: 65426 - RNA, 19 nt, Homo sapiens
  misc_RNA (1)...(19): siRNA sense strand
guaagcucauccaccaaga

SEQ ID NO: 65427 - RNA, 19 nt, Homo sapiens
  misc_RNA (1)...(19): siRNA sense strand
caguuugugcuuuccauua

SEQ ID NO: 65428 - RNA, 19 nt, Homo sapiens
  misc_RNA (1)...(19): siRNA sense strand
gcuggcccuuuggcaauua

SEQ ID NO: 65429 - RNA, 19 nt, Homo sapiens
  misc_RNA (1)...(19): siRNA sense strand
acuaugggcugucuacaca

SEQ ID NO: 65430 - RNA, 19 nt, Homo sapiens
  misc_RNA (1)...(19): siRNA sense strand
aaaucccacucaaaccuuu

SEQ ID NO: 65431 - RNA, 19 nt, Homo sapiens
  misc_RNA (1)...(19): siRNA sense strand
gcaauugugcuuuucuuuu

SEQ ID NO: 65432 - RNA, 19 nt, Homo sapiens
  misc_RNA (1)...(19): siRNA sense strand
aagaacaaaccaagaaaug

SEQ ID NO: 65433 - RNA, 19 nt, Homo sapiens
  misc_RNA (1)...(19): siRNA sense strand
ggaaggcauaauuacauau

SEQ ID NO: 65434 - RNA, 19 nt, Homo sapiens
  misc_RNA (1)...(19): siRNA sense strand
cuacugaagaugguauuaa

SEQ ID NO: 65435 - RNA, 19 nt, Homo sapiens
  misc_RNA (1)...(19): siRNA sense strand
gugggaauauuuggaaaca

SEQ ID NO: 65436 - RNA, 19 nt, Homo sapiens
  misc_RNA (1)...(19): siRNA sense strand
agaacaaaccaagaaauga

SEQ ID NO: 65437 - RNA, 19 nt, Homo sapiens
  misc_RNA (1)...(19): siRNA sense strand
gaaauucagaagaacaaac

SEQ ID NO: 65438 - RNA, 19 nt, Homo sapiens
  misc_RNA (1)...(19): siRNA sense strand
gacuguagaauugcagaua

SEQ ID NO: 65439 - RNA, 19 nt, Homo sapiens
  misc_RNA (1)...(19): siRNA sense strand
uggguuuccuguuuccuuu

SEQ ID NO: 65440 - RNA, 19 nt, Homo sapiens
  misc_RNA (1)...(19): siRNA sense strand
ccacucaaaccuuucaaca

SEQ ID NO: 65441 - RNA, 19 nt, Homo sapiens
  misc_RNA (1)...(19): siRNA sense strand
cuguagaauugcagauauu

SEQ ID NO: 65442 - RNA, 19 nt, Homo sapiens
  misc_RNA (1)...(19): siRNA sense strand
caccaaauauucacuuuuc

SEQ ID NO: 65443 - RNA, 19 nt, Homo sapiens
  misc_RNA (1)...(19): siRNA sense strand
aaagcuggaaggcauaauu

SEQ ID NO: 65444 - RNA, 19 nt, Homo sapiens
  misc_RNA (1)...(19): siRNA sense strand
ugagaacaccaauauuaca

SEQ ID NO: 65445 - RNA, 19 nt, Homo sapiens
  misc_RNA (1)...(19): siRNA sense strand
cagauaauguaagcucauc

SEQ ID NO: 65446 - RNA, 19 nt, Homo sapiens
  misc_RNA (1)...(19): siRNA sense strand
caaaucccacucaaaccuu

SEQ ID NO: 65447 - RNA, 19 nt, Homo sapiens
  misc_RNA (1)...(19): siRNA sense strand
agaagaacaaaccaagaaa

SEQ ID NO: 65448 - RNA, 19 nt, Homo sapiens
  misc_RNA (1)...(19): siRNA sense strand
uauuacaguuugugcuuuc

SEQ ID NO: 65449 - RNA, 19 nt, Homo sapiens
  misc_RNA (1)...(19): siRNA sense strand
gagaacaccaauauuacag

SEQ ID NO: 65450 - RNA, 19 nt, Homo sapiens
  misc_RNA (1)...(19): siRNA sense strand
guacgcuaguguguuucua

SEQ ID NO: 65451 - RNA, 19 nt, Homo sapiens
  misc_RNA (1)...(19): siRNA sense strand
gccaaagucaccugcauca

SEQ ID NO: 65452 - RNA, 19 nt, Homo sapiens
  misc_RNA (1)...(19): siRNA sense strand
ugguggugauagucauuua

SEQ ID NO: 65453 - RNA, 19 nt, Homo sapiens
  misc_RNA (1)...(19): siRNA sense strand
uagaauugcagauauugug

SEQ ID NO: 65454 - RNA, 19 nt, Homo sapiens
  misc_RNA (1)...(19): siRNA sense strand
acuguagaauugcagauau

SEQ ID NO: 65455 - RNA, 19 nt, Homo sapiens
  misc_RNA (1)...(19): siRNA sense strand
gauucaacuaggcaucaua

SEQ ID NO: 65456 - RNA, 19 nt, Homo sapiens
  misc_RNA (1)...(19): siRNA sense strand
gcuggaaggcauaauuaca

SEQ ID NO: 65457 - RNA, 19 nt, Homo sapiens
  misc_RNA (1)...(19): siRNA sense strand
aaacagcuugguggugaua

SEQ ID NO: 65458 - RNA, 19 nt, Homo sapiens
  misc_RNA (1)...(19): siRNA sense strand
auacuggguuuccuguuuc

SEQ ID NO: 65459 - RNA, 19 nt, Homo sapiens
  misc_RNA (1)...(19): siRNA sense strand
ccaaagcuggaaggcauaa

SEQ ID NO: 65460 - RNA, 19 nt, Homo sapiens
  misc_RNA (1)...(19): siRNA sense strand
cccaccaaauauucacuuu

SEQ ID NO: 65461 - RNA, 19 nt, Homo sapiens
  misc_RNA (1)...(19): siRNA sense strand
ucagaagaacaaaccaaga

SEQ ID NO: 65462 - RNA, 19 nt, Homo sapiens
  misc_RNA (1)...(19): siRNA sense strand
cauuaugagucccaaaauu

SEQ ID NO: 65463 - RNA, 19 nt, Homo sapiens
  misc_RNA (1)...(19): siRNA sense strand
aguuugugcuuuccauuau

SEQ ID NO: 65464 - RNA, 19 nt, Homo sapiens
  misc_RNA (1)...(19): siRNA sense strand
cauacgugacuguagaauu

SEQ ID NO: 65465 - RNA, 19 nt, Homo sapiens
  misc_RNA (1)...(19): siRNA sense strand
ucacuuuucuggauguauu

SEQ ID NO: 65466 - RNA, 19 nt, Homo sapiens
  misc_RNA (1)...(19): siRNA sense strand
cccuaaagaaggcuuauga

SEQ ID NO: 65467 - RNA, 19 nt, Homo sapiens
  misc_RNA (1)...(19): siRNA sense strand
uuugugcuuuccauuauga

SEQ ID NO: 65468 - RNA, 19 nt, Homo sapiens
  misc_RNA (1)...(19): siRNA sense strand
ucuacacagcuauggaaua

SEQ ID NO: 65469 - RNA, 19 nt, Homo sapiens
  misc_RNA (1)...(19): siRNA sense strand
gauaauguaagcucaucca

SEQ ID NO: 65470 - RNA, 19 nt, Homo sapiens
  misc_RNA (1)...(19): siRNA sense strand
ccuaaagaaggcuuaugaa

SEQ ID NO: 65471 - RNA, 19 nt, Homo sapiens
  misc_RNA (1)...(19): siRNA sense strand
ccaguuugccagcuauaau

SEQ ID NO: 65472 - RNA, 19 nt, Homo sapiens
  misc_RNA (1)...(19): siRNA sense strand
gucaugauuccuacuuuau

SEQ ID NO: 65473 - RNA, 19 nt, Homo sapiens
  misc_RNA (1)...(19): siRNA sense strand
auucucaacucuucuacug

SEQ ID NO: 65474 - RNA, 19 nt, Homo sapiens
  misc_RNA (1)...(19): siRNA sense strand
guagaauugcagauauugu

SEQ ID NO: 65475 - RNA, 19 nt, Homo sapiens
  misc_RNA (1)...(19): siRNA sense strand
ccagcuauaauccaucgaa

SEQ ID NO: 65476 - RNA, 19 nt, Homo sapiens
  misc_RNA (1)...(19): siRNA sense strand
aucgauaccuggcuauugu

SEQ ID NO: 65477 - RNA, 19 nt, Homo sapiens
  misc_RNA (1)...(19): siRNA sense strand
acucacgugucucagcauu

SEQ ID NO: 65478 - RNA, 19 nt, Homo sapiens
  misc_RNA (1)...(19): siRNA sense strand
aagaaggcuuaugaaauuc

SEQ ID NO: 65479 - RNA, 19 nt, Homo sapiens
  misc_RNA (1)...(19): siRNA sense strand
ucucagcauugaucgauac

SEQ ID NO: 65480 - RNA, 19 nt, Homo sapiens
  misc_RNA (1)...(19): siRNA sense strand
uagccaaagucaccugcau

SEQ ID NO: 65481 - RNA, 19 nt, Homo sapiens
  misc_RNA (1)...(19): siRNA sense strand
gaauauuuggaaacagcuu

SEQ ID NO: 65482 - RNA, 19 nt, Homo sapiens
  misc_RNA (1)...(19): siRNA sense strand
uuuggaaggcccuaaagaa

SEQ ID NO: 65483 - RNA, 19 nt, Homo sapiens
  misc_RNA (1)...(19): siRNA sense strand
gggcugggccugaccaaaa

SEQ ID NO: 65484 - RNA, 19 nt, Homo sapiens
  misc_RNA (1)...(19): siRNA sense strand
gauuccuacuuuauacagu

SEQ ID NO: 65485 - RNA, 19 nt, Homo sapiens
  misc_RNA (1)...(19): siRNA sense strand
uaagcucauccaccaagaa

SEQ ID NO: 65486 - RNA, 19 nt, Homo sapiens
  misc_RNA (1)...(19): siRNA sense strand
ccaaaucccacucaaaccu

SEQ ID NO: 65487 - RNA, 19 nt, Homo sapiens
  misc_RNA (1)...(19): siRNA sense strand
uuuaacaauugccugaauc

SEQ ID NO: 65488 - RNA, 19 nt, Homo sapiens
  misc_RNA (1)...(19): siRNA sense strand
acaaaccaagaaaugauga

SEQ ID NO: 65489 - RNA, 19 nt, Homo sapiens
  misc_RNA (1)...(19): siRNA sense strand
ucugaucauucuuacaagu

SEQ ID NO: 65490 - RNA, 19 nt, Homo sapiens
  misc_RNA (1)...(19): siRNA sense strand
gcgucaguuucaaccugua

SEQ ID NO: 65491 - RNA, 19 nt, Homo sapiens
  misc_RNA (1)...(19): siRNA sense strand
guuugugcuuuccauuaug

SEQ ID NO: 65492 - RNA, 19 nt, Homo sapiens
  misc_RNA (1)...(19): siRNA sense strand
gaacaccaauauuacaguu

SEQ ID NO: 65493 - RNA, 19 nt, Homo sapiens
  misc_RNA (1)...(19): siRNA sense strand
gaauaccgcuggcccuuug

SEQ ID NO: 65494 - RNA, 19 nt, Homo sapiens
  misc_RNA (1)...(19): siRNA sense strand
acucaaaccuuucaacaaa

SEQ ID NO: 65495 - RNA, 19 nt, Homo sapiens
  misc_RNA (1)...(19): siRNA sense strand
gaacaaaccaagaaaugau

SEQ ID NO: 65496 - RNA, 19 nt, Homo sapiens
  misc_RNA (1)...(19): siRNA sense strand
auacgugacuguagaauug

SEQ ID NO: 65497 - RNA, 19 nt, Homo sapiens
  misc_RNA (1)...(19): siRNA sense strand
caucauacgugacuguaga

SEQ ID NO: 65498 - RNA, 19 nt, Homo sapiens
  misc_RNA (1)...(19): siRNA sense strand
ccaagaugauugucccaaa

SEQ ID NO: 65499 - RNA, 19 nt, Homo sapiens
  misc_RNA (1)...(19): siRNA sense strand
uauacuggguuuccuguuu

SEQ ID NO: 65500 - RNA, 19 nt, Homo sapiens
  misc_RNA (1)...(19): siRNA sense strand
gcuauaauccaucgaaaug

SEQ ID NO: 65501 - RNA, 19 nt, Homo sapiens
  misc_RNA (1)...(19): siRNA sense strand
ugucaugauuccuacuuua

SEQ ID NO: 65502 - RNA, 19 nt, Homo sapiens
  misc_RNA (1)...(19): siRNA sense strand
gaagaacaaaccaagaaau

SEQ ID NO: 65503 - RNA, 19 nt, Homo sapiens
  misc_RNA (1)...(19): siRNA sense strand
aaagucaccugcaucauca

SEQ ID NO: 65504 - RNA, 19 nt, Homo sapiens
  misc_RNA (1)...(19): siRNA sense strand
ggugauagucauuuacuuu

SEQ ID NO: 65505 - RNA, 19 nt, Homo sapiens
  misc_RNA (1)...(19): siRNA sense strand
uggaaggcauaauuacaua

SEQ ID NO: 65506 - RNA, 19 nt, Homo sapiens
  misc_RNA (1)...(19): siRNA sense strand
gcuaguguguuucuacuca

SEQ ID NO: 65507 - RNA, 19 nt, Homo sapiens
  misc_RNA (1)...(19): siRNA sense strand
ccuguacgcuaguguguuu

SEQ ID NO: 65508 - RNA, 19 nt, Homo sapiens
  misc_RNA (1)...(19): siRNA sense strand
ucacgugucucagcauuga

SEQ ID NO: 65509 - RNA, 19 nt, Homo sapiens
  misc_RNA (1)...(19): siRNA sense strand
acaccaauauuacaguuug

SEQ ID NO: 65510 - RNA, 19 nt, Homo sapiens
  misc_RNA (1)...(19): siRNA sense strand
cuaaagaaggcuuaugaaa

SEQ ID NO: 65511 - RNA, 19 nt, Homo sapiens
  misc_RNA (1)...(19): siRNA sense strand
cagaagaacaaaccaagaa

SEQ ID NO: 65512 - RNA, 19 nt, Homo sapiens
  misc_RNA (1)...(19): siRNA sense strand
ucucaacucuucuacugaa

SEQ ID NO: 65513 - RNA, 19 nt, Homo sapiens
  misc_RNA (1)...(19): siRNA sense strand
caaagucaccugcaucauc

SEQ ID NO: 65514 - RNA, 19 nt, Homo sapiens
  misc_RNA (1)...(19): siRNA sense strand
uuacugacuuugccacuau

SEQ ID NO: 65515 - RNA, 19 nt, Homo sapiens
  misc_RNA (1)...(19): siRNA sense strand
ucaccugcaucaucauuug

SEQ ID NO: 65516 - RNA, 19 nt, Homo sapiens
  misc_RNA (1)...(19): siRNA sense strand
caagaugauugucccaaag

SEQ ID NO: 65517 - RNA, 19 nt, Homo sapiens
  misc_RNA (1)...(19): siRNA sense strand
cuacacagcuauggaauac

SEQ ID NO: 65518 - RNA, 19 nt, Homo sapiens
  misc_RNA (1)...(19): siRNA sense strand
auaugaagcugaagacugu

SEQ ID NO: 65519 - RNA, 19 nt, Homo sapiens
  misc_RNA (1)...(19): siRNA sense strand
gaaacagcuugguggugau

SEQ ID NO: 65520 - RNA, 19 nt, Homo sapiens
  misc_RNA (1)...(19): siRNA sense strand
aagcuggaaggcauaauua

SEQ ID NO: 65521 - RNA, 19 nt, Homo sapiens
  misc_RNA (1)...(19): siRNA sense strand
cagcuauaauccaucgaaa

SEQ ID NO: 65522 - RNA, 19 nt, Homo sapiens
  misc_RNA (1)...(19): siRNA sense strand
caugauuccuacuuuauac

SEQ ID NO: 65523 - RNA, 19 nt, Homo sapiens
  misc_RNA (1)...(19): siRNA sense strand
gaucgauaccuggcuauug

SEQ ID NO: 65524 - RNA, 19 nt, Homo sapiens
  misc_RNA (1)...(19): siRNA sense strand
ggaauaccgcuggcccuuu

SEQ ID NO: 65525 - RNA, 19 nt, Homo sapiens
  misc_RNA (1)...(19): siRNA sense strand
guaagcucauccaccaaga

SEQ ID NO: 65526 - RNA, 19 nt, Homo sapiens
  misc_RNA (1)...(19): siRNA sense strand
caguuugugcuuuccauua

SEQ ID NO: 65527 - RNA, 19 nt, Homo sapiens
  misc_RNA (1)...(19): siRNA sense strand
gcuggcccuuuggcaauua

SEQ ID NO: 65528 - RNA, 19 nt, Homo sapiens
  misc_RNA (1)...(19): siRNA sense strand
acuaugggcugucuacaca

SEQ ID NO: 65529 - RNA, 19 nt, Homo sapiens
  misc_RNA (1)...(19): siRNA sense strand
aaaucccacucaaaccuuu

SEQ ID NO: 65530 - RNA, 19 nt, Homo sapiens
  misc_RNA (1)...(19): siRNA sense strand
gcaauugugcuuuucuuuu

SEQ ID NO: 65531 - RNA, 19 nt, Homo sapiens
  misc_RNA (1)...(19): siRNA sense strand
aagaacaaaccaagaaaug

SEQ ID NO: 65532 - RNA, 19 nt, Homo sapiens
  misc_RNA (1)...(19): siRNA sense strand
ggaaggcauaauuacauau

SEQ ID NO: 65533 - RNA, 19 nt, Homo sapiens
  misc_RNA (1)...(19): siRNA sense strand
cuacugaagaugguauuaa

SEQ ID NO: 65534 - RNA, 19 nt, Homo sapiens
  misc_RNA (1)...(19): siRNA sense strand
gugggaauauuuggaaaca

SEQ ID NO: 65535 - RNA, 19 nt, Homo sapiens
  misc_RNA (1)...(19): siRNA sense strand
agaacaaaccaagaaauga

SEQ ID NO: 65536 - RNA, 19 nt, Homo sapiens
  misc_RNA (1)...(19): siRNA sense strand
gaaauucagaagaacaaac

SEQ ID NO: 65537 - RNA, 19 nt, Homo sapiens
  misc_RNA (1)...(19): siRNA sense strand
gacuguagaauugcagaua

SEQ ID NO: 65538 - RNA, 19 nt, Homo sapiens
  misc_RNA (1)...(19): siRNA sense strand
uggguuuccuguuuccuuu

SEQ ID NO: 65539 - RNA, 19 nt, Homo sapiens
  misc_RNA (1)...(19): siRNA sense strand
ccacucaaaccuuucaaca

SEQ ID NO: 65540 - RNA, 19 nt, Homo sapiens
  misc_RNA (1)...(19): siRNA sense strand
cuguagaauugcagauauu

SEQ ID NO: 65541 - RNA, 19 nt, Homo sapiens
  misc_RNA (1)...(19): siRNA sense strand
caccaaauauucacuuuuc

SEQ ID NO: 65542 - RNA, 19 nt, Homo sapiens
  misc_RNA (1)...(19): siRNA sense strand
aaagcuggaaggcauaauu

SEQ ID NO: 65543 - RNA, 19 nt, Homo sapiens
  misc_RNA (1)...(19): siRNA sense strand
ugagaacaccaauauuaca

SEQ ID NO: 65544 - RNA, 19 nt, Homo sapiens
  misc_RNA (1)...(19): siRNA sense strand
cagauaauguaagcucauc

SEQ ID NO: 65545 - RNA, 19 nt, Homo sapiens
  misc_RNA (1)...(19): siRNA sense strand
caaaucccacucaaaccuu

SEQ ID NO: 65546 - RNA, 19 nt, Homo sapiens
  misc_RNA (1)...(19): siRNA sense strand
agaagaacaaaccaagaaa

SEQ ID NO: 65547 - RNA, 19 nt, Homo sapiens
  misc_RNA (1)...(19): siRNA sense strand
uauuacaguuugugcuuuc

SEQ ID NO: 65548 - RNA, 19 nt, Homo sapiens
  misc_RNA (1)...(19): siRNA sense strand
gagaacaccaauauuacag

SEQ ID NO: 65549 - RNA, 19 nt, Homo sapiens
  misc_RNA (1)...(19): siRNA sense strand
guacgcuaguguguuucua

SEQ ID NO: 65550 - RNA, 19 nt, Homo sapiens
  misc_RNA (1)...(19): siRNA sense strand
gccaaagucaccugcauca

SEQ ID NO: 65551 - RNA, 19 nt, Homo sapiens
  misc_RNA (1)...(19): siRNA sense strand
ugguggugauagucauuua

SEQ ID NO: 65552 - RNA, 19 nt, Homo sapiens
  misc_RNA (1)...(19): siRNA sense strand
uagaauugcagauauugug

SEQ ID NO: 65553 - RNA, 19 nt, Homo sapiens
  misc_RNA (1)...(19): siRNA sense strand
acuguagaauugcagauau

SEQ ID NO: 65554 - RNA, 19 nt, Homo sapiens
  misc_RNA (1)...(19): siRNA sense strand
gauucaacuaggcaucaua

SEQ ID NO: 65555 - RNA, 19 nt, Homo sapiens
  misc_RNA (1)...(19): siRNA sense strand
gcuggaaggcauaauuaca

SEQ ID NO: 65556 - RNA, 19 nt, Homo sapiens
  misc_RNA (1)...(19): siRNA sense strand
aaacagcuugguggugaua

SEQ ID NO: 65557 - RNA, 19 nt, Homo sapiens
  misc_RNA (1)...(19): siRNA sense strand
auacuggguuuccuguuuc

SEQ ID NO: 65558 - RNA, 19 nt, Homo sapiens
  misc_RNA (1)...(19): siRNA sense strand
ccaaagcuggaaggcauaa

SEQ ID NO: 65559 - RNA, 19 nt, Homo sapiens
  misc_RNA (1)...(19): siRNA sense strand
cccaccaaauauucacuuu

SEQ ID NO: 65560 - RNA, 19 nt, Homo sapiens
  misc_RNA (1)...(19): siRNA sense strand
ucagaagaacaaaccaaga

SEQ ID NO: 65561 - RNA, 19 nt, Homo sapiens
  misc_RNA (1)...(19): siRNA sense strand
cauuaugagucccaaaauu

SEQ ID NO: 65562 - RNA, 19 nt, Homo sapiens
  misc_RNA (1)...(19): siRNA sense strand
aguuugugcuuuccauuau

SEQ ID NO: 65563 - RNA, 19 nt, Homo sapiens
  misc_RNA (1)...(19): siRNA sense strand
cauacgugacuguagaauu

SEQ ID NO: 65564 - RNA, 19 nt, Homo sapiens
  misc_RNA (1)...(19): siRNA sense strand
ucacuuuucuggauguauu

SEQ ID NO: 65565 - RNA, 19 nt, Homo sapiens
  misc_RNA (1)...(19): siRNA sense strand
cccuaaagaaggcuuauga

SEQ ID NO: 65566 - RNA, 19 nt, Homo sapiens
  misc_RNA (1)...(19): siRNA sense strand
uuugugcuuuccauuauga

SEQ ID NO: 65567 - RNA, 19 nt, Homo sapiens
  misc_RNA (1)...(19): siRNA sense strand
ucuacacagcuauggaaua

SEQ ID NO: 65568 - RNA, 19 nt, Homo sapiens
  misc_RNA (1)...(19): siRNA sense strand
gauaauguaagcucaucca

SEQ ID NO: 65569 - RNA, 19 nt, Homo sapiens
  misc_RNA (1)...(19): siRNA sense strand
ccuaaagaaggcuuaugaa

SEQ ID NO: 65570 - RNA, 19 nt, Homo sapiens
  misc_RNA (1)...(19): siRNA sense strand
ccaguuugccagcuauaau

SEQ ID NO: 65571 - RNA, 19 nt, Homo sapiens
  misc_RNA (1)...(19): siRNA sense strand
gucaugauuccuacuuuau

SEQ ID NO: 65572 - RNA, 19 nt, Homo sapiens
  misc_RNA (1)...(19): siRNA sense strand
auucucaacucuucuacug

SEQ ID NO: 65573 - RNA, 19 nt, Homo sapiens
  misc_RNA (1)...(19): siRNA sense strand
guagaauugcagauauugu

SEQ ID NO: 65574 - RNA, 19 nt, Homo sapiens
  misc_RNA (1)...(19): siRNA sense strand
ccagcuauaauccaucgaa

SEQ ID NO: 65575 - RNA, 19 nt, Homo sapiens
  misc_RNA (1)...(19): siRNA sense strand
aucgauaccuggcuauugu

SEQ ID NO: 65576 - RNA, 19 nt, Homo sapiens
  misc_RNA (1)...(19): siRNA sense strand
acucacgugucucagcauu

SEQ ID NO: 65577 - RNA, 19 nt, Homo sapiens
  misc_RNA (1)...(19): siRNA sense strand
aagaaggcuuaugaaauuc

SEQ ID NO: 65578 - RNA, 19 nt, Homo sapiens
  misc_RNA (1)...(19): siRNA sense strand
ucucagcauugaucgauac

SEQ ID NO: 65579 - RNA, 19 nt, Homo sapiens
  misc_RNA (1)...(19): siRNA sense strand
uagccaaagucaccugcau

SEQ ID NO: 65580 - RNA, 19 nt, Homo sapiens
  misc_RNA (1)...(19): siRNA sense strand
gaauauuuggaaacagcuu

SEQ ID NO: 65581 - RNA, 19 nt, Homo sapiens
  misc_RNA (1)...(19): siRNA sense strand
uuuggaaggcccuaaagaa

SEQ ID NO: 65582 - RNA, 19 nt, Homo sapiens
  misc_RNA (1)...(19): siRNA sense strand
gggcugggccugaccaaaa

SEQ ID NO: 65583 - RNA, 19 nt, Homo sapiens
  misc_RNA (1)...(19): siRNA sense strand
gauuccuacuuuauacagu

SEQ ID NO: 65584 - RNA, 19 nt, Homo sapiens
  misc_RNA (1)...(19): siRNA sense strand
uaagcucauccaccaagaa

SEQ ID NO: 65585 - RNA, 19 nt, Homo sapiens
  misc_RNA (1)...(19): siRNA sense strand
ccaaaucccacucaaaccu

SEQ ID NO: 65586 - RNA, 19 nt, Homo sapiens
  misc_RNA (1)...(19): siRNA sense strand
uuuaacaauugccugaauc

SEQ ID NO: 65587 - RNA, 19 nt, Homo sapiens
  misc_RNA (1)...(19): siRNA sense strand
acaaaccaagaaaugauga

SEQ ID NO: 65588 - RNA, 19 nt, Homo sapiens
  misc_RNA (1)...(19): siRNA sense strand
ucugaucauucuuacaagu

SEQ ID NO: 65589 - RNA, 19 nt, Homo sapiens
  misc_RNA (1)...(19): siRNA sense strand
gcgucaguuucaaccugua

SEQ ID NO: 65590 - RNA, 19 nt, Homo sapiens
  misc_RNA (1)...(19): siRNA sense strand
guuugugcuuuccauuaug

SEQ ID NO: 65591 - RNA, 19 nt, Homo sapiens
  misc_RNA (1)...(19): siRNA sense strand
gaacaccaauauuacaguu

SEQ ID NO: 65592 - RNA, 19 nt, Homo sapiens
  misc_RNA (1)...(19): siRNA sense strand
gaauaccgcuggcccuuug

SEQ ID NO: 65593 - RNA, 19 nt, Homo sapiens
  misc_RNA (1)...(19): siRNA sense strand
acucaaaccuuucaacaaa

SEQ ID NO: 65594 - RNA, 19 nt, Homo sapiens
  misc_RNA (1)...(19): siRNA sense strand
gaacaaaccaagaaaugau

SEQ ID NO: 65595 - RNA, 19 nt, Homo sapiens
  misc_RNA (1)...(19): siRNA sense strand
auacgugacuguagaauug

SEQ ID NO: 65596 - RNA, 19 nt, Homo sapiens
  misc_RNA (1)...(19): siRNA sense strand
caucauacgugacuguaga

SEQ ID NO: 65597 - RNA, 19 nt, Homo sapiens
  misc_RNA (1)...(19): siRNA sense strand
ccaagaugauugucccaaa

SEQ ID NO: 65598 - RNA, 19 nt, Homo sapiens
  misc_RNA (1)...(19): siRNA sense strand
uauacuggguuuccuguuu

SEQ ID NO: 65599 - RNA, 19 nt, Homo sapiens
  misc_RNA (1)...(19): siRNA sense strand
gcuauaauccaucgaaaug

SEQ ID NO: 65600 - RNA, 19 nt, Homo sapiens
  misc_RNA (1)...(19): siRNA sense strand
ugucaugauuccuacuuua

SEQ ID NO: 65601 - RNA, 19 nt, Homo sapiens
  misc_RNA (1)...(19): siRNA sense strand
gaagaacaaaccaagaaau

SEQ ID NO: 65602 - RNA, 19 nt, Homo sapiens
  misc_RNA (1)...(19): siRNA sense strand
aaagucaccugcaucauca

SEQ ID NO: 65603 - RNA, 19 nt, Homo sapiens
  misc_RNA (1)...(19): siRNA sense strand
ggugauagucauuuacuuu

SEQ ID NO: 65604 - RNA, 19 nt, Homo sapiens
  misc_RNA (1)...(19): siRNA sense strand
uggaaggcauaauuacaua

SEQ ID NO: 65605 - RNA, 19 nt, Homo sapiens
  misc_RNA (1)...(19): siRNA sense strand
gcuaguguguuucuacuca

SEQ ID NO: 65606 - RNA, 19 nt, Homo sapiens
  misc_RNA (1)...(19): siRNA sense strand
ccuguacgcuaguguguuu

SEQ ID NO: 65607 - RNA, 19 nt, Homo sapiens
  misc_RNA (1)...(19): siRNA sense strand
ucacgugucucagcauuga

SEQ ID NO: 65608 - RNA, 19 nt, Homo sapiens
  misc_RNA (1)...(19): siRNA sense strand
acaccaauauuacaguuug

SEQ ID NO: 65609 - RNA, 19 nt, Homo sapiens
  misc_RNA (1)...(19): siRNA sense strand
cuaaagaaggcuuaugaaa

SEQ ID NO: 65610 - RNA, 19 nt, Homo sapiens
  misc_RNA (1)...(19): siRNA sense strand
cagaagaacaaaccaagaa

SEQ ID NO: 65611 - RNA, 19 nt, Homo sapiens
  misc_RNA (1)...(19): siRNA sense strand
ucucaacucuucuacugaa

SEQ ID NO: 65612 - RNA, 19 nt, Homo sapiens
  misc_RNA (1)...(19): siRNA sense strand
caaagucaccugcaucauc

SEQ ID NO: 65613 - RNA, 19 nt, Homo sapiens
  misc_RNA (1)...(19): siRNA sense strand
uuacugacuuugccacuau

SEQ ID NO: 65614 - RNA, 19 nt, Homo sapiens
  misc_RNA (1)...(19): siRNA sense strand
ucaccugcaucaucauuug

SEQ ID NO: 65615 - RNA, 19 nt, Homo sapiens
  misc_RNA (1)...(19): siRNA sense strand
caagaugauugucccaaag

SEQ ID NO: 65616 - RNA, 19 nt, Homo sapiens
  misc_RNA (1)...(19): siRNA sense strand
cuacacagcuauggaauac

SEQ ID NO: 65617 - RNA, 19 nt, Homo sapiens
  misc_RNA (1)...(19): siRNA sense strand
auaugaagcugaagacugu

SEQ ID NO: 65618 - RNA, 19 nt, Homo sapiens
  misc_RNA (1)...(19): siRNA sense strand
gaaacagcuugguggugau

SEQ ID NO: 65619 - RNA, 19 nt, Homo sapiens
  misc_RNA (1)...(19): siRNA sense strand
aagcuggaaggcauaauua

SEQ ID NO: 65620 - RNA, 19 nt, Homo sapiens
  misc_RNA (1)...(19): siRNA sense strand
cagcuauaauccaucgaaa

SEQ ID NO: 65621 - RNA, 19 nt, Homo sapiens
  misc_RNA (1)...(19): siRNA sense strand
caugauuccuacuuuauac

SEQ ID NO: 65622 - RNA, 19 nt, Homo sapiens
  misc_RNA (1)...(19): siRNA sense strand
gaucgauaccuggcuauug

SEQ ID NO: 65623 - RNA, 19 nt, Homo sapiens
  misc_RNA (1)...(19): siRNA sense strand
ggaauaccgcuggcccuuu

SEQ ID NO: 65624 - RNA, 19 nt, Homo sapiens
  misc_RNA (1)...(19): siRNA sense strand
guaagcucauccaccaaga

SEQ ID NO: 65625 - RNA, 19 nt, Homo sapiens
  misc_RNA (1)...(19): siRNA sense strand
caguuugugcuuuccauua

SEQ ID NO: 65626 - RNA, 19 nt, Homo sapiens
  misc_RNA (1)...(19): siRNA sense strand
gcuggcccuuuggcaauua

SEQ ID NO: 65627 - RNA, 19 nt, Homo sapiens
  misc_RNA (1)...(19): siRNA sense strand
acuaugggcugucuacaca

SEQ ID NO: 65628 - RNA, 19 nt, Homo sapiens
  misc_RNA (1)...(19): siRNA sense strand
aaaucccacucaaaccuuu

SEQ ID NO: 65629 - RNA, 19 nt, Homo sapiens
  misc_RNA (1)...(19): siRNA sense strand
gcaauugugcuuuucuuuu

SEQ ID NO: 65630 - RNA, 19 nt, Homo sapiens
  misc_RNA (1)...(19): siRNA sense strand
aagaacaaaccaagaaaug

SEQ ID NO: 65631 - RNA, 19 nt, Homo sapiens
  misc_RNA (1)...(19): siRNA sense strand
ggaaggcauaauuacauau

SEQ ID NO: 65632 - RNA, 19 nt, Homo sapiens
  misc_RNA (1)...(19): siRNA sense strand
cuacugaagaugguauuaa

SEQ ID NO: 65633 - RNA, 19 nt, Homo sapiens
  misc_RNA (1)...(19): siRNA sense strand
gugggaauauuuggaaaca

SEQ ID NO: 65634 - RNA, 19 nt, Homo sapiens
  misc_RNA (1)...(19): siRNA sense strand
agaacaaaccaagaaauga

SEQ ID NO: 65635 - RNA, 19 nt, Homo sapiens
  misc_RNA (1)...(19): siRNA sense strand
gaaauucagaagaacaaac

SEQ ID NO: 65636 - RNA, 19 nt, Homo sapiens
  misc_RNA (1)...(19): siRNA sense strand
gacuguagaauugcagaua

SEQ ID NO: 65637 - RNA, 19 nt, Homo sapiens
  misc_RNA (1)...(19): siRNA sense strand
uggguuuccuguuuccuuu

SEQ ID NO: 65638 - RNA, 19 nt, Homo sapiens
  misc_RNA (1)...(19): siRNA sense strand
ccacucaaaccuuucaaca

SEQ ID NO: 65639 - RNA, 19 nt, Homo sapiens
  misc_RNA (1)...(19): siRNA sense strand
cuguagaauugcagauauu

SEQ ID NO: 65640 - RNA, 19 nt, Homo sapiens
  misc_RNA (1)...(19): siRNA sense strand
caccaaauauucacuuuuc

SEQ ID NO: 65641 - RNA, 19 nt, Homo sapiens
  misc_RNA (1)...(19): siRNA sense strand
aaagcuggaaggcauaauu

SEQ ID NO: 65642 - RNA, 19 nt, Homo sapiens
  misc_RNA (1)...(19): siRNA sense strand
ugagaacaccaauauuaca

SEQ ID NO: 65643 - RNA, 19 nt, Homo sapiens
  misc_RNA (1)...(19): siRNA sense strand
cagauaauguaagcucauc

SEQ ID NO: 65644 - RNA, 19 nt, Homo sapiens
  misc_RNA (1)...(19): siRNA sense strand
caaaucccacucaaaccuu

SEQ ID NO: 65645 - RNA, 19 nt, Homo sapiens
  misc_RNA (1)...(19): siRNA sense strand
agaagaacaaaccaagaaa

SEQ ID NO: 65646 - RNA, 19 nt, Homo sapiens
  misc_RNA (1)...(19): siRNA sense strand
uauuacaguuugugcuuuc

SEQ ID NO: 65647 - RNA, 19 nt, Homo sapiens
  misc_RNA (1)...(19): siRNA sense strand
gagaacaccaauauuacag

SEQ ID NO: 65648 - RNA, 19 nt, Homo sapiens
  misc_RNA (1)...(19): siRNA sense strand
guacgcuaguguguuucua

SEQ ID NO: 65649 - RNA, 19 nt, Homo sapiens
  misc_RNA (1)...(19): siRNA sense strand
gccaaagucaccugcauca

SEQ ID NO: 65650 - RNA, 19 nt, Homo sapiens
  misc_RNA (1)...(19): siRNA sense strand
ugguggugauagucauuua

SEQ ID NO: 65651 - RNA, 19 nt, Homo sapiens
  misc_RNA (1)...(19): siRNA sense strand
uagaauugcagauauugug

SEQ ID NO: 65652 - RNA, 19 nt, Homo sapiens
  misc_RNA (1)...(19): siRNA sense strand
acuguagaauugcagauau

SEQ ID NO: 65653 - RNA, 19 nt, Homo sapiens
  misc_RNA (1)...(19): siRNA sense strand
gauucaacuaggcaucaua

SEQ ID NO: 65654 - RNA, 19 nt, Homo sapiens
  misc_RNA (1)...(19): siRNA sense strand
gcuggaaggcauaauuaca

SEQ ID NO: 65655 - RNA, 19 nt, Homo sapiens
  misc_RNA (1)...(19): siRNA sense strand
aaacagcuugguggugaua

SEQ ID NO: 65656 - RNA, 19 nt, Homo sapiens
  misc_RNA (1)...(19): siRNA sense strand
auacuggguuuccuguuuc

SEQ ID NO: 65657 - RNA, 19 nt, Homo sapiens
  misc_RNA (1)...(19): siRNA sense strand
ccaaagcuggaaggcauaa

SEQ ID NO: 65658 - RNA, 19 nt, Homo sapiens
  misc_RNA (1)...(19): siRNA sense strand
cccaccaaauauucacuuu

SEQ ID NO: 65659 - RNA, 19 nt, Homo sapiens
  misc_RNA (1)...(19): siRNA sense strand
ucagaagaacaaaccaaga

SEQ ID NO: 65660 - RNA, 19 nt, Homo sapiens
  misc_RNA (1)...(19): siRNA sense strand
cauuaugagucccaaaauu

SEQ ID NO: 65661 - RNA, 19 nt, Homo sapiens
  misc_RNA (1)...(19): siRNA sense strand
aguuugugcuuuccauuau

SEQ ID NO: 65662 - RNA, 19 nt, Homo sapiens
  misc_RNA (1)...(19): siRNA sense strand
cauacgugacuguagaauu

SEQ ID NO: 65663 - RNA, 19 nt, Homo sapiens
  misc_RNA (1)...(19): siRNA sense strand
ucacuuuucuggauguauu

SEQ ID NO: 65664 - RNA, 19 nt, Homo sapiens
  misc_RNA (1)...(19): siRNA sense strand
cccuaaagaaggcuuauga

SEQ ID NO: 65665 - RNA, 19 nt, Homo sapiens
  misc_RNA (1)...(19): siRNA sense strand
uuugugcuuuccauuauga

SEQ ID NO: 65666 - RNA, 19 nt, Homo sapiens
  misc_RNA (1)...(19): siRNA sense strand
ucuacacagcuauggaaua

SEQ ID NO: 65667 - RNA, 19 nt, Homo sapiens
  misc_RNA (1)...(19): siRNA sense strand
gauaauguaagcucaucca

SEQ ID NO: 65668 - RNA, 19 nt, Homo sapiens
  misc_RNA (1)...(19): siRNA sense strand
ccuaaagaaggcuuaugaa

SEQ ID NO: 65669 - RNA, 19 nt, Homo sapiens
  misc_RNA (1)...(19): siRNA sense strand
ccaguuugccagcuauaau

SEQ ID NO: 65670 - RNA, 19 nt, Homo sapiens
  misc_RNA (1)...(19): siRNA sense strand
gucaugauuccuacuuuau

SEQ ID NO: 65671 - RNA, 19 nt, Homo sapiens
  misc_RNA (1)...(19): siRNA sense strand
auucucaacucuucuacug

SEQ ID NO: 65672 - RNA, 19 nt, Homo sapiens
  misc_RNA (1)...(19): siRNA sense strand
guagaauugcagauauugu

SEQ ID NO: 65673 - RNA, 19 nt, Homo sapiens
  misc_RNA (1)...(19): siRNA sense strand
ccagcuauaauccaucgaa

SEQ ID NO: 65674 - RNA, 19 nt, Homo sapiens
  misc_RNA (1)...(19): siRNA sense strand
aucgauaccuggcuauugu

SEQ ID NO: 65675 - RNA, 19 nt, Homo sapiens
  misc_RNA (1)...(19): siRNA sense strand
acucacgugucucagcauu

SEQ ID NO: 65676 - RNA, 19 nt, Homo sapiens
  misc_RNA (1)...(19): siRNA sense strand
aagaaggcuuaugaaauuc

SEQ ID NO: 65677 - RNA, 19 nt, Homo sapiens
  misc_RNA (1)...(19): siRNA sense strand
ucucagcauugaucgauac

SEQ ID NO: 65678 - RNA, 19 nt, Homo sapiens
  misc_RNA (1)...(19): siRNA sense strand
uagccaaagucaccugcau

SEQ ID NO: 65679 - RNA, 19 nt, Homo sapiens
  misc_RNA (1)...(19): siRNA sense strand
gaauauuuggaaacagcuu

SEQ ID NO: 65680 - RNA, 19 nt, Homo sapiens
  misc_RNA (1)...(19): siRNA sense strand
uuuggaaggcccuaaagaa

SEQ ID NO: 65681 - RNA, 19 nt, Homo sapiens
  misc_RNA (1)...(19): siRNA sense strand
gggcugggccugaccaaaa

SEQ ID NO: 65682 - RNA, 19 nt, Homo sapiens
  misc_RNA (1)...(19): siRNA sense strand
gauuccuacuuuauacagu

SEQ ID NO: 65683 - RNA, 19 nt, Homo sapiens
  misc_RNA (1)...(19): siRNA sense strand
uaagcucauccaccaagaa

SEQ ID NO: 65684 - RNA, 19 nt, Homo sapiens
  misc_RNA (1)...(19): siRNA sense strand
ccaaaucccacucaaaccu

SEQ ID NO: 65685 - RNA, 19 nt, Homo sapiens
  misc_RNA (1)...(19): siRNA sense strand
uuuaacaauugccugaauc

SEQ ID NO: 65686 - RNA, 19 nt, Homo sapiens
  misc_RNA (1)...(19): siRNA sense strand
acaaaccaagaaaugauga

SEQ ID NO: 65687 - RNA, 19 nt, Homo sapiens
  misc_RNA (1)...(19): siRNA sense strand
ucugaucauucuuacaagu

SEQ ID NO: 65688 - RNA, 19 nt, Homo sapiens
  misc_RNA (1)...(19): siRNA sense strand
gcgucaguuucaaccugua

SEQ ID NO: 65689 - RNA, 19 nt, Homo sapiens
  misc_RNA (1)...(19): siRNA sense strand
guuugugcuuuccauuaug

SEQ ID NO: 65690 - RNA, 19 nt, Homo sapiens
  misc_RNA (1)...(19): siRNA sense strand
gaacaccaauauuacaguu

SEQ ID NO: 65691 - RNA, 19 nt, Homo sapiens
  misc_RNA (1)...(19): siRNA sense strand
gaauaccgcuggcccuuug

SEQ ID NO: 65692 - RNA, 19 nt, Homo sapiens
  misc_RNA (1)...(19): siRNA sense strand
acucaaaccuuucaacaaa

SEQ ID NO: 65693 - RNA, 19 nt, Homo sapiens
  misc_RNA (1)...(19): siRNA sense strand
gaacaaaccaagaaaugau

SEQ ID NO: 65694 - RNA, 19 nt, Homo sapiens
  misc_RNA (1)...(19): siRNA sense strand
auacgugacuguagaauug

SEQ ID NO: 65695 - RNA, 19 nt, Homo sapiens
  misc_RNA (1)...(19): siRNA sense strand
caucauacgugacuguaga

SEQ ID NO: 65696 - RNA, 19 nt, Homo sapiens
  misc_RNA (1)...(19): siRNA sense strand
ccaagaugauugucccaaa

SEQ ID NO: 65697 - RNA, 19 nt, Homo sapiens
  misc_RNA (1)...(19): siRNA sense strand
uauacuggguuuccuguuu

SEQ ID NO: 65698 - RNA, 19 nt, Homo sapiens
  misc_RNA (1)...(19): siRNA sense strand
gcuauaauccaucgaaaug

SEQ ID NO: 65699 - RNA, 19 nt, Homo sapiens
  misc_RNA (1)...(19): siRNA sense strand
ugucaugauuccuacuuua

SEQ ID NO: 65700 - RNA, 19 nt, Homo sapiens
  misc_RNA (1)...(19): siRNA sense strand
gaagaacaaaccaagaaau

SEQ ID NO: 65701 - RNA, 19 nt, Homo sapiens
  misc_RNA (1)...(19): siRNA sense strand
aaagucaccugcaucauca

SEQ ID NO: 65702 - RNA, 19 nt, Homo sapiens
  misc_RNA (1)...(19): siRNA sense strand
ggugauagucauuuacuuu

SEQ ID NO: 65703 - RNA, 19 nt, Homo sapiens
  misc_RNA (1)...(19): siRNA sense strand
uggaaggcauaauuacaua

SEQ ID NO: 65704 - RNA, 19 nt, Homo sapiens
  misc_RNA (1)...(19): siRNA sense strand
gcuaguguguuucuacuca

SEQ ID NO: 65705 - RNA, 19 nt, Homo sapiens
  misc_RNA (1)...(19): siRNA sense strand
ccuguacgcuaguguguuu

SEQ ID NO: 65706 - RNA, 19 nt, Homo sapiens
  misc_RNA (1)...(19): siRNA sense strand
ucacgugucucagcauuga

SEQ ID NO: 65707 - RNA, 19 nt, Homo sapiens
  misc_RNA (1)...(19): siRNA sense strand
acaccaauauuacaguuug

SEQ ID NO: 65708 - RNA, 19 nt, Homo sapiens
  misc_RNA (1)...(19): siRNA sense strand
cuaaagaaggcuuaugaaa

SEQ ID NO: 65709 - RNA, 19 nt, Homo sapiens
  misc_RNA (1)...(19): siRNA sense strand
cagaagaacaaaccaagaa

SEQ ID NO: 65710 - RNA, 19 nt, Homo sapiens
  misc_RNA (1)...(19): siRNA sense strand
ucucaacucuucuacugaa

SEQ ID NO: 65711 - RNA, 19 nt, Homo sapiens
  misc_RNA (1)...(19): siRNA sense strand
caaagucaccugcaucauc

SEQ ID NO: 65712 - RNA, 19 nt, Homo sapiens
  misc_RNA (1)...(19): siRNA sense strand
uuacugacuuugccacuau

SEQ ID NO: 65713 - RNA, 19 nt, Homo sapiens
  misc_RNA (1)...(19): siRNA sense strand
ucaccugcaucaucauuug

SEQ ID NO: 65714 - RNA, 19 nt, Homo sapiens
  misc_RNA (1)...(19): siRNA sense strand
caagaugauugucccaaag

SEQ ID NO: 65715 - RNA, 19 nt, Homo sapiens
  misc_RNA (1)...(19): siRNA sense strand
cuacacagcuauggaauac

SEQ ID NO: 65716 - RNA, 19 nt, Homo sapiens
  misc_RNA (1)...(19): siRNA sense strand
auaugaagcugaagacugu

SEQ ID NO: 65717 - RNA, 19 nt, Homo sapiens
  misc_RNA (1)...(19): siRNA sense strand
gaaacagcuugguggugau

SEQ ID NO: 65718 - RNA, 19 nt, Homo sapiens
  misc_RNA (1)...(19): siRNA sense strand
aagcuggaaggcauaauua

SEQ ID NO: 65719 - RNA, 19 nt, Homo sapiens
  misc_RNA (1)...(19): siRNA sense strand
cagcuauaauccaucgaaa

SEQ ID NO: 65720 - RNA, 19 nt, Homo sapiens
  misc_RNA (1)...(19): siRNA sense strand
caugauuccuacuuuauac

SEQ ID NO: 65721 - RNA, 19 nt, Homo sapiens
  misc_RNA (1)...(19): siRNA sense strand
gaucgauaccuggcuauug

SEQ ID NO: 65722 - RNA, 19 nt, Homo sapiens
  misc_RNA (1)...(19): siRNA sense strand
ggaauaccgcuggcccuuu

SEQ ID NO: 65723 - RNA, 19 nt, Homo sapiens
  misc_RNA (1)...(19): siRNA sense strand
guaagcucauccaccaaga

SEQ ID NO: 65724 - RNA, 19 nt, Homo sapiens
  misc_RNA (1)...(19): siRNA sense strand
caguuugugcuuuccauua

SEQ ID NO: 65725 - RNA, 19 nt, Homo sapiens
  misc_RNA (1)...(19): siRNA sense strand
gcuggcccuuuggcaauua

SEQ ID NO: 65726 - RNA, 19 nt, Homo sapiens
  misc_RNA (1)...(19): siRNA sense strand
acuaugggcugucuacaca

SEQ ID NO: 65727 - RNA, 19 nt, Homo sapiens
  misc_RNA (1)...(19): siRNA sense strand
aaaucccacucaaaccuuu

SEQ ID NO: 65728 - RNA, 19 nt, Homo sapiens
  misc_RNA (1)...(19): siRNA sense strand
gcaauugugcuuuucuuuu

SEQ ID NO: 65729 - RNA, 19 nt, Homo sapiens
  misc_RNA (1)...(19): siRNA sense strand
aagaacaaaccaagaaaug

SEQ ID NO: 65730 - RNA, 19 nt, Homo sapiens
  misc_RNA (1)...(19): siRNA sense strand
ggaaggcauaauuacauau

SEQ ID NO: 65731 - RNA, 19 nt, Homo sapiens
  misc_RNA (1)...(19): siRNA sense strand
cuacugaagaugguauuaa

SEQ ID NO: 65732 - RNA, 19 nt, Homo sapiens
  misc_RNA (1)...(19): siRNA sense strand
gugggaauauuuggaaaca

SEQ ID NO: 65733 - RNA, 19 nt, Homo sapiens
  misc_RNA (1)...(19): siRNA sense strand
agaacaaaccaagaaauga

SEQ ID NO: 65734 - RNA, 19 nt, Homo sapiens
  misc_RNA (1)...(19): siRNA sense strand
gaaauucagaagaacaaac

SEQ ID NO: 65735 - RNA, 19 nt, Homo sapiens
  misc_RNA (1)...(19): siRNA sense strand
gacuguagaauugcagaua

SEQ ID NO: 65736 - RNA, 19 nt, Homo sapiens
  misc_RNA (1)...(19): siRNA sense strand
uggguuuccuguuuccuuu

SEQ ID NO: 65737 - RNA, 19 nt, Homo sapiens
  misc_RNA (1)...(19): siRNA sense strand
ccacucaaaccuuucaaca

SEQ ID NO: 65738 - RNA, 19 nt, Homo sapiens
  misc_RNA (1)...(19): siRNA sense strand
cuguagaauugcagauauu

SEQ ID NO: 65739 - RNA, 19 nt, Homo sapiens
  misc_RNA (1)...(19): siRNA sense strand
caccaaauauucacuuuuc

SEQ ID NO: 65740 - RNA, 19 nt, Homo sapiens
  misc_RNA (1)...(19): siRNA sense strand
aaagcuggaaggcauaauu

SEQ ID NO: 65741 - RNA, 19 nt, Homo sapiens
  misc_RNA (1)...(19): siRNA sense strand
ugagaacaccaauauuaca

SEQ ID NO: 65742 - RNA, 19 nt, Homo sapiens
  misc_RNA (1)...(19): siRNA sense strand
cagauaauguaagcucauc

SEQ ID NO: 65743 - RNA, 19 nt, Homo sapiens
  misc_RNA (1)...(19): siRNA sense strand
caaaucccacucaaaccuu

SEQ ID NO: 65744 - RNA, 19 nt, Homo sapiens
  misc_RNA (1)...(19): siRNA sense strand
agaagaacaaaccaagaaa

SEQ ID NO: 65745 - RNA, 19 nt, Homo sapiens
  misc_RNA (1)...(19): siRNA sense strand
uauuacaguuugugcuuuc

SEQ ID NO: 65746 - RNA, 19 nt, Homo sapiens
  misc_RNA (1)...(19): siRNA sense strand
gagaacaccaauauuacag

SEQ ID NO: 65747 - RNA, 19 nt, Homo sapiens
  misc_RNA (1)...(19): siRNA sense strand
guacgcuaguguguuucua

SEQ ID NO: 65748 - RNA, 19 nt, Homo sapiens
  misc_RNA (1)...(19): siRNA sense strand
gccaaagucaccugcauca

SEQ ID NO: 65749 - RNA, 19 nt, Homo sapiens
  misc_RNA (1)...(19): siRNA sense strand
ugguggugauagucauuua

SEQ ID NO: 65750 - RNA, 19 nt, Homo sapiens
  misc_RNA (1)...(19): siRNA sense strand
uagaauugcagauauugug

SEQ ID NO: 65751 - RNA, 19 nt, Homo sapiens
  misc_RNA (1)...(19): siRNA sense strand
acuguagaauugcagauau

SEQ ID NO: 65752 - RNA, 19 nt, Homo sapiens
  misc_RNA (1)...(19): siRNA sense strand
gauucaacuaggcaucaua

SEQ ID NO: 65753 - RNA, 19 nt, Homo sapiens
  misc_RNA (1)...(19): siRNA sense strand
gcuggaaggcauaauuaca

SEQ ID NO: 65754 - RNA, 19 nt, Homo sapiens
  misc_RNA (1)...(19): siRNA sense strand
aaacagcuugguggugaua

SEQ ID NO: 65755 - RNA, 19 nt, Homo sapiens
  misc_RNA (1)...(19): siRNA sense strand
auacuggguuuccuguuuc

SEQ ID NO: 65756 - RNA, 19 nt, Homo sapiens
  misc_RNA (1)...(19): siRNA sense strand
ccaaagcuggaaggcauaa

SEQ ID NO: 65757 - RNA, 19 nt, Homo sapiens
  misc_RNA (1)...(19): siRNA sense strand
cccaccaaauauucacuuu

SEQ ID NO: 65758 - RNA, 19 nt, Homo sapiens
  misc_RNA (1)...(19): siRNA sense strand
ucagaagaacaaaccaaga

SEQ ID NO: 65759 - RNA, 19 nt, Homo sapiens
  misc_RNA (1)...(19): siRNA sense strand
cauuaugagucccaaaauu

SEQ ID NO: 65760 - RNA, 19 nt, Homo sapiens
  misc_RNA (1)...(19): siRNA sense strand
aguuugugcuuuccauuau

SEQ ID NO: 65761 - RNA, 19 nt, Homo sapiens
  misc_RNA (1)...(19): siRNA sense strand
cauacgugacuguagaauu

SEQ ID NO: 65762 - RNA, 19 nt, Homo sapiens
  misc_RNA (1)...(19): siRNA sense strand
ucacuuuucuggauguauu

SEQ ID NO: 65763 - RNA, 19 nt, Homo sapiens
  misc_RNA (1)...(19): siRNA sense strand
cccuaaagaaggcuuauga

SEQ ID NO: 65764 - RNA, 19 nt, Homo sapiens
  misc_RNA (1)...(19): siRNA sense strand
uuugugcuuuccauuauga

SEQ ID NO: 65765 - RNA, 19 nt, Homo sapiens
  misc_RNA (1)...(19): siRNA sense strand
ucuacacagcuauggaaua

SEQ ID NO: 65766 - RNA, 19 nt, Homo sapiens
  misc_RNA (1)...(19): siRNA sense strand
gauaauguaagcucaucca

SEQ ID NO: 65767 - RNA, 19 nt, Homo sapiens
  misc_RNA (1)...(19): siRNA sense strand
ccuaaagaaggcuuaugaa

SEQ ID NO: 65768 - RNA, 19 nt, Homo sapiens
  misc_RNA (1)...(19): siRNA sense strand
ccaguuugccagcuauaau

SEQ ID NO: 65769 - RNA, 19 nt, Homo sapiens
  misc_RNA (1)...(19): siRNA sense strand
gucaugauuccuacuuuau

SEQ ID NO: 65770 - RNA, 19 nt, Homo sapiens
  misc_RNA (1)...(19): siRNA sense strand
auucucaacucuucuacug

SEQ ID NO: 65771 - RNA, 19 nt, Homo sapiens
  misc_RNA (1)...(19): siRNA sense strand
guagaauugcagauauugu

SEQ ID NO: 65772 - RNA, 19 nt, Homo sapiens
  misc_RNA (1)...(19): siRNA sense strand
ccagcuauaauccaucgaa

SEQ ID NO: 65773 - RNA, 19 nt, Homo sapiens
  misc_RNA (1)...(19): siRNA sense strand
aucgauaccuggcuauugu

SEQ ID NO: 65774 - RNA, 19 nt, Homo sapiens
  misc_RNA (1)...(19): siRNA sense strand
acucacgugucucagcauu

SEQ ID NO: 65775 - RNA, 19 nt, Homo sapiens
  misc_RNA (1)...(19): siRNA sense strand
aagaaggcuuaugaaauuc

SEQ ID NO: 65776 - RNA, 19 nt, Homo sapiens
  misc_RNA (1)...(19): siRNA sense strand
ucucagcauugaucgauac

SEQ ID NO: 65777 - RNA, 19 nt, Homo sapiens
  misc_RNA (1)...(19): siRNA sense strand
uagccaaagucaccugcau

SEQ ID NO: 65778 - RNA, 19 nt, Homo sapiens
  misc_RNA (1)...(19): siRNA sense strand
gaauauuuggaaacagcuu

SEQ ID NO: 65779 - RNA, 19 nt, Homo sapiens
  misc_RNA (1)...(19): siRNA sense strand
uuuggaaggcccuaaagaa

SEQ ID NO: 65780 - RNA, 19 nt, Homo sapiens
  misc_RNA (1)...(19): siRNA sense strand
gggcugggccugaccaaaa

SEQ ID NO: 65781 - RNA, 19 nt, Homo sapiens
  misc_RNA (1)...(19): siRNA sense strand
gauuccuacuuuauacagu

SEQ ID NO: 65782 - RNA, 19 nt, Homo sapiens
  misc_RNA (1)...(19): siRNA sense strand
uaagcucauccaccaagaa

SEQ ID NO: 65783 - RNA, 19 nt, Homo sapiens
  misc_RNA (1)...(19): siRNA sense strand
ccaaaucccacucaaaccu

SEQ ID NO: 65784 - RNA, 19 nt, Homo sapiens
  misc_RNA (1)...(19): siRNA sense strand
uuuaacaauugccugaauc

SEQ ID NO: 65785 - RNA, 19 nt, Homo sapiens
  misc_RNA (1)...(19): siRNA sense strand
acaaaccaagaaaugauga

SEQ ID NO: 65786 - RNA, 19 nt, Homo sapiens
  misc_RNA (1)...(19): siRNA sense strand
ucugaucauucuuacaagu

SEQ ID NO: 65787 - RNA, 19 nt, Homo sapiens
  misc_RNA (1)...(19): siRNA sense strand
gcgucaguuucaaccugua

SEQ ID NO: 65788 - RNA, 19 nt, Homo sapiens
  misc_RNA (1)...(19): siRNA sense strand
guuugugcuuuccauuaug

SEQ ID NO: 65789 - RNA, 19 nt, Homo sapiens
  misc_RNA (1)...(19): siRNA sense strand
gcagugaccugugacguua

SEQ ID NO: 65790 - RNA, 19 nt, Homo sapiens
  misc_RNA (1)...(19): siRNA sense strand
caacaacccucgggacuuu

SEQ ID NO: 65791 - RNA, 19 nt, Homo sapiens
  misc_RNA (1)...(19): siRNA sense strand
ggaaggagauccggcguuu

SEQ ID NO: 65792 - RNA, 19 nt, Homo sapiens
  misc_RNA (1)...(19): siRNA sense strand
gggaacccauaacaaauua

SEQ ID NO: 65793 - RNA, 19 nt, Homo sapiens
  misc_RNA (1)...(19): siRNA sense strand
gauaugaaguggugaagga

SEQ ID NO: 65794 - RNA, 19 nt, Homo sapiens
  misc_RNA (1)...(19): siRNA sense strand
gcacaaccauauuaacuuc

SEQ ID NO: 65795 - RNA, 19 nt, Homo sapiens
  misc_RNA (1)...(19): siRNA sense strand
uaacuucccucacuucugu

SEQ ID NO: 65796 - RNA, 19 nt, Homo sapiens
  misc_RNA (1)...(19): siRNA sense strand
gugaucugcuccauuauuu

SEQ ID NO: 65797 - RNA, 19 nt, Homo sapiens
  misc_RNA (1)...(19): siRNA sense strand
gaucagcaauuucuuaacu

SEQ ID NO: 65798 - RNA, 19 nt, Homo sapiens
  misc_RNA (1)...(19): siRNA sense strand
guaacuacuucaugccuuu

SEQ ID NO: 65799 - RNA, 19 nt, Homo sapiens
  misc_RNA (1)...(19): siRNA sense strand
gaaaacaucaggauuguaa

SEQ ID NO: 65800 - RNA, 19 nt, Homo sapiens
  misc_RNA (1)...(19): siRNA sense strand
gcacaacccugagauaugc

SEQ ID NO: 65801 - RNA, 19 nt, Homo sapiens
  misc_RNA (1)...(19): siRNA sense strand
caagggcacaaccauauua

SEQ ID NO: 65802 - RNA, 19 nt, Homo sapiens
  misc_RNA (1)...(19): siRNA sense strand
gcaaauccuuaaccaaucu

SEQ ID NO: 65803 - RNA, 19 nt, Homo sapiens
  misc_RNA (1)...(19): siRNA sense strand
ggaugaagguggaaauuuu

SEQ ID NO: 65804 - RNA, 19 nt, Homo sapiens
  misc_RNA (1)...(19): siRNA sense strand
ucacuucugugcuacauga

SEQ ID NO: 65805 - RNA, 19 nt, Homo sapiens
  misc_RNA (1)...(19): siRNA sense strand
ccucgggacuuuauugauu

SEQ ID NO: 65806 - RNA, 19 nt, Homo sapiens
  misc_RNA (1)...(19): siRNA sense strand
gaaggaagcccugauugau

SEQ ID NO: 65807 - RNA, 19 nt, Homo sapiens
  misc_RNA (1)...(19): siRNA sense strand
cagcuaaaguccaggaaga

SEQ ID NO: 65808 - RNA, 19 nt, Homo sapiens
  misc_RNA (1)...(19): siRNA sense strand
ucaugacgcugcggaauuu

SEQ ID NO: 65809 - RNA, 19 nt, Homo sapiens
  misc_RNA (1)...(19): siRNA sense strand
ggauccagauaugcaauaa

SEQ ID NO: 65810 - RNA, 19 nt, Homo sapiens
  misc_RNA (1)...(19): siRNA sense strand
cauauuaacuucccucacu

SEQ ID NO: 65811 - RNA, 19 nt, Homo sapiens
  misc_RNA (1)...(19): siRNA sense strand
gcaauaauuuucccacuau

SEQ ID NO: 65812 - RNA, 19 nt, Homo sapiens
  misc_RNA (1)...(19): siRNA sense strand
cagcaaauccuuaaccaau

SEQ ID NO: 65813 - RNA, 19 nt, Homo sapiens
  misc_RNA (1)...(19): siRNA sense strand
uaucagcugugcuucauuc

SEQ ID NO: 65814 - RNA, 19 nt, Homo sapiens
  misc_RNA (1)...(19): siRNA sense strand
gcaauuucuuaacuugaug

SEQ ID NO: 65815 - RNA, 19 nt, Homo sapiens
  misc_RNA (1)...(19): siRNA sense strand
gacguuaaauucagaaacu

SEQ ID NO: 65816 - RNA, 19 nt, Homo sapiens
  misc_RNA (1)...(19): siRNA sense strand
uauuaaggaugucagcaaa

SEQ ID NO: 65817 - RNA, 19 nt, Homo sapiens
  misc_RNA (1)...(19): siRNA sense strand
ucagcaauuucuuaacuug

SEQ ID NO: 65818 - RNA, 19 nt, Homo sapiens
  misc_RNA (1)...(19): siRNA sense strand
gaugucagcaaauccuuaa

SEQ ID NO: 65819 - RNA, 19 nt, Homo sapiens
  misc_RNA (1)...(19): siRNA sense strand
ugaaggaagcccugauuga

SEQ ID NO: 65820 - RNA, 19 nt, Homo sapiens
  misc_RNA (1)...(19): siRNA sense strand
acccagaggucacagcuaa

SEQ ID NO: 65821 - RNA, 19 nt, Homo sapiens
  misc_RNA (1)...(19): siRNA sense strand
ggaccguguucaagaggaa

SEQ ID NO: 65822 - RNA, 19 nt, Homo sapiens
  misc_RNA (1)...(19): siRNA sense strand
caagcacaacccugagaua

SEQ ID NO: 65823 - RNA, 19 nt, Homo sapiens
  misc_RNA (1)...(19): siRNA sense strand
ugcacgagguccagagaua

SEQ ID NO: 65824 - RNA, 19 nt, Homo sapiens
  misc_RNA (1)...(19): siRNA sense strand
ccacaugcccuacacagau

SEQ ID NO: 65825 - RNA, 19 nt, Homo sapiens
  misc_RNA (1)...(19): siRNA sense strand
ucaauggauuugcuucugu

SEQ ID NO: 65826 - RNA, 19 nt, Homo sapiens
  misc_RNA (1)...(19): siRNA sense strand
ggagaggaguuuucuggaa

SEQ ID NO: 65827 - RNA, 19 nt, Homo sapiens
  misc_RNA (1)...(19): siRNA sense strand
cauguuugcuucuccuuuc

SEQ ID NO: 65828 - RNA, 19 nt, Homo sapiens
  misc_RNA (1)...(19): siRNA sense strand
uaaaguccaggaagagauu

SEQ ID NO: 65829 - RNA, 19 nt, Homo sapiens
  misc_RNA (1)...(19): siRNA sense strand
agucugaauucacuauuga

SEQ ID NO: 65830 - RNA, 19 nt, Homo sapiens
  misc_RNA (1)...(19): siRNA sense strand
gggcugugcucccugcaau

SEQ ID NO: 65831 - RNA, 19 nt, Homo sapiens
  misc_RNA (1)...(19): siRNA sense strand
ccaacagucugaauucacu

SEQ ID NO: 65832 - RNA, 19 nt, Homo sapiens
  misc_RNA (1)...(19): siRNA sense strand
gugcuucauuccugucuga

SEQ ID NO: 65833 - RNA, 19 nt, Homo sapiens
  misc_RNA (1)...(19): siRNA sense strand
acagaacuuuaaccugaaa

SEQ ID NO: 65834 - RNA, 19 nt, Homo sapiens
  misc_RNA (1)...(19): siRNA sense strand
uuaaggaugucagcaaauc

SEQ ID NO: 65835 - RNA, 19 nt, Homo sapiens
  misc_RNA (1)...(19): siRNA sense strand
cggcguuucucccucauga

SEQ ID NO: 65836 - RNA, 19 nt, Homo sapiens
  misc_RNA (1)...(19): siRNA sense strand
aaucacugcagcugacuua

SEQ ID NO: 65837 - RNA, 19 nt, Homo sapiens
  misc_RNA (1)...(19): siRNA sense strand
gaccugugacguuaaauuc

SEQ ID NO: 65838 - RNA, 19 nt, Homo sapiens
  misc_RNA (1)...(19): siRNA sense strand
ggugaaggaagcccugauu

SEQ ID NO: 65839 - RNA, 19 nt, Homo sapiens
  misc_RNA (1)...(19): siRNA sense strand
gaacuuuaaccugaaaucu

SEQ ID NO: 65840 - RNA, 19 nt, Homo sapiens
  misc_RNA (1)...(19): siRNA sense strand
cacugcagcugacuuacuu

SEQ ID NO: 65841 - RNA, 19 nt, Homo sapiens
  misc_RNA (1)...(19): siRNA sense strand
cagucugaauucacuauug

SEQ ID NO: 65842 - RNA, 19 nt, Homo sapiens
  misc_RNA (1)...(19): siRNA sense strand
gcaaugugaucugcuccau

SEQ ID NO: 65843 - RNA, 19 nt, Homo sapiens
  misc_RNA (1)...(19): siRNA sense strand
gaaagagauggaaggagau

SEQ ID NO: 65844 - RNA, 19 nt, Homo sapiens
  misc_RNA (1)...(19): siRNA sense strand
gaugaagguggaaauuuua

SEQ ID NO: 65845 - RNA, 19 nt, Homo sapiens
  misc_RNA (1)...(19): siRNA sense strand
ugugcuacaugacaacaaa

SEQ ID NO: 65846 - RNA, 19 nt, Homo sapiens
  misc_RNA (1)...(19): siRNA sense strand
aaaccaacagucugaauuc

SEQ ID NO: 65847 - RNA, 19 nt, Homo sapiens
  misc_RNA (1)...(19): siRNA sense strand
cgggaacccauaacaaauu

SEQ ID NO: 65848 - RNA, 19 nt, Homo sapiens
  misc_RNA (1)...(19): siRNA sense strand
ggugcugcauggauaugaa

SEQ ID NO: 65849 - RNA, 19 nt, Homo sapiens
  misc_RNA (1)...(19): siRNA sense strand
gaauuucccaacccagaga

SEQ ID NO: 65850 - RNA, 19 nt, Homo sapiens
  misc_RNA (1)...(19): siRNA sense strand
gaaaguaaaagaacaccaa

SEQ ID NO: 65851 - RNA, 19 nt, Homo sapiens
  misc_RNA (1)...(19): siRNA sense strand
cacaugcccuacacagaug

SEQ ID NO: 65852 - RNA, 19 nt, Homo sapiens
  misc_RNA (1)...(19): siRNA sense strand
gcaauggaaagagauggaa

SEQ ID NO: 65853 - RNA, 19 nt, Homo sapiens
  misc_RNA (1)...(19): siRNA sense strand
uacagaacuuuaaccugaa

SEQ ID NO: 65854 - RNA, 19 nt, Homo sapiens
  misc_RNA (1)...(19): siRNA sense strand
gggcacaaccauauuaacu

SEQ ID NO: 65855 - RNA, 19 nt, Homo sapiens
  misc_RNA (1)...(19): siRNA sense strand
gcccuguguucacucugua

SEQ ID NO: 65856 - RNA, 19 nt, Homo sapiens
  misc_RNA (1)...(19): siRNA sense strand
ccaagggcacaaccauauu

SEQ ID NO: 65857 - RNA, 19 nt, Homo sapiens
  misc_RNA (1)...(19): siRNA sense strand
agagauacaucgaccucau

SEQ ID NO: 65858 - RNA, 19 nt, Homo sapiens
  misc_RNA (1)...(19): siRNA sense strand
gauuggaaauauccuacag

SEQ ID NO: 65859 - RNA, 19 nt, Homo sapiens
  misc_RNA (1)...(19): siRNA sense strand
aggaagcccugauugaucu

SEQ ID NO: 65860 - RNA, 19 nt, Homo sapiens
  misc_RNA (1)...(19): siRNA sense strand
ggcacaaccauauuaacuu

SEQ ID NO: 65861 - RNA, 19 nt, Homo sapiens
  misc_RNA (1)...(19): siRNA sense strand
cuacaugacaacaaagaau

SEQ ID NO: 65862 - RNA, 19 nt, Homo sapiens
  misc_RNA (1)...(19): siRNA sense strand
gaacccauaacaaauuacu

SEQ ID NO: 65863 - RNA, 19 nt, Homo sapiens
  misc_RNA (1)...(19): siRNA sense strand
cccaugcagugaccuguga

SEQ ID NO: 65864 - RNA, 19 nt, Homo sapiens
  misc_RNA (1)...(19): siRNA sense strand
gcuaaaguccaggaagaga

SEQ ID NO: 65865 - RNA, 19 nt, Homo sapiens
  misc_RNA (1)...(19): siRNA sense strand
gggacuuuauugauugcuu

SEQ ID NO: 65866 - RNA, 19 nt, Homo sapiens
  misc_RNA (1)...(19): siRNA sense strand
uaaaagaacaccaagaauc

SEQ ID NO: 65867 - RNA, 19 nt, Homo sapiens
  misc_RNA (1)...(19): siRNA sense strand
ugguggugcugcauggaua

SEQ ID NO: 65868 - RNA, 19 nt, Homo sapiens
  misc_RNA (1)...(19): siRNA sense strand
ugaccugugacguuaaauu

SEQ ID NO: 65869 - RNA, 19 nt, Homo sapiens
  misc_RNA (1)...(19): siRNA sense strand
uuggaaauauccuacagau

SEQ ID NO: 65870 - RNA, 19 nt, Homo sapiens
  misc_RNA (1)...(19): siRNA sense strand
aaaccuugcuuuuauggaa

SEQ ID NO: 65871 - RNA, 19 nt, Homo sapiens
  misc_RNA (1)...(19): siRNA sense strand
ugugcucccugcaauguga

SEQ ID NO: 65872 - RNA, 19 nt, Homo sapiens
  misc_RNA (1)...(19): siRNA sense strand
gagcauugaggaccguguu

SEQ ID NO: 65873 - RNA, 19 nt, Homo sapiens
  misc_RNA (1)...(19): siRNA sense strand
ugaggaccguguucaagag

SEQ ID NO: 65874 - RNA, 19 nt, Homo sapiens
  misc_RNA (1)...(19): siRNA sense strand
gaagguggaaauuuuaaga

SEQ ID NO: 65875 - RNA, 19 nt, Homo sapiens
  misc_RNA (1)...(19): siRNA sense strand
cccaagggcacaaccauau

SEQ ID NO: 65876 - RNA, 19 nt, Homo sapiens
  misc_RNA (1)...(19): siRNA sense strand
auucagaaacuaccucauu

SEQ ID NO: 65877 - RNA, 19 nt, Homo sapiens
  misc_RNA (1)...(19): siRNA sense strand
gugaaggaagcccugauug

SEQ ID NO: 65878 - RNA, 19 nt, Homo sapiens
  misc_RNA (1)...(19): siRNA sense strand
ucccagugauuggaaauau

SEQ ID NO: 65879 - RNA, 19 nt, Homo sapiens
  misc_RNA (1)...(19): siRNA sense strand
uucagaaacuaccucauuc

SEQ ID NO: 65880 - RNA, 19 nt, Homo sapiens
  misc_RNA (1)...(19): siRNA sense strand
cccgggaacccauaacaaa

SEQ ID NO: 65881 - RNA, 19 nt, Homo sapiens
  misc_RNA (1)...(19): siRNA sense strand
gagauacaucgaccucauc

SEQ ID NO: 65882 - RNA, 19 nt, Homo sapiens
  misc_RNA (1)...(19): siRNA sense strand
gaaagagcuaacagaggau

SEQ ID NO: 65883 - RNA, 19 nt, Homo sapiens
  misc_RNA (1)...(19): siRNA sense strand
acuuuaaccugaaaucucu

SEQ ID NO: 65884 - RNA, 19 nt, Homo sapiens
  misc_RNA (1)...(19): siRNA sense strand
uggaugaagguggaaauuu

SEQ ID NO: 65885 - RNA, 19 nt, Homo sapiens
  misc_RNA (1)...(19): siRNA sense strand
aagcacaacccugagauau

SEQ ID NO: 65886 - RNA, 19 nt, Homo sapiens
  misc_RNA (1)...(19): siRNA sense strand
cuacagauagauauuaagg

SEQ ID NO: 65887 - RNA, 19 nt, Homo sapiens
  misc_RNA (1)...(19): siRNA sense strand
gcuacaugacaacaaagaa

SEQ ID NO: 65888 - RNA, 19 nt, Homo sapiens
  misc_RNA (1)...(19): siRNA sense strand
gucaauggauuugcuucug

SEQ ID NO: 65889 - RNA, 19 nt, Homo sapiens
  misc_RNA (1)...(19): siRNA sense strand
ggacggaccugcucaaugu

SEQ ID NO: 65890 - RNA, 19 nt, Homo sapiens
  misc_RNA (1)...(19): siRNA sense strand
gcaaagagcgcauucugaa

SEQ ID NO: 65891 - RNA, 19 nt, Homo sapiens
  misc_RNA (1)...(19): siRNA sense strand
gccaggagcugcacaagga

SEQ ID NO: 65892 - RNA, 19 nt, Homo sapiens
  misc_RNA (1)...(19): siRNA sense strand
cacaaaggcuggaauugga

SEQ ID NO: 65893 - RNA, 19 nt, Homo sapiens
  misc_RNA (1)...(19): siRNA sense strand
gaauuggaccucagggauu

SEQ ID NO: 65894 - RNA, 19 nt, Homo sapiens
  misc_RNA (1)...(19): siRNA sense strand
gcacaaaggcuggaauugg

SEQ ID NO: 65895 - RNA, 19 nt, Homo sapiens
  misc_RNA (1)...(19): siRNA sense strand
aauuggaccucagggauua

SEQ ID NO: 65896 - RNA, 19 nt, Homo sapiens
  misc_RNA (1)...(19): siRNA sense strand
ggaccucagggauuaauga

SEQ ID NO: 65897 - RNA, 19 nt, Homo sapiens
  misc_RNA (1)...(19): siRNA sense strand
ggaucacugugguaagaug

SEQ ID NO: 65898 - RNA, 19 nt, Homo sapiens
  misc_RNA (1)...(19): siRNA sense strand
ggagguggccaaguucuau

SEQ ID NO: 65899 - RNA, 19 nt, Homo sapiens
  misc_RNA (1)...(19): siRNA sense strand
augaggagguggccaaguu

SEQ ID NO: 65900 - RNA, 19 nt, Homo sapiens
  misc_RNA (1)...(19): siRNA sense strand
ugggaucacugugguaaga

SEQ ID NO: 65901 - RNA, 19 nt, Homo sapiens
  misc_RNA (1)...(19): siRNA sense strand
ugcagucccuggaagaaga

SEQ ID NO: 65902 - RNA, 19 nt, Homo sapiens
  misc_RNA (1)...(19): siRNA sense strand
ccaagcaccacaagacaca

SEQ ID NO: 65903 - RNA, 19 nt, Homo sapiens
  misc_RNA (1)...(19): siRNA sense strand
ccagaugugguuugacuca

SEQ ID NO: 65904 - RNA, 19 nt, Homo sapiens
  misc_RNA (1)...(19): siRNA sense strand
gaacgccaagcaccacaag

SEQ ID NO: 65905 - RNA, 19 nt, Homo sapiens
  misc_RNA (1)...(19): siRNA sense strand
ucacugugguaagauggaa

SEQ ID NO: 65906 - RNA, 19 nt, Homo sapiens
  misc_RNA (1)...(19): siRNA sense strand
aaaagcaacuggcacaaag

SEQ ID NO: 65907 - RNA, 19 nt, Homo sapiens
  misc_RNA (1)...(19): siRNA sense strand
ucucgugggauuauugauu

SEQ ID NO: 65908 - RNA, 19 nt, Homo sapiens
  misc_RNA (1)...(19): siRNA sense strand
ccucccgccuguacaacuu

SEQ ID NO: 65909 - RNA, 19 nt, Homo sapiens
  misc_RNA (1)...(19): siRNA sense strand
gaacgugccccugugcaaa

SEQ ID NO: 65910 - RNA, 19 nt, Homo sapiens
  misc_RNA (1)...(19): siRNA sense strand
cgcaaagagcgcauucuga

SEQ ID NO: 65911 - RNA, 19 nt, Homo sapiens
  misc_RNA (1)...(19): siRNA sense strand
ccugcaagcgccacuuuau

SEQ ID NO: 65912 - RNA, 19 nt, Homo sapiens
  misc_RNA (1)...(19): siRNA sense strand
gcagucccuggaagaagaa

SEQ ID NO: 65913 - RNA, 19 nt, Homo sapiens
  misc_RNA (1)...(19): siRNA sense strand
cucgugggauuauugauuc

SEQ ID NO: 65914 - RNA, 19 nt, Homo sapiens
  misc_RNA (1)...(19): siRNA sense strand
gcaagacgcuccuccugua

SEQ ID NO: 65915 - RNA, 19 nt, Homo sapiens
  misc_RNA (1)...(19): siRNA sense strand
cacaacaucugguacuuug

SEQ ID NO: 65916 - RNA, 19 nt, Homo sapiens
  misc_RNA (1)...(19): siRNA sense strand
uaaggagacuuuguucaug

SEQ ID NO: 65917 - RNA, 19 nt, Homo sapiens
  misc_RNA (1)...(19): siRNA sense strand
gaucagggcuaugguuugg

SEQ ID NO: 65918 - RNA, 19 nt, Homo sapiens
  misc_RNA (1)...(19): siRNA sense strand
caaugccgccuucaacuuu

SEQ ID NO: 65919 - RNA, 19 nt, Homo sapiens
  misc_RNA (1)...(19): siRNA sense strand
cugcauggcugccuucaau

SEQ ID NO: 65920 - RNA, 19 nt, Homo sapiens
  misc_RNA (1)...(19): siRNA sense strand
ccugugacauugugacuga

SEQ ID NO: 65921 - RNA, 19 nt, Homo sapiens
  misc_RNA (1)...(19): siRNA sense strand
gcacagucaccaacuacuu

SEQ ID NO: 65922 - RNA, 19 nt, Homo sapiens
  misc_RNA (1)...(19): siRNA sense strand
ggacaucuacugccacaag

SEQ ID NO: 65923 - RNA, 19 nt, Homo sapiens
  misc_RNA (1)...(19): siRNA sense strand
aagaagaaguuugugaaga

SEQ ID NO: 65924 - RNA, 19 nt, Homo sapiens
  misc_RNA (1)...(19): siRNA sense strand
ccaagaagaaguuugugaa

SEQ ID NO: 65925 - RNA, 19 nt, Homo sapiens
  misc_RNA (1)...(19): siRNA sense strand
guaaugccaucgucaucug

SEQ ID NO: 65926 - RNA, 19 nt, Homo sapiens
  misc_RNA (1)...(19): siRNA sense strand
agaagaaguuugugaagac

SEQ ID NO: 65927 - RNA, 19 nt, Homo sapiens
  misc_RNA (1)...(19): siRNA sense strand
gucagcaucuacuccauga

SEQ ID NO: 65928 - RNA, 19 nt, Homo sapiens
  misc_RNA (1)...(19): siRNA sense strand
caccaaaacucauguugaa

SEQ ID NO: 65929 - RNA, 19 nt, Homo sapiens
  misc_RNA (1)...(19): siRNA sense strand
acacuaaggagacuuuguu

SEQ ID NO: 65930 - RNA, 19 nt, Homo sapiens
  misc_RNA (1)...(19): siRNA sense strand
ccacaacaucugguacuuu

SEQ ID NO: 65931 - RNA, 19 nt, Homo sapiens
  misc_RNA (1)...(19): siRNA sense strand
ggucacacccaccaaggaa

SEQ ID NO: 65932 - RNA, 19 nt, Homo sapiens
  misc_RNA (1)...(19): siRNA sense strand
ggugaucgcccucaucuac

SEQ ID NO: 65933 - RNA, 19 nt, Homo sapiens
  misc_RNA (1)...(19): siRNA sense strand
gcaccaaggcgguuauugc

SEQ ID NO: 65934 - RNA, 19 nt, Homo sapiens
  misc_RNA (1)...(19): siRNA sense strand
ccaacuacuucaucgucaa

SEQ ID NO: 65935 - RNA, 19 nt, Homo sapiens
  misc_RNA (1)...(19): siRNA sense strand
gacugaagccaauaucuca

SEQ ID NO: 65936 - RNA, 19 nt, Homo sapiens
  misc_RNA (1)...(19): siRNA sense strand
caggauggaucagggcuau

SEQ ID NO: 65937 - RNA, 19 nt, Homo sapiens
  misc_RNA (1)...(19): siRNA sense strand
gccaagaagaaguuuguga

SEQ ID NO: 65938 - RNA, 19 nt, Homo sapiens
  misc_RNA (1)...(19): siRNA sense strand
cauguacaaucccaucauc

SEQ ID NO: 65939 - RNA, 19 nt, Homo sapiens
  misc_RNA (1)...(19): siRNA sense strand
gcucuaccauguacaaucc

SEQ ID NO: 65940 - RNA, 19 nt, Homo sapiens
  misc_RNA (1)...(19): siRNA sense strand
caagaagaaguuugugaag

SEQ ID NO: 65941 - RNA, 19 nt, Homo sapiens
  misc_RNA (1)...(19): siRNA sense strand
cuaaggagacuuuguucau

SEQ ID NO: 65942 - RNA, 19 nt, Homo sapiens
  misc_RNA (1)...(19): siRNA sense strand
uguacaaucccaucaucua

SEQ ID NO: 65943 - RNA, 19 nt, Homo sapiens
  misc_RNA (1)...(19): siRNA sense strand
ugaucgcccucaucuacuu

SEQ ID NO: 65944 - RNA, 19 nt, Homo sapiens
  misc_RNA (1)...(19): siRNA sense strand
guacaaucccaucaucuac

SEQ ID NO: 65945 - RNA, 19 nt, Homo sapiens
  misc_RNA (1)...(19): siRNA sense strand
gacaucuacugccacaagu

SEQ ID NO: 65946 - RNA, 19 nt, Homo sapiens
  misc_RNA (1)...(19): siRNA sense strand
ggaucagggcuaugguuug

SEQ ID NO: 65947 - RNA, 19 nt, Homo sapiens
  misc_RNA (1)...(19): siRNA sense strand
ucaaugccgccuucaacuu

SEQ ID NO: 65948 - RNA, 19 nt, Homo sapiens
  misc_RNA (1)...(19): siRNA sense strand
acaaucccaucaucuacug

SEQ ID NO: 65949 - RNA, 19 nt, Homo sapiens
  misc_RNA (1)...(19): siRNA sense strand
caacuacuucaucgucaau

SEQ ID NO: 65950 - RNA, 19 nt, Homo sapiens
  misc_RNA (1)...(19): siRNA sense strand
gccacaacaucugguacuu

SEQ ID NO: 65951 - RNA, 19 nt, Homo sapiens
  misc_RNA (1)...(19): siRNA sense strand
caucuacugccacaaguuc

SEQ ID NO: 65952 - RNA, 19 nt, Homo sapiens
  misc_RNA (1)...(19): siRNA sense strand
ucacacccaccaaggaaga

SEQ ID NO: 65953 - RNA, 19 nt, Homo sapiens
  misc_RNA (1)...(19): siRNA sense strand
gggcuaugguuuggguaug

SEQ ID NO: 65954 - RNA, 19 nt, Homo sapiens
  misc_RNA (1)...(19): siRNA sense strand
caucuggcccugagagcaa

SEQ ID NO: 65955 - RNA, 19 nt, Homo sapiens
  misc_RNA (1)...(19): siRNA sense strand
ccauugcugccgacaggua

SEQ ID NO: 65956 - RNA, 19 nt, Homo sapiens
  misc_RNA (1)...(19): siRNA sense strand
acaaguucauccagcaagu

SEQ ID NO: 65957 - RNA, 19 nt, Homo sapiens
  misc_RNA (1)...(19): siRNA sense strand
gugcugacguuugccaucu

SEQ ID NO: 65958 - RNA, 19 nt, Homo sapiens
  misc_RNA (1)...(19): siRNA sense strand
ugaagccaauaucucaucu

SEQ ID NO: 65959 - RNA, 19 nt, Homo sapiens
  misc_RNA (1)...(19): siRNA sense strand
ggauggaucagggcuaugg

SEQ ID NO: 65960 - RNA, 19 nt, Homo sapiens
  misc_RNA (1)...(19): siRNA sense strand
ugacugaagccaauaucuc

SEQ ID NO: 65961 - RNA, 19 nt, Homo sapiens
  misc_RNA (1)...(19): siRNA sense strand
ccaaaacucauguugaaau

SEQ ID NO: 65962 - RNA, 19 nt, Homo sapiens
  misc_RNA (1)...(19): siRNA sense strand
cagaaccucuuccccauca

SEQ ID NO: 65963 - RNA, 19 nt, Homo sapiens
  misc_RNA (1)...(19): siRNA sense strand
ccuaccaccucuacuucau

SEQ ID NO: 65964 - RNA, 19 nt, Homo sapiens
  misc_RNA (1)...(19): siRNA sense strand
agaaguuugugaagaccau

SEQ ID NO: 65965 - RNA, 19 nt, Homo sapiens
  misc_RNA (1)...(19): siRNA sense strand
guuuggguaugguuugcuu

SEQ ID NO: 65966 - RNA, 19 nt, Homo sapiens
  misc_RNA (1)...(19): siRNA sense strand
uggaucagggcuaugguuu

SEQ ID NO: 65967 - RNA, 19 nt, Homo sapiens
  misc_RNA (1)...(19): siRNA sense strand
ccacaaguucauccagcaa

SEQ ID NO: 65968 - RNA, 19 nt, Homo sapiens
  misc_RNA (1)...(19): siRNA sense strand
gcaaugagcucaaccaugu

SEQ ID NO: 65969 - RNA, 19 nt, Homo sapiens
  misc_RNA (1)...(19): siRNA sense strand
ccaaacaacauuucacuua

SEQ ID NO: 65970 - RNA, 19 nt, Homo sapiens
  misc_RNA (1)...(19): siRNA sense strand
ggagaaaucccaggagaua

SEQ ID NO: 65971 - RNA, 19 nt, Homo sapiens
  misc_RNA (1)...(19): siRNA sense strand
ggaaguauuuggauucuag

SEQ ID NO: 65972 - RNA, 19 nt, Homo sapiens
  misc_RNA (1)...(19): siRNA sense strand
gaacuucuuuccuaucaca

SEQ ID NO: 65973 - RNA, 19 nt, Homo sapiens
  misc_RNA (1)...(19): siRNA sense strand
caucaaaguuuccagcuau

SEQ ID NO: 65974 - RNA, 19 nt, Homo sapiens
  misc_RNA (1)...(19): siRNA sense strand
caacauuucacuuaccaua

SEQ ID NO: 65975 - RNA, 19 nt, Homo sapiens
  misc_RNA (1)...(19): siRNA sense strand
gcauuucgcugguguccuu

SEQ ID NO: 65976 - RNA, 19 nt, Homo sapiens
  misc_RNA (1)...(19): siRNA sense strand
guauuuggauucuagcauu

SEQ ID NO: 65977 - RNA, 19 nt, Homo sapiens
  misc_RNA (1)...(19): siRNA sense strand
gccagaaggucccaaacaa

SEQ ID NO: 65978 - RNA, 19 nt, Homo sapiens
  misc_RNA (1)...(19): siRNA sense strand
ggacagguauauggcuauu

SEQ ID NO: 65979 - RNA, 19 nt, Homo sapiens
  misc_RNA (1)...(19): siRNA sense strand
acagguauauggcuauuau

SEQ ID NO: 65980 - RNA, 19 nt, Homo sapiens
  misc_RNA (1)...(19): siRNA sense strand
uucauaagcucacccuaua

SEQ ID NO: 65981 - RNA, 19 nt, Homo sapiens
  misc_RNA (1)...(19): siRNA sense strand
caaacaacauuucacuuac

SEQ ID NO: 65982 - RNA, 19 nt, Homo sapiens
  misc_RNA (1)...(19): siRNA sense strand
uggcugcccuaucauauuu

SEQ ID NO: 65983 - RNA, 19 nt, Homo sapiens
  misc_RNA (1)...(19): siRNA sense strand
gaaggucccaaacaacauu

SEQ ID NO: 65984 - RNA, 19 nt, Homo sapiens
  misc_RNA (1)...(19): siRNA sense strand
ccauugcgguggacaggua

SEQ ID NO: 65985 - RNA, 19 nt, Homo sapiens
  misc_RNA (1)...(19): siRNA sense strand
gguguacuguuucccauug

SEQ ID NO: 65986 - RNA, 19 nt, Homo sapiens
  misc_RNA (1)...(19): siRNA sense strand
ugaggacugucaccaacua

SEQ ID NO: 65987 - RNA, 19 nt, Homo sapiens
  misc_RNA (1)...(19): siRNA sense strand
gccagcaucuacuccauga

SEQ ID NO: 65988 - RNA, 19 nt, Homo sapiens
  misc_RNA (1)...(19): siRNA sense strand
ugcaaucuaucaacaacua

SEQ ID NO: 65989 - RNA, 19 nt, Homo sapiens
  misc_RNA (1)...(19): siRNA sense strand
gguauauggcuauuauuga

SEQ ID NO: 65990 - RNA, 19 nt, Homo sapiens
  misc_RNA (1)...(19): siRNA sense strand
ccaccagguuucauccaaa

SEQ ID NO: 65991 - RNA, 19 nt, Homo sapiens
  misc_RNA (1)...(19): siRNA sense strand
gcucaagaccaccagguuu

SEQ ID NO: 65992 - RNA, 19 nt, Homo sapiens
  misc_RNA (1)...(19): siRNA sense strand
ucacugcaaucuaucaaca

SEQ ID NO: 65993 - RNA, 19 nt, Homo sapiens
  misc_RNA (1)...(19): siRNA sense strand
gaaaucucaucgucaucug

SEQ ID NO: 65994 - RNA, 19 nt, Homo sapiens
  misc_RNA (1)...(19): siRNA sense strand
ccaagagacccaaguuuca

SEQ ID NO: 65995 - RNA, 19 nt, Homo sapiens
  misc_RNA (1)...(19): siRNA sense strand
ccaugacagucguguuuga

SEQ ID NO: 65996 - RNA, 19 nt, Homo sapiens
  misc_RNA (1)...(19): siRNA sense strand
auaccucuguggaugaaua

SEQ ID NO: 65997 - RNA, 19 nt, Homo sapiens
  misc_RNA (1)...(19): siRNA sense strand
ccaacuacuuccuugugaa

SEQ ID NO: 65998 - RNA, 19 nt, Homo sapiens
  misc_RNA (1)...(19): siRNA sense strand
gauucuagcauuucuacuu

SEQ ID NO: 65999 - RNA, 19 nt, Homo sapiens
  misc_RNA (1)...(19): siRNA sense strand
cuacugcugucugaauaaa

SEQ ID NO: 66000 - RNA, 19 nt, Homo sapiens
  misc_RNA (1)...(19): siRNA sense strand
cuacuugccuucccucagu

SEQ ID NO: 66001 - RNA, 19 nt, Homo sapiens
  misc_RNA (1)...(19): siRNA sense strand
gauugucauuggaaguauu

SEQ ID NO: 66002 - RNA, 19 nt, Homo sapiens
  misc_RNA (1)...(19): siRNA sense strand
ccaaaccggcaaagcagua

SEQ ID NO: 66003 - RNA, 19 nt, Homo sapiens
  misc_RNA (1)...(19): siRNA sense strand
gcucaaccauguacaaucc

SEQ ID NO: 66004 - RNA, 19 nt, Homo sapiens
  misc_RNA (1)...(19): siRNA sense strand
caaaagaaagguugucaaa

SEQ ID NO: 66005 - RNA, 19 nt, Homo sapiens
  misc_RNA (1)...(19): siRNA sense strand
gccaagagacccaaguuuc

SEQ ID NO: 66006 - RNA, 19 nt, Homo sapiens
  misc_RNA (1)...(19): siRNA sense strand
ucaucaaaguuuccagcua

SEQ ID NO: 66007 - RNA, 19 nt, Homo sapiens
  misc_RNA (1)...(19): siRNA sense strand
gggccaaccucaccaacca

SEQ ID NO: 66008 - RNA, 19 nt, Homo sapiens
  misc_RNA (1)...(19): siRNA sense strand
ggaaaucucaucgucaucu

SEQ ID NO: 66009 - RNA, 19 nt, Homo sapiens
  misc_RNA (1)...(19): siRNA sense strand
ggacugucaccaacuacuu

SEQ ID NO: 66010 - RNA, 19 nt, Homo sapiens
  misc_RNA (1)...(19): siRNA sense strand
cagaaggucccaaacaaca

SEQ ID NO: 66011 - RNA, 19 nt, Homo sapiens
  misc_RNA (1)...(19): siRNA sense strand
caagagacccaaguuucaa

SEQ ID NO: 66012 - RNA, 19 nt, Homo sapiens
  misc_RNA (1)...(19): siRNA sense strand
cauucucacugcaaucuau

SEQ ID NO: 66013 - RNA, 19 nt, Homo sapiens
  misc_RNA (1)...(19): siRNA sense strand
cauuggaaguauuuggauu

SEQ ID NO: 66014 - RNA, 19 nt, Homo sapiens
  misc_RNA (1)...(19): siRNA sense strand
caacaacuaaauagaugga

SEQ ID NO: 66015 - RNA, 19 nt, Homo sapiens
  misc_RNA (1)...(19): siRNA sense strand
uuauacugguguacuguuu

SEQ ID NO: 66016 - RNA, 19 nt, Homo sapiens
  misc_RNA (1)...(19): siRNA sense strand
cauagcgagugguacuuug

SEQ ID NO: 66017 - RNA, 19 nt, Homo sapiens
  misc_RNA (1)...(19): siRNA sense strand
ucgcaggaauuccaaaucu

SEQ ID NO: 66018 - RNA, 19 nt, Homo sapiens
  misc_RNA (1)...(19): siRNA sense strand
gaaaagagcaacgccaaga

SEQ ID NO: 66019 - RNA, 19 nt, Homo sapiens
  misc_RNA (1)...(19): siRNA sense strand
guccaugacagucguguuu

SEQ ID NO: 66020 - RNA, 19 nt, Homo sapiens
  misc_RNA (1)...(19): siRNA sense strand
auacaccauuguuggaauu

SEQ ID NO: 66021 - RNA, 19 nt, Homo sapiens
  misc_RNA (1)...(19): siRNA sense strand
gaaagguugucaaaaugau

SEQ ID NO: 66022 - RNA, 19 nt, Homo sapiens
  misc_RNA (1)...(19): siRNA sense strand
gcaaucuaucaacaacuaa

SEQ ID NO: 66023 - RNA, 19 nt, Homo sapiens
  misc_RNA (1)...(19): siRNA sense strand
cauguacaaucccaucauc

SEQ ID NO: 66024 - RNA, 19 nt, Homo sapiens
  misc_RNA (1)...(19): siRNA sense strand
gcaugaggacugucaccaa

SEQ ID NO: 66025 - RNA, 19 nt, Homo sapiens
  misc_RNA (1)...(19): siRNA sense strand
cuacagcaaccaagauugu

SEQ ID NO: 66026 - RNA, 19 nt, Homo sapiens
  misc_RNA (1)...(19): siRNA sense strand
aaagagcaacgccaagaga

SEQ ID NO: 66027 - RNA, 19 nt, Homo sapiens
  misc_RNA (1)...(19): siRNA sense strand
cggcaaagcaguauguaca

SEQ ID NO: 66028 - RNA, 19 nt, Homo sapiens
  misc_RNA (1)...(19): siRNA sense strand
caaccucaccaaccaguuc

SEQ ID NO: 66029 - RNA, 19 nt, Homo sapiens
  misc_RNA (1)...(19): siRNA sense strand
cauacaccauuguuggaau

SEQ ID NO: 66030 - RNA, 19 nt, Homo sapiens
  misc_RNA (1)...(19): siRNA sense strand
uguacaaucccaucaucua

SEQ ID NO: 66031 - RNA, 19 nt, Homo sapiens
  misc_RNA (1)...(19): siRNA sense strand
ucugcuggcugcccuauca

SEQ ID NO: 66032 - RNA, 19 nt, Homo sapiens
  misc_RNA (1)...(19): siRNA sense strand
cagcagaaaccuggauaga

SEQ ID NO: 66033 - RNA, 19 nt, Homo sapiens
  misc_RNA (1)...(19): siRNA sense strand
guacaaucccaucaucuac

SEQ ID NO: 66034 - RNA, 19 nt, Homo sapiens
  misc_RNA (1)...(19): siRNA sense strand
ugggaaaucucaucgucau

SEQ ID NO: 66035 - RNA, 19 nt, Homo sapiens
  misc_RNA (1)...(19): siRNA sense strand
guuggucaauuucaucuac

SEQ ID NO: 66036 - RNA, 19 nt, Homo sapiens
  misc_RNA (1)...(19): siRNA sense strand
gcugguguccuuucaucaa

SEQ ID NO: 66037 - RNA, 19 nt, Homo sapiens
  misc_RNA (1)...(19): siRNA sense strand
ucagugucuuuauuccaaa

SEQ ID NO: 66038 - RNA, 19 nt, Homo sapiens
  misc_RNA (1)...(19): siRNA sense strand
auucuagcauuucuacuug

SEQ ID NO: 66039 - RNA, 19 nt, Homo sapiens
  misc_RNA (1)...(19): siRNA sense strand
gcaaccaagauugucauug

SEQ ID NO: 66040 - RNA, 19 nt, Homo sapiens
  misc_RNA (1)...(19): siRNA sense strand
caaaguuuccagcuaugau

SEQ ID NO: 66041 - RNA, 19 nt, Homo sapiens
  misc_RNA (1)...(19): siRNA sense strand
acaaucccaucaucuacug

SEQ ID NO: 66042 - RNA, 19 nt, Homo sapiens
  misc_RNA (1)...(19): siRNA sense strand
ucauuauacugguguacug

SEQ ID NO: 66043 - RNA, 19 nt, Homo sapiens
  misc_RNA (1)...(19): siRNA sense strand
aagauugucauuggaagua

SEQ ID NO: 66044 - RNA, 19 nt, Homo sapiens
  misc_RNA (1)...(19): siRNA sense strand
cugguguccuuucaucaaa

SEQ ID NO: 66045 - RNA, 19 nt, Homo sapiens
  misc_RNA (1)...(19): siRNA sense strand
acacguuggucaauuucau

SEQ ID NO: 66046 - RNA, 19 nt, Homo sapiens
  misc_RNA (1)...(19): siRNA sense strand
gagcucaaccauguacaau

SEQ ID NO: 66047 - RNA, 19 nt, Homo sapiens
  misc_RNA (1)...(19): siRNA sense strand
gucaugacauuugcuaucu

SEQ ID NO: 66048 - RNA, 19 nt, Homo sapiens
  misc_RNA (1)...(19): siRNA sense strand
cucagugucuuuauuccaa

SEQ ID NO: 66049 - RNA, 19 nt, Homo sapiens
  misc_RNA (1)...(19): siRNA sense strand
ucacuuaccauauuaucgu

SEQ ID NO: 66050 - RNA, 19 nt, Homo sapiens
  misc_RNA (1)...(19): siRNA sense strand
cauccaaaccggcaaagca

SEQ ID NO: 66051 - RNA, 19 nt, Homo sapiens
  misc_RNA (1)...(19): siRNA sense strand
gcccuaucauauuuacuuc

SEQ ID NO: 66052 - RNA, 19 nt, Homo sapiens
  misc_RNA (1)...(19): siRNA sense strand
ggccagaaggucccaaaca

SEQ ID NO: 66053 - RNA, 19 nt, Homo sapiens
  misc_RNA (1)...(19): siRNA sense strand
caucuacugcugucugaau

SEQ ID NO: 66054 - RNA, 19 nt, Homo sapiens
  misc_RNA (1)...(19): siRNA sense strand
aagaaagguugucaaaaug

SEQ ID NO: 66055 - RNA, 19 nt, Homo sapiens
  misc_RNA (1)...(19): siRNA sense strand
aaacaacauuucacuuacc

SEQ ID NO: 66056 - RNA, 19 nt, Homo sapiens
  misc_RNA (1)...(19): siRNA sense strand
gccguacucucugcuuugu

SEQ ID NO: 66057 - RNA, 19 nt, Homo sapiens
  misc_RNA (1)...(19): siRNA sense strand
cuauaccucuguggaugaa

SEQ ID NO: 66058 - RNA, 19 nt, Homo sapiens
  misc_RNA (1)...(19): siRNA sense strand
uugcucaucauggguauua

SEQ ID NO: 66059 - RNA, 19 nt, Homo sapiens
  misc_RNA (1)...(19): siRNA sense strand
gacagguauauggcuauua

SEQ ID NO: 66060 - RNA, 19 nt, Homo sapiens
  misc_RNA (1)...(19): siRNA sense strand
gcuggcugcccuaucauau

SEQ ID NO: 66061 - RNA, 19 nt, Homo sapiens
  misc_RNA (1)...(19): siRNA sense strand
gcuauuauugaucccuuga

SEQ ID NO: 66062 - RNA, 19 nt, Homo sapiens
  misc_RNA (1)...(19): siRNA sense strand
ucauagcgagugguacuuu

SEQ ID NO: 66063 - RNA, 19 nt, Homo sapiens
  misc_RNA (1)...(19): siRNA sense strand
ucaaaguuuccagcuauga

SEQ ID NO: 66064 - RNA, 19 nt, Homo sapiens
  misc_RNA (1)...(19): siRNA sense strand
accaacuacuuccuuguga

SEQ ID NO: 66065 - RNA, 19 nt, Homo sapiens
  misc_RNA (1)...(19): siRNA sense strand
caacuacuuccuugugaac

SEQ ID NO: 66066 - RNA, 19 nt, Homo sapiens
  misc_RNA (1)...(19): siRNA sense strand
uuucauaagcucacccuau

SEQ ID NO: 66067 - RNA, 19 nt, Homo sapiens
  misc_RNA (1)...(19): siRNA sense strand
ucuggucccuggcguaugg

SEQ ID NO: 66068 - RNA, 19 nt, Homo sapiens
  misc_RNA (1)...(19): siRNA sense strand
gacagaagcagccauauuu

SEQ ID NO: 66069 - RNA, 19 nt, Homo sapiens
  misc_RNA (1)...(19): siRNA sense strand
ggagggcgaccaugaguuu

SEQ ID NO: 66070 - RNA, 19 nt, Homo sapiens
  misc_RNA (1)...(19): siRNA sense strand
gcgcuacugugaccauuga

SEQ ID NO: 66071 - RNA, 19 nt, Homo sapiens
  misc_RNA (1)...(19): siRNA sense strand
ggagaaagagcugcuggua

SEQ ID NO: 66072 - RNA, 19 nt, Homo sapiens
  misc_RNA (1)...(19): siRNA sense strand
ugacucaccugccaucaag

SEQ ID NO: 66073 - RNA, 19 nt, Homo sapiens
  misc_RNA (1)...(19): siRNA sense strand
ugacagaagcagccauauu

SEQ ID NO: 66074 - RNA, 19 nt, Homo sapiens
  misc_RNA (1)...(19): siRNA sense strand
gagcccagcgcuacuguga

SEQ ID NO: 66075 - RNA, 19 nt, Homo sapiens
  misc_RNA (1)...(19): siRNA sense strand
ugaaacccuuggccaaugu

SEQ ID NO: 66076 - RNA, 19 nt, Homo sapiens
  misc_RNA (1)...(19): siRNA sense strand
gcuaccggcugcaugacaa

SEQ ID NO: 66077 - RNA, 19 nt, Homo sapiens
  misc_RNA (1)...(19): siRNA sense strand
ugacagggccaaaguccuu

SEQ ID NO: 66078 - RNA, 19 nt, Homo sapiens
  misc_RNA (1)...(19): siRNA sense strand
gcucguggucuuucucuug

SEQ ID NO: 66079 - RNA, 19 nt, Homo sapiens
  misc_RNA (1)...(19): siRNA sense strand
cagaagcagccauauuuua

SEQ ID NO: 66080 - RNA, 19 nt, Homo sapiens
  misc_RNA (1)...(19): siRNA sense strand
gaaccucgagcugaucuuc

SEQ ID NO: 66081 - RNA, 19 nt, Homo sapiens
  misc_RNA (1)...(19): siRNA sense strand
gagcugacagggccaaagu

SEQ ID NO: 66082 - RNA, 19 nt, Homo sapiens
  misc_RNA (1)...(19): siRNA sense strand
cggcgaaccucgagcugau

SEQ ID NO: 66083 - RNA, 19 nt, Homo sapiens
  misc_RNA (1)...(19): siRNA sense strand
gagcagcaccagcccagau

SEQ ID NO: 66084 - RNA, 19 nt, Homo sapiens
  misc_RNA (1)...(19): siRNA sense strand
caacuacagcugcgucuac

SEQ ID NO: 66085 - RNA, 19 nt, Homo sapiens
  misc_RNA (1)...(19): siRNA sense strand
cugaaacccuuggccaaug

SEQ ID NO: 66086 - RNA, 19 nt, Homo sapiens
  misc_RNA (1)...(19): siRNA sense strand
ccgaaucacugcugaaacc

SEQ ID NO: 66087 - RNA, 19 nt, Homo sapiens
  misc_RNA (1)...(19): siRNA sense strand
gcugaaacccuuggccaau

SEQ ID NO: 66088 - RNA, 19 nt, Homo sapiens
  misc_RNA (1)...(19): siRNA sense strand
gggcagaguccgaaucacu

SEQ ID NO: 66089 - RNA, 19 nt, Homo sapiens
  misc_RNA (1)...(19): siRNA sense strand
acuuccagcuguucaagaa

SEQ ID NO: 66090 - RNA, 19 nt, Homo sapiens
  misc_RNA (1)...(19): siRNA sense strand
gauggacccagcugagcaa

SEQ ID NO: 66091 - RNA, 19 nt, Homo sapiens
  misc_RNA (1)...(19): siRNA sense strand
ccaucagccuggcaacuac

SEQ ID NO: 66092 - RNA, 19 nt, Homo sapiens
  misc_RNA (1)...(19): siRNA sense strand
gcgucuacguggaccugaa

SEQ ID NO: 66093 - RNA, 19 nt, Homo sapiens
  misc_RNA (1)...(19): siRNA sense strand
ucuucgagcugcacaacau

SEQ ID NO: 66094 - RNA, 19 nt, Homo sapiens
  misc_RNA (1)...(19): siRNA sense strand
uuccagcuguucaagaaug

SEQ ID NO: 66095 - RNA, 19 nt, Homo sapiens
  misc_RNA (1)...(19): siRNA sense strand
agacgaaggccgugaagac

SEQ ID NO: 66096 - RNA, 19 nt, Homo sapiens
  misc_RNA (1)...(19): siRNA sense strand
ggucgugucugauguauuu

SEQ ID NO: 66097 - RNA, 19 nt, Homo sapiens
  misc_RNA (1)...(19): siRNA sense strand
gaaaugccauguuugucaa

SEQ ID NO: 66098 - RNA, 19 nt, Homo sapiens
  misc_RNA (1)...(19): siRNA sense strand
cuaagaagcucaucaacga

SEQ ID NO: 66099 - RNA, 19 nt, Homo sapiens
  misc_RNA (1)...(19): siRNA sense strand
ggaaaugccauguuuguca

SEQ ID NO: 66100 - RNA, 19 nt, Homo sapiens
  misc_RNA (1)...(19): siRNA sense strand
ugaugguccuggugaauua

SEQ ID NO: 66101 - RNA, 19 nt, Homo sapiens
  misc_RNA (1)...(19): siRNA sense strand
caaggaccauugugcguuu

SEQ ID NO: 66102 - RNA, 19 nt, Homo sapiens
  misc_RNA (1)...(19): siRNA sense strand
ccaagauacucaucaguca

SEQ ID NO: 66103 - RNA, 19 nt, Homo sapiens
  misc_RNA (1)...(19): siRNA sense strand
acacguggaccucggauua

SEQ ID NO: 66104 - RNA, 19 nt, Homo sapiens
  misc_RNA (1)...(19): siRNA sense strand
aaugggagaugcccuuuga

SEQ ID NO: 66105 - RNA, 19 nt, Homo sapiens
  misc_RNA (1)...(19): siRNA sense strand
uccauaaggucgugucuga

SEQ ID NO: 66106 - RNA, 19 nt, Homo sapiens
  misc_RNA (1)...(19): siRNA sense strand
aggcagaaauucacucaga

SEQ ID NO: 66107 - RNA, 19 nt, Homo sapiens
  misc_RNA (1)...(19): siRNA sense strand
caagauggaggaaguggaa

SEQ ID NO: 66108 - RNA, 19 nt, Homo sapiens
  misc_RNA (1)...(19): siRNA sense strand
caacguggacuucgcuuuc

SEQ ID NO: 66109 - RNA, 19 nt, Homo sapiens
  misc_RNA (1)...(19): siRNA sense strand
ucucccaggugguccauaa

SEQ ID NO: 66110 - RNA, 19 nt, Homo sapiens
  misc_RNA (1)...(19): siRNA sense strand
cacccuccuuucugcauua

SEQ ID NO: 66111 - RNA, 19 nt, Homo sapiens
  misc_RNA (1)...(19): siRNA sense strand
ucaaagagcaacucagucu

SEQ ID NO: 66112 - RNA, 19 nt, Homo sapiens
  misc_RNA (1)...(19): siRNA sense strand
gaugaucauugucccuaca

SEQ ID NO: 66113 - RNA, 19 nt, Homo sapiens
  misc_RNA (1)...(19): siRNA sense strand
cauaaggucgugucugaug

SEQ ID NO: 66114 - RNA, 19 nt, Homo sapiens
  misc_RNA (1)...(19): siRNA sense strand
gagacuuacugaggcagaa

SEQ ID NO: 66115 - RNA, 19 nt, Homo sapiens
  misc_RNA (1)...(19): siRNA sense strand
caucuucuuuaaagccaaa

SEQ ID NO: 66116 - RNA, 19 nt, Homo sapiens
  misc_RNA (1)...(19): siRNA sense strand
caaugaugguccuggugaa

SEQ ID NO: 66117 - RNA, 19 nt, Homo sapiens
  misc_RNA (1)...(19): siRNA sense strand
ucagucugcuggacagguu

SEQ ID NO: 66118 - RNA, 19 nt, Homo sapiens
  misc_RNA (1)...(19): siRNA sense strand
aagacaagauggaggaagu

SEQ ID NO: 66119 - RNA, 19 nt, Homo sapiens
  misc_RNA (1)...(19): siRNA sense strand
uaaggucgugucugaugua

SEQ ID NO: 66120 - RNA, 19 nt, Homo sapiens
  misc_RNA (1)...(19): siRNA sense strand
acuauaaccugaacgacau

SEQ ID NO: 66121 - RNA, 19 nt, Homo sapiens
  misc_RNA (1)...(19): siRNA sense strand
caucaacgacuacgugaag

SEQ ID NO: 66122 - RNA, 19 nt, Homo sapiens
  misc_RNA (1)...(19): siRNA sense strand
ggugaauuacaucuucuuu

SEQ ID NO: 66123 - RNA, 19 nt, Homo sapiens
  misc_RNA (1)...(19): siRNA sense strand
ccuggugaauuacaucuuc

SEQ ID NO: 66124 - RNA, 19 nt, Homo sapiens
  misc_RNA (1)...(19): siRNA sense strand
uaaccugaacgacauacuu

SEQ ID NO: 66125 - RNA, 19 nt, Homo sapiens
  misc_RNA (1)...(19): siRNA sense strand
uuacugaggcagaaauuca

SEQ ID NO: 66126 - RNA, 19 nt, Homo sapiens
  misc_RNA (1)...(19): siRNA sense strand
ggccuuugccacugacuuu

SEQ ID NO: 66127 - RNA, 19 nt, Homo sapiens
  misc_RNA (1)...(19): siRNA sense strand
gcaguggggcucucaguaa

SEQ ID NO: 66128 - RNA, 19 nt, Homo sapiens
  misc_RNA (1)...(19): siRNA sense strand
acaagcaguuaguccugaa

SEQ ID NO: 66129 - RNA, 19 nt, Homo sapiens
  misc_RNA (1)...(19): siRNA sense strand
ccaucucgagggacuauaa

SEQ ID NO: 66130 - RNA, 19 nt, Homo sapiens
  misc_RNA (1)...(19): siRNA sense strand
gcucuaccugccaaaguuu

SEQ ID NO: 66131 - RNA, 19 nt, Homo sapiens
  misc_RNA (1)...(19): siRNA sense strand
caacgacuacgugaagaau

SEQ ID NO: 66132 - RNA, 19 nt, Homo sapiens
  misc_RNA (1)...(19): siRNA sense strand
caaaugggagaugcccuuu

SEQ ID NO: 66133 - RNA, 19 nt, Homo sapiens
  misc_RNA (1)...(19): siRNA sense strand
caagauacucaucagucaa

SEQ ID NO: 66134 - RNA, 19 nt, Homo sapiens
  misc_RNA (1)...(19): siRNA sense strand
ccgaggccuuugccacuga

SEQ ID NO: 66135 - RNA, 19 nt, Homo sapiens
  misc_RNA (1)...(19): siRNA sense strand
ggaccauugugcguuucaa

SEQ ID NO: 66136 - RNA, 19 nt, Homo sapiens
  misc_RNA (1)...(19): siRNA sense strand
guggagacaaggaccauug

SEQ ID NO: 66137 - RNA, 19 nt, Homo sapiens
  misc_RNA (1)...(19): siRNA sense strand
ucacccuccuuucugcauu

SEQ ID NO: 66138 - RNA, 19 nt, Homo sapiens
  misc_RNA (1)...(19): siRNA sense strand
ggagggcacagaagcaucu

SEQ ID NO: 66139 - RNA, 19 nt, Homo sapiens
  misc_RNA (1)...(19): siRNA sense strand
agaagcucaucaacgacua

SEQ ID NO: 66140 - RNA, 19 nt, Homo sapiens
  misc_RNA (1)...(19): siRNA sense strand
cauccucccugaucaagac

SEQ ID NO: 66141 - RNA, 19 nt, Homo sapiens
  misc_RNA (1)...(19): siRNA sense strand
ccuccuuucugcauuagug

SEQ ID NO: 66142 - RNA, 19 nt, Homo sapiens
  misc_RNA (1)...(19): siRNA sense strand
ucaccugacuauaccuuac

SEQ ID NO: 66143 - RNA, 19 nt, Homo sapiens
  misc_RNA (1)...(19): siRNA sense strand
gagggacuauaaccugaac

SEQ ID NO: 66144 - RNA, 19 nt, Homo sapiens
  misc_RNA (1)...(19): siRNA sense strand
gcagcugaguaugggaaau

SEQ ID NO: 66145 - RNA, 19 nt, Homo sapiens
  misc_RNA (1)...(19): siRNA sense strand
ugucaaagagcaacucagu

SEQ ID NO: 66146 - RNA, 19 nt, Homo sapiens
  misc_RNA (1)...(19): siRNA sense strand
caaaaucacccuccuuucu

SEQ ID NO: 66147 - RNA, 19 nt, Homo sapiens
  misc_RNA (1)...(19): siRNA sense strand
gagcucuaccugccaaagu

SEQ ID NO: 66148 - RNA, 19 nt, Homo sapiens
  misc_RNA (1)...(19): siRNA sense strand
gcaaugccagcgcacucuu

SEQ ID NO: 66149 - RNA, 19 nt, Homo sapiens
  misc_RNA (1)...(19): siRNA sense strand
gaguuugcaucaccugacu

SEQ ID NO: 66150 - RNA, 19 nt, Homo sapiens
  misc_RNA (1)...(19): siRNA sense strand
ucacggaggaugccaagag

SEQ ID NO: 66151 - RNA, 19 nt, Homo sapiens
  misc_RNA (1)...(19): siRNA sense strand
auaccacccugacagagau

SEQ ID NO: 66152 - RNA, 19 nt, Homo sapiens
  misc_RNA (1)...(19): siRNA sense strand
ucaacgacuacgugaagaa

SEQ ID NO: 66153 - RNA, 19 nt, Homo sapiens
  misc_RNA (1)...(19): siRNA sense strand
ugagcaaagucaccaaucc

SEQ ID NO: 66154 - RNA, 19 nt, Homo sapiens
  misc_RNA (1)...(19): siRNA sense strand
acgacuacgugaagaaugg

SEQ ID NO: 66155 - RNA, 19 nt, Homo sapiens
  misc_RNA (1)...(19): siRNA sense strand
ugggaaaugccauguuugu

SEQ ID NO: 66156 - RNA, 19 nt, Homo sapiens
  misc_RNA (1)...(19): siRNA sense strand
auacucaucagucaagguu

SEQ ID NO: 66157 - RNA, 19 nt, Homo sapiens
  misc_RNA (1)...(19): siRNA sense strand
gggaaaaucacagaucuga

SEQ ID NO: 66158 - RNA, 19 nt, Homo sapiens
  misc_RNA (1)...(19): siRNA sense strand
guauggcuccgaggccuuu

SEQ ID NO: 66159 - RNA, 19 nt, Homo sapiens
  misc_RNA (1)...(19): siRNA sense strand
cagcugaguaugggaaaug

SEQ ID NO: 66160 - RNA, 19 nt, Homo sapiens
  misc_RNA (1)...(19): siRNA sense strand
auaaggucgugucugaugu

SEQ ID NO: 66161 - RNA, 19 nt, Homo sapiens
  misc_RNA (1)...(19): siRNA sense strand
cacccuaacagcccacuug

SEQ ID NO: 66162 - RNA, 19 nt, Homo sapiens
  misc_RNA (1)...(19): siRNA sense strand
caagucaucucuucaaauu

SEQ ID NO: 66163 - RNA, 19 nt, Homo sapiens
  misc_RNA (1)...(19): siRNA sense strand
gagaaagucugaagcacua

SEQ ID NO: 66164 - RNA, 19 nt, Homo sapiens
  misc_RNA (1)...(19): siRNA sense strand
gauaaacgcacaucugaaa

SEQ ID NO: 66165 - RNA, 19 nt, Homo sapiens
  misc_RNA (1)...(19): siRNA sense strand
ggaaucaagucaucucuuc

SEQ ID NO: 66166 - RNA, 19 nt, Homo sapiens
  misc_RNA (1)...(19): siRNA sense strand
gaggagccauggagaauga

SEQ ID NO: 66167 - RNA, 19 nt, Homo sapiens
  misc_RNA (1)...(19): siRNA sense strand
caacaaauuacguggcuua

SEQ ID NO: 66168 - RNA, 19 nt, Homo sapiens
  misc_RNA (1)...(19): siRNA sense strand
ggagaaugauguggauaaa

SEQ ID NO: 66169 - RNA, 19 nt, Homo sapiens
  misc_RNA (1)...(19): siRNA sense strand
gggaagugcugcucuaagu

SEQ ID NO: 66170 - RNA, 19 nt, Homo sapiens
  misc_RNA (1)...(19): siRNA sense strand
gaaaaucgcuguaccuucu

SEQ ID NO: 66171 - RNA, 19 nt, Homo sapiens
  misc_RNA (1)...(19): siRNA sense strand
ccaccaaccucagaugaaa

SEQ ID NO: 66172 - RNA, 19 nt, Homo sapiens
  misc_RNA (1)...(19): siRNA sense strand
ggguucaggugacucauaa

SEQ ID NO: 66173 - RNA, 19 nt, Homo sapiens
  misc_RNA (1)...(19): siRNA sense strand
ggauccucauagcauauua

SEQ ID NO: 66174 - RNA, 19 nt, Homo sapiens
  misc_RNA (1)...(19): siRNA sense strand
gucacagacuuauaaauca

SEQ ID NO: 66175 - RNA, 19 nt, Homo sapiens
  misc_RNA (1)...(19): siRNA sense strand
caaauuauggcaguucuga

SEQ ID NO: 66176 - RNA, 19 nt, Homo sapiens
  misc_RNA (1)...(19): siRNA sense strand
gugcugcucuaagugguua

SEQ ID NO: 66177 - RNA, 19 nt, Homo sapiens
  misc_RNA (1)...(19): siRNA sense strand
auacgccucucccagauaa

SEQ ID NO: 66178 - RNA, 19 nt, Homo sapiens
  misc_RNA (1)...(19): siRNA sense strand
ugucaucaccugucaauau

SEQ ID NO: 66179 - RNA, 19 nt, Homo sapiens
  misc_RNA (1)...(19): siRNA sense strand
gucaucaccugucaauaug

SEQ ID NO: 66180 - RNA, 19 nt, Homo sapiens
  misc_RNA (1)...(19): siRNA sense strand
ggguauaugugccaaagag

SEQ ID NO: 66181 - RNA, 19 nt, Homo sapiens
  misc_RNA (1)...(19): siRNA sense strand
ucaaccaacuacagauuag

SEQ ID NO: 66182 - RNA, 19 nt, Homo sapiens
  misc_RNA (1)...(19): siRNA sense strand
cugucaauaugaucucuua

SEQ ID NO: 66183 - RNA, 19 nt, Homo sapiens
  misc_RNA (1)...(19): siRNA sense strand
gccucuugauguagauuua

SEQ ID NO: 66184 - RNA, 19 nt, Homo sapiens
  misc_RNA (1)...(19): siRNA sense strand
agaaugauguggauaaacg

SEQ ID NO: 66185 - RNA, 19 nt, Homo sapiens
  misc_RNA (1)...(19): siRNA sense strand
gcaguucugagcuggcuaa

SEQ ID NO: 66186 - RNA, 19 nt, Homo sapiens
  misc_RNA (1)...(19): siRNA sense strand
acauguaccuguggaauca

SEQ ID NO: 66187 - RNA, 19 nt, Homo sapiens
  misc_RNA (1)...(19): siRNA sense strand
ggauaaacgcacaucugaa

SEQ ID NO: 66188 - RNA, 19 nt, Homo sapiens
  misc_RNA (1)...(19): siRNA sense strand
gauuuaccgucauaucaag

SEQ ID NO: 66189 - RNA, 19 nt, Homo sapiens
  misc_RNA (1)...(19): siRNA sense strand
uaauuuauccugcccuuca

SEQ ID NO: 66190 - RNA, 19 nt, Homo sapiens
  misc_RNA (1)...(19): siRNA sense strand
guauaugugccaaagagaa

SEQ ID NO: 66191 - RNA, 19 nt, Homo sapiens
  misc_RNA (1)...(19): siRNA sense strand
ucaggugacucauaaccau

SEQ ID NO: 66192 - RNA, 19 nt, Homo sapiens
  misc_RNA (1)...(19): siRNA sense strand
gauggacucauguauguca

SEQ ID NO: 66193 - RNA, 19 nt, Homo sapiens
  misc_RNA (1)...(19): siRNA sense strand
uauccaggguuccuagaug

SEQ ID NO: 66194 - RNA, 19 nt, Homo sapiens
  misc_RNA (1)...(19): siRNA sense strand
gugaauauuuuaccacuga

SEQ ID NO: 66195 - RNA, 19 nt, Homo sapiens
  misc_RNA (1)...(19): siRNA sense strand
gcaccuaaguaucauuucc

SEQ ID NO: 66196 - RNA, 19 nt, Homo sapiens
  misc_RNA (1)...(19): siRNA sense strand
ccaaagagaaagucugaag

SEQ ID NO: 66197 - RNA, 19 nt, Homo sapiens
  misc_RNA (1)...(19): siRNA sense strand
cuaaguaucauuucccaau

SEQ ID NO: 66198 - RNA, 19 nt, Homo sapiens
  misc_RNA (1)...(19): siRNA sense strand
ccugagagaaucgguauuu

SEQ ID NO: 66199 - RNA, 19 nt, Homo sapiens
  misc_RNA (1)...(19): siRNA sense strand
uggauaaacgcacaucuga

SEQ ID NO: 66200 - RNA, 19 nt, Homo sapiens
  misc_RNA (1)...(19): siRNA sense strand
ggacagcagacagacuuga

SEQ ID NO: 66201 - RNA, 19 nt, Homo sapiens
  misc_RNA (1)...(19): siRNA sense strand
uauauugaguggcuaaagg

SEQ ID NO: 66202 - RNA, 19 nt, Homo sapiens
  misc_RNA (1)...(19): siRNA sense strand
ucauaaccauguugaggau

SEQ ID NO: 66203 - RNA, 19 nt, Homo sapiens
  misc_RNA (1)...(19): siRNA sense strand
uauaugugccaaagagaaa

SEQ ID NO: 66204 - RNA, 19 nt, Homo sapiens
  misc_RNA (1)...(19): siRNA sense strand
uaucaaccaacuacagauu

SEQ ID NO: 66205 - RNA, 19 nt, Homo sapiens
  misc_RNA (1)...(19): siRNA sense strand
uagauuuaccgucauauca

SEQ ID NO: 66206 - RNA, 19 nt, Homo sapiens
  misc_RNA (1)...(19): siRNA sense strand
ucacagacuuauaaaucag

SEQ ID NO: 66207 - RNA, 19 nt, Homo sapiens
  misc_RNA (1)...(19): siRNA sense strand
uggagaaugauguggauaa

SEQ ID NO: 66208 - RNA, 19 nt, Homo sapiens
  misc_RNA (1)...(19): siRNA sense strand
gagacaaaauucaacaaca

SEQ ID NO: 66209 - RNA, 19 nt, Homo sapiens
  misc_RNA (1)...(19): siRNA sense strand
caacauguaccuguggaau

SEQ ID NO: 66210 - RNA, 19 nt, Homo sapiens
  misc_RNA (1)...(19): siRNA sense strand
ggaagugcugcucuaagug

SEQ ID NO: 66211 - RNA, 19 nt, Homo sapiens
  misc_RNA (1)...(19): siRNA sense strand
aaagagaaagucugaagca

SEQ ID NO: 66212 - RNA, 19 nt, Homo sapiens
  misc_RNA (1)...(19): siRNA sense strand
cgugggaagugcugcucua

SEQ ID NO: 66213 - RNA, 19 nt, Homo sapiens
  misc_RNA (1)...(19): siRNA sense strand
uggcugaugacaacaaauu

SEQ ID NO: 66214 - RNA, 19 nt, Homo sapiens
  misc_RNA (1)...(19): siRNA sense strand
ccuucagccucuugaugua

SEQ ID NO: 66215 - RNA, 19 nt, Homo sapiens
  misc_RNA (1)...(19): siRNA sense strand
ggugugaacccugagagaa

SEQ ID NO: 66216 - RNA, 19 nt, Homo sapiens
  misc_RNA (1)...(19): siRNA sense strand
uagcaccuaaguaucauuu

SEQ ID NO: 66217 - RNA, 19 nt, Homo sapiens
  misc_RNA (1)...(19): siRNA sense strand
cauggagaaugauguggau

SEQ ID NO: 66218 - RNA, 19 nt, Homo sapiens
  misc_RNA (1)...(19): siRNA sense strand
gaugucaagaucaaacuca

SEQ ID NO: 66219 - RNA, 19 nt, Homo sapiens
  misc_RNA (1)...(19): siRNA sense strand
gaaucaagucaucucuuca

SEQ ID NO: 66220 - RNA, 19 nt, Homo sapiens
  misc_RNA (1)...(19): siRNA sense strand
gucaagaucaaacucaaga

SEQ ID NO: 66221 - RNA, 19 nt, Homo sapiens
  misc_RNA (1)...(19): siRNA sense strand
aaguaucauuucccaauuc

SEQ ID NO: 66222 - RNA, 19 nt, Homo sapiens
  misc_RNA (1)...(19): siRNA sense strand
uuucauuucugggacuuaa

SEQ ID NO: 66223 - RNA, 19 nt, Homo sapiens
  misc_RNA (1)...(19): siRNA sense strand
ccauggagcauuuucauuu

SEQ ID NO: 66224 - RNA, 19 nt, Homo sapiens
  misc_RNA (1)...(19): siRNA sense strand
ggcugaugacaacaaauua

SEQ ID NO: 66225 - RNA, 19 nt, Homo sapiens
  misc_RNA (1)...(19): siRNA sense strand
ccugagagguuuauaaaag

SEQ ID NO: 66226 - RNA, 19 nt, Homo sapiens
  misc_RNA (1)...(19): siRNA sense strand
acccagaugucaagaucaa

SEQ ID NO: 66227 - RNA, 19 nt, Homo sapiens
  misc_RNA (1)...(19): siRNA sense strand
ugacucauaaccauguuga

SEQ ID NO: 66228 - RNA, 19 nt, Homo sapiens
  misc_RNA (1)...(19): siRNA sense strand
cgcuguaccuucugauugu

SEQ ID NO: 66229 - RNA, 19 nt, Homo sapiens
  misc_RNA (1)...(19): siRNA sense strand
guagauuuaccgucauauc

SEQ ID NO: 66230 - RNA, 19 nt, Homo sapiens
  misc_RNA (1)...(19): siRNA sense strand
gcuccuugaugacccagau

SEQ ID NO: 66231 - RNA, 19 nt, Homo sapiens
  misc_RNA (1)...(19): siRNA sense strand
gucgggagcuuugaugaag

SEQ ID NO: 66232 - RNA, 19 nt, Homo sapiens
  misc_RNA (1)...(19): siRNA sense strand
gaaagucugaagcacuaag

SEQ ID NO: 66233 - RNA, 19 nt, Homo sapiens
  misc_RNA (1)...(19): siRNA sense strand
acuugaugcugucgucgua

SEQ ID NO: 66234 - RNA, 19 nt, Homo sapiens
  misc_RNA (1)...(19): siRNA sense strand
ucaagucaucucuucaaau

SEQ ID NO: 66235 - RNA, 19 nt, Homo sapiens
  misc_RNA (1)...(19): siRNA sense strand
aaucaagucaucucuucaa

SEQ ID NO: 66236 - RNA, 19 nt, Homo sapiens
  misc_RNA (1)...(19): siRNA sense strand
gauguagauuuaccgucau

SEQ ID NO: 66237 - RNA, 19 nt, Homo sapiens
  misc_RNA (1)...(19): siRNA sense strand
gauagugcaggagggaauu

SEQ ID NO: 66238 - RNA, 19 nt, Homo sapiens
  misc_RNA (1)...(19): siRNA sense strand
ucccugagagguuuauaaa

SEQ ID NO: 66239 - RNA, 19 nt, Homo sapiens
  misc_RNA (1)...(19): siRNA sense strand
ccuaugucaucaccuguca

SEQ ID NO: 66240 - RNA, 19 nt, Homo sapiens
  misc_RNA (1)...(19): siRNA sense strand
gauccucauagcauauuau

SEQ ID NO: 66241 - RNA, 19 nt, Homo sapiens
  misc_RNA (1)...(19): siRNA sense strand
cguaucaaccaacuacaga

SEQ ID NO: 66242 - RNA, 19 nt, Homo sapiens
  misc_RNA (1)...(19): siRNA sense strand
aaaucgcuguaccuucuga

SEQ ID NO: 66243 - RNA, 19 nt, Homo sapiens
  misc_RNA (1)...(19): siRNA sense strand
gaugaagucccaccaaccu

SEQ ID NO: 66244 - RNA, 19 nt, Homo sapiens
  misc_RNA (1)...(19): siRNA sense strand
acgcacaucugaaaacuau

SEQ ID NO: 66245 - RNA, 19 nt, Homo sapiens
  misc_RNA (1)...(19): siRNA sense strand
ggugacucauaaccauguu

SEQ ID NO: 66246 - RNA, 19 nt, Homo sapiens
  misc_RNA (1)...(19): siRNA sense strand
ccuguggaaucaagucauc

SEQ ID NO: 66247 - RNA, 19 nt, Homo sapiens
  misc_RNA (1)...(19): siRNA sense strand
guauauaaugccuuaaggu

SEQ ID NO: 66248 - RNA, 19 nt, Homo sapiens
  misc_RNA (1)...(19): siRNA sense strand
aguaucauuucccaauuca

SEQ ID NO: 66249 - RNA, 19 nt, Homo sapiens
  misc_RNA (1)...(19): siRNA sense strand
ugccaaagagaaagucuga

SEQ ID NO: 66250 - RNA, 19 nt, Homo sapiens
  misc_RNA (1)...(19): siRNA sense strand
uuaccgucauaucaagaaa

SEQ ID NO: 66251 - RNA, 19 nt, Homo sapiens
  misc_RNA (1)...(19): siRNA sense strand
gugugaacccugagagaau

SEQ ID NO: 66252 - RNA, 19 nt, Homo sapiens
  misc_RNA (1)...(19): siRNA sense strand
guugaggagccauggagaa

SEQ ID NO: 66253 - RNA, 19 nt, Homo sapiens
  misc_RNA (1)...(19): siRNA sense strand
gcugaugacaacaaauuac

SEQ ID NO: 66254 - RNA, 19 nt, Homo sapiens
  misc_RNA (1)...(19): siRNA sense strand
agauuuaccgucauaucaa

SEQ ID NO: 66255 - RNA, 19 nt, Homo sapiens
  misc_RNA (1)...(19): siRNA sense strand
auguagauuuaccgucaua

SEQ ID NO: 66256 - RNA, 19 nt, Homo sapiens
  misc_RNA (1)...(19): siRNA sense strand
ugugaacccugagagaauc

SEQ ID NO: 66257 - RNA, 19 nt, Homo sapiens
  misc_RNA (1)...(19): siRNA sense strand
gcucuaagugguuaugacu

SEQ ID NO: 66258 - RNA, 19 nt, Homo sapiens
  misc_RNA (1)...(19): siRNA sense strand
gucaauaugaucucuuaag

SEQ ID NO: 66259 - RNA, 19 nt, Homo sapiens
  misc_RNA (1)...(19): siRNA sense strand
gggauccucauagcauauu

SEQ ID NO: 66260 - RNA, 19 nt, Homo sapiens
  misc_RNA (1)...(19): siRNA sense strand
gacagcagacagacuugau

SEQ ID NO: 66261 - RNA, 19 nt, Homo sapiens
  misc_RNA (1)...(19): siRNA sense strand
ccacaaagcgaaaguauuu

SEQ ID NO: 66262 - RNA, 19 nt, Homo sapiens
  misc_RNA (1)...(19): siRNA sense strand
gauggcagcuugauccuaa

SEQ ID NO: 66263 - RNA, 19 nt, Homo sapiens
  misc_RNA (1)...(19): siRNA sense strand
ggacaugaguggccucuug

SEQ ID NO: 66264 - RNA, 19 nt, Homo sapiens
  misc_RNA (1)...(19): siRNA sense strand
ccaaaggccugaccguuaa

SEQ ID NO: 66265 - RNA, 19 nt, Homo sapiens
  misc_RNA (1)...(19): siRNA sense strand
gaagagggcuggguucuag

SEQ ID NO: 66266 - RNA, 19 nt, Homo sapiens
  misc_RNA (1)...(19): siRNA sense strand
gcacucagcaucuguguuu

SEQ ID NO: 66267 - RNA, 19 nt, Homo sapiens
  misc_RNA (1)...(19): siRNA sense strand
gauggaagauguggacuuu

SEQ ID NO: 66268 - RNA, 19 nt, Homo sapiens
  misc_RNA (1)...(19): siRNA sense strand
gggaagcccuauccaugua

SEQ ID NO: 66269 - RNA, 19 nt, Homo sapiens
  misc_RNA (1)...(19): siRNA sense strand
ugacaaagccuucguaugg

SEQ ID NO: 66270 - RNA, 19 nt, Homo sapiens
  misc_RNA (1)...(19): siRNA sense strand
gcacugccgugguauauac

SEQ ID NO: 66271 - RNA, 19 nt, Homo sapiens
  misc_RNA (1)...(19): siRNA sense strand
uggaagauguggacuuuga

SEQ ID NO: 66272 - RNA, 19 nt, Homo sapiens
  misc_RNA (1)...(19): siRNA sense strand
gaaaguauuuuguguccaa

SEQ ID NO: 66273 - RNA, 19 nt, Homo sapiens
  misc_RNA (1)...(19): siRNA sense strand
ggaggaagagggcaacgaa

SEQ ID NO: 66274 - RNA, 19 nt, Homo sapiens
  misc_RNA (1)...(19): siRNA sense strand
ggaccuuggccaucuauga

SEQ ID NO: 66275 - RNA, 19 nt, Homo sapiens
  misc_RNA (1)...(19): siRNA sense strand
uaaagacucugugacuugu

SEQ ID NO: 66276 - RNA, 19 nt, Homo sapiens
  misc_RNA (1)...(19): siRNA sense strand
cauaaagacucugugacuu

SEQ ID NO: 66277 - RNA, 19 nt, Homo sapiens
  misc_RNA (1)...(19): siRNA sense strand
ugaguggccucuugaaagu

SEQ ID NO: 66278 - RNA, 19 nt, Homo sapiens
  misc_RNA (1)...(19): siRNA sense strand
gagcugugguaggcuauga

SEQ ID NO: 66279 - RNA, 19 nt, Homo sapiens
  misc_RNA (1)...(19): siRNA sense strand
uccaaaggccugaccguua

SEQ ID NO: 66280 - RNA, 19 nt, Homo sapiens
  misc_RNA (1)...(19): siRNA sense strand
ccauggugaugaagagauu

SEQ ID NO: 66281 - RNA, 19 nt, Homo sapiens
  misc_RNA (1)...(19): siRNA sense strand
cggcugagauccuggacuu

SEQ ID NO: 66282 - RNA, 19 nt, Homo sapiens
  misc_RNA (1)...(19): siRNA sense strand
uguggcagguggacacuaa

SEQ ID NO: 66283 - RNA, 19 nt, Homo sapiens
  misc_RNA (1)...(19): siRNA sense strand
cccaggagauggaagaugu

SEQ ID NO: 66284 - RNA, 19 nt, Homo sapiens
  misc_RNA (1)...(19): siRNA sense strand
cgggagaccuggaguggau

SEQ ID NO: 66285 - RNA, 19 nt, Homo sapiens
  misc_RNA (1)...(19): siRNA sense strand
gcugagauccuggacuuug

SEQ ID NO: 66286 - RNA, 19 nt, Homo sapiens
  misc_RNA (1)...(19): siRNA sense strand
gaccacaaagcgaaaguau

SEQ ID NO: 66287 - RNA, 19 nt, Homo sapiens
  misc_RNA (1)...(19): siRNA sense strand
ggaagaagaggaggaagag

SEQ ID NO: 66288 - RNA, 19 nt, Homo sapiens
  misc_RNA (1)...(19): siRNA sense strand
aagcuuccauggugaugaa

SEQ ID NO: 66289 - RNA, 19 nt, Homo sapiens
  misc_RNA (1)...(19): siRNA sense strand
ggaagagggcaacgaagag

SEQ ID NO: 66290 - RNA, 19 nt, Homo sapiens
  misc_RNA (1)...(19): siRNA sense strand
auaaagacucugugacuug

SEQ ID NO: 66291 - RNA, 19 nt, Homo sapiens
  misc_RNA (1)...(19): siRNA sense strand
gaugacaaagccuucguau

SEQ ID NO: 66292 - RNA, 19 nt, Homo sapiens
  misc_RNA (1)...(19): siRNA sense strand
gcauugcacucagcaucug

SEQ ID NO: 66293 - RNA, 19 nt, Homo sapiens
  misc_RNA (1)...(19): siRNA sense strand
gggaggagagugaguccaa

SEQ ID NO: 66294 - RNA, 19 nt, Homo sapiens
  misc_RNA (1)...(19): siRNA sense strand
ggaggucugguccuuugaa

SEQ ID NO: 66295 - RNA, 19 nt, Homo sapiens
  misc_RNA (1)...(19): siRNA sense strand
ggccauaaagacucuguga

SEQ ID NO: 66296 - RNA, 19 nt, Homo sapiens
  misc_RNA (1)...(19): siRNA sense strand
ucgggcaccuguccuguug

SEQ ID NO: 66297 - RNA, 19 nt, Homo sapiens
  misc_RNA (1)...(19): siRNA sense strand
gacaugaguggccucuuga

SEQ ID NO: 66298 - RNA, 19 nt, Homo sapiens
  misc_RNA (1)...(19): siRNA sense strand
ggacuuugaggaagaagag

SEQ ID NO: 66299 - RNA, 19 nt, Homo sapiens
  misc_RNA (1)...(19): siRNA sense strand
caugaguggccucuugaaa

SEQ ID NO: 66300 - RNA, 19 nt, Homo sapiens
  misc_RNA (1)...(19): siRNA sense strand
ccauaaagacucugugacu

SEQ ID NO: 66301 - RNA, 19 nt, Homo sapiens
  misc_RNA (1)...(19): siRNA sense strand
gugguaggcuaugaagaug

SEQ ID NO: 66302 - RNA, 19 nt, Homo sapiens
  misc_RNA (1)...(19): siRNA sense strand
cgaagagggcuggguucua

SEQ ID NO: 66303 - RNA, 19 nt, Homo sapiens
  misc_RNA (1)...(19): siRNA sense strand
gauuaucgaggugguagaa

SEQ ID NO: 66304 - RNA, 19 nt, Homo sapiens
  misc_RNA (1)...(19): siRNA sense strand
agccaugacuccacucuag

SEQ ID NO: 66305 - RNA, 19 nt, Homo sapiens
  misc_RNA (1)...(19): siRNA sense strand
cccuauccauguacugaaa

SEQ ID NO: 66306 - RNA, 19 nt, Homo sapiens
  misc_RNA (1)...(19): siRNA sense strand
ugagugugcaggccauaaa

SEQ ID NO: 66307 - RNA, 19 nt, Homo sapiens
  misc_RNA (1)...(19): siRNA sense strand
gcaaggugguggguguuuu

SEQ ID NO: 66308 - RNA, 19 nt, Homo sapiens
  misc_RNA (1)...(19): siRNA sense strand
uguggaaagucccgaaugg

SEQ ID NO: 66309 - RNA, 19 nt, Homo sapiens
  misc_RNA (1)...(19): siRNA sense strand
gaggucugguccuuugaag

SEQ ID NO: 66310 - RNA, 19 nt, Homo sapiens
  misc_RNA (1)...(19): siRNA sense strand
gaagcccuauccauguacu

SEQ ID NO: 66311 - RNA, 19 nt, Homo sapiens
  misc_RNA (1)...(19): siRNA sense strand
cagcaucuguguuuugugu

SEQ ID NO: 66312 - RNA, 19 nt, Homo sapiens
  misc_RNA (1)...(19): siRNA sense strand
acaccuggauguggaaagu

SEQ ID NO: 66313 - RNA, 19 nt, Homo sapiens
  misc_RNA (1)...(19): siRNA sense strand
gcaucuguguuuuguguga

SEQ ID NO: 66314 - RNA, 19 nt, Homo sapiens
  misc_RNA (1)...(19): siRNA sense strand
aggaagagggcaacgaaga

SEQ ID NO: 66315 - RNA, 19 nt, Homo sapiens
  misc_RNA (1)...(19): siRNA sense strand
ggauuugggaccugaagca

SEQ ID NO: 66316 - RNA, 19 nt, Homo sapiens
  misc_RNA (1)...(19): siRNA sense strand
gcaacaccuggauguggaa

SEQ ID NO: 66317 - RNA, 19 nt, Homo sapiens
  misc_RNA (1)...(19): siRNA sense strand
ugugguaggcuaugaagau

SEQ ID NO: 66318 - RNA, 19 nt, Homo sapiens
  misc_RNA (1)...(19): siRNA sense strand
gagaaggggaggagaguga

SEQ ID NO: 66319 - RNA, 19 nt, Homo sapiens
  misc_RNA (1)...(19): siRNA sense strand
cgcagacucuuaggcauca

SEQ ID NO: 66320 - RNA, 19 nt, Homo sapiens
  misc_RNA (1)...(19): siRNA sense strand
gccgccugcuuacugacua

SEQ ID NO: 66321 - RNA, 19 nt, Homo sapiens
  misc_RNA (1)...(19): siRNA sense strand
ccacauagcccaccugcau

SEQ ID NO: 66322 - RNA, 19 nt, Homo sapiens
  misc_RNA (1)...(19): siRNA sense strand
ggacaaggagagacucaug

SEQ ID NO: 66323 - RNA, 19 nt, Homo sapiens
  misc_RNA (1)...(19): siRNA sense strand
cugguacccuucuaugaga

SEQ ID NO: 66324 - RNA, 19 nt, Homo sapiens
  misc_RNA (1)...(19): siRNA sense strand
ugucagcgccuuugagauc

SEQ ID NO: 66325 - RNA, 19 nt, Homo sapiens
  misc_RNA (1)...(19): siRNA sense strand
gcugguacccuucuaugag

SEQ ID NO: 66326 - RNA, 19 nt, Homo sapiens
  misc_RNA (1)...(19): siRNA sense strand
gcacuuccugacccuaugu

SEQ ID NO: 66327 - RNA, 19 nt, Homo sapiens
  misc_RNA (1)...(19): siRNA sense strand
gcgcugguacccuucuaug

SEQ ID NO: 66328 - RNA, 19 nt, Homo sapiens
  misc_RNA (1)...(19): siRNA sense strand
gaaauacggugccggcuau

SEQ ID NO: 66329 - RNA, 19 nt, Homo sapiens
  misc_RNA (1)...(19): siRNA sense strand
aaaggaggcugaaggagua

SEQ ID NO: 66330 - RNA, 19 nt, Homo sapiens
  misc_RNA (1)...(19): siRNA sense strand
gaagugcccugaagaaguc

SEQ ID NO: 66331 - RNA, 19 nt, Homo sapiens
  misc_RNA (1)...(19): siRNA sense strand
gggagaugcuggucaugua

SEQ ID NO: 66332 - RNA, 19 nt, Homo sapiens
  misc_RNA (1)...(19): siRNA sense strand
cagagcaccuuuauuucua

SEQ ID NO: 66333 - RNA, 19 nt, Homo sapiens
  misc_RNA (1)...(19): siRNA sense strand
gcagggcacuugugaucaa

SEQ ID NO: 66334 - RNA, 19 nt, Homo sapiens
  misc_RNA (1)...(19): siRNA sense strand
acagaaggcuggcacacua

SEQ ID NO: 66335 - RNA, 19 nt, Homo sapiens
  misc_RNA (1)...(19): siRNA sense strand
ucgcagagcaccuuuauuu

SEQ ID NO: 66336 - RNA, 19 nt, Homo sapiens
  misc_RNA (1)...(19): siRNA sense strand
gcuccugccuccugucuaa

SEQ ID NO: 66337 - RNA, 19 nt, Homo sapiens
  misc_RNA (1)...(19): siRNA sense strand
gggccaaggugcagaguga

SEQ ID NO: 66338 - RNA, 19 nt, Homo sapiens
  misc_RNA (1)...(19): siRNA sense strand
gaaggucucuuugcuaaac

SEQ ID NO: 66339 - RNA, 19 nt, Homo sapiens
  misc_RNA (1)...(19): siRNA sense strand
ggacacugacagaauuaua

SEQ ID NO: 66340 - RNA, 19 nt, Homo sapiens
  misc_RNA (1)...(19): siRNA sense strand
gaggaguucuugaucuuca

SEQ ID NO: 66341 - RNA, 19 nt, Homo sapiens
  misc_RNA (1)...(19): siRNA sense strand
guacaguggugguaacaag

SEQ ID NO: 66342 - RNA, 19 nt, Homo sapiens
  misc_RNA (1)...(19): siRNA sense strand
cuacaucccuucucacagu

SEQ ID NO: 66343 - RNA, 19 nt, Homo sapiens
  misc_RNA (1)...(19): siRNA sense strand
gcagcguccuggaagauga

SEQ ID NO: 66344 - RNA, 19 nt, Homo sapiens
  misc_RNA (1)...(19): siRNA sense strand
uugcuaaacuggagaagaa

SEQ ID NO: 66345 - RNA, 19 nt, Homo sapiens
  misc_RNA (1)...(19): siRNA sense strand
gcagagcaccuuuauuucu

SEQ ID NO: 66346 - RNA, 19 nt, Homo sapiens
  misc_RNA (1)...(19): siRNA sense strand
gaagaccacgacuuucaaa

SEQ ID NO: 66347 - RNA, 19 nt, Homo sapiens
  misc_RNA (1)...(19): siRNA sense strand
ccacacaccucugauuauc

SEQ ID NO: 66348 - RNA, 19 nt, Homo sapiens
  misc_RNA (1)...(19): siRNA sense strand
uugaaggucucuuugcuaa

SEQ ID NO: 66349 - RNA, 19 nt, Homo sapiens
  misc_RNA (1)...(19): siRNA sense strand
ccaagcaugugcaguuugu

SEQ ID NO: 66350 - RNA, 19 nt, Homo sapiens
  misc_RNA (1)...(19): siRNA sense strand
acacgaggcugaccaucuu

SEQ ID NO: 66351 - RNA, 19 nt, Homo sapiens
  misc_RNA (1)...(19): siRNA sense strand
agaaggacuuugaggacua

SEQ ID NO: 66352 - RNA, 19 nt, Homo sapiens
  misc_RNA (1)...(19): siRNA sense strand
caucagcggguaugaaauu

SEQ ID NO: 66353 - RNA, 19 nt, Homo sapiens
  misc_RNA (1)...(19): siRNA sense strand
ggacuuugaggacuacauu

SEQ ID NO: 66354 - RNA, 19 nt, Homo sapiens
  misc_RNA (1)...(19): siRNA sense strand
gggccgagcugucuuucau

SEQ ID NO: 66355 - RNA, 19 nt, Homo sapiens
  misc_RNA (1)...(19): siRNA sense strand
gggaagaccacgacuuuca

SEQ ID NO: 66356 - RNA, 19 nt, Homo sapiens
  misc_RNA (1)...(19): siRNA sense strand
ggcggacacugacagaauu

SEQ ID NO: 66357 - RNA, 19 nt, Homo sapiens
  misc_RNA (1)...(19): siRNA sense strand
ggauggcagucagcaguuu

SEQ ID NO: 66358 - RNA, 19 nt, Homo sapiens
  misc_RNA (1)...(19): siRNA sense strand
caacguggacgacgacuuc

SEQ ID NO: 66359 - RNA, 19 nt, Homo sapiens
  misc_RNA (1)...(19): siRNA sense strand
ugaaggagccgcacugcaa

SEQ ID NO: 66360 - RNA, 19 nt, Homo sapiens
  misc_RNA (1)...(19): siRNA sense strand
agaaagagcugggcauugc

SEQ ID NO: 66361 - RNA, 19 nt, Homo sapiens
  misc_RNA (1)...(19): siRNA sense strand
ggccaagcaugugcaguuu

SEQ ID NO: 66362 - RNA, 19 nt, Homo sapiens
  misc_RNA (1)...(19): siRNA sense strand
gcagaaagagcugggcauu

SEQ ID NO: 66363 - RNA, 19 nt, Homo sapiens
  misc_RNA (1)...(19): siRNA sense strand
gaugaacuucuucuucuug

SEQ ID NO: 66364 - RNA, 19 nt, Homo sapiens
  misc_RNA (1)...(19): siRNA sense strand
ggacaaccuucuguucaag

SEQ ID NO: 66365 - RNA, 19 nt, Homo sapiens
  misc_RNA (1)...(19): siRNA sense strand
gcagcguccuucagagaug

SEQ ID NO: 66366 - RNA, 19 nt, Homo sapiens
  misc_RNA (1)...(19): siRNA sense strand
agaaagcacucagaaacga

SEQ ID NO: 66367 - RNA, 19 nt, Homo sapiens
  misc_RNA (1)...(19): siRNA sense strand
ggacguacaguggugguaa

SEQ ID NO: 66368 - RNA, 19 nt, Homo sapiens
  misc_RNA (1)...(19): siRNA sense strand
ggaagaccacgacuuucaa

SEQ ID NO: 66369 - RNA, 19 nt, Homo sapiens
  misc_RNA (1)...(19): siRNA sense strand
cggaagggauucgacauug

SEQ ID NO: 66370 - RNA, 19 nt, Homo sapiens
  misc_RNA (1)...(19): siRNA sense strand
ggacagcaguauggacauc

SEQ ID NO: 66371 - RNA, 19 nt, Homo sapiens
  misc_RNA (1)...(19): siRNA sense strand
ggagcugccucuguucuuc

SEQ ID NO: 66372 - RNA, 19 nt, Homo sapiens
  misc_RNA (1)...(19): siRNA sense strand
gaacuacacccugcagaag

SEQ ID NO: 66373 - RNA, 19 nt, Homo sapiens
  misc_RNA (1)...(19): siRNA sense strand
gguccucgcuguuccucaa

SEQ ID NO: 66374 - RNA, 19 nt, Homo sapiens
  misc_RNA (1)...(19): siRNA sense strand
ucagaaacgaguacuuuga

SEQ ID NO: 66375 - RNA, 19 nt, Homo sapiens
  misc_RNA (1)...(19): siRNA sense strand
guacauggaggccgucuuc

SEQ ID NO: 66376 - RNA, 19 nt, Homo sapiens
  misc_RNA (1)...(19): siRNA sense strand
ccugggagcuugccuacau

SEQ ID NO: 66377 - RNA, 19 nt, Homo sapiens
  misc_RNA (1)...(19): siRNA sense strand
ccaaggaccaguuuaacga

SEQ ID NO: 66378 - RNA, 19 nt, Homo sapiens
  misc_RNA (1)...(19): siRNA sense strand
acaugacgcuggugaagga

SEQ ID NO: 66379 - RNA, 19 nt, Homo sapiens
  misc_RNA (1)...(19): siRNA sense strand
gcagcacgacauccuguuu

SEQ ID NO: 66380 - RNA, 19 nt, Homo sapiens
  misc_RNA (1)...(19): siRNA sense strand
caaggugaagccaaaugua

SEQ ID NO: 66381 - RNA, 19 nt, Homo sapiens
  misc_RNA (1)...(19): siRNA sense strand
ggaagggauucgacauugc

SEQ ID NO: 66382 - RNA, 19 nt, Homo sapiens
  misc_RNA (1)...(19): siRNA sense strand
gcaccgcugucaagcucaa

SEQ ID NO: 66383 - RNA, 19 nt, Homo sapiens
  misc_RNA (1)...(19): siRNA sense strand
cgagcugucuuucauccuu

SEQ ID NO: 66384 - RNA, 19 nt, Homo sapiens
  misc_RNA (1)...(19): siRNA sense strand
cagaaacgaguacuuugaa

SEQ ID NO: 66385 - RNA, 19 nt, Homo sapiens
  misc_RNA (1)...(19): siRNA sense strand
gaaggaggaagaagacagu

SEQ ID NO: 66386 - RNA, 19 nt, Homo sapiens
  misc_RNA (1)...(19): siRNA sense strand
gcuggacucugugcucuau

SEQ ID NO: 66387 - RNA, 19 nt, Homo sapiens
  misc_RNA (1)...(19): siRNA sense strand
cgagaaagcacucagaaac

SEQ ID NO: 66388 - RNA, 19 nt, Homo sapiens
  misc_RNA (1)...(19): siRNA sense strand
gagaccaaccugcuucaga

SEQ ID NO: 66389 - RNA, 19 nt, Homo sapiens
  misc_RNA (1)...(19): siRNA sense strand
gcaauucugggccauguuc

SEQ ID NO: 66390 - RNA, 19 nt, Homo sapiens
  misc_RNA (1)...(19): siRNA sense strand
gccaagaccgucacugaga

SEQ ID NO: 66391 - RNA, 19 nt, Homo sapiens
  misc_RNA (1)...(19): siRNA sense strand
gaguccacguggccaguuu

SEQ ID NO: 66392 - RNA, 19 nt, Homo sapiens
  misc_RNA (1)...(19): siRNA sense strand
gcuccaaggugcugauacu

SEQ ID NO: 66393 - RNA, 19 nt, Homo sapiens
  misc_RNA (1)...(19): siRNA sense strand
gaccacgacuuucaaaaug

SEQ ID NO: 66394 - RNA, 19 nt, Homo sapiens
  misc_RNA (1)...(19): siRNA sense strand
gaaggacuuugaggacuac

SEQ ID NO: 66395 - RNA, 19 nt, Homo sapiens
  misc_RNA (1)...(19): siRNA sense strand
uggacaaccuucuguucaa

SEQ ID NO: 66396 - RNA, 19 nt, Homo sapiens
  misc_RNA (1)...(19): siRNA sense strand
uggcuccgcuugaagauuc

SEQ ID NO: 66397 - RNA, 19 nt, Homo sapiens
  misc_RNA (1)...(19): siRNA sense strand
ucggugaccuggaggaguu

SEQ ID NO: 66398 - RNA, 19 nt, Homo sapiens
  misc_RNA (1)...(19): siRNA sense strand
gggcauccaucaccaccau

SEQ ID NO: 66399 - RNA, 19 nt, Homo sapiens
  misc_RNA (1)...(19): siRNA sense strand
cugaagaagucaagcagau

SEQ ID NO: 66400 - RNA, 19 nt, Homo sapiens
  misc_RNA (1)...(19): siRNA sense strand
uccaggagcugccucuguu

SEQ ID NO: 66401 - RNA, 19 nt, Homo sapiens
  misc_RNA (1)...(19): siRNA sense strand
gacccaaacaggcuccuuu

SEQ ID NO: 66402 - RNA, 19 nt, Homo sapiens
  misc_RNA (1)...(19): siRNA sense strand
guuacacacggagaaauua

SEQ ID NO: 66403 - RNA, 19 nt, Homo sapiens
  misc_RNA (1)...(19): siRNA sense strand
gcacacuacuucccuuuuc

SEQ ID NO: 66404 - RNA, 19 nt, Homo sapiens
  misc_RNA (1)...(19): siRNA sense strand
gcaaggccaucaucaucac

SEQ ID NO: 66405 - RNA, 19 nt, Homo sapiens
  misc_RNA (1)...(19): siRNA sense strand
ggagccacaugccaacaag

SEQ ID NO: 66406 - RNA, 19 nt, Homo sapiens
  misc_RNA (1)...(19): siRNA sense strand
ccgggaagaccacgacuuu

SEQ ID NO: 66407 - RNA, 19 nt, Homo sapiens
  misc_RNA (1)...(19): siRNA sense strand
gcggacacugacagaauua

SEQ ID NO: 66408 - RNA, 19 nt, Homo sapiens
  misc_RNA (1)...(19): siRNA sense strand
aauauaacauccaguacca

SEQ ID NO: 66409 - RNA, 19 nt, Homo sapiens
  misc_RNA (1)...(19): siRNA sense strand
gaaauauaacauccaguac

SEQ ID NO: 66410 - RNA, 19 nt, Homo sapiens
  misc_RNA (1)...(19): siRNA sense strand
ggugccggcuaucacauga

SEQ ID NO: 66411 - RNA, 19 nt, Homo sapiens
  misc_RNA (1)...(19): siRNA sense strand
gcgcagggcacuugugauc

SEQ ID NO: 66412 - RNA, 19 nt, Homo sapiens
  misc_RNA (1)...(19): siRNA sense strand
cauccuguuugacaacuug

SEQ ID NO: 66413 - RNA, 19 nt, Homo sapiens
  misc_RNA (1)...(19): siRNA sense strand
ccagcucauugggaaauuu

SEQ ID NO: 66414 - RNA, 19 nt, Homo sapiens
  misc_RNA (1)...(19): siRNA sense strand
caccuacgguucaguuaca

SEQ ID NO: 66415 - RNA, 19 nt, Homo sapiens
  misc_RNA (1)...(19): siRNA sense strand
aggaggcgcuggaggaguu

SEQ ID NO: 66416 - RNA, 19 nt, Homo sapiens
  misc_RNA (1)...(19): siRNA sense strand
gcucugaugucggaaaggu

SEQ ID NO: 66417 - RNA, 19 nt, Homo sapiens
  misc_RNA (1)...(19): siRNA sense strand
gcccacuacugcaagaaau

SEQ ID NO: 66418 - RNA, 19 nt, Homo sapiens
  misc_RNA (1)...(19): siRNA sense strand
uggaggaguucuugaucuu

SEQ ID NO: 66419 - RNA, 19 nt, Homo sapiens
  misc_RNA (1)...(19): siRNA sense strand
gagagagcacgcacagguu

SEQ ID NO: 66420 - RNA, 19 nt, Homo sapiens
  misc_RNA (1)...(19): siRNA sense strand
gcccugcacugccagcaau

SEQ ID NO: 66421 - RNA, 19 nt, Homo sapiens
  misc_RNA (1)...(19): siRNA sense strand
cugaugaacuucuucuucu

SEQ ID NO: 66422 - RNA, 19 nt, Homo sapiens
  misc_RNA (1)...(19): siRNA sense strand
gggccauguuccugaagaa

SEQ ID NO: 66423 - RNA, 19 nt, Homo sapiens
  misc_RNA (1)...(19): siRNA sense strand
gugucaaggugaagccaaa

SEQ ID NO: 66424 - RNA, 19 nt, Homo sapiens
  misc_RNA (1)...(19): siRNA sense strand
ugugggaccucaucuccuu

SEQ ID NO: 66425 - RNA, 19 nt, Homo sapiens
  misc_RNA (1)...(19): siRNA sense strand
ccauuguggucuccaacuu

SEQ ID NO: 66426 - RNA, 19 nt, Homo sapiens
  misc_RNA (1)...(19): siRNA sense strand
ugaugaacuucuucuucuu

SEQ ID NO: 66427 - RNA, 19 nt, Homo sapiens
  misc_RNA (1)...(19): siRNA sense strand
cggagagccugcugucauc

SEQ ID NO: 66428 - RNA, 19 nt, Homo sapiens
  misc_RNA (1)...(19): siRNA sense strand
gaugaugucugcacugaua

SEQ ID NO: 66429 - RNA, 19 nt, Homo sapiens
  misc_RNA (1)...(19): siRNA sense strand
ggacagaaaccacucuuua

SEQ ID NO: 66430 - RNA, 19 nt, Homo sapiens
  misc_RNA (1)...(19): siRNA sense strand
ccaaaucgauggugacuuu

SEQ ID NO: 66431 - RNA, 19 nt, Homo sapiens
  misc_RNA (1)...(19): siRNA sense strand
gcaaggagcuguucgucaa

SEQ ID NO: 66432 - RNA, 19 nt, Homo sapiens
  misc_RNA (1)...(19): siRNA sense strand
gagcaucccucccaacauu

SEQ ID NO: 66433 - RNA, 19 nt, Homo sapiens
  misc_RNA (1)...(19): siRNA sense strand
gcugucaucuggcuuaaua

SEQ ID NO: 66434 - RNA, 19 nt, Homo sapiens
  misc_RNA (1)...(19): siRNA sense strand
gcaauuacaugaccuucaa

SEQ ID NO: 66435 - RNA, 19 nt, Homo sapiens
  misc_RNA (1)...(19): siRNA sense strand
ccaauaaccuggacauaga

SEQ ID NO: 66436 - RNA, 19 nt, Homo sapiens
  misc_RNA (1)...(19): siRNA sense strand
agaaagaacugcugaaaca

SEQ ID NO: 66437 - RNA, 19 nt, Homo sapiens
  misc_RNA (1)...(19): siRNA sense strand
cgacauggauucaaggauu

SEQ ID NO: 66438 - RNA, 19 nt, Homo sapiens
  misc_RNA (1)...(19): siRNA sense strand
gagaagaaucggaucaaua

SEQ ID NO: 66439 - RNA, 19 nt, Homo sapiens
  misc_RNA (1)...(19): siRNA sense strand
gauugaagcugcuggaaga

SEQ ID NO: 66440 - RNA, 19 nt, Homo sapiens
  misc_RNA (1)...(19): siRNA sense strand
gaaaggaagagaagucaaa

SEQ ID NO: 66441 - RNA, 19 nt, Homo sapiens
  misc_RNA (1)...(19): siRNA sense strand
gaagguguaugaggaauug

SEQ ID NO: 66442 - RNA, 19 nt, Homo sapiens
  misc_RNA (1)...(19): siRNA sense strand
ggaagaaggauguggauga

SEQ ID NO: 66443 - RNA, 19 nt, Homo sapiens
  misc_RNA (1)...(19): siRNA sense strand
gggaggccaucaaugaaua

SEQ ID NO: 66444 - RNA, 19 nt, Homo sapiens
  misc_RNA (1)...(19): siRNA sense strand
cagagcagauggaguauga

SEQ ID NO: 66445 - RNA, 19 nt, Homo sapiens
  misc_RNA (1)...(19): siRNA sense strand
gaagaaggauguggaugau

SEQ ID NO: 66446 - RNA, 19 nt, Homo sapiens
  misc_RNA (1)...(19): siRNA sense strand
ggaaggagaaggccaagaa

SEQ ID NO: 66447 - RNA, 19 nt, Homo sapiens
  misc_RNA (1)...(19): siRNA sense strand
agaagaaucggaucaauaa

SEQ ID NO: 66448 - RNA, 19 nt, Homo sapiens
  misc_RNA (1)...(19): siRNA sense strand
ccaaguggcuucauuaaaa

SEQ ID NO: 66449 - RNA, 19 nt, Homo sapiens
  misc_RNA (1)...(19): siRNA sense strand
agaaggauguggaugauga

SEQ ID NO: 66450 - RNA, 19 nt, Homo sapiens
  misc_RNA (1)...(19): siRNA sense strand
agaaagugcucaaggagaa

SEQ ID NO: 66451 - RNA, 19 nt, Homo sapiens
  misc_RNA (1)...(19): siRNA sense strand
gacagaaaccacucuuuaa

SEQ ID NO: 66452 - RNA, 19 nt, Homo sapiens
  misc_RNA (1)...(19): siRNA sense strand
ggaagaaggacaagaagau

SEQ ID NO: 66453 - RNA, 19 nt, Homo sapiens
  misc_RNA (1)...(19): siRNA sense strand
gacauggauucaaggauuu

SEQ ID NO: 66454 - RNA, 19 nt, Homo sapiens
  misc_RNA (1)...(19): siRNA sense strand
ucaauaaggccguaucuga

SEQ ID NO: 66455 - RNA, 19 nt, Homo sapiens
  misc_RNA (1)...(19): siRNA sense strand
gcagaaaugccgacggaaa

SEQ ID NO: 66456 - RNA, 19 nt, Homo sapiens
  misc_RNA (1)...(19): siRNA sense strand
ucaucuggcuuaauaacua

SEQ ID NO: 66457 - RNA, 19 nt, Homo sapiens
  misc_RNA (1)...(19): siRNA sense strand
ggauguggaugaugaugga

SEQ ID NO: 66458 - RNA, 19 nt, Homo sapiens
  misc_RNA (1)...(19): siRNA sense strand
cagacaaaguggugaagaa

SEQ ID NO: 66459 - RNA, 19 nt, Homo sapiens
  misc_RNA (1)...(19): siRNA sense strand
ggagaagaaucggaucaau

SEQ ID NO: 66460 - RNA, 19 nt, Homo sapiens
  misc_RNA (1)...(19): siRNA sense strand
gaaacaguaugagaagcaa

SEQ ID NO: 66461 - RNA, 19 nt, Homo sapiens
  misc_RNA (1)...(19): siRNA sense strand
acaucaagcuggagaaguu

SEQ ID NO: 66462 - RNA, 19 nt, Homo sapiens
  misc_RNA (1)...(19): siRNA sense strand
ucgcugcucuggacaauga

SEQ ID NO: 66463 - RNA, 19 nt, Homo sapiens
  misc_RNA (1)...(19): siRNA sense strand
gagcagaguguuagccaaa

SEQ ID NO: 66464 - RNA, 19 nt, Homo sapiens
  misc_RNA (1)...(19): siRNA sense strand
uugaagagcuggcaguaga

SEQ ID NO: 66465 - RNA, 19 nt, Homo sapiens
  misc_RNA (1)...(19): siRNA sense strand
gagcugacaccaagcgauu

SEQ ID NO: 66466 - RNA, 19 nt, Homo sapiens
  misc_RNA (1)...(19): siRNA sense strand
gaaagaaccaccggcugaa

SEQ ID NO: 66467 - RNA, 19 nt, Homo sapiens
  misc_RNA (1)...(19): siRNA sense strand
gaaaaugcaucugacauca

SEQ ID NO: 66468 - RNA, 19 nt, Homo sapiens
  misc_RNA (1)...(19): siRNA sense strand
gcagaguguuagccaaauc

SEQ ID NO: 66469 - RNA, 19 nt, Homo sapiens
  misc_RNA (1)...(19): siRNA sense strand
aagagaaagugcucaagga

SEQ ID NO: 66470 - RNA, 19 nt, Homo sapiens
  misc_RNA (1)...(19): siRNA sense strand
caagggugcugugaucguu

SEQ ID NO: 66471 - RNA, 19 nt, Homo sapiens
  misc_RNA (1)...(19): siRNA sense strand
ccagggcacuguucaugga

SEQ ID NO: 66472 - RNA, 19 nt, Homo sapiens
  misc_RNA (1)...(19): siRNA sense strand
agaggaggauaaagaagaa

SEQ ID NO: 66473 - RNA, 19 nt, Homo sapiens
  misc_RNA (1)...(19): siRNA sense strand
acaaugaagaggaggauaa

SEQ ID NO: 66474 - RNA, 19 nt, Homo sapiens
  misc_RNA (1)...(19): siRNA sense strand
caacagcaacagcagcaaa

SEQ ID NO: 66475 - RNA, 19 nt, Homo sapiens
  misc_RNA (1)...(19): siRNA sense strand
ggccaucaaugaauacaag

SEQ ID NO: 66476 - RNA, 19 nt, Homo sapiens
  misc_RNA (1)...(19): siRNA sense strand
ugaagaggaggauaaagaa

SEQ ID NO: 66477 - RNA, 19 nt, Homo sapiens
  misc_RNA (1)...(19): siRNA sense strand
ucauggagcgucuuaagaa

SEQ ID NO: 66478 - RNA, 19 nt, Homo sapiens
  misc_RNA (1)...(19): siRNA sense strand
ggaagaggaggaggaagaa

SEQ ID NO: 66479 - RNA, 19 nt, Homo sapiens
  misc_RNA (1)...(19): siRNA sense strand
gaaggcgcgaguuguguuu

SEQ ID NO: 66480 - RNA, 19 nt, Homo sapiens
  misc_RNA (1)...(19): siRNA sense strand
gcaucgacauggauucaag

SEQ ID NO: 66481 - RNA, 19 nt, Homo sapiens
  misc_RNA (1)...(19): siRNA sense strand
aggcagagcagauggagua

SEQ ID NO: 66482 - RNA, 19 nt, Homo sapiens
  misc_RNA (1)...(19): siRNA sense strand
augcagaccuguacauugu

SEQ ID NO: 66483 - RNA, 19 nt, Homo sapiens
  misc_RNA (1)...(19): siRNA sense strand
auacaagggugcugugauc

SEQ ID NO: 66484 - RNA, 19 nt, Homo sapiens
  misc_RNA (1)...(19): siRNA sense strand
uggacgagccaaccaauaa

SEQ ID NO: 66485 - RNA, 19 nt, Homo sapiens
  misc_RNA (1)...(19): siRNA sense strand
ggucagaaggcgcgaguug

SEQ ID NO: 66486 - RNA, 19 nt, Homo sapiens
  misc_RNA (1)...(19): siRNA sense strand
cagaaucgacccacacaga

SEQ ID NO: 66487 - RNA, 19 nt, Homo sapiens
  misc_RNA (1)...(19): siRNA sense strand
gaagaaggacaagaagauc

SEQ ID NO: 66488 - RNA, 19 nt, Homo sapiens
  misc_RNA (1)...(19): siRNA sense strand
gcacgagcccaucagacaa

SEQ ID NO: 66489 - RNA, 19 nt, Homo sapiens
  misc_RNA (1)...(19): siRNA sense strand
acaaaguggugaagaaagg

SEQ ID NO: 66490 - RNA, 19 nt, Homo sapiens
  misc_RNA (1)...(19): siRNA sense strand
ggaugaugauggagaagag

SEQ ID NO: 66491 - RNA, 19 nt, Homo sapiens
  misc_RNA (1)...(19): siRNA sense strand
aaaugcaucugacaucaag

SEQ ID NO: 66492 - RNA, 19 nt, Homo sapiens
  misc_RNA (1)...(19): siRNA sense strand
caagaaggcagagcagaug

SEQ ID NO: 66493 - RNA, 19 nt, Homo sapiens
  misc_RNA (1)...(19): siRNA sense strand
ugaagcgcccuaaggagua

SEQ ID NO: 66494 - RNA, 19 nt, Homo sapiens
  misc_RNA (1)...(19): siRNA sense strand
cccagcggcuccacuacua

SEQ ID NO: 66495 - RNA, 19 nt, Homo sapiens
  misc_RNA (1)...(19): siRNA sense strand
ccaaacaagggaaggagaa

SEQ ID NO: 66496 - RNA, 19 nt, Homo sapiens
  misc_RNA (1)...(19): siRNA sense strand
ugucugcacugauaucauc

SEQ ID NO: 66497 - RNA, 19 nt, Homo sapiens
  misc_RNA (1)...(19): siRNA sense strand
ccaaccaccuggaccucaa

SEQ ID NO: 66498 - RNA, 19 nt, Homo sapiens
  misc_RNA (1)...(19): siRNA sense strand
gagaagguguaugaggaau

SEQ ID NO: 66499 - RNA, 19 nt, Homo sapiens
  misc_RNA (1)...(19): siRNA sense strand
ggcuagagaagguguauga

SEQ ID NO: 66500 - RNA, 19 nt, Homo sapiens
  misc_RNA (1)...(19): siRNA sense strand
gagcuggcaguagaagaua

SEQ ID NO: 66501 - RNA, 19 nt, Homo sapiens
  misc_RNA (1)...(19): siRNA sense strand
cagagcagcugcgcaugga

SEQ ID NO: 66502 - RNA, 19 nt, Homo sapiens
  misc_RNA (1)...(19): siRNA sense strand
gauucaaggauuugcauug

SEQ ID NO: 66503 - RNA, 19 nt, Homo sapiens
  misc_RNA (1)...(19): siRNA sense strand
acacugugcgcuucacuuu

SEQ ID NO: 66504 - RNA, 19 nt, Homo sapiens
  misc_RNA (1)...(19): siRNA sense strand
caaugaagaggaggauaaa

SEQ ID NO: 66505 - RNA, 19 nt, Homo sapiens
  misc_RNA (1)...(19): siRNA sense strand
aaucgauggugacuuugaa

SEQ ID NO: 66506 - RNA, 19 nt, Homo sapiens
  misc_RNA (1)...(19): siRNA sense strand
gaauacaagggugcuguga

SEQ ID NO: 66507 - RNA, 19 nt, Homo sapiens
  misc_RNA (1)...(19): siRNA sense strand
ggugguagcagaugagaca

SEQ ID NO: 66508 - RNA, 19 nt, Homo sapiens
  misc_RNA (1)...(19): siRNA sense strand
ugaagaaagggaagaagga

SEQ ID NO: 66509 - RNA, 19 nt, Homo sapiens
  misc_RNA (1)...(19): siRNA sense strand
gaggauaaagaagaagaaa

SEQ ID NO: 66510 - RNA, 19 nt, Homo sapiens
  misc_RNA (1)...(19): siRNA sense strand
ggaggauaaagaagaagaa

SEQ ID NO: 66511 - RNA, 19 nt, Homo sapiens
  misc_RNA (1)...(19): siRNA sense strand
ccagugaugaggaggauga

SEQ ID NO: 66512 - RNA, 19 nt, Homo sapiens
  misc_RNA (1)...(19): siRNA sense strand
gggaagaaggacaagaaga

SEQ ID NO: 66513 - RNA, 19 nt, Homo sapiens
  misc_RNA (1)...(19): siRNA sense strand
cagcggcuccacuacuaua

SEQ ID NO: 66514 - RNA, 19 nt, Homo sapiens
  misc_RNA (1)...(19): siRNA sense strand
uggaugaugucugcacuga

SEQ ID NO: 66515 - RNA, 19 nt, Homo sapiens
  misc_RNA (1)...(19): siRNA sense strand
ggaagaccuugcugaucgu

SEQ ID NO: 66516 - RNA, 19 nt, Homo sapiens
  misc_RNA (1)...(19): siRNA sense strand
gaagaggaggauaaagaag

SEQ ID NO: 66517 - RNA, 19 nt, Homo sapiens
  misc_RNA (1)...(19): siRNA sense strand
gaagaggaggaggaagaaa

SEQ ID NO: 66518 - RNA, 19 nt, Homo sapiens
  misc_RNA (1)...(19): siRNA sense strand
gggcuuugacccugaaaug

SEQ ID NO: 66519 - RNA, 19 nt, Homo sapiens
  misc_RNA (1)...(19): siRNA sense strand
gauggugacuuugaagacu

SEQ ID NO: 66520 - RNA, 19 nt, Homo sapiens
  misc_RNA (1)...(19): siRNA sense strand
guggaggagcagaguguua

SEQ ID NO: 66521 - RNA, 19 nt, Homo sapiens
  misc_RNA (1)...(19): siRNA sense strand
ccaagaaggcagagcagau

SEQ ID NO: 66522 - RNA, 19 nt, Homo sapiens
  misc_RNA (1)...(19): siRNA sense strand
ggcccugggugaagucaug

SEQ ID NO: 66523 - RNA, 19 nt, Homo sapiens
  misc_RNA (1)...(19): siRNA sense strand
gaaggacaagaagaucaaa

SEQ ID NO: 66524 - RNA, 19 nt, Homo sapiens
  misc_RNA (1)...(19): siRNA sense strand
agacaaaguggugaagaaa

SEQ ID NO: 66525 - RNA, 19 nt, Homo sapiens
  misc_RNA (1)...(19): siRNA sense strand
gaggagacgcccacugagu

SEQ ID NO: 66526 - RNA, 19 nt, Homo sapiens
  misc_RNA (1)...(19): siRNA sense strand
ccacacuccucaagcacau

SEQ ID NO: 66527 - RNA, 19 nt, Homo sapiens
  misc_RNA (1)...(19): siRNA sense strand
agaccacacuccucaagca

SEQ ID NO: 66528 - RNA, 19 nt, Homo sapiens
  misc_RNA (1)...(19): siRNA sense strand
gcacuuuaauuccaacuuu

SEQ ID NO: 66529 - RNA, 19 nt, Homo sapiens
  misc_RNA (1)...(19): siRNA sense strand
gcaguuggcuuaucauaca

SEQ ID NO: 66530 - RNA, 19 nt, Homo sapiens
  misc_RNA (1)...(19): siRNA sense strand
caucaguucuuccucaaua

SEQ ID NO: 66531 - RNA, 19 nt, Homo sapiens
  misc_RNA (1)...(19): siRNA sense strand
cuucaacugucuacaauua

SEQ ID NO: 66532 - RNA, 19 nt, Homo sapiens
  misc_RNA (1)...(19): siRNA sense strand
gugcugagguuucuggaua

SEQ ID NO: 66533 - RNA, 19 nt, Homo sapiens
  misc_RNA (1)...(19): siRNA sense strand
ggaacuggcucggaaguau

SEQ ID NO: 66534 - RNA, 19 nt, Homo sapiens
  misc_RNA (1)...(19): siRNA sense strand
caacauacacacucacuug

SEQ ID NO: 66535 - RNA, 19 nt, Homo sapiens
  misc_RNA (1)...(19): siRNA sense strand
gagagcgcauugccuauga

SEQ ID NO: 66536 - RNA, 19 nt, Homo sapiens
  misc_RNA (1)...(19): siRNA sense strand
ccaccuuccuggacacuuu

SEQ ID NO: 66537 - RNA, 19 nt, Homo sapiens
  misc_RNA (1)...(19): siRNA sense strand
gauuacauuugggacuuua

SEQ ID NO: 66538 - RNA, 19 nt, Homo sapiens
  misc_RNA (1)...(19): siRNA sense strand
ccaccugauuggcaacaua

SEQ ID NO: 66539 - RNA, 19 nt, Homo sapiens
  misc_RNA (1)...(19): siRNA sense strand
caacuucaacugucuacaa

SEQ ID NO: 66540 - RNA, 19 nt, Homo sapiens
  misc_RNA (1)...(19): siRNA sense strand
caacaacgagaacauugaa

SEQ ID NO: 66541 - RNA, 19 nt, Homo sapiens
  misc_RNA (1)...(19): siRNA sense strand
gggcaacgcugugcucuac

SEQ ID NO: 66542 - RNA, 19 nt, Homo sapiens
  misc_RNA (1)...(19): siRNA sense strand
ucaacugucuacaauuaug

SEQ ID NO: 66543 - RNA, 19 nt, Homo sapiens
  misc_RNA (1)...(19): siRNA sense strand
ccaccaccauggccaagaa

SEQ ID NO: 66544 - RNA, 19 nt, Homo sapiens
  misc_RNA (1)...(19): siRNA sense strand
aaagguggcuucaacuucu

SEQ ID NO: 66545 - RNA, 19 nt, Homo sapiens
  misc_RNA (1)...(19): siRNA sense strand
gaucaugggagcacagaug

SEQ ID NO: 66546 - RNA, 19 nt, Homo sapiens
  misc_RNA (1)...(19): siRNA sense strand
gaacuggcucggaaguaug

SEQ ID NO: 66547 - RNA, 19 nt, Homo sapiens
  misc_RNA (1)...(19): siRNA sense strand
ugaaggcagugcacagcuu

SEQ ID NO: 66548 - RNA, 19 nt, Homo sapiens
  misc_RNA (1)...(19): siRNA sense strand
gcugagguuucuggauaaa

SEQ ID NO: 66549 - RNA, 19 nt, Homo sapiens
  misc_RNA (1)...(19): siRNA sense strand
uaaagguggcuucaacuuc

SEQ ID NO: 66550 - RNA, 19 nt, Homo sapiens
  misc_RNA (1)...(19): siRNA sense strand
acacucacuuggugcacua

SEQ ID NO: 66551 - RNA, 19 nt, Homo sapiens
  misc_RNA (1)...(19): siRNA sense strand
caacugucuacaauuauga

SEQ ID NO: 66552 - RNA, 19 nt, Homo sapiens
  misc_RNA (1)...(19): siRNA sense strand
gagaugcugcugcccaaga

SEQ ID NO: 66553 - RNA, 19 nt, Homo sapiens
  misc_RNA (1)...(19): siRNA sense strand
caagaacagcuuccagaca

SEQ ID NO: 66554 - RNA, 19 nt, Homo sapiens
  misc_RNA (1)...(19): siRNA sense strand
gcucggaaguaugcagaug

SEQ ID NO: 66555 - RNA, 19 nt, Homo sapiens
  misc_RNA (1)...(19): siRNA sense strand
ucacaacaacgagaacauu

SEQ ID NO: 66556 - RNA, 19 nt, Homo sapiens
  misc_RNA (1)...(19): siRNA sense strand
ggagagcgcauugccuaug

SEQ ID NO: 66557 - RNA, 19 nt, Homo sapiens
  misc_RNA (1)...(19): siRNA sense strand
ccaagacugccaugacaga

SEQ ID NO: 66558 - RNA, 19 nt, Homo sapiens
  misc_RNA (1)...(19): siRNA sense strand
ggacacuuuccacuacuau

SEQ ID NO: 66559 - RNA, 19 nt, Homo sapiens
  misc_RNA (1)...(19): siRNA sense strand
acacuuuccacuacuauga

SEQ ID NO: 66560 - RNA, 19 nt, Homo sapiens
  misc_RNA (1)...(19): siRNA sense strand
ugagguuucuggauaaagg

SEQ ID NO: 66561 - RNA, 19 nt, Homo sapiens
  misc_RNA (1)...(19): siRNA sense strand
guacaacgggaaguucuau

SEQ ID NO: 66562 - RNA, 19 nt, Homo sapiens
  misc_RNA (1)...(19): siRNA sense strand
uccagacacugcagaugaa

SEQ ID NO: 66563 - RNA, 19 nt, Homo sapiens
  misc_RNA (1)...(19): siRNA sense strand
aagaggcaguggcgcugua

SEQ ID NO: 66564 - RNA, 19 nt, Homo sapiens
  misc_RNA (1)...(19): siRNA sense strand
ccacaggcuucucauucca

SEQ ID NO: 66565 - RNA, 19 nt, Homo sapiens
  misc_RNA (1)...(19): siRNA sense strand
ugauuacauuugggacuuu

SEQ ID NO: 66566 - RNA, 19 nt, Homo sapiens
  misc_RNA (1)...(19): siRNA sense strand
cgagcccucugccucuuug

SEQ ID NO: 66567 - RNA, 19 nt, Homo sapiens
  misc_RNA (1)...(19): siRNA sense strand
gguacaacgggaaguucua

SEQ ID NO: 66568 - RNA, 19 nt, Homo sapiens
  misc_RNA (1)...(19): siRNA sense strand
gcuacaaugggaccuauag

SEQ ID NO: 66569 - RNA, 19 nt, Homo sapiens
  misc_RNA (1)...(19): siRNA sense strand
cagaggacauucccaacac

SEQ ID NO: 66570 - RNA, 19 nt, Homo sapiens
  misc_RNA (1)...(19): siRNA sense strand
ggugauggaggccaagaug

SEQ ID NO: 66571 - RNA, 19 nt, Homo sapiens
  misc_RNA (1)...(19): siRNA sense strand
ccaggagcaucccaauguc

SEQ ID NO: 66572 - RNA, 19 nt, Homo sapiens
  misc_RNA (1)...(19): siRNA sense strand
acaacaacgagaacauuga

SEQ ID NO: 66573 - RNA, 19 nt, Homo sapiens
  misc_RNA (1)...(19): siRNA sense strand
cacaacaacgagaacauug

SEQ ID NO: 66574 - RNA, 19 nt, Homo sapiens
  misc_RNA (1)...(19): siRNA sense strand
gcaguuucuucacaacaac

SEQ ID NO: 66575 - RNA, 19 nt, Homo sapiens
  misc_RNA (1)...(19): siRNA sense strand
gcaacauacacacucacuu

SEQ ID NO: 66576 - RNA, 19 nt, Homo sapiens
  misc_RNA (1)...(19): siRNA sense strand
agaugcugcugcccaagaa

SEQ ID NO: 66577 - RNA, 19 nt, Homo sapiens
  misc_RNA (1)...(19): siRNA sense strand
gcaucuaccaccagaacga

SEQ ID NO: 66578 - RNA, 19 nt, Homo sapiens
  misc_RNA (1)...(19): siRNA sense strand
cgccgcaguuggcuuauca

SEQ ID NO: 66579 - RNA, 19 nt, Homo sapiens
  misc_RNA (1)...(19): siRNA sense strand
uaccacaggcuucucauuc

SEQ ID NO: 66580 - RNA, 19 nt, Homo sapiens
  misc_RNA (1)...(19): siRNA sense strand
caauaccacaggcuucuca

SEQ ID NO: 66581 - RNA, 19 nt, Homo sapiens
  misc_RNA (1)...(19): siRNA sense strand
gcccucugccucuuugaaa

SEQ ID NO: 66582 - RNA, 19 nt, Homo sapiens
  misc_RNA (1)...(19): siRNA sense strand
ucggaaguaugcagaugga

SEQ ID NO: 66583 - RNA, 19 nt, Homo sapiens
  misc_RNA (1)...(19): siRNA sense strand
uagcuacaaugggaccuau

SEQ ID NO: 66584 - RNA, 19 nt, Homo sapiens
  misc_RNA (1)...(19): siRNA sense strand
uuugggacuuuaucuucua

SEQ ID NO: 66585 - RNA, 19 nt, Homo sapiens
  misc_RNA (1)...(19): siRNA sense strand
gaccaggagcaucccaaug

SEQ ID NO: 66586 - RNA, 19 nt, Homo sapiens
  misc_RNA (1)...(19): siRNA sense strand
ucagaggacauucccaaca

SEQ ID NO: 66587 - RNA, 19 nt, Homo sapiens
  misc_RNA (1)...(19): siRNA sense strand
gagcaguuucuucacaaca

SEQ ID NO: 66588 - RNA, 19 nt, Homo sapiens
  misc_RNA (1)...(19): siRNA sense strand
cauuugggacuuuaucuuc

SEQ ID NO: 66589 - RNA, 19 nt, Homo sapiens
  misc_RNA (1)...(19): siRNA sense strand
uuaaagguggcuucaacuu

SEQ ID NO: 66590 - RNA, 19 nt, Homo sapiens
  misc_RNA (1)...(19): siRNA sense strand
ccguggagcagguguggua

SEQ ID NO: 66591 - RNA, 19 nt, Homo sapiens
  misc_RNA (1)...(19): siRNA sense strand
ccgcaguuggcuuaucaua

SEQ ID NO: 66592 - RNA, 19 nt, Homo sapiens
  misc_RNA (1)...(19): siRNA sense strand
uggagcaggugugguacaa

SEQ ID NO: 66593 - RNA, 19 nt, Homo sapiens
  misc_RNA (1)...(19): siRNA sense strand
gaccaaguaccucgauguc

SEQ ID NO: 66594 - RNA, 19 nt, Homo sapiens
  misc_RNA (1)...(19): siRNA sense strand
caucuccacagcagaguau

SEQ ID NO: 66595 - RNA, 19 nt, Homo sapiens
  misc_RNA (1)...(19): siRNA sense strand
cugcagcccuccaguacca

SEQ ID NO: 66596 - RNA, 19 nt, Homo sapiens
  misc_RNA (1)...(19): siRNA sense strand
aagguggcuucaacuucua

SEQ ID NO: 66597 - RNA, 19 nt, Homo sapiens
  misc_RNA (1)...(19): siRNA sense strand
cuuuaaagguggcuucaac

SEQ ID NO: 66598 - RNA, 19 nt, Homo sapiens
  misc_RNA (1)...(19): siRNA sense strand
caggcaugcagaccaagua

SEQ ID NO: 66599 - RNA, 19 nt, Homo sapiens
  misc_RNA (1)...(19): siRNA sense strand
ccaagccccugcaucaguu

SEQ ID NO: 66600 - RNA, 19 nt, Homo sapiens
  misc_RNA (1)...(19): siRNA sense strand
cccuggcagugaccaagua

SEQ ID NO: 66601 - RNA, 19 nt, Homo sapiens
  misc_RNA (1)...(19): siRNA sense strand
cacugcagaugaagcuaga

SEQ ID NO: 66602 - RNA, 19 nt, Homo sapiens
  misc_RNA (1)...(19): siRNA sense strand
gauguggcaggcaccaaga

SEQ ID NO: 66603 - RNA, 19 nt, Homo sapiens
  misc_RNA (1)...(19): siRNA sense strand
aacuucaacugucuacaau

SEQ ID NO: 66604 - RNA, 19 nt, Homo sapiens
  misc_RNA (1)...(19): siRNA sense strand
gcagaccaaguaccucgau

SEQ ID NO: 66605 - RNA, 19 nt, Homo sapiens
  misc_RNA (1)...(19): siRNA sense strand
uuccaagacugccaugaca

SEQ ID NO: 66606 - RNA, 19 nt, Homo sapiens
  misc_RNA (1)...(19): siRNA sense strand
ggcggcacuuuaauuccaa

SEQ ID NO: 66607 - RNA, 19 nt, Homo sapiens
  misc_RNA (1)...(19): siRNA sense strand
ccagagacacugugaucgu

SEQ ID NO: 66608 - RNA, 19 nt, Homo sapiens
  misc_RNA (1)...(19): siRNA sense strand
gcauccagagacacuguga

SEQ ID NO: 66609 - RNA, 19 nt, Homo sapiens
  misc_RNA (1)...(19): siRNA sense strand
gcuccggccauucaacuuc

SEQ ID NO: 66610 - RNA, 19 nt, Homo sapiens
  misc_RNA (1)...(19): siRNA sense strand
agcaguuucuucacaacaa

SEQ ID NO: 66611 - RNA, 19 nt, Homo sapiens
  misc_RNA (1)...(19): siRNA sense strand
uugagcaguuucuucacaa

SEQ ID NO: 66612 - RNA, 19 nt, Homo sapiens
  misc_RNA (1)...(19): siRNA sense strand
cguggucuuugagcaguuu

SEQ ID NO: 66613 - RNA, 19 nt, Homo sapiens
  misc_RNA (1)...(19): siRNA sense strand
ugcugagguuucuggauaa

SEQ ID NO: 66614 - RNA, 19 nt, Homo sapiens
  misc_RNA (1)...(19): siRNA sense strand
gcgaagagaucuacauuaa

SEQ ID NO: 66615 - RNA, 19 nt, Homo sapiens
  misc_RNA (1)...(19): siRNA sense strand
gaagaucucugcccucaag

SEQ ID NO: 66616 - RNA, 19 nt, Homo sapiens
  misc_RNA (1)...(19): siRNA sense strand
caaccuggcuaccguguuu

SEQ ID NO: 66617 - RNA, 19 nt, Homo sapiens
  misc_RNA (1)...(19): siRNA sense strand
agaagaagauguuugagaa

SEQ ID NO: 66618 - RNA, 19 nt, Homo sapiens
  misc_RNA (1)...(19): siRNA sense strand
gaagagaucuacauuaacc

SEQ ID NO: 66619 - RNA, 19 nt, Homo sapiens
  misc_RNA (1)...(19): siRNA sense strand
ggaaaggccuggagaugag

SEQ ID NO: 66620 - RNA, 19 nt, Homo sapiens
  misc_RNA (1)...(19): siRNA sense strand
gagagaagcaauucagaaa

SEQ ID NO: 66621 - RNA, 19 nt, Homo sapiens
  misc_RNA (1)...(19): siRNA sense strand
ggaagcaccagcaguauga

SEQ ID NO: 66622 - RNA, 19 nt, Homo sapiens
  misc_RNA (1)...(19): siRNA sense strand
cagaggaacucaaagugaa

SEQ ID NO: 66623 - RNA, 19 nt, Homo sapiens
  misc_RNA (1)...(19): siRNA sense strand
caagugggaugaggaguuu

SEQ ID NO: 66624 - RNA, 19 nt, Homo sapiens
  misc_RNA (1)...(19): siRNA sense strand
gcaauaaagacgacgauga

SEQ ID NO: 66625 - RNA, 19 nt, Homo sapiens
  misc_RNA (1)...(19): siRNA sense strand
gagaagcaauucagaaacu

SEQ ID NO: 66626 - RNA, 19 nt, Homo sapiens
  misc_RNA (1)...(19): siRNA sense strand
cggcacgucuuccucuuua

SEQ ID NO: 66627 - RNA, 19 nt, Homo sapiens
  misc_RNA (1)...(19): siRNA sense strand
gaaggagcccaucaacaaa

SEQ ID NO: 66628 - RNA, 19 nt, Homo sapiens
  misc_RNA (1)...(19): siRNA sense strand
acaaugagaucguggacaa

SEQ ID NO: 66629 - RNA, 19 nt, Homo sapiens
  misc_RNA (1)...(19): siRNA sense strand
gagaagugcuaugacaaga

SEQ ID NO: 66630 - RNA, 19 nt, Homo sapiens
  misc_RNA (1)...(19): siRNA sense strand
ugaagaagaagauguuuga

SEQ ID NO: 66631 - RNA, 19 nt, Homo sapiens
  misc_RNA (1)...(19): siRNA sense strand
ggagagaagcaauucagaa

SEQ ID NO: 66632 - RNA, 19 nt, Homo sapiens
  misc_RNA (1)...(19): siRNA sense strand
uaaagucgcucuggagaca

SEQ ID NO: 66633 - RNA, 19 nt, Homo sapiens
  misc_RNA (1)...(19): siRNA sense strand
ucuaugagauccacaagga

SEQ ID NO: 66634 - RNA, 19 nt, Homo sapiens
  misc_RNA (1)...(19): siRNA sense strand
agaaggagcccaucaacaa

SEQ ID NO: 66635 - RNA, 19 nt, Homo sapiens
  misc_RNA (1)...(19): siRNA sense strand
agaagauguuugagaauga

SEQ ID NO: 66636 - RNA, 19 nt, Homo sapiens
  misc_RNA (1)...(19): siRNA sense strand
acaaggaguucuaugacaa

SEQ ID NO: 66637 - RNA, 19 nt, Homo sapiens
  misc_RNA (1)...(19): siRNA sense strand
gccaagggauuuaagcaau

SEQ ID NO: 66638 - RNA, 19 nt, Homo sapiens
  misc_RNA (1)...(19): siRNA sense strand
guacacaacauuccuguca

SEQ ID NO: 66639 - RNA, 19 nt, Homo sapiens
  misc_RNA (1)...(19): siRNA sense strand
gaaggagaaagccaacaaa

SEQ ID NO: 66640 - RNA, 19 nt, Homo sapiens
  misc_RNA (1)...(19): siRNA sense strand
gaucucagaggaacucaaa

SEQ ID NO: 66641 - RNA, 19 nt, Homo sapiens
  misc_RNA (1)...(19): siRNA sense strand
gaaauucaccagccgagau

SEQ ID NO: 66642 - RNA, 19 nt, Homo sapiens
  misc_RNA (1)...(19): siRNA sense strand
ggaacacacuguacuucuc

SEQ ID NO: 66643 - RNA, 19 nt, Homo sapiens
  misc_RNA (1)...(19): siRNA sense strand
uggaagcucugcucuacaa

SEQ ID NO: 66644 - RNA, 19 nt, Homo sapiens
  misc_RNA (1)...(19): siRNA sense strand
ucaacaaggacaacaauga

SEQ ID NO: 66645 - RNA, 19 nt, Homo sapiens
  misc_RNA (1)...(19): siRNA sense strand
gggaaaggccuggagauga

SEQ ID NO: 66646 - RNA, 19 nt, Homo sapiens
  misc_RNA (1)...(19): siRNA sense strand
agagugaaauccagaagga

SEQ ID NO: 66647 - RNA, 19 nt, Homo sapiens
  misc_RNA (1)...(19): siRNA sense strand
gcaaucagccaaccuguac

SEQ ID NO: 66648 - RNA, 19 nt, Homo sapiens
  misc_RNA (1)...(19): siRNA sense strand
gaagaagauguuugagaau

SEQ ID NO: 66649 - RNA, 19 nt, Homo sapiens
  misc_RNA (1)...(19): siRNA sense strand
gcuaugagaagugcuauga

SEQ ID NO: 66650 - RNA, 19 nt, Homo sapiens
  misc_RNA (1)...(19): siRNA sense strand
ccucagaaguggagagcaa

SEQ ID NO: 66651 - RNA, 19 nt, Homo sapiens
  misc_RNA (1)...(19): siRNA sense strand
ugagugacauggacaucaa

SEQ ID NO: 66652 - RNA, 19 nt, Homo sapiens
  misc_RNA (1)...(19): siRNA sense strand
uaugagaagugcuaugaca

SEQ ID NO: 66653 - RNA, 19 nt, Homo sapiens
  misc_RNA (1)...(19): siRNA sense strand
aagaagauguuugagaaug

SEQ ID NO: 66654 - RNA, 19 nt, Homo sapiens
  misc_RNA (1)...(19): siRNA sense strand
gcucaaggccgucuucgau

SEQ ID NO: 66655 - RNA, 19 nt, Homo sapiens
  misc_RNA (1)...(19): siRNA sense strand
cagggaagcaccagcagua

SEQ ID NO: 66656 - RNA, 19 nt, Homo sapiens
  misc_RNA (1)...(19): siRNA sense strand
ccgggacgcucaagcugua

SEQ ID NO: 66657 - RNA, 19 nt, Homo sapiens
  misc_RNA (1)...(19): siRNA sense strand
gcuccaaggugcccuacau

SEQ ID NO: 66658 - RNA, 19 nt, Homo sapiens
  misc_RNA (1)...(19): siRNA sense strand
gagaugaacgggaucaaag

SEQ ID NO: 66659 - RNA, 19 nt, Homo sapiens
  misc_RNA (1)...(19): siRNA sense strand
gaagauguuugagaaugag

SEQ ID NO: 66660 - RNA, 19 nt, Homo sapiens
  misc_RNA (1)...(19): siRNA sense strand
uggaggacaugaagaugaa

SEQ ID NO: 66661 - RNA, 19 nt, Homo sapiens
  misc_RNA (1)...(19): siRNA sense strand
gaaaaggguugccgagaag

SEQ ID NO: 66662 - RNA, 19 nt, Homo sapiens
  misc_RNA (1)...(19): siRNA sense strand
gugccaagcugaagaagac

SEQ ID NO: 66663 - RNA, 19 nt, Homo sapiens
  misc_RNA (1)...(19): siRNA sense strand
gaacgggaucaaaguggaa

SEQ ID NO: 66664 - RNA, 19 nt, Homo sapiens
  misc_RNA (1)...(19): siRNA sense strand
ggauccuguuucaagcuua

SEQ ID NO: 66665 - RNA, 19 nt, Homo sapiens
  misc_RNA (1)...(19): siRNA sense strand
uggaaagaguuaccuguuc

SEQ ID NO: 66666 - RNA, 19 nt, Homo sapiens
  misc_RNA (1)...(19): siRNA sense strand
ucagaggaacucaaaguga

SEQ ID NO: 66667 - RNA, 19 nt, Homo sapiens
  misc_RNA (1)...(19): siRNA sense strand
guuggcaucuacaggauau

SEQ ID NO: 66668 - RNA, 19 nt, Homo sapiens
  misc_RNA (1)...(19): siRNA sense strand
cauggaagcucugcucuac

SEQ ID NO: 66669 - RNA, 19 nt, Homo sapiens
  misc_RNA (1)...(19): siRNA sense strand
ccaacaaccaguuccagaa

SEQ ID NO: 66670 - RNA, 19 nt, Homo sapiens
  misc_RNA (1)...(19): siRNA sense strand
ugaggauccugugcuauga

SEQ ID NO: 66671 - RNA, 19 nt, Homo sapiens
  misc_RNA (1)...(19): siRNA sense strand
caauaaagacgacgaugag

SEQ ID NO: 66672 - RNA, 19 nt, Homo sapiens
  misc_RNA (1)...(19): siRNA sense strand
gcaauucagaaacuacaga

SEQ ID NO: 66673 - RNA, 19 nt, Homo sapiens
  misc_RNA (1)...(19): siRNA sense strand
cgcgacagcuggugaagga

SEQ ID NO: 66674 - RNA, 19 nt, Homo sapiens
  misc_RNA (1)...(19): siRNA sense strand
ccagccagcucggugugua

SEQ ID NO: 66675 - RNA, 19 nt, Homo sapiens
  misc_RNA (1)...(19): siRNA sense strand
gagaaggagcccaucaaca

SEQ ID NO: 66676 - RNA, 19 nt, Homo sapiens
  misc_RNA (1)...(19): siRNA sense strand
cgagauaugagccugaaga

SEQ ID NO: 66677 - RNA, 19 nt, Homo sapiens
  misc_RNA (1)...(19): siRNA sense strand
cacaaggaguucuaugaca

SEQ ID NO: 66678 - RNA, 19 nt, Homo sapiens
  misc_RNA (1)...(19): siRNA sense strand
agaagcaauucagaaacua

SEQ ID NO: 66679 - RNA, 19 nt, Homo sapiens
  misc_RNA (1)...(19): siRNA sense strand
caacaaggacaacaaugag

SEQ ID NO: 66680 - RNA, 19 nt, Homo sapiens
  misc_RNA (1)...(19): siRNA sense strand
ccagcucgguguguacaaa

SEQ ID NO: 66681 - RNA, 19 nt, Homo sapiens
  misc_RNA (1)...(19): siRNA sense strand
ugaaaaggguugccgagaa

SEQ ID NO: 66682 - RNA, 19 nt, Homo sapiens
  misc_RNA (1)...(19): siRNA sense strand
gcuuaggacuguacacaac

SEQ ID NO: 66683 - RNA, 19 nt, Homo sapiens
  misc_RNA (1)...(19): siRNA sense strand
uucagaaacuacagaagaa

SEQ ID NO: 66684 - RNA, 19 nt, Homo sapiens
  misc_RNA (1)...(19): siRNA sense strand
cagcgaagagaucuacauu

SEQ ID NO: 66685 - RNA, 19 nt, Homo sapiens
  misc_RNA (1)...(19): siRNA sense strand
aagcguuugucgauaacua

SEQ ID NO: 66686 - RNA, 19 nt, Homo sapiens
  misc_RNA (1)...(19): siRNA sense strand
ucgagcgccugaagaagaa

SEQ ID NO: 66687 - RNA, 19 nt, Homo sapiens
  misc_RNA (1)...(19): siRNA sense strand
ucgaggagguuggcaucua

SEQ ID NO: 66688 - RNA, 19 nt, Homo sapiens
  misc_RNA (1)...(19): siRNA sense strand
aaauucaccagccgagaua

SEQ ID NO: 66689 - RNA, 19 nt, Homo sapiens
  misc_RNA (1)...(19): siRNA sense strand
caacaaccaguuccagaag

SEQ ID NO: 66690 - RNA, 19 nt, Homo sapiens
  misc_RNA (1)...(19): siRNA sense strand
ccucaucaccuuccucuuc

SEQ ID NO: 66691 - RNA, 19 nt, Homo sapiens
  misc_RNA (1)...(19): siRNA sense strand
cacaaaccguggagaccaa

SEQ ID NO: 66692 - RNA, 19 nt, Homo sapiens
  misc_RNA (1)...(19): siRNA sense strand
gauccuguuucaagcuuag

SEQ ID NO: 66693 - RNA, 19 nt, Homo sapiens
  misc_RNA (1)...(19): siRNA sense strand
gaagaucucagaggaacuc

SEQ ID NO: 66694 - RNA, 19 nt, Homo sapiens
  misc_RNA (1)...(19): siRNA sense strand
ucgagaccaucuucuacaa

SEQ ID NO: 66695 - RNA, 19 nt, Homo sapiens
  misc_RNA (1)...(19): siRNA sense strand
uggaggagguggagaagag

SEQ ID NO: 66696 - RNA, 19 nt, Homo sapiens
  misc_RNA (1)...(19): siRNA sense strand
gggaugaggaguuugagau

SEQ ID NO: 66697 - RNA, 19 nt, Homo sapiens
  misc_RNA (1)...(19): siRNA sense strand
ccaagugggaugaggaguu

SEQ ID NO: 66698 - RNA, 19 nt, Homo sapiens
  misc_RNA (1)...(19): siRNA sense strand
gcacgucuuccucuuuaca

SEQ ID NO: 66699 - RNA, 19 nt, Homo sapiens
  misc_RNA (1)...(19): siRNA sense strand
acacgucugucaccaugga

SEQ ID NO: 66700 - RNA, 19 nt, Homo sapiens
  misc_RNA (1)...(19): siRNA sense strand
ggagcacccuaguccuaca

SEQ ID NO: 66701 - RNA, 19 nt, Homo sapiens
  misc_RNA (1)...(19): siRNA sense strand
gcagaacucaagcggaaca

SEQ ID NO: 66702 - RNA, 19 nt, Homo sapiens
  misc_RNA (1)...(19): siRNA sense strand
gaucgagaccaucuucuac

SEQ ID NO: 66703 - RNA, 19 nt, Homo sapiens
  misc_RNA (1)...(19): siRNA sense strand
gaugaacgggaucaaagug

SEQ ID NO: 66704 - RNA, 19 nt, Homo sapiens
  misc_RNA (1)...(19): siRNA sense strand
ggucaacaaggacaacaau

SEQ ID NO: 66705 - RNA, 19 nt, Homo sapiens
  misc_RNA (1)...(19): siRNA sense strand
agaguuaccuguuccuacu

SEQ ID NO: 66706 - RNA, 19 nt, Homo sapiens
  misc_RNA (1)...(19): siRNA sense strand
aagaagaagauguuugaga

SEQ ID NO: 66707 - RNA, 19 nt, Homo sapiens
  misc_RNA (1)...(19): siRNA sense strand
acaaccaguuccagaagau

SEQ ID NO: 66708 - RNA, 19 nt, Homo sapiens
  misc_RNA (1)...(19): siRNA sense strand
cgaggagguuggcaucuac

SEQ ID NO: 66709 - RNA, 19 nt, Homo sapiens
  misc_RNA (1)...(19): siRNA sense strand
ccaucgagcgccugaagaa

SEQ ID NO: 66710 - RNA, 19 nt, Homo sapiens
  misc_RNA (1)...(19): siRNA sense strand
ggacgugauugagaugaac

SEQ ID NO: 66711 - RNA, 19 nt, Homo sapiens
  misc_RNA (1)...(19): siRNA sense strand
guuucaagcuuaggacugu

SEQ ID NO: 66712 - RNA, 19 nt, Homo sapiens
  misc_RNA (1)...(19): siRNA sense strand
gccgagauaugagccugaa

SEQ ID NO: 66713 - RNA, 19 nt, Homo sapiens
  misc_RNA (1)...(19): siRNA sense strand
uggauuccuucggcuauuu

SEQ ID NO: 66714 - RNA, 19 nt, Homo sapiens
  misc_RNA (1)...(19): siRNA sense strand
gcgaagagaucuacauuaa

SEQ ID NO: 66715 - RNA, 19 nt, Homo sapiens
  misc_RNA (1)...(19): siRNA sense strand
gaagaucucugcccucaag

SEQ ID NO: 66716 - RNA, 19 nt, Homo sapiens
  misc_RNA (1)...(19): siRNA sense strand
caaccuggcuaccguguuu

SEQ ID NO: 66717 - RNA, 19 nt, Homo sapiens
  misc_RNA (1)...(19): siRNA sense strand
agaagaagauguuugagaa

SEQ ID NO: 66718 - RNA, 19 nt, Homo sapiens
  misc_RNA (1)...(19): siRNA sense strand
gaagagaucuacauuaacc

SEQ ID NO: 66719 - RNA, 19 nt, Homo sapiens
  misc_RNA (1)...(19): siRNA sense strand
ggaaaggccuggagaugag

SEQ ID NO: 66720 - RNA, 19 nt, Homo sapiens
  misc_RNA (1)...(19): siRNA sense strand
gagagaagcaauucagaaa

SEQ ID NO: 66721 - RNA, 19 nt, Homo sapiens
  misc_RNA (1)...(19): siRNA sense strand
ggaagcaccagcaguauga

SEQ ID NO: 66722 - RNA, 19 nt, Homo sapiens
  misc_RNA (1)...(19): siRNA sense strand
cagaggaacucaaagugaa

SEQ ID NO: 66723 - RNA, 19 nt, Homo sapiens
  misc_RNA (1)...(19): siRNA sense strand
caagugggaugaggaguuu

SEQ ID NO: 66724 - RNA, 19 nt, Homo sapiens
  misc_RNA (1)...(19): siRNA sense strand
gcaauaaagacgacgauga

SEQ ID NO: 66725 - RNA, 19 nt, Homo sapiens
  misc_RNA (1)...(19): siRNA sense strand
gagaagcaauucagaaacu

SEQ ID NO: 66726 - RNA, 19 nt, Homo sapiens
  misc_RNA (1)...(19): siRNA sense strand
cggcacgucuuccucuuua

SEQ ID NO: 66727 - RNA, 19 nt, Homo sapiens
  misc_RNA (1)...(19): siRNA sense strand
gaaggagcccaucaacaaa

SEQ ID NO: 66728 - RNA, 19 nt, Homo sapiens
  misc_RNA (1)...(19): siRNA sense strand
acaaugagaucguggacaa

SEQ ID NO: 66729 - RNA, 19 nt, Homo sapiens
  misc_RNA (1)...(19): siRNA sense strand
gagaagugcuaugacaaga

SEQ ID NO: 66730 - RNA, 19 nt, Homo sapiens
  misc_RNA (1)...(19): siRNA sense strand
ugaagaagaagauguuuga

SEQ ID NO: 66731 - RNA, 19 nt, Homo sapiens
  misc_RNA (1)...(19): siRNA sense strand
ggagagaagcaauucagaa

SEQ ID NO: 66732 - RNA, 19 nt, Homo sapiens
  misc_RNA (1)...(19): siRNA sense strand
uaaagucgcucuggagaca

SEQ ID NO: 66733 - RNA, 19 nt, Homo sapiens
  misc_RNA (1)...(19): siRNA sense strand
ucuaugagauccacaagga

SEQ ID NO: 66734 - RNA, 19 nt, Homo sapiens
  misc_RNA (1)...(19): siRNA sense strand
agaaggagcccaucaacaa

SEQ ID NO: 66735 - RNA, 19 nt, Homo sapiens
  misc_RNA (1)...(19): siRNA sense strand
agaagauguuugagaauga

SEQ ID NO: 66736 - RNA, 19 nt, Homo sapiens
  misc_RNA (1)...(19): siRNA sense strand
acaaggaguucuaugacaa

SEQ ID NO: 66737 - RNA, 19 nt, Homo sapiens
  misc_RNA (1)...(19): siRNA sense strand
gccaagggauuuaagcaau

SEQ ID NO: 66738 - RNA, 19 nt, Homo sapiens
  misc_RNA (1)...(19): siRNA sense strand
guacacaacauuccuguca

SEQ ID NO: 66739 - RNA, 19 nt, Homo sapiens
  misc_RNA (1)...(19): siRNA sense strand
gaaggagaaagccaacaaa

SEQ ID NO: 66740 - RNA, 19 nt, Homo sapiens
  misc_RNA (1)...(19): siRNA sense strand
gaucucagaggaacucaaa

SEQ ID NO: 66741 - RNA, 19 nt, Homo sapiens
  misc_RNA (1)...(19): siRNA sense strand
gaaauucaccagccgagau

SEQ ID NO: 66742 - RNA, 19 nt, Homo sapiens
  misc_RNA (1)...(19): siRNA sense strand
ggaacacacuguacuucuc

SEQ ID NO: 66743 - RNA, 19 nt, Homo sapiens
  misc_RNA (1)...(19): siRNA sense strand
uggaagcucugcucuacaa

SEQ ID NO: 66744 - RNA, 19 nt, Homo sapiens
  misc_RNA (1)...(19): siRNA sense strand
ucaacaaggacaacaauga

SEQ ID NO: 66745 - RNA, 19 nt, Homo sapiens
  misc_RNA (1)...(19): siRNA sense strand
gggaaaggccuggagauga

SEQ ID NO: 66746 - RNA, 19 nt, Homo sapiens
  misc_RNA (1)...(19): siRNA sense strand
agagugaaauccagaagga

SEQ ID NO: 66747 - RNA, 19 nt, Homo sapiens
  misc_RNA (1)...(19): siRNA sense strand
gcaaucagccaaccuguac

SEQ ID NO: 66748 - RNA, 19 nt, Homo sapiens
  misc_RNA (1)...(19): siRNA sense strand
gaagaagauguuugagaau

SEQ ID NO: 66749 - RNA, 19 nt, Homo sapiens
  misc_RNA (1)...(19): siRNA sense strand
gcuaugagaagugcuauga

SEQ ID NO: 66750 - RNA, 19 nt, Homo sapiens
  misc_RNA (1)...(19): siRNA sense strand
ccucagaaguggagagcaa

SEQ ID NO: 66751 - RNA, 19 nt, Homo sapiens
  misc_RNA (1)...(19): siRNA sense strand
ugagugacauggacaucaa

SEQ ID NO: 66752 - RNA, 19 nt, Homo sapiens
  misc_RNA (1)...(19): siRNA sense strand
uaugagaagugcuaugaca

SEQ ID NO: 66753 - RNA, 19 nt, Homo sapiens
  misc_RNA (1)...(19): siRNA sense strand
aagaagauguuugagaaug

SEQ ID NO: 66754 - RNA, 19 nt, Homo sapiens
  misc_RNA (1)...(19): siRNA sense strand
gcucaaggccgucuucgau

SEQ ID NO: 66755 - RNA, 19 nt, Homo sapiens
  misc_RNA (1)...(19): siRNA sense strand
cagggaagcaccagcagua

SEQ ID NO: 66756 - RNA, 19 nt, Homo sapiens
  misc_RNA (1)...(19): siRNA sense strand
ccgggacgcucaagcugua

SEQ ID NO: 66757 - RNA, 19 nt, Homo sapiens
  misc_RNA (1)...(19): siRNA sense strand
gcuccaaggugcccuacau

SEQ ID NO: 66758 - RNA, 19 nt, Homo sapiens
  misc_RNA (1)...(19): siRNA sense strand
gagaugaacgggaucaaag

SEQ ID NO: 66759 - RNA, 19 nt, Homo sapiens
  misc_RNA (1)...(19): siRNA sense strand
gaagauguuugagaaugag

SEQ ID NO: 66760 - RNA, 19 nt, Homo sapiens
  misc_RNA (1)...(19): siRNA sense strand
uggaggacaugaagaugaa

SEQ ID NO: 66761 - RNA, 19 nt, Homo sapiens
  misc_RNA (1)...(19): siRNA sense strand
gaaaaggguugccgagaag

SEQ ID NO: 66762 - RNA, 19 nt, Homo sapiens
  misc_RNA (1)...(19): siRNA sense strand
gugccaagcugaagaagac

SEQ ID NO: 66763 - RNA, 19 nt, Homo sapiens
  misc_RNA (1)...(19): siRNA sense strand
gaacgggaucaaaguggaa

SEQ ID NO: 66764 - RNA, 19 nt, Homo sapiens
  misc_RNA (1)...(19): siRNA sense strand
ggauccuguuucaagcuua

SEQ ID NO: 66765 - RNA, 19 nt, Homo sapiens
  misc_RNA (1)...(19): siRNA sense strand
uggaaagaguuaccuguuc

SEQ ID NO: 66766 - RNA, 19 nt, Homo sapiens
  misc_RNA (1)...(19): siRNA sense strand
ucagaggaacucaaaguga

SEQ ID NO: 66767 - RNA, 19 nt, Homo sapiens
  misc_RNA (1)...(19): siRNA sense strand
guuggcaucuacaggauau

SEQ ID NO: 66768 - RNA, 19 nt, Homo sapiens
  misc_RNA (1)...(19): siRNA sense strand
cauggaagcucugcucuac

SEQ ID NO: 66769 - RNA, 19 nt, Homo sapiens
  misc_RNA (1)...(19): siRNA sense strand
ccaacaaccaguuccagaa

SEQ ID NO: 66770 - RNA, 19 nt, Homo sapiens
  misc_RNA (1)...(19): siRNA sense strand
ugaggauccugugcuauga

SEQ ID NO: 66771 - RNA, 19 nt, Homo sapiens
  misc_RNA (1)...(19): siRNA sense strand
caauaaagacgacgaugag

SEQ ID NO: 66772 - RNA, 19 nt, Homo sapiens
  misc_RNA (1)...(19): siRNA sense strand
gcaauucagaaacuacaga

SEQ ID NO: 66773 - RNA, 19 nt, Homo sapiens
  misc_RNA (1)...(19): siRNA sense strand
cgcgacagcuggugaagga

SEQ ID NO: 66774 - RNA, 19 nt, Homo sapiens
  misc_RNA (1)...(19): siRNA sense strand
ccagccagcucggugugua

SEQ ID NO: 66775 - RNA, 19 nt, Homo sapiens
  misc_RNA (1)...(19): siRNA sense strand
gagaaggagcccaucaaca

SEQ ID NO: 66776 - RNA, 19 nt, Homo sapiens
  misc_RNA (1)...(19): siRNA sense strand
cgagauaugagccugaaga

SEQ ID NO: 66777 - RNA, 19 nt, Homo sapiens
  misc_RNA (1)...(19): siRNA sense strand
cacaaggaguucuaugaca

SEQ ID NO: 66778 - RNA, 19 nt, Homo sapiens
  misc_RNA (1)...(19): siRNA sense strand
agaagcaauucagaaacua

SEQ ID NO: 66779 - RNA, 19 nt, Homo sapiens
  misc_RNA (1)...(19): siRNA sense strand
caacaaggacaacaaugag

SEQ ID NO: 66780 - RNA, 19 nt, Homo sapiens
  misc_RNA (1)...(19): siRNA sense strand
ccagcucgguguguacaaa

SEQ ID NO: 66781 - RNA, 19 nt, Homo sapiens
  misc_RNA (1)...(19): siRNA sense strand
ugaaaaggguugccgagaa

SEQ ID NO: 66782 - RNA, 19 nt, Homo sapiens
  misc_RNA (1)...(19): siRNA sense strand
gcuuaggacuguacacaac

SEQ ID NO: 66783 - RNA, 19 nt, Homo sapiens
  misc_RNA (1)...(19): siRNA sense strand
uucagaaacuacagaagaa

SEQ ID NO: 66784 - RNA, 19 nt, Homo sapiens
  misc_RNA (1)...(19): siRNA sense strand
cagcgaagagaucuacauu

SEQ ID NO: 66785 - RNA, 19 nt, Homo sapiens
  misc_RNA (1)...(19): siRNA sense strand
aagcguuugucgauaacua

SEQ ID NO: 66786 - RNA, 19 nt, Homo sapiens
  misc_RNA (1)...(19): siRNA sense strand
ucgagcgccugaagaagaa

SEQ ID NO: 66787 - RNA, 19 nt, Homo sapiens
  misc_RNA (1)...(19): siRNA sense strand
ucgaggagguuggcaucua

SEQ ID NO: 66788 - RNA, 19 nt, Homo sapiens
  misc_RNA (1)...(19): siRNA sense strand
aaauucaccagccgagaua

SEQ ID NO: 66789 - RNA, 19 nt, Homo sapiens
  misc_RNA (1)...(19): siRNA sense strand
caacaaccaguuccagaag

SEQ ID NO: 66790 - RNA, 19 nt, Homo sapiens
  misc_RNA (1)...(19): siRNA sense strand
ccucaucaccuuccucuuc

SEQ ID NO: 66791 - RNA, 19 nt, Homo sapiens
  misc_RNA (1)...(19): siRNA sense strand
cacaaaccguggagaccaa

SEQ ID NO: 66792 - RNA, 19 nt, Homo sapiens
  misc_RNA (1)...(19): siRNA sense strand
gauccuguuucaagcuuag

SEQ ID NO: 66793 - RNA, 19 nt, Homo sapiens
  misc_RNA (1)...(19): siRNA sense strand
gaagaucucagaggaacuc

SEQ ID NO: 66794 - RNA, 19 nt, Homo sapiens
  misc_RNA (1)...(19): siRNA sense strand
ucgagaccaucuucuacaa

SEQ ID NO: 66795 - RNA, 19 nt, Homo sapiens
  misc_RNA (1)...(19): siRNA sense strand
uggaggagguggagaagag

SEQ ID NO: 66796 - RNA, 19 nt, Homo sapiens
  misc_RNA (1)...(19): siRNA sense strand
gggaugaggaguuugagau

SEQ ID NO: 66797 - RNA, 19 nt, Homo sapiens
  misc_RNA (1)...(19): siRNA sense strand
ccaagugggaugaggaguu

SEQ ID NO: 66798 - RNA, 19 nt, Homo sapiens
  misc_RNA (1)...(19): siRNA sense strand
gcacgucuuccucuuuaca

SEQ ID NO: 66799 - RNA, 19 nt, Homo sapiens
  misc_RNA (1)...(19): siRNA sense strand
acacgucugucaccaugga

SEQ ID NO: 66800 - RNA, 19 nt, Homo sapiens
  misc_RNA (1)...(19): siRNA sense strand
ggagcacccuaguccuaca

SEQ ID NO: 66801 - RNA, 19 nt, Homo sapiens
  misc_RNA (1)...(19): siRNA sense strand
gcagaacucaagcggaaca

SEQ ID NO: 66802 - RNA, 19 nt, Homo sapiens
  misc_RNA (1)...(19): siRNA sense strand
gaucgagaccaucuucuac

SEQ ID NO: 66803 - RNA, 19 nt, Homo sapiens
  misc_RNA (1)...(19): siRNA sense strand
gaugaacgggaucaaagug

SEQ ID NO: 66804 - RNA, 19 nt, Homo sapiens
  misc_RNA (1)...(19): siRNA sense strand
ggucaacaaggacaacaau

SEQ ID NO: 66805 - RNA, 19 nt, Homo sapiens
  misc_RNA (1)...(19): siRNA sense strand
agaguuaccuguuccuacu

SEQ ID NO: 66806 - RNA, 19 nt, Homo sapiens
  misc_RNA (1)...(19): siRNA sense strand
aagaagaagauguuugaga

SEQ ID NO: 66807 - RNA, 19 nt, Homo sapiens
  misc_RNA (1)...(19): siRNA sense strand
acaaccaguuccagaagau

SEQ ID NO: 66808 - RNA, 19 nt, Homo sapiens
  misc_RNA (1)...(19): siRNA sense strand
cgaggagguuggcaucuac

SEQ ID NO: 66809 - RNA, 19 nt, Homo sapiens
  misc_RNA (1)...(19): siRNA sense strand
ccaucgagcgccugaagaa

SEQ ID NO: 66810 - RNA, 19 nt, Homo sapiens
  misc_RNA (1)...(19): siRNA sense strand
ggacgugauugagaugaac

SEQ ID NO: 66811 - RNA, 19 nt, Homo sapiens
  misc_RNA (1)...(19): siRNA sense strand
guuucaagcuuaggacugu

SEQ ID NO: 66812 - RNA, 19 nt, Homo sapiens
  misc_RNA (1)...(19): siRNA sense strand
gccgagauaugagccugaa

SEQ ID NO: 66813 - RNA, 19 nt, Homo sapiens
  misc_RNA (1)...(19): siRNA sense strand
uggauuccuucggcuauuu

SEQ ID NO: 66814 - RNA, 19 nt, Homo sapiens
  misc_RNA (1)...(19): siRNA sense strand
gaacaucccugcacagaaa

SEQ ID NO: 66815 - RNA, 19 nt, Homo sapiens
  misc_RNA (1)...(19): siRNA sense strand
gaauggaguugcuuucuua

SEQ ID NO: 66816 - RNA, 19 nt, Homo sapiens
  misc_RNA (1)...(19): siRNA sense strand
gaagagaucgucaccauua

SEQ ID NO: 66817 - RNA, 19 nt, Homo sapiens
  misc_RNA (1)...(19): siRNA sense strand
gaacgugcaugacagauuu

SEQ ID NO: 66818 - RNA, 19 nt, Homo sapiens
  misc_RNA (1)...(19): siRNA sense strand
ccaaagacauccugacaua

SEQ ID NO: 66819 - RNA, 19 nt, Homo sapiens
  misc_RNA (1)...(19): siRNA sense strand
gaagagaggucuacacauc

SEQ ID NO: 66820 - RNA, 19 nt, Homo sapiens
  misc_RNA (1)...(19): siRNA sense strand
cgacagagcucuucaugga

SEQ ID NO: 66821 - RNA, 19 nt, Homo sapiens
  misc_RNA (1)...(19): siRNA sense strand
aggaagagguugacaguua

SEQ ID NO: 66822 - RNA, 19 nt, Homo sapiens
  misc_RNA (1)...(19): siRNA sense strand
gcacgcaccuuccuguauu

SEQ ID NO: 66823 - RNA, 19 nt, Homo sapiens
  misc_RNA (1)...(19): siRNA sense strand
gaaggaagguaugaaguga

SEQ ID NO: 66824 - RNA, 19 nt, Homo sapiens
  misc_RNA (1)...(19): siRNA sense strand
ccucguagauguggaauua

SEQ ID NO: 66825 - RNA, 19 nt, Homo sapiens
  misc_RNA (1)...(19): siRNA sense strand
gaaaggaagaucugauaaa

SEQ ID NO: 66826 - RNA, 19 nt, Homo sapiens
  misc_RNA (1)...(19): siRNA sense strand
gagaugaguuugcagaaga

SEQ ID NO: 66827 - RNA, 19 nt, Homo sapiens
  misc_RNA (1)...(19): siRNA sense strand
ugacaaggguugcgugaaa

SEQ ID NO: 66828 - RNA, 19 nt, Homo sapiens
  misc_RNA (1)...(19): siRNA sense strand
gcaaggugauggcccagua

SEQ ID NO: 66829 - RNA, 19 nt, Homo sapiens
  misc_RNA (1)...(19): siRNA sense strand
gauccucgcugaccaguau

SEQ ID NO: 66830 - RNA, 19 nt, Homo sapiens
  misc_RNA (1)...(19): siRNA sense strand
gcguucagaucaugcauua

SEQ ID NO: 66831 - RNA, 19 nt, Homo sapiens
  misc_RNA (1)...(19): siRNA sense strand
ccgagaaccuccagaaauu

SEQ ID NO: 66832 - RNA, 19 nt, Homo sapiens
  misc_RNA (1)...(19): siRNA sense strand
gaagauacuugcguguuga

SEQ ID NO: 66833 - RNA, 19 nt, Homo sapiens
  misc_RNA (1)...(19): siRNA sense strand
gacaucaccuuucgcauug

SEQ ID NO: 66834 - RNA, 19 nt, Homo sapiens
  misc_RNA (1)...(19): siRNA sense strand
acaagaagcucauggaaca

SEQ ID NO: 66835 - RNA, 19 nt, Homo sapiens
  misc_RNA (1)...(19): siRNA sense strand
cagaagauguuuaugacaa

SEQ ID NO: 66836 - RNA, 19 nt, Homo sapiens
  misc_RNA (1)...(19): siRNA sense strand
agaaauguaugcagacaaa

SEQ ID NO: 66837 - RNA, 19 nt, Homo sapiens
  misc_RNA (1)...(19): siRNA sense strand
ggacaucagccucuacaaa

SEQ ID NO: 66838 - RNA, 19 nt, Homo sapiens
  misc_RNA (1)...(19): siRNA sense strand
gugaggagccugagcuuua

SEQ ID NO: 66839 - RNA, 19 nt, Homo sapiens
  misc_RNA (1)...(19): siRNA sense strand
cgagaggucuucuucauca

SEQ ID NO: 66840 - RNA, 19 nt, Homo sapiens
  misc_RNA (1)...(19): siRNA sense strand
gcacgacucuguccucaag

SEQ ID NO: 66841 - RNA, 19 nt, Homo sapiens
  misc_RNA (1)...(19): siRNA sense strand
gcaagagccucagagaaga

SEQ ID NO: 66842 - RNA, 19 nt, Homo sapiens
  misc_RNA (1)...(19): siRNA sense strand
uggaauaccucuauaguca

SEQ ID NO: 66843 - RNA, 19 nt, Homo sapiens
  misc_RNA (1)...(19): siRNA sense strand
ggaauccgcggucauauga

SEQ ID NO: 66844 - RNA, 19 nt, Homo sapiens
  misc_RNA (1)...(19): siRNA sense strand
ggaaugcugugucucuguu

SEQ ID NO: 66845 - RNA, 19 nt, Homo sapiens
  misc_RNA (1)...(19): siRNA sense strand
gagauuaaguuccgaaagg

SEQ ID NO: 66846 - RNA, 19 nt, Homo sapiens
  misc_RNA (1)...(19): siRNA sense strand
gaaaugaggugggcauggu

SEQ ID NO: 66847 - RNA, 19 nt, Homo sapiens
  misc_RNA (1)...(19): siRNA sense strand
gcaccugcgugguagaauu

SEQ ID NO: 66848 - RNA, 19 nt, Homo sapiens
  misc_RNA (1)...(19): siRNA sense strand
gaaccuccagaaauuaaua

SEQ ID NO: 66849 - RNA, 19 nt, Homo sapiens
  misc_RNA (1)...(19): siRNA sense strand
gaugguagcuuccacuucu

SEQ ID NO: 66850 - RNA, 19 nt, Homo sapiens
  misc_RNA (1)...(19): siRNA sense strand
gaaaugauugcugacguua

SEQ ID NO: 66851 - RNA, 19 nt, Homo sapiens
  misc_RNA (1)...(19): siRNA sense strand
gugcaugacagauuucuua

SEQ ID NO: 66852 - RNA, 19 nt, Homo sapiens
  misc_RNA (1)...(19): siRNA sense strand
gcaaugacaucaccuuucg

SEQ ID NO: 66853 - RNA, 19 nt, Homo sapiens
  misc_RNA (1)...(19): siRNA sense strand
ggaggcagcagaaagaauu

SEQ ID NO: 66854 - RNA, 19 nt, Homo sapiens
  misc_RNA (1)...(19): siRNA sense strand
gaacaucacguaccugaag

SEQ ID NO: 66855 - RNA, 19 nt, Homo sapiens
  misc_RNA (1)...(19): siRNA sense strand
gagaaccuccagaaauuaa

SEQ ID NO: 66856 - RNA, 19 nt, Homo sapiens
  misc_RNA (1)...(19): siRNA sense strand
uggaguggcuguccuauau

SEQ ID NO: 66857 - RNA, 19 nt, Homo sapiens
  misc_RNA (1)...(19): siRNA sense strand
ccacaaaggauuuaaauac

SEQ ID NO: 66858 - RNA, 19 nt, Homo sapiens
  misc_RNA (1)...(19): siRNA sense strand
gagaagagcccauccacau

SEQ ID NO: 66859 - RNA, 19 nt, Homo sapiens
  misc_RNA (1)...(19): siRNA sense strand
gaagagcccauccacauuc

SEQ ID NO: 66860 - RNA, 19 nt, Homo sapiens
  misc_RNA (1)...(19): siRNA sense strand
gagcugcugugcaagaaug

SEQ ID NO: 66861 - RNA, 19 nt, Homo sapiens
  misc_RNA (1)...(19): siRNA sense strand
gaagaucguugaggaagca

SEQ ID NO: 66862 - RNA, 19 nt, Homo sapiens
  misc_RNA (1)...(19): siRNA sense strand
ggacaguggagauuaaguu

SEQ ID NO: 66863 - RNA, 19 nt, Homo sapiens
  misc_RNA (1)...(19): siRNA sense strand
caagugcucucaacaaggu

SEQ ID NO: 66864 - RNA, 19 nt, Homo sapiens
  misc_RNA (1)...(19): siRNA sense strand
gauacaugaucacggauau

SEQ ID NO: 66865 - RNA, 19 nt, Homo sapiens
  misc_RNA (1)...(19): siRNA sense strand
ccaccuacaugaaggaaga

SEQ ID NO: 66866 - RNA, 19 nt, Homo sapiens
  misc_RNA (1)...(19): siRNA sense strand
acucugaccugaucacaaa

SEQ ID NO: 66867 - RNA, 19 nt, Homo sapiens
  misc_RNA (1)...(19): siRNA sense strand
ggaaccaccuacaucuaug

SEQ ID NO: 66868 - RNA, 19 nt, Homo sapiens
  misc_RNA (1)...(19): siRNA sense strand
ccacaaaggcccaaagauc

SEQ ID NO: 66869 - RNA, 19 nt, Homo sapiens
  misc_RNA (1)...(19): siRNA sense strand
ccacggcaguuucaaggaa

SEQ ID NO: 66870 - RNA, 19 nt, Homo sapiens
  misc_RNA (1)...(19): siRNA sense strand
caggcaggcucucuuuaaa

SEQ ID NO: 66871 - RNA, 19 nt, Homo sapiens
  misc_RNA (1)...(19): siRNA sense strand
ucgaauaccugcagaacga

SEQ ID NO: 66872 - RNA, 19 nt, Homo sapiens
  misc_RNA (1)...(19): siRNA sense strand
ggaaggaagguaugaagug

SEQ ID NO: 66873 - RNA, 19 nt, Homo sapiens
  misc_RNA (1)...(19): siRNA sense strand
ggaagagguugacaguuac

SEQ ID NO: 66874 - RNA, 19 nt, Homo sapiens
  misc_RNA (1)...(19): siRNA sense strand
ucaagauggcggaucauua

SEQ ID NO: 66875 - RNA, 19 nt, Homo sapiens
  misc_RNA (1)...(19): siRNA sense strand
aaagauauccggcuucugu

SEQ ID NO: 66876 - RNA, 19 nt, Homo sapiens
  misc_RNA (1)...(19): siRNA sense strand
aggaagaucugauaaaguc

SEQ ID NO: 66877 - RNA, 19 nt, Homo sapiens
  misc_RNA (1)...(19): siRNA sense strand
aaaggaagaucugauaaag

SEQ ID NO: 66878 - RNA, 19 nt, Homo sapiens
  misc_RNA (1)...(19): siRNA sense strand
ugaacuccguccacuguaa

SEQ ID NO: 66879 - RNA, 19 nt, Homo sapiens
  misc_RNA (1)...(19): siRNA sense strand
gagaggaccuucuguaccu

SEQ ID NO: 66880 - RNA, 19 nt, Homo sapiens
  misc_RNA (1)...(19): siRNA sense strand
gaaggaagagguugacagu

SEQ ID NO: 66881 - RNA, 19 nt, Homo sapiens
  misc_RNA (1)...(19): siRNA sense strand
gaaucagugucccagaaga

SEQ ID NO: 66882 - RNA, 19 nt, Homo sapiens
  misc_RNA (1)...(19): siRNA sense strand
ggagaagggcgucauaucu

SEQ ID NO: 66883 - RNA, 19 nt, Homo sapiens
  misc_RNA (1)...(19): siRNA sense strand
ugacaucaccuuucgcauu

SEQ ID NO: 66884 - RNA, 19 nt, Homo sapiens
  misc_RNA (1)...(19): siRNA sense strand
ccaccuacaucuaugacuu

SEQ ID NO: 66885 - RNA, 19 nt, Homo sapiens
  misc_RNA (1)...(19): siRNA sense strand
ccuacgagcugcggcauaa

SEQ ID NO: 66886 - RNA, 19 nt, Homo sapiens
  misc_RNA (1)...(19): siRNA sense strand
agaagauacuugcguguug

SEQ ID NO: 66887 - RNA, 19 nt, Homo sapiens
  misc_RNA (1)...(19): siRNA sense strand
gcaagaacgucugggguua

SEQ ID NO: 66888 - RNA, 19 nt, Homo sapiens
  misc_RNA (1)...(19): siRNA sense strand
gagguggcguucaauaaca

SEQ ID NO: 66889 - RNA, 19 nt, Homo sapiens
  misc_RNA (1)...(19): siRNA sense strand
agaagggcgucauaucuga

SEQ ID NO: 66890 - RNA, 19 nt, Homo sapiens
  misc_RNA (1)...(19): siRNA sense strand
gaacguggcagagcggauu

SEQ ID NO: 66891 - RNA, 19 nt, Homo sapiens
  misc_RNA (1)...(19): siRNA sense strand
ggaggagaguccagauaca

SEQ ID NO: 66892 - RNA, 19 nt, Homo sapiens
  misc_RNA (1)...(19): siRNA sense strand
cagaggagaucaaacacau

SEQ ID NO: 66893 - RNA, 19 nt, Homo sapiens
  misc_RNA (1)...(19): siRNA sense strand
ucagacaaguacagaguga

SEQ ID NO: 66894 - RNA, 19 nt, Homo sapiens
  misc_RNA (1)...(19): siRNA sense strand
ggagaguccagauacauga

SEQ ID NO: 66895 - RNA, 19 nt, Homo sapiens
  misc_RNA (1)...(19): siRNA sense strand
gaacuccguccacuguaaa

SEQ ID NO: 66896 - RNA, 19 nt, Homo sapiens
  misc_RNA (1)...(19): siRNA sense strand
gagcccagccucccacaaa

SEQ ID NO: 66897 - RNA, 19 nt, Homo sapiens
  misc_RNA (1)...(19): siRNA sense strand
caaacaaagucgugugcau

SEQ ID NO: 66898 - RNA, 19 nt, Homo sapiens
  misc_RNA (1)...(19): siRNA sense strand
ggcagucucugaccauguu

SEQ ID NO: 66899 - RNA, 19 nt, Homo sapiens
  misc_RNA (1)...(19): siRNA sense strand
cgaggcgacuuuaggacua

SEQ ID NO: 66900 - RNA, 19 nt, Homo sapiens
  misc_RNA (1)...(19): siRNA sense strand
caacgggacugggacacaa

SEQ ID NO: 66901 - RNA, 19 nt, Homo sapiens
  misc_RNA (1)...(19): siRNA sense strand
gaaccaccuacaucuauga

SEQ ID NO: 66902 - RNA, 19 nt, Homo sapiens
  misc_RNA (1)...(19): siRNA sense strand
ccugaauacuuucuucuau

SEQ ID NO: 66903 - RNA, 19 nt, Homo sapiens
  misc_RNA (1)...(19): siRNA sense strand
gcacaggugaccaagaaga

SEQ ID NO: 66904 - RNA, 19 nt, Homo sapiens
  misc_RNA (1)...(19): siRNA sense strand
ggcaauaagacguguguuu

SEQ ID NO: 66905 - RNA, 19 nt, Homo sapiens
  misc_RNA (1)...(19): siRNA sense strand
ggugguggcuuugaaggaa

SEQ ID NO: 66906 - RNA, 19 nt, Homo sapiens
  misc_RNA (1)...(19): siRNA sense strand
agaaaugauugcugacguu

SEQ ID NO: 66907 - RNA, 19 nt, Homo sapiens
  misc_RNA (1)...(19): siRNA sense strand
gccacacucugcacaaaga

SEQ ID NO: 66908 - RNA, 19 nt, Homo sapiens
  misc_RNA (1)...(19): siRNA sense strand
gcaaccacaucuuccucaa

SEQ ID NO: 66909 - RNA, 19 nt, Homo sapiens
  misc_RNA (1)...(19): siRNA sense strand
gaaaccgaauaucaugcuu

SEQ ID NO: 66910 - RNA, 19 nt, Homo sapiens
  misc_RNA (1)...(19): siRNA sense strand
cgagaaccuccagaaauua

SEQ ID NO: 66911 - RNA, 19 nt, Homo sapiens
  misc_RNA (1)...(19): siRNA sense strand
gaucugauaaaguccauga

SEQ ID NO: 66912 - RNA, 19 nt, Homo sapiens
  misc_RNA (1)...(19): siRNA sense strand
cgaaaggaagaucugauaa

SEQ ID NO: 66913 - RNA, 19 nt, Homo sapiens
  misc_RNA (1)...(19): siRNA sense strand
ccgaaaggaagaucugaua

SEQ ID NO: 66914 - RNA, 19 nt, Homo sapiens
  misc_RNA (1)...(19): siRNA sense strand
gaagaaggccuaugagauu

SEQ ID NO: 66915 - RNA, 19 nt, Homo sapiens
  misc_RNA (1)...(19): siRNA sense strand
ccaaguaccuggccaagaa

SEQ ID NO: 66916 - RNA, 19 nt, Homo sapiens
  misc_RNA (1)...(19): siRNA sense strand
caacaaaucugagcaauac

SEQ ID NO: 66917 - RNA, 19 nt, Homo sapiens
  misc_RNA (1)...(19): siRNA sense strand
gcaaugggcuggaaaucau

SEQ ID NO: 66918 - RNA, 19 nt, Homo sapiens
  misc_RNA (1)...(19): siRNA sense strand
gcaaagcuguuaccaugga

SEQ ID NO: 66919 - RNA, 19 nt, Homo sapiens
  misc_RNA (1)...(19): siRNA sense strand
ccaagaaguucaacaaauc

SEQ ID NO: 66920 - RNA, 19 nt, Homo sapiens
  misc_RNA (1)...(19): siRNA sense strand
ggaaagugcuacacguuca

SEQ ID NO: 66921 - RNA, 19 nt, Homo sapiens
  misc_RNA (1)...(19): siRNA sense strand
caacaacagguaugagaua

SEQ ID NO: 66922 - RNA, 19 nt, Homo sapiens
  misc_RNA (1)...(19): siRNA sense strand
acacacagauggcagauga

SEQ ID NO: 66923 - RNA, 19 nt, Homo sapiens
  misc_RNA (1)...(19): siRNA sense strand
gccaagaaguucaacaaau

SEQ ID NO: 66924 - RNA, 19 nt, Homo sapiens
  misc_RNA (1)...(19): siRNA sense strand
gacauacgcugccaacauc

SEQ ID NO: 66925 - RNA, 19 nt, Homo sapiens
  misc_RNA (1)...(19): siRNA sense strand
gcacgacauucgagacaug

SEQ ID NO: 66926 - RNA, 19 nt, Homo sapiens
  misc_RNA (1)...(19): siRNA sense strand
ggacucggauuuggauuuc

SEQ ID NO: 66927 - RNA, 19 nt, Homo sapiens
  misc_RNA (1)...(19): siRNA sense strand
gcaaagccucagccaagua

SEQ ID NO: 66928 - RNA, 19 nt, Homo sapiens
  misc_RNA (1)...(19): siRNA sense strand
caaaucugagcaauacaua

SEQ ID NO: 66929 - RNA, 19 nt, Homo sapiens
  misc_RNA (1)...(19): siRNA sense strand
caacaugcgugaguucuac

SEQ ID NO: 66930 - RNA, 19 nt, Homo sapiens
  misc_RNA (1)...(19): siRNA sense strand
ucaacaaaucugagcaaua

SEQ ID NO: 66931 - RNA, 19 nt, Homo sapiens
  misc_RNA (1)...(19): siRNA sense strand
ccaagaaugaccuguauca

SEQ ID NO: 66932 - RNA, 19 nt, Homo sapiens
  misc_RNA (1)...(19): siRNA sense strand
caacuuccgcagcuucaaa

SEQ ID NO: 66933 - RNA, 19 nt, Homo sapiens
  misc_RNA (1)...(19): siRNA sense strand
guacaaggagugugcagau

SEQ ID NO: 66934 - RNA, 19 nt, Homo sapiens
  misc_RNA (1)...(19): siRNA sense strand
guacugcgugugugaaaug

SEQ ID NO: 66935 - RNA, 19 nt, Homo sapiens
  misc_RNA (1)...(19): siRNA sense strand
ccuacgaggucauuaagca

SEQ ID NO: 66936 - RNA, 19 nt, Homo sapiens
  misc_RNA (1)...(19): siRNA sense strand
ggagauacugcaggacaaa

SEQ ID NO: 66937 - RNA, 19 nt, Homo sapiens
  misc_RNA (1)...(19): siRNA sense strand
aagaaggccuaugagauug

SEQ ID NO: 66938 - RNA, 19 nt, Homo sapiens
  misc_RNA (1)...(19): siRNA sense strand
cagaagaaggccuaugaga

SEQ ID NO: 66939 - RNA, 19 nt, Homo sapiens
  misc_RNA (1)...(19): siRNA sense strand
gaacagaagaaggccuaug

SEQ ID NO: 66940 - RNA, 19 nt, Homo sapiens
  misc_RNA (1)...(19): siRNA sense strand
gaaagugcuacacguucaa

SEQ ID NO: 66941 - RNA, 19 nt, Homo sapiens
  misc_RNA (1)...(19): siRNA sense strand
ucaaagugcagauccauag

SEQ ID NO: 66942 - RNA, 19 nt, Homo sapiens
  misc_RNA (1)...(19): siRNA sense strand
ugacauacgcugccaacau

SEQ ID NO: 66943 - RNA, 19 nt, Homo sapiens
  misc_RNA (1)...(19): siRNA sense strand
ugcuggagcucuuugacua

SEQ ID NO: 66944 - RNA, 19 nt, Homo sapiens
  misc_RNA (1)...(19): siRNA sense strand
ucacggugcuggagcucuu

SEQ ID NO: 66945 - RNA, 19 nt, Homo sapiens
  misc_RNA (1)...(19): siRNA sense strand
cuucgaagcaggcaucaaa

SEQ ID NO: 66946 - RNA, 19 nt, Homo sapiens
  misc_RNA (1)...(19): siRNA sense strand
agaagaaggccuaugagau

SEQ ID NO: 66947 - RNA, 19 nt, Homo sapiens
  misc_RNA (1)...(19): siRNA sense strand
agccaagucuccaagaaug

SEQ ID NO: 66948 - RNA, 19 nt, Homo sapiens
  misc_RNA (1)...(19): siRNA sense strand
ggccaagaaguucaacaaa

SEQ ID NO: 66949 - RNA, 19 nt, Homo sapiens
  misc_RNA (1)...(19): siRNA sense strand
ugugcaaccucaacgaguu

SEQ ID NO: 66950 - RNA, 19 nt, Homo sapiens
  misc_RNA (1)...(19): siRNA sense strand
cgaagcaggcaucaaagug

SEQ ID NO: 66951 - RNA, 19 nt, Homo sapiens
  misc_RNA (1)...(19): siRNA sense strand
cucaacgaguuccgcuuua

SEQ ID NO: 66952 - RNA, 19 nt, Homo sapiens
  misc_RNA (1)...(19): siRNA sense strand
gaaggccuaugagauugca

SEQ ID NO: 66953 - RNA, 19 nt, Homo sapiens
  misc_RNA (1)...(19): siRNA sense strand
ccucaacgaguuccgcuuu

SEQ ID NO: 66954 - RNA, 19 nt, Homo sapiens
  misc_RNA (1)...(19): siRNA sense strand
gcaggacaaagccaacuuc

SEQ ID NO: 66955 - RNA, 19 nt, Homo sapiens
  misc_RNA (1)...(19): siRNA sense strand
cggagcgugugcaguacua

SEQ ID NO: 66956 - RNA, 19 nt, Homo sapiens
  misc_RNA (1)...(19): siRNA sense strand
cuccaagaaugaccuguau

SEQ ID NO: 66957 - RNA, 19 nt, Homo sapiens
  misc_RNA (1)...(19): siRNA sense strand
aacagaagaaggccuauga

SEQ ID NO: 66958 - RNA, 19 nt, Homo sapiens
  misc_RNA (1)...(19): siRNA sense strand
ggagaaggaccaggaguac

SEQ ID NO: 66959 - RNA, 19 nt, Homo sapiens
  misc_RNA (1)...(19): siRNA sense strand
gcaucaaagugcagaucca

SEQ ID NO: 66960 - RNA, 19 nt, Homo sapiens
  misc_RNA (1)...(19): siRNA sense strand
ucaacgaguuccgcuuuag

SEQ ID NO: 66961 - RNA, 19 nt, Homo sapiens
  misc_RNA (1)...(19): siRNA sense strand
gauaccagacacacagaug

SEQ ID NO: 66962 - RNA, 19 nt, Homo sapiens
  misc_RNA (1)...(19): siRNA sense strand
acacagauggcagaugaaa

SEQ ID NO: 66963 - RNA, 19 nt, Homo sapiens
  misc_RNA (1)...(19): siRNA sense strand
gaggcacguucgaggacuu

SEQ ID NO: 66964 - RNA, 19 nt, Homo sapiens
  misc_RNA (1)...(19): siRNA sense strand
caacuaugagaccauugaa

SEQ ID NO: 66965 - RNA, 19 nt, Homo sapiens
  misc_RNA (1)...(19): siRNA sense strand
uggcugugcugcugugugu

SEQ ID NO: 66966 - RNA, 19 nt, Homo sapiens
  misc_RNA (1)...(19): siRNA sense strand
ugugugaaaugccuugcaa

SEQ ID NO: 66967 - RNA, 19 nt, Homo sapiens
  misc_RNA (1)...(19): siRNA sense strand
uuagccaagucuccaagaa

SEQ ID NO: 66968 - RNA, 19 nt, Homo sapiens
  misc_RNA (1)...(19): siRNA sense strand
uggagaaggaccaggagua

SEQ ID NO: 66969 - RNA, 19 nt, Homo sapiens
  misc_RNA (1)...(19): siRNA sense strand
ggcaaugggcuggaaauca

SEQ ID NO: 66970 - RNA, 19 nt, Homo sapiens
  misc_RNA (1)...(19): siRNA sense strand
caagaaguucaacaaaucu

SEQ ID NO: 66971 - RNA, 19 nt, Homo sapiens
  misc_RNA (1)...(19): siRNA sense strand
gaguacugcgugugugaaa

SEQ ID NO: 66972 - RNA, 19 nt, Homo sapiens
  misc_RNA (1)...(19): siRNA sense strand
ggucuucacacgcuaugga

SEQ ID NO: 66973 - RNA, 19 nt, Homo sapiens
  misc_RNA (1)...(19): siRNA sense strand
ucaacaugcgugaguucua

SEQ ID NO: 66974 - RNA, 19 nt, Homo sapiens
  misc_RNA (1)...(19): siRNA sense strand
agaaggaccaggaguacug

SEQ ID NO: 66975 - RNA, 19 nt, Homo sapiens
  misc_RNA (1)...(19): siRNA sense strand
aagugcagauccauaguca

SEQ ID NO: 66976 - RNA, 19 nt, Homo sapiens
  misc_RNA (1)...(19): siRNA sense strand
acccaaacccuucaacaug

SEQ ID NO: 66977 - RNA, 19 nt, Homo sapiens
  misc_RNA (1)...(19): siRNA sense strand
uaugagaccauugaacaga

SEQ ID NO: 66978 - RNA, 19 nt, Homo sapiens
  misc_RNA (1)...(19): siRNA sense strand
cuccagagcaguacaagga

SEQ ID NO: 66979 - RNA, 19 nt, Homo sapiens
  misc_RNA (1)...(19): siRNA sense strand
gagauaccagacacacaga

SEQ ID NO: 66980 - RNA, 19 nt, Homo sapiens
  misc_RNA (1)...(19): siRNA sense strand
gagcugggcacgacauucg

SEQ ID NO: 66981 - RNA, 19 nt, Homo sapiens
  misc_RNA (1)...(19): siRNA sense strand
gccaagucuccaagaauga

SEQ ID NO: 66982 - RNA, 19 nt, Homo sapiens
  misc_RNA (1)...(19): siRNA sense strand
aaaagcagcuggagauacu

SEQ ID NO: 66983 - RNA, 19 nt, Homo sapiens
  misc_RNA (1)...(19): siRNA sense strand
guaccuggccaagaaguuc

SEQ ID NO: 66984 - RNA, 19 nt, Homo sapiens
  misc_RNA (1)...(19): siRNA sense strand
caaagccucagccaaguac

SEQ ID NO: 66985 - RNA, 19 nt, Homo sapiens
  misc_RNA (1)...(19): siRNA sense strand
acucggauuuggauuucuu

SEQ ID NO: 66986 - RNA, 19 nt, Homo sapiens
  misc_RNA (1)...(19): siRNA sense strand
cgagacguccuucgaagca

SEQ ID NO: 66987 - RNA, 19 nt, Homo sapiens
  misc_RNA (1)...(19): siRNA sense strand
uggagauacugcaggacaa

SEQ ID NO: 66988 - RNA, 19 nt, Homo sapiens
  misc_RNA (1)...(19): siRNA sense strand
acgagcggcugucucugaa

SEQ ID NO: 66989 - RNA, 19 nt, Homo sapiens
  misc_RNA (1)...(19): siRNA sense strand
ugagaccauugaacagaag

SEQ ID NO: 66990 - RNA, 19 nt, Homo sapiens
  misc_RNA (1)...(19): siRNA sense strand
acuaugagaccauugaaca

SEQ ID NO: 66991 - RNA, 19 nt, Homo sapiens
  misc_RNA (1)...(19): siRNA sense strand
cgcgcuaccugguggagaa

SEQ ID NO: 66992 - RNA, 19 nt, Homo sapiens
  misc_RNA (1)...(19): siRNA sense strand
ggaaaucaugcuggacauc

SEQ ID NO: 66993 - RNA, 19 nt, Homo sapiens
  misc_RNA (1)...(19): siRNA sense strand
guucaacaaaucugagcaa

SEQ ID NO: 66994 - RNA, 19 nt, Homo sapiens
  misc_RNA (1)...(19): siRNA sense strand
uggcccacaucuucuccua

SEQ ID NO: 66995 - RNA, 19 nt, Homo sapiens
  misc_RNA (1)...(19): siRNA sense strand
gacgaguaccugccugugu

SEQ ID NO: 66996 - RNA, 19 nt, Homo sapiens
  misc_RNA (1)...(19): siRNA sense strand
gacgggcaaugggcuggaa

SEQ ID NO: 66997 - RNA, 19 nt, Homo sapiens
  misc_RNA (1)...(19): siRNA sense strand
augagaccauugaacagaa

SEQ ID NO: 66998 - RNA, 19 nt, Homo sapiens
  misc_RNA (1)...(19): siRNA sense strand
acaaaucugagcaauacau

SEQ ID NO: 66999 - RNA, 19 nt, Homo sapiens
  misc_RNA (1)...(19): siRNA sense strand
uacgagcggcugucucuga

SEQ ID NO: 67000 - RNA, 19 nt, Homo sapiens
  misc_RNA (1)...(19): siRNA sense strand
ggaguacugcgugugugaa

SEQ ID NO: 67001 - RNA, 19 nt, Homo sapiens
  misc_RNA (1)...(19): siRNA sense strand
gggcacgacauucgagaca

SEQ ID NO: 67002 - RNA, 19 nt, Homo sapiens
  misc_RNA (1)...(19): siRNA sense strand
agaaguucaacaaaucuga

SEQ ID NO: 67003 - RNA, 19 nt, Homo sapiens
  misc_RNA (1)...(19): siRNA sense strand
ccaggaguacugcgugugu

SEQ ID NO: 67004 - RNA, 19 nt, Homo sapiens
  misc_RNA (1)...(19): siRNA sense strand
gaagaaggccuaugagauu

SEQ ID NO: 67005 - RNA, 19 nt, Homo sapiens
  misc_RNA (1)...(19): siRNA sense strand
ccaaguaccuggccaagaa

SEQ ID NO: 67006 - RNA, 19 nt, Homo sapiens
  misc_RNA (1)...(19): siRNA sense strand
caacaaaucugagcaauac

SEQ ID NO: 67007 - RNA, 19 nt, Homo sapiens
  misc_RNA (1)...(19): siRNA sense strand
gcaaugggcuggaaaucau

SEQ ID NO: 67008 - RNA, 19 nt, Homo sapiens
  misc_RNA (1)...(19): siRNA sense strand
gcaaagcuguuaccaugga

SEQ ID NO: 67009 - RNA, 19 nt, Homo sapiens
  misc_RNA (1)...(19): siRNA sense strand
ccaagaaguucaacaaauc

SEQ ID NO: 67010 - RNA, 19 nt, Homo sapiens
  misc_RNA (1)...(19): siRNA sense strand
ggaaagugcuacacguuca

SEQ ID NO: 67011 - RNA, 19 nt, Homo sapiens
  misc_RNA (1)...(19): siRNA sense strand
caacaacagguaugagaua

SEQ ID NO: 67012 - RNA, 19 nt, Homo sapiens
  misc_RNA (1)...(19): siRNA sense strand
acacacagauggcagauga

SEQ ID NO: 67013 - RNA, 19 nt, Homo sapiens
  misc_RNA (1)...(19): siRNA sense strand
gccaagaaguucaacaaau

SEQ ID NO: 67014 - RNA, 19 nt, Homo sapiens
  misc_RNA (1)...(19): siRNA sense strand
gacauacgcugccaacauc

SEQ ID NO: 67015 - RNA, 19 nt, Homo sapiens
  misc_RNA (1)...(19): siRNA sense strand
gcacgacauucgagacaug

SEQ ID NO: 67016 - RNA, 19 nt, Homo sapiens
  misc_RNA (1)...(19): siRNA sense strand
ggacucggauuuggauuuc

SEQ ID NO: 67017 - RNA, 19 nt, Homo sapiens
  misc_RNA (1)...(19): siRNA sense strand
gcaaagccucagccaagua

SEQ ID NO: 67018 - RNA, 19 nt, Homo sapiens
  misc_RNA (1)...(19): siRNA sense strand
caaaucugagcaauacaua

SEQ ID NO: 67019 - RNA, 19 nt, Homo sapiens
  misc_RNA (1)...(19): siRNA sense strand
caacaugcgugaguucuac

SEQ ID NO: 67020 - RNA, 19 nt, Homo sapiens
  misc_RNA (1)...(19): siRNA sense strand
ucaacaaaucugagcaaua

SEQ ID NO: 67021 - RNA, 19 nt, Homo sapiens
  misc_RNA (1)...(19): siRNA sense strand
ccaagaaugaccuguauca

SEQ ID NO: 67022 - RNA, 19 nt, Homo sapiens
  misc_RNA (1)...(19): siRNA sense strand
caacuuccgcagcuucaaa

SEQ ID NO: 67023 - RNA, 19 nt, Homo sapiens
  misc_RNA (1)...(19): siRNA sense strand
guacaaggagugugcagau

SEQ ID NO: 67024 - RNA, 19 nt, Homo sapiens
  misc_RNA (1)...(19): siRNA sense strand
guacugcgugugugaaaug

SEQ ID NO: 67025 - RNA, 19 nt, Homo sapiens
  misc_RNA (1)...(19): siRNA sense strand
ccuacgaggucauuaagca

SEQ ID NO: 67026 - RNA, 19 nt, Homo sapiens
  misc_RNA (1)...(19): siRNA sense strand
ggagauacugcaggacaaa

SEQ ID NO: 67027 - RNA, 19 nt, Homo sapiens
  misc_RNA (1)...(19): siRNA sense strand
aagaaggccuaugagauug

SEQ ID NO: 67028 - RNA, 19 nt, Homo sapiens
  misc_RNA (1)...(19): siRNA sense strand
cagaagaaggccuaugaga

SEQ ID NO: 67029 - RNA, 19 nt, Homo sapiens
  misc_RNA (1)...(19): siRNA sense strand
gaacagaagaaggccuaug

SEQ ID NO: 67030 - RNA, 19 nt, Homo sapiens
  misc_RNA (1)...(19): siRNA sense strand
gaaagugcuacacguucaa

SEQ ID NO: 67031 - RNA, 19 nt, Homo sapiens
  misc_RNA (1)...(19): siRNA sense strand
ucaaagugcagauccauag

SEQ ID NO: 67032 - RNA, 19 nt, Homo sapiens
  misc_RNA (1)...(19): siRNA sense strand
ugacauacgcugccaacau

SEQ ID NO: 67033 - RNA, 19 nt, Homo sapiens
  misc_RNA (1)...(19): siRNA sense strand
ugcuggagcucuuugacua

SEQ ID NO: 67034 - RNA, 19 nt, Homo sapiens
  misc_RNA (1)...(19): siRNA sense strand
ucacggugcuggagcucuu

SEQ ID NO: 67035 - RNA, 19 nt, Homo sapiens
  misc_RNA (1)...(19): siRNA sense strand
cuucgaagcaggcaucaaa

SEQ ID NO: 67036 - RNA, 19 nt, Homo sapiens
  misc_RNA (1)...(19): siRNA sense strand
agaagaaggccuaugagau

SEQ ID NO: 67037 - RNA, 19 nt, Homo sapiens
  misc_RNA (1)...(19): siRNA sense strand
agccaagucuccaagaaug

SEQ ID NO: 67038 - RNA, 19 nt, Homo sapiens
  misc_RNA (1)...(19): siRNA sense strand
ggccaagaaguucaacaaa

SEQ ID NO: 67039 - RNA, 19 nt, Homo sapiens
  misc_RNA (1)...(19): siRNA sense strand
ugugcaaccucaacgaguu

SEQ ID NO: 67040 - RNA, 19 nt, Homo sapiens
  misc_RNA (1)...(19): siRNA sense strand
cgaagcaggcaucaaagug

SEQ ID NO: 67041 - RNA, 19 nt, Homo sapiens
  misc_RNA (1)...(19): siRNA sense strand
cucaacgaguuccgcuuua

SEQ ID NO: 67042 - RNA, 19 nt, Homo sapiens
  misc_RNA (1)...(19): siRNA sense strand
gaaggccuaugagauugca

SEQ ID NO: 67043 - RNA, 19 nt, Homo sapiens
  misc_RNA (1)...(19): siRNA sense strand
ccucaacgaguuccgcuuu

SEQ ID NO: 67044 - RNA, 19 nt, Homo sapiens
  misc_RNA (1)...(19): siRNA sense strand
gcaggacaaagccaacuuc

SEQ ID NO: 67045 - RNA, 19 nt, Homo sapiens
  misc_RNA (1)...(19): siRNA sense strand
cggagcgugugcaguacua

SEQ ID NO: 67046 - RNA, 19 nt, Homo sapiens
  misc_RNA (1)...(19): siRNA sense strand
cuccaagaaugaccuguau

SEQ ID NO: 67047 - RNA, 19 nt, Homo sapiens
  misc_RNA (1)...(19): siRNA sense strand
aacagaagaaggccuauga

SEQ ID NO: 67048 - RNA, 19 nt, Homo sapiens
  misc_RNA (1)...(19): siRNA sense strand
ggagaaggaccaggaguac

SEQ ID NO: 67049 - RNA, 19 nt, Homo sapiens
  misc_RNA (1)...(19): siRNA sense strand
gcaucaaagugcagaucca

SEQ ID NO: 67050 - RNA, 19 nt, Homo sapiens
  misc_RNA (1)...(19): siRNA sense strand
ucaacgaguuccgcuuuag

SEQ ID NO: 67051 - RNA, 19 nt, Homo sapiens
  misc_RNA (1)...(19): siRNA sense strand
gauaccagacacacagaug

SEQ ID NO: 67052 - RNA, 19 nt, Homo sapiens
  misc_RNA (1)...(19): siRNA sense strand
acacagauggcagaugaaa

SEQ ID NO: 67053 - RNA, 19 nt, Homo sapiens
  misc_RNA (1)...(19): siRNA sense strand
gaggcacguucgaggacuu

SEQ ID NO: 67054 - RNA, 19 nt, Homo sapiens
  misc_RNA (1)...(19): siRNA sense strand
caacuaugagaccauugaa

SEQ ID NO: 67055 - RNA, 19 nt, Homo sapiens
  misc_RNA (1)...(19): siRNA sense strand
uggcugugcugcugugugu

SEQ ID NO: 67056 - RNA, 19 nt, Homo sapiens
  misc_RNA (1)...(19): siRNA sense strand
ugugugaaaugccuugcaa

SEQ ID NO: 67057 - RNA, 19 nt, Homo sapiens
  misc_RNA (1)...(19): siRNA sense strand
uuagccaagucuccaagaa

SEQ ID NO: 67058 - RNA, 19 nt, Homo sapiens
  misc_RNA (1)...(19): siRNA sense strand
uggagaaggaccaggagua

SEQ ID NO: 67059 - RNA, 19 nt, Homo sapiens
  misc_RNA (1)...(19): siRNA sense strand
ggcaaugggcuggaaauca

SEQ ID NO: 67060 - RNA, 19 nt, Homo sapiens
  misc_RNA (1)...(19): siRNA sense strand
caagaaguucaacaaaucu

SEQ ID NO: 67061 - RNA, 19 nt, Homo sapiens
  misc_RNA (1)...(19): siRNA sense strand
gaguacugcgugugugaaa

SEQ ID NO: 67062 - RNA, 19 nt, Homo sapiens
  misc_RNA (1)...(19): siRNA sense strand
ggucuucacacgcuaugga

SEQ ID NO: 67063 - RNA, 19 nt, Homo sapiens
  misc_RNA (1)...(19): siRNA sense strand
ucaacaugcgugaguucua

SEQ ID NO: 67064 - RNA, 19 nt, Homo sapiens
  misc_RNA (1)...(19): siRNA sense strand
agaaggaccaggaguacug

SEQ ID NO: 67065 - RNA, 19 nt, Homo sapiens
  misc_RNA (1)...(19): siRNA sense strand
aagugcagauccauaguca

SEQ ID NO: 67066 - RNA, 19 nt, Homo sapiens
  misc_RNA (1)...(19): siRNA sense strand
acccaaacccuucaacaug

SEQ ID NO: 67067 - RNA, 19 nt, Homo sapiens
  misc_RNA (1)...(19): siRNA sense strand
uaugagaccauugaacaga

SEQ ID NO: 67068 - RNA, 19 nt, Homo sapiens
  misc_RNA (1)...(19): siRNA sense strand
cuccagagcaguacaagga

SEQ ID NO: 67069 - RNA, 19 nt, Homo sapiens
  misc_RNA (1)...(19): siRNA sense strand
gagauaccagacacacaga

SEQ ID NO: 67070 - RNA, 19 nt, Homo sapiens
  misc_RNA (1)...(19): siRNA sense strand
gagcugggcacgacauucg

SEQ ID NO: 67071 - RNA, 19 nt, Homo sapiens
  misc_RNA (1)...(19): siRNA sense strand
gccaagucuccaagaauga

SEQ ID NO: 67072 - RNA, 19 nt, Homo sapiens
  misc_RNA (1)...(19): siRNA sense strand
aaaagcagcuggagauacu

SEQ ID NO: 67073 - RNA, 19 nt, Homo sapiens
  misc_RNA (1)...(19): siRNA sense strand
guaccuggccaagaaguuc

SEQ ID NO: 67074 - RNA, 19 nt, Homo sapiens
  misc_RNA (1)...(19): siRNA sense strand
caaagccucagccaaguac

SEQ ID NO: 67075 - RNA, 19 nt, Homo sapiens
  misc_RNA (1)...(19): siRNA sense strand
acucggauuuggauuucuu

SEQ ID NO: 67076 - RNA, 19 nt, Homo sapiens
  misc_RNA (1)...(19): siRNA sense strand
cgagacguccuucgaagca

SEQ ID NO: 67077 - RNA, 19 nt, Homo sapiens
  misc_RNA (1)...(19): siRNA sense strand
uggagauacugcaggacaa

SEQ ID NO: 67078 - RNA, 19 nt, Homo sapiens
  misc_RNA (1)...(19): siRNA sense strand
acgagcggcugucucugaa

SEQ ID NO: 67079 - RNA, 19 nt, Homo sapiens
  misc_RNA (1)...(19): siRNA sense strand
ugagaccauugaacagaag

SEQ ID NO: 67080 - RNA, 19 nt, Homo sapiens
  misc_RNA (1)...(19): siRNA sense strand
acuaugagaccauugaaca

SEQ ID NO: 67081 - RNA, 19 nt, Homo sapiens
  misc_RNA (1)...(19): siRNA sense strand
cgcgcuaccugguggagaa

SEQ ID NO: 67082 - RNA, 19 nt, Homo sapiens
  misc_RNA (1)...(19): siRNA sense strand
ggaaaucaugcuggacauc

SEQ ID NO: 67083 - RNA, 19 nt, Homo sapiens
  misc_RNA (1)...(19): siRNA sense strand
guucaacaaaucugagcaa

SEQ ID NO: 67084 - RNA, 19 nt, Homo sapiens
  misc_RNA (1)...(19): siRNA sense strand
uggcccacaucuucuccua

SEQ ID NO: 67085 - RNA, 19 nt, Homo sapiens
  misc_RNA (1)...(19): siRNA sense strand
gacgaguaccugccugugu

SEQ ID NO: 67086 - RNA, 19 nt, Homo sapiens
  misc_RNA (1)...(19): siRNA sense strand
gacgggcaaugggcuggaa

SEQ ID NO: 67087 - RNA, 19 nt, Homo sapiens
  misc_RNA (1)...(19): siRNA sense strand
augagaccauugaacagaa

SEQ ID NO: 67088 - RNA, 19 nt, Homo sapiens
  misc_RNA (1)...(19): siRNA sense strand
acaaaucugagcaauacau

SEQ ID NO: 67089 - RNA, 19 nt, Homo sapiens
  misc_RNA (1)...(19): siRNA sense strand
uacgagcggcugucucuga

SEQ ID NO: 67090 - RNA, 19 nt, Homo sapiens
  misc_RNA (1)...(19): siRNA sense strand
ggaguacugcgugugugaa

SEQ ID NO: 67091 - RNA, 19 nt, Homo sapiens
  misc_RNA (1)...(19): siRNA sense strand
gggcacgacauucgagaca

SEQ ID NO: 67092 - RNA, 19 nt, Homo sapiens
  misc_RNA (1)...(19): siRNA sense strand
agaaguucaacaaaucuga

SEQ ID NO: 67093 - RNA, 19 nt, Homo sapiens
  misc_RNA (1)...(19): siRNA sense strand
ccaggaguacugcgugugu

SEQ ID NO: 67094 - RNA, 19 nt, Homo sapiens
  misc_RNA (1)...(19): siRNA sense strand
ggaggaagcugaugaauau

SEQ ID NO: 67095 - RNA, 19 nt, Homo sapiens
  misc_RNA (1)...(19): siRNA sense strand
cgagaaagcugaucaagaa

SEQ ID NO: 67096 - RNA, 19 nt, Homo sapiens
  misc_RNA (1)...(19): siRNA sense strand
ccaacgagcucaacaauau

SEQ ID NO: 67097 - RNA, 19 nt, Homo sapiens
  misc_RNA (1)...(19): siRNA sense strand
gaaggaagcaggaguguuu

SEQ ID NO: 67098 - RNA, 19 nt, Homo sapiens
  misc_RNA (1)...(19): siRNA sense strand
gaccaaagauggagucuau

SEQ ID NO: 67099 - RNA, 19 nt, Homo sapiens
  misc_RNA (1)...(19): siRNA sense strand
ucaacgagcuggcaaacua

SEQ ID NO: 67100 - RNA, 19 nt, Homo sapiens
  misc_RNA (1)...(19): siRNA sense strand
ccacuccucugcucgauua

SEQ ID NO: 67101 - RNA, 19 nt, Homo sapiens
  misc_RNA (1)...(19): siRNA sense strand
gaaccaggcuuugaaggaa

SEQ ID NO: 67102 - RNA, 19 nt, Homo sapiens
  misc_RNA (1)...(19): siRNA sense strand
cagccaagauguucaguaa

SEQ ID NO: 67103 - RNA, 19 nt, Homo sapiens
  misc_RNA (1)...(19): siRNA sense strand
ggaagcugaugaauauauu

SEQ ID NO: 67104 - RNA, 19 nt, Homo sapiens
  misc_RNA (1)...(19): siRNA sense strand
ucacugaggucuucaagga

SEQ ID NO: 67105 - RNA, 19 nt, Homo sapiens
  misc_RNA (1)...(19): siRNA sense strand
gacacuaucuugaucagaa

SEQ ID NO: 67106 - RNA, 19 nt, Homo sapiens
  misc_RNA (1)...(19): siRNA sense strand
gcacgaagucacaaucuuu

SEQ ID NO: 67107 - RNA, 19 nt, Homo sapiens
  misc_RNA (1)...(19): siRNA sense strand
ugagagcaauucgagauua

SEQ ID NO: 67108 - RNA, 19 nt, Homo sapiens
  misc_RNA (1)...(19): siRNA sense strand
ugaacaagaugaagaagga

SEQ ID NO: 67109 - RNA, 19 nt, Homo sapiens
  misc_RNA (1)...(19): siRNA sense strand
gacuacaucugcaaaguga

SEQ ID NO: 67110 - RNA, 19 nt, Homo sapiens
  misc_RNA (1)...(19): siRNA sense strand
uaaguacucuugccaguuc

SEQ ID NO: 67111 - RNA, 19 nt, Homo sapiens
  misc_RNA (1)...(19): siRNA sense strand
ggaggcauauccagaggaa

SEQ ID NO: 67112 - RNA, 19 nt, Homo sapiens
  misc_RNA (1)...(19): siRNA sense strand
gggaggaagcugaugaaua

SEQ ID NO: 67113 - RNA, 19 nt, Homo sapiens
  misc_RNA (1)...(19): siRNA sense strand
gugcagauccucaaagauu

SEQ ID NO: 67114 - RNA, 19 nt, Homo sapiens
  misc_RNA (1)...(19): siRNA sense strand
caaccaggcuucugaaacu

SEQ ID NO: 67115 - RNA, 19 nt, Homo sapiens
  misc_RNA (1)...(19): siRNA sense strand
ggcaagauccucaucauug

SEQ ID NO: 67116 - RNA, 19 nt, Homo sapiens
  misc_RNA (1)...(19): siRNA sense strand
gccaagauguucaguaaag

SEQ ID NO: 67117 - RNA, 19 nt, Homo sapiens
  misc_RNA (1)...(19): siRNA sense strand
aaaccugccucguucauga

SEQ ID NO: 67118 - RNA, 19 nt, Homo sapiens
  misc_RNA (1)...(19): siRNA sense strand
gcaagauccucaucauugg

SEQ ID NO: 67119 - RNA, 19 nt, Homo sapiens
  misc_RNA (1)...(19): siRNA sense strand
gaucaaacgucguggaaaa

SEQ ID NO: 67120 - RNA, 19 nt, Homo sapiens
  misc_RNA (1)...(19): siRNA sense strand
gagugcagauccucaaaga

SEQ ID NO: 67121 - RNA, 19 nt, Homo sapiens
  misc_RNA (1)...(19): siRNA sense strand
cgagugaagucgauaaaca

SEQ ID NO: 67122 - RNA, 19 nt, Homo sapiens
  misc_RNA (1)...(19): siRNA sense strand
cagaaucgguucaaguaug

SEQ ID NO: 67123 - RNA, 19 nt, Homo sapiens
  misc_RNA (1)...(19): siRNA sense strand
ccacaggcuuccucaagaa

SEQ ID NO: 67124 - RNA, 19 nt, Homo sapiens
  misc_RNA (1)...(19): siRNA sense strand
gaucauguguuacgcuauc

SEQ ID NO: 67125 - RNA, 19 nt, Homo sapiens
  misc_RNA (1)...(19): siRNA sense strand
gcacccagauggcaagauc

SEQ ID NO: 67126 - RNA, 19 nt, Homo sapiens
  misc_RNA (1)...(19): siRNA sense strand
gaccacggauggcgucuau

SEQ ID NO: 67127 - RNA, 19 nt, Homo sapiens
  misc_RNA (1)...(19): siRNA sense strand
caucggaccugccacuguu

SEQ ID NO: 67128 - RNA, 19 nt, Homo sapiens
  misc_RNA (1)...(19): siRNA sense strand
caaaucuuauccugaaugu

SEQ ID NO: 67129 - RNA, 19 nt, Homo sapiens
  misc_RNA (1)...(19): siRNA sense strand
gcacugaggaauauaagau

SEQ ID NO: 67130 - RNA, 19 nt, Homo sapiens
  misc_RNA (1)...(19): siRNA sense strand
ggacaggaagccacaguug

SEQ ID NO: 67131 - RNA, 19 nt, Homo sapiens
  misc_RNA (1)...(19): siRNA sense strand
gauaaacaacccagacaug

SEQ ID NO: 67132 - RNA, 19 nt, Homo sapiens
  misc_RNA (1)...(19): siRNA sense strand
gcgagcagcagaccuauga

SEQ ID NO: 67133 - RNA, 19 nt, Homo sapiens
  misc_RNA (1)...(19): siRNA sense strand
ucaccuaccucgagaucaa

SEQ ID NO: 67134 - RNA, 19 nt, Homo sapiens
  misc_RNA (1)...(19): siRNA sense strand
gcacagagacucacaugac

SEQ ID NO: 67135 - RNA, 19 nt, Homo sapiens
  misc_RNA (1)...(19): siRNA sense strand
gaggaagcauccggaggua

SEQ ID NO: 67136 - RNA, 19 nt, Homo sapiens
  misc_RNA (1)...(19): siRNA sense strand
gaaauucuggccaguuuua

SEQ ID NO: 67137 - RNA, 19 nt, Homo sapiens
  misc_RNA (1)...(19): siRNA sense strand
cauccagucuguauacgaa

SEQ ID NO: 67138 - RNA, 19 nt, Homo sapiens
  misc_RNA (1)...(19): siRNA sense strand
aaacugcaguagccaagaa

SEQ ID NO: 67139 - RNA, 19 nt, Homo sapiens
  misc_RNA (1)...(19): siRNA sense strand
ggaagcauccggagguaga

SEQ ID NO: 67140 - RNA, 19 nt, Homo sapiens
  misc_RNA (1)...(19): siRNA sense strand
ucuccggccucuucaauuu

SEQ ID NO: 67141 - RNA, 19 nt, Homo sapiens
  misc_RNA (1)...(19): siRNA sense strand
ccagggagcuugguuugau

SEQ ID NO: 67142 - RNA, 19 nt, Homo sapiens
  misc_RNA (1)...(19): siRNA sense strand
ugcagauccucaaagauua

SEQ ID NO: 67143 - RNA, 19 nt, Homo sapiens
  misc_RNA (1)...(19): siRNA sense strand
ccaagaaccaggcuuugaa

SEQ ID NO: 67144 - RNA, 19 nt, Homo sapiens
  misc_RNA (1)...(19): siRNA sense strand
gagaucauccagucuguau

SEQ ID NO: 67145 - RNA, 19 nt, Homo sapiens
  misc_RNA (1)...(19): siRNA sense strand
gccacaggcuuccucaaga

SEQ ID NO: 67146 - RNA, 19 nt, Homo sapiens
  misc_RNA (1)...(19): siRNA sense strand
gcagcagaccuaugacuau

SEQ ID NO: 67147 - RNA, 19 nt, Homo sapiens
  misc_RNA (1)...(19): siRNA sense strand
gauaccaucugugaucuag

SEQ ID NO: 67148 - RNA, 19 nt, Homo sapiens
  misc_RNA (1)...(19): siRNA sense strand
ucaagaaggcggaccagaa

SEQ ID NO: 67149 - RNA, 19 nt, Homo sapiens
  misc_RNA (1)...(19): siRNA sense strand
caucggagucgcauuugua

SEQ ID NO: 67150 - RNA, 19 nt, Homo sapiens
  misc_RNA (1)...(19): siRNA sense strand
gcccacaacaccaucauuu

SEQ ID NO: 67151 - RNA, 19 nt, Homo sapiens
  misc_RNA (1)...(19): siRNA sense strand
ccacggauggcgucuauga

SEQ ID NO: 67152 - RNA, 19 nt, Homo sapiens
  misc_RNA (1)...(19): siRNA sense strand
gagagaucauccagucugu

SEQ ID NO: 67153 - RNA, 19 nt, Homo sapiens
  misc_RNA (1)...(19): siRNA sense strand
gaagaucucguggccaaug

SEQ ID NO: 67154 - RNA, 19 nt, Homo sapiens
  misc_RNA (1)...(19): siRNA sense strand
ccugggugcuuuaagauug

SEQ ID NO: 67155 - RNA, 19 nt, Homo sapiens
  misc_RNA (1)...(19): siRNA sense strand
ggacgugugccaccauguu

SEQ ID NO: 67156 - RNA, 19 nt, Homo sapiens
  misc_RNA (1)...(19): siRNA sense strand
gcucaacaauaucaucucu

SEQ ID NO: 67157 - RNA, 19 nt, Homo sapiens
  misc_RNA (1)...(19): siRNA sense strand
cagcagaccuaugacuaug

SEQ ID NO: 67158 - RNA, 19 nt, Homo sapiens
  misc_RNA (1)...(19): siRNA sense strand
gcugaugaauauauugaca

SEQ ID NO: 67159 - RNA, 19 nt, Homo sapiens
  misc_RNA (1)...(19): siRNA sense strand
agccaaaucuuauccugaa

SEQ ID NO: 67160 - RNA, 19 nt, Homo sapiens
  misc_RNA (1)...(19): siRNA sense strand
agaaaagguugccuaagua

SEQ ID NO: 67161 - RNA, 19 nt, Homo sapiens
  misc_RNA (1)...(19): siRNA sense strand
gagagcaauucgagauuac

SEQ ID NO: 67162 - RNA, 19 nt, Homo sapiens
  misc_RNA (1)...(19): siRNA sense strand
ccaaagauggagucuaugu

SEQ ID NO: 67163 - RNA, 19 nt, Homo sapiens
  misc_RNA (1)...(19): siRNA sense strand
uagaaacuguggguccuuu

SEQ ID NO: 67164 - RNA, 19 nt, Homo sapiens
  misc_RNA (1)...(19): siRNA sense strand
gaagacaagaaagaaauuc

SEQ ID NO: 67165 - RNA, 19 nt, Homo sapiens
  misc_RNA (1)...(19): siRNA sense strand
gcucgauuaugcacuggaa

SEQ ID NO: 67166 - RNA, 19 nt, Homo sapiens
  misc_RNA (1)...(19): siRNA sense strand
cagaaaagguugccuaagu

SEQ ID NO: 67167 - RNA, 19 nt, Homo sapiens
  misc_RNA (1)...(19): siRNA sense strand
gcccaucacugaggucuuc

SEQ ID NO: 67168 - RNA, 19 nt, Homo sapiens
  misc_RNA (1)...(19): siRNA sense strand
gaggacaggagcucaucua

SEQ ID NO: 67169 - RNA, 19 nt, Homo sapiens
  misc_RNA (1)...(19): siRNA sense strand
gcugaggaguucuaugucu

SEQ ID NO: 67170 - RNA, 19 nt, Homo sapiens
  misc_RNA (1)...(19): siRNA sense strand
aaucuuauccugaauguag

SEQ ID NO: 67171 - RNA, 19 nt, Homo sapiens
  misc_RNA (1)...(19): siRNA sense strand
caaccgugcccauggacua

SEQ ID NO: 67172 - RNA, 19 nt, Homo sapiens
  misc_RNA (1)...(19): siRNA sense strand
gaucauccagucuguauac

SEQ ID NO: 67173 - RNA, 19 nt, Homo sapiens
  misc_RNA (1)...(19): siRNA sense strand
caagaaggcggaccagaag

SEQ ID NO: 67174 - RNA, 19 nt, Homo sapiens
  misc_RNA (1)...(19): siRNA sense strand
gaaggagcacgaagucaca

SEQ ID NO: 67175 - RNA, 19 nt, Homo sapiens
  misc_RNA (1)...(19): siRNA sense strand
cagcguggccuaugucuca

SEQ ID NO: 67176 - RNA, 19 nt, Homo sapiens
  misc_RNA (1)...(19): siRNA sense strand
gagugaagucgauaaacaa

SEQ ID NO: 67177 - RNA, 19 nt, Homo sapiens
  misc_RNA (1)...(19): siRNA sense strand
gaggcagcaucgcaaacuu

SEQ ID NO: 67178 - RNA, 19 nt, Homo sapiens
  misc_RNA (1)...(19): siRNA sense strand
ggaugcagcagccaagaug

SEQ ID NO: 67179 - RNA, 19 nt, Homo sapiens
  misc_RNA (1)...(19): siRNA sense strand
ccaccauguucuccucuga

SEQ ID NO: 67180 - RNA, 19 nt, Homo sapiens
  misc_RNA (1)...(19): siRNA sense strand
caugaacuaugcccagauc

SEQ ID NO: 67181 - RNA, 19 nt, Homo sapiens
  misc_RNA (1)...(19): siRNA sense strand
gccauggucuacccuuuca

SEQ ID NO: 67182 - RNA, 19 nt, Homo sapiens
  misc_RNA (1)...(19): siRNA sense strand
ggcccacacugcaaacuuc

SEQ ID NO: 67183 - RNA, 19 nt, Homo sapiens
  misc_RNA (1)...(19): siRNA sense strand
gaagcugaugaauauauug

SEQ ID NO: 67184 - RNA, 19 nt, Homo sapiens
  misc_RNA (1)...(19): siRNA sense strand
cgagaucaauccccuugua

SEQ ID NO: 67185 - RNA, 19 nt, Homo sapiens
  misc_RNA (1)...(19): siRNA sense strand
uuguagacaugcuuagaaa

SEQ ID NO: 67186 - RNA, 19 nt, Homo sapiens
  misc_RNA (1)...(19): siRNA sense strand
gcagccaagauguucagua

SEQ ID NO: 67187 - RNA, 19 nt, Homo sapiens
  misc_RNA (1)...(19): siRNA sense strand
ccugaucccugucuucaag

SEQ ID NO: 67188 - RNA, 19 nt, Homo sapiens
  misc_RNA (1)...(19): siRNA sense strand
uacgaggacuuguacuuca

SEQ ID NO: 67189 - RNA, 19 nt, Homo sapiens
  misc_RNA (1)...(19): siRNA sense strand
agacaugcuuagaaacugu

SEQ ID NO: 67190 - RNA, 19 nt, Homo sapiens
  misc_RNA (1)...(19): siRNA sense strand
caggugggaugcuggacaa

SEQ ID NO: 67191 - RNA, 19 nt, Homo sapiens
  misc_RNA (1)...(19): siRNA sense strand
uccagaaucgguucaagua

SEQ ID NO: 67192 - RNA, 19 nt, Homo sapiens
  misc_RNA (1)...(19): siRNA sense strand
ccagcgagcagcagaccua

SEQ ID NO: 67193 - RNA, 19 nt, Homo sapiens
  misc_RNA (1)...(19): siRNA sense strand
guagacaugcuuagaaacu

SEQ ID NO: 67194 - RNA, 19 nt, Homo sapiens
  misc_RNA (1)...(19): siRNA sense strand
ggaggaagcugaugaauau

SEQ ID NO: 67195 - RNA, 19 nt, Homo sapiens
  misc_RNA (1)...(19): siRNA sense strand
cgagaaagcugaucaagaa

SEQ ID NO: 67196 - RNA, 19 nt, Homo sapiens
  misc_RNA (1)...(19): siRNA sense strand
ccaacgagcucaacaauau

SEQ ID NO: 67197 - RNA, 19 nt, Homo sapiens
  misc_RNA (1)...(19): siRNA sense strand
gaaggaagcaggaguguuu

SEQ ID NO: 67198 - RNA, 19 nt, Homo sapiens
  misc_RNA (1)...(19): siRNA sense strand
gaccaaagauggagucuau

SEQ ID NO: 67199 - RNA, 19 nt, Homo sapiens
  misc_RNA (1)...(19): siRNA sense strand
ucaacgagcuggcaaacua

SEQ ID NO: 67200 - RNA, 19 nt, Homo sapiens
  misc_RNA (1)...(19): siRNA sense strand
ccacuccucugcucgauua

SEQ ID NO: 67201 - RNA, 19 nt, Homo sapiens
  misc_RNA (1)...(19): siRNA sense strand
gaaccaggcuuugaaggaa

SEQ ID NO: 67202 - RNA, 19 nt, Homo sapiens
  misc_RNA (1)...(19): siRNA sense strand
cagccaagauguucaguaa

SEQ ID NO: 67203 - RNA, 19 nt, Homo sapiens
  misc_RNA (1)...(19): siRNA sense strand
ggaagcugaugaauauauu

SEQ ID NO: 67204 - RNA, 19 nt, Homo sapiens
  misc_RNA (1)...(19): siRNA sense strand
ucacugaggucuucaagga

SEQ ID NO: 67205 - RNA, 19 nt, Homo sapiens
  misc_RNA (1)...(19): siRNA sense strand
gacacuaucuugaucagaa

SEQ ID NO: 67206 - RNA, 19 nt, Homo sapiens
  misc_RNA (1)...(19): siRNA sense strand
gcacgaagucacaaucuuu

SEQ ID NO: 67207 - RNA, 19 nt, Homo sapiens
  misc_RNA (1)...(19): siRNA sense strand
ugagagcaauucgagauua

SEQ ID NO: 67208 - RNA, 19 nt, Homo sapiens
  misc_RNA (1)...(19): siRNA sense strand
ugaacaagaugaagaagga

SEQ ID NO: 67209 - RNA, 19 nt, Homo sapiens
  misc_RNA (1)...(19): siRNA sense strand
gacuacaucugcaaaguga

SEQ ID NO: 67210 - RNA, 19 nt, Homo sapiens
  misc_RNA (1)...(19): siRNA sense strand
uaaguacucuugccaguuc

SEQ ID NO: 67211 - RNA, 19 nt, Homo sapiens
  misc_RNA (1)...(19): siRNA sense strand
ggaggcauauccagaggaa

SEQ ID NO: 67212 - RNA, 19 nt, Homo sapiens
  misc_RNA (1)...(19): siRNA sense strand
gggaggaagcugaugaaua

SEQ ID NO: 67213 - RNA, 19 nt, Homo sapiens
  misc_RNA (1)...(19): siRNA sense strand
gugcagauccucaaagauu

SEQ ID NO: 67214 - RNA, 19 nt, Homo sapiens
  misc_RNA (1)...(19): siRNA sense strand
caaccaggcuucugaaacu

SEQ ID NO: 67215 - RNA, 19 nt, Homo sapiens
  misc_RNA (1)...(19): siRNA sense strand
ggcaagauccucaucauug

SEQ ID NO: 67216 - RNA, 19 nt, Homo sapiens
  misc_RNA (1)...(19): siRNA sense strand
gccaagauguucaguaaag

SEQ ID NO: 67217 - RNA, 19 nt, Homo sapiens
  misc_RNA (1)...(19): siRNA sense strand
aaaccugccucguucauga

SEQ ID NO: 67218 - RNA, 19 nt, Homo sapiens
  misc_RNA (1)...(19): siRNA sense strand
gcaagauccucaucauugg

SEQ ID NO: 67219 - RNA, 19 nt, Homo sapiens
  misc_RNA (1)...(19): siRNA sense strand
gaucaaacgucguggaaaa

SEQ ID NO: 67220 - RNA, 19 nt, Homo sapiens
  misc_RNA (1)...(19): siRNA sense strand
gagugcagauccucaaaga

SEQ ID NO: 67221 - RNA, 19 nt, Homo sapiens
  misc_RNA (1)...(19): siRNA sense strand
cgagugaagucgauaaaca

SEQ ID NO: 67222 - RNA, 19 nt, Homo sapiens
  misc_RNA (1)...(19): siRNA sense strand
cagaaucgguucaaguaug

SEQ ID NO: 67223 - RNA, 19 nt, Homo sapiens
  misc_RNA (1)...(19): siRNA sense strand
ccacaggcuuccucaagaa

SEQ ID NO: 67224 - RNA, 19 nt, Homo sapiens
  misc_RNA (1)...(19): siRNA sense strand
gaucauguguuacgcuauc

SEQ ID NO: 67225 - RNA, 19 nt, Homo sapiens
  misc_RNA (1)...(19): siRNA sense strand
gcacccagauggcaagauc

SEQ ID NO: 67226 - RNA, 19 nt, Homo sapiens
  misc_RNA (1)...(19): siRNA sense strand
gaccacggauggcgucuau

SEQ ID NO: 67227 - RNA, 19 nt, Homo sapiens
  misc_RNA (1)...(19): siRNA sense strand
caucggaccugccacuguu

SEQ ID NO: 67228 - RNA, 19 nt, Homo sapiens
  misc_RNA (1)...(19): siRNA sense strand
caaaucuuauccugaaugu

SEQ ID NO: 67229 - RNA, 19 nt, Homo sapiens
  misc_RNA (1)...(19): siRNA sense strand
gcacugaggaauauaagau

SEQ ID NO: 67230 - RNA, 19 nt, Homo sapiens
  misc_RNA (1)...(19): siRNA sense strand
ggacaggaagccacaguug

SEQ ID NO: 67231 - RNA, 19 nt, Homo sapiens
  misc_RNA (1)...(19): siRNA sense strand
gauaaacaacccagacaug

SEQ ID NO: 67232 - RNA, 19 nt, Homo sapiens
  misc_RNA (1)...(19): siRNA sense strand
gcgagcagcagaccuauga

SEQ ID NO: 67233 - RNA, 19 nt, Homo sapiens
  misc_RNA (1)...(19): siRNA sense strand
ucaccuaccucgagaucaa

SEQ ID NO: 67234 - RNA, 19 nt, Homo sapiens
  misc_RNA (1)...(19): siRNA sense strand
gcacagagacucacaugac

SEQ ID NO: 67235 - RNA, 19 nt, Homo sapiens
  misc_RNA (1)...(19): siRNA sense strand
gaggaagcauccggaggua

SEQ ID NO: 67236 - RNA, 19 nt, Homo sapiens
  misc_RNA (1)...(19): siRNA sense strand
gaaauucuggccaguuuua

SEQ ID NO: 67237 - RNA, 19 nt, Homo sapiens
  misc_RNA (1)...(19): siRNA sense strand
cauccagucuguauacgaa

SEQ ID NO: 67238 - RNA, 19 nt, Homo sapiens
  misc_RNA (1)...(19): siRNA sense strand
aaacugcaguagccaagaa

SEQ ID NO: 67239 - RNA, 19 nt, Homo sapiens
  misc_RNA (1)...(19): siRNA sense strand
ggaagcauccggagguaga

SEQ ID NO: 67240 - RNA, 19 nt, Homo sapiens
  misc_RNA (1)...(19): siRNA sense strand
ucuccggccucuucaauuu

SEQ ID NO: 67241 - RNA, 19 nt, Homo sapiens
  misc_RNA (1)...(19): siRNA sense strand
ccagggagcuugguuugau

SEQ ID NO: 67242 - RNA, 19 nt, Homo sapiens
  misc_RNA (1)...(19): siRNA sense strand
ugcagauccucaaagauua

SEQ ID NO: 67243 - RNA, 19 nt, Homo sapiens
  misc_RNA (1)...(19): siRNA sense strand
ccaagaaccaggcuuugaa

SEQ ID NO: 67244 - RNA, 19 nt, Homo sapiens
  misc_RNA (1)...(19): siRNA sense strand
gagaucauccagucuguau

SEQ ID NO: 67245 - RNA, 19 nt, Homo sapiens
  misc_RNA (1)...(19): siRNA sense strand
gccacaggcuuccucaaga

SEQ ID NO: 67246 - RNA, 19 nt, Homo sapiens
  misc_RNA (1)...(19): siRNA sense strand
gcagcagaccuaugacuau

SEQ ID NO: 67247 - RNA, 19 nt, Homo sapiens
  misc_RNA (1)...(19): siRNA sense strand
gauaccaucugugaucuag

SEQ ID NO: 67248 - RNA, 19 nt, Homo sapiens
  misc_RNA (1)...(19): siRNA sense strand
ucaagaaggcggaccagaa

SEQ ID NO: 67249 - RNA, 19 nt, Homo sapiens
  misc_RNA (1)...(19): siRNA sense strand
caucggagucgcauuugua

SEQ ID NO: 67250 - RNA, 19 nt, Homo sapiens
  misc_RNA (1)...(19): siRNA sense strand
gcccacaacaccaucauuu

SEQ ID NO: 67251 - RNA, 19 nt, Homo sapiens
  misc_RNA (1)...(19): siRNA sense strand
ccacggauggcgucuauga

SEQ ID NO: 67252 - RNA, 19 nt, Homo sapiens
  misc_RNA (1)...(19): siRNA sense strand
gagagaucauccagucugu

SEQ ID NO: 67253 - RNA, 19 nt, Homo sapiens
  misc_RNA (1)...(19): siRNA sense strand
gaagaucucguggccaaug

SEQ ID NO: 67254 - RNA, 19 nt, Homo sapiens
  misc_RNA (1)...(19): siRNA sense strand
ccugggugcuuuaagauug

SEQ ID NO: 67255 - RNA, 19 nt, Homo sapiens
  misc_RNA (1)...(19): siRNA sense strand
ggacgugugccaccauguu

SEQ ID NO: 67256 - RNA, 19 nt, Homo sapiens
  misc_RNA (1)...(19): siRNA sense strand
gcucaacaauaucaucucu

SEQ ID NO: 67257 - RNA, 19 nt, Homo sapiens
  misc_RNA (1)...(19): siRNA sense strand
cagcagaccuaugacuaug

SEQ ID NO: 67258 - RNA, 19 nt, Homo sapiens
  misc_RNA (1)...(19): siRNA sense strand
gcugaugaauauauugaca

SEQ ID NO: 67259 - RNA, 19 nt, Homo sapiens
  misc_RNA (1)...(19): siRNA sense strand
agccaaaucuuauccugaa

SEQ ID NO: 67260 - RNA, 19 nt, Homo sapiens
  misc_RNA (1)...(19): siRNA sense strand
agaaaagguugccuaagua

SEQ ID NO: 67261 - RNA, 19 nt, Homo sapiens
  misc_RNA (1)...(19): siRNA sense strand
gagagcaauucgagauuac

SEQ ID NO: 67262 - RNA, 19 nt, Homo sapiens
  misc_RNA (1)...(19): siRNA sense strand
ccaaagauggagucuaugu

SEQ ID NO: 67263 - RNA, 19 nt, Homo sapiens
  misc_RNA (1)...(19): siRNA sense strand
uagaaacuguggguccuuu

SEQ ID NO: 67264 - RNA, 19 nt, Homo sapiens
  misc_RNA (1)...(19): siRNA sense strand
gaagacaagaaagaaauuc

SEQ ID NO: 67265 - RNA, 19 nt, Homo sapiens
  misc_RNA (1)...(19): siRNA sense strand
gcucgauuaugcacuggaa

SEQ ID NO: 67266 - RNA, 19 nt, Homo sapiens
  misc_RNA (1)...(19): siRNA sense strand
cagaaaagguugccuaagu

SEQ ID NO: 67267 - RNA, 19 nt, Homo sapiens
  misc_RNA (1)...(19): siRNA sense strand
gcccaucacugaggucuuc

SEQ ID NO: 67268 - RNA, 19 nt, Homo sapiens
  misc_RNA (1)...(19): siRNA sense strand
gaggacaggagcucaucua

SEQ ID NO: 67269 - RNA, 19 nt, Homo sapiens
  misc_RNA (1)...(19): siRNA sense strand
gcugaggaguucuaugucu

SEQ ID NO: 67270 - RNA, 19 nt, Homo sapiens
  misc_RNA (1)...(19): siRNA sense strand
aaucuuauccugaauguag

SEQ ID NO: 67271 - RNA, 19 nt, Homo sapiens
  misc_RNA (1)...(19): siRNA sense strand
caaccgugcccauggacua

SEQ ID NO: 67272 - RNA, 19 nt, Homo sapiens
  misc_RNA (1)...(19): siRNA sense strand
gaucauccagucuguauac

SEQ ID NO: 67273 - RNA, 19 nt, Homo sapiens
  misc_RNA (1)...(19): siRNA sense strand
caagaaggcggaccagaag

SEQ ID NO: 67274 - RNA, 19 nt, Homo sapiens
  misc_RNA (1)...(19): siRNA sense strand
gaaggagcacgaagucaca

SEQ ID NO: 67275 - RNA, 19 nt, Homo sapiens
  misc_RNA (1)...(19): siRNA sense strand
cagcguggccuaugucuca

SEQ ID NO: 67276 - RNA, 19 nt, Homo sapiens
  misc_RNA (1)...(19): siRNA sense strand
gagugaagucgauaaacaa

SEQ ID NO: 67277 - RNA, 19 nt, Homo sapiens
  misc_RNA (1)...(19): siRNA sense strand
gaggcagcaucgcaaacuu

SEQ ID NO: 67278 - RNA, 19 nt, Homo sapiens
  misc_RNA (1)...(19): siRNA sense strand
ggaugcagcagccaagaug

SEQ ID NO: 67279 - RNA, 19 nt, Homo sapiens
  misc_RNA (1)...(19): siRNA sense strand
ccaccauguucuccucuga

SEQ ID NO: 67280 - RNA, 19 nt, Homo sapiens
  misc_RNA (1)...(19): siRNA sense strand
caugaacuaugcccagauc

SEQ ID NO: 67281 - RNA, 19 nt, Homo sapiens
  misc_RNA (1)...(19): siRNA sense strand
gccauggucuacccuuuca

SEQ ID NO: 67282 - RNA, 19 nt, Homo sapiens
  misc_RNA (1)...(19): siRNA sense strand
ggcccacacugcaaacuuc

SEQ ID NO: 67283 - RNA, 19 nt, Homo sapiens
  misc_RNA (1)...(19): siRNA sense strand
gaagcugaugaauauauug

SEQ ID NO: 67284 - RNA, 19 nt, Homo sapiens
  misc_RNA (1)...(19): siRNA sense strand
cgagaucaauccccuugua

SEQ ID NO: 67285 - RNA, 19 nt, Homo sapiens
  misc_RNA (1)...(19): siRNA sense strand
uuguagacaugcuuagaaa

SEQ ID NO: 67286 - RNA, 19 nt, Homo sapiens
  misc_RNA (1)...(19): siRNA sense strand
gcagccaagauguucagua

SEQ ID NO: 67287 - RNA, 19 nt, Homo sapiens
  misc_RNA (1)...(19): siRNA sense strand
ccugaucccugucuucaag

SEQ ID NO: 67288 - RNA, 19 nt, Homo sapiens
  misc_RNA (1)...(19): siRNA sense strand
uacgaggacuuguacuuca

SEQ ID NO: 67289 - RNA, 19 nt, Homo sapiens
  misc_RNA (1)...(19): siRNA sense strand
agacaugcuuagaaacugu

SEQ ID NO: 67290 - RNA, 19 nt, Homo sapiens
  misc_RNA (1)...(19): siRNA sense strand
caggugggaugcuggacaa

SEQ ID NO: 67291 - RNA, 19 nt, Homo sapiens
  misc_RNA (1)...(19): siRNA sense strand
uccagaaucgguucaagua

SEQ ID NO: 67292 - RNA, 19 nt, Homo sapiens
  misc_RNA (1)...(19): siRNA sense strand
ccagcgagcagcagaccua

SEQ ID NO: 67293 - RNA, 19 nt, Homo sapiens
  misc_RNA (1)...(19): siRNA sense strand
guagacaugcuuagaaacu

SEQ ID NO: 67294 - RNA, 19 nt, Homo sapiens
  misc_RNA (1)...(19): siRNA sense strand
caaaggaaauuacauaugg

SEQ ID NO: 67295 - RNA, 19 nt, Homo sapiens
  misc_RNA (1)...(19): siRNA sense strand
gagcaaaggaaauuacaua

SEQ ID NO: 67296 - RNA, 19 nt, Homo sapiens
  misc_RNA (1)...(19): siRNA sense strand
ggaaagaaccauuaugaca

SEQ ID NO: 67297 - RNA, 19 nt, Homo sapiens
  misc_RNA (1)...(19): siRNA sense strand
ccacagagcucccagaacu

SEQ ID NO: 67298 - RNA, 19 nt, Homo sapiens
  misc_RNA (1)...(19): siRNA sense strand
gaaauuacauaugggaaca

SEQ ID NO: 67299 - RNA, 19 nt, Homo sapiens
  misc_RNA (1)...(19): siRNA sense strand
gaaagaaccauuaugacau

SEQ ID NO: 67300 - RNA, 19 nt, Homo sapiens
  misc_RNA (1)...(19): siRNA sense strand
aaagaaccauuaugacaug

SEQ ID NO: 67301 - RNA, 19 nt, Homo sapiens
  misc_RNA (1)...(19): siRNA sense strand
gcaaaggaaauuacauaug

SEQ ID NO: 67302 - RNA, 19 nt, Homo sapiens
  misc_RNA (1)...(19): siRNA sense strand
gcaaggaaagcgccuaugu

SEQ ID NO: 67303 - RNA, 19 nt, Homo sapiens
  misc_RNA (1)...(19): siRNA sense strand
ggccuuaucugaacuggau

SEQ ID NO: 67304 - RNA, 19 nt, Homo sapiens
  misc_RNA (1)...(19): siRNA sense strand
gaacaauaaaccaguaaag

SEQ ID NO: 67305 - RNA, 19 nt, Homo sapiens
  misc_RNA (1)...(19): siRNA sense strand
gcaaagacagcaaggaaag

SEQ ID NO: 67306 - RNA, 19 nt, Homo sapiens
  misc_RNA (1)...(19): siRNA sense strand
agagagauauguggagaaa

SEQ ID NO: 67307 - RNA, 19 nt, Homo sapiens
  misc_RNA (1)...(19): siRNA sense strand
gaccuggacuuguguaacu

SEQ ID NO: 67308 - RNA, 19 nt, Homo sapiens
  misc_RNA (1)...(19): siRNA sense strand
guaacucgacccaguggua

SEQ ID NO: 67309 - RNA, 19 nt, Homo sapiens
  misc_RNA (1)...(19): siRNA sense strand
cugcucaccuuccuuggua

SEQ ID NO: 67310 - RNA, 19 nt, Homo sapiens
  misc_RNA (1)...(19): siRNA sense strand
gcucauagaggucuugaag

SEQ ID NO: 67311 - RNA, 19 nt, Homo sapiens
  misc_RNA (1)...(19): siRNA sense strand
ggguuacgguucaggcaaa

SEQ ID NO: 67312 - RNA, 19 nt, Homo sapiens
  misc_RNA (1)...(19): siRNA sense strand
ggaacaauaaaccaguaaa

SEQ ID NO: 67313 - RNA, 19 nt, Homo sapiens
  misc_RNA (1)...(19): siRNA sense strand
gagaaaaucaucauucaug

SEQ ID NO: 67314 - RNA, 19 nt, Homo sapiens
  misc_RNA (1)...(19): siRNA sense strand
gugcaaagacagcaaggaa

SEQ ID NO: 67315 - RNA, 19 nt, Homo sapiens
  misc_RNA (1)...(19): siRNA sense strand
ccacagguaccacacaugu

SEQ ID NO: 67316 - RNA, 19 nt, Homo sapiens
  misc_RNA (1)...(19): siRNA sense strand
gauaacgccacgugugaug

SEQ ID NO: 67317 - RNA, 19 nt, Homo sapiens
  misc_RNA (1)...(19): siRNA sense strand
ugggaacaauaaaccagua

SEQ ID NO: 67318 - RNA, 19 nt, Homo sapiens
  misc_RNA (1)...(19): siRNA sense strand
ccaccuggccuuaucugaa

SEQ ID NO: 67319 - RNA, 19 nt, Homo sapiens
  misc_RNA (1)...(19): siRNA sense strand
caaggaaagcgccuaugug

SEQ ID NO: 67320 - RNA, 19 nt, Homo sapiens
  misc_RNA (1)...(19): siRNA sense strand
gcuaccaacugccauucug

SEQ ID NO: 67321 - RNA, 19 nt, Homo sapiens
  misc_RNA (1)...(19): siRNA sense strand
acggaaagaaccauuauga

SEQ ID NO: 67322 - RNA, 19 nt, Homo sapiens
  misc_RNA (1)...(19): siRNA sense strand
gaccacagagcucccagaa

SEQ ID NO: 67323 - RNA, 19 nt, Homo sapiens
  misc_RNA (1)...(19): siRNA sense strand
gauugguucuaacgcuuug

SEQ ID NO: 67324 - RNA, 19 nt, Homo sapiens
  misc_RNA (1)...(19): siRNA sense strand
gggaacaauaaaccaguaa

SEQ ID NO: 67325 - RNA, 19 nt, Homo sapiens
  misc_RNA (1)...(19): siRNA sense strand
cgacggaaagaaccauuau

SEQ ID NO: 67326 - RNA, 19 nt, Homo sapiens
  misc_RNA (1)...(19): siRNA sense strand
agagauauguggagaaaau

SEQ ID NO: 67327 - RNA, 19 nt, Homo sapiens
  misc_RNA (1)...(19): siRNA sense strand
gagaucaccccucccauuu

SEQ ID NO: 67328 - RNA, 19 nt, Homo sapiens
  misc_RNA (1)...(19): siRNA sense strand
caguguccgugguugcuaa

SEQ ID NO: 67329 - RNA, 19 nt, Homo sapiens
  misc_RNA (1)...(19): siRNA sense strand
ucaucgaccuggacuugug

SEQ ID NO: 67330 - RNA, 19 nt, Homo sapiens
  misc_RNA (1)...(19): siRNA sense strand
aagauaacgccacguguga

SEQ ID NO: 67331 - RNA, 19 nt, Homo sapiens
  misc_RNA (1)...(19): siRNA sense strand
ggggauauauagaagagaa

SEQ ID NO: 67332 - RNA, 19 nt, Homo sapiens
  misc_RNA (1)...(19): siRNA sense strand
ccucucaugugcaaagaca

SEQ ID NO: 67333 - RNA, 19 nt, Homo sapiens
  misc_RNA (1)...(19): siRNA sense strand
cgacagagggaaaugacau

SEQ ID NO: 67334 - RNA, 19 nt, Homo sapiens
  misc_RNA (1)...(19): siRNA sense strand
gauggaggcacguguggau

SEQ ID NO: 67335 - RNA, 19 nt, Homo sapiens
  misc_RNA (1)...(19): siRNA sense strand
guccgugguugcuaaagau

SEQ ID NO: 67336 - RNA, 19 nt, Homo sapiens
  misc_RNA (1)...(19): siRNA sense strand
caccuggccuuaucugaac

SEQ ID NO: 67337 - RNA, 19 nt, Homo sapiens
  misc_RNA (1)...(19): siRNA sense strand
gaugcuaccaacugccauu

SEQ ID NO: 67338 - RNA, 19 nt, Homo sapiens
  misc_RNA (1)...(19): siRNA sense strand
acagagcucccagaacuga

SEQ ID NO: 67339 - RNA, 19 nt, Homo sapiens
  misc_RNA (1)...(19): siRNA sense strand
ucaccuuccuugguauuuc

SEQ ID NO: 67340 - RNA, 19 nt, Homo sapiens
  misc_RNA (1)...(19): siRNA sense strand
uguccgugguugcuaaaga

SEQ ID NO: 67341 - RNA, 19 nt, Homo sapiens
  misc_RNA (1)...(19): siRNA sense strand
ccgacggaaagaaccauua

SEQ ID NO: 67342 - RNA, 19 nt, Homo sapiens
  misc_RNA (1)...(19): siRNA sense strand
acauugcccucguggagau

SEQ ID NO: 67343 - RNA, 19 nt, Homo sapiens
  misc_RNA (1)...(19): siRNA sense strand
gcgccuacagcagcucaua

SEQ ID NO: 67344 - RNA, 19 nt, Homo sapiens
  misc_RNA (1)...(19): siRNA sense strand
ccuauguggucgugggaau

SEQ ID NO: 67345 - RNA, 19 nt, Homo sapiens
  misc_RNA (1)...(19): siRNA sense strand
gccuacagcagcucauaga

SEQ ID NO: 67346 - RNA, 19 nt, Homo sapiens
  misc_RNA (1)...(19): siRNA sense strand
ccuccagccucaccuuuac

SEQ ID NO: 67347 - RNA, 19 nt, Homo sapiens
  misc_RNA (1)...(19): siRNA sense strand
gcucaccuuccuugguauu

SEQ ID NO: 67348 - RNA, 19 nt, Homo sapiens
  misc_RNA (1)...(19): siRNA sense strand
ggagcaaaggaaauuacau

SEQ ID NO: 67349 - RNA, 19 nt, Homo sapiens
  misc_RNA (1)...(19): siRNA sense strand
cccaggccaucaucuauac

SEQ ID NO: 67350 - RNA, 19 nt, Homo sapiens
  misc_RNA (1)...(19): siRNA sense strand
gauggucagccuccagauc

SEQ ID NO: 67351 - RNA, 19 nt, Homo sapiens
  misc_RNA (1)...(19): siRNA sense strand
ucacugcugcucacugcuu

SEQ ID NO: 67352 - RNA, 19 nt, Homo sapiens
  misc_RNA (1)...(19): siRNA sense strand
gggauauauagaagagaaa

SEQ ID NO: 67353 - RNA, 19 nt, Homo sapiens
  misc_RNA (1)...(19): siRNA sense strand
caacaugggugcagaaauu

SEQ ID NO: 67354 - RNA, 19 nt, Homo sapiens
  misc_RNA (1)...(19): siRNA sense strand
gagaagaacauuaacauug

SEQ ID NO: 67355 - RNA, 19 nt, Homo sapiens
  misc_RNA (1)...(19): siRNA sense strand
caaucuagcugaugaauuc

SEQ ID NO: 67356 - RNA, 19 nt, Homo sapiens
  misc_RNA (1)...(19): siRNA sense strand
ccaaagaugugauccugaa

SEQ ID NO: 67357 - RNA, 19 nt, Homo sapiens
  misc_RNA (1)...(19): siRNA sense strand
ccacuuccguguucccuua

SEQ ID NO: 67358 - RNA, 19 nt, Homo sapiens
  misc_RNA (1)...(19): siRNA sense strand
gcagugcccucaacagaau

SEQ ID NO: 67359 - RNA, 19 nt, Homo sapiens
  misc_RNA (1)...(19): siRNA sense strand
ccaggaaguuuauaauuuc

SEQ ID NO: 67360 - RNA, 19 nt, Homo sapiens
  misc_RNA (1)...(19): siRNA sense strand
cagaugagcuucccaaagg

SEQ ID NO: 67361 - RNA, 19 nt, Homo sapiens
  misc_RNA (1)...(19): siRNA sense strand
gcacuggcauggcgacaau

SEQ ID NO: 67362 - RNA, 19 nt, Homo sapiens
  misc_RNA (1)...(19): siRNA sense strand
ggacggcuaugcacagauc

SEQ ID NO: 67363 - RNA, 19 nt, Homo sapiens
  misc_RNA (1)...(19): siRNA sense strand
gcacggauggcaagaaguu

SEQ ID NO: 67364 - RNA, 19 nt, Homo sapiens
  misc_RNA (1)...(19): siRNA sense strand
ccaacgaguacauccauua

SEQ ID NO: 67365 - RNA, 19 nt, Homo sapiens
  misc_RNA (1)...(19): siRNA sense strand
agaccaaccugaagaaaca

SEQ ID NO: 67366 - RNA, 19 nt, Homo sapiens
  misc_RNA (1)...(19): siRNA sense strand
caggugcaaucguggaaua

SEQ ID NO: 67367 - RNA, 19 nt, Homo sapiens
  misc_RNA (1)...(19): siRNA sense strand
acgaguacauccauuauga

SEQ ID NO: 67368 - RNA, 19 nt, Homo sapiens
  misc_RNA (1)...(19): siRNA sense strand
cggagaagauuguguaugg

SEQ ID NO: 67369 - RNA, 19 nt, Homo sapiens
  misc_RNA (1)...(19): siRNA sense strand
ggacaucaaccaggaaguu

SEQ ID NO: 67370 - RNA, 19 nt, Homo sapiens
  misc_RNA (1)...(19): siRNA sense strand
agacgcagauugagugguu

SEQ ID NO: 67371 - RNA, 19 nt, Homo sapiens
  misc_RNA (1)...(19): siRNA sense strand
gccuggaucuggaaucauu

SEQ ID NO: 67372 - RNA, 19 nt, Homo sapiens
  misc_RNA (1)...(19): siRNA sense strand
uggacaagcugaccauuca

SEQ ID NO: 67373 - RNA, 19 nt, Homo sapiens
  misc_RNA (1)...(19): siRNA sense strand
gagcugaagccacacauca

SEQ ID NO: 67374 - RNA, 19 nt, Homo sapiens
  misc_RNA (1)...(19): siRNA sense strand
ggagaagauuguguaugga

SEQ ID NO: 67375 - RNA, 19 nt, Homo sapiens
  misc_RNA (1)...(19): siRNA sense strand
ugaagugcaucaucaagca

SEQ ID NO: 67376 - RNA, 19 nt, Homo sapiens
  misc_RNA (1)...(19): siRNA sense strand
caacgaguacauccauuau

SEQ ID NO: 67377 - RNA, 19 nt, Homo sapiens
  misc_RNA (1)...(19): siRNA sense strand
acacaaucgucaccuccua

SEQ ID NO: 67378 - RNA, 19 nt, Homo sapiens
  misc_RNA (1)...(19): siRNA sense strand
ggccaccacuuccguguuc

SEQ ID NO: 67379 - RNA, 19 nt, Homo sapiens
  misc_RNA (1)...(19): siRNA sense strand
auuaugaccugcuagagaa

SEQ ID NO: 67380 - RNA, 19 nt, Homo sapiens
  misc_RNA (1)...(19): siRNA sense strand
ucacagcccuggccauugc

SEQ ID NO: 67381 - RNA, 19 nt, Homo sapiens
  misc_RNA (1)...(19): siRNA sense strand
cauccaccauccacuguga

SEQ ID NO: 67382 - RNA, 19 nt, Homo sapiens
  misc_RNA (1)...(19): siRNA sense strand
gggcacggauggcaagaag

SEQ ID NO: 67383 - RNA, 19 nt, Homo sapiens
  misc_RNA (1)...(19): siRNA sense strand
ccacugugaccaucugauu

SEQ ID NO: 67384 - RNA, 19 nt, Homo sapiens
  misc_RNA (1)...(19): siRNA sense strand
cgagugggucuaauuggua

SEQ ID NO: 67385 - RNA, 19 nt, Homo sapiens
  misc_RNA (1)...(19): siRNA sense strand
ucaaccaggaaguuuauaa

SEQ ID NO: 67386 - RNA, 19 nt, Homo sapiens
  misc_RNA (1)...(19): siRNA sense strand
gcagaugagcuucccaaag

SEQ ID NO: 67387 - RNA, 19 nt, Homo sapiens
  misc_RNA (1)...(19): siRNA sense strand
ggacaggaaggacaucaag

SEQ ID NO: 67388 - RNA, 19 nt, Homo sapiens
  misc_RNA (1)...(19): siRNA sense strand
caaccaggaaguuuauaau

SEQ ID NO: 67389 - RNA, 19 nt, Homo sapiens
  misc_RNA (1)...(19): siRNA sense strand
gcucauuggugccaucaac

SEQ ID NO: 67390 - RNA, 19 nt, Homo sapiens
  misc_RNA (1)...(19): siRNA sense strand
gaaugaaggaacugcaaca

SEQ ID NO: 67391 - RNA, 19 nt, Homo sapiens
  misc_RNA (1)...(19): siRNA sense strand
gaaauugagcgaggcaagu

SEQ ID NO: 67392 - RNA, 19 nt, Homo sapiens
  misc_RNA (1)...(19): siRNA sense strand
acaggaaggacaucaagaa

SEQ ID NO: 67393 - RNA, 19 nt, Homo sapiens
  misc_RNA (1)...(19): siRNA sense strand
gcaccaauucaagcuauga

SEQ ID NO: 67394 - RNA, 19 nt, Homo sapiens
  misc_RNA (1)...(19): siRNA sense strand
ugacucggcugcagaaagc

SEQ ID NO: 67395 - RNA, 19 nt, Homo sapiens
  misc_RNA (1)...(19): siRNA sense strand
gacaucaaccaggaaguuu

SEQ ID NO: 67396 - RNA, 19 nt, Homo sapiens
  misc_RNA (1)...(19): siRNA sense strand
caucaaccaggaaguuuau

SEQ ID NO: 67397 - RNA, 19 nt, Homo sapiens
  misc_RNA (1)...(19): siRNA sense strand
caaggugauuggcgugaag

SEQ ID NO: 67398 - RNA, 19 nt, Homo sapiens
  misc_RNA (1)...(19): siRNA sense strand
ccaagagcuuugccaggau

SEQ ID NO: 67399 - RNA, 19 nt, Homo sapiens
  misc_RNA (1)...(19): siRNA sense strand
gaucggagacgagaacuac

SEQ ID NO: 67400 - RNA, 19 nt, Homo sapiens
  misc_RNA (1)...(19): siRNA sense strand
gcaagucccaguucaccau

SEQ ID NO: 67401 - RNA, 19 nt, Homo sapiens
  misc_RNA (1)...(19): siRNA sense strand
gcaagguggcagagaagga

SEQ ID NO: 67402 - RNA, 19 nt, Homo sapiens
  misc_RNA (1)...(19): siRNA sense strand
accacaggaugaagaagua

SEQ ID NO: 67403 - RNA, 19 nt, Homo sapiens
  misc_RNA (1)...(19): siRNA sense strand
agaaguaccugagcaagac

SEQ ID NO: 67404 - RNA, 19 nt, Homo sapiens
  misc_RNA (1)...(19): siRNA sense strand
uugccaaucuagcugauga

SEQ ID NO: 67405 - RNA, 19 nt, Homo sapiens
  misc_RNA (1)...(19): siRNA sense strand
caucaucaccaagagcuuu

SEQ ID NO: 67406 - RNA, 19 nt, Homo sapiens
  misc_RNA (1)...(19): siRNA sense strand
cauuaugaccugcuagaga

SEQ ID NO: 67407 - RNA, 19 nt, Homo sapiens
  misc_RNA (1)...(19): siRNA sense strand
ggaucuggguggcauuguc

SEQ ID NO: 67408 - RNA, 19 nt, Homo sapiens
  misc_RNA (1)...(19): siRNA sense strand
caagguggcagagaaggaa

SEQ ID NO: 67409 - RNA, 19 nt, Homo sapiens
  misc_RNA (1)...(19): siRNA sense strand
gcugaagccacacaucaau

SEQ ID NO: 67410 - RNA, 19 nt, Homo sapiens
  misc_RNA (1)...(19): siRNA sense strand
acaucaaccaggaaguuua

SEQ ID NO: 67411 - RNA, 19 nt, Homo sapiens
  misc_RNA (1)...(19): siRNA sense strand
cauccgagugggucuaauu

SEQ ID NO: 67412 - RNA, 19 nt, Homo sapiens
  misc_RNA (1)...(19): siRNA sense strand
cauccauuaugaccugcua

SEQ ID NO: 67413 - RNA, 19 nt, Homo sapiens
  misc_RNA (1)...(19): siRNA sense strand
gggcaucugcauuggaguu

SEQ ID NO: 67414 - RNA, 19 nt, Homo sapiens
  misc_RNA (1)...(19): siRNA sense strand
ugaagaaguaccugagcaa

SEQ ID NO: 67415 - RNA, 19 nt, Homo sapiens
  misc_RNA (1)...(19): siRNA sense strand
ucgcugacccggcugacua

SEQ ID NO: 67416 - RNA, 19 nt, Homo sapiens
  misc_RNA (1)...(19): siRNA sense strand
uccaacaaccugcucauug

SEQ ID NO: 67417 - RNA, 19 nt, Homo sapiens
  misc_RNA (1)...(19): siRNA sense strand
ggacauccgagugggucua

SEQ ID NO: 67418 - RNA, 19 nt, Homo sapiens
  misc_RNA (1)...(19): siRNA sense strand
gcaacaugggugcagaaau

SEQ ID NO: 67419 - RNA, 19 nt, Homo sapiens
  misc_RNA (1)...(19): siRNA sense strand
cccauggccucaagugcaa

SEQ ID NO: 67420 - RNA, 19 nt, Homo sapiens
  misc_RNA (1)...(19): siRNA sense strand
ccgagugggucuaauuggu

SEQ ID NO: 67421 - RNA, 19 nt, Homo sapiens
  misc_RNA (1)...(19): siRNA sense strand
ugggcaagguggcagagaa

SEQ ID NO: 67422 - RNA, 19 nt, Homo sapiens
  misc_RNA (1)...(19): siRNA sense strand
ccaaucuagcugaugaauu

SEQ ID NO: 67423 - RNA, 19 nt, Homo sapiens
  misc_RNA (1)...(19): siRNA sense strand
caagugcaagucccaguuc

SEQ ID NO: 67424 - RNA, 19 nt, Homo sapiens
  misc_RNA (1)...(19): siRNA sense strand
ucaacagaaugaaggaacu

SEQ ID NO: 67425 - RNA, 19 nt, Homo sapiens
  misc_RNA (1)...(19): siRNA sense strand
ugacccggcugacuacaac

SEQ ID NO: 67426 - RNA, 19 nt, Homo sapiens
  misc_RNA (1)...(19): siRNA sense strand
gagaccaaccugaagaaac

SEQ ID NO: 67427 - RNA, 19 nt, Homo sapiens
  misc_RNA (1)...(19): siRNA sense strand
cgagacccaugccuuuguc

SEQ ID NO: 67428 - RNA, 19 nt, Homo sapiens
  misc_RNA (1)...(19): siRNA sense strand
aagaaguaccugagcaaga

SEQ ID NO: 67429 - RNA, 19 nt, Homo sapiens
  misc_RNA (1)...(19): siRNA sense strand
gacaggaaggacaucaaga

SEQ ID NO: 67430 - RNA, 19 nt, Homo sapiens
  misc_RNA (1)...(19): siRNA sense strand
cugcaccaauucaagcuau

SEQ ID NO: 67431 - RNA, 19 nt, Homo sapiens
  misc_RNA (1)...(19): siRNA sense strand
cuagagaagaacauuaaca

SEQ ID NO: 67432 - RNA, 19 nt, Homo sapiens
  misc_RNA (1)...(19): siRNA sense strand
cagaaugaaggaacugcaa

SEQ ID NO: 67433 - RNA, 19 nt, Homo sapiens
  misc_RNA (1)...(19): siRNA sense strand
acacugcccgcuacuacaa

SEQ ID NO: 67434 - RNA, 19 nt, Homo sapiens
  misc_RNA (1)...(19): siRNA sense strand
ugcuagagaagaacauuaa

SEQ ID NO: 67435 - RNA, 19 nt, Homo sapiens
  misc_RNA (1)...(19): siRNA sense strand
gcauggcgacaaucugcaa

SEQ ID NO: 67436 - RNA, 19 nt, Homo sapiens
  misc_RNA (1)...(19): siRNA sense strand
aagccuggaucuggaauca

SEQ ID NO: 67437 - RNA, 19 nt, Homo sapiens
  misc_RNA (1)...(19): siRNA sense strand
guguaccacugaccacauc

SEQ ID NO: 67438 - RNA, 19 nt, Homo sapiens
  misc_RNA (1)...(19): siRNA sense strand
gugcaaucguggaauacca

SEQ ID NO: 67439 - RNA, 19 nt, Homo sapiens
  misc_RNA (1)...(19): siRNA sense strand
aagaugugauccugaaggu

SEQ ID NO: 67440 - RNA, 19 nt, Homo sapiens
  misc_RNA (1)...(19): siRNA sense strand
agauggccaugcuccaguu

SEQ ID NO: 67441 - RNA, 19 nt, Homo sapiens
  misc_RNA (1)...(19): siRNA sense strand
ccacgagaccaaccugaag

SEQ ID NO: 67442 - RNA, 19 nt, Homo sapiens
  misc_RNA (1)...(19): siRNA sense strand
cgugggcacuuggauaaca

SEQ ID NO: 67443 - RNA, 19 nt, Homo sapiens
  misc_RNA (1)...(19): siRNA sense strand
uguauggacaccuggauga

SEQ ID NO: 67444 - RNA, 19 nt, Homo sapiens
  misc_RNA (1)...(19): siRNA sense strand
gaaauuggggccaccacuu

SEQ ID NO: 67445 - RNA, 19 nt, Homo sapiens
  misc_RNA (1)...(19): siRNA sense strand
ucaagugcaagucccaguu

SEQ ID NO: 67446 - RNA, 19 nt, Homo sapiens
  misc_RNA (1)...(19): siRNA sense strand
gccaugcuccaguucauca

SEQ ID NO: 67447 - RNA, 19 nt, Homo sapiens
  misc_RNA (1)...(19): siRNA sense strand
acugugaccaucugauuga

SEQ ID NO: 67448 - RNA, 19 nt, Homo sapiens
  misc_RNA (1)...(19): siRNA sense strand
guggacaagcugaccauuc

SEQ ID NO: 67449 - RNA, 19 nt, Homo sapiens
  misc_RNA (1)...(19): siRNA sense strand
cgagaccaaccugaagaaa

SEQ ID NO: 67450 - RNA, 19 nt, Homo sapiens
  misc_RNA (1)...(19): siRNA sense strand
ugacacugcccgcuacuac

SEQ ID NO: 67451 - RNA, 19 nt, Homo sapiens
  misc_RNA (1)...(19): siRNA sense strand
ugucacagcccuggccauu

SEQ ID NO: 67452 - RNA, 19 nt, Homo sapiens
  misc_RNA (1)...(19): siRNA sense strand
gggagaagaacacaaucgu

SEQ ID NO: 67453 - RNA, 19 nt, Homo sapiens
  misc_RNA (1)...(19): siRNA sense strand
ugaugaagauccucacuga

SEQ ID NO: 67454 - RNA, 19 nt, Homo sapiens
  misc_RNA (1)...(19): siRNA sense strand
gggaugacauggagaagau

SEQ ID NO: 67455 - RNA, 19 nt, Homo sapiens
  misc_RNA (1)...(19): siRNA sense strand
gcgagaagaugacccagau

SEQ ID NO: 67456 - RNA, 19 nt, Homo sapiens
  misc_RNA (1)...(19): siRNA sense strand
ugacccagaucauguuuga

SEQ ID NO: 67457 - RNA, 19 nt, Homo sapiens
  misc_RNA (1)...(19): siRNA sense strand
gcaaauacucgguguggau

SEQ ID NO: 67458 - RNA, 19 nt, Homo sapiens
  misc_RNA (1)...(19): siRNA sense strand
gagaagaugacccagauca

SEQ ID NO: 67459 - RNA, 19 nt, Homo sapiens
  misc_RNA (1)...(19): siRNA sense strand
cccacaacgugcccauuua

SEQ ID NO: 67460 - RNA, 19 nt, Homo sapiens
  misc_RNA (1)...(19): siRNA sense strand
gcacccagcaccaugaaga

SEQ ID NO: 67461 - RNA, 19 nt, Homo sapiens
  misc_RNA (1)...(19): siRNA sense strand
ccgacuaccugaugaagau

SEQ ID NO: 67462 - RNA, 19 nt, Homo sapiens
  misc_RNA (1)...(19): siRNA sense strand
ucaaggagaagcugugcua

SEQ ID NO: 67463 - RNA, 19 nt, Homo sapiens
  misc_RNA (1)...(19): siRNA sense strand
gagguauccugacccugaa

SEQ ID NO: 67464 - RNA, 19 nt, Homo sapiens
  misc_RNA (1)...(19): siRNA sense strand
gccgcgaucucaccgacua

SEQ ID NO: 67465 - RNA, 19 nt, Homo sapiens
  misc_RNA (1)...(19): siRNA sense strand
ggaccuguaugccaacaac

SEQ ID NO: 67466 - RNA, 19 nt, Homo sapiens
  misc_RNA (1)...(19): siRNA sense strand
ggacuucgagaacgagaug

SEQ ID NO: 67467 - RNA, 19 nt, Homo sapiens
  misc_RNA (1)...(19): siRNA sense strand
ccacaacgugcccauuuau

SEQ ID NO: 67468 - RNA, 19 nt, Homo sapiens
  misc_RNA (1)...(19): siRNA sense strand
acaacgugcccauuuauga

SEQ ID NO: 67469 - RNA, 19 nt, Homo sapiens
  misc_RNA (1)...(19): siRNA sense strand
acaacagcaucaugaagug

SEQ ID NO: 67470 - RNA, 19 nt, Homo sapiens
  misc_RNA (1)...(19): siRNA sense strand
gcaccacaccuucuacaac

SEQ ID NO: 67471 - RNA, 19 nt, Homo sapiens
  misc_RNA (1)...(19): siRNA sense strand
gguaugggucagaaagauu

SEQ ID NO: 67472 - RNA, 19 nt, Homo sapiens
  misc_RNA (1)...(19): siRNA sense strand
gaagugugacaucgacauc

SEQ ID NO: 67473 - RNA, 19 nt, Homo sapiens
  misc_RNA (1)...(19): siRNA sense strand
ccaccgcaaaugcuucuaa

SEQ ID NO: 67474 - RNA, 19 nt, Homo sapiens
  misc_RNA (1)...(19): siRNA sense strand
ucaccaagcaggaguacga

SEQ ID NO: 67475 - RNA, 19 nt, Homo sapiens
  misc_RNA (1)...(19): siRNA sense strand
ccagcaccaugaagaucaa

SEQ ID NO: 67476 - RNA, 19 nt, Homo sapiens
  misc_RNA (1)...(19): siRNA sense strand
caacgugcccauuuaugag

SEQ ID NO: 67477 - RNA, 19 nt, Homo sapiens
  misc_RNA (1)...(19): siRNA sense strand
gcaccaugaagaucaagau

SEQ ID NO: 67478 - RNA, 19 nt, Homo sapiens
  misc_RNA (1)...(19): siRNA sense strand
guaugggucagaaagauuc

SEQ ID NO: 67479 - RNA, 19 nt, Homo sapiens
  misc_RNA (1)...(19): siRNA sense strand
gccaaccgcgagaagauga

SEQ ID NO: 67480 - RNA, 19 nt, Homo sapiens
  misc_RNA (1)...(19): siRNA sense strand
agauguggaucaccaagca

SEQ ID NO: 67481 - RNA, 19 nt, Homo sapiens
  misc_RNA (1)...(19): siRNA sense strand
gcauucacgagaccaccua

SEQ ID NO: 67482 - RNA, 19 nt, Homo sapiens
  misc_RNA (1)...(19): siRNA sense strand
gaucgugcgcgacaucaag

SEQ ID NO: 67483 - RNA, 19 nt, Homo sapiens
  misc_RNA (1)...(19): siRNA sense strand
uacaacagcaucaugaagu

SEQ ID NO: 67484 - RNA, 19 nt, Homo sapiens
  misc_RNA (1)...(19): siRNA sense strand
uggccucgcuguccaccuu

SEQ ID NO: 67485 - RNA, 19 nt, Homo sapiens
  misc_RNA (1)...(19): siRNA sense strand
acagcaucaugaaguguga

SEQ ID NO: 67486 - RNA, 19 nt, Homo sapiens
  misc_RNA (1)...(19): siRNA sense strand
cuacguggcccuggacuuc

SEQ ID NO: 67487 - RNA, 19 nt, Homo sapiens
  misc_RNA (1)...(19): siRNA sense strand
ggaucaccaagcaggagua

SEQ ID NO: 67488 - RNA, 19 nt, Homo sapiens
  misc_RNA (1)...(19): siRNA sense strand
caucaugaagugugacauc

SEQ ID NO: 67489 - RNA, 19 nt, Homo sapiens
  misc_RNA (1)...(19): siRNA sense strand
aggagaagcugugcuacgu

SEQ ID NO: 67490 - RNA, 19 nt, Homo sapiens
  misc_RNA (1)...(19): siRNA sense strand
acccagaucauguuugaga

SEQ ID NO: 67491 - RNA, 19 nt, Homo sapiens
  misc_RNA (1)...(19): siRNA sense strand
gaccgcaugcagaaagaga

SEQ ID NO: 67492 - RNA, 19 nt, Homo sapiens
  misc_RNA (1)...(19): siRNA sense strand
ucgcugaccgcaugcagaa

SEQ ID NO: 67493 - RNA, 19 nt, Homo sapiens
  misc_RNA (1)...(19): siRNA sense strand
caacagcaucaugaagugu

SEQ ID NO: 67494 - RNA, 19 nt, Homo sapiens
  misc_RNA (1)...(19): siRNA sense strand
ccauguacguggccaucca

SEQ ID NO: 67495 - RNA, 19 nt, Homo sapiens
  misc_RNA (1)...(19): siRNA sense strand
gaaaucgugcgugacauua

SEQ ID NO: 67496 - RNA, 19 nt, Homo sapiens
  misc_RNA (1)...(19): siRNA sense strand
gcgagaagaugacccagau

SEQ ID NO: 67497 - RNA, 19 nt, Homo sapiens
  misc_RNA (1)...(19): siRNA sense strand
ugacccagaucauguuuga

SEQ ID NO: 67498 - RNA, 19 nt, Homo sapiens
  misc_RNA (1)...(19): siRNA sense strand
ggaaaucgugcgugacauu

SEQ ID NO: 67499 - RNA, 19 nt, Homo sapiens
  misc_RNA (1)...(19): siRNA sense strand
caccacaccuucuacaaug

SEQ ID NO: 67500 - RNA, 19 nt, Homo sapiens
  misc_RNA (1)...(19): siRNA sense strand
gccgggaccugacugacua

SEQ ID NO: 67501 - RNA, 19 nt, Homo sapiens
  misc_RNA (1)...(19): siRNA sense strand
gcacccagcacaaugaaga

SEQ ID NO: 67502 - RNA, 19 nt, Homo sapiens
  misc_RNA (1)...(19): siRNA sense strand
gagaagaugacccagauca

SEQ ID NO: 67503 - RNA, 19 nt, Homo sapiens
  misc_RNA (1)...(19): siRNA sense strand
gcacaaugaagaucaagau

SEQ ID NO: 67504 - RNA, 19 nt, Homo sapiens
  misc_RNA (1)...(19): siRNA sense strand
ccacgaaacuaccuucaac

SEQ ID NO: 67505 - RNA, 19 nt, Homo sapiens
  misc_RNA (1)...(19): siRNA sense strand
ggacuucgagcaagagaug

SEQ ID NO: 67506 - RNA, 19 nt, Homo sapiens
  misc_RNA (1)...(19): siRNA sense strand
gcaccacaccuucuacaau

SEQ ID NO: 67507 - RNA, 19 nt, Homo sapiens
  misc_RNA (1)...(19): siRNA sense strand
ucagcaagcaggaguauga

SEQ ID NO: 67508 - RNA, 19 nt, Homo sapiens
  misc_RNA (1)...(19): siRNA sense strand
gacaacggcuccggcaugu

SEQ ID NO: 67509 - RNA, 19 nt, Homo sapiens
  misc_RNA (1)...(19): siRNA sense strand
ucaacuccaucaugaagug

SEQ ID NO: 67510 - RNA, 19 nt, Homo sapiens
  misc_RNA (1)...(19): siRNA sense strand
gggcaugggucagaaggau

SEQ ID NO: 67511 - RNA, 19 nt, Homo sapiens
  misc_RNA (1)...(19): siRNA sense strand
cugacuaccucaugaagau

SEQ ID NO: 67512 - RNA, 19 nt, Homo sapiens
  misc_RNA (1)...(19): siRNA sense strand
uuaaggagaagcugugcua

SEQ ID NO: 67513 - RNA, 19 nt, Homo sapiens
  misc_RNA (1)...(19): siRNA sense strand
ggccaggucaucaccauug

SEQ ID NO: 67514 - RNA, 19 nt, Homo sapiens
  misc_RNA (1)...(19): siRNA sense strand
ccagcacaaugaagaucaa

SEQ ID NO: 67515 - RNA, 19 nt, Homo sapiens
  misc_RNA (1)...(19): siRNA sense strand
gcaugggucagaaggauuc

SEQ ID NO: 67516 - RNA, 19 nt, Homo sapiens
  misc_RNA (1)...(19): siRNA sense strand
ccgacaggaugcagaagga

SEQ ID NO: 67517 - RNA, 19 nt, Homo sapiens
  misc_RNA (1)...(19): siRNA sense strand
aaacuaccuucaacuccau

SEQ ID NO: 67518 - RNA, 19 nt, Homo sapiens
  misc_RNA (1)...(19): siRNA sense strand
gaucagcaagcaggaguau

SEQ ID NO: 67519 - RNA, 19 nt, Homo sapiens
  misc_RNA (1)...(19): siRNA sense strand
ugcgugacauuaaggagaa

SEQ ID NO: 67520 - RNA, 19 nt, Homo sapiens
  misc_RNA (1)...(19): siRNA sense strand
ugacguggacauccgcaaa

SEQ ID NO: 67521 - RNA, 19 nt, Homo sapiens
  misc_RNA (1)...(19): siRNA sense strand
gccaaccgcgagaagauga

SEQ ID NO: 67522 - RNA, 19 nt, Homo sapiens
  misc_RNA (1)...(19): siRNA sense strand
cugacugacuaccucauga

SEQ ID NO: 67523 - RNA, 19 nt, Homo sapiens
  misc_RNA (1)...(19): siRNA sense strand
ccauguacguugcuaucca

SEQ ID NO: 67524 - RNA, 19 nt, Homo sapiens
  misc_RNA (1)...(19): siRNA sense strand
ugacugacuaccucaugaa

SEQ ID NO: 67525 - RNA, 19 nt, Homo sapiens
  misc_RNA (1)...(19): siRNA sense strand
gacgaggcccagagcaaga

SEQ ID NO: 67526 - RNA, 19 nt, Homo sapiens
  misc_RNA (1)...(19): siRNA sense strand
uggccucgcuguccaccuu

SEQ ID NO: 67527 - RNA, 19 nt, Homo sapiens
  misc_RNA (1)...(19): siRNA sense strand
gaagugugacguggacauc

SEQ ID NO: 67528 - RNA, 19 nt, Homo sapiens
  misc_RNA (1)...(19): siRNA sense strand
gggacgacauggagaaaau

SEQ ID NO: 67529 - RNA, 19 nt, Homo sapiens
  misc_RNA (1)...(19): siRNA sense strand
aaucgugcgugacauuaag

SEQ ID NO: 67530 - RNA, 19 nt, Homo sapiens
  misc_RNA (1)...(19): siRNA sense strand
aggcugugcuaucccugua

SEQ ID NO: 67531 - RNA, 19 nt, Homo sapiens
  misc_RNA (1)...(19): siRNA sense strand
acacugugcccaucuacga

SEQ ID NO: 67532 - RNA, 19 nt, Homo sapiens
  misc_RNA (1)...(19): siRNA sense strand
ggaucagcaagcaggagua

SEQ ID NO: 67533 - RNA, 19 nt, Homo sapiens
  misc_RNA (1)...(19): siRNA sense strand
cuacgucgcccuggacuuc

SEQ ID NO: 67534 - RNA, 19 nt, Homo sapiens
  misc_RNA (1)...(19): siRNA sense strand
aaaucgugcgugacauuaa

SEQ ID NO: 67535 - RNA, 19 nt, Homo sapiens
  misc_RNA (1)...(19): siRNA sense strand
caccauguacccuggcauu

SEQ ID NO: 67536 - RNA, 19 nt, Homo sapiens
  misc_RNA (1)...(19): siRNA sense strand
aggagaagcugugcuacgu

SEQ ID NO: 67537 - RNA, 19 nt, Homo sapiens
  misc_RNA (1)...(19): siRNA sense strand
acccagaucauguuugaga

SEQ ID NO: 67538 - RNA, 19 nt, Homo sapiens
  misc_RNA (1)...(19): siRNA sense strand
gaacaacacugcugguuug

SEQ ID NO: 67539 - RNA, 19 nt, Homo sapiens
  misc_RNA (1)...(19): siRNA sense strand
gaagucaucuguucauuau

SEQ ID NO: 67540 - RNA, 19 nt, Homo sapiens
  misc_RNA (1)...(19): siRNA sense strand
gaaauaagguagacucaau

SEQ ID NO: 67541 - RNA, 19 nt, Homo sapiens
  misc_RNA (1)...(19): siRNA sense strand
gcccaaauaucaagaaaua

SEQ ID NO: 67542 - RNA, 19 nt, Homo sapiens
  misc_RNA (1)...(19): siRNA sense strand
caacauaaauccaagaaga

SEQ ID NO: 67543 - RNA, 19 nt, Homo sapiens
  misc_RNA (1)...(19): siRNA sense strand
cagauaagcuucuagaauu

SEQ ID NO: 67544 - RNA, 19 nt, Homo sapiens
  misc_RNA (1)...(19): siRNA sense strand
gacaugaucuugccaguaa

SEQ ID NO: 67545 - RNA, 19 nt, Homo sapiens
  misc_RNA (1)...(19): siRNA sense strand
gagaaaggauuguagacua

SEQ ID NO: 67546 - RNA, 19 nt, Homo sapiens
  misc_RNA (1)...(19): siRNA sense strand
uaacagaguucccaagauu

SEQ ID NO: 67547 - RNA, 19 nt, Homo sapiens
  misc_RNA (1)...(19): siRNA sense strand
gaagcaacauuuagugaaa

SEQ ID NO: 67548 - RNA, 19 nt, Homo sapiens
  misc_RNA (1)...(19): siRNA sense strand
gaagauggauuuauaaagg

SEQ ID NO: 67549 - RNA, 19 nt, Homo sapiens
  misc_RNA (1)...(19): siRNA sense strand
ggucagcugucuacuguua

SEQ ID NO: 67550 - RNA, 19 nt, Homo sapiens
  misc_RNA (1)...(19): siRNA sense strand
gcagaagcuuauagaaaua

SEQ ID NO: 67551 - RNA, 19 nt, Homo sapiens
  misc_RNA (1)...(19): siRNA sense strand
ggacugccguuaucuauug

SEQ ID NO: 67552 - RNA, 19 nt, Homo sapiens
  misc_RNA (1)...(19): siRNA sense strand
ggaagaaacagcuaacuuu

SEQ ID NO: 67553 - RNA, 19 nt, Homo sapiens
  misc_RNA (1)...(19): siRNA sense strand
ggaaaguucuacaucauga

SEQ ID NO: 67554 - RNA, 19 nt, Homo sapiens
  misc_RNA (1)...(19): siRNA sense strand
gaaaccuucuguagugaua

SEQ ID NO: 67555 - RNA, 19 nt, Homo sapiens
  misc_RNA (1)...(19): siRNA sense strand
ggagaaaccuuugaaguuc

SEQ ID NO: 67556 - RNA, 19 nt, Homo sapiens
  misc_RNA (1)...(19): siRNA sense strand
ggaaaucaguucauauauc

SEQ ID NO: 67557 - RNA, 19 nt, Homo sapiens
  misc_RNA (1)...(19): siRNA sense strand
gcaacucgccuaacagaua

SEQ ID NO: 67558 - RNA, 19 nt, Homo sapiens
  misc_RNA (1)...(19): siRNA sense strand
caacuugucuguacucuuc

SEQ ID NO: 67559 - RNA, 19 nt, Homo sapiens
  misc_RNA (1)...(19): siRNA sense strand
ggaaauaauagccaaagua

SEQ ID NO: 67560 - RNA, 19 nt, Homo sapiens
  misc_RNA (1)...(19): siRNA sense strand
caaguacuaugacaaauug

SEQ ID NO: 67561 - RNA, 19 nt, Homo sapiens
  misc_RNA (1)...(19): siRNA sense strand
gaacagauccuugaacaug

SEQ ID NO: 67562 - RNA, 19 nt, Homo sapiens
  misc_RNA (1)...(19): siRNA sense strand
gaaauuguaugcugcuaug

SEQ ID NO: 67563 - RNA, 19 nt, Homo sapiens
  misc_RNA (1)...(19): siRNA sense strand
uuacugagcucuaguguug

SEQ ID NO: 67564 - RNA, 19 nt, Homo sapiens
  misc_RNA (1)...(19): siRNA sense strand
ucaauuagaugaacacaug

SEQ ID NO: 67565 - RNA, 19 nt, Homo sapiens
  misc_RNA (1)...(19): siRNA sense strand
acugauggcugauuauuua

SEQ ID NO: 67566 - RNA, 19 nt, Homo sapiens
  misc_RNA (1)...(19): siRNA sense strand
gcagaauucuuguaacaga

SEQ ID NO: 67567 - RNA, 19 nt, Homo sapiens
  misc_RNA (1)...(19): siRNA sense strand
gcagagcucccaugaagua

SEQ ID NO: 67568 - RNA, 19 nt, Homo sapiens
  misc_RNA (1)...(19): siRNA sense strand
acauuaagcuguaggauuu

SEQ ID NO: 67569 - RNA, 19 nt, Homo sapiens
  misc_RNA (1)...(19): siRNA sense strand
cuuaagagcuguagaaguu

SEQ ID NO: 67570 - RNA, 19 nt, Homo sapiens
  misc_RNA (1)...(19): siRNA sense strand
caaagaugauucugacauu

SEQ ID NO: 67571 - RNA, 19 nt, Homo sapiens
  misc_RNA (1)...(19): siRNA sense strand
uaaacaagguuaucacaga

SEQ ID NO: 67572 - RNA, 19 nt, Homo sapiens
  misc_RNA (1)...(19): siRNA sense strand
gcaacucccuccugucauu

SEQ ID NO: 67573 - RNA, 19 nt, Homo sapiens
  misc_RNA (1)...(19): siRNA sense strand
ucacagagcauacaaacua

SEQ ID NO: 67574 - RNA, 19 nt, Homo sapiens
  misc_RNA (1)...(19): siRNA sense strand
ccacgaauguuaacucuau

SEQ ID NO: 67575 - RNA, 19 nt, Homo sapiens
  misc_RNA (1)...(19): siRNA sense strand
uggcagaucucuacaauau

SEQ ID NO: 67576 - RNA, 19 nt, Homo sapiens
  misc_RNA (1)...(19): siRNA sense strand
cagaccagaucauucauua

SEQ ID NO: 67577 - RNA, 19 nt, Homo sapiens
  misc_RNA (1)...(19): siRNA sense strand
ggagugcacugaaacagaa

SEQ ID NO: 67578 - RNA, 19 nt, Homo sapiens
  misc_RNA (1)...(19): siRNA sense strand
gcaaguaaacaguucauuu

SEQ ID NO: 67579 - RNA, 19 nt, Homo sapiens
  misc_RNA (1)...(19): siRNA sense strand
gagacaagauuuccaagga

SEQ ID NO: 67580 - RNA, 19 nt, Homo sapiens
  misc_RNA (1)...(19): siRNA sense strand
guagagagauggagaccaa

SEQ ID NO: 67581 - RNA, 19 nt, Homo sapiens
  misc_RNA (1)...(19): siRNA sense strand
guaugaaucugcuuuacaa

SEQ ID NO: 67582 - RNA, 19 nt, Homo sapiens
  misc_RNA (1)...(19): siRNA sense strand
caacucgccuaacagauaa

SEQ ID NO: 67583 - RNA, 19 nt, Homo sapiens
  misc_RNA (1)...(19): siRNA sense strand
gcagaucucuacaauaugg

SEQ ID NO: 67584 - RNA, 19 nt, Homo sapiens
  misc_RNA (1)...(19): siRNA sense strand
gaaagccacuucucaacau

SEQ ID NO: 67585 - RNA, 19 nt, Homo sapiens
  misc_RNA (1)...(19): siRNA sense strand
aggaauugcuguugucuua

SEQ ID NO: 67586 - RNA, 19 nt, Homo sapiens
  misc_RNA (1)...(19): siRNA sense strand
ggacaugugcauuaccuua

SEQ ID NO: 67587 - RNA, 19 nt, Homo sapiens
  misc_RNA (1)...(19): siRNA sense strand
caacacugcugguuugaga

SEQ ID NO: 67588 - RNA, 19 nt, Homo sapiens
  misc_RNA (1)...(19): siRNA sense strand
caaaguauuucuagccuau

SEQ ID NO: 67589 - RNA, 19 nt, Homo sapiens
  misc_RNA (1)...(19): siRNA sense strand
ugacagggcuauucagcua

SEQ ID NO: 67590 - RNA, 19 nt, Homo sapiens
  misc_RNA (1)...(19): siRNA sense strand
gaaauuauggcaguucuaa

SEQ ID NO: 67591 - RNA, 19 nt, Homo sapiens
  misc_RNA (1)...(19): siRNA sense strand
gaaacaguagaaccuauua

SEQ ID NO: 67592 - RNA, 19 nt, Homo sapiens
  misc_RNA (1)...(19): siRNA sense strand
ccgcuaaucuucuaacauu

SEQ ID NO: 67593 - RNA, 19 nt, Homo sapiens
  misc_RNA (1)...(19): siRNA sense strand
caaaggcaguuguauugaa

SEQ ID NO: 67594 - RNA, 19 nt, Homo sapiens
  misc_RNA (1)...(19): siRNA sense strand
agaaacagcuaacuuugaa

SEQ ID NO: 67595 - RNA, 19 nt, Homo sapiens
  misc_RNA (1)...(19): siRNA sense strand
ucaggaacaucuuggauuu

SEQ ID NO: 67596 - RNA, 19 nt, Homo sapiens
  misc_RNA (1)...(19): siRNA sense strand
uaaagaaacugcagcuauc

SEQ ID NO: 67597 - RNA, 19 nt, Homo sapiens
  misc_RNA (1)...(19): siRNA sense strand
cgucucagcucgucucuaa

SEQ ID NO: 67598 - RNA, 19 nt, Homo sapiens
  misc_RNA (1)...(19): siRNA sense strand
cgaagagcaugugaaguua

SEQ ID NO: 67599 - RNA, 19 nt, Homo sapiens
  misc_RNA (1)...(19): siRNA sense strand
guacagaagccaagacaaa

SEQ ID NO: 67600 - RNA, 19 nt, Homo sapiens
  misc_RNA (1)...(19): siRNA sense strand
ggagguuuaugcagaaauu

SEQ ID NO: 67601 - RNA, 19 nt, Homo sapiens
  misc_RNA (1)...(19): siRNA sense strand
gagcuuaccuugcguaugc

SEQ ID NO: 67602 - RNA, 19 nt, Homo sapiens
  misc_RNA (1)...(19): siRNA sense strand
gaacuggccuucgauucaa

SEQ ID NO: 67603 - RNA, 19 nt, Homo sapiens
  misc_RNA (1)...(19): siRNA sense strand
gaucauauccuggaagauu

SEQ ID NO: 67604 - RNA, 19 nt, Homo sapiens
  misc_RNA (1)...(19): siRNA sense strand
gaaaguauggaaaucauug

SEQ ID NO: 67605 - RNA, 19 nt, Homo sapiens
  misc_RNA (1)...(19): siRNA sense strand
gaagaaacagcuaacuuug

SEQ ID NO: 67606 - RNA, 19 nt, Homo sapiens
  misc_RNA (1)...(19): siRNA sense strand
agagagaaauggcuuuaaa

SEQ ID NO: 67607 - RNA, 19 nt, Homo sapiens
  misc_RNA (1)...(19): siRNA sense strand
gaaauaaugagcugaagga

SEQ ID NO: 67608 - RNA, 19 nt, Homo sapiens
  misc_RNA (1)...(19): siRNA sense strand
gaauuugcuucuauacuug

SEQ ID NO: 67609 - RNA, 19 nt, Homo sapiens
  misc_RNA (1)...(19): siRNA sense strand
caaggacugucaacauaaa

SEQ ID NO: 67610 - RNA, 19 nt, Homo sapiens
  misc_RNA (1)...(19): siRNA sense strand
ccacuuauguuuguaaaug

SEQ ID NO: 67611 - RNA, 19 nt, Homo sapiens
  misc_RNA (1)...(19): siRNA sense strand
caagcaauguggaugauga

SEQ ID NO: 67612 - RNA, 19 nt, Homo sapiens
  misc_RNA (1)...(19): siRNA sense strand
uaacuuggaugucauugga

SEQ ID NO: 67613 - RNA, 19 nt, Homo sapiens
  misc_RNA (1)...(19): siRNA sense strand
ccaaagcgccacugaauga

SEQ ID NO: 67614 - RNA, 19 nt, Homo sapiens
  misc_RNA (1)...(19): siRNA sense strand
uaaugucaaugguugguua

SEQ ID NO: 67615 - RNA, 19 nt, Homo sapiens
  misc_RNA (1)...(19): siRNA sense strand
gaaagcaaugcaauuauga

SEQ ID NO: 67616 - RNA, 19 nt, Homo sapiens
  misc_RNA (1)...(19): siRNA sense strand
uaagguagacucaauggua

SEQ ID NO: 67617 - RNA, 19 nt, Homo sapiens
  misc_RNA (1)...(19): siRNA sense strand
gggaugcugugcaagauuu

SEQ ID NO: 67618 - RNA, 19 nt, Homo sapiens
  misc_RNA (1)...(19): siRNA sense strand
gacaagauuuccaaggauu

SEQ ID NO: 67619 - RNA, 19 nt, Homo sapiens
  misc_RNA (1)...(19): siRNA sense strand
gaaguaauccgggcuaguu

SEQ ID NO: 67620 - RNA, 19 nt, Homo sapiens
  misc_RNA (1)...(19): siRNA sense strand
agaaaggauuguagacuaa

SEQ ID NO: 67621 - RNA, 19 nt, Homo sapiens
  misc_RNA (1)...(19): siRNA sense strand
guagaagaagcaacauuua

SEQ ID NO: 67622 - RNA, 19 nt, Homo sapiens
  misc_RNA (1)...(19): siRNA sense strand
caaacuauuuagcuccaua

SEQ ID NO: 67623 - RNA, 19 nt, Homo sapiens
  misc_RNA (1)...(19): siRNA sense strand
guacaaaugaggaaugauu

SEQ ID NO: 67624 - RNA, 19 nt, Homo sapiens
  misc_RNA (1)...(19): siRNA sense strand
ugaaagcaaugcaauuaug

SEQ ID NO: 67625 - RNA, 19 nt, Homo sapiens
  misc_RNA (1)...(19): siRNA sense strand
uuacaaagguucgacauga

SEQ ID NO: 67626 - RNA, 19 nt, Homo sapiens
  misc_RNA (1)...(19): siRNA sense strand
ggaguugcuuucuauuuau

SEQ ID NO: 67627 - RNA, 19 nt, Homo sapiens
  misc_RNA (1)...(19): siRNA sense strand
aggaguugcuuucuauuua

SEQ ID NO: 67628 - RNA, 19 nt, Homo sapiens
  misc_RNA (1)...(19): siRNA sense strand
caaguaaacaguucauuug

SEQ ID NO: 67629 - RNA, 19 nt, Homo sapiens
  misc_RNA (1)...(19): siRNA sense strand
guaaucaagacucgaaaua

SEQ ID NO: 67630 - RNA, 19 nt, Homo sapiens
  misc_RNA (1)...(19): siRNA sense strand
gggagaaaccuuugaaguu

SEQ ID NO: 67631 - RNA, 19 nt, Homo sapiens
  misc_RNA (1)...(19): siRNA sense strand
guacaaaggcauaugaaug

SEQ ID NO: 67632 - RNA, 19 nt, Homo sapiens
  misc_RNA (1)...(19): siRNA sense strand
cgaguggacagaugaauua

SEQ ID NO: 67633 - RNA, 19 nt, Homo sapiens
  misc_RNA (1)...(19): siRNA sense strand
gaucagcauaccauaaaua

SEQ ID NO: 67634 - RNA, 19 nt, Homo sapiens
  misc_RNA (1)...(19): siRNA sense strand
gcaggagguuuaugcagaa

SEQ ID NO: 67635 - RNA, 19 nt, Homo sapiens
  misc_RNA (1)...(19): siRNA sense strand
gaagcaugauuucaaagug

SEQ ID NO: 67636 - RNA, 19 nt, Homo sapiens
  misc_RNA (1)...(19): siRNA sense strand
gcauuaugaugaagcauga

SEQ ID NO: 67637 - RNA, 19 nt, Homo sapiens
  misc_RNA (1)...(19): siRNA sense strand
ugacagcacuuccgaauac

SEQ ID NO: 67638 - RNA, 19 nt, Homo sapiens
  misc_RNA (1)...(19): siRNA sense strand
ucaaugagcuggacuauua

SEQ ID NO: 67639 - RNA, 19 nt, Homo sapiens
  misc_RNA (1)...(19): siRNA sense strand
agaaagccaucaugacuua

SEQ ID NO: 67640 - RNA, 19 nt, Homo sapiens
  misc_RNA (1)...(19): siRNA sense strand
ggacacagaucgagaacau

SEQ ID NO: 67641 - RNA, 19 nt, Homo sapiens
  misc_RNA (1)...(19): siRNA sense strand
ggagaucaauggcaaaugg

SEQ ID NO: 67642 - RNA, 19 nt, Homo sapiens
  misc_RNA (1)...(19): siRNA sense strand
ggcccgagcugauugacua

SEQ ID NO: 67643 - RNA, 19 nt, Homo sapiens
  misc_RNA (1)...(19): siRNA sense strand
gacaagaacuacauuacca

SEQ ID NO: 67644 - RNA, 19 nt, Homo sapiens
  misc_RNA (1)...(19): siRNA sense strand
gaauuugcccgcaucauga

SEQ ID NO: 67645 - RNA, 19 nt, Homo sapiens
  misc_RNA (1)...(19): siRNA sense strand
acaaugagguguccaagau

SEQ ID NO: 67646 - RNA, 19 nt, Homo sapiens
  misc_RNA (1)...(19): siRNA sense strand
gggagaagcagcagagaaa

SEQ ID NO: 67647 - RNA, 19 nt, Homo sapiens
  misc_RNA (1)...(19): siRNA sense strand
ccagggagaagcagaauuu

SEQ ID NO: 67648 - RNA, 19 nt, Homo sapiens
  misc_RNA (1)...(19): siRNA sense strand
acgagaagcuggccaguga

SEQ ID NO: 67649 - RNA, 19 nt, Homo sapiens
  misc_RNA (1)...(19): siRNA sense strand
caucaugacuuacgugucu

SEQ ID NO: 67650 - RNA, 19 nt, Homo sapiens
  misc_RNA (1)...(19): siRNA sense strand
gccaggagcagaugaauga

SEQ ID NO: 67651 - RNA, 19 nt, Homo sapiens
  misc_RNA (1)...(19): siRNA sense strand
agaagagcaucgucaacua

SEQ ID NO: 67652 - RNA, 19 nt, Homo sapiens
  misc_RNA (1)...(19): siRNA sense strand
caaccggccugccuucaug

SEQ ID NO: 67653 - RNA, 19 nt, Homo sapiens
  misc_RNA (1)...(19): siRNA sense strand
caacaaggcccuggauuuc

SEQ ID NO: 67654 - RNA, 19 nt, Homo sapiens
  misc_RNA (1)...(19): siRNA sense strand
gaggagugguugcugaaug

SEQ ID NO: 67655 - RNA, 19 nt, Homo sapiens
  misc_RNA (1)...(19): siRNA sense strand
ugacuuacgugucuagcuu

SEQ ID NO: 67656 - RNA, 19 nt, Homo sapiens
  misc_RNA (1)...(19): siRNA sense strand
auccagaacuuccacauaa

SEQ ID NO: 67657 - RNA, 19 nt, Homo sapiens
  misc_RNA (1)...(19): siRNA sense strand
gcaaaccaacgauuacaug

SEQ ID NO: 67658 - RNA, 19 nt, Homo sapiens
  misc_RNA (1)...(19): siRNA sense strand
gaacgagcagcuuauggaa

SEQ ID NO: 67659 - RNA, 19 nt, Homo sapiens
  misc_RNA (1)...(19): siRNA sense strand
ucaacaaggcccuggauuu

SEQ ID NO: 67660 - RNA, 19 nt, Homo sapiens
  misc_RNA (1)...(19): siRNA sense strand
gaacugcccgaccggauga

SEQ ID NO: 67661 - RNA, 19 nt, Homo sapiens
  misc_RNA (1)...(19): siRNA sense strand
ucaacacgcugcagaccaa

SEQ ID NO: 67662 - RNA, 19 nt, Homo sapiens
  misc_RNA (1)...(19): siRNA sense strand
caacuacaagccaaagauu

SEQ ID NO: 67663 - RNA, 19 nt, Homo sapiens
  misc_RNA (1)...(19): siRNA sense strand
gagaaagccaucaugacuu

SEQ ID NO: 67664 - RNA, 19 nt, Homo sapiens
  misc_RNA (1)...(19): siRNA sense strand
acaacaagcacaccaacua

SEQ ID NO: 67665 - RNA, 19 nt, Homo sapiens
  misc_RNA (1)...(19): siRNA sense strand
ccaagauuguccagaccua

SEQ ID NO: 67666 - RNA, 19 nt, Homo sapiens
  misc_RNA (1)...(19): siRNA sense strand
gagaagcagcagagaaaga

SEQ ID NO: 67667 - RNA, 19 nt, Homo sapiens
  misc_RNA (1)...(19): siRNA sense strand
gcuggacuauuaugacuca

SEQ ID NO: 67668 - RNA, 19 nt, Homo sapiens
  misc_RNA (1)...(19): siRNA sense strand
acgagcagcuuauggaaga

SEQ ID NO: 67669 - RNA, 19 nt, Homo sapiens
  misc_RNA (1)...(19): siRNA sense strand
ucaaugagguagagaacca

SEQ ID NO: 67670 - RNA, 19 nt, Homo sapiens
  misc_RNA (1)...(19): siRNA sense strand
gagcuggacuauuaugacu

SEQ ID NO: 67671 - RNA, 19 nt, Homo sapiens
  misc_RNA (1)...(19): siRNA sense strand
ggccuggacugacggcaaa

SEQ ID NO: 67672 - RNA, 19 nt, Homo sapiens
  misc_RNA (1)...(19): siRNA sense strand
aacagaagcuggaggacuu

SEQ ID NO: 67673 - RNA, 19 nt, Homo sapiens
  misc_RNA (1)...(19): siRNA sense strand
gauccacucacaaaucuga

SEQ ID NO: 67674 - RNA, 19 nt, Homo sapiens
  misc_RNA (1)...(19): siRNA sense strand
gcaggacaccuucauugug

SEQ ID NO: 67675 - RNA, 19 nt, Homo sapiens
  misc_RNA (1)...(19): siRNA sense strand
caggagaacgagcagcuua

SEQ ID NO: 67676 - RNA, 19 nt, Homo sapiens
  misc_RNA (1)...(19): siRNA sense strand
cagcaaaggcgucaaacug

SEQ ID NO: 67677 - RNA, 19 nt, Homo sapiens
  misc_RNA (1)...(19): siRNA sense strand
gaugauccacucacaaauc

SEQ ID NO: 67678 - RNA, 19 nt, Homo sapiens
  misc_RNA (1)...(19): siRNA sense strand
ggaagcugcggaaggauga

SEQ ID NO: 67679 - RNA, 19 nt, Homo sapiens
  misc_RNA (1)...(19): siRNA sense strand
aaugagguguccaagauug

SEQ ID NO: 67680 - RNA, 19 nt, Homo sapiens
  misc_RNA (1)...(19): siRNA sense strand
agaacuacauuaccaugga

SEQ ID NO: 67681 - RNA, 19 nt, Homo sapiens
  misc_RNA (1)...(19): siRNA sense strand
agucauggcuuccuucaag

SEQ ID NO: 67682 - RNA, 19 nt, Homo sapiens
  misc_RNA (1)...(19): siRNA sense strand
gaagacaucguuggaacug

SEQ ID NO: 67683 - RNA, 19 nt, Homo sapiens
  misc_RNA (1)...(19): siRNA sense strand
agaccaagauggaggagau

SEQ ID NO: 67684 - RNA, 19 nt, Homo sapiens
  misc_RNA (1)...(19): siRNA sense strand
ggacaucuccguggaagag

SEQ ID NO: 67685 - RNA, 19 nt, Homo sapiens
  misc_RNA (1)...(19): siRNA sense strand
cgagacagccgacacagau

SEQ ID NO: 67686 - RNA, 19 nt, Homo sapiens
  misc_RNA (1)...(19): siRNA sense strand
gaagagcaucgucaacuac

SEQ ID NO: 67687 - RNA, 19 nt, Homo sapiens
  misc_RNA (1)...(19): siRNA sense strand
ccacagcccaugagcaguu

SEQ ID NO: 67688 - RNA, 19 nt, Homo sapiens
  misc_RNA (1)...(19): siRNA sense strand
gaggagauccagggacuga

SEQ ID NO: 67689 - RNA, 19 nt, Homo sapiens
  misc_RNA (1)...(19): siRNA sense strand
ccacucacaaaucugaaua

SEQ ID NO: 67690 - RNA, 19 nt, Homo sapiens
  misc_RNA (1)...(19): siRNA sense strand
ccagagcgaggcaagauga

SEQ ID NO: 67691 - RNA, 19 nt, Homo sapiens
  misc_RNA (1)...(19): siRNA sense strand
cagagaaguuccggcagaa

SEQ ID NO: 67692 - RNA, 19 nt, Homo sapiens
  misc_RNA (1)...(19): siRNA sense strand
gcaagguguuggccgucaa

SEQ ID NO: 67693 - RNA, 19 nt, Homo sapiens
  misc_RNA (1)...(19): siRNA sense strand
ggaugggaaugugaagaug

SEQ ID NO: 67694 - RNA, 19 nt, Homo sapiens
  misc_RNA (1)...(19): siRNA sense strand
gagacagccgacacagaua

SEQ ID NO: 67695 - RNA, 19 nt, Homo sapiens
  misc_RNA (1)...(19): siRNA sense strand
gcgcucaucuucgacaaca

SEQ ID NO: 67696 - RNA, 19 nt, Homo sapiens
  misc_RNA (1)...(19): siRNA sense strand
gggcugcacccuucaacaa

SEQ ID NO: 67697 - RNA, 19 nt, Homo sapiens
  misc_RNA (1)...(19): siRNA sense strand
aggagugguugcugaauga

SEQ ID NO: 67698 - RNA, 19 nt, Homo sapiens
  misc_RNA (1)...(19): siRNA sense strand
gaugggaaugugaagauga

SEQ ID NO: 67699 - RNA, 19 nt, Homo sapiens
  misc_RNA (1)...(19): siRNA sense strand
guuaugauauuggcaacga

SEQ ID NO: 67700 - RNA, 19 nt, Homo sapiens
  misc_RNA (1)...(19): siRNA sense strand
gagaagagcaucgucaacu

SEQ ID NO: 67701 - RNA, 19 nt, Homo sapiens
  misc_RNA (1)...(19): siRNA sense strand
agaccuaccacgucaauau

SEQ ID NO: 67702 - RNA, 19 nt, Homo sapiens
  misc_RNA (1)...(19): siRNA sense strand
gcaugaggccuucgagagu

SEQ ID NO: 67703 - RNA, 19 nt, Homo sapiens
  misc_RNA (1)...(19): siRNA sense strand
cgacagaaggacuaugaga

SEQ ID NO: 67704 - RNA, 19 nt, Homo sapiens
  misc_RNA (1)...(19): siRNA sense strand
cauccagaacuuccacaua

SEQ ID NO: 67705 - RNA, 19 nt, Homo sapiens
  misc_RNA (1)...(19): siRNA sense strand
aggagcagaugaaugaguu

SEQ ID NO: 67706 - RNA, 19 nt, Homo sapiens
  misc_RNA (1)...(19): siRNA sense strand
gaugagagugcacaagauc

SEQ ID NO: 67707 - RNA, 19 nt, Homo sapiens
  misc_RNA (1)...(19): siRNA sense strand
gcaggauggucucggacau

SEQ ID NO: 67708 - RNA, 19 nt, Homo sapiens
  misc_RNA (1)...(19): siRNA sense strand
cauuaugauucucagcaaa

SEQ ID NO: 67709 - RNA, 19 nt, Homo sapiens
  misc_RNA (1)...(19): siRNA sense strand
ggccucggcuucugugcuu

SEQ ID NO: 67710 - RNA, 19 nt, Homo sapiens
  misc_RNA (1)...(19): siRNA sense strand
acaaggcccuggauuucau

SEQ ID NO: 67711 - RNA, 19 nt, Homo sapiens
  misc_RNA (1)...(19): siRNA sense strand
gcacaccauugaggagauc

SEQ ID NO: 67712 - RNA, 19 nt, Homo sapiens
  misc_RNA (1)...(19): siRNA sense strand
cagcagagaaagacauuca

SEQ ID NO: 67713 - RNA, 19 nt, Homo sapiens
  misc_RNA (1)...(19): siRNA sense strand
gcuggccagugaucuguug

SEQ ID NO: 67714 - RNA, 19 nt, Homo sapiens
  misc_RNA (1)...(19): siRNA sense strand
caaaucugaauacggcuuu

SEQ ID NO: 67715 - RNA, 19 nt, Homo sapiens
  misc_RNA (1)...(19): siRNA sense strand
ggagaacgagcagcuuaug

SEQ ID NO: 67716 - RNA, 19 nt, Homo sapiens
  misc_RNA (1)...(19): siRNA sense strand
caggugcucuggacuacau

SEQ ID NO: 67717 - RNA, 19 nt, Homo sapiens
  misc_RNA (1)...(19): siRNA sense strand
gaccaucaaugagguagag

SEQ ID NO: 67718 - RNA, 19 nt, Homo sapiens
  misc_RNA (1)...(19): siRNA sense strand
ccauuaugauucucagcaa

SEQ ID NO: 67719 - RNA, 19 nt, Homo sapiens
  misc_RNA (1)...(19): siRNA sense strand
gggauggccugaagcucau

SEQ ID NO: 67720 - RNA, 19 nt, Homo sapiens
  misc_RNA (1)...(19): siRNA sense strand
ggccuucauugacuucaug

SEQ ID NO: 67721 - RNA, 19 nt, Homo sapiens
  misc_RNA (1)...(19): siRNA sense strand
ugagaaagccaucaugacu

SEQ ID NO: 67722 - RNA, 19 nt, Homo sapiens
  misc_RNA (1)...(19): siRNA sense strand
cgacagcagcacaaugaga

SEQ ID NO: 67723 - RNA, 19 nt, Homo sapiens
  misc_RNA (1)...(19): siRNA sense strand
caacaagcacaccaacuac

SEQ ID NO: 67724 - RNA, 19 nt, Homo sapiens
  misc_RNA (1)...(19): siRNA sense strand
aaagacagccccuuacaaa

SEQ ID NO: 67725 - RNA, 19 nt, Homo sapiens
  misc_RNA (1)...(19): siRNA sense strand
agaauuugcccgcaucaug

SEQ ID NO: 67726 - RNA, 19 nt, Homo sapiens
  misc_RNA (1)...(19): siRNA sense strand
ccaggaggcgcucaucuuc

SEQ ID NO: 67727 - RNA, 19 nt, Homo sapiens
  misc_RNA (1)...(19): siRNA sense strand
agaaacugcuggagaccau

SEQ ID NO: 67728 - RNA, 19 nt, Homo sapiens
  misc_RNA (1)...(19): siRNA sense strand
gaagcuggccagugaucug

SEQ ID NO: 67729 - RNA, 19 nt, Homo sapiens
  misc_RNA (1)...(19): siRNA sense strand
uuacgugucuagcuucuac

SEQ ID NO: 67730 - RNA, 19 nt, Homo sapiens
  misc_RNA (1)...(19): siRNA sense strand
ccacauaagcuggaaggau

SEQ ID NO: 67731 - RNA, 19 nt, Homo sapiens
  misc_RNA (1)...(19): siRNA sense strand
gaccuaccacgucaauaug

SEQ ID NO: 67732 - RNA, 19 nt, Homo sapiens
  misc_RNA (1)...(19): siRNA sense strand
ucgcacaggagcucaauga

SEQ ID NO: 67733 - RNA, 19 nt, Homo sapiens
  misc_RNA (1)...(19): siRNA sense strand
ucucggacaucaacaaugc

SEQ ID NO: 67734 - RNA, 19 nt, Homo sapiens
  misc_RNA (1)...(19): siRNA sense strand
ccauugaccagcuguacuu

SEQ ID NO: 67735 - RNA, 19 nt, Homo sapiens
  misc_RNA (1)...(19): siRNA sense strand
ggacaagaacuacauuacc

SEQ ID NO: 67736 - RNA, 19 nt, Homo sapiens
  misc_RNA (1)...(19): siRNA sense strand
gacauuccaggccuucauu

SEQ ID NO: 67737 - RNA, 19 nt, Homo sapiens
  misc_RNA (1)...(19): siRNA sense strand
gagcaucgucaacuacaag

SEQ ID NO: 67738 - RNA, 19 nt, Homo sapiens
  misc_RNA (1)...(19): siRNA sense strand
ucaaugaacuggacuauca

SEQ ID NO: 67739 - RNA, 19 nt, Homo sapiens
  misc_RNA (1)...(19): siRNA sense strand
caucggcgcugaagaaauu

SEQ ID NO: 67740 - RNA, 19 nt, Homo sapiens
  misc_RNA (1)...(19): siRNA sense strand
agaaacaucugccaaagaa

SEQ ID NO: 67741 - RNA, 19 nt, Homo sapiens
  misc_RNA (1)...(19): siRNA sense strand
gcaagauggugucggauau

SEQ ID NO: 67742 - RNA, 19 nt, Homo sapiens
  misc_RNA (1)...(19): siRNA sense strand
caagagggcugcuccuuuc

SEQ ID NO: 67743 - RNA, 19 nt, Homo sapiens
  misc_RNA (1)...(19): siRNA sense strand
acucaaagcuuaacaagga

SEQ ID NO: 67744 - RNA, 19 nt, Homo sapiens
  misc_RNA (1)...(19): siRNA sense strand
gaauuugcccgcauuauga

SEQ ID NO: 67745 - RNA, 19 nt, Homo sapiens
  misc_RNA (1)...(19): siRNA sense strand
ugaaccagcugaagcagua

SEQ ID NO: 67746 - RNA, 19 nt, Homo sapiens
  misc_RNA (1)...(19): siRNA sense strand
gagagaagcccuagagaga

SEQ ID NO: 67747 - RNA, 19 nt, Homo sapiens
  misc_RNA (1)...(19): siRNA sense strand
cauacuagcuggaaagaug

SEQ ID NO: 67748 - RNA, 19 nt, Homo sapiens
  misc_RNA (1)...(19): siRNA sense strand
gaagaaacaucugccaaag

SEQ ID NO: 67749 - RNA, 19 nt, Homo sapiens
  misc_RNA (1)...(19): siRNA sense strand
agaagaagcuggaggacuu

SEQ ID NO: 67750 - RNA, 19 nt, Homo sapiens
  misc_RNA (1)...(19): siRNA sense strand
gagaagcccuagagagaau

SEQ ID NO: 67751 - RNA, 19 nt, Homo sapiens
  misc_RNA (1)...(19): siRNA sense strand
ggccugaccucauugacua

SEQ ID NO: 67752 - RNA, 19 nt, Homo sapiens
  misc_RNA (1)...(19): siRNA sense strand
aaagagccaucaugacgua

SEQ ID NO: 67753 - RNA, 19 nt, Homo sapiens
  misc_RNA (1)...(19): siRNA sense strand
gcaccuggauauuccuaaa

SEQ ID NO: 67754 - RNA, 19 nt, Homo sapiens
  misc_RNA (1)...(19): siRNA sense strand
caaagaaggucugcugcuu

SEQ ID NO: 67755 - RNA, 19 nt, Homo sapiens
  misc_RNA (1)...(19): siRNA sense strand
auucagaacuuccauacua

SEQ ID NO: 67756 - RNA, 19 nt, Homo sapiens
  misc_RNA (1)...(19): siRNA sense strand
gaaaacugcuccuuauaga

SEQ ID NO: 67757 - RNA, 19 nt, Homo sapiens
  misc_RNA (1)...(19): siRNA sense strand
gcacgagacuugggcuuau

SEQ ID NO: 67758 - RNA, 19 nt, Homo sapiens
  misc_RNA (1)...(19): siRNA sense strand
gaaccggacucccgagaag

SEQ ID NO: 67759 - RNA, 19 nt, Homo sapiens
  misc_RNA (1)...(19): siRNA sense strand
guacgucucuugcuucuac

SEQ ID NO: 67760 - RNA, 19 nt, Homo sapiens
  misc_RNA (1)...(19): siRNA sense strand
uagagagaauggagaaauu

SEQ ID NO: 67761 - RNA, 19 nt, Homo sapiens
  misc_RNA (1)...(19): siRNA sense strand
gauccuggcuucugauaag

SEQ ID NO: 67762 - RNA, 19 nt, Homo sapiens
  misc_RNA (1)...(19): siRNA sense strand
gcacccagauugagaacau

SEQ ID NO: 67763 - RNA, 19 nt, Homo sapiens
  misc_RNA (1)...(19): siRNA sense strand
gacagcggcuaacaggaua

SEQ ID NO: 67764 - RNA, 19 nt, Homo sapiens
  misc_RNA (1)...(19): siRNA sense strand
aaacugcuccuuauagaaa

SEQ ID NO: 67765 - RNA, 19 nt, Homo sapiens
  misc_RNA (1)...(19): siRNA sense strand
ggaauggccuuaagcucau

SEQ ID NO: 67766 - RNA, 19 nt, Homo sapiens
  misc_RNA (1)...(19): siRNA sense strand
gaggaagaauggccugaug

SEQ ID NO: 67767 - RNA, 19 nt, Homo sapiens
  misc_RNA (1)...(19): siRNA sense strand
uaacaaggaugaccccaua

SEQ ID NO: 67768 - RNA, 19 nt, Homo sapiens
  misc_RNA (1)...(19): siRNA sense strand
guaagguucuugcugugaa

SEQ ID NO: 67769 - RNA, 19 nt, Homo sapiens
  misc_RNA (1)...(19): siRNA sense strand
ccaggaggcccuugucuuu

SEQ ID NO: 67770 - RNA, 19 nt, Homo sapiens
  misc_RNA (1)...(19): siRNA sense strand
gaggagugguugcucaaug

SEQ ID NO: 67771 - RNA, 19 nt, Homo sapiens
  misc_RNA (1)...(19): siRNA sense strand
gacuugggcuuauggcaaa

SEQ ID NO: 67772 - RNA, 19 nt, Homo sapiens
  misc_RNA (1)...(19): siRNA sense strand
gagaagcaccuggauauuc

SEQ ID NO: 67773 - RNA, 19 nt, Homo sapiens
  misc_RNA (1)...(19): siRNA sense strand
aagaaggucugcugcuuug

SEQ ID NO: 67774 - RNA, 19 nt, Homo sapiens
  misc_RNA (1)...(19): siRNA sense strand
ugggaacgcuuacucagaa

SEQ ID NO: 67775 - RNA, 19 nt, Homo sapiens
  misc_RNA (1)...(19): siRNA sense strand
gagaauggagaaauugcua

SEQ ID NO: 67776 - RNA, 19 nt, Homo sapiens
  misc_RNA (1)...(19): siRNA sense strand
gaaauugcuagaaaccauu

SEQ ID NO: 67777 - RNA, 19 nt, Homo sapiens
  misc_RNA (1)...(19): siRNA sense strand
gggagaagcagcagaggaa

SEQ ID NO: 67778 - RNA, 19 nt, Homo sapiens
  misc_RNA (1)...(19): siRNA sense strand
gcacaacaucaucaacuau

SEQ ID NO: 67779 - RNA, 19 nt, Homo sapiens
  misc_RNA (1)...(19): siRNA sense strand
ucaacacgcugcagaccaa

SEQ ID NO: 67780 - RNA, 19 nt, Homo sapiens
  misc_RNA (1)...(19): siRNA sense strand
ugaagaaacaucugccaaa

SEQ ID NO: 67781 - RNA, 19 nt, Homo sapiens
  misc_RNA (1)...(19): siRNA sense strand
gaaagccggcacccagauu

SEQ ID NO: 67782 - RNA, 19 nt, Homo sapiens
  misc_RNA (1)...(19): siRNA sense strand
ccauggaaaucgcugagaa

SEQ ID NO: 67783 - RNA, 19 nt, Homo sapiens
  misc_RNA (1)...(19): siRNA sense strand
cgacgaggaugaguacaug

SEQ ID NO: 67784 - RNA, 19 nt, Homo sapiens
  misc_RNA (1)...(19): siRNA sense strand
gcccaguacugcaucaaga

SEQ ID NO: 67785 - RNA, 19 nt, Homo sapiens
  misc_RNA (1)...(19): siRNA sense strand
acaacaagcacacgaacua

SEQ ID NO: 67786 - RNA, 19 nt, Homo sapiens
  misc_RNA (1)...(19): siRNA sense strand
uggaacaccuggcugagaa

SEQ ID NO: 67787 - RNA, 19 nt, Homo sapiens
  misc_RNA (1)...(19): siRNA sense strand
cgagugagcuuuuggaaug

SEQ ID NO: 67788 - RNA, 19 nt, Homo sapiens
  misc_RNA (1)...(19): siRNA sense strand
caaccguccugccuucaug

SEQ ID NO: 67789 - RNA, 19 nt, Homo sapiens
  misc_RNA (1)...(19): siRNA sense strand
auucagagcuacaacauca

SEQ ID NO: 67790 - RNA, 19 nt, Homo sapiens
  misc_RNA (1)...(19): siRNA sense strand
agaaggugauucagagcua

SEQ ID NO: 67791 - RNA, 19 nt, Homo sapiens
  misc_RNA (1)...(19): siRNA sense strand
ccaagagggcugcuccuuu

SEQ ID NO: 67792 - RNA, 19 nt, Homo sapiens
  misc_RNA (1)...(19): siRNA sense strand
gggaaaggcugcccaaacc

SEQ ID NO: 67793 - RNA, 19 nt, Homo sapiens
  misc_RNA (1)...(19): siRNA sense strand
cacaacaucaucaacuaua

SEQ ID NO: 67794 - RNA, 19 nt, Homo sapiens
  misc_RNA (1)...(19): siRNA sense strand
gaacaagauggaggagauu

SEQ ID NO: 67795 - RNA, 19 nt, Homo sapiens
  misc_RNA (1)...(19): siRNA sense strand
ggauauuucgguugaagaa

SEQ ID NO: 67796 - RNA, 19 nt, Homo sapiens
  misc_RNA (1)...(19): siRNA sense strand
gcacugucaccauggauga

SEQ ID NO: 67797 - RNA, 19 nt, Homo sapiens
  misc_RNA (1)...(19): siRNA sense strand
ggaagaauggccugaugga

SEQ ID NO: 67798 - RNA, 19 nt, Homo sapiens
  misc_RNA (1)...(19): siRNA sense strand
agaacaagauggaggagau

SEQ ID NO: 67799 - RNA, 19 nt, Homo sapiens
  misc_RNA (1)...(19): siRNA sense strand
gcuuugcuauucaggauau

SEQ ID NO: 67800 - RNA, 19 nt, Homo sapiens
  misc_RNA (1)...(19): siRNA sense strand
cgaauuugcccgcauuaug

SEQ ID NO: 67801 - RNA, 19 nt, Homo sapiens
  misc_RNA (1)...(19): siRNA sense strand
ugcaagauauguucauugu

SEQ ID NO: 67802 - RNA, 19 nt, Homo sapiens
  misc_RNA (1)...(19): siRNA sense strand
acaccggccugaccucauu

SEQ ID NO: 67803 - RNA, 19 nt, Homo sapiens
  misc_RNA (1)...(19): siRNA sense strand
aaaaugcgguuccacaaaa

SEQ ID NO: 67804 - RNA, 19 nt, Homo sapiens
  misc_RNA (1)...(19): siRNA sense strand
gcugagaagcaccuggaua

SEQ ID NO: 67805 - RNA, 19 nt, Homo sapiens
  misc_RNA (1)...(19): siRNA sense strand
gagccugccugauuuccau

SEQ ID NO: 67806 - RNA, 19 nt, Homo sapiens
  misc_RNA (1)...(19): siRNA sense strand
gggcugcuccuuucaacaa

SEQ ID NO: 67807 - RNA, 19 nt, Homo sapiens
  misc_RNA (1)...(19): siRNA sense strand
gaauggagaaauugcuaga

SEQ ID NO: 67808 - RNA, 19 nt, Homo sapiens
  misc_RNA (1)...(19): siRNA sense strand
ggcaagauggugucggaua

SEQ ID NO: 67809 - RNA, 19 nt, Homo sapiens
  misc_RNA (1)...(19): siRNA sense strand
agaggcugauggaagaaua

SEQ ID NO: 67810 - RNA, 19 nt, Homo sapiens
  misc_RNA (1)...(19): siRNA sense strand
agaaauugcuagaaaccau

SEQ ID NO: 67811 - RNA, 19 nt, Homo sapiens
  misc_RNA (1)...(19): siRNA sense strand
guucagagccuccuucaac

SEQ ID NO: 67812 - RNA, 19 nt, Homo sapiens
  misc_RNA (1)...(19): siRNA sense strand
cccaggagcagaugaauga

SEQ ID NO: 67813 - RNA, 19 nt, Homo sapiens
  misc_RNA (1)...(19): siRNA sense strand
ggagagcggcaguccauca

SEQ ID NO: 67814 - RNA, 19 nt, Homo sapiens
  misc_RNA (1)...(19): siRNA sense strand
auggagaaauugcuagaaa

SEQ ID NO: 67815 - RNA, 19 nt, Homo sapiens
  misc_RNA (1)...(19): siRNA sense strand
aggaggcccuugucuuuga

SEQ ID NO: 67816 - RNA, 19 nt, Homo sapiens
  misc_RNA (1)...(19): siRNA sense strand
gggacaaggugaagcaacu

SEQ ID NO: 67817 - RNA, 19 nt, Homo sapiens
  misc_RNA (1)...(19): siRNA sense strand
ggagggcgcuauggaggau

SEQ ID NO: 67818 - RNA, 19 nt, Homo sapiens
  misc_RNA (1)...(19): siRNA sense strand
gaagucaucucaggggaaa

SEQ ID NO: 67819 - RNA, 19 nt, Homo sapiens
  misc_RNA (1)...(19): siRNA sense strand
ccucaacgcacgagacuug

SEQ ID NO: 67820 - RNA, 19 nt, Homo sapiens
  misc_RNA (1)...(19): siRNA sense strand
aggagugguugcucaauga

SEQ ID NO: 67821 - RNA, 19 nt, Homo sapiens
  misc_RNA (1)...(19): siRNA sense strand
ccaaggugcaggagaaaug

SEQ ID NO: 67822 - RNA, 19 nt, Homo sapiens
  misc_RNA (1)...(19): siRNA sense strand
uggaggacuuccgggauua

SEQ ID NO: 67823 - RNA, 19 nt, Homo sapiens
  misc_RNA (1)...(19): siRNA sense strand
gaccaucauccuucgcuuu

SEQ ID NO: 67824 - RNA, 19 nt, Homo sapiens
  misc_RNA (1)...(19): siRNA sense strand
ucaaugagauucggagacu

SEQ ID NO: 67825 - RNA, 19 nt, Homo sapiens
  misc_RNA (1)...(19): siRNA sense strand
cggcuaacaggauauguaa

SEQ ID NO: 67826 - RNA, 19 nt, Homo sapiens
  misc_RNA (1)...(19): siRNA sense strand
gcggcuaacaggauaugua

SEQ ID NO: 67827 - RNA, 19 nt, Homo sapiens
  misc_RNA (1)...(19): siRNA sense strand
gagaagcagcagaggaaga

SEQ ID NO: 67828 - RNA, 19 nt, Homo sapiens
  misc_RNA (1)...(19): siRNA sense strand
cuggaaagauggccuugga

SEQ ID NO: 67829 - RNA, 19 nt, Homo sapiens
  misc_RNA (1)...(19): siRNA sense strand
ugauuuccauggguuauga

SEQ ID NO: 67830 - RNA, 19 nt, Homo sapiens
  misc_RNA (1)...(19): siRNA sense strand
aggagcagaugaaugaguu

SEQ ID NO: 67831 - RNA, 19 nt, Homo sapiens
  misc_RNA (1)...(19): siRNA sense strand
ugacaaccaucgccagaac

SEQ ID NO: 67832 - RNA, 19 nt, Homo sapiens
  misc_RNA (1)...(19): siRNA sense strand
gaugagcuccggaccaagu

SEQ ID NO: 67833 - RNA, 19 nt, Homo sapiens
  misc_RNA (1)...(19): siRNA sense strand
uaacaggauauguaagguu

SEQ ID NO: 67834 - RNA, 19 nt, Homo sapiens
  misc_RNA (1)...(19): siRNA sense strand
cgcaggagcucaaugaacu

SEQ ID NO: 67835 - RNA, 19 nt, Homo sapiens
  misc_RNA (1)...(19): siRNA sense strand
gagcacaacaucaucaacu

SEQ ID NO: 67836 - RNA, 19 nt, Homo sapiens
  misc_RNA (1)...(19): siRNA sense strand
gaggagagaagcccuagag

SEQ ID NO: 67837 - RNA, 19 nt, Homo sapiens
  misc_RNA (1)...(19): siRNA sense strand
gaccgacugggaacgcuua

SEQ ID NO: 67838 - RNA, 19 nt, Homo sapiens
  misc_RNA (1)...(19): siRNA sense strand
ggacaucucuguggaagaa

SEQ ID NO: 67839 - RNA, 19 nt, Homo sapiens
  misc_RNA (1)...(19): siRNA sense strand
gaacaucgaggaagauuuc

SEQ ID NO: 67840 - RNA, 19 nt, Homo sapiens
  misc_RNA (1)...(19): siRNA sense strand
gcaaggugcuggcagugaa

SEQ ID NO: 67841 - RNA, 19 nt, Homo sapiens
  misc_RNA (1)...(19): siRNA sense strand
ucaaugagcuggacuacca

SEQ ID NO: 67842 - RNA, 19 nt, Homo sapiens
  misc_RNA (1)...(19): siRNA sense strand
gcccugaccucaucgacua

SEQ ID NO: 67843 - RNA, 19 nt, Homo sapiens
  misc_RNA (1)...(19): siRNA sense strand
gcaccuggcugagaaguuc

SEQ ID NO: 67844 - RNA, 19 nt, Homo sapiens
  misc_RNA (1)...(19): siRNA sense strand
gauggagccugaugacuuc

SEQ ID NO: 67845 - RNA, 19 nt, Homo sapiens
  misc_RNA (1)...(19): siRNA sense strand
gcaauggccucaaacucau

SEQ ID NO: 67846 - RNA, 19 nt, Homo sapiens
  misc_RNA (1)...(19): siRNA sense strand
gcacccagaucgagaacau

SEQ ID NO: 67847 - RNA, 19 nt, Homo sapiens
  misc_RNA (1)...(19): siRNA sense strand
gagcauccuucaaccacuu

SEQ ID NO: 67848 - RNA, 19 nt, Homo sapiens
  misc_RNA (1)...(19): siRNA sense strand
caagaugcgcuuccacaaa

SEQ ID NO: 67849 - RNA, 19 nt, Homo sapiens
  misc_RNA (1)...(19): siRNA sense strand
gagcuugccucaucuccau

SEQ ID NO: 67850 - RNA, 19 nt, Homo sapiens
  misc_RNA (1)...(19): siRNA sense strand
augagaagcuugccaguga

SEQ ID NO: 67851 - RNA, 19 nt, Homo sapiens
  misc_RNA (1)...(19): siRNA sense strand
gacgggaaccugaagauga

SEQ ID NO: 67852 - RNA, 19 nt, Homo sapiens
  misc_RNA (1)...(19): siRNA sense strand
ugacacgacugagcaaguu

SEQ ID NO: 67853 - RNA, 19 nt, Homo sapiens
  misc_RNA (1)...(19): siRNA sense strand
uaacaaggcccuggacuuc

SEQ ID NO: 67854 - RNA, 19 nt, Homo sapiens
  misc_RNA (1)...(19): siRNA sense strand
gagcagaacauuaucaacu

SEQ ID NO: 67855 - RNA, 19 nt, Homo sapiens
  misc_RNA (1)...(19): siRNA sense strand
cagcaggagcagaacauua

SEQ ID NO: 67856 - RNA, 19 nt, Homo sapiens
  misc_RNA (1)...(19): siRNA sense strand
cgacuacgauucggcuuug

SEQ ID NO: 67857 - RNA, 19 nt, Homo sapiens
  misc_RNA (1)...(19): siRNA sense strand
gcagaacauuaucaacuac

SEQ ID NO: 67858 - RNA, 19 nt, Homo sapiens
  misc_RNA (1)...(19): siRNA sense strand
agaaggccaucaugaccua

SEQ ID NO: 67859 - RNA, 19 nt, Homo sapiens
  misc_RNA (1)...(19): siRNA sense strand
ucaaugaaguggagaacca

SEQ ID NO: 67860 - RNA, 19 nt, Homo sapiens
  misc_RNA (1)...(19): siRNA sense strand
ggagaucaacuucaacaca

SEQ ID NO: 67861 - RNA, 19 nt, Homo sapiens
  misc_RNA (1)...(19): siRNA sense strand
cauuggugcugaagagauu

SEQ ID NO: 67862 - RNA, 19 nt, Homo sapiens
  misc_RNA (1)...(19): siRNA sense strand
acaauaagcacaccgucua

SEQ ID NO: 67863 - RNA, 19 nt, Homo sapiens
  misc_RNA (1)...(19): siRNA sense strand
gauguuggaugcagaagac

SEQ ID NO: 67864 - RNA, 19 nt, Homo sapiens
  misc_RNA (1)...(19): siRNA sense strand
ucaacacacugcagaccaa

SEQ ID NO: 67865 - RNA, 19 nt, Homo sapiens
  misc_RNA (1)...(19): siRNA sense strand
gagagacagccgagacuga

SEQ ID NO: 67866 - RNA, 19 nt, Homo sapiens
  misc_RNA (1)...(19): siRNA sense strand
gaagcggaaugggaugaug

SEQ ID NO: 67867 - RNA, 19 nt, Homo sapiens
  misc_RNA (1)...(19): siRNA sense strand
agcagaacauuaucaacua

SEQ ID NO: 67868 - RNA, 19 nt, Homo sapiens
  misc_RNA (1)...(19): siRNA sense strand
gcaagaugcgcuuccacaa

SEQ ID NO: 67869 - RNA, 19 nt, Homo sapiens
  misc_RNA (1)...(19): siRNA sense strand
cagaagacauugugaacac

SEQ ID NO: 67870 - RNA, 19 nt, Homo sapiens
  misc_RNA (1)...(19): siRNA sense strand
ugaccuauguguccugcuu

SEQ ID NO: 67871 - RNA, 19 nt, Homo sapiens
  misc_RNA (1)...(19): siRNA sense strand
caacuacaagacuaacauu

SEQ ID NO: 67872 - RNA, 19 nt, Homo sapiens
  misc_RNA (1)...(19): siRNA sense strand
ggaggaguaugagaagcuu

SEQ ID NO: 67873 - RNA, 19 nt, Homo sapiens
  misc_RNA (1)...(19): siRNA sense strand
agaagcugauggaggagua

SEQ ID NO: 67874 - RNA, 19 nt, Homo sapiens
  misc_RNA (1)...(19): siRNA sense strand
ggguuaaacugguguccau

SEQ ID NO: 67875 - RNA, 19 nt, Homo sapiens
  misc_RNA (1)...(19): siRNA sense strand
ccugaugacuuccgagcuu

SEQ ID NO: 67876 - RNA, 19 nt, Homo sapiens
  misc_RNA (1)...(19): siRNA sense strand
gagaacaucgaggaagauu

SEQ ID NO: 67877 - RNA, 19 nt, Homo sapiens
  misc_RNA (1)...(19): siRNA sense strand
gaccuuccaggccuucaua

SEQ ID NO: 67878 - RNA, 19 nt, Homo sapiens
  misc_RNA (1)...(19): siRNA sense strand
agagcgaggugccaucaug

SEQ ID NO: 67879 - RNA, 19 nt, Homo sapiens
  misc_RNA (1)...(19): siRNA sense strand
ccuuugagguggcagagaa

SEQ ID NO: 67880 - RNA, 19 nt, Homo sapiens
  misc_RNA (1)...(19): siRNA sense strand
gaucuggaccaucauccuu

SEQ ID NO: 67881 - RNA, 19 nt, Homo sapiens
  misc_RNA (1)...(19): siRNA sense strand
cuacaagacuaacauugac

SEQ ID NO: 67882 - RNA, 19 nt, Homo sapiens
  misc_RNA (1)...(19): siRNA sense strand
gaacauuaucaacuacaag

SEQ ID NO: 67883 - RNA, 19 nt, Homo sapiens
  misc_RNA (1)...(19): siRNA sense strand
gcagaagacauugugaaca

SEQ ID NO: 67884 - RNA, 19 nt, Homo sapiens
  misc_RNA (1)...(19): siRNA sense strand
ggagacaagaacuacauca

SEQ ID NO: 67885 - RNA, 19 nt, Homo sapiens
  misc_RNA (1)...(19): siRNA sense strand
ugauggagccugaugacuu

SEQ ID NO: 67886 - RNA, 19 nt, Homo sapiens
  misc_RNA (1)...(19): siRNA sense strand
gcaagcuggucucggacau

SEQ ID NO: 67887 - RNA, 19 nt, Homo sapiens
  misc_RNA (1)...(19): siRNA sense strand
ccucaucgacuacgccaaa

SEQ ID NO: 67888 - RNA, 19 nt, Homo sapiens
  misc_RNA (1)...(19): siRNA sense strand
cuuccgagcuugccucauc

SEQ ID NO: 67889 - RNA, 19 nt, Homo sapiens
  misc_RNA (1)...(19): siRNA sense strand
acaaggcccuggacuucau

SEQ ID NO: 67890 - RNA, 19 nt, Homo sapiens
  misc_RNA (1)...(19): siRNA sense strand
gccugguguucgacaauaa

SEQ ID NO: 67891 - RNA, 19 nt, Homo sapiens
  misc_RNA (1)...(19): siRNA sense strand
gcgcaaacuagaggacuuu

SEQ ID NO: 67892 - RNA, 19 nt, Homo sapiens
  misc_RNA (1)...(19): siRNA sense strand
cgcaauggccucaaacuca

SEQ ID NO: 67893 - RNA, 19 nt, Homo sapiens
  misc_RNA (1)...(19): siRNA sense strand
aagaugcgcuuccacaaaa

SEQ ID NO: 67894 - RNA, 19 nt, Homo sapiens
  misc_RNA (1)...(19): siRNA sense strand
ccaaacugcgaaaggauga

SEQ ID NO: 67895 - RNA, 19 nt, Homo sapiens
  misc_RNA (1)...(19): siRNA sense strand
guuaaacugguguccauug

SEQ ID NO: 67896 - RNA, 19 nt, Homo sapiens
  misc_RNA (1)...(19): siRNA sense strand
caagauguuggaugcagaa

SEQ ID NO: 67897 - RNA, 19 nt, Homo sapiens
  misc_RNA (1)...(19): siRNA sense strand
guagcuuccuucaagaucu

SEQ ID NO: 67898 - RNA, 19 nt, Homo sapiens
  misc_RNA (1)...(19): siRNA sense strand
ugaaguggagaaccaggua

SEQ ID NO: 67899 - RNA, 19 nt, Homo sapiens
  misc_RNA (1)...(19): siRNA sense strand
agggugagauccagaagau

SEQ ID NO: 67900 - RNA, 19 nt, Homo sapiens
  misc_RNA (1)...(19): siRNA sense strand
gaggucauuucaggugaga

SEQ ID NO: 67901 - RNA, 19 nt, Homo sapiens
  misc_RNA (1)...(19): siRNA sense strand
acuacaagacuaacauuga

SEQ ID NO: 67902 - RNA, 19 nt, Homo sapiens
  misc_RNA (1)...(19): siRNA sense strand
gaaggccucccugcacgaa

SEQ ID NO: 67903 - RNA, 19 nt, Homo sapiens
  misc_RNA (1)...(19): siRNA sense strand
uagaggacuuucgggacua

SEQ ID NO: 67904 - RNA, 19 nt, Homo sapiens
  misc_RNA (1)...(19): siRNA sense strand
ccaagcaggccgaguacug

SEQ ID NO: 67905 - RNA, 19 nt, Homo sapiens
  misc_RNA (1)...(19): siRNA sense strand
aguuguagcuuccuucaag

SEQ ID NO: 67906 - RNA, 19 nt, Homo sapiens
  misc_RNA (1)...(19): siRNA sense strand
cagcugcucaccuccauug

SEQ ID NO: 67907 - RNA, 19 nt, Homo sapiens
  misc_RNA (1)...(19): siRNA sense strand
ccugaacacugccuuugag

SEQ ID NO: 67908 - RNA, 19 nt, Homo sapiens
  misc_RNA (1)...(19): siRNA sense strand
guuguagcuuccuucaaga

SEQ ID NO: 67909 - RNA, 19 nt, Homo sapiens
  misc_RNA (1)...(19): siRNA sense strand
cgcaggacaucaacaccaa

SEQ ID NO: 67910 - RNA, 19 nt, Homo sapiens
  misc_RNA (1)...(19): siRNA sense strand
gcgacuacgauucggcuuu

SEQ ID NO: 67911 - RNA, 19 nt, Homo sapiens
  misc_RNA (1)...(19): siRNA sense strand
cacaaaaucgccaacguua

SEQ ID NO: 67912 - RNA, 19 nt, Homo sapiens
  misc_RNA (1)...(19): siRNA sense strand
gugcugaagagauuguuga

SEQ ID NO: 67913 - RNA, 19 nt, Homo sapiens
  misc_RNA (1)...(19): siRNA sense strand
uagcuuccuucaagaucuu

SEQ ID NO: 67914 - RNA, 19 nt, Homo sapiens
  misc_RNA (1)...(19): siRNA sense strand
aggcgaagguggaggaagu

SEQ ID NO: 67915 - RNA, 19 nt, Homo sapiens
  misc_RNA (1)...(19): siRNA sense strand
agugggauaugguccgaaa

SEQ ID NO: 67916 - RNA, 19 nt, Homo sapiens
  misc_RNA (1)...(19): siRNA sense strand
ccaacaggaucugcaaggu

SEQ ID NO: 67917 - RNA, 19 nt, Homo sapiens
  misc_RNA (1)...(19): siRNA sense strand
acaccgcccugaccucauc

SEQ ID NO: 67918 - RNA, 19 nt, Homo sapiens
  misc_RNA (1)...(19): siRNA sense strand
ggaugcagaagacauugug

SEQ ID NO: 67919 - RNA, 19 nt, Homo sapiens
  misc_RNA (1)...(19): siRNA sense strand
ggaugauggagccugauga

SEQ ID NO: 67920 - RNA, 19 nt, Homo sapiens
  misc_RNA (1)...(19): siRNA sense strand
acacacugcagaccaaguu

SEQ ID NO: 67921 - RNA, 19 nt, Homo sapiens
  misc_RNA (1)...(19): siRNA sense strand
aagaugacccugggcauga

SEQ ID NO: 67922 - RNA, 19 nt, Homo sapiens
  misc_RNA (1)...(19): siRNA sense strand
gccguauggugcccuacaa

SEQ ID NO: 67923 - RNA, 19 nt, Homo sapiens
  misc_RNA (1)...(19): siRNA sense strand
uuaaacugguguccauugg

SEQ ID NO: 67924 - RNA, 19 nt, Homo sapiens
  misc_RNA (1)...(19): siRNA sense strand
ugauggaggaguaugagaa

SEQ ID NO: 67925 - RNA, 19 nt, Homo sapiens
  misc_RNA (1)...(19): siRNA sense strand
agaaaccucagccaaggaa

SEQ ID NO: 67926 - RNA, 19 nt, Homo sapiens
  misc_RNA (1)...(19): siRNA sense strand
guggagaaccagguacuga

SEQ ID NO: 67927 - RNA, 19 nt, Homo sapiens
  misc_RNA (1)...(19): siRNA sense strand
gcaaggcaggcacccagau

SEQ ID NO: 67928 - RNA, 19 nt, Homo sapiens
  misc_RNA (1)...(19): siRNA sense strand
gauggaggaguaugagaag

SEQ ID NO: 67929 - RNA, 19 nt, Homo sapiens
  misc_RNA (1)...(19): siRNA sense strand
ggagaagcagcagcggaaa

SEQ ID NO: 67930 - RNA, 19 nt, Homo sapiens
  misc_RNA (1)...(19): siRNA sense strand
gugagcugcuggaguggau

SEQ ID NO: 67931 - RNA, 19 nt, Homo sapiens
  misc_RNA (1)...(19): siRNA sense strand
caaguuguagcuuccuuca

SEQ ID NO: 67932 - RNA, 19 nt, Homo sapiens
  misc_RNA (1)...(19): siRNA sense strand
gcagcaggagcagaacauu

SEQ ID NO: 67933 - RNA, 19 nt, Homo sapiens
  misc_RNA (1)...(19): siRNA sense strand
guccauuggugcugaagag

SEQ ID NO: 67934 - RNA, 19 nt, Homo sapiens
  misc_RNA (1)...(19): siRNA sense strand
gcaggacguguggcuggua

SEQ ID NO: 67935 - RNA, 19 nt, Homo sapiens
  misc_RNA (1)...(19): siRNA sense strand
guuggaugcagaagacauu

SEQ ID NO: 67936 - RNA, 19 nt, Homo sapiens
  misc_RNA (1)...(19): siRNA sense strand
ccaugcagcgcaaacuaga

SEQ ID NO: 67937 - RNA, 19 nt, Homo sapiens
  misc_RNA (1)...(19): siRNA sense strand
agcaggagcagaacauuau

SEQ ID NO: 67938 - RNA, 19 nt, Homo sapiens
  misc_RNA (1)...(19): siRNA sense strand
aaagaaugcugguaucaaa

SEQ ID NO: 67939 - RNA, 19 nt, Homo sapiens
  misc_RNA (1)...(19): siRNA sense strand
ggaaagaugaccuguaaga

SEQ ID NO: 67940 - RNA, 19 nt, Homo sapiens
  misc_RNA (1)...(19): siRNA sense strand
gaacacagaauuuccacuu

SEQ ID NO: 67941 - RNA, 19 nt, Homo sapiens
  misc_RNA (1)...(19): siRNA sense strand
gaaacggaauuguacaaca

SEQ ID NO: 67942 - RNA, 19 nt, Homo sapiens
  misc_RNA (1)...(19): siRNA sense strand
acaguuagcugccuucgaa

SEQ ID NO: 67943 - RNA, 19 nt, Homo sapiens
  misc_RNA (1)...(19): siRNA sense strand
caacaaaggccaaacauac

SEQ ID NO: 67944 - RNA, 19 nt, Homo sapiens
  misc_RNA (1)...(19): siRNA sense strand
cuaguggucuugcacauuu

SEQ ID NO: 67945 - RNA, 19 nt, Homo sapiens
  misc_RNA (1)...(19): siRNA sense strand
agggaaagaugaccuguaa

SEQ ID NO: 67946 - RNA, 19 nt, Homo sapiens
  misc_RNA (1)...(19): siRNA sense strand
gcagauuuauuggaucauu

SEQ ID NO: 67947 - RNA, 19 nt, Homo sapiens
  misc_RNA (1)...(19): siRNA sense strand
uaagaagaauggacagugu

SEQ ID NO: 67948 - RNA, 19 nt, Homo sapiens
  misc_RNA (1)...(19): siRNA sense strand
guaaugaggaccacuguga

SEQ ID NO: 67949 - RNA, 19 nt, Homo sapiens
  misc_RNA (1)...(19): siRNA sense strand
gaauggacaguguugcaua

SEQ ID NO: 67950 - RNA, 19 nt, Homo sapiens
  misc_RNA (1)...(19): siRNA sense strand
gaaaggcugcuuccagguu

SEQ ID NO: 67951 - RNA, 19 nt, Homo sapiens
  misc_RNA (1)...(19): siRNA sense strand
acccagcugugguuaauua

SEQ ID NO: 67952 - RNA, 19 nt, Homo sapiens
  misc_RNA (1)...(19): siRNA sense strand
guacgacuaucuucagcuu

SEQ ID NO: 67953 - RNA, 19 nt, Homo sapiens
  misc_RNA (1)...(19): siRNA sense strand
agacagcacuuuagcagau

SEQ ID NO: 67954 - RNA, 19 nt, Homo sapiens
  misc_RNA (1)...(19): siRNA sense strand
gaaagaaugcugguaucaa

SEQ ID NO: 67955 - RNA, 19 nt, Homo sapiens
  misc_RNA (1)...(19): siRNA sense strand
uggauuguuucgauucuua

SEQ ID NO: 67956 - RNA, 19 nt, Homo sapiens
  misc_RNA (1)...(19): siRNA sense strand
gaauagugcuguccauagc

SEQ ID NO: 67957 - RNA, 19 nt, Homo sapiens
  misc_RNA (1)...(19): siRNA sense strand
ggugagcaaugguauagug

SEQ ID NO: 67958 - RNA, 19 nt, Homo sapiens
  misc_RNA (1)...(19): siRNA sense strand
gaagguagucuguguggau

SEQ ID NO: 67959 - RNA, 19 nt, Homo sapiens
  misc_RNA (1)...(19): siRNA sense strand
guacccagcugugguuaau

SEQ ID NO: 67960 - RNA, 19 nt, Homo sapiens
  misc_RNA (1)...(19): siRNA sense strand
uggccaagcuaaugaaaga

SEQ ID NO: 67961 - RNA, 19 nt, Homo sapiens
  misc_RNA (1)...(19): siRNA sense strand
aaaggcugcuuccagguuu

SEQ ID NO: 67962 - RNA, 19 nt, Homo sapiens
  misc_RNA (1)...(19): siRNA sense strand
ccagguggauuguuucgau

SEQ ID NO: 67963 - RNA, 19 nt, Homo sapiens
  misc_RNA (1)...(19): siRNA sense strand
ucacagcacugcguaucaa

SEQ ID NO: 67964 - RNA, 19 nt, Homo sapiens
  misc_RNA (1)...(19): siRNA sense strand
ugaggaagguagucugugu

SEQ ID NO: 67965 - RNA, 19 nt, Homo sapiens
  misc_RNA (1)...(19): siRNA sense strand
uagcagauuuauuggauca

SEQ ID NO: 67966 - RNA, 19 nt, Homo sapiens
  misc_RNA (1)...(19): siRNA sense strand
guccauagcuaguggucuu

SEQ ID NO: 67967 - RNA, 19 nt, Homo sapiens
  misc_RNA (1)...(19): siRNA sense strand
guagauggagugaugauuc

SEQ ID NO: 67968 - RNA, 19 nt, Homo sapiens
  misc_RNA (1)...(19): siRNA sense strand
ucaacaaaggccaaacaua

SEQ ID NO: 67969 - RNA, 19 nt, Homo sapiens
  misc_RNA (1)...(19): siRNA sense strand
uuacuacucuggauacagu

SEQ ID NO: 67970 - RNA, 19 nt, Homo sapiens
  misc_RNA (1)...(19): siRNA sense strand
gacaugacaucaagacacu

SEQ ID NO: 67971 - RNA, 19 nt, Homo sapiens
  misc_RNA (1)...(19): siRNA sense strand
ucagggaaacggaauugua

SEQ ID NO: 67972 - RNA, 19 nt, Homo sapiens
  misc_RNA (1)...(19): siRNA sense strand
gcacuuuagcagauuuauu

SEQ ID NO: 67973 - RNA, 19 nt, Homo sapiens
  misc_RNA (1)...(19): siRNA sense strand
cauugcccaucgagauuua

SEQ ID NO: 67974 - RNA, 19 nt, Homo sapiens
  misc_RNA (1)...(19): siRNA sense strand
gcucaucaccaccaauguu

SEQ ID NO: 67975 - RNA, 19 nt, Homo sapiens
  misc_RNA (1)...(19): siRNA sense strand
guucucagacccgacauua

SEQ ID NO: 67976 - RNA, 19 nt, Homo sapiens
  misc_RNA (1)...(19): siRNA sense strand
gaucaacaaaggccaaaca

SEQ ID NO: 67977 - RNA, 19 nt, Homo sapiens
  misc_RNA (1)...(19): siRNA sense strand
gcacauuugcacauagaga

SEQ ID NO: 67978 - RNA, 19 nt, Homo sapiens
  misc_RNA (1)...(19): siRNA sense strand
uuucauugcuucagacaug

SEQ ID NO: 67979 - RNA, 19 nt, Homo sapiens
  misc_RNA (1)...(19): siRNA sense strand
cacuuuagcagauuuauug

SEQ ID NO: 67980 - RNA, 19 nt, Homo sapiens
  misc_RNA (1)...(19): siRNA sense strand
caaccaagaacgccucaau

SEQ ID NO: 67981 - RNA, 19 nt, Homo sapiens
  misc_RNA (1)...(19): siRNA sense strand
uaucuuagguuucauugcu

SEQ ID NO: 67982 - RNA, 19 nt, Homo sapiens
  misc_RNA (1)...(19): siRNA sense strand
ccaagcuaaugaaagaaug

SEQ ID NO: 67983 - RNA, 19 nt, Homo sapiens
  misc_RNA (1)...(19): siRNA sense strand
cuucagacaugacaucaag

SEQ ID NO: 67984 - RNA, 19 nt, Homo sapiens
  misc_RNA (1)...(19): siRNA sense strand
ccaaacauacccaacagau

SEQ ID NO: 67985 - RNA, 19 nt, Homo sapiens
  misc_RNA (1)...(19): siRNA sense strand
gacagcacuuuagcagauu

SEQ ID NO: 67986 - RNA, 19 nt, Homo sapiens
  misc_RNA (1)...(19): siRNA sense strand
caaacauacccaacagaug

SEQ ID NO: 67987 - RNA, 19 nt, Homo sapiens
  misc_RNA (1)...(19): siRNA sense strand
gauggugagcaaugguaua

SEQ ID NO: 67988 - RNA, 19 nt, Homo sapiens
  misc_RNA (1)...(19): siRNA sense strand
caagggaaaccagccauug

SEQ ID NO: 67989 - RNA, 19 nt, Homo sapiens
  misc_RNA (1)...(19): siRNA sense strand
gaucauucguguacaucag

SEQ ID NO: 67990 - RNA, 19 nt, Homo sapiens
  misc_RNA (1)...(19): siRNA sense strand
uaaccucucuggccaagcu

SEQ ID NO: 67991 - RNA, 19 nt, Homo sapiens
  misc_RNA (1)...(19): siRNA sense strand
acgaugugguucccaauga

SEQ ID NO: 67992 - RNA, 19 nt, Homo sapiens
  misc_RNA (1)...(19): siRNA sense strand
gaugauucuuccugugcuu

SEQ ID NO: 67993 - RNA, 19 nt, Homo sapiens
  misc_RNA (1)...(19): siRNA sense strand
gaauuguacaacacuguga

SEQ ID NO: 67994 - RNA, 19 nt, Homo sapiens
  misc_RNA (1)...(19): siRNA sense strand
cuacaugugugugugugaa

SEQ ID NO: 67995 - RNA, 19 nt, Homo sapiens
  misc_RNA (1)...(19): siRNA sense strand
ccucauuauucucucugua

SEQ ID NO: 67996 - RNA, 19 nt, Homo sapiens
  misc_RNA (1)...(19): siRNA sense strand
gggaaacggaauuguacaa

SEQ ID NO: 67997 - RNA, 19 nt, Homo sapiens
  misc_RNA (1)...(19): siRNA sense strand
gggaaaauguugccgugaa

SEQ ID NO: 67998 - RNA, 19 nt, Homo sapiens
  misc_RNA (1)...(19): siRNA sense strand
cagauuuauuggaucauuc

SEQ ID NO: 67999 - RNA, 19 nt, Homo sapiens
  misc_RNA (1)...(19): siRNA sense strand
auaaaagggucgauauuug

SEQ ID NO: 68000 - RNA, 19 nt, Homo sapiens
  misc_RNA (1)...(19): siRNA sense strand
cgaauagugcuguccauag

SEQ ID NO: 68001 - RNA, 19 nt, Homo sapiens
  misc_RNA (1)...(19): siRNA sense strand
aaacggaauuguacaacac

SEQ ID NO: 68002 - RNA, 19 nt, Homo sapiens
  misc_RNA (1)...(19): siRNA sense strand
gaucuucuccucccgugau

SEQ ID NO: 68003 - RNA, 19 nt, Homo sapiens
  misc_RNA (1)...(19): siRNA sense strand
gcccaucgagauuuaaaga

SEQ ID NO: 68004 - RNA, 19 nt, Homo sapiens
  misc_RNA (1)...(19): siRNA sense strand
cagcuuacuacucuggaua

SEQ ID NO: 68005 - RNA, 19 nt, Homo sapiens
  misc_RNA (1)...(19): siRNA sense strand
caaggggacugguguaaca

SEQ ID NO: 68006 - RNA, 19 nt, Homo sapiens
  misc_RNA (1)...(19): siRNA sense strand
ugauaauucccucgacaaa

SEQ ID NO: 68007 - RNA, 19 nt, Homo sapiens
  misc_RNA (1)...(19): siRNA sense strand
gguagucuguguggaucaa

SEQ ID NO: 68008 - RNA, 19 nt, Homo sapiens
  misc_RNA (1)...(19): siRNA sense strand
gcucuccccuccccuagua

SEQ ID NO: 68009 - RNA, 19 nt, Homo sapiens
  misc_RNA (1)...(19): siRNA sense strand
ccaggcggauggugagcaa

SEQ ID NO: 68010 - RNA, 19 nt, Homo sapiens
  misc_RNA (1)...(19): siRNA sense strand
cagguggauuguuucgauu

SEQ ID NO: 68011 - RNA, 19 nt, Homo sapiens
  misc_RNA (1)...(19): siRNA sense strand
uagauggagugaugauucu

SEQ ID NO: 68012 - RNA, 19 nt, Homo sapiens
  misc_RNA (1)...(19): siRNA sense strand
guuggagugugucgggaaa

SEQ ID NO: 68013 - RNA, 19 nt, Homo sapiens
  misc_RNA (1)...(19): siRNA sense strand
ggaguauggcacuaucgaa

SEQ ID NO: 68014 - RNA, 19 nt, Homo sapiens
  misc_RNA (1)...(19): siRNA sense strand
auagugcuguccauagcua

SEQ ID NO: 68015 - RNA, 19 nt, Homo sapiens
  misc_RNA (1)...(19): siRNA sense strand
ggccaaacauacccaacag

SEQ ID NO: 68016 - RNA, 19 nt, Homo sapiens
  misc_RNA (1)...(19): siRNA sense strand
gggcucaucaccaccaaug

SEQ ID NO: 68017 - RNA, 19 nt, Homo sapiens
  misc_RNA (1)...(19): siRNA sense strand
aaugaaagaaugcugguau

SEQ ID NO: 68018 - RNA, 19 nt, Homo sapiens
  misc_RNA (1)...(19): siRNA sense strand
gacccaaguuuugaagaua

SEQ ID NO: 68019 - RNA, 19 nt, Homo sapiens
  misc_RNA (1)...(19): siRNA sense strand
uagcugccuucgaauagug

SEQ ID NO: 68020 - RNA, 19 nt, Homo sapiens
  misc_RNA (1)...(19): siRNA sense strand
gaaagaugaccuguaagac

SEQ ID NO: 68021 - RNA, 19 nt, Homo sapiens
  misc_RNA (1)...(19): siRNA sense strand
uauucucucuguaguguuc

SEQ ID NO: 68022 - RNA, 19 nt, Homo sapiens
  misc_RNA (1)...(19): siRNA sense strand
ugaaagaaugcugguauca

SEQ ID NO: 68023 - RNA, 19 nt, Homo sapiens
  misc_RNA (1)...(19): siRNA sense strand
ggucucuccugcgguaaug

SEQ ID NO: 68024 - RNA, 19 nt, Homo sapiens
  misc_RNA (1)...(19): siRNA sense strand
ccagagcaccaaucagcuu

SEQ ID NO: 68025 - RNA, 19 nt, Homo sapiens
  misc_RNA (1)...(19): siRNA sense strand
gccauugcccaucgagauu

SEQ ID NO: 68026 - RNA, 19 nt, Homo sapiens
  misc_RNA (1)...(19): siRNA sense strand
gauggagugaugauucuuc

SEQ ID NO: 68027 - RNA, 19 nt, Homo sapiens
  misc_RNA (1)...(19): siRNA sense strand
cagcugcccacuaaaggaa

SEQ ID NO: 68028 - RNA, 19 nt, Homo sapiens
  misc_RNA (1)...(19): siRNA sense strand
caucaagacacuccaguac

SEQ ID NO: 68029 - RNA, 19 nt, Homo sapiens
  misc_RNA (1)...(19): siRNA sense strand
ggaaaauguugccgugaag

SEQ ID NO: 68030 - RNA, 19 nt, Homo sapiens
  misc_RNA (1)...(19): siRNA sense strand
aacacagaauuuccacuug

SEQ ID NO: 68031 - RNA, 19 nt, Homo sapiens
  misc_RNA (1)...(19): siRNA sense strand
aguguugcauagcagauuu

SEQ ID NO: 68032 - RNA, 19 nt, Homo sapiens
  misc_RNA (1)...(19): siRNA sense strand
agaagaauggacaguguug

SEQ ID NO: 68033 - RNA, 19 nt, Homo sapiens
  misc_RNA (1)...(19): siRNA sense strand
gcuaguggucuugcacauu

SEQ ID NO: 68034 - RNA, 19 nt, Homo sapiens
  misc_RNA (1)...(19): siRNA sense strand
uaaugaggaccacugugaa

SEQ ID NO: 68035 - RNA, 19 nt, Homo sapiens
  misc_RNA (1)...(19): siRNA sense strand
uagguuucauugcuucaga

SEQ ID NO: 68036 - RNA, 19 nt, Homo sapiens
  misc_RNA (1)...(19): siRNA sense strand
cccgagacguggaguaugg

SEQ ID NO: 68037 - RNA, 19 nt, Homo sapiens
  misc_RNA (1)...(19): siRNA sense strand
gccaagcuaaugaaagaau

SEQ ID NO: 68038 - RNA, 19 nt, Homo sapiens
  misc_RNA (1)...(19): siRNA sense strand
gaacgaacugugucaugua

SEQ ID NO: 68039 - RNA, 19 nt, Homo sapiens
  misc_RNA (1)...(19): siRNA sense strand
ggaacgaacugugucaugu

SEQ ID NO: 68040 - RNA, 19 nt, Homo sapiens
  misc_RNA (1)...(19): siRNA sense strand
uggcuuggcuguucgauuu

SEQ ID NO: 68041 - RNA, 19 nt, Homo sapiens
  misc_RNA (1)...(19): siRNA sense strand
guaagaauguauugcugaa

SEQ ID NO: 68042 - RNA, 19 nt, Homo sapiens
  misc_RNA (1)...(19): siRNA sense strand
ccaucgagcucgugaagaa

SEQ ID NO: 68043 - RNA, 19 nt, Homo sapiens
  misc_RNA (1)...(19): siRNA sense strand
gacuucaacugcuacgaua

SEQ ID NO: 68044 - RNA, 19 nt, Homo sapiens
  misc_RNA (1)...(19): siRNA sense strand
aagaugaggcccaccauua

SEQ ID NO: 68045 - RNA, 19 nt, Homo sapiens
  misc_RNA (1)...(19): siRNA sense strand
gcuccaaccucgaaguaga

SEQ ID NO: 68046 - RNA, 19 nt, Homo sapiens
  misc_RNA (1)...(19): siRNA sense strand
ggaacaucaucacauggaa

SEQ ID NO: 68047 - RNA, 19 nt, Homo sapiens
  misc_RNA (1)...(19): siRNA sense strand
uaaagagucaagcaucuaa

SEQ ID NO: 68048 - RNA, 19 nt, Homo sapiens
  misc_RNA (1)...(19): siRNA sense strand
gggagugcaucuacuacaa

SEQ ID NO: 68049 - RNA, 19 nt, Homo sapiens
  misc_RNA (1)...(19): siRNA sense strand
ggacacccacggacaggua

SEQ ID NO: 68050 - RNA, 19 nt, Homo sapiens
  misc_RNA (1)...(19): siRNA sense strand
gagcgggugucccugauuc

SEQ ID NO: 68051 - RNA, 19 nt, Homo sapiens
  misc_RNA (1)...(19): siRNA sense strand
acaagcggcugcacugcua

SEQ ID NO: 68052 - RNA, 19 nt, Homo sapiens
  misc_RNA (1)...(19): siRNA sense strand
aaagaucacugguugaaac

SEQ ID NO: 68053 - RNA, 19 nt, Homo sapiens
  misc_RNA (1)...(19): siRNA sense strand
aagaauguauugcugaaga

SEQ ID NO: 68054 - RNA, 19 nt, Homo sapiens
  misc_RNA (1)...(19): siRNA sense strand
uagaugacuucaacugcua

SEQ ID NO: 68055 - RNA, 19 nt, Homo sapiens
  misc_RNA (1)...(19): siRNA sense strand
cagcacaccuggcaugaag

SEQ ID NO: 68056 - RNA, 19 nt, Homo sapiens
  misc_RNA (1)...(19): siRNA sense strand
gaugaggcccaccauuaaa

SEQ ID NO: 68057 - RNA, 19 nt, Homo sapiens
  misc_RNA (1)...(19): siRNA sense strand
gaagaugaggcccaccauu

SEQ ID NO: 68058 - RNA, 19 nt, Homo sapiens
  misc_RNA (1)...(19): siRNA sense strand
ggaaggcccagcucaugaa

SEQ ID NO: 68059 - RNA, 19 nt, Homo sapiens
  misc_RNA (1)...(19): siRNA sense strand
acgagaaccugcuacaguu

SEQ ID NO: 68060 - RNA, 19 nt, Homo sapiens
  misc_RNA (1)...(19): siRNA sense strand
guucauugcugccgagaag

SEQ ID NO: 68061 - RNA, 19 nt, Homo sapiens
  misc_RNA (1)...(19): siRNA sense strand
cgagggagccaucaacuuc

SEQ ID NO: 68062 - RNA, 19 nt, Homo sapiens
  misc_RNA (1)...(19): siRNA sense strand
ggccacaagccgucuauug

SEQ ID NO: 68063 - RNA, 19 nt, Homo sapiens
  misc_RNA (1)...(19): siRNA sense strand
agaugaggcccaccauuaa

SEQ ID NO: 68064 - RNA, 19 nt, Homo sapiens
  misc_RNA (1)...(19): siRNA sense strand
gcccggaagucacguacga

SEQ ID NO: 68065 - RNA, 19 nt, Homo sapiens
  misc_RNA (1)...(19): siRNA sense strand
cgaacugugucauguagca

SEQ ID NO: 68066 - RNA, 19 nt, Homo sapiens
  misc_RNA (1)...(19): siRNA sense strand
gggaacaucaucacaugga

SEQ ID NO: 68067 - RNA, 19 nt, Homo sapiens
  misc_RNA (1)...(19): siRNA sense strand
ccuaaagagucaagcaucu

SEQ ID NO: 68068 - RNA, 19 nt, Homo sapiens
  misc_RNA (1)...(19): siRNA sense strand
gacuuuggcuuggcuguuc

SEQ ID NO: 68069 - RNA, 19 nt, Homo sapiens
  misc_RNA (1)...(19): siRNA sense strand
guacuucugcugcugugaa

SEQ ID NO: 68070 - RNA, 19 nt, Homo sapiens
  misc_RNA (1)...(19): siRNA sense strand
gcugcuggcuagaugacuu

SEQ ID NO: 68071 - RNA, 19 nt, Homo sapiens
  misc_RNA (1)...(19): siRNA sense strand
cuuuguagcugucaagauc

SEQ ID NO: 68072 - RNA, 19 nt, Homo sapiens
  misc_RNA (1)...(19): siRNA sense strand
ucacggugcuggccuacuc

SEQ ID NO: 68073 - RNA, 19 nt, Homo sapiens
  misc_RNA (1)...(19): siRNA sense strand
uuaaagaucacugguugaa

SEQ ID NO: 68074 - RNA, 19 nt, Homo sapiens
  misc_RNA (1)...(19): siRNA sense strand
ccucacggauuaccucaag

SEQ ID NO: 68075 - RNA, 19 nt, Homo sapiens
  misc_RNA (1)...(19): siRNA sense strand
ggcccaccauuaaagauca

SEQ ID NO: 68076 - RNA, 19 nt, Homo sapiens
  misc_RNA (1)...(19): siRNA sense strand
ucacggccuuccaugacaa

SEQ ID NO: 68077 - RNA, 19 nt, Homo sapiens
  misc_RNA (1)...(19): siRNA sense strand
ccaucaacuuccagagaga

SEQ ID NO: 68078 - RNA, 19 nt, Homo sapiens
  misc_RNA (1)...(19): siRNA sense strand
aguacaugcugcccuuuga

SEQ ID NO: 68079 - RNA, 19 nt, Homo sapiens
  misc_RNA (1)...(19): siRNA sense strand
gaguacaugcugcccuuug

SEQ ID NO: 68080 - RNA, 19 nt, Homo sapiens
  misc_RNA (1)...(19): siRNA sense strand
cuaaagagucaagcaucua

SEQ ID NO: 68081 - RNA, 19 nt, Homo sapiens
  misc_RNA (1)...(19): siRNA sense strand
gcacaccuggcaugaagca

SEQ ID NO: 68082 - RNA, 19 nt, Homo sapiens
  misc_RNA (1)...(19): siRNA sense strand
uaaagaucacugguugaaa

SEQ ID NO: 68083 - RNA, 19 nt, Homo sapiens
  misc_RNA (1)...(19): siRNA sense strand
gcuuggcuguucgauuuga

SEQ ID NO: 68084 - RNA, 19 nt, Homo sapiens
  misc_RNA (1)...(19): siRNA sense strand
gaagggcugcuggcuagau

SEQ ID NO: 68085 - RNA, 19 nt, Homo sapiens
  misc_RNA (1)...(19): siRNA sense strand
gaaggcccagcucaugaau

SEQ ID NO: 68086 - RNA, 19 nt, Homo sapiens
  misc_RNA (1)...(19): siRNA sense strand
caucaucacauggaacgaa

SEQ ID NO: 68087 - RNA, 19 nt, Homo sapiens
  misc_RNA (1)...(19): siRNA sense strand
gcaugaagcacgagaaccu

SEQ ID NO: 68088 - RNA, 19 nt, Homo sapiens
  misc_RNA (1)...(19): siRNA sense strand
ccauuaaagaucacugguu

SEQ ID NO: 68089 - RNA, 19 nt, Homo sapiens
  misc_RNA (1)...(19): siRNA sense strand
cacgagaaccugcuacagu

SEQ ID NO: 68090 - RNA, 19 nt, Homo sapiens
  misc_RNA (1)...(19): siRNA sense strand
gcacuaccucggacugucu

SEQ ID NO: 68091 - RNA, 19 nt, Homo sapiens
  misc_RNA (1)...(19): siRNA sense strand
uggaaggcccagcucauga

SEQ ID NO: 68092 - RNA, 19 nt, Homo sapiens
  misc_RNA (1)...(19): siRNA sense strand
ggagcgggugucccugauu

SEQ ID NO: 68093 - RNA, 19 nt, Homo sapiens
  misc_RNA (1)...(19): siRNA sense strand
ugacuucaacugcuacgau

SEQ ID NO: 68094 - RNA, 19 nt, Homo sapiens
  misc_RNA (1)...(19): siRNA sense strand
aacgaacugugucauguag

SEQ ID NO: 68095 - RNA, 19 nt, Homo sapiens
  misc_RNA (1)...(19): siRNA sense strand
gcucaucacggccuuccau

SEQ ID NO: 68096 - RNA, 19 nt, Homo sapiens
  misc_RNA (1)...(19): siRNA sense strand
agagugaacgggagaucuu

SEQ ID NO: 68097 - RNA, 19 nt, Homo sapiens
  misc_RNA (1)...(19): siRNA sense strand
gaggugguggugcacaaga

SEQ ID NO: 68098 - RNA, 19 nt, Homo sapiens
  misc_RNA (1)...(19): siRNA sense strand
gccacaagccgucuauugc

SEQ ID NO: 68099 - RNA, 19 nt, Homo sapiens
  misc_RNA (1)...(19): siRNA sense strand
gccagcacccuucguugga

SEQ ID NO: 68100 - RNA, 19 nt, Homo sapiens
  misc_RNA (1)...(19): siRNA sense strand
guacagggcugacaugugu

SEQ ID NO: 68101 - RNA, 19 nt, Homo sapiens
  misc_RNA (1)...(19): siRNA sense strand
gcgcgaagcugcugacuga

SEQ ID NO: 68102 - RNA, 19 nt, Homo sapiens
  misc_RNA (1)...(19): siRNA sense strand
gcaccugcaugacaacgua

SEQ ID NO: 68103 - RNA, 19 nt, Homo sapiens
  misc_RNA (1)...(19): siRNA sense strand
ggacuuacacguuuacaga

SEQ ID NO: 68104 - RNA, 19 nt, Homo sapiens
  misc_RNA (1)...(19): siRNA sense strand
gcccaaagguugcccugaa

SEQ ID NO: 68105 - RNA, 19 nt, Homo sapiens
  misc_RNA (1)...(19): siRNA sense strand
ggacaagcuauaucagaaa

SEQ ID NO: 68106 - RNA, 19 nt, Homo sapiens
  misc_RNA (1)...(19): siRNA sense strand
ccaagaaggacauguguga

SEQ ID NO: 68107 - RNA, 19 nt, Homo sapiens
  misc_RNA (1)...(19): siRNA sense strand
ggaauagucaggacagguu

SEQ ID NO: 68108 - RNA, 19 nt, Homo sapiens
  misc_RNA (1)...(19): siRNA sense strand
cagagaagguuugcuggaa

SEQ ID NO: 68109 - RNA, 19 nt, Homo sapiens
  misc_RNA (1)...(19): siRNA sense strand
gccaggacuuacacguuua

SEQ ID NO: 68110 - RNA, 19 nt, Homo sapiens
  misc_RNA (1)...(19): siRNA sense strand
gagaagguuugcuggaaag

SEQ ID NO: 68111 - RNA, 19 nt, Homo sapiens
  misc_RNA (1)...(19): siRNA sense strand
uggacaagcuauaucagaa

SEQ ID NO: 68112 - RNA, 19 nt, Homo sapiens
  misc_RNA (1)...(19): siRNA sense strand
caucacgggugucgacuuc

SEQ ID NO: 68113 - RNA, 19 nt, Homo sapiens
  misc_RNA (1)...(19): siRNA sense strand
ugccaggacuuacacguuu

SEQ ID NO: 68114 - RNA, 19 nt, Homo sapiens
  misc_RNA (1)...(19): siRNA sense strand
agagaagguuugcuggaaa

SEQ ID NO: 68115 - RNA, 19 nt, Homo sapiens
  misc_RNA (1)...(19): siRNA sense strand
ggauggcacugcguaugaa

SEQ ID NO: 68116 - RNA, 19 nt, Homo sapiens
  misc_RNA (1)...(19): siRNA sense strand
gagcugugccgucccaaga

SEQ ID NO: 68117 - RNA, 19 nt, Homo sapiens
  misc_RNA (1)...(19): siRNA sense strand
ugugugaccucgaggaguu

SEQ ID NO: 68118 - RNA, 19 nt, Homo sapiens
  misc_RNA (1)...(19): siRNA sense strand
ugacauguguggcguucug

SEQ ID NO: 68119 - RNA, 19 nt, Homo sapiens
  misc_RNA (1)...(19): siRNA sense strand
caccaaagcaggucaucaa

SEQ ID NO: 68120 - RNA, 19 nt, Homo sapiens
  misc_RNA (1)...(19): siRNA sense strand
gacaagcuauaucagaaac

SEQ ID NO: 68121 - RNA, 19 nt, Homo sapiens
  misc_RNA (1)...(19): siRNA sense strand
gcaguaugaggucguguug

SEQ ID NO: 68122 - RNA, 19 nt, Homo sapiens
  misc_RNA (1)...(19): siRNA sense strand
caucaucgucuaccgcaaa

SEQ ID NO: 68123 - RNA, 19 nt, Homo sapiens
  misc_RNA (1)...(19): siRNA sense strand
caagcuauaucagaaacuc

SEQ ID NO: 68124 - RNA, 19 nt, Homo sapiens
  misc_RNA (1)...(19): siRNA sense strand
gccuggagauuuggaauag

SEQ ID NO: 68125 - RNA, 19 nt, Homo sapiens
  misc_RNA (1)...(19): siRNA sense strand
uggcaggcaucaucgucua

SEQ ID NO: 68126 - RNA, 19 nt, Homo sapiens
  misc_RNA (1)...(19): siRNA sense strand
ggccuggagauuuggaaua

SEQ ID NO: 68127 - RNA, 19 nt, Homo sapiens
  misc_RNA (1)...(19): siRNA sense strand
gaaccgcugcugcaacucu

SEQ ID NO: 68128 - RNA, 19 nt, Homo sapiens
  misc_RNA (1)...(19): siRNA sense strand
ggcggcaccugcaugacaa

SEQ ID NO: 68129 - RNA, 19 nt, Homo sapiens
  misc_RNA (1)...(19): siRNA sense strand
ugaaucacguggacaagcu

SEQ ID NO: 68130 - RNA, 19 nt, Homo sapiens
  misc_RNA (1)...(19): siRNA sense strand
gaagcagccgugcgucauc

SEQ ID NO: 68131 - RNA, 19 nt, Homo sapiens
  misc_RNA (1)...(19): siRNA sense strand
caaugcagaguuccagaug

SEQ ID NO: 68132 - RNA, 19 nt, Homo sapiens
  misc_RNA (1)...(19): siRNA sense strand
cggaaccgcugcugcaacu

SEQ ID NO: 68133 - RNA, 19 nt, Homo sapiens
  misc_RNA (1)...(19): siRNA sense strand
gaaucacguggacaagcua

SEQ ID NO: 68134 - RNA, 19 nt, Homo sapiens
  misc_RNA (1)...(19): siRNA sense strand
cguggacaaugcagaguuc

SEQ ID NO: 68135 - RNA, 19 nt, Homo sapiens
  misc_RNA (1)...(19): siRNA sense strand
gaagguuugcuggaaagga

SEQ ID NO: 68136 - RNA, 19 nt, Homo sapiens
  misc_RNA (1)...(19): siRNA sense strand
guggacaagcuauaucaga

SEQ ID NO: 68137 - RNA, 19 nt, Homo sapiens
  misc_RNA (1)...(19): siRNA sense strand
ucacguggacaagcuauau

SEQ ID NO: 68138 - RNA, 19 nt, Homo sapiens
  misc_RNA (1)...(19): siRNA sense strand
gcugugccgucccaagaag

SEQ ID NO: 68139 - RNA, 19 nt, Homo sapiens
  misc_RNA (1)...(19): siRNA sense strand
gaggauggcacugcguaug

SEQ ID NO: 68140 - RNA, 19 nt, Homo sapiens
  misc_RNA (1)...(19): siRNA sense strand
gccacaaccugggcaugga

SEQ ID NO: 68141 - RNA, 19 nt, Homo sapiens
  misc_RNA (1)...(19): siRNA sense strand
guuuacagauccagcaacu

SEQ ID NO: 68142 - RNA, 19 nt, Homo sapiens
  misc_RNA (1)...(19): siRNA sense strand
ugcuggagguggugaauca

SEQ ID NO: 68143 - RNA, 19 nt, Homo sapiens
  misc_RNA (1)...(19): siRNA sense strand
gcaccaaagcaggucauca

SEQ ID NO: 68144 - RNA, 19 nt, Homo sapiens
  misc_RNA (1)...(19): siRNA sense strand
gagcucugcccucccacuu

SEQ ID NO: 68145 - RNA, 19 nt, Homo sapiens
  misc_RNA (1)...(19): siRNA sense strand
ggccacagggcacaacuuc

SEQ ID NO: 68146 - RNA, 19 nt, Homo sapiens
  misc_RNA (1)...(19): siRNA sense strand
cuucuccuaugacauccua

SEQ ID NO: 68147 - RNA, 19 nt, Homo sapiens
  misc_RNA (1)...(19): siRNA sense strand
gcagcauuggcuccaguuu

SEQ ID NO: 68148 - RNA, 19 nt, Homo sapiens
  misc_RNA (1)...(19): siRNA sense strand
cuggagauuuggaauaguc

SEQ ID NO: 68149 - RNA, 19 nt, Homo sapiens
  misc_RNA (1)...(19): siRNA sense strand
uggugggccuggagauuug

SEQ ID NO: 68150 - RNA, 19 nt, Homo sapiens
  misc_RNA (1)...(19): siRNA sense strand
aggccuaccuggagagcuu

SEQ ID NO: 68151 - RNA, 19 nt, Homo sapiens
  misc_RNA (1)...(19): siRNA sense strand
gggcccucauggagcagua

SEQ ID NO: 68152 - RNA, 19 nt, Homo sapiens
  misc_RNA (1)...(19): siRNA sense strand
uguauguggucguggacaa

SEQ ID NO: 68153 - RNA, 19 nt, Homo sapiens
  misc_RNA (1)...(19): siRNA sense strand
ccuccucgguggcucugaa

SEQ ID NO: 68154 - RNA, 19 nt, Homo sapiens
  misc_RNA (1)...(19): siRNA sense strand
gaugaugcugccugcgauu

SEQ ID NO: 68155 - RNA, 19 nt, Homo sapiens
  misc_RNA (1)...(19): siRNA sense strand
cagcauuggcuccaguuuc

SEQ ID NO: 68156 - RNA, 19 nt, Homo sapiens
  misc_RNA (1)...(19): siRNA sense strand
gagggugagcuacguccuu

SEQ ID NO: 68157 - RNA, 19 nt, Homo sapiens
  misc_RNA (1)...(19): siRNA sense strand
gaguccugcuucuccuaug

SEQ ID NO: 68158 - RNA, 19 nt, Homo sapiens
  misc_RNA (1)...(19): siRNA sense strand
gguuccggcuacacagaga

SEQ ID NO: 68159 - RNA, 19 nt, Homo sapiens
  misc_RNA (1)...(19): siRNA sense strand
cccaaagguugcccugaag

SEQ ID NO: 68160 - RNA, 19 nt, Homo sapiens
  misc_RNA (1)...(19): siRNA sense strand
gguacagggcugacaugug

SEQ ID NO: 68161 - RNA, 19 nt, Homo sapiens
  misc_RNA (1)...(19): siRNA sense strand
aguccugcuucuccuauga

SEQ ID NO: 68162 - RNA, 19 nt, Homo sapiens
  misc_RNA (1)...(19): siRNA sense strand
gcuaauggcuggauuuauu

SEQ ID NO: 68163 - RNA, 19 nt, Homo sapiens
  misc_RNA (1)...(19): siRNA sense strand
gcagagagauauauuaaag

SEQ ID NO: 68164 - RNA, 19 nt, Homo sapiens
  misc_RNA (1)...(19): siRNA sense strand
acagauaccucaagaagaa

SEQ ID NO: 68165 - RNA, 19 nt, Homo sapiens
  misc_RNA (1)...(19): siRNA sense strand
gaaauggaaugguagaaca

SEQ ID NO: 68166 - RNA, 19 nt, Homo sapiens
  misc_RNA (1)...(19): siRNA sense strand
ggacaaacuuaacaacaau

SEQ ID NO: 68167 - RNA, 19 nt, Homo sapiens
  misc_RNA (1)...(19): siRNA sense strand
cccaaagucucucacauua

SEQ ID NO: 68168 - RNA, 19 nt, Homo sapiens
  misc_RNA (1)...(19): siRNA sense strand
uggcaaagaugauaaagaa

SEQ ID NO: 68169 - RNA, 19 nt, Homo sapiens
  misc_RNA (1)...(19): siRNA sense strand
uaacacagauaccucaaga

SEQ ID NO: 68170 - RNA, 19 nt, Homo sapiens
  misc_RNA (1)...(19): siRNA sense strand
gggacaaacuuaacaacaa

SEQ ID NO: 68171 - RNA, 19 nt, Homo sapiens
  misc_RNA (1)...(19): siRNA sense strand
gaaggauuaucuuacaaug

SEQ ID NO: 68172 - RNA, 19 nt, Homo sapiens
  misc_RNA (1)...(19): siRNA sense strand
cuacaaauccuuuccguuu

SEQ ID NO: 68173 - RNA, 19 nt, Homo sapiens
  misc_RNA (1)...(19): siRNA sense strand
uaucagacauuaugaagga

SEQ ID NO: 68174 - RNA, 19 nt, Homo sapiens
  misc_RNA (1)...(19): siRNA sense strand
gauauccagucauguuaaa

SEQ ID NO: 68175 - RNA, 19 nt, Homo sapiens
  misc_RNA (1)...(19): siRNA sense strand
ggaagaaaaugcaaacuga

SEQ ID NO: 68176 - RNA, 19 nt, Homo sapiens
  misc_RNA (1)...(19): siRNA sense strand
gaaucuggccaaccuauuu

SEQ ID NO: 68177 - RNA, 19 nt, Homo sapiens
  misc_RNA (1)...(19): siRNA sense strand
aaagagcagucucacauga

SEQ ID NO: 68178 - RNA, 19 nt, Homo sapiens
  misc_RNA (1)...(19): siRNA sense strand
gaacuaugggucucaugua

SEQ ID NO: 68179 - RNA, 19 nt, Homo sapiens
  misc_RNA (1)...(19): siRNA sense strand
aggaagcucuggaggaaua

SEQ ID NO: 68180 - RNA, 19 nt, Homo sapiens
  misc_RNA (1)...(19): siRNA sense strand
caaaguugccuccuccuaa

SEQ ID NO: 68181 - RNA, 19 nt, Homo sapiens
  misc_RNA (1)...(19): siRNA sense strand
agaacaaggugaagaaugu

SEQ ID NO: 68182 - RNA, 19 nt, Homo sapiens
  misc_RNA (1)...(19): siRNA sense strand
caaagucucucacauuacu

SEQ ID NO: 68183 - RNA, 19 nt, Homo sapiens
  misc_RNA (1)...(19): siRNA sense strand
gcagaucauucaguauuug

SEQ ID NO: 68184 - RNA, 19 nt, Homo sapiens
  misc_RNA (1)...(19): siRNA sense strand
ccaggagaaucuaagaauu

SEQ ID NO: 68185 - RNA, 19 nt, Homo sapiens
  misc_RNA (1)...(19): siRNA sense strand
gagaaggacccuacaaauc

SEQ ID NO: 68186 - RNA, 19 nt, Homo sapiens
  misc_RNA (1)...(19): siRNA sense strand
uggaagacauuucaaccua

SEQ ID NO: 68187 - RNA, 19 nt, Homo sapiens
  misc_RNA (1)...(19): siRNA sense strand
cagcagagagauauauuaa

SEQ ID NO: 68188 - RNA, 19 nt, Homo sapiens
  misc_RNA (1)...(19): siRNA sense strand
gaagaaguccuuaaacacu

SEQ ID NO: 68189 - RNA, 19 nt, Homo sapiens
  misc_RNA (1)...(19): siRNA sense strand
aagaagaaguccuuaaaca

SEQ ID NO: 68190 - RNA, 19 nt, Homo sapiens
  misc_RNA (1)...(19): siRNA sense strand
gcccagauauccagucaug

SEQ ID NO: 68191 - RNA, 19 nt, Homo sapiens
  misc_RNA (1)...(19): siRNA sense strand
cagacauuaugaaggauua

SEQ ID NO: 68192 - RNA, 19 nt, Homo sapiens
  misc_RNA (1)...(19): siRNA sense strand
aaaguugccuccuccuaaa

SEQ ID NO: 68193 - RNA, 19 nt, Homo sapiens
  misc_RNA (1)...(19): siRNA sense strand
gcaagggaaggaauaugua

SEQ ID NO: 68194 - RNA, 19 nt, Homo sapiens
  misc_RNA (1)...(19): siRNA sense strand
caggagaaucuaagaauuu

SEQ ID NO: 68195 - RNA, 19 nt, Homo sapiens
  misc_RNA (1)...(19): siRNA sense strand
cgagagaguuaucaaaugg

SEQ ID NO: 68196 - RNA, 19 nt, Homo sapiens
  misc_RNA (1)...(19): siRNA sense strand
ucaggaagcucuggaggaa

SEQ ID NO: 68197 - RNA, 19 nt, Homo sapiens
  misc_RNA (1)...(19): siRNA sense strand
gggaauugcucugaucaug

SEQ ID NO: 68198 - RNA, 19 nt, Homo sapiens
  misc_RNA (1)...(19): siRNA sense strand
ugagaaauauggcuuagag

SEQ ID NO: 68199 - RNA, 19 nt, Homo sapiens
  misc_RNA (1)...(19): siRNA sense strand
gauggaagauuugaaggau

SEQ ID NO: 68200 - RNA, 19 nt, Homo sapiens
  misc_RNA (1)...(19): siRNA sense strand
gaaugugauuguggcuaua

SEQ ID NO: 68201 - RNA, 19 nt, Homo sapiens
  misc_RNA (1)...(19): siRNA sense strand
ccauuucacucugucauuu

SEQ ID NO: 68202 - RNA, 19 nt, Homo sapiens
  misc_RNA (1)...(19): siRNA sense strand
agaccgaacucugccauuu

SEQ ID NO: 68203 - RNA, 19 nt, Homo sapiens
  misc_RNA (1)...(19): siRNA sense strand
cauguaugcuguaugaaga

SEQ ID NO: 68204 - RNA, 19 nt, Homo sapiens
  misc_RNA (1)...(19): siRNA sense strand
guaugggaauccuuuaaau

SEQ ID NO: 68205 - RNA, 19 nt, Homo sapiens
  misc_RNA (1)...(19): siRNA sense strand
gcauaagaaucaauacaac

SEQ ID NO: 68206 - RNA, 19 nt, Homo sapiens
  misc_RNA (1)...(19): siRNA sense strand
gugaaacgcauaagaauca

SEQ ID NO: 68207 - RNA, 19 nt, Homo sapiens
  misc_RNA (1)...(19): siRNA sense strand
ccacagacuucuccggaau

SEQ ID NO: 68208 - RNA, 19 nt, Homo sapiens
  misc_RNA (1)...(19): siRNA sense strand
caucugacccuaaaccaaa

SEQ ID NO: 68209 - RNA, 19 nt, Homo sapiens
  misc_RNA (1)...(19): siRNA sense strand
gggaaacagugcaguccaa

SEQ ID NO: 68210 - RNA, 19 nt, Homo sapiens
  misc_RNA (1)...(19): siRNA sense strand
caauacaacugcugaugag

SEQ ID NO: 68211 - RNA, 19 nt, Homo sapiens
  misc_RNA (1)...(19): siRNA sense strand
ccagauauccagucauguu

SEQ ID NO: 68212 - RNA, 19 nt, Homo sapiens
  misc_RNA (1)...(19): siRNA sense strand
guccagagcucuaugaaaa

SEQ ID NO: 68213 - RNA, 19 nt, Homo sapiens
  misc_RNA (1)...(19): siRNA sense strand
gaugacugguguagaggaa

SEQ ID NO: 68214 - RNA, 19 nt, Homo sapiens
  misc_RNA (1)...(19): siRNA sense strand
gaauugcucugaucaugcu

SEQ ID NO: 68215 - RNA, 19 nt, Homo sapiens
  misc_RNA (1)...(19): siRNA sense strand
aaaccaaacuucacagacu

SEQ ID NO: 68216 - RNA, 19 nt, Homo sapiens
  misc_RNA (1)...(19): siRNA sense strand
caagggaaggaauauguaa

SEQ ID NO: 68217 - RNA, 19 nt, Homo sapiens
  misc_RNA (1)...(19): siRNA sense strand
acacuggaauuauuacugu

SEQ ID NO: 68218 - RNA, 19 nt, Homo sapiens
  misc_RNA (1)...(19): siRNA sense strand
gugcagaucauucaguauu

SEQ ID NO: 68219 - RNA, 19 nt, Homo sapiens
  misc_RNA (1)...(19): siRNA sense strand
guaauaggcauacacaagu

SEQ ID NO: 68220 - RNA, 19 nt, Homo sapiens
  misc_RNA (1)...(19): siRNA sense strand
aggauuaucuuacaaugug

SEQ ID NO: 68221 - RNA, 19 nt, Homo sapiens
  misc_RNA (1)...(19): siRNA sense strand
agaagaacaugcugcuaau

SEQ ID NO: 68222 - RNA, 19 nt, Homo sapiens
  misc_RNA (1)...(19): siRNA sense strand
aagaagaacaugcugcuaa

SEQ ID NO: 68223 - RNA, 19 nt, Homo sapiens
  misc_RNA (1)...(19): siRNA sense strand
cagauauccagucauguua

SEQ ID NO: 68224 - RNA, 19 nt, Homo sapiens
  misc_RNA (1)...(19): siRNA sense strand
ccgagagaguuaucaaaug

SEQ ID NO: 68225 - RNA, 19 nt, Homo sapiens
  misc_RNA (1)...(19): siRNA sense strand
gaaaauggcaauuacauca

SEQ ID NO: 68226 - RNA, 19 nt, Homo sapiens
  misc_RNA (1)...(19): siRNA sense strand
cauguuaaagcgauugaua

SEQ ID NO: 68227 - RNA, 19 nt, Homo sapiens
  misc_RNA (1)...(19): siRNA sense strand
uggaagauuugaaggauuc

SEQ ID NO: 68228 - RNA, 19 nt, Homo sapiens
  misc_RNA (1)...(19): siRNA sense strand
ugccauguaugcuguauga

SEQ ID NO: 68229 - RNA, 19 nt, Homo sapiens
  misc_RNA (1)...(19): siRNA sense strand
gcacaccaggagaaucuaa

SEQ ID NO: 68230 - RNA, 19 nt, Homo sapiens
  misc_RNA (1)...(19): siRNA sense strand
cuugucagcuuuauauuca

SEQ ID NO: 68231 - RNA, 19 nt, Homo sapiens
  misc_RNA (1)...(19): siRNA sense strand
ccagcagagagauauauua

SEQ ID NO: 68232 - RNA, 19 nt, Homo sapiens
  misc_RNA (1)...(19): siRNA sense strand
ucauguaccucccaaaguc

SEQ ID NO: 68233 - RNA, 19 nt, Homo sapiens
  misc_RNA (1)...(19): siRNA sense strand
gguagaacaaggugaagaa

SEQ ID NO: 68234 - RNA, 19 nt, Homo sapiens
  misc_RNA (1)...(19): siRNA sense strand
ucaauacaacugcugauga

SEQ ID NO: 68235 - RNA, 19 nt, Homo sapiens
  misc_RNA (1)...(19): siRNA sense strand
uaucaaaugggacacauga

SEQ ID NO: 68236 - RNA, 19 nt, Homo sapiens
  misc_RNA (1)...(19): siRNA sense strand
gcucauuggugggcaguau

SEQ ID NO: 68237 - RNA, 19 nt, Homo sapiens
  misc_RNA (1)...(19): siRNA sense strand
gaagaagagaaacaacugu

SEQ ID NO: 68238 - RNA, 19 nt, Homo sapiens
  misc_RNA (1)...(19): siRNA sense strand
ucacgaaguuggacauaac

SEQ ID NO: 68239 - RNA, 19 nt, Homo sapiens
  misc_RNA (1)...(19): siRNA sense strand
caauuuaccagaccacaga

SEQ ID NO: 68240 - RNA, 19 nt, Homo sapiens
  misc_RNA (1)...(19): siRNA sense strand
caaguaguaauccaaaguu

SEQ ID NO: 68241 - RNA, 19 nt, Homo sapiens
  misc_RNA (1)...(19): siRNA sense strand
gcucugaucaugcuaaugg

SEQ ID NO: 68242 - RNA, 19 nt, Homo sapiens
  misc_RNA (1)...(19): siRNA sense strand
uaauaggcauacacaagug

SEQ ID NO: 68243 - RNA, 19 nt, Homo sapiens
  misc_RNA (1)...(19): siRNA sense strand
agaaugugauuguggcuau

SEQ ID NO: 68244 - RNA, 19 nt, Homo sapiens
  misc_RNA (1)...(19): siRNA sense strand
aguaaacucuauucagaug

SEQ ID NO: 68245 - RNA, 19 nt, Homo sapiens
  misc_RNA (1)...(19): siRNA sense strand
aaauggcaauuacaucaug

SEQ ID NO: 68246 - RNA, 19 nt, Homo sapiens
  misc_RNA (1)...(19): siRNA sense strand
ucaaaugggacacaugaga

SEQ ID NO: 68247 - RNA, 19 nt, Homo sapiens
  misc_RNA (1)...(19): siRNA sense strand
ccacuuccaggcacuuuaa

SEQ ID NO: 68248 - RNA, 19 nt, Homo sapiens
  misc_RNA (1)...(19): siRNA sense strand
ggcuggauuuauuaagaua

SEQ ID NO: 68249 - RNA, 19 nt, Homo sapiens
  misc_RNA (1)...(19): siRNA sense strand
gcaacgauuuuagagguua

SEQ ID NO: 68250 - RNA, 19 nt, Homo sapiens
  misc_RNA (1)...(19): siRNA sense strand
gcuauagugaccaguguaa

SEQ ID NO: 68251 - RNA, 19 nt, Homo sapiens
  misc_RNA (1)...(19): siRNA sense strand
agaaauauaagccaaguuc

SEQ ID NO: 68252 - RNA, 19 nt, Homo sapiens
  misc_RNA (1)...(19): siRNA sense strand
caauaaauucucacucugu

SEQ ID NO: 68253 - RNA, 19 nt, Homo sapiens
  misc_RNA (1)...(19): siRNA sense strand
ccaugggucuguuauugau

SEQ ID NO: 68254 - RNA, 19 nt, Homo sapiens
  misc_RNA (1)...(19): siRNA sense strand
auuaagauaugcaguguuc

SEQ ID NO: 68255 - RNA, 19 nt, Homo sapiens
  misc_RNA (1)...(19): siRNA sense strand
caugaugacuacuguuugg

SEQ ID NO: 68256 - RNA, 19 nt, Homo sapiens
  misc_RNA (1)...(19): siRNA sense strand
ggaauuauuacuguucaga

SEQ ID NO: 68257 - RNA, 19 nt, Homo sapiens
  misc_RNA (1)...(19): siRNA sense strand
uaaacucuauucagauggu

SEQ ID NO: 68258 - RNA, 19 nt, Homo sapiens
  misc_RNA (1)...(19): siRNA sense strand
agagguuacugugauguuu

SEQ ID NO: 68259 - RNA, 19 nt, Homo sapiens
  misc_RNA (1)...(19): siRNA sense strand
gaaugcugcuucgaugcaa

SEQ ID NO: 68260 - RNA, 19 nt, Homo sapiens
  misc_RNA (1)...(19): siRNA sense strand
gagaagaagagaaacaacu

SEQ ID NO: 68261 - RNA, 19 nt, Homo sapiens
  misc_RNA (1)...(19): siRNA sense strand
ugauaccucucauauuuac

SEQ ID NO: 68262 - RNA, 19 nt, Homo sapiens
  misc_RNA (1)...(19): siRNA sense strand
uuacuacgcuccaagauua

SEQ ID NO: 68263 - RNA, 19 nt, Homo sapiens
  misc_RNA (1)...(19): siRNA sense strand
gaaggagaauguccaguuu

SEQ ID NO: 68264 - RNA, 19 nt, Homo sapiens
  misc_RNA (1)...(19): siRNA sense strand
auacacaacuugagcuuua

SEQ ID NO: 68265 - RNA, 19 nt, Homo sapiens
  misc_RNA (1)...(19): siRNA sense strand
gcccaggacucaaguauga

SEQ ID NO: 68266 - RNA, 19 nt, Homo sapiens
  misc_RNA (1)...(19): siRNA sense strand
gcaauggccacuccaagua

SEQ ID NO: 68267 - RNA, 19 nt, Homo sapiens
  misc_RNA (1)...(19): siRNA sense strand
ggauauagaagaugaagaa

SEQ ID NO: 68268 - RNA, 19 nt, Homo sapiens
  misc_RNA (1)...(19): siRNA sense strand
ggagauccuugcucagauu

SEQ ID NO: 68269 - RNA, 19 nt, Homo sapiens
  misc_RNA (1)...(19): siRNA sense strand
gauagacacccaaaucgua

SEQ ID NO: 68270 - RNA, 19 nt, Homo sapiens
  misc_RNA (1)...(19): siRNA sense strand
gcucucagcucuccaaugg

SEQ ID NO: 68271 - RNA, 19 nt, Homo sapiens
  misc_RNA (1)...(19): siRNA sense strand
gagaaggccuugaggucuu

SEQ ID NO: 68272 - RNA, 19 nt, Homo sapiens
  misc_RNA (1)...(19): siRNA sense strand
ggaagaaucccgugaugau

SEQ ID NO: 68273 - RNA, 19 nt, Homo sapiens
  misc_RNA (1)...(19): siRNA sense strand
gcucagauuucuuuauaca

SEQ ID NO: 68274 - RNA, 19 nt, Homo sapiens
  misc_RNA (1)...(19): siRNA sense strand
gcacugaugugaaggaaaa

SEQ ID NO: 68275 - RNA, 19 nt, Homo sapiens
  misc_RNA (1)...(19): siRNA sense strand
cagcggaucuccaacauag

SEQ ID NO: 68276 - RNA, 19 nt, Homo sapiens
  misc_RNA (1)...(19): siRNA sense strand
caacuugagcuuuacuuaa

SEQ ID NO: 68277 - RNA, 19 nt, Homo sapiens
  misc_RNA (1)...(19): siRNA sense strand
gaucguggccuugcauuaa

SEQ ID NO: 68278 - RNA, 19 nt, Homo sapiens
  misc_RNA (1)...(19): siRNA sense strand
gccaagagcuucgucaugu

SEQ ID NO: 68279 - RNA, 19 nt, Homo sapiens
  misc_RNA (1)...(19): siRNA sense strand
gaccucagcuugucugcuu

SEQ ID NO: 68280 - RNA, 19 nt, Homo sapiens
  misc_RNA (1)...(19): siRNA sense strand
gcagauagacacccaaauc

SEQ ID NO: 68281 - RNA, 19 nt, Homo sapiens
  misc_RNA (1)...(19): siRNA sense strand
caacaagccuuugcucagu

SEQ ID NO: 68282 - RNA, 19 nt, Homo sapiens
  misc_RNA (1)...(19): siRNA sense strand
ggaggugaauggccagguu

SEQ ID NO: 68283 - RNA, 19 nt, Homo sapiens
  misc_RNA (1)...(19): siRNA sense strand
caagguucccucccacuua

SEQ ID NO: 68284 - RNA, 19 nt, Homo sapiens
  misc_RNA (1)...(19): siRNA sense strand
gaacugcgcccaggacuca

SEQ ID NO: 68285 - RNA, 19 nt, Homo sapiens
  misc_RNA (1)...(19): siRNA sense strand
gguuuaggcugaaggagaa

SEQ ID NO: 68286 - RNA, 19 nt, Homo sapiens
  misc_RNA (1)...(19): siRNA sense strand
ggucguggauggucaguuc

SEQ ID NO: 68287 - RNA, 19 nt, Homo sapiens
  misc_RNA (1)...(19): siRNA sense strand
ggaggacccugucugucaa

SEQ ID NO: 68288 - RNA, 19 nt, Homo sapiens
  misc_RNA (1)...(19): siRNA sense strand
ccaaguaccgccugaagaa

SEQ ID NO: 68289 - RNA, 19 nt, Homo sapiens
  misc_RNA (1)...(19): siRNA sense strand
ggugauaaguguuucuaca

SEQ ID NO: 68290 - RNA, 19 nt, Homo sapiens
  misc_RNA (1)...(19): siRNA sense strand
acacggacuucacaucuga

SEQ ID NO: 68291 - RNA, 19 nt, Homo sapiens
  misc_RNA (1)...(19): siRNA sense strand
cagcagcacugaugugaag

SEQ ID NO: 68292 - RNA, 19 nt, Homo sapiens
  misc_RNA (1)...(19): siRNA sense strand
gacacgcucuucaaugguu

SEQ ID NO: 68293 - RNA, 19 nt, Homo sapiens
  misc_RNA (1)...(19): siRNA sense strand
gcucuggucccacaaagaa

SEQ ID NO: 68294 - RNA, 19 nt, Homo sapiens
  misc_RNA (1)...(19): siRNA sense strand
gagaauguccaguuucauc

SEQ ID NO: 68295 - RNA, 19 nt, Homo sapiens
  misc_RNA (1)...(19): siRNA sense strand
gauggucaguucuuugaag

SEQ ID NO: 68296 - RNA, 19 nt, Homo sapiens
  misc_RNA (1)...(19): siRNA sense strand
guaggcgacuccgcuauug

SEQ ID NO: 68297 - RNA, 19 nt, Homo sapiens
  misc_RNA (1)...(19): siRNA sense strand
caucagcaaugcagaagca

SEQ ID NO: 68298 - RNA, 19 nt, Homo sapiens
  misc_RNA (1)...(19): siRNA sense strand
gggaggacccugucuguca

SEQ ID NO: 68299 - RNA, 19 nt, Homo sapiens
  misc_RNA (1)...(19): siRNA sense strand
gaggacagcuacggaccaa

SEQ ID NO: 68300 - RNA, 19 nt, Homo sapiens
  misc_RNA (1)...(19): siRNA sense strand
uaaagaugccaaggugaua

SEQ ID NO: 68301 - RNA, 19 nt, Homo sapiens
  misc_RNA (1)...(19): siRNA sense strand
ugaugcagcugaaugagau

SEQ ID NO: 68302 - RNA, 19 nt, Homo sapiens
  misc_RNA (1)...(19): siRNA sense strand
aggcacagauguuaaagau

SEQ ID NO: 68303 - RNA, 19 nt, Homo sapiens
  misc_RNA (1)...(19): siRNA sense strand
ugaaggagaauguccaguu

SEQ ID NO: 68304 - RNA, 19 nt, Homo sapiens
  misc_RNA (1)...(19): siRNA sense strand
caacacggacuucacaucu

SEQ ID NO: 68305 - RNA, 19 nt, Homo sapiens
  misc_RNA (1)...(19): siRNA sense strand
aguccaagcuggcggcaaa

SEQ ID NO: 68306 - RNA, 19 nt, Homo sapiens
  misc_RNA (1)...(19): siRNA sense strand
gccaaggugauaaguguuu

SEQ ID NO: 68307 - RNA, 19 nt, Homo sapiens
  misc_RNA (1)...(19): siRNA sense strand
gcacgcgccuuuguuuguc

SEQ ID NO: 68308 - RNA, 19 nt, Homo sapiens
  misc_RNA (1)...(19): siRNA sense strand
gcaagguucccucccacuu

SEQ ID NO: 68309 - RNA, 19 nt, Homo sapiens
  misc_RNA (1)...(19): siRNA sense strand
guccugcagugacaagauu

SEQ ID NO: 68310 - RNA, 19 nt, Homo sapiens
  misc_RNA (1)...(19): siRNA sense strand
gaagaaucccgugaugauc

SEQ ID NO: 68311 - RNA, 19 nt, Homo sapiens
  misc_RNA (1)...(19): siRNA sense strand
acaacuugagcuuuacuua

SEQ ID NO: 68312 - RNA, 19 nt, Homo sapiens
  misc_RNA (1)...(19): siRNA sense strand
gguaggcgacuccgcuauu

SEQ ID NO: 68313 - RNA, 19 nt, Homo sapiens
  misc_RNA (1)...(19): siRNA sense strand
uaaagcaagaggacagcua

SEQ ID NO: 68314 - RNA, 19 nt, Homo sapiens
  misc_RNA (1)...(19): siRNA sense strand
aggagaauguccaguuuca

SEQ ID NO: 68315 - RNA, 19 nt, Homo sapiens
  misc_RNA (1)...(19): siRNA sense strand
ugaggucuuucguucaguu

SEQ ID NO: 68316 - RNA, 19 nt, Homo sapiens
  misc_RNA (1)...(19): siRNA sense strand
uguguaagcacgcguugua

SEQ ID NO: 68317 - RNA, 19 nt, Homo sapiens
  misc_RNA (1)...(19): siRNA sense strand
gauccuugcucagauuucu

SEQ ID NO: 68318 - RNA, 19 nt, Homo sapiens
  misc_RNA (1)...(19): siRNA sense strand
gccagccuauucccaguga

SEQ ID NO: 68319 - RNA, 19 nt, Homo sapiens
  misc_RNA (1)...(19): siRNA sense strand
ggacagcuacggaccaaaa

SEQ ID NO: 68320 - RNA, 19 nt, Homo sapiens
  misc_RNA (1)...(19): siRNA sense strand
agaaggccuugaggucuuu

SEQ ID NO: 68321 - RNA, 19 nt, Homo sapiens
  misc_RNA (1)...(19): siRNA sense strand
auaaguguuucuacaggaa

SEQ ID NO: 68322 - RNA, 19 nt, Homo sapiens
  misc_RNA (1)...(19): siRNA sense strand
gggaugacuccuucaguuc

SEQ ID NO: 68323 - RNA, 19 nt, Homo sapiens
  misc_RNA (1)...(19): siRNA sense strand
gaggugaauggccagguuu

SEQ ID NO: 68324 - RNA, 19 nt, Homo sapiens
  misc_RNA (1)...(19): siRNA sense strand
guaagcacgcguuguacug

SEQ ID NO: 68325 - RNA, 19 nt, Homo sapiens
  misc_RNA (1)...(19): siRNA sense strand
ccacgacugggaaggauga

SEQ ID NO: 68326 - RNA, 19 nt, Homo sapiens
  misc_RNA (1)...(19): siRNA sense strand
gagauccuugcucagauuu

SEQ ID NO: 68327 - RNA, 19 nt, Homo sapiens
  misc_RNA (1)...(19): siRNA sense strand
ggggaugacuccuucaguu

SEQ ID NO: 68328 - RNA, 19 nt, Homo sapiens
  misc_RNA (1)...(19): siRNA sense strand
cugacacgcucuucaaugg

SEQ ID NO: 68329 - RNA, 19 nt, Homo sapiens
  misc_RNA (1)...(19): siRNA sense strand
ccaagagcuucgucauguc

SEQ ID NO: 68330 - RNA, 19 nt, Homo sapiens
  misc_RNA (1)...(19): siRNA sense strand
caaguaccgccugaagaaa

SEQ ID NO: 68331 - RNA, 19 nt, Homo sapiens
  misc_RNA (1)...(19): siRNA sense strand
aaagaugccaaggugauaa

SEQ ID NO: 68332 - RNA, 19 nt, Homo sapiens
  misc_RNA (1)...(19): siRNA sense strand
gcauuuaccgcagguuuua

SEQ ID NO: 68333 - RNA, 19 nt, Homo sapiens
  misc_RNA (1)...(19): siRNA sense strand
gaagaugaagaaaacauga

SEQ ID NO: 68334 - RNA, 19 nt, Homo sapiens
  misc_RNA (1)...(19): siRNA sense strand
gcagcugaaugagaucaag

SEQ ID NO: 68335 - RNA, 19 nt, Homo sapiens
  misc_RNA (1)...(19): siRNA sense strand
gaugacuccuucaguucca

SEQ ID NO: 68336 - RNA, 19 nt, Homo sapiens
  misc_RNA (1)...(19): siRNA sense strand
cagcacugaugugaaggaa

SEQ ID NO: 68337 - RNA, 19 nt, Homo sapiens
  misc_RNA (1)...(19): siRNA sense strand
acacccaaaucguaaagca

SEQ ID NO: 68338 - RNA, 19 nt, Homo sapiens
  misc_RNA (1)...(19): siRNA sense strand
auagacacccaaaucguaa

SEQ ID NO: 68339 - RNA, 19 nt, Homo sapiens
  misc_RNA (1)...(19): siRNA sense strand
cagcagauagacacccaaa

SEQ ID NO: 68340 - RNA, 19 nt, Homo sapiens
  misc_RNA (1)...(19): siRNA sense strand
ugaccugaccgacaacuuc

SEQ ID NO: 68341 - RNA, 19 nt, Homo sapiens
  misc_RNA (1)...(19): siRNA sense strand
agaaucccgugaugaucuu

SEQ ID NO: 68342 - RNA, 19 nt, Homo sapiens
  misc_RNA (1)...(19): siRNA sense strand
ugacaacaggcacagaugu

SEQ ID NO: 68343 - RNA, 19 nt, Homo sapiens
  misc_RNA (1)...(19): siRNA sense strand
caucugaccaggccgacuu

SEQ ID NO: 68344 - RNA, 19 nt, Homo sapiens
  misc_RNA (1)...(19): siRNA sense strand
ccaagaacgcccugaugca

SEQ ID NO: 68345 - RNA, 19 nt, Homo sapiens
  misc_RNA (1)...(19): siRNA sense strand
gaagaaaacaugaguucca

SEQ ID NO: 68346 - RNA, 19 nt, Homo sapiens
  misc_RNA (1)...(19): siRNA sense strand
uuaaagaugccaaggugau

SEQ ID NO: 68347 - RNA, 19 nt, Homo sapiens
  misc_RNA (1)...(19): siRNA sense strand
cguggauggucaguucuuu

SEQ ID NO: 68348 - RNA, 19 nt, Homo sapiens
  misc_RNA (1)...(19): siRNA sense strand
ucaugucuguggaggugaa

SEQ ID NO: 68349 - RNA, 19 nt, Homo sapiens
  misc_RNA (1)...(19): siRNA sense strand
ggaccugccaccucucuac

SEQ ID NO: 68350 - RNA, 19 nt, Homo sapiens
  misc_RNA (1)...(19): siRNA sense strand
ccauuuacuucucgagcau

SEQ ID NO: 68351 - RNA, 19 nt, Homo sapiens
  misc_RNA (1)...(19): siRNA sense strand
ccaaggugauaaguguuuc

SEQ ID NO: 68352 - RNA, 19 nt, Homo sapiens
  misc_RNA (1)...(19): siRNA sense strand
caagagcuucgucaugucu

SEQ ID NO: 68353 - RNA, 19 nt, Homo sapiens
  misc_RNA (1)...(19): siRNA sense strand
ccagcggaucuccaacaua

SEQ ID NO: 68354 - RNA, 19 nt, Homo sapiens
  misc_RNA (1)...(19): siRNA sense strand
gcagcaauggccacuccaa

SEQ ID NO: 68355 - RNA, 19 nt, Homo sapiens
  misc_RNA (1)...(19): siRNA sense strand
cggagauccuugcucagau

SEQ ID NO: 68356 - RNA, 19 nt, Homo sapiens
  misc_RNA (1)...(19): siRNA sense strand
uuggugaccugaccgacaa

SEQ ID NO: 68357 - RNA, 19 nt, Homo sapiens
  misc_RNA (1)...(19): siRNA sense strand
uggauggucaguucuuuga

SEQ ID NO: 68358 - RNA, 19 nt, Homo sapiens
  misc_RNA (1)...(19): siRNA sense strand
ugaucguggccuugcauua

SEQ ID NO: 68359 - RNA, 19 nt, Homo sapiens
  misc_RNA (1)...(19): siRNA sense strand
ucguggagcccauuuacuu

SEQ ID NO: 68360 - RNA, 19 nt, Homo sapiens
  misc_RNA (1)...(19): siRNA sense strand
ucaagccugguuugcagua

SEQ ID NO: 68361 - RNA, 19 nt, Homo sapiens
  misc_RNA (1)...(19): siRNA sense strand
gaauguccaguuucaucug

SEQ ID NO: 68362 - RNA, 19 nt, Homo sapiens
  misc_RNA (1)...(19): siRNA sense strand
uuacuacgcuccaagauua

SEQ ID NO: 68363 - RNA, 19 nt, Homo sapiens
  misc_RNA (1)...(19): siRNA sense strand
gaaggagaauguccaguuu

SEQ ID NO: 68364 - RNA, 19 nt, Homo sapiens
  misc_RNA (1)...(19): siRNA sense strand
auacacaacuugagcuuua

SEQ ID NO: 68365 - RNA, 19 nt, Homo sapiens
  misc_RNA (1)...(19): siRNA sense strand
gcccaggacucaaguauga

SEQ ID NO: 68366 - RNA, 19 nt, Homo sapiens
  misc_RNA (1)...(19): siRNA sense strand
gcaauggccacuccaagua

SEQ ID NO: 68367 - RNA, 19 nt, Homo sapiens
  misc_RNA (1)...(19): siRNA sense strand
ggauauagaagaugaagaa

SEQ ID NO: 68368 - RNA, 19 nt, Homo sapiens
  misc_RNA (1)...(19): siRNA sense strand
ggagauccuugcucagauu

SEQ ID NO: 68369 - RNA, 19 nt, Homo sapiens
  misc_RNA (1)...(19): siRNA sense strand
gauagacacccaaaucgua

SEQ ID NO: 68370 - RNA, 19 nt, Homo sapiens
  misc_RNA (1)...(19): siRNA sense strand
gcucucagcucuccaaugg

SEQ ID NO: 68371 - RNA, 19 nt, Homo sapiens
  misc_RNA (1)...(19): siRNA sense strand
gagaaggccuugaggucuu

SEQ ID NO: 68372 - RNA, 19 nt, Homo sapiens
  misc_RNA (1)...(19): siRNA sense strand
ggaagaaucccgugaugau

SEQ ID NO: 68373 - RNA, 19 nt, Homo sapiens
  misc_RNA (1)...(19): siRNA sense strand
gcucagauuucuuuauaca

SEQ ID NO: 68374 - RNA, 19 nt, Homo sapiens
  misc_RNA (1)...(19): siRNA sense strand
gcacugaugugaaggaaaa

SEQ ID NO: 68375 - RNA, 19 nt, Homo sapiens
  misc_RNA (1)...(19): siRNA sense strand
cagcggaucuccaacauag

SEQ ID NO: 68376 - RNA, 19 nt, Homo sapiens
  misc_RNA (1)...(19): siRNA sense strand
caacuugagcuuuacuuaa

SEQ ID NO: 68377 - RNA, 19 nt, Homo sapiens
  misc_RNA (1)...(19): siRNA sense strand
gaucguggccuugcauuaa

SEQ ID NO: 68378 - RNA, 19 nt, Homo sapiens
  misc_RNA (1)...(19): siRNA sense strand
gccaagagcuucgucaugu

SEQ ID NO: 68379 - RNA, 19 nt, Homo sapiens
  misc_RNA (1)...(19): siRNA sense strand
gaccucagcuugucugcuu

SEQ ID NO: 68380 - RNA, 19 nt, Homo sapiens
  misc_RNA (1)...(19): siRNA sense strand
gcagauagacacccaaauc

SEQ ID NO: 68381 - RNA, 19 nt, Homo sapiens
  misc_RNA (1)...(19): siRNA sense strand
caacaagccuuugcucagu

SEQ ID NO: 68382 - RNA, 19 nt, Homo sapiens
  misc_RNA (1)...(19): siRNA sense strand
ggaggugaauggccagguu

SEQ ID NO: 68383 - RNA, 19 nt, Homo sapiens
  misc_RNA (1)...(19): siRNA sense strand
caagguucccucccacuua

SEQ ID NO: 68384 - RNA, 19 nt, Homo sapiens
  misc_RNA (1)...(19): siRNA sense strand
gaacugcgcccaggacuca

SEQ ID NO: 68385 - RNA, 19 nt, Homo sapiens
  misc_RNA (1)...(19): siRNA sense strand
gguuuaggcugaaggagaa

SEQ ID NO: 68386 - RNA, 19 nt, Homo sapiens
  misc_RNA (1)...(19): siRNA sense strand
ggucguggauggucaguuc

SEQ ID NO: 68387 - RNA, 19 nt, Homo sapiens
  misc_RNA (1)...(19): siRNA sense strand
ggaggacccugucugucaa

SEQ ID NO: 68388 - RNA, 19 nt, Homo sapiens
  misc_RNA (1)...(19): siRNA sense strand
ccaaguaccgccugaagaa

SEQ ID NO: 68389 - RNA, 19 nt, Homo sapiens
  misc_RNA (1)...(19): siRNA sense strand
ggugauaaguguuucuaca

SEQ ID NO: 68390 - RNA, 19 nt, Homo sapiens
  misc_RNA (1)...(19): siRNA sense strand
acacggacuucacaucuga

SEQ ID NO: 68391 - RNA, 19 nt, Homo sapiens
  misc_RNA (1)...(19): siRNA sense strand
cagcagcacugaugugaag

SEQ ID NO: 68392 - RNA, 19 nt, Homo sapiens
  misc_RNA (1)...(19): siRNA sense strand
gacacgcucuucaaugguu

SEQ ID NO: 68393 - RNA, 19 nt, Homo sapiens
  misc_RNA (1)...(19): siRNA sense strand
gcucuggucccacaaagaa

SEQ ID NO: 68394 - RNA, 19 nt, Homo sapiens
  misc_RNA (1)...(19): siRNA sense strand
gagaauguccaguuucauc

SEQ ID NO: 68395 - RNA, 19 nt, Homo sapiens
  misc_RNA (1)...(19): siRNA sense strand
gauggucaguucuuugaag

SEQ ID NO: 68396 - RNA, 19 nt, Homo sapiens
  misc_RNA (1)...(19): siRNA sense strand
guaggcgacuccgcuauug

SEQ ID NO: 68397 - RNA, 19 nt, Homo sapiens
  misc_RNA (1)...(19): siRNA sense strand
caucagcaaugcagaagca

SEQ ID NO: 68398 - RNA, 19 nt, Homo sapiens
  misc_RNA (1)...(19): siRNA sense strand
gggaggacccugucuguca

SEQ ID NO: 68399 - RNA, 19 nt, Homo sapiens
  misc_RNA (1)...(19): siRNA sense strand
gaggacagcuacggaccaa

SEQ ID NO: 68400 - RNA, 19 nt, Homo sapiens
  misc_RNA (1)...(19): siRNA sense strand
uaaagaugccaaggugaua

SEQ ID NO: 68401 - RNA, 19 nt, Homo sapiens
  misc_RNA (1)...(19): siRNA sense strand
ugaugcagcugaaugagau

SEQ ID NO: 68402 - RNA, 19 nt, Homo sapiens
  misc_RNA (1)...(19): siRNA sense strand
aggcacagauguuaaagau

SEQ ID NO: 68403 - RNA, 19 nt, Homo sapiens
  misc_RNA (1)...(19): siRNA sense strand
ugaaggagaauguccaguu

SEQ ID NO: 68404 - RNA, 19 nt, Homo sapiens
  misc_RNA (1)...(19): siRNA sense strand
caacacggacuucacaucu

SEQ ID NO: 68405 - RNA, 19 nt, Homo sapiens
  misc_RNA (1)...(19): siRNA sense strand
aguccaagcuggcggcaaa

SEQ ID NO: 68406 - RNA, 19 nt, Homo sapiens
  misc_RNA (1)...(19): siRNA sense strand
gccaaggugauaaguguuu

SEQ ID NO: 68407 - RNA, 19 nt, Homo sapiens
  misc_RNA (1)...(19): siRNA sense strand
gcacgcgccuuuguuuguc

SEQ ID NO: 68408 - RNA, 19 nt, Homo sapiens
  misc_RNA (1)...(19): siRNA sense strand
gcaagguucccucccacuu

SEQ ID NO: 68409 - RNA, 19 nt, Homo sapiens
  misc_RNA (1)...(19): siRNA sense strand
guccugcagugacaagauu

SEQ ID NO: 68410 - RNA, 19 nt, Homo sapiens
  misc_RNA (1)...(19): siRNA sense strand
gaagaaucccgugaugauc

SEQ ID NO: 68411 - RNA, 19 nt, Homo sapiens
  misc_RNA (1)...(19): siRNA sense strand
acaacuugagcuuuacuua

SEQ ID NO: 68412 - RNA, 19 nt, Homo sapiens
  misc_RNA (1)...(19): siRNA sense strand
gguaggcgacuccgcuauu

SEQ ID NO: 68413 - RNA, 19 nt, Homo sapiens
  misc_RNA (1)...(19): siRNA sense strand
uaaagcaagaggacagcua

SEQ ID NO: 68414 - RNA, 19 nt, Homo sapiens
  misc_RNA (1)...(19): siRNA sense strand
aggagaauguccaguuuca

SEQ ID NO: 68415 - RNA, 19 nt, Homo sapiens
  misc_RNA (1)...(19): siRNA sense strand
ugaggucuuucguucaguu

SEQ ID NO: 68416 - RNA, 19 nt, Homo sapiens
  misc_RNA (1)...(19): siRNA sense strand
uguguaagcacgcguugua

SEQ ID NO: 68417 - RNA, 19 nt, Homo sapiens
  misc_RNA (1)...(19): siRNA sense strand
gauccuugcucagauuucu

SEQ ID NO: 68418 - RNA, 19 nt, Homo sapiens
  misc_RNA (1)...(19): siRNA sense strand
gccagccuauucccaguga

SEQ ID NO: 68419 - RNA, 19 nt, Homo sapiens
  misc_RNA (1)...(19): siRNA sense strand
ggacagcuacggaccaaaa

SEQ ID NO: 68420 - RNA, 19 nt, Homo sapiens
  misc_RNA (1)...(19): siRNA sense strand
agaaggccuugaggucuuu

SEQ ID NO: 68421 - RNA, 19 nt, Homo sapiens
  misc_RNA (1)...(19): siRNA sense strand
auaaguguuucuacaggaa

SEQ ID NO: 68422 - RNA, 19 nt, Homo sapiens
  misc_RNA (1)...(19): siRNA sense strand
gggaugacuccuucaguuc

SEQ ID NO: 68423 - RNA, 19 nt, Homo sapiens
  misc_RNA (1)...(19): siRNA sense strand
gaggugaauggccagguuu

SEQ ID NO: 68424 - RNA, 19 nt, Homo sapiens
  misc_RNA (1)...(19): siRNA sense strand
guaagcacgcguuguacug

SEQ ID NO: 68425 - RNA, 19 nt, Homo sapiens
  misc_RNA (1)...(19): siRNA sense strand
ccacgacugggaaggauga

SEQ ID NO: 68426 - RNA, 19 nt, Homo sapiens
  misc_RNA (1)...(19): siRNA sense strand
gagauccuugcucagauuu

SEQ ID NO: 68427 - RNA, 19 nt, Homo sapiens
  misc_RNA (1)...(19): siRNA sense strand
ggggaugacuccuucaguu

SEQ ID NO: 68428 - RNA, 19 nt, Homo sapiens
  misc_RNA (1)...(19): siRNA sense strand
cugacacgcucuucaaugg

SEQ ID NO: 68429 - RNA, 19 nt, Homo sapiens
  misc_RNA (1)...(19): siRNA sense strand
ccaagagcuucgucauguc

SEQ ID NO: 68430 - RNA, 19 nt, Homo sapiens
  misc_RNA (1)...(19): siRNA sense strand
caaguaccgccugaagaaa

SEQ ID NO: 68431 - RNA, 19 nt, Homo sapiens
  misc_RNA (1)...(19): siRNA sense strand
aaagaugccaaggugauaa

SEQ ID NO: 68432 - RNA, 19 nt, Homo sapiens
  misc_RNA (1)...(19): siRNA sense strand
gcauuuaccgcagguuuua

SEQ ID NO: 68433 - RNA, 19 nt, Homo sapiens
  misc_RNA (1)...(19): siRNA sense strand
gaagaugaagaaaacauga

SEQ ID NO: 68434 - RNA, 19 nt, Homo sapiens
  misc_RNA (1)...(19): siRNA sense strand
gcagcugaaugagaucaag

SEQ ID NO: 68435 - RNA, 19 nt, Homo sapiens
  misc_RNA (1)...(19): siRNA sense strand
gaugacuccuucaguucca

SEQ ID NO: 68436 - RNA, 19 nt, Homo sapiens
  misc_RNA (1)...(19): siRNA sense strand
cagcacugaugugaaggaa

SEQ ID NO: 68437 - RNA, 19 nt, Homo sapiens
  misc_RNA (1)...(19): siRNA sense strand
acacccaaaucguaaagca

SEQ ID NO: 68438 - RNA, 19 nt, Homo sapiens
  misc_RNA (1)...(19): siRNA sense strand
auagacacccaaaucguaa

SEQ ID NO: 68439 - RNA, 19 nt, Homo sapiens
  misc_RNA (1)...(19): siRNA sense strand
cagcagauagacacccaaa

SEQ ID NO: 68440 - RNA, 19 nt, Homo sapiens
  misc_RNA (1)...(19): siRNA sense strand
ugaccugaccgacaacuuc

SEQ ID NO: 68441 - RNA, 19 nt, Homo sapiens
  misc_RNA (1)...(19): siRNA sense strand
agaaucccgugaugaucuu

SEQ ID NO: 68442 - RNA, 19 nt, Homo sapiens
  misc_RNA (1)...(19): siRNA sense strand
ugacaacaggcacagaugu

SEQ ID NO: 68443 - RNA, 19 nt, Homo sapiens
  misc_RNA (1)...(19): siRNA sense strand
caucugaccaggccgacuu

SEQ ID NO: 68444 - RNA, 19 nt, Homo sapiens
  misc_RNA (1)...(19): siRNA sense strand
ccaagaacgcccugaugca

SEQ ID NO: 68445 - RNA, 19 nt, Homo sapiens
  misc_RNA (1)...(19): siRNA sense strand
gaagaaaacaugaguucca

SEQ ID NO: 68446 - RNA, 19 nt, Homo sapiens
  misc_RNA (1)...(19): siRNA sense strand
uuaaagaugccaaggugau

SEQ ID NO: 68447 - RNA, 19 nt, Homo sapiens
  misc_RNA (1)...(19): siRNA sense strand
cguggauggucaguucuuu

SEQ ID NO: 68448 - RNA, 19 nt, Homo sapiens
  misc_RNA (1)...(19): siRNA sense strand
ucaugucuguggaggugaa

SEQ ID NO: 68449 - RNA, 19 nt, Homo sapiens
  misc_RNA (1)...(19): siRNA sense strand
ggaccugccaccucucuac

SEQ ID NO: 68450 - RNA, 19 nt, Homo sapiens
  misc_RNA (1)...(19): siRNA sense strand
ccauuuacuucucgagcau

SEQ ID NO: 68451 - RNA, 19 nt, Homo sapiens
  misc_RNA (1)...(19): siRNA sense strand
ccaaggugauaaguguuuc

SEQ ID NO: 68452 - RNA, 19 nt, Homo sapiens
  misc_RNA (1)...(19): siRNA sense strand
caagagcuucgucaugucu

SEQ ID NO: 68453 - RNA, 19 nt, Homo sapiens
  misc_RNA (1)...(19): siRNA sense strand
ccagcggaucuccaacaua

SEQ ID NO: 68454 - RNA, 19 nt, Homo sapiens
  misc_RNA (1)...(19): siRNA sense strand
gcagcaauggccacuccaa

SEQ ID NO: 68455 - RNA, 19 nt, Homo sapiens
  misc_RNA (1)...(19): siRNA sense strand
cggagauccuugcucagau

SEQ ID NO: 68456 - RNA, 19 nt, Homo sapiens
  misc_RNA (1)...(19): siRNA sense strand
uuggugaccugaccgacaa

SEQ ID NO: 68457 - RNA, 19 nt, Homo sapiens
  misc_RNA (1)...(19): siRNA sense strand
uggauggucaguucuuuga

SEQ ID NO: 68458 - RNA, 19 nt, Homo sapiens
  misc_RNA (1)...(19): siRNA sense strand
ugaucguggccuugcauua

SEQ ID NO: 68459 - RNA, 19 nt, Homo sapiens
  misc_RNA (1)...(19): siRNA sense strand
ucguggagcccauuuacuu

SEQ ID NO: 68460 - RNA, 19 nt, Homo sapiens
  misc_RNA (1)...(19): siRNA sense strand
ucaagccugguuugcagua

SEQ ID NO: 68461 - RNA, 19 nt, Homo sapiens
  misc_RNA (1)...(19): siRNA sense strand
gaauguccaguuucaucug

SEQ ID NO: 68462 - RNA, 19 nt, Homo sapiens
  misc_RNA (1)...(19): siRNA sense strand
uuacuacgcuccaagauua

SEQ ID NO: 68463 - RNA, 19 nt, Homo sapiens
  misc_RNA (1)...(19): siRNA sense strand
gaaggagaauguccaguuu

SEQ ID NO: 68464 - RNA, 19 nt, Homo sapiens
  misc_RNA (1)...(19): siRNA sense strand
auacacaacuugagcuuua

SEQ ID NO: 68465 - RNA, 19 nt, Homo sapiens
  misc_RNA (1)...(19): siRNA sense strand
gcccaggacucaaguauga

SEQ ID NO: 68466 - RNA, 19 nt, Homo sapiens
  misc_RNA (1)...(19): siRNA sense strand
gcaauggccacuccaagua

SEQ ID NO: 68467 - RNA, 19 nt, Homo sapiens
  misc_RNA (1)...(19): siRNA sense strand
ggauauagaagaugaagaa

SEQ ID NO: 68468 - RNA, 19 nt, Homo sapiens
  misc_RNA (1)...(19): siRNA sense strand
ggagauccuugcucagauu

SEQ ID NO: 68469 - RNA, 19 nt, Homo sapiens
  misc_RNA (1)...(19): siRNA sense strand
gauagacacccaaaucgua

SEQ ID NO: 68470 - RNA, 19 nt, Homo sapiens
  misc_RNA (1)...(19): siRNA sense strand
gcucucagcucuccaaugg

SEQ ID NO: 68471 - RNA, 19 nt, Homo sapiens
  misc_RNA (1)...(19): siRNA sense strand
gagaaggccuugaggucuu

SEQ ID NO: 68472 - RNA, 19 nt, Homo sapiens
  misc_RNA (1)...(19): siRNA sense strand
ggaagaaucccgugaugau

SEQ ID NO: 68473 - RNA, 19 nt, Homo sapiens
  misc_RNA (1)...(19): siRNA sense strand
gcucagauuucuuuauaca

SEQ ID NO: 68474 - RNA, 19 nt, Homo sapiens
  misc_RNA (1)...(19): siRNA sense strand
gcacugaugugaaggaaaa

SEQ ID NO: 68475 - RNA, 19 nt, Homo sapiens
  misc_RNA (1)...(19): siRNA sense strand
cagcggaucuccaacauag

SEQ ID NO: 68476 - RNA, 19 nt, Homo sapiens
  misc_RNA (1)...(19): siRNA sense strand
caacuugagcuuuacuuaa

SEQ ID NO: 68477 - RNA, 19 nt, Homo sapiens
  misc_RNA (1)...(19): siRNA sense strand
gaucguggccuugcauuaa

SEQ ID NO: 68478 - RNA, 19 nt, Homo sapiens
  misc_RNA (1)...(19): siRNA sense strand
gccaagagcuucgucaugu

SEQ ID NO: 68479 - RNA, 19 nt, Homo sapiens
  misc_RNA (1)...(19): siRNA sense strand
gaccucagcuugucugcuu

SEQ ID NO: 68480 - RNA, 19 nt, Homo sapiens
  misc_RNA (1)...(19): siRNA sense strand
gcagauagacacccaaauc

SEQ ID NO: 68481 - RNA, 19 nt, Homo sapiens
  misc_RNA (1)...(19): siRNA sense strand
caacaagccuuugcucagu

SEQ ID NO: 68482 - RNA, 19 nt, Homo sapiens
  misc_RNA (1)...(19): siRNA sense strand
ggaggugaauggccagguu

SEQ ID NO: 68483 - RNA, 19 nt, Homo sapiens
  misc_RNA (1)...(19): siRNA sense strand
caagguucccucccacuua

SEQ ID NO: 68484 - RNA, 19 nt, Homo sapiens
  misc_RNA (1)...(19): siRNA sense strand
gaacugcgcccaggacuca

SEQ ID NO: 68485 - RNA, 19 nt, Homo sapiens
  misc_RNA (1)...(19): siRNA sense strand
gguuuaggcugaaggagaa

SEQ ID NO: 68486 - RNA, 19 nt, Homo sapiens
  misc_RNA (1)...(19): siRNA sense strand
ggucguggauggucaguuc

SEQ ID NO: 68487 - RNA, 19 nt, Homo sapiens
  misc_RNA (1)...(19): siRNA sense strand
ggaggacccugucugucaa

SEQ ID NO: 68488 - RNA, 19 nt, Homo sapiens
  misc_RNA (1)...(19): siRNA sense strand
ccaaguaccgccugaagaa

SEQ ID NO: 68489 - RNA, 19 nt, Homo sapiens
  misc_RNA (1)...(19): siRNA sense strand
ggugauaaguguuucuaca

SEQ ID NO: 68490 - RNA, 19 nt, Homo sapiens
  misc_RNA (1)...(19): siRNA sense strand
acacggacuucacaucuga

SEQ ID NO: 68491 - RNA, 19 nt, Homo sapiens
  misc_RNA (1)...(19): siRNA sense strand
cagcagcacugaugugaag

SEQ ID NO: 68492 - RNA, 19 nt, Homo sapiens
  misc_RNA (1)...(19): siRNA sense strand
gacacgcucuucaaugguu

SEQ ID NO: 68493 - RNA, 19 nt, Homo sapiens
  misc_RNA (1)...(19): siRNA sense strand
gcucuggucccacaaagaa

SEQ ID NO: 68494 - RNA, 19 nt, Homo sapiens
  misc_RNA (1)...(19): siRNA sense strand
gagaauguccaguuucauc

SEQ ID NO: 68495 - RNA, 19 nt, Homo sapiens
  misc_RNA (1)...(19): siRNA sense strand
gauggucaguucuuugaag

SEQ ID NO: 68496 - RNA, 19 nt, Homo sapiens
  misc_RNA (1)...(19): siRNA sense strand
guaggcgacuccgcuauug

SEQ ID NO: 68497 - RNA, 19 nt, Homo sapiens
  misc_RNA (1)...(19): siRNA sense strand
caucagcaaugcagaagca

SEQ ID NO: 68498 - RNA, 19 nt, Homo sapiens
  misc_RNA (1)...(19): siRNA sense strand
gggaggacccugucuguca

SEQ ID NO: 68499 - RNA, 19 nt, Homo sapiens
  misc_RNA (1)...(19): siRNA sense strand
gaggacagcuacggaccaa

SEQ ID NO: 68500 - RNA, 19 nt, Homo sapiens
  misc_RNA (1)...(19): siRNA sense strand
uaaagaugccaaggugaua

SEQ ID NO: 68501 - RNA, 19 nt, Homo sapiens
  misc_RNA (1)...(19): siRNA sense strand
ugaugcagcugaaugagau

SEQ ID NO: 68502 - RNA, 19 nt, Homo sapiens
  misc_RNA (1)...(19): siRNA sense strand
aggcacagauguuaaagau

SEQ ID NO: 68503 - RNA, 19 nt, Homo sapiens
  misc_RNA (1)...(19): siRNA sense strand
ugaaggagaauguccaguu

SEQ ID NO: 68504 - RNA, 19 nt, Homo sapiens
  misc_RNA (1)...(19): siRNA sense strand
uuaccaagcccaacgugua

SEQ ID NO: 68505 - RNA, 19 nt, Homo sapiens
  misc_RNA (1)...(19): siRNA sense strand
caacacggacuucacaucu

SEQ ID NO: 68506 - RNA, 19 nt, Homo sapiens
  misc_RNA (1)...(19): siRNA sense strand
aguccaagcuggcggcaaa

SEQ ID NO: 68507 - RNA, 19 nt, Homo sapiens
  misc_RNA (1)...(19): siRNA sense strand
gccaaggugauaaguguuu

SEQ ID NO: 68508 - RNA, 19 nt, Homo sapiens
  misc_RNA (1)...(19): siRNA sense strand
gcacgcgccuuuguuuguc

SEQ ID NO: 68509 - RNA, 19 nt, Homo sapiens
  misc_RNA (1)...(19): siRNA sense strand
gcaagguucccucccacuu

SEQ ID NO: 68510 - RNA, 19 nt, Homo sapiens
  misc_RNA (1)...(19): siRNA sense strand
guccugcagugacaagauu

SEQ ID NO: 68511 - RNA, 19 nt, Homo sapiens
  misc_RNA (1)...(19): siRNA sense strand
gaagaaucccgugaugauc

SEQ ID NO: 68512 - RNA, 19 nt, Homo sapiens
  misc_RNA (1)...(19): siRNA sense strand
acaacuugagcuuuacuua

SEQ ID NO: 68513 - RNA, 19 nt, Homo sapiens
  misc_RNA (1)...(19): siRNA sense strand
gguaggcgacuccgcuauu

SEQ ID NO: 68514 - RNA, 19 nt, Homo sapiens
  misc_RNA (1)...(19): siRNA sense strand
uaaagcaagaggacagcua

SEQ ID NO: 68515 - RNA, 19 nt, Homo sapiens
  misc_RNA (1)...(19): siRNA sense strand
aggagaauguccaguuuca

SEQ ID NO: 68516 - RNA, 19 nt, Homo sapiens
  misc_RNA (1)...(19): siRNA sense strand
ugaggucuuucguucaguu

SEQ ID NO: 68517 - RNA, 19 nt, Homo sapiens
  misc_RNA (1)...(19): siRNA sense strand
uguguaagcacgcguugua

SEQ ID NO: 68518 - RNA, 19 nt, Homo sapiens
  misc_RNA (1)...(19): siRNA sense strand
gauccuugcucagauuucu

SEQ ID NO: 68519 - RNA, 19 nt, Homo sapiens
  misc_RNA (1)...(19): siRNA sense strand
gccagccuauucccaguga

SEQ ID NO: 68520 - RNA, 19 nt, Homo sapiens
  misc_RNA (1)...(19): siRNA sense strand
ggacagcuacggaccaaaa

SEQ ID NO: 68521 - RNA, 19 nt, Homo sapiens
  misc_RNA (1)...(19): siRNA sense strand
agaaggccuugaggucuuu

SEQ ID NO: 68522 - RNA, 19 nt, Homo sapiens
  misc_RNA (1)...(19): siRNA sense strand
auaaguguuucuacaggaa

SEQ ID NO: 68523 - RNA, 19 nt, Homo sapiens
  misc_RNA (1)...(19): siRNA sense strand
gggaugacuccuucaguuc

SEQ ID NO: 68524 - RNA, 19 nt, Homo sapiens
  misc_RNA (1)...(19): siRNA sense strand
gaggugaauggccagguuu

SEQ ID NO: 68525 - RNA, 19 nt, Homo sapiens
  misc_RNA (1)...(19): siRNA sense strand
guaagcacgcguuguacug

SEQ ID NO: 68526 - RNA, 19 nt, Homo sapiens
  misc_RNA (1)...(19): siRNA sense strand
ccacgacugggaaggauga

SEQ ID NO: 68527 - RNA, 19 nt, Homo sapiens
  misc_RNA (1)...(19): siRNA sense strand
gagauccuugcucagauuu

SEQ ID NO: 68528 - RNA, 19 nt, Homo sapiens
  misc_RNA (1)...(19): siRNA sense strand
ggggaugacuccuucaguu

SEQ ID NO: 68529 - RNA, 19 nt, Homo sapiens
  misc_RNA (1)...(19): siRNA sense strand
cugacacgcucuucaaugg

SEQ ID NO: 68530 - RNA, 19 nt, Homo sapiens
  misc_RNA (1)...(19): siRNA sense strand
caaguaccgccugaagaaa

SEQ ID NO: 68531 - RNA, 19 nt, Homo sapiens
  misc_RNA (1)...(19): siRNA sense strand
aaagaugccaaggugauaa

SEQ ID NO: 68532 - RNA, 19 nt, Homo sapiens
  misc_RNA (1)...(19): siRNA sense strand
ccaagagcuucgucauguc

SEQ ID NO: 68533 - RNA, 19 nt, Homo sapiens
  misc_RNA (1)...(19): siRNA sense strand
gcauuuaccgcagguuuua

SEQ ID NO: 68534 - RNA, 19 nt, Homo sapiens
  misc_RNA (1)...(19): siRNA sense strand
gaagaugaagaaaacauga

SEQ ID NO: 68535 - RNA, 19 nt, Homo sapiens
  misc_RNA (1)...(19): siRNA sense strand
gcagcugaaugagaucaag

SEQ ID NO: 68536 - RNA, 19 nt, Homo sapiens
  misc_RNA (1)...(19): siRNA sense strand
gaugacuccuucaguucca

SEQ ID NO: 68537 - RNA, 19 nt, Homo sapiens
  misc_RNA (1)...(19): siRNA sense strand
cagcacugaugugaaggaa

SEQ ID NO: 68538 - RNA, 19 nt, Homo sapiens
  misc_RNA (1)...(19): siRNA sense strand
acacccaaaucguaaagca

SEQ ID NO: 68539 - RNA, 19 nt, Homo sapiens
  misc_RNA (1)...(19): siRNA sense strand
auagacacccaaaucguaa

SEQ ID NO: 68540 - RNA, 19 nt, Homo sapiens
  misc_RNA (1)...(19): siRNA sense strand
cagcagauagacacccaaa

SEQ ID NO: 68541 - RNA, 19 nt, Homo sapiens
  misc_RNA (1)...(19): siRNA sense strand
ugaccugaccgacaacuuc

SEQ ID NO: 68542 - RNA, 19 nt, Homo sapiens
  misc_RNA (1)...(19): siRNA sense strand
agaaucccgugaugaucuu

SEQ ID NO: 68543 - RNA, 19 nt, Homo sapiens
  misc_RNA (1)...(19): siRNA sense strand
ugacaacaggcacagaugu

SEQ ID NO: 68544 - RNA, 19 nt, Homo sapiens
  misc_RNA (1)...(19): siRNA sense strand
ccaagaacgcccugaugca

SEQ ID NO: 68545 - RNA, 19 nt, Homo sapiens
  misc_RNA (1)...(19): siRNA sense strand
gaagaaaacaugaguucca

SEQ ID NO: 68546 - RNA, 19 nt, Homo sapiens
  misc_RNA (1)...(19): siRNA sense strand
uuaaagaugccaaggugau

SEQ ID NO: 68547 - RNA, 19 nt, Homo sapiens
  misc_RNA (1)...(19): siRNA sense strand
cguggauggucaguucuuu

SEQ ID NO: 68548 - RNA, 19 nt, Homo sapiens
  misc_RNA (1)...(19): siRNA sense strand
caucugaccaggccgacuu

SEQ ID NO: 68549 - RNA, 19 nt, Homo sapiens
  misc_RNA (1)...(19): siRNA sense strand
ucaugucuguggaggugaa

SEQ ID NO: 68550 - RNA, 19 nt, Homo sapiens
  misc_RNA (1)...(19): siRNA sense strand
ggaccugccaccucucuac

SEQ ID NO: 68551 - RNA, 19 nt, Homo sapiens
  misc_RNA (1)...(19): siRNA sense strand
ccauuuacuucucgagcau

SEQ ID NO: 68552 - RNA, 19 nt, Homo sapiens
  misc_RNA (1)...(19): siRNA sense strand
ccaaggugauaaguguuuc

SEQ ID NO: 68553 - RNA, 19 nt, Homo sapiens
  misc_RNA (1)...(19): siRNA sense strand
caagagcuucgucaugucu

SEQ ID NO: 68554 - RNA, 19 nt, Homo sapiens
  misc_RNA (1)...(19): siRNA sense strand
ccagcggaucuccaacaua

SEQ ID NO: 68555 - RNA, 19 nt, Homo sapiens
  misc_RNA (1)...(19): siRNA sense strand
gcagcaauggccacuccaa

SEQ ID NO: 68556 - RNA, 19 nt, Homo sapiens
  misc_RNA (1)...(19): siRNA sense strand
cggagauccuugcucagau

SEQ ID NO: 68557 - RNA, 19 nt, Homo sapiens
  misc_RNA (1)...(19): siRNA sense strand
uuggugaccugaccgacaa

SEQ ID NO: 68558 - RNA, 19 nt, Homo sapiens
  misc_RNA (1)...(19): siRNA sense strand
uggauggucaguucuuuga

SEQ ID NO: 68559 - RNA, 19 nt, Homo sapiens
  misc_RNA (1)...(19): siRNA sense strand
gaauguccaguuucaucug

SEQ ID NO: 68560 - RNA, 19 nt, Homo sapiens
  misc_RNA (1)...(19): siRNA sense strand
ucaagccugguuugcagua

SEQ ID NO: 68561 - RNA, 19 nt, Homo sapiens
  misc_RNA (1)...(19): siRNA sense strand
ucguggagcccauuuacuu

SEQ ID NO: 68562 - RNA, 19 nt, Homo sapiens
  misc_RNA (1)...(19): siRNA sense strand
gaagagauuugaagaagaa

SEQ ID NO: 68563 - RNA, 19 nt, Homo sapiens
  misc_RNA (1)...(19): siRNA sense strand
ggacaugugugaagccaua

SEQ ID NO: 68564 - RNA, 19 nt, Homo sapiens
  misc_RNA (1)...(19): siRNA sense strand
ugaaugagcucuuuggaaa

SEQ ID NO: 68565 - RNA, 19 nt, Homo sapiens
  misc_RNA (1)...(19): siRNA sense strand
ggagggagauggugacauu

SEQ ID NO: 68566 - RNA, 19 nt, Homo sapiens
  misc_RNA (1)...(19): siRNA sense strand
gaauggcgcuuauaaagug

SEQ ID NO: 68567 - RNA, 19 nt, Homo sapiens
  misc_RNA (1)...(19): siRNA sense strand
ggaaagaccugaagaccau

SEQ ID NO: 68568 - RNA, 19 nt, Homo sapiens
  misc_RNA (1)...(19): siRNA sense strand
gagaaugaaugcaugagaa

SEQ ID NO: 68569 - RNA, 19 nt, Homo sapiens
  misc_RNA (1)...(19): siRNA sense strand
ggaacucgcucuucagcaa

SEQ ID NO: 68570 - RNA, 19 nt, Homo sapiens
  misc_RNA (1)...(19): siRNA sense strand
ugugauagcuggugugauu

SEQ ID NO: 68571 - RNA, 19 nt, Homo sapiens
  misc_RNA (1)...(19): siRNA sense strand
caccacagccaucauauua

SEQ ID NO: 68572 - RNA, 19 nt, Homo sapiens
  misc_RNA (1)...(19): siRNA sense strand
gcacguggcugagcacuuc

SEQ ID NO: 68573 - RNA, 19 nt, Homo sapiens
  misc_RNA (1)...(19): siRNA sense strand
gcacuugaauggcgcuuau

SEQ ID NO: 68574 - RNA, 19 nt, Homo sapiens
  misc_RNA (1)...(19): siRNA sense strand
gaauauuacuguagguuag

SEQ ID NO: 68575 - RNA, 19 nt, Homo sapiens
  misc_RNA (1)...(19): siRNA sense strand
ccacagccaucauauuaau

SEQ ID NO: 68576 - RNA, 19 nt, Homo sapiens
  misc_RNA (1)...(19): siRNA sense strand
cauguggcguuucuaauaa

SEQ ID NO: 68577 - RNA, 19 nt, Homo sapiens
  misc_RNA (1)...(19): siRNA sense strand
gaaacaaucccuccaacug

SEQ ID NO: 68578 - RNA, 19 nt, Homo sapiens
  misc_RNA (1)...(19): siRNA sense strand
ugccagcguucaaguauua

SEQ ID NO: 68579 - RNA, 19 nt, Homo sapiens
  misc_RNA (1)...(19): siRNA sense strand
gggcaacacugucaaugug

SEQ ID NO: 68580 - RNA, 19 nt, Homo sapiens
  misc_RNA (1)...(19): siRNA sense strand
gaaaggaugauucaagcaa

SEQ ID NO: 68581 - RNA, 19 nt, Homo sapiens
  misc_RNA (1)...(19): siRNA sense strand
acuaugagcugaagauguu

SEQ ID NO: 68582 - RNA, 19 nt, Homo sapiens
  misc_RNA (1)...(19): siRNA sense strand
cugaagauguugaucauga

SEQ ID NO: 68583 - RNA, 19 nt, Homo sapiens
  misc_RNA (1)...(19): siRNA sense strand
gagcucagaagccacaaua

SEQ ID NO: 68584 - RNA, 19 nt, Homo sapiens
  misc_RNA (1)...(19): siRNA sense strand
ccauguggcguuucuaaua

SEQ ID NO: 68585 - RNA, 19 nt, Homo sapiens
  misc_RNA (1)...(19): siRNA sense strand
cauuagggacccauauuua

SEQ ID NO: 68586 - RNA, 19 nt, Homo sapiens
  misc_RNA (1)...(19): siRNA sense strand
cugaagacguacuuuguaa

SEQ ID NO: 68587 - RNA, 19 nt, Homo sapiens
  misc_RNA (1)...(19): siRNA sense strand
caacugcccuggcgauuuu

SEQ ID NO: 68588 - RNA, 19 nt, Homo sapiens
  misc_RNA (1)...(19): siRNA sense strand
gugcaccugucgaggaaua

SEQ ID NO: 68589 - RNA, 19 nt, Homo sapiens
  misc_RNA (1)...(19): siRNA sense strand
gagauuugaagaagaauug

SEQ ID NO: 68590 - RNA, 19 nt, Homo sapiens
  misc_RNA (1)...(19): siRNA sense strand
gaccaggcauuuggaaaga

SEQ ID NO: 68591 - RNA, 19 nt, Homo sapiens
  misc_RNA (1)...(19): siRNA sense strand
agcaauggcucaagucuga

SEQ ID NO: 68592 - RNA, 19 nt, Homo sapiens
  misc_RNA (1)...(19): siRNA sense strand
gcucagaagccacaauaug

SEQ ID NO: 68593 - RNA, 19 nt, Homo sapiens
  misc_RNA (1)...(19): siRNA sense strand
gguuagacuucuuauggaa

SEQ ID NO: 68594 - RNA, 19 nt, Homo sapiens
  misc_RNA (1)...(19): siRNA sense strand
gauauccuguuccguguuc

SEQ ID NO: 68595 - RNA, 19 nt, Homo sapiens
  misc_RNA (1)...(19): siRNA sense strand
gcaucgagucuguguuuaa

SEQ ID NO: 68596 - RNA, 19 nt, Homo sapiens
  misc_RNA (1)...(19): siRNA sense strand
cuuauacgcugacaucguu

SEQ ID NO: 68597 - RNA, 19 nt, Homo sapiens
  misc_RNA (1)...(19): siRNA sense strand
ggagaacacaaauaacuuc

SEQ ID NO: 68598 - RNA, 19 nt, Homo sapiens
  misc_RNA (1)...(19): siRNA sense strand
gaggaauaaucaacgugaa

SEQ ID NO: 68599 - RNA, 19 nt, Homo sapiens
  misc_RNA (1)...(19): siRNA sense strand
uaaucaacgugaaaggaaa

SEQ ID NO: 68600 - RNA, 19 nt, Homo sapiens
  misc_RNA (1)...(19): siRNA sense strand
gauaccuguucauguguuu

SEQ ID NO: 68601 - RNA, 19 nt, Homo sapiens
  misc_RNA (1)...(19): siRNA sense strand
cagaagccacaauaugaua

SEQ ID NO: 68602 - RNA, 19 nt, Homo sapiens
  misc_RNA (1)...(19): siRNA sense strand
cuacagccaggucuuauuu

SEQ ID NO: 68603 - RNA, 19 nt, Homo sapiens
  misc_RNA (1)...(19): siRNA sense strand
gaaguccucgggcaucauu

SEQ ID NO: 68604 - RNA, 19 nt, Homo sapiens
  misc_RNA (1)...(19): siRNA sense strand
gagggaugcuacuggaguu

SEQ ID NO: 68605 - RNA, 19 nt, Homo sapiens
  misc_RNA (1)...(19): siRNA sense strand
ucaagucgcggaucaaguu

SEQ ID NO: 68606 - RNA, 19 nt, Homo sapiens
  misc_RNA (1)...(19): siRNA sense strand
ggauaccuguucauguguu

SEQ ID NO: 68607 - RNA, 19 nt, Homo sapiens
  misc_RNA (1)...(19): siRNA sense strand
ugacuuugaugaucuucuu

SEQ ID NO: 68608 - RNA, 19 nt, Homo sapiens
  misc_RNA (1)...(19): siRNA sense strand
ugaagaaugaggagcuaua

SEQ ID NO: 68609 - RNA, 19 nt, Homo sapiens
  misc_RNA (1)...(19): siRNA sense strand
gcaauugaugggauuaaug

SEQ ID NO: 68610 - RNA, 19 nt, Homo sapiens
  misc_RNA (1)...(19): siRNA sense strand
caaaaucgcaccuuaagaa

SEQ ID NO: 68611 - RNA, 19 nt, Homo sapiens
  misc_RNA (1)...(19): siRNA sense strand
caaacgugagcaucuuaua

SEQ ID NO: 68612 - RNA, 19 nt, Homo sapiens
  misc_RNA (1)...(19): siRNA sense strand
caacugccaacacaacaaa

SEQ ID NO: 68613 - RNA, 19 nt, Homo sapiens
  misc_RNA (1)...(19): siRNA sense strand
gaccauguggcguuucuaa

SEQ ID NO: 68614 - RNA, 19 nt, Homo sapiens
  misc_RNA (1)...(19): siRNA sense strand
guucacauuucuucuguca

SEQ ID NO: 68615 - RNA, 19 nt, Homo sapiens
  misc_RNA (1)...(19): siRNA sense strand
ugggauaccuguucaugug

SEQ ID NO: 68616 - RNA, 19 nt, Homo sapiens
  misc_RNA (1)...(19): siRNA sense strand
gaagacguacuuuguaaac

SEQ ID NO: 68617 - RNA, 19 nt, Homo sapiens
  misc_RNA (1)...(19): siRNA sense strand
gagcugaagauguugauca

SEQ ID NO: 68618 - RNA, 19 nt, Homo sapiens
  misc_RNA (1)...(19): siRNA sense strand
aagaagagauuugaagaag

SEQ ID NO: 68619 - RNA, 19 nt, Homo sapiens
  misc_RNA (1)...(19): siRNA sense strand
gugaaaaccuacuuuguga

SEQ ID NO: 68620 - RNA, 19 nt, Homo sapiens
  misc_RNA (1)...(19): siRNA sense strand
uaucuggacucccuauauc

SEQ ID NO: 68621 - RNA, 19 nt, Homo sapiens
  misc_RNA (1)...(19): siRNA sense strand
caaauaacuuccacaaccu

SEQ ID NO: 68622 - RNA, 19 nt, Homo sapiens
  misc_RNA (1)...(19): siRNA sense strand
agauggagaacacaaauaa

SEQ ID NO: 68623 - RNA, 19 nt, Homo sapiens
  misc_RNA (1)...(19): siRNA sense strand
ucauggaacucgcucuuca

SEQ ID NO: 68624 - RNA, 19 nt, Homo sapiens
  misc_RNA (1)...(19): siRNA sense strand
cuucaacgacuucaaauug

SEQ ID NO: 68625 - RNA, 19 nt, Homo sapiens
  misc_RNA (1)...(19): siRNA sense strand
uugaugaucuucuuuccaa

SEQ ID NO: 68626 - RNA, 19 nt, Homo sapiens
  misc_RNA (1)...(19): siRNA sense strand
acagccaggucuuauuuga

SEQ ID NO: 68627 - RNA, 19 nt, Homo sapiens
  misc_RNA (1)...(19): siRNA sense strand
cgacuacagccaggucuua

SEQ ID NO: 68628 - RNA, 19 nt, Homo sapiens
  misc_RNA (1)...(19): siRNA sense strand
caucaccacagccaucaua

SEQ ID NO: 68629 - RNA, 19 nt, Homo sapiens
  misc_RNA (1)...(19): siRNA sense strand
cuggacagcuucugcaaug

SEQ ID NO: 68630 - RNA, 19 nt, Homo sapiens
  misc_RNA (1)...(19): siRNA sense strand
ucgagucuguguuuaagaa

SEQ ID NO: 68631 - RNA, 19 nt, Homo sapiens
  misc_RNA (1)...(19): siRNA sense strand
cagaagcaauggcucaagu

SEQ ID NO: 68632 - RNA, 19 nt, Homo sapiens
  misc_RNA (1)...(19): siRNA sense strand
agaagagauuugaagaaga

SEQ ID NO: 68633 - RNA, 19 nt, Homo sapiens
  misc_RNA (1)...(19): siRNA sense strand
gaucagcaccacggaugua

SEQ ID NO: 68634 - RNA, 19 nt, Homo sapiens
  misc_RNA (1)...(19): siRNA sense strand
aaaccuacuuugugaucaa

SEQ ID NO: 68635 - RNA, 19 nt, Homo sapiens
  misc_RNA (1)...(19): siRNA sense strand
cugcagaaguggcaauaug

SEQ ID NO: 68636 - RNA, 19 nt, Homo sapiens
  misc_RNA (1)...(19): siRNA sense strand
ggagaaugaaugcaugaga

SEQ ID NO: 68637 - RNA, 19 nt, Homo sapiens
  misc_RNA (1)...(19): siRNA sense strand
caaaggagaaugaaugcau

SEQ ID NO: 68638 - RNA, 19 nt, Homo sapiens
  misc_RNA (1)...(19): siRNA sense strand
gaaugaaugcaugagaauu

SEQ ID NO: 68639 - RNA, 19 nt, Homo sapiens
  misc_RNA (1)...(19): siRNA sense strand
ccaugggucagcauaauuu

SEQ ID NO: 68640 - RNA, 19 nt, Homo sapiens
  misc_RNA (1)...(19): siRNA sense strand
gaacucgcucuucagcaaa

SEQ ID NO: 68641 - RNA, 19 nt, Homo sapiens
  misc_RNA (1)...(19): siRNA sense strand
gggaggagauagagaccau

SEQ ID NO: 68642 - RNA, 19 nt, Homo sapiens
  misc_RNA (1)...(19): siRNA sense strand
gaauugaaugaaaggauga

SEQ ID NO: 68643 - RNA, 19 nt, Homo sapiens
  misc_RNA (1)...(19): siRNA sense strand
ugaagaccauguggcguuu

SEQ ID NO: 68644 - RNA, 19 nt, Homo sapiens
  misc_RNA (1)...(19): siRNA sense strand
ugauuggucugcagaagug

SEQ ID NO: 68645 - RNA, 19 nt, Homo sapiens
  misc_RNA (1)...(19): siRNA sense strand
gugaagccauaaagaaagu

SEQ ID NO: 68646 - RNA, 19 nt, Homo sapiens
  misc_RNA (1)...(19): siRNA sense strand
gacauuagggacccauauu

SEQ ID NO: 68647 - RNA, 19 nt, Homo sapiens
  misc_RNA (1)...(19): siRNA sense strand
cgagaucaucgcugacuuu

SEQ ID NO: 68648 - RNA, 19 nt, Homo sapiens
  misc_RNA (1)...(19): siRNA sense strand
gaaucucacugcuuuucua

SEQ ID NO: 68649 - RNA, 19 nt, Homo sapiens
  misc_RNA (1)...(19): siRNA sense strand
gcugacaucguuggcuuua

SEQ ID NO: 68650 - RNA, 19 nt, Homo sapiens
  misc_RNA (1)...(19): siRNA sense strand
ggcaguacaugcacauugg

SEQ ID NO: 68651 - RNA, 19 nt, Homo sapiens
  misc_RNA (1)...(19): siRNA sense strand
gguaaacuaugagcugaag

SEQ ID NO: 68652 - RNA, 19 nt, Homo sapiens
  misc_RNA (1)...(19): siRNA sense strand
guucaaguauuaugugacu

SEQ ID NO: 68653 - RNA, 19 nt, Homo sapiens
  misc_RNA (1)...(19): siRNA sense strand
uuacccggcuggcaaguga

SEQ ID NO: 68654 - RNA, 19 nt, Homo sapiens
  misc_RNA (1)...(19): siRNA sense strand
ggcagauccuggccaaugu

SEQ ID NO: 68655 - RNA, 19 nt, Homo sapiens
  misc_RNA (1)...(19): siRNA sense strand
gaagauguugaucaugaug

SEQ ID NO: 68656 - RNA, 19 nt, Homo sapiens
  misc_RNA (1)...(19): siRNA sense strand
gacuugugccugucucaua

SEQ ID NO: 68657 - RNA, 19 nt, Homo sapiens
  misc_RNA (1)...(19): siRNA sense strand
gcguucaaguauuauguga

SEQ ID NO: 68658 - RNA, 19 nt, Homo sapiens
  misc_RNA (1)...(19): siRNA sense strand
aaggaugauucaagcaauu

SEQ ID NO: 68659 - RNA, 19 nt, Homo sapiens
  misc_RNA (1)...(19): siRNA sense strand
aaaggaugauucaagcaau

SEQ ID NO: 68660 - RNA, 19 nt, Homo sapiens
  misc_RNA (1)...(19): siRNA sense strand
gaaguggcaauaugaugug

SEQ ID NO: 68661 - RNA, 19 nt, Homo sapiens
  misc_RNA (1)...(19): siRNA sense strand
gcuggaaguugaagaccau

SEQ ID NO: 68662 - RNA, 19 nt, Homo sapiens
  misc_RNA (1)...(19): siRNA sense strand
ccagacagauugacuauua

SEQ ID NO: 68663 - RNA, 19 nt, Homo sapiens
  misc_RNA (1)...(19): siRNA sense strand
ggaaagcacuggagaacuu

SEQ ID NO: 68664 - RNA, 19 nt, Homo sapiens
  misc_RNA (1)...(19): siRNA sense strand
ggaagaagaaguucaagaa

SEQ ID NO: 68665 - RNA, 19 nt, Homo sapiens
  misc_RNA (1)...(19): siRNA sense strand
ugaagaccaugaccaauuu

SEQ ID NO: 68666 - RNA, 19 nt, Homo sapiens
  misc_RNA (1)...(19): siRNA sense strand
ggaaggaccugaagaccau

SEQ ID NO: 68667 - RNA, 19 nt, Homo sapiens
  misc_RNA (1)...(19): siRNA sense strand
gggaaacacugucaaugug

SEQ ID NO: 68668 - RNA, 19 nt, Homo sapiens
  misc_RNA (1)...(19): siRNA sense strand
ggacuuacuuugucuguac

SEQ ID NO: 68669 - RNA, 19 nt, Homo sapiens
  misc_RNA (1)...(19): siRNA sense strand
gcaccuaccuggucaucga

SEQ ID NO: 68670 - RNA, 19 nt, Homo sapiens
  misc_RNA (1)...(19): siRNA sense strand
ggagggcccugaccaagau

SEQ ID NO: 68671 - RNA, 19 nt, Homo sapiens
  misc_RNA (1)...(19): siRNA sense strand
agaagaaguucaagaagga

SEQ ID NO: 68672 - RNA, 19 nt, Homo sapiens
  misc_RNA (1)...(19): siRNA sense strand
ggaugagccuggagccaaa

SEQ ID NO: 68673 - RNA, 19 nt, Homo sapiens
  misc_RNA (1)...(19): siRNA sense strand
cuuuaucggugacaaguua

SEQ ID NO: 68674 - RNA, 19 nt, Homo sapiens
  misc_RNA (1)...(19): siRNA sense strand
ccugaugccuuuccaaguu

SEQ ID NO: 68675 - RNA, 19 nt, Homo sapiens
  misc_RNA (1)...(19): siRNA sense strand
aagaugcgcucuacgagaa

SEQ ID NO: 68676 - RNA, 19 nt, Homo sapiens
  misc_RNA (1)...(19): siRNA sense strand
guacggacacugccaaguu

SEQ ID NO: 68677 - RNA, 19 nt, Homo sapiens
  misc_RNA (1)...(19): siRNA sense strand
agagugcgaugucaacaaa

SEQ ID NO: 68678 - RNA, 19 nt, Homo sapiens
  misc_RNA (1)...(19): siRNA sense strand
gcacggcccuuugcacauc

SEQ ID NO: 68679 - RNA, 19 nt, Homo sapiens
  misc_RNA (1)...(19): siRNA sense strand
gagcugaggacuuacuuug

SEQ ID NO: 68680 - RNA, 19 nt, Homo sapiens
  misc_RNA (1)...(19): siRNA sense strand
aaggcgagcugaggacuua

SEQ ID NO: 68681 - RNA, 19 nt, Homo sapiens
  misc_RNA (1)...(19): siRNA sense strand
gcugaggacuuacuuuguc

SEQ ID NO: 68682 - RNA, 19 nt, Homo sapiens
  misc_RNA (1)...(19): siRNA sense strand
ggucggaggaugacucgua

SEQ ID NO: 68683 - RNA, 19 nt, Homo sapiens
  misc_RNA (1)...(19): siRNA sense strand
gaacgugaaccgccuucuu

SEQ ID NO: 68684 - RNA, 19 nt, Homo sapiens
  misc_RNA (1)...(19): siRNA sense strand
gaagaagaaguucaagaag

SEQ ID NO: 68685 - RNA, 19 nt, Homo sapiens
  misc_RNA (1)...(19): siRNA sense strand
gaaggagcacgaggaguuu

SEQ ID NO: 68686 - RNA, 19 nt, Homo sapiens
  misc_RNA (1)...(19): siRNA sense strand
gauggaggcagccggagua

SEQ ID NO: 68687 - RNA, 19 nt, Homo sapiens
  misc_RNA (1)...(19): siRNA sense strand
gcuaugugcugguguucga

SEQ ID NO: 68688 - RNA, 19 nt, Homo sapiens
  misc_RNA (1)...(19): siRNA sense strand
uacggacacugccaaguuu

SEQ ID NO: 68689 - RNA, 19 nt, Homo sapiens
  misc_RNA (1)...(19): siRNA sense strand
gggagcaggugcccuucuu

SEQ ID NO: 68690 - RNA, 19 nt, Homo sapiens
  misc_RNA (1)...(19): siRNA sense strand
ucaagaggcaccagaaugu

SEQ ID NO: 68691 - RNA, 19 nt, Homo sapiens
  misc_RNA (1)...(19): siRNA sense strand
gaucaacgucaaaggcaaa

SEQ ID NO: 68692 - RNA, 19 nt, Homo sapiens
  misc_RNA (1)...(19): siRNA sense strand
ucacggaggccacgcuaaa

SEQ ID NO: 68693 - RNA, 19 nt, Homo sapiens
  misc_RNA (1)...(19): siRNA sense strand
gaugacuucuacaccuuug

SEQ ID NO: 68694 - RNA, 19 nt, Homo sapiens
  misc_RNA (1)...(19): siRNA sense strand
gcccggaacugcgugaaga

SEQ ID NO: 68695 - RNA, 19 nt, Homo sapiens
  misc_RNA (1)...(19): siRNA sense strand
ucgacgagcuccuacugaa

SEQ ID NO: 68696 - RNA, 19 nt, Homo sapiens
  misc_RNA (1)...(19): siRNA sense strand
gccuacgccugcucaauga

SEQ ID NO: 68697 - RNA, 19 nt, Homo sapiens
  misc_RNA (1)...(19): siRNA sense strand
agaaggagcacgaggaguu

SEQ ID NO: 68698 - RNA, 19 nt, Homo sapiens
  misc_RNA (1)...(19): siRNA sense strand
gggacgcucugcacuaucu

SEQ ID NO: 68699 - RNA, 19 nt, Homo sapiens
  misc_RNA (1)...(19): siRNA sense strand
ggugcucgguucuuugaug

SEQ ID NO: 68700 - RNA, 19 nt, Homo sapiens
  misc_RNA (1)...(19): siRNA sense strand
cgacugcuacuacugugua

SEQ ID NO: 68701 - RNA, 19 nt, Homo sapiens
  misc_RNA (1)...(19): siRNA sense strand
gguaccaucaguccuauga

SEQ ID NO: 68702 - RNA, 19 nt, Homo sapiens
  misc_RNA (1)...(19): siRNA sense strand
ugagaucauugccgacuuc

SEQ ID NO: 68703 - RNA, 19 nt, Homo sapiens
  misc_RNA (1)...(19): siRNA sense strand
cugcgucugugucauguuu

SEQ ID NO: 68704 - RNA, 19 nt, Homo sapiens
  misc_RNA (1)...(19): siRNA sense strand
gaaugucagcauccucuau

SEQ ID NO: 68705 - RNA, 19 nt, Homo sapiens
  misc_RNA (1)...(19): siRNA sense strand
ggccaacgcagucaucuuc

SEQ ID NO: 68706 - RNA, 19 nt, Homo sapiens
  misc_RNA (1)...(19): siRNA sense strand
cugaagaccaugaccaauu

SEQ ID NO: 68707 - RNA, 19 nt, Homo sapiens
  misc_RNA (1)...(19): siRNA sense strand
agacaagagcccuguguga

SEQ ID NO: 68708 - RNA, 19 nt, Homo sapiens
  misc_RNA (1)...(19): siRNA sense strand
ggaagcugcgcaucgagaa

SEQ ID NO: 68709 - RNA, 19 nt, Homo sapiens
  misc_RNA (1)...(19): siRNA sense strand
cccgggaccucuucaccua

SEQ ID NO: 68710 - RNA, 19 nt, Homo sapiens
  misc_RNA (1)...(19): siRNA sense strand
ugaaugccguggccugauc

SEQ ID NO: 68711 - RNA, 19 nt, Homo sapiens
  misc_RNA (1)...(19): siRNA sense strand
gaaagcacuggagaacuug

SEQ ID NO: 68712 - RNA, 19 nt, Homo sapiens
  misc_RNA (1)...(19): siRNA sense strand
uggagaagaucaagaccau

SEQ ID NO: 68713 - RNA, 19 nt, Homo sapiens
  misc_RNA (1)...(19): siRNA sense strand
ggugcugaaugagcucuuu

SEQ ID NO: 68714 - RNA, 19 nt, Homo sapiens
  misc_RNA (1)...(19): siRNA sense strand
gaccaugaccaauuucuac

SEQ ID NO: 68715 - RNA, 19 nt, Homo sapiens
  misc_RNA (1)...(19): siRNA sense strand
gugcugggccugugcuuug

SEQ ID NO: 68716 - RNA, 19 nt, Homo sapiens
  misc_RNA (1)...(19): siRNA sense strand
gacaggcgccuuccacaag

SEQ ID NO: 68717 - RNA, 19 nt, Homo sapiens
  misc_RNA (1)...(19): siRNA sense strand
caacaggcacuccuucaac

SEQ ID NO: 68718 - RNA, 19 nt, Homo sapiens
  misc_RNA (1)...(19): siRNA sense strand
ccgaugacuucuacaccuu

SEQ ID NO: 68719 - RNA, 19 nt, Homo sapiens
  misc_RNA (1)...(19): siRNA sense strand
gcauccugcucguccaugu

SEQ ID NO: 68720 - RNA, 19 nt, Homo sapiens
  misc_RNA (1)...(19): siRNA sense strand
caauguggccagccgaaug

SEQ ID NO: 68721 - RNA, 19 nt, Homo sapiens
  misc_RNA (1)...(19): siRNA sense strand
ugaccaagaugcgcucuac

SEQ ID NO: 68722 - RNA, 19 nt, Homo sapiens
  misc_RNA (1)...(19): siRNA sense strand
gcugguggccuguguacug

SEQ ID NO: 68723 - RNA, 19 nt, Homo sapiens
  misc_RNA (1)...(19): siRNA sense strand
cgacuucgacgagcuccua

SEQ ID NO: 68724 - RNA, 19 nt, Homo sapiens
  misc_RNA (1)...(19): siRNA sense strand
caagacaagagcccugugu

SEQ ID NO: 68725 - RNA, 19 nt, Homo sapiens
  misc_RNA (1)...(19): siRNA sense strand
ugauguacgucgagugucu

SEQ ID NO: 68726 - RNA, 19 nt, Homo sapiens
  misc_RNA (1)...(19): siRNA sense strand
cuuacacucuccagacaga

SEQ ID NO: 68727 - RNA, 19 nt, Homo sapiens
  misc_RNA (1)...(19): siRNA sense strand
gcugauguacgucgagugu

SEQ ID NO: 68728 - RNA, 19 nt, Homo sapiens
  misc_RNA (1)...(19): siRNA sense strand
cggguacucuugugaaugc

SEQ ID NO: 68729 - RNA, 19 nt, Homo sapiens
  misc_RNA (1)...(19): siRNA sense strand
gucaagaggcaccagaaug

SEQ ID NO: 68730 - RNA, 19 nt, Homo sapiens
  misc_RNA (1)...(19): siRNA sense strand
agugcgaugucaacaaaga

SEQ ID NO: 68731 - RNA, 19 nt, Homo sapiens
  misc_RNA (1)...(19): siRNA sense strand
gagccuggagccaaagguu

SEQ ID NO: 68732 - RNA, 19 nt, Homo sapiens
  misc_RNA (1)...(19): siRNA sense strand
gggcguggacaucaacaug

SEQ ID NO: 68733 - RNA, 19 nt, Homo sapiens
  misc_RNA (1)...(19): siRNA sense strand
ugacaggcgccuuccacaa

SEQ ID NO: 68734 - RNA, 19 nt, Homo sapiens
  misc_RNA (1)...(19): siRNA sense strand
cugcaugccugacaacaac

SEQ ID NO: 68735 - RNA, 19 nt, Homo sapiens
  misc_RNA (1)...(19): siRNA sense strand
gagugcaugcgaaucaaga

SEQ ID NO: 68736 - RNA, 19 nt, Homo sapiens
  misc_RNA (1)...(19): siRNA sense strand
gaagaccaugaccaauuuc

SEQ ID NO: 68737 - RNA, 19 nt, Homo sapiens
  misc_RNA (1)...(19): siRNA sense strand
gacugccuauggaagaaga

SEQ ID NO: 68738 - RNA, 19 nt, Homo sapiens
  misc_RNA (1)...(19): siRNA sense strand
ucaacaggcacuccuucaa

SEQ ID NO: 68739 - RNA, 19 nt, Homo sapiens
  misc_RNA (1)...(19): siRNA sense strand
uauggaagaagaaguucaa

SEQ ID NO: 68740 - RNA, 19 nt, Homo sapiens
  misc_RNA (1)...(19): siRNA sense strand
aaugagcucuuuggcaagu

SEQ ID NO: 68741 - RNA, 19 nt, Homo sapiens
  misc_RNA (1)...(19): siRNA sense strand
gccuauggaagaagaaguu

SEQ ID NO: 68742 - RNA, 19 nt, Homo sapiens
  misc_RNA (1)...(19): siRNA sense strand
caacuuccacagccucuac

SEQ ID NO: 68743 - RNA, 19 nt, Homo sapiens
  misc_RNA (1)...(19): siRNA sense strand
gcguggcccucaucaucau

SEQ ID NO: 68744 - RNA, 19 nt, Homo sapiens
  misc_RNA (1)...(19): siRNA sense strand
cagacagauugacuauuac

SEQ ID NO: 68745 - RNA, 19 nt, Homo sapiens
  misc_RNA (1)...(19): siRNA sense strand
cuacaucacccugcuuaca

SEQ ID NO: 68746 - RNA, 19 nt, Homo sapiens
  misc_RNA (1)...(19): siRNA sense strand
uggccuaccuggugcucuu

SEQ ID NO: 68747 - RNA, 19 nt, Homo sapiens
  misc_RNA (1)...(19): siRNA sense strand
cugagaggguggagacaca

SEQ ID NO: 68748 - RNA, 19 nt, Homo sapiens
  misc_RNA (1)...(19): siRNA sense strand
ucucugugcugauguacgu

SEQ ID NO: 68749 - RNA, 19 nt, Homo sapiens
  misc_RNA (1)...(19): siRNA sense strand
ugagcucuuuggcaaguuc

SEQ ID NO: 68750 - RNA, 19 nt, Homo sapiens
  misc_RNA (1)...(19): siRNA sense strand
gcugcaugccugacaacaa

SEQ ID NO: 68751 - RNA, 19 nt, Homo sapiens
  misc_RNA (1)...(19): siRNA sense strand
ucagcggcguggagaagau

SEQ ID NO: 68752 - RNA, 19 nt, Homo sapiens
  misc_RNA (1)...(19): siRNA sense strand
ggcccucucugugcugaug

SEQ ID NO: 68753 - RNA, 19 nt, Homo sapiens
  misc_RNA (1)...(19): siRNA sense strand
acacagagugcgaugucaa

SEQ ID NO: 68754 - RNA, 19 nt, Homo sapiens
  misc_RNA (1)...(19): siRNA sense strand
gcgccagccugaucuucgu

SEQ ID NO: 68755 - RNA, 19 nt, Homo sapiens
  misc_RNA (1)...(19): siRNA sense strand
uggugguggugcugaauga

SEQ ID NO: 68756 - RNA, 19 nt, Homo sapiens
  misc_RNA (1)...(19): siRNA sense strand
agaccaugaccaauuucua

SEQ ID NO: 68757 - RNA, 19 nt, Homo sapiens
  misc_RNA (1)...(19): siRNA sense strand
ccagacaccaggccauucu

SEQ ID NO: 68758 - RNA, 19 nt, Homo sapiens
  misc_RNA (1)...(19): siRNA sense strand
gaggacuuacuuugucugu

SEQ ID NO: 68759 - RNA, 19 nt, Homo sapiens
  misc_RNA (1)...(19): siRNA sense strand
gccguggccugaucaacgu

SEQ ID NO: 68760 - RNA, 19 nt, Homo sapiens
  misc_RNA (1)...(19): siRNA sense strand
guggccagccgaauggaaa

SEQ ID NO: 68761 - RNA, 19 nt, Homo sapiens
  misc_RNA (1)...(19): siRNA sense strand
gagcacgaggaguuugaga

SEQ ID NO: 68762 - RNA, 19 nt, Homo sapiens
  misc_RNA (1)...(19): siRNA sense strand
gaacacagcuggaaucuuc

SEQ ID NO: 68763 - RNA, 19 nt, Homo sapiens
  misc_RNA (1)...(19): siRNA sense strand
gaacugcccuuugauaaua

SEQ ID NO: 68764 - RNA, 19 nt, Homo sapiens
  misc_RNA (1)...(19): siRNA sense strand
gcacaaguauucucaaaug

SEQ ID NO: 68765 - RNA, 19 nt, Homo sapiens
  misc_RNA (1)...(19): siRNA sense strand
gagcaucacugccuucgua

SEQ ID NO: 68766 - RNA, 19 nt, Homo sapiens
  misc_RNA (1)...(19): siRNA sense strand
caauaaaucugcuuccaaa

SEQ ID NO: 68767 - RNA, 19 nt, Homo sapiens
  misc_RNA (1)...(19): siRNA sense strand
guaaagagaggaaugaauu

SEQ ID NO: 68768 - RNA, 19 nt, Homo sapiens
  misc_RNA (1)...(19): siRNA sense strand
gaagaccgauuucaagaca

SEQ ID NO: 68769 - RNA, 19 nt, Homo sapiens
  misc_RNA (1)...(19): siRNA sense strand
gagcacaaguauucucaaa

SEQ ID NO: 68770 - RNA, 19 nt, Homo sapiens
  misc_RNA (1)...(19): siRNA sense strand
ccaaagaggagaucaauga

SEQ ID NO: 68771 - RNA, 19 nt, Homo sapiens
  misc_RNA (1)...(19): siRNA sense strand
gaucauugcugacuucgau

SEQ ID NO: 68772 - RNA, 19 nt, Homo sapiens
  misc_RNA (1)...(19): siRNA sense strand
agaagcagcuacucaauga

SEQ ID NO: 68773 - RNA, 19 nt, Homo sapiens
  misc_RNA (1)...(19): siRNA sense strand
gcuggaaucuucaucaguu

SEQ ID NO: 68774 - RNA, 19 nt, Homo sapiens
  misc_RNA (1)...(19): siRNA sense strand
gaucaugauugccaucuau

SEQ ID NO: 68775 - RNA, 19 nt, Homo sapiens
  misc_RNA (1)...(19): siRNA sense strand
gaaaugggucucagcauga

SEQ ID NO: 68776 - RNA, 19 nt, Homo sapiens
  misc_RNA (1)...(19): siRNA sense strand
gagaacaugcuccggaaua

SEQ ID NO: 68777 - RNA, 19 nt, Homo sapiens
  misc_RNA (1)...(19): siRNA sense strand
caucacugccuucguauua

SEQ ID NO: 68778 - RNA, 19 nt, Homo sapiens
  misc_RNA (1)...(19): siRNA sense strand
gcccugaacugcccuuuga

SEQ ID NO: 68779 - RNA, 19 nt, Homo sapiens
  misc_RNA (1)...(19): siRNA sense strand
gagagcauaucaagccauu

SEQ ID NO: 68780 - RNA, 19 nt, Homo sapiens
  misc_RNA (1)...(19): siRNA sense strand
ggauuaaugagaccuauuu

SEQ ID NO: 68781 - RNA, 19 nt, Homo sapiens
  misc_RNA (1)...(19): siRNA sense strand
gaaaugaucaacgacauga

SEQ ID NO: 68782 - RNA, 19 nt, Homo sapiens
  misc_RNA (1)...(19): siRNA sense strand
ccacugcuguguugaaaug

SEQ ID NO: 68783 - RNA, 19 nt, Homo sapiens
  misc_RNA (1)...(19): siRNA sense strand
caacucggauuucuuucuu

SEQ ID NO: 68784 - RNA, 19 nt, Homo sapiens
  misc_RNA (1)...(19): siRNA sense strand
caacaagcauucauucaac

SEQ ID NO: 68785 - RNA, 19 nt, Homo sapiens
  misc_RNA (1)...(19): siRNA sense strand
ugaccaauguggaagauga

SEQ ID NO: 68786 - RNA, 19 nt, Homo sapiens
  misc_RNA (1)...(19): siRNA sense strand
gcagaggauuauaaauguu

SEQ ID NO: 68787 - RNA, 19 nt, Homo sapiens
  misc_RNA (1)...(19): siRNA sense strand
ggaaguggcaguuugaugu

SEQ ID NO: 68788 - RNA, 19 nt, Homo sapiens
  misc_RNA (1)...(19): siRNA sense strand
gcauuuaucguucuucuau

SEQ ID NO: 68789 - RNA, 19 nt, Homo sapiens
  misc_RNA (1)...(19): siRNA sense strand
gaccagggcuuugccuuug

SEQ ID NO: 68790 - RNA, 19 nt, Homo sapiens
  misc_RNA (1)...(19): siRNA sense strand
ccacagcagaggauuauaa

SEQ ID NO: 68791 - RNA, 19 nt, Homo sapiens
  misc_RNA (1)...(19): siRNA sense strand
ggaagagggccaugguaaa

SEQ ID NO: 68792 - RNA, 19 nt, Homo sapiens
  misc_RNA (1)...(19): siRNA sense strand
ucacggcaauacaaaguuu

SEQ ID NO: 68793 - RNA, 19 nt, Homo sapiens
  misc_RNA (1)...(19): siRNA sense strand
gaggaagcauaauaucgaa

SEQ ID NO: 68794 - RNA, 19 nt, Homo sapiens
  misc_RNA (1)...(19): siRNA sense strand
aaaguuugcuuccuucuuc

SEQ ID NO: 68795 - RNA, 19 nt, Homo sapiens
  misc_RNA (1)...(19): siRNA sense strand
cuaagaaaccacaguauga

SEQ ID NO: 68796 - RNA, 19 nt, Homo sapiens
  misc_RNA (1)...(19): siRNA sense strand
gaaccugacuuucaauucc

SEQ ID NO: 68797 - RNA, 19 nt, Homo sapiens
  misc_RNA (1)...(19): siRNA sense strand
cagcagaggauuauaaaug

SEQ ID NO: 68798 - RNA, 19 nt, Homo sapiens
  misc_RNA (1)...(19): siRNA sense strand
uaaauauccugugguguga

SEQ ID NO: 68799 - RNA, 19 nt, Homo sapiens
  misc_RNA (1)...(19): siRNA sense strand
ggacuuccuuuggcgagua

SEQ ID NO: 68800 - RNA, 19 nt, Homo sapiens
  misc_RNA (1)...(19): siRNA sense strand
gaauagaacauaccaucga

SEQ ID NO: 68801 - RNA, 19 nt, Homo sapiens
  misc_RNA (1)...(19): siRNA sense strand
gcgaggaacucuacaccau

SEQ ID NO: 68802 - RNA, 19 nt, Homo sapiens
  misc_RNA (1)...(19): siRNA sense strand
gaacaacaacacaggaauc

SEQ ID NO: 68803 - RNA, 19 nt, Homo sapiens
  misc_RNA (1)...(19): siRNA sense strand
gaaaccacaguaugacauu

SEQ ID NO: 68804 - RNA, 19 nt, Homo sapiens
  misc_RNA (1)...(19): siRNA sense strand
ugaaggagcugagggaaca

SEQ ID NO: 68805 - RNA, 19 nt, Homo sapiens
  misc_RNA (1)...(19): siRNA sense strand
gagaagagagcauaucaag

SEQ ID NO: 68806 - RNA, 19 nt, Homo sapiens
  misc_RNA (1)...(19): siRNA sense strand
ucacugccuucguauuaaa

SEQ ID NO: 68807 - RNA, 19 nt, Homo sapiens
  misc_RNA (1)...(19): siRNA sense strand
ggaccagggcuuugccuuu

SEQ ID NO: 68808 - RNA, 19 nt, Homo sapiens
  misc_RNA (1)...(19): siRNA sense strand
aaaacuugcuguuggauua

SEQ ID NO: 68809 - RNA, 19 nt, Homo sapiens
  misc_RNA (1)...(19): siRNA sense strand
cuacggaaguggcaguuug

SEQ ID NO: 68810 - RNA, 19 nt, Homo sapiens
  misc_RNA (1)...(19): siRNA sense strand
cauucucacugauguuuaa

SEQ ID NO: 68811 - RNA, 19 nt, Homo sapiens
  misc_RNA (1)...(19): siRNA sense strand
caacaacacaggaaucauc

SEQ ID NO: 68812 - RNA, 19 nt, Homo sapiens
  misc_RNA (1)...(19): siRNA sense strand
agaccuaucucauccugaa

SEQ ID NO: 68813 - RNA, 19 nt, Homo sapiens
  misc_RNA (1)...(19): siRNA sense strand
caucaucuuugcauccauu

SEQ ID NO: 68814 - RNA, 19 nt, Homo sapiens
  misc_RNA (1)...(19): siRNA sense strand
aaacuuggucugugcauuu

SEQ ID NO: 68815 - RNA, 19 nt, Homo sapiens
  misc_RNA (1)...(19): siRNA sense strand
ggagacagagaaccaaaga

SEQ ID NO: 68816 - RNA, 19 nt, Homo sapiens
  misc_RNA (1)...(19): siRNA sense strand
gaggagcuguauucucaau

SEQ ID NO: 68817 - RNA, 19 nt, Homo sapiens
  misc_RNA (1)...(19): siRNA sense strand
ggaacacaaugagaacaug

SEQ ID NO: 68818 - RNA, 19 nt, Homo sapiens
  misc_RNA (1)...(19): siRNA sense strand
ggagaucaaugagaugaag

SEQ ID NO: 68819 - RNA, 19 nt, Homo sapiens
  misc_RNA (1)...(19): siRNA sense strand
uagcaacucggauuucuuu

SEQ ID NO: 68820 - RNA, 19 nt, Homo sapiens
  misc_RNA (1)...(19): siRNA sense strand
gaugugcgcugccuuacag

SEQ ID NO: 68821 - RNA, 19 nt, Homo sapiens
  misc_RNA (1)...(19): siRNA sense strand
gcuaugagaacgucaguau

SEQ ID NO: 68822 - RNA, 19 nt, Homo sapiens
  misc_RNA (1)...(19): siRNA sense strand
ugaccaaacucacucucuu

SEQ ID NO: 68823 - RNA, 19 nt, Homo sapiens
  misc_RNA (1)...(19): siRNA sense strand
caucaagggucauuacaac

SEQ ID NO: 68824 - RNA, 19 nt, Homo sapiens
  misc_RNA (1)...(19): siRNA sense strand
ucacugauguuuaaagacu

SEQ ID NO: 68825 - RNA, 19 nt, Homo sapiens
  misc_RNA (1)...(19): siRNA sense strand
cugaagauaucgucaagga

SEQ ID NO: 68826 - RNA, 19 nt, Homo sapiens
  misc_RNA (1)...(19): siRNA sense strand
gaagagggccaugguaaag

SEQ ID NO: 68827 - RNA, 19 nt, Homo sapiens
  misc_RNA (1)...(19): siRNA sense strand
gcauugagguagugaucug

SEQ ID NO: 68828 - RNA, 19 nt, Homo sapiens
  misc_RNA (1)...(19): siRNA sense strand
gcuaagaaaccacaguaug

SEQ ID NO: 68829 - RNA, 19 nt, Homo sapiens
  misc_RNA (1)...(19): siRNA sense strand
gaucaacaagcauucauuc

SEQ ID NO: 68830 - RNA, 19 nt, Homo sapiens
  misc_RNA (1)...(19): siRNA sense strand
aagaggagaucaaugagau

SEQ ID NO: 68831 - RNA, 19 nt, Homo sapiens
  misc_RNA (1)...(19): siRNA sense strand
gcgcaacuccuucaaaucu

SEQ ID NO: 68832 - RNA, 19 nt, Homo sapiens
  misc_RNA (1)...(19): siRNA sense strand
agacugaaaugaauaacca

SEQ ID NO: 68833 - RNA, 19 nt, Homo sapiens
  misc_RNA (1)...(19): siRNA sense strand
gcuguauucucaauccuau

SEQ ID NO: 68834 - RNA, 19 nt, Homo sapiens
  misc_RNA (1)...(19): siRNA sense strand
ucuaugcccugcucacuga

SEQ ID NO: 68835 - RNA, 19 nt, Homo sapiens
  misc_RNA (1)...(19): siRNA sense strand
gcgauaaauugagaagaga

SEQ ID NO: 68836 - RNA, 19 nt, Homo sapiens
  misc_RNA (1)...(19): siRNA sense strand
uugcagauguuaaaggauu

SEQ ID NO: 68837 - RNA, 19 nt, Homo sapiens
  misc_RNA (1)...(19): siRNA sense strand
aaucggaaguggugaugaa

SEQ ID NO: 68838 - RNA, 19 nt, Homo sapiens
  misc_RNA (1)...(19): siRNA sense strand
gagaacaacaacacaggaa

SEQ ID NO: 68839 - RNA, 19 nt, Homo sapiens
  misc_RNA (1)...(19): siRNA sense strand
agaccgauuucaagacauu

SEQ ID NO: 68840 - RNA, 19 nt, Homo sapiens
  misc_RNA (1)...(19): siRNA sense strand
cacaaguauucucaaauga

SEQ ID NO: 68841 - RNA, 19 nt, Homo sapiens
  misc_RNA (1)...(19): siRNA sense strand
ggcgauaaauugagaagag

SEQ ID NO: 68842 - RNA, 19 nt, Homo sapiens
  misc_RNA (1)...(19): siRNA sense strand
gaguggcgauaaauugaga

SEQ ID NO: 68843 - RNA, 19 nt, Homo sapiens
  misc_RNA (1)...(19): siRNA sense strand
uaaaucugcuuccaaacca

SEQ ID NO: 68844 - RNA, 19 nt, Homo sapiens
  misc_RNA (1)...(19): siRNA sense strand
uaugagaacgucaguauuc

SEQ ID NO: 68845 - RNA, 19 nt, Homo sapiens
  misc_RNA (1)...(19): siRNA sense strand
gaaccuggcaagccgaaug

SEQ ID NO: 68846 - RNA, 19 nt, Homo sapiens
  misc_RNA (1)...(19): siRNA sense strand
gcgcuaagaaaccacagua

SEQ ID NO: 68847 - RNA, 19 nt, Homo sapiens
  misc_RNA (1)...(19): siRNA sense strand
gcauacaggagaucaacaa

SEQ ID NO: 68848 - RNA, 19 nt, Homo sapiens
  misc_RNA (1)...(19): siRNA sense strand
ucggauuucuuucuuaaug

SEQ ID NO: 68849 - RNA, 19 nt, Homo sapiens
  misc_RNA (1)...(19): siRNA sense strand
aaugagggaugaaguguuc

SEQ ID NO: 68850 - RNA, 19 nt, Homo sapiens
  misc_RNA (1)...(19): siRNA sense strand
ggaaaugaucaacgacaug

SEQ ID NO: 68851 - RNA, 19 nt, Homo sapiens
  misc_RNA (1)...(19): siRNA sense strand
ggguaucagugaacaggaa

SEQ ID NO: 68852 - RNA, 19 nt, Homo sapiens
  misc_RNA (1)...(19): siRNA sense strand
gagaaggaccgagacaaug

SEQ ID NO: 68853 - RNA, 19 nt, Homo sapiens
  misc_RNA (1)...(19): siRNA sense strand
uuuccugggugccaucuua

SEQ ID NO: 68854 - RNA, 19 nt, Homo sapiens
  misc_RNA (1)...(19): siRNA sense strand
ucaacaagcauucauucaa

SEQ ID NO: 68855 - RNA, 19 nt, Homo sapiens
  misc_RNA (1)...(19): siRNA sense strand
uacaggagaucaacaagca

SEQ ID NO: 68856 - RNA, 19 nt, Homo sapiens
  misc_RNA (1)...(19): siRNA sense strand
aaacagcaaugugaagaca

SEQ ID NO: 68857 - RNA, 19 nt, Homo sapiens
  misc_RNA (1)...(19): siRNA sense strand
ugagaucauugcugacuuc

SEQ ID NO: 68858 - RNA, 19 nt, Homo sapiens
  misc_RNA (1)...(19): siRNA sense strand
gaauaaccagggaguggaa

SEQ ID NO: 68859 - RNA, 19 nt, Homo sapiens
  misc_RNA (1)...(19): siRNA sense strand
acaaugaggagcuguauuc

SEQ ID NO: 68860 - RNA, 19 nt, Homo sapiens
  misc_RNA (1)...(19): siRNA sense strand
ucucacugauguuuaaaga

SEQ ID NO: 68861 - RNA, 19 nt, Homo sapiens
  misc_RNA (1)...(19): siRNA sense strand
acucggauuucuuucuuaa

SEQ ID NO: 68862 - RNA, 19 nt, Homo sapiens
  misc_RNA (1)...(19): siRNA sense strand
gagaggaacccgugcaaua

SEQ ID NO: 68863 - RNA, 19 nt, Homo sapiens
  misc_RNA (1)...(19): siRNA sense strand
ggcgacagcuccaaccuua

SEQ ID NO: 68864 - RNA, 19 nt, Homo sapiens
  misc_RNA (1)...(19): siRNA sense strand
ugaaagguuugaagacaua

SEQ ID NO: 68865 - RNA, 19 nt, Homo sapiens
  misc_RNA (1)...(19): siRNA sense strand
gaagacagccugaugaaag

SEQ ID NO: 68866 - RNA, 19 nt, Homo sapiens
  misc_RNA (1)...(19): siRNA sense strand
gcccacagauacuugcuua

SEQ ID NO: 68867 - RNA, 19 nt, Homo sapiens
  misc_RNA (1)...(19): siRNA sense strand
aggaagaggucauaaagaa

SEQ ID NO: 68868 - RNA, 19 nt, Homo sapiens
  misc_RNA (1)...(19): siRNA sense strand
ccaagcagcuguccuccaa

SEQ ID NO: 68869 - RNA, 19 nt, Homo sapiens
  misc_RNA (1)...(19): siRNA sense strand
ccaccaagcugcuguacga

SEQ ID NO: 68870 - RNA, 19 nt, Homo sapiens
  misc_RNA (1)...(19): siRNA sense strand
gcaaaguucacauuucuga

SEQ ID NO: 68871 - RNA, 19 nt, Homo sapiens
  misc_RNA (1)...(19): siRNA sense strand
cacaugagauccagacuga

SEQ ID NO: 68872 - RNA, 19 nt, Homo sapiens
  misc_RNA (1)...(19): siRNA sense strand
gguaugcgcucuucuacau

SEQ ID NO: 68873 - RNA, 19 nt, Homo sapiens
  misc_RNA (1)...(19): siRNA sense strand
gcaccaagauccagagcau

SEQ ID NO: 68874 - RNA, 19 nt, Homo sapiens
  misc_RNA (1)...(19): siRNA sense strand
gaucgaagaagucaguauu

SEQ ID NO: 68875 - RNA, 19 nt, Homo sapiens
  misc_RNA (1)...(19): siRNA sense strand
ggaggugguucucgucuuc

SEQ ID NO: 68876 - RNA, 19 nt, Homo sapiens
  misc_RNA (1)...(19): siRNA sense strand
gaaccuggccaaucucaug

SEQ ID NO: 68877 - RNA, 19 nt, Homo sapiens
  misc_RNA (1)...(19): siRNA sense strand
ugaggagguuuaaauuuga

SEQ ID NO: 68878 - RNA, 19 nt, Homo sapiens
  misc_RNA (1)...(19): siRNA sense strand
agacaucucuggguucuga

SEQ ID NO: 68879 - RNA, 19 nt, Homo sapiens
  misc_RNA (1)...(19): siRNA sense strand
gaagaugggaaaguuauug

SEQ ID NO: 68880 - RNA, 19 nt, Homo sapiens
  misc_RNA (1)...(19): siRNA sense strand
agaccuaccuguacccaaa

SEQ ID NO: 68881 - RNA, 19 nt, Homo sapiens
  misc_RNA (1)...(19): siRNA sense strand
cauagccgaugacuuaaug

SEQ ID NO: 68882 - RNA, 19 nt, Homo sapiens
  misc_RNA (1)...(19): siRNA sense strand
caagaugggcuaugacuuc

SEQ ID NO: 68883 - RNA, 19 nt, Homo sapiens
  misc_RNA (1)...(19): siRNA sense strand
guuccugaaucgcgaauuu

SEQ ID NO: 68884 - RNA, 19 nt, Homo sapiens
  misc_RNA (1)...(19): siRNA sense strand
caaagaagacagccugaug

SEQ ID NO: 68885 - RNA, 19 nt, Homo sapiens
  misc_RNA (1)...(19): siRNA sense strand
agaaggagauggugaacau

SEQ ID NO: 68886 - RNA, 19 nt, Homo sapiens
  misc_RNA (1)...(19): siRNA sense strand
caagaugagugccaacaag

SEQ ID NO: 68887 - RNA, 19 nt, Homo sapiens
  misc_RNA (1)...(19): siRNA sense strand
ucaaagagaggaugauuca

SEQ ID NO: 68888 - RNA, 19 nt, Homo sapiens
  misc_RNA (1)...(19): siRNA sense strand
gcaugaggagguuuaaauu

SEQ ID NO: 68889 - RNA, 19 nt, Homo sapiens
  misc_RNA (1)...(19): siRNA sense strand
gcagggagaugaggagagu

SEQ ID NO: 68890 - RNA, 19 nt, Homo sapiens
  misc_RNA (1)...(19): siRNA sense strand
cagacuggcugcugaggaa

SEQ ID NO: 68891 - RNA, 19 nt, Homo sapiens
  misc_RNA (1)...(19): siRNA sense strand
ugagcaagaugggcuauga

SEQ ID NO: 68892 - RNA, 19 nt, Homo sapiens
  misc_RNA (1)...(19): siRNA sense strand
gggaaaggccagaugaaga

SEQ ID NO: 68893 - RNA, 19 nt, Homo sapiens
  misc_RNA (1)...(19): siRNA sense strand
cgaaauggaagaugggaaa

SEQ ID NO: 68894 - RNA, 19 nt, Homo sapiens
  misc_RNA (1)...(19): siRNA sense strand
gaagaggucauaaagaacu

SEQ ID NO: 68895 - RNA, 19 nt, Homo sapiens
  misc_RNA (1)...(19): siRNA sense strand
augaggagguuuaaauuug

SEQ ID NO: 68896 - RNA, 19 nt, Homo sapiens
  misc_RNA (1)...(19): siRNA sense strand
gugaggagaccaaguguga

SEQ ID NO: 68897 - RNA, 19 nt, Homo sapiens
  misc_RNA (1)...(19): siRNA sense strand
gaaaacggacgcccacuuu

SEQ ID NO: 68898 - RNA, 19 nt, Homo sapiens
  misc_RNA (1)...(19): siRNA sense strand
caugaggagguuuaaauuu

SEQ ID NO: 68899 - RNA, 19 nt, Homo sapiens
  misc_RNA (1)...(19): siRNA sense strand
gagaugggccugggcauga

SEQ ID NO: 68900 - RNA, 19 nt, Homo sapiens
  misc_RNA (1)...(19): siRNA sense strand
ucaaggccaucgagcaguu

SEQ ID NO: 68901 - RNA, 19 nt, Homo sapiens
  misc_RNA (1)...(19): siRNA sense strand
acaacaacaugcugugguu

SEQ ID NO: 68902 - RNA, 19 nt, Homo sapiens
  misc_RNA (1)...(19): siRNA sense strand
ucaagaacauccgggagaa

SEQ ID NO: 68903 - RNA, 19 nt, Homo sapiens
  misc_RNA (1)...(19): siRNA sense strand
cggcaaaguucacauuucu

SEQ ID NO: 68904 - RNA, 19 nt, Homo sapiens
  misc_RNA (1)...(19): siRNA sense strand
guugaaagguuugaagaca

SEQ ID NO: 68905 - RNA, 19 nt, Homo sapiens
  misc_RNA (1)...(19): siRNA sense strand
aaagaagacagccugauga

SEQ ID NO: 68906 - RNA, 19 nt, Homo sapiens
  misc_RNA (1)...(19): siRNA sense strand
aagacagccugaugaaaga

SEQ ID NO: 68907 - RNA, 19 nt, Homo sapiens
  misc_RNA (1)...(19): siRNA sense strand
gugggcuucuuucuguuua

SEQ ID NO: 68908 - RNA, 19 nt, Homo sapiens
  misc_RNA (1)...(19): siRNA sense strand
gaugaagaccuaccuguac

SEQ ID NO: 68909 - RNA, 19 nt, Homo sapiens
  misc_RNA (1)...(19): siRNA sense strand
uggaggaccuaaucccaaa

SEQ ID NO: 68910 - RNA, 19 nt, Homo sapiens
  misc_RNA (1)...(19): siRNA sense strand
caucagggaaugucaguga

SEQ ID NO: 68911 - RNA, 19 nt, Homo sapiens
  misc_RNA (1)...(19): siRNA sense strand
gcugaccaguugaaagguu

SEQ ID NO: 68912 - RNA, 19 nt, Homo sapiens
  misc_RNA (1)...(19): siRNA sense strand
gucaugcacuuaccuuugu

SEQ ID NO: 68913 - RNA, 19 nt, Homo sapiens
  misc_RNA (1)...(19): siRNA sense strand
caagacaucucuggguucu

SEQ ID NO: 68914 - RNA, 19 nt, Homo sapiens
  misc_RNA (1)...(19): siRNA sense strand
ggaaaggccagaugaagac

SEQ ID NO: 68915 - RNA, 19 nt, Homo sapiens
  misc_RNA (1)...(19): siRNA sense strand
acagccugaugaaagauua

SEQ ID NO: 68916 - RNA, 19 nt, Homo sapiens
  misc_RNA (1)...(19): siRNA sense strand
ggaagaugggaaaguuauu

SEQ ID NO: 68917 - RNA, 19 nt, Homo sapiens
  misc_RNA (1)...(19): siRNA sense strand
aauggaagaugggaaaguu

SEQ ID NO: 68918 - RNA, 19 nt, Homo sapiens
  misc_RNA (1)...(19): siRNA sense strand
gaggagaccaagugugaga

SEQ ID NO: 68919 - RNA, 19 nt, Homo sapiens
  misc_RNA (1)...(19): siRNA sense strand
gcagaucgaagaagucagu

SEQ ID NO: 68920 - RNA, 19 nt, Homo sapiens
  misc_RNA (1)...(19): siRNA sense strand
ggagaccaagugugagaaa

SEQ ID NO: 68921 - RNA, 19 nt, Homo sapiens
  misc_RNA (1)...(19): siRNA sense strand
gaggagaagcucaccaaca

SEQ ID NO: 68922 - RNA, 19 nt, Homo sapiens
  misc_RNA (1)...(19): siRNA sense strand
ugugugggcuucuuucugu

SEQ ID NO: 68923 - RNA, 19 nt, Homo sapiens
  misc_RNA (1)...(19): siRNA sense strand
uugaagacauaccugauau

SEQ ID NO: 68924 - RNA, 19 nt, Homo sapiens
  misc_RNA (1)...(19): siRNA sense strand
gcagauaucgugggcuuca

SEQ ID NO: 68925 - RNA, 19 nt, Homo sapiens
  misc_RNA (1)...(19): siRNA sense strand
gagaugaggagagugagaa

SEQ ID NO: 68926 - RNA, 19 nt, Homo sapiens
  misc_RNA (1)...(19): siRNA sense strand
ccaugucaccuccgaauau

SEQ ID NO: 68927 - RNA, 19 nt, Homo sapiens
  misc_RNA (1)...(19): siRNA sense strand
gugaagacguuugcuaguc

SEQ ID NO: 68928 - RNA, 19 nt, Homo sapiens
  misc_RNA (1)...(19): siRNA sense strand
ggcaugaggagguuuaaau

SEQ ID NO: 68929 - RNA, 19 nt, Homo sapiens
  misc_RNA (1)...(19): siRNA sense strand
cgaagaagucaguauuuua

SEQ ID NO: 68930 - RNA, 19 nt, Homo sapiens
  misc_RNA (1)...(19): siRNA sense strand
uaaugaagcagggagauga

SEQ ID NO: 68931 - RNA, 19 nt, Homo sapiens
  misc_RNA (1)...(19): siRNA sense strand
cccaagcacugcaaauaca

SEQ ID NO: 68932 - RNA, 19 nt, Homo sapiens
  misc_RNA (1)...(19): siRNA sense strand
ucccagaccuacuccaaga

SEQ ID NO: 68933 - RNA, 19 nt, Homo sapiens
  misc_RNA (1)...(19): siRNA sense strand
ggccuugcuuucuggcuuu

SEQ ID NO: 68934 - RNA, 19 nt, Homo sapiens
  misc_RNA (1)...(19): siRNA sense strand
gaagacauaccugauaucg

SEQ ID NO: 68935 - RNA, 19 nt, Homo sapiens
  misc_RNA (1)...(19): siRNA sense strand
gagggaccgugaaugucaa

SEQ ID NO: 68936 - RNA, 19 nt, Homo sapiens
  misc_RNA (1)...(19): siRNA sense strand
gcuaugacuucgacuacag

SEQ ID NO: 68937 - RNA, 19 nt, Homo sapiens
  misc_RNA (1)...(19): siRNA sense strand
gugcagaggccuugcuuuc

SEQ ID NO: 68938 - RNA, 19 nt, Homo sapiens
  misc_RNA (1)...(19): siRNA sense strand
gcacgggaaggaccuggaa

SEQ ID NO: 68939 - RNA, 19 nt, Homo sapiens
  misc_RNA (1)...(19): siRNA sense strand
ucgagaagaucaagaccau

SEQ ID NO: 68940 - RNA, 19 nt, Homo sapiens
  misc_RNA (1)...(19): siRNA sense strand
ggacuuugacgagcuccua

SEQ ID NO: 68941 - RNA, 19 nt, Homo sapiens
  misc_RNA (1)...(19): siRNA sense strand
gagugagaauucugucaag

SEQ ID NO: 68942 - RNA, 19 nt, Homo sapiens
  misc_RNA (1)...(19): siRNA sense strand
ggagauggugaacaugaga

SEQ ID NO: 68943 - RNA, 19 nt, Homo sapiens
  misc_RNA (1)...(19): siRNA sense strand
guggacgacuucaacaaca

SEQ ID NO: 68944 - RNA, 19 nt, Homo sapiens
  misc_RNA (1)...(19): siRNA sense strand
aaacggacgcccacuuugu

SEQ ID NO: 68945 - RNA, 19 nt, Homo sapiens
  misc_RNA (1)...(19): siRNA sense strand
aggagaagcucaccaacag

SEQ ID NO: 68946 - RNA, 19 nt, Homo sapiens
  misc_RNA (1)...(19): siRNA sense strand
uuagaugaccgguacgaaa

SEQ ID NO: 68947 - RNA, 19 nt, Homo sapiens
  misc_RNA (1)...(19): siRNA sense strand
gcaagaugggcuaugacuu

SEQ ID NO: 68948 - RNA, 19 nt, Homo sapiens
  misc_RNA (1)...(19): siRNA sense strand
ccaagcugcuguacgacau

SEQ ID NO: 68949 - RNA, 19 nt, Homo sapiens
  misc_RNA (1)...(19): siRNA sense strand
uugacgagcuccuaagcaa

SEQ ID NO: 68950 - RNA, 19 nt, Homo sapiens
  misc_RNA (1)...(19): siRNA sense strand
caugucaccuccgaauaug

SEQ ID NO: 68951 - RNA, 19 nt, Homo sapiens
  misc_RNA (1)...(19): siRNA sense strand
gaaggaccuggaaguggaa

SEQ ID NO: 68952 - RNA, 19 nt, Homo sapiens
  misc_RNA (1)...(19): siRNA sense strand
acagagggaccgugaaugu

SEQ ID NO: 68953 - RNA, 19 nt, Homo sapiens
  misc_RNA (1)...(19): siRNA sense strand
gcauccaggugagcgaaga

SEQ ID NO: 68954 - RNA, 19 nt, Homo sapiens
  misc_RNA (1)...(19): siRNA sense strand
ucagcucccuccuggaugu

SEQ ID NO: 68955 - RNA, 19 nt, Homo sapiens
  misc_RNA (1)...(19): siRNA sense strand
uagaugaccgguacgaaau

SEQ ID NO: 68956 - RNA, 19 nt, Homo sapiens
  misc_RNA (1)...(19): siRNA sense strand
agaugaagaccuaccugua

SEQ ID NO: 68957 - RNA, 19 nt, Homo sapiens
  misc_RNA (1)...(19): siRNA sense strand
gggagacaccgucaacauc

SEQ ID NO: 68958 - RNA, 19 nt, Homo sapiens
  misc_RNA (1)...(19): siRNA sense strand
gcagauccuguucgaguuc

SEQ ID NO: 68959 - RNA, 19 nt, Homo sapiens
  misc_RNA (1)...(19): siRNA sense strand
ugauugccgucgugcacua

SEQ ID NO: 68960 - RNA, 19 nt, Homo sapiens
  misc_RNA (1)...(19): siRNA sense strand
ucaggaagaggucauaaag

SEQ ID NO: 68961 - RNA, 19 nt, Homo sapiens
  misc_RNA (1)...(19): siRNA sense strand
gaccagcuaucaggaagag

SEQ ID NO: 68962 - RNA, 19 nt, Homo sapiens
  misc_RNA (1)...(19): siRNA sense strand
gggaagagguauaaacaaa

SEQ ID NO: 68963 - RNA, 19 nt, Homo sapiens
  misc_RNA (1)...(19): siRNA sense strand
aaacaaaggacgccgaaua

SEQ ID NO: 68964 - RNA, 19 nt, Homo sapiens
  misc_RNA (1)...(19): siRNA sense strand
ggaaacaaauggcugucaa

SEQ ID NO: 68965 - RNA, 19 nt, Homo sapiens
  misc_RNA (1)...(19): siRNA sense strand
gaaacccgcugccagacuu

SEQ ID NO: 68966 - RNA, 19 nt, Homo sapiens
  misc_RNA (1)...(19): siRNA sense strand
gaagagguauaaacaaagg

SEQ ID NO: 68967 - RNA, 19 nt, Homo sapiens
  misc_RNA (1)...(19): siRNA sense strand
uaacgaggccuaccgcaaa

SEQ ID NO: 68968 - RNA, 19 nt, Homo sapiens
  misc_RNA (1)...(19): siRNA sense strand
ggaagagguauaaacaaag

SEQ ID NO: 68969 - RNA, 19 nt, Homo sapiens
  misc_RNA (1)...(19): siRNA sense strand
gguauaaacaaaggguuaa

SEQ ID NO: 68970 - RNA, 19 nt, Homo sapiens
  misc_RNA (1)...(19): siRNA sense strand
aaaggacgccgaauagcuu

SEQ ID NO: 68971 - RNA, 19 nt, Homo sapiens
  misc_RNA (1)...(19): siRNA sense strand
gaaacaaauggcugucaag

SEQ ID NO: 68972 - RNA, 19 nt, Homo sapiens
  misc_RNA (1)...(19): siRNA sense strand
aaacaaauggcugucaaga

SEQ ID NO: 68973 - RNA, 19 nt, Homo sapiens
  misc_RNA (1)...(19): siRNA sense strand
caaaggacgccgaauagcu

SEQ ID NO: 68974 - RNA, 19 nt, Homo sapiens
  misc_RNA (1)...(19): siRNA sense strand
gcuggucuaugggauaauc

SEQ ID NO: 68975 - RNA, 19 nt, Homo sapiens
  misc_RNA (1)...(19): siRNA sense strand
ggaucaggccagaggaaga

SEQ ID NO: 68976 - RNA, 19 nt, Homo sapiens
  misc_RNA (1)...(19): siRNA sense strand
cuacagccgcuaccggaaa

SEQ ID NO: 68977 - RNA, 19 nt, Homo sapiens
  misc_RNA (1)...(19): siRNA sense strand
cugcuggucuaugggauaa

SEQ ID NO: 68978 - RNA, 19 nt, Homo sapiens
  misc_RNA (1)...(19): siRNA sense strand
uagggaagagguauaaaca

SEQ ID NO: 68979 - RNA, 19 nt, Homo sapiens
  misc_RNA (1)...(19): siRNA sense strand
aacaaaggacgccgaauag

SEQ ID NO: 68980 - RNA, 19 nt, Homo sapiens
  misc_RNA (1)...(19): siRNA sense strand
agguauaaacaaaggguua

SEQ ID NO: 68981 - RNA, 19 nt, Homo sapiens
  misc_RNA (1)...(19): siRNA sense strand
ggaaacccgcugccagacu

SEQ ID NO: 68982 - RNA, 19 nt, Homo sapiens
  misc_RNA (1)...(19): siRNA sense strand
gaucaggccagaggaagag

SEQ ID NO: 68983 - RNA, 19 nt, Homo sapiens
  misc_RNA (1)...(19): siRNA sense strand
aacaaauggcugucaagaa

SEQ ID NO: 68984 - RNA, 19 nt, Homo sapiens
  misc_RNA (1)...(19): siRNA sense strand
ucuaugggauaaucaugca

SEQ ID NO: 68985 - RNA, 19 nt, Homo sapiens
  misc_RNA (1)...(19): siRNA sense strand
cagcuuaucuacaaucaua

SEQ ID NO: 68986 - RNA, 19 nt, Homo sapiens
  misc_RNA (1)...(19): siRNA sense strand
gcacucggcuucccaaugu

SEQ ID NO: 68987 - RNA, 19 nt, Homo sapiens
  misc_RNA (1)...(19): siRNA sense strand
ggucucagcuuaucuacaa

SEQ ID NO: 68988 - RNA, 19 nt, Homo sapiens
  misc_RNA (1)...(19): siRNA sense strand
gcagggagguggagaggaa

SEQ ID NO: 68989 - RNA, 19 nt, Homo sapiens
  misc_RNA (1)...(19): siRNA sense strand
uaaagaggauggacauaga

SEQ ID NO: 68990 - RNA, 19 nt, Homo sapiens
  misc_RNA (1)...(19): siRNA sense strand
caaaggagagaaguuauua

SEQ ID NO: 68991 - RNA, 19 nt, Homo sapiens
  misc_RNA (1)...(19): siRNA sense strand
gaacauggcaccagaccuu

SEQ ID NO: 68992 - RNA, 19 nt, Homo sapiens
  misc_RNA (1)...(19): siRNA sense strand
gagaaguuauuacggugua

SEQ ID NO: 68993 - RNA, 19 nt, Homo sapiens
  misc_RNA (1)...(19): siRNA sense strand
ugacaaaggagagaaguua

SEQ ID NO: 68994 - RNA, 19 nt, Homo sapiens
  misc_RNA (1)...(19): siRNA sense strand
gaacaacccagaguacuug

SEQ ID NO: 68995 - RNA, 19 nt, Homo sapiens
  misc_RNA (1)...(19): siRNA sense strand
gaggaggccuucuauuaca

SEQ ID NO: 68996 - RNA, 19 nt, Homo sapiens
  misc_RNA (1)...(19): siRNA sense strand
ccacaggccuauuggcauu

SEQ ID NO: 68997 - RNA, 19 nt, Homo sapiens
  misc_RNA (1)...(19): siRNA sense strand
ccacgaauguaccaaaugu

SEQ ID NO: 68998 - RNA, 19 nt, Homo sapiens
  misc_RNA (1)...(19): siRNA sense strand
gaagaggguguccaugauu

SEQ ID NO: 68999 - RNA, 19 nt, Homo sapiens
  misc_RNA (1)...(19): siRNA sense strand
ggacgaggcuagagaacag

SEQ ID NO: 69000 - RNA, 19 nt, Homo sapiens
  misc_RNA (1)...(19): siRNA sense strand
ugucacagguuacuccuuu

SEQ ID NO: 69001 - RNA, 19 nt, Homo sapiens
  misc_RNA (1)...(19): siRNA sense strand
aaacaugagucuugguaug

SEQ ID NO: 69002 - RNA, 19 nt, Homo sapiens
  misc_RNA (1)...(19): siRNA sense strand
uacagcagauugcagauuu

SEQ ID NO: 69003 - RNA, 19 nt, Homo sapiens
  misc_RNA (1)...(19): siRNA sense strand
acaaggagauauaguagau

SEQ ID NO: 69004 - RNA, 19 nt, Homo sapiens
  misc_RNA (1)...(19): siRNA sense strand
gauccgagagcagaauuua

SEQ ID NO: 69005 - RNA, 19 nt, Homo sapiens
  misc_RNA (1)...(19): siRNA sense strand
ugaagaagagcaagaagaa

SEQ ID NO: 69006 - RNA, 19 nt, Homo sapiens
  misc_RNA (1)...(19): siRNA sense strand
aaugaaauguggccucuug

SEQ ID NO: 69007 - RNA, 19 nt, Homo sapiens
  misc_RNA (1)...(19): siRNA sense strand
uugaggaggccuucuauua

SEQ ID NO: 69008 - RNA, 19 nt, Homo sapiens
  misc_RNA (1)...(19): siRNA sense strand
cgccaggacuucaacauga

SEQ ID NO: 69009 - RNA, 19 nt, Homo sapiens
  misc_RNA (1)...(19): siRNA sense strand
gaagcagucccaagucgaa

SEQ ID NO: 69010 - RNA, 19 nt, Homo sapiens
  misc_RNA (1)...(19): siRNA sense strand
caaaagagguccaggagau

SEQ ID NO: 69011 - RNA, 19 nt, Homo sapiens
  misc_RNA (1)...(19): siRNA sense strand
uaaccuguuuguuccauug

SEQ ID NO: 69012 - RNA, 19 nt, Homo sapiens
  misc_RNA (1)...(19): siRNA sense strand
uagacuagcagaucucuuu

SEQ ID NO: 69013 - RNA, 19 nt, Homo sapiens
  misc_RNA (1)...(19): siRNA sense strand
gaccacgaauguaccaaau

SEQ ID NO: 69014 - RNA, 19 nt, Homo sapiens
  misc_RNA (1)...(19): siRNA sense strand
aaagcaagguucuuauucu

SEQ ID NO: 69015 - RNA, 19 nt, Homo sapiens
  misc_RNA (1)...(19): siRNA sense strand
cugauucuauugcguauga

SEQ ID NO: 69016 - RNA, 19 nt, Homo sapiens
  misc_RNA (1)...(19): siRNA sense strand
cugcuagugucacagguua

SEQ ID NO: 69017 - RNA, 19 nt, Homo sapiens
  misc_RNA (1)...(19): siRNA sense strand
ccaguuugguuaagaucaa

SEQ ID NO: 69018 - RNA, 19 nt, Homo sapiens
  misc_RNA (1)...(19): siRNA sense strand
ucaugcggaugcucgauaa

SEQ ID NO: 69019 - RNA, 19 nt, Homo sapiens
  misc_RNA (1)...(19): siRNA sense strand
gcauucugguugaugaaga

SEQ ID NO: 69020 - RNA, 19 nt, Homo sapiens
  misc_RNA (1)...(19): siRNA sense strand
gggcugcggucucugcaau

SEQ ID NO: 69021 - RNA, 19 nt, Homo sapiens
  misc_RNA (1)...(19): siRNA sense strand
gaggauggacauagaacuu

SEQ ID NO: 69022 - RNA, 19 nt, Homo sapiens
  misc_RNA (1)...(19): siRNA sense strand
ugauacaggagcaauuuaa

SEQ ID NO: 69023 - RNA, 19 nt, Homo sapiens
  misc_RNA (1)...(19): siRNA sense strand
accgugagcuggaggagua

SEQ ID NO: 69024 - RNA, 19 nt, Homo sapiens
  misc_RNA (1)...(19): siRNA sense strand
gaauuuacaggacauuaag

SEQ ID NO: 69025 - RNA, 19 nt, Homo sapiens
  misc_RNA (1)...(19): siRNA sense strand
aggaggaccagacaacuua

SEQ ID NO: 69026 - RNA, 19 nt, Homo sapiens
  misc_RNA (1)...(19): siRNA sense strand
aagaagaggguguccauga

SEQ ID NO: 69027 - RNA, 19 nt, Homo sapiens
  misc_RNA (1)...(19): siRNA sense strand
acagguuacuccuuugcua

SEQ ID NO: 69028 - RNA, 19 nt, Homo sapiens
  misc_RNA (1)...(19): siRNA sense strand
gaucguggaagcacuaauc

SEQ ID NO: 69029 - RNA, 19 nt, Homo sapiens
  misc_RNA (1)...(19): siRNA sense strand
agaagaggguguccaugau

SEQ ID NO: 69030 - RNA, 19 nt, Homo sapiens
  misc_RNA (1)...(19): siRNA sense strand
gaauguaccaaaugucuac

SEQ ID NO: 69031 - RNA, 19 nt, Homo sapiens
  misc_RNA (1)...(19): siRNA sense strand
aagaagagcaagaagaaga

SEQ ID NO: 69032 - RNA, 19 nt, Homo sapiens
  misc_RNA (1)...(19): siRNA sense strand
cagugaugcugccaccuuu

SEQ ID NO: 69033 - RNA, 19 nt, Homo sapiens
  misc_RNA (1)...(19): siRNA sense strand
ucgauacccugcucugaga

SEQ ID NO: 69034 - RNA, 19 nt, Homo sapiens
  misc_RNA (1)...(19): siRNA sense strand
caacuuaguccugcugaau

SEQ ID NO: 69035 - RNA, 19 nt, Homo sapiens
  misc_RNA (1)...(19): siRNA sense strand
gcugcggucucugcaauga

SEQ ID NO: 69036 - RNA, 19 nt, Homo sapiens
  misc_RNA (1)...(19): siRNA sense strand
gcauccaguuugguuaaga

SEQ ID NO: 69037 - RNA, 19 nt, Homo sapiens
  misc_RNA (1)...(19): siRNA sense strand
cuuacacucugcaauuuau

SEQ ID NO: 69038 - RNA, 19 nt, Homo sapiens
  misc_RNA (1)...(19): siRNA sense strand
uuaaacaugagucuuggua

SEQ ID NO: 69039 - RNA, 19 nt, Homo sapiens
  misc_RNA (1)...(19): siRNA sense strand
ucuacaaggagauauagua

SEQ ID NO: 69040 - RNA, 19 nt, Homo sapiens
  misc_RNA (1)...(19): siRNA sense strand
uacaggagcaauuuaagaa

SEQ ID NO: 69041 - RNA, 19 nt, Homo sapiens
  misc_RNA (1)...(19): siRNA sense strand
gcuagagaacagaaagaaa

SEQ ID NO: 69042 - RNA, 19 nt, Homo sapiens
  misc_RNA (1)...(19): siRNA sense strand
guagaucguggaagcacua

SEQ ID NO: 69043 - RNA, 19 nt, Homo sapiens
  misc_RNA (1)...(19): siRNA sense strand
acaaaggagagaaguuauu

SEQ ID NO: 69044 - RNA, 19 nt, Homo sapiens
  misc_RNA (1)...(19): siRNA sense strand
caccuuacacucugcaauu

SEQ ID NO: 69045 - RNA, 19 nt, Homo sapiens
  misc_RNA (1)...(19): siRNA sense strand
gugaugcugccaccuuuaa

SEQ ID NO: 69046 - RNA, 19 nt, Homo sapiens
  misc_RNA (1)...(19): siRNA sense strand
ccaaggccaucauugaaaa

SEQ ID NO: 69047 - RNA, 19 nt, Homo sapiens
  misc_RNA (1)...(19): siRNA sense strand
ugacuaccauggcauucug

SEQ ID NO: 69048 - RNA, 19 nt, Homo sapiens
  misc_RNA (1)...(19): siRNA sense strand
auacagcgauguggagguu

SEQ ID NO: 69049 - RNA, 19 nt, Homo sapiens
  misc_RNA (1)...(19): siRNA sense strand
agaacuggcuacccuuauc

SEQ ID NO: 69050 - RNA, 19 nt, Homo sapiens
  misc_RNA (1)...(19): siRNA sense strand
uuacauccauaaccuugug

SEQ ID NO: 69051 - RNA, 19 nt, Homo sapiens
  misc_RNA (1)...(19): siRNA sense strand
gagggauggcugccuuaaa

SEQ ID NO: 69052 - RNA, 19 nt, Homo sapiens
  misc_RNA (1)...(19): siRNA sense strand
guuacuccuuugcuaguga

SEQ ID NO: 69053 - RNA, 19 nt, Homo sapiens
  misc_RNA (1)...(19): siRNA sense strand
gaugagaacaacccagagu

SEQ ID NO: 69054 - RNA, 19 nt, Homo sapiens
  misc_RNA (1)...(19): siRNA sense strand
acagaacuggcuacccuua

SEQ ID NO: 69055 - RNA, 19 nt, Homo sapiens
  misc_RNA (1)...(19): siRNA sense strand
ggagggauggcugccuuaa

SEQ ID NO: 69056 - RNA, 19 nt, Homo sapiens
  misc_RNA (1)...(19): siRNA sense strand
gccaggacuucaacaugau

SEQ ID NO: 69057 - RNA, 19 nt, Homo sapiens
  misc_RNA (1)...(19): siRNA sense strand
aagaggguguccaugauuc

SEQ ID NO: 69058 - RNA, 19 nt, Homo sapiens
  misc_RNA (1)...(19): siRNA sense strand
gacaaaggagagaaguuau

SEQ ID NO: 69059 - RNA, 19 nt, Homo sapiens
  misc_RNA (1)...(19): siRNA sense strand
gauggcugccuuaaacaug

SEQ ID NO: 69060 - RNA, 19 nt, Homo sapiens
  misc_RNA (1)...(19): siRNA sense strand
ccuccaaggccaucauuga

SEQ ID NO: 69061 - RNA, 19 nt, Homo sapiens
  misc_RNA (1)...(19): siRNA sense strand
cagaauuuacaggacauua

SEQ ID NO: 69062 - RNA, 19 nt, Homo sapiens
  misc_RNA (1)...(19): siRNA sense strand
uggcuacccuuaucgauac

SEQ ID NO: 69063 - RNA, 19 nt, Homo sapiens
  misc_RNA (1)...(19): siRNA sense strand
gaaccaugggcucguguca

SEQ ID NO: 69064 - RNA, 19 nt, Homo sapiens
  misc_RNA (1)...(19): siRNA sense strand
agggauggcugccuuaaac

SEQ ID NO: 69065 - RNA, 19 nt, Homo sapiens
  misc_RNA (1)...(19): siRNA sense strand
ggcccucagucccagguuu

SEQ ID NO: 69066 - RNA, 19 nt, Homo sapiens
  misc_RNA (1)...(19): siRNA sense strand
ugaggaggccuucuauuac

SEQ ID NO: 69067 - RNA, 19 nt, Homo sapiens
  misc_RNA (1)...(19): siRNA sense strand
ugcggucucugcaaugaaa

SEQ ID NO: 69068 - RNA, 19 nt, Homo sapiens
  misc_RNA (1)...(19): siRNA sense strand
gauauaguagaucguggaa

SEQ ID NO: 69069 - RNA, 19 nt, Homo sapiens
  misc_RNA (1)...(19): siRNA sense strand
gguggucucagcuuaucua

SEQ ID NO: 69070 - RNA, 19 nt, Homo sapiens
  misc_RNA (1)...(19): siRNA sense strand
gguauggugacuccuguga

SEQ ID NO: 69071 - RNA, 19 nt, Homo sapiens
  misc_RNA (1)...(19): siRNA sense strand
cuaaagaggauggacauag

SEQ ID NO: 69072 - RNA, 19 nt, Homo sapiens
  misc_RNA (1)...(19): siRNA sense strand
aaugauacaggagcaauuu

SEQ ID NO: 69073 - RNA, 19 nt, Homo sapiens
  misc_RNA (1)...(19): siRNA sense strand
cgaauguaccaaaugucua

SEQ ID NO: 69074 - RNA, 19 nt, Homo sapiens
  misc_RNA (1)...(19): siRNA sense strand
gaagaagagcaagaagaag

SEQ ID NO: 69075 - RNA, 19 nt, Homo sapiens
  misc_RNA (1)...(19): siRNA sense strand
caggagaugaggaacaaga

SEQ ID NO: 69076 - RNA, 19 nt, Homo sapiens
  misc_RNA (1)...(19): siRNA sense strand
ccaccucugcugucccuaa

SEQ ID NO: 69077 - RNA, 19 nt, Homo sapiens
  misc_RNA (1)...(19): siRNA sense strand
ccucccaaguggcagauug

SEQ ID NO: 69078 - RNA, 19 nt, Homo sapiens
  misc_RNA (1)...(19): siRNA sense strand
ggccuucuauuacauccau

SEQ ID NO: 69079 - RNA, 19 nt, Homo sapiens
  misc_RNA (1)...(19): siRNA sense strand
caaugauacaggagcaauu

SEQ ID NO: 69080 - RNA, 19 nt, Homo sapiens
  misc_RNA (1)...(19): siRNA sense strand
ggaggcgcuuucccuugga

SEQ ID NO: 69081 - RNA, 19 nt, Homo sapiens
  misc_RNA (1)...(19): siRNA sense strand
ccuuacacucugcaauuua

SEQ ID NO: 69082 - RNA, 19 nt, Homo sapiens
  misc_RNA (1)...(19): siRNA sense strand
cauccaguuugguuaagau

SEQ ID NO: 69083 - RNA, 19 nt, Homo sapiens
  misc_RNA (1)...(19): siRNA sense strand
aaagaggauggacauagaa

SEQ ID NO: 69084 - RNA, 19 nt, Homo sapiens
  misc_RNA (1)...(19): siRNA sense strand
ggagccgacuacuggagau

SEQ ID NO: 69085 - RNA, 19 nt, Homo sapiens
  misc_RNA (1)...(19): siRNA sense strand
cagcuuaucuacaaucaua

SEQ ID NO: 69086 - RNA, 19 nt, Homo sapiens
  misc_RNA (1)...(19): siRNA sense strand
gcacucggcuucccaaugu

SEQ ID NO: 69087 - RNA, 19 nt, Homo sapiens
  misc_RNA (1)...(19): siRNA sense strand
ggucucagcuuaucuacaa

SEQ ID NO: 69088 - RNA, 19 nt, Homo sapiens
  misc_RNA (1)...(19): siRNA sense strand
gcagggagguggagaggaa

SEQ ID NO: 69089 - RNA, 19 nt, Homo sapiens
  misc_RNA (1)...(19): siRNA sense strand
uaaagaggauggacauaga

SEQ ID NO: 69090 - RNA, 19 nt, Homo sapiens
  misc_RNA (1)...(19): siRNA sense strand
caaaggagagaaguuauua

SEQ ID NO: 69091 - RNA, 19 nt, Homo sapiens
  misc_RNA (1)...(19): siRNA sense strand
gaacauggcaccagaccuu

SEQ ID NO: 69092 - RNA, 19 nt, Homo sapiens
  misc_RNA (1)...(19): siRNA sense strand
gagaaguuauuacggugua

SEQ ID NO: 69093 - RNA, 19 nt, Homo sapiens
  misc_RNA (1)...(19): siRNA sense strand
ugacaaaggagagaaguua

SEQ ID NO: 69094 - RNA, 19 nt, Homo sapiens
  misc_RNA (1)...(19): siRNA sense strand
gaacaacccagaguacuug

SEQ ID NO: 69095 - RNA, 19 nt, Homo sapiens
  misc_RNA (1)...(19): siRNA sense strand
gaggaggccuucuauuaca

SEQ ID NO: 69096 - RNA, 19 nt, Homo sapiens
  misc_RNA (1)...(19): siRNA sense strand
ccacaggccuauuggcauu

SEQ ID NO: 69097 - RNA, 19 nt, Homo sapiens
  misc_RNA (1)...(19): siRNA sense strand
ccacgaauguaccaaaugu

SEQ ID NO: 69098 - RNA, 19 nt, Homo sapiens
  misc_RNA (1)...(19): siRNA sense strand
gaagaggguguccaugauu

SEQ ID NO: 69099 - RNA, 19 nt, Homo sapiens
  misc_RNA (1)...(19): siRNA sense strand
ggacgaggcuagagaacag

SEQ ID NO: 69100 - RNA, 19 nt, Homo sapiens
  misc_RNA (1)...(19): siRNA sense strand
ugucacagguuacuccuuu

SEQ ID NO: 69101 - RNA, 19 nt, Homo sapiens
  misc_RNA (1)...(19): siRNA sense strand
aaacaugagucuugguaug

SEQ ID NO: 69102 - RNA, 19 nt, Homo sapiens
  misc_RNA (1)...(19): siRNA sense strand
uacagcagauugcagauuu

SEQ ID NO: 69103 - RNA, 19 nt, Homo sapiens
  misc_RNA (1)...(19): siRNA sense strand
acaaggagauauaguagau

SEQ ID NO: 69104 - RNA, 19 nt, Homo sapiens
  misc_RNA (1)...(19): siRNA sense strand
gauccgagagcagaauuua

SEQ ID NO: 69105 - RNA, 19 nt, Homo sapiens
  misc_RNA (1)...(19): siRNA sense strand
ugaagaagagcaagaagaa

SEQ ID NO: 69106 - RNA, 19 nt, Homo sapiens
  misc_RNA (1)...(19): siRNA sense strand
aaugaaauguggccucuug

SEQ ID NO: 69107 - RNA, 19 nt, Homo sapiens
  misc_RNA (1)...(19): siRNA sense strand
uugaggaggccuucuauua

SEQ ID NO: 69108 - RNA, 19 nt, Homo sapiens
  misc_RNA (1)...(19): siRNA sense strand
cgccaggacuucaacauga

SEQ ID NO: 69109 - RNA, 19 nt, Homo sapiens
  misc_RNA (1)...(19): siRNA sense strand
gaagcagucccaagucgaa

SEQ ID NO: 69110 - RNA, 19 nt, Homo sapiens
  misc_RNA (1)...(19): siRNA sense strand
caaaagagguccaggagau

SEQ ID NO: 69111 - RNA, 19 nt, Homo sapiens
  misc_RNA (1)...(19): siRNA sense strand
uaaccuguuuguuccauug

SEQ ID NO: 69112 - RNA, 19 nt, Homo sapiens
  misc_RNA (1)...(19): siRNA sense strand
uagacuagcagaucucuuu

SEQ ID NO: 69113 - RNA, 19 nt, Homo sapiens
  misc_RNA (1)...(19): siRNA sense strand
gaccacgaauguaccaaau

SEQ ID NO: 69114 - RNA, 19 nt, Homo sapiens
  misc_RNA (1)...(19): siRNA sense strand
aaagcaagguucuuauucu

SEQ ID NO: 69115 - RNA, 19 nt, Homo sapiens
  misc_RNA (1)...(19): siRNA sense strand
cugauucuauugcguauga

SEQ ID NO: 69116 - RNA, 19 nt, Homo sapiens
  misc_RNA (1)...(19): siRNA sense strand
cugcuagugucacagguua

SEQ ID NO: 69117 - RNA, 19 nt, Homo sapiens
  misc_RNA (1)...(19): siRNA sense strand
ccaguuugguuaagaucaa

SEQ ID NO: 69118 - RNA, 19 nt, Homo sapiens
  misc_RNA (1)...(19): siRNA sense strand
ucaugcggaugcucgauaa

SEQ ID NO: 69119 - RNA, 19 nt, Homo sapiens
  misc_RNA (1)...(19): siRNA sense strand
gcauucugguugaugaaga

SEQ ID NO: 69120 - RNA, 19 nt, Homo sapiens
  misc_RNA (1)...(19): siRNA sense strand
gggcugcggucucugcaau

SEQ ID NO: 69121 - RNA, 19 nt, Homo sapiens
  misc_RNA (1)...(19): siRNA sense strand
gaggauggacauagaacuu

SEQ ID NO: 69122 - RNA, 19 nt, Homo sapiens
  misc_RNA (1)...(19): siRNA sense strand
ugauacaggagcaauuuaa

SEQ ID NO: 69123 - RNA, 19 nt, Homo sapiens
  misc_RNA (1)...(19): siRNA sense strand
accgugagcuggaggagua

SEQ ID NO: 69124 - RNA, 19 nt, Homo sapiens
  misc_RNA (1)...(19): siRNA sense strand
gaauuuacaggacauuaag

SEQ ID NO: 69125 - RNA, 19 nt, Homo sapiens
  misc_RNA (1)...(19): siRNA sense strand
aggaggaccagacaacuua

SEQ ID NO: 69126 - RNA, 19 nt, Homo sapiens
  misc_RNA (1)...(19): siRNA sense strand
aagaagaggguguccauga

SEQ ID NO: 69127 - RNA, 19 nt, Homo sapiens
  misc_RNA (1)...(19): siRNA sense strand
acagguuacuccuuugcua

SEQ ID NO: 69128 - RNA, 19 nt, Homo sapiens
  misc_RNA (1)...(19): siRNA sense strand
gaucguggaagcacuaauc

SEQ ID NO: 69129 - RNA, 19 nt, Homo sapiens
  misc_RNA (1)...(19): siRNA sense strand
agaagaggguguccaugau

SEQ ID NO: 69130 - RNA, 19 nt, Homo sapiens
  misc_RNA (1)...(19): siRNA sense strand
gaauguaccaaaugucuac

SEQ ID NO: 69131 - RNA, 19 nt, Homo sapiens
  misc_RNA (1)...(19): siRNA sense strand
aagaagagcaagaagaaga

SEQ ID NO: 69132 - RNA, 19 nt, Homo sapiens
  misc_RNA (1)...(19): siRNA sense strand
cagugaugcugccaccuuu

SEQ ID NO: 69133 - RNA, 19 nt, Homo sapiens
  misc_RNA (1)...(19): siRNA sense strand
ucgauacccugcucugaga

SEQ ID NO: 69134 - RNA, 19 nt, Homo sapiens
  misc_RNA (1)...(19): siRNA sense strand
caacuuaguccugcugaau

SEQ ID NO: 69135 - RNA, 19 nt, Homo sapiens
  misc_RNA (1)...(19): siRNA sense strand
gcugcggucucugcaauga

SEQ ID NO: 69136 - RNA, 19 nt, Homo sapiens
  misc_RNA (1)...(19): siRNA sense strand
gcauccaguuugguuaaga

SEQ ID NO: 69137 - RNA, 19 nt, Homo sapiens
  misc_RNA (1)...(19): siRNA sense strand
cuuacacucugcaauuuau

SEQ ID NO: 69138 - RNA, 19 nt, Homo sapiens
  misc_RNA (1)...(19): siRNA sense strand
uuaaacaugagucuuggua

SEQ ID NO: 69139 - RNA, 19 nt, Homo sapiens
  misc_RNA (1)...(19): siRNA sense strand
ucuacaaggagauauagua

SEQ ID NO: 69140 - RNA, 19 nt, Homo sapiens
  misc_RNA (1)...(19): siRNA sense strand
uacaggagcaauuuaagaa

SEQ ID NO: 69141 - RNA, 19 nt, Homo sapiens
  misc_RNA (1)...(19): siRNA sense strand
gcuagagaacagaaagaaa

SEQ ID NO: 69142 - RNA, 19 nt, Homo sapiens
  misc_RNA (1)...(19): siRNA sense strand
guagaucguggaagcacua

SEQ ID NO: 69143 - RNA, 19 nt, Homo sapiens
  misc_RNA (1)...(19): siRNA sense strand
acaaaggagagaaguuauu

SEQ ID NO: 69144 - RNA, 19 nt, Homo sapiens
  misc_RNA (1)...(19): siRNA sense strand
caccuuacacucugcaauu

SEQ ID NO: 69145 - RNA, 19 nt, Homo sapiens
  misc_RNA (1)...(19): siRNA sense strand
gugaugcugccaccuuuaa

SEQ ID NO: 69146 - RNA, 19 nt, Homo sapiens
  misc_RNA (1)...(19): siRNA sense strand
ccaaggccaucauugaaaa

SEQ ID NO: 69147 - RNA, 19 nt, Homo sapiens
  misc_RNA (1)...(19): siRNA sense strand
ugacuaccauggcauucug

SEQ ID NO: 69148 - RNA, 19 nt, Homo sapiens
  misc_RNA (1)...(19): siRNA sense strand
auacagcgauguggagguu

SEQ ID NO: 69149 - RNA, 19 nt, Homo sapiens
  misc_RNA (1)...(19): siRNA sense strand
agaacuggcuacccuuauc

SEQ ID NO: 69150 - RNA, 19 nt, Homo sapiens
  misc_RNA (1)...(19): siRNA sense strand
uuacauccauaaccuugug

SEQ ID NO: 69151 - RNA, 19 nt, Homo sapiens
  misc_RNA (1)...(19): siRNA sense strand
gagggauggcugccuuaaa

SEQ ID NO: 69152 - RNA, 19 nt, Homo sapiens
  misc_RNA (1)...(19): siRNA sense strand
guuacuccuuugcuaguga

SEQ ID NO: 69153 - RNA, 19 nt, Homo sapiens
  misc_RNA (1)...(19): siRNA sense strand
gaugagaacaacccagagu

SEQ ID NO: 69154 - RNA, 19 nt, Homo sapiens
  misc_RNA (1)...(19): siRNA sense strand
acagaacuggcuacccuua

SEQ ID NO: 69155 - RNA, 19 nt, Homo sapiens
  misc_RNA (1)...(19): siRNA sense strand
ggagggauggcugccuuaa

SEQ ID NO: 69156 - RNA, 19 nt, Homo sapiens
  misc_RNA (1)...(19): siRNA sense strand
gccaggacuucaacaugau

SEQ ID NO: 69157 - RNA, 19 nt, Homo sapiens
  misc_RNA (1)...(19): siRNA sense strand
aagaggguguccaugauuc

SEQ ID NO: 69158 - RNA, 19 nt, Homo sapiens
  misc_RNA (1)...(19): siRNA sense strand
gacaaaggagagaaguuau

SEQ ID NO: 69159 - RNA, 19 nt, Homo sapiens
  misc_RNA (1)...(19): siRNA sense strand
gauggcugccuuaaacaug

SEQ ID NO: 69160 - RNA, 19 nt, Homo sapiens
  misc_RNA (1)...(19): siRNA sense strand
ccuccaaggccaucauuga

SEQ ID NO: 69161 - RNA, 19 nt, Homo sapiens
  misc_RNA (1)...(19): siRNA sense strand
cagaauuuacaggacauua

SEQ ID NO: 69162 - RNA, 19 nt, Homo sapiens
  misc_RNA (1)...(19): siRNA sense strand
uggcuacccuuaucgauac

SEQ ID NO: 69163 - RNA, 19 nt, Homo sapiens
  misc_RNA (1)...(19): siRNA sense strand
gaaccaugggcucguguca

SEQ ID NO: 69164 - RNA, 19 nt, Homo sapiens
  misc_RNA (1)...(19): siRNA sense strand
agggauggcugccuuaaac

SEQ ID NO: 69165 - RNA, 19 nt, Homo sapiens
  misc_RNA (1)...(19): siRNA sense strand
ggcccucagucccagguuu

SEQ ID NO: 69166 - RNA, 19 nt, Homo sapiens
  misc_RNA (1)...(19): siRNA sense strand
ugaggaggccuucuauuac

SEQ ID NO: 69167 - RNA, 19 nt, Homo sapiens
  misc_RNA (1)...(19): siRNA sense strand
ugcggucucugcaaugaaa

SEQ ID NO: 69168 - RNA, 19 nt, Homo sapiens
  misc_RNA (1)...(19): siRNA sense strand
gauauaguagaucguggaa

SEQ ID NO: 69169 - RNA, 19 nt, Homo sapiens
  misc_RNA (1)...(19): siRNA sense strand
gguggucucagcuuaucua

SEQ ID NO: 69170 - RNA, 19 nt, Homo sapiens
  misc_RNA (1)...(19): siRNA sense strand
gguauggugacuccuguga

SEQ ID NO: 69171 - RNA, 19 nt, Homo sapiens
  misc_RNA (1)...(19): siRNA sense strand
cuaaagaggauggacauag

SEQ ID NO: 69172 - RNA, 19 nt, Homo sapiens
  misc_RNA (1)...(19): siRNA sense strand
aaugauacaggagcaauuu

SEQ ID NO: 69173 - RNA, 19 nt, Homo sapiens
  misc_RNA (1)...(19): siRNA sense strand
cgaauguaccaaaugucua

SEQ ID NO: 69174 - RNA, 19 nt, Homo sapiens
  misc_RNA (1)...(19): siRNA sense strand
gaagaagagcaagaagaag

SEQ ID NO: 69175 - RNA, 19 nt, Homo sapiens
  misc_RNA (1)...(19): siRNA sense strand
caggagaugaggaacaaga

SEQ ID NO: 69176 - RNA, 19 nt, Homo sapiens
  misc_RNA (1)...(19): siRNA sense strand
ccaccucugcugucccuaa

SEQ ID NO: 69177 - RNA, 19 nt, Homo sapiens
  misc_RNA (1)...(19): siRNA sense strand
ccucccaaguggcagauug

SEQ ID NO: 69178 - RNA, 19 nt, Homo sapiens
  misc_RNA (1)...(19): siRNA sense strand
ggccuucuauuacauccau

SEQ ID NO: 69179 - RNA, 19 nt, Homo sapiens
  misc_RNA (1)...(19): siRNA sense strand
caaugauacaggagcaauu

SEQ ID NO: 69180 - RNA, 19 nt, Homo sapiens
  misc_RNA (1)...(19): siRNA sense strand
ggaggcgcuuucccuugga

SEQ ID NO: 69181 - RNA, 19 nt, Homo sapiens
  misc_RNA (1)...(19): siRNA sense strand
ccuuacacucugcaauuua

SEQ ID NO: 69182 - RNA, 19 nt, Homo sapiens
  misc_RNA (1)...(19): siRNA sense strand
cauccaguuugguuaagau

SEQ ID NO: 69183 - RNA, 19 nt, Homo sapiens
  misc_RNA (1)...(19): siRNA sense strand
aaagaggauggacauagaa

SEQ ID NO: 69184 - RNA, 19 nt, Homo sapiens
  misc_RNA (1)...(19): siRNA sense strand
ggagccgacuacuggagau

SEQ ID NO: 69185 - RNA, 19 nt, Homo sapiens
  misc_RNA (1)...(19): siRNA sense strand
cagcuuaucuacaaucaua

SEQ ID NO: 69186 - RNA, 19 nt, Homo sapiens
  misc_RNA (1)...(19): siRNA sense strand
ggucucagcuuaucuacaa

SEQ ID NO: 69187 - RNA, 19 nt, Homo sapiens
  misc_RNA (1)...(19): siRNA sense strand
gcagggagguggagaggaa

SEQ ID NO: 69188 - RNA, 19 nt, Homo sapiens
  misc_RNA (1)...(19): siRNA sense strand
uaaagaggauggacauaga

SEQ ID NO: 69189 - RNA, 19 nt, Homo sapiens
  misc_RNA (1)...(19): siRNA sense strand
caaaggagagaaguuauua

SEQ ID NO: 69190 - RNA, 19 nt, Homo sapiens
  misc_RNA (1)...(19): siRNA sense strand
gaacauggcaccagaccuu

SEQ ID NO: 69191 - RNA, 19 nt, Homo sapiens
  misc_RNA (1)...(19): siRNA sense strand
gagaaguuauuacggugua

SEQ ID NO: 69192 - RNA, 19 nt, Homo sapiens
  misc_RNA (1)...(19): siRNA sense strand
ugacaaaggagagaaguua

SEQ ID NO: 69193 - RNA, 19 nt, Homo sapiens
  misc_RNA (1)...(19): siRNA sense strand
gaacaacccagaguacuug

SEQ ID NO: 69194 - RNA, 19 nt, Homo sapiens
  misc_RNA (1)...(19): siRNA sense strand
gaggaggccuucuauuaca

SEQ ID NO: 69195 - RNA, 19 nt, Homo sapiens
  misc_RNA (1)...(19): siRNA sense strand
ccacaggccuauuggcauu

SEQ ID NO: 69196 - RNA, 19 nt, Homo sapiens
  misc_RNA (1)...(19): siRNA sense strand
ccacgaauguaccaaaugu

SEQ ID NO: 69197 - RNA, 19 nt, Homo sapiens
  misc_RNA (1)...(19): siRNA sense strand
gaagaggguguccaugauu

SEQ ID NO: 69198 - RNA, 19 nt, Homo sapiens
  misc_RNA (1)...(19): siRNA sense strand
ggacgaggcuagagaacag

SEQ ID NO: 69199 - RNA, 19 nt, Homo sapiens
  misc_RNA (1)...(19): siRNA sense strand
ugucacagguuacuccuuu

SEQ ID NO: 69200 - RNA, 19 nt, Homo sapiens
  misc_RNA (1)...(19): siRNA sense strand
aaacaugagucuugguaug

SEQ ID NO: 69201 - RNA, 19 nt, Homo sapiens
  misc_RNA (1)...(19): siRNA sense strand
uacagcagauugcagauuu

SEQ ID NO: 69202 - RNA, 19 nt, Homo sapiens
  misc_RNA (1)...(19): siRNA sense strand
acaaggagauauaguagau

SEQ ID NO: 69203 - RNA, 19 nt, Homo sapiens
  misc_RNA (1)...(19): siRNA sense strand
gauccgagagcagaauuua

SEQ ID NO: 69204 - RNA, 19 nt, Homo sapiens
  misc_RNA (1)...(19): siRNA sense strand
aaugaaauguggccucuug

SEQ ID NO: 69205 - RNA, 19 nt, Homo sapiens
  misc_RNA (1)...(19): siRNA sense strand
uugaggaggccuucuauua

SEQ ID NO: 69206 - RNA, 19 nt, Homo sapiens
  misc_RNA (1)...(19): siRNA sense strand
cgccaggacuucaacauga

SEQ ID NO: 69207 - RNA, 19 nt, Homo sapiens
  misc_RNA (1)...(19): siRNA sense strand
gaagcagucccaagucgaa

SEQ ID NO: 69208 - RNA, 19 nt, Homo sapiens
  misc_RNA (1)...(19): siRNA sense strand
caaaagagguccaggagau

SEQ ID NO: 69209 - RNA, 19 nt, Homo sapiens
  misc_RNA (1)...(19): siRNA sense strand
uaaccuguuuguuccauug

SEQ ID NO: 69210 - RNA, 19 nt, Homo sapiens
  misc_RNA (1)...(19): siRNA sense strand
uagacuagcagaucucuuu

SEQ ID NO: 69211 - RNA, 19 nt, Homo sapiens
  misc_RNA (1)...(19): siRNA sense strand
gaccacgaauguaccaaau

SEQ ID NO: 69212 - RNA, 19 nt, Homo sapiens
  misc_RNA (1)...(19): siRNA sense strand
aaagcaagguucuuauucu

SEQ ID NO: 69213 - RNA, 19 nt, Homo sapiens
  misc_RNA (1)...(19): siRNA sense strand
cugauucuauugcguauga

SEQ ID NO: 69214 - RNA, 19 nt, Homo sapiens
  misc_RNA (1)...(19): siRNA sense strand
cugcuagugucacagguua

SEQ ID NO: 69215 - RNA, 19 nt, Homo sapiens
  misc_RNA (1)...(19): siRNA sense strand
ccaguuugguuaagaucaa

SEQ ID NO: 69216 - RNA, 19 nt, Homo sapiens
  misc_RNA (1)...(19): siRNA sense strand
ucaugcggaugcucgauaa

SEQ ID NO: 69217 - RNA, 19 nt, Homo sapiens
  misc_RNA (1)...(19): siRNA sense strand
gcauucugguugaugaaga

SEQ ID NO: 69218 - RNA, 19 nt, Homo sapiens
  misc_RNA (1)...(19): siRNA sense strand
gggcugcggucucugcaau

SEQ ID NO: 69219 - RNA, 19 nt, Homo sapiens
  misc_RNA (1)...(19): siRNA sense strand
gaggauggacauagaacuu

SEQ ID NO: 69220 - RNA, 19 nt, Homo sapiens
  misc_RNA (1)...(19): siRNA sense strand
ugauacaggagcaauuuaa

SEQ ID NO: 69221 - RNA, 19 nt, Homo sapiens
  misc_RNA (1)...(19): siRNA sense strand
accgugagcuggaggagua

SEQ ID NO: 69222 - RNA, 19 nt, Homo sapiens
  misc_RNA (1)...(19): siRNA sense strand
gaauuuacaggacauuaag

SEQ ID NO: 69223 - RNA, 19 nt, Homo sapiens
  misc_RNA (1)...(19): siRNA sense strand
aggaggaccagacaacuua

SEQ ID NO: 69224 - RNA, 19 nt, Homo sapiens
  misc_RNA (1)...(19): siRNA sense strand
aagaagaggguguccauga

SEQ ID NO: 69225 - RNA, 19 nt, Homo sapiens
  misc_RNA (1)...(19): siRNA sense strand
acagguuacuccuuugcua

SEQ ID NO: 69226 - RNA, 19 nt, Homo sapiens
  misc_RNA (1)...(19): siRNA sense strand
gaucguggaagcacuaauc

SEQ ID NO: 69227 - RNA, 19 nt, Homo sapiens
  misc_RNA (1)...(19): siRNA sense strand
agaagaggguguccaugau

SEQ ID NO: 69228 - RNA, 19 nt, Homo sapiens
  misc_RNA (1)...(19): siRNA sense strand
gaauguaccaaaugucuac

SEQ ID NO: 69229 - RNA, 19 nt, Homo sapiens
  misc_RNA (1)...(19): siRNA sense strand
ucgauacccugcucugaga

SEQ ID NO: 69230 - RNA, 19 nt, Homo sapiens
  misc_RNA (1)...(19): siRNA sense strand
caacuuaguccugcugaau

SEQ ID NO: 69231 - RNA, 19 nt, Homo sapiens
  misc_RNA (1)...(19): siRNA sense strand
gcugcggucucugcaauga

SEQ ID NO: 69232 - RNA, 19 nt, Homo sapiens
  misc_RNA (1)...(19): siRNA sense strand
gcauccaguuugguuaaga

SEQ ID NO: 69233 - RNA, 19 nt, Homo sapiens
  misc_RNA (1)...(19): siRNA sense strand
cuuacacucugcaauuuau

SEQ ID NO: 69234 - RNA, 19 nt, Homo sapiens
  misc_RNA (1)...(19): siRNA sense strand
uuaaacaugagucuuggua

SEQ ID NO: 69235 - RNA, 19 nt, Homo sapiens
  misc_RNA (1)...(19): siRNA sense strand
ucuacaaggagauauagua

SEQ ID NO: 69236 - RNA, 19 nt, Homo sapiens
  misc_RNA (1)...(19): siRNA sense strand
uacaggagcaauuuaagaa

SEQ ID NO: 69237 - RNA, 19 nt, Homo sapiens
  misc_RNA (1)...(19): siRNA sense strand
gcuagagaacagaaagaaa

SEQ ID NO: 69238 - RNA, 19 nt, Homo sapiens
  misc_RNA (1)...(19): siRNA sense strand
guagaucguggaagcacua

SEQ ID NO: 69239 - RNA, 19 nt, Homo sapiens
  misc_RNA (1)...(19): siRNA sense strand
acaaaggagagaaguuauu

SEQ ID NO: 69240 - RNA, 19 nt, Homo sapiens
  misc_RNA (1)...(19): siRNA sense strand
caccuuacacucugcaauu

SEQ ID NO: 69241 - RNA, 19 nt, Homo sapiens
  misc_RNA (1)...(19): siRNA sense strand
ccaaggccaucauugaaaa

SEQ ID NO: 69242 - RNA, 19 nt, Homo sapiens
  misc_RNA (1)...(19): siRNA sense strand
ugacuaccauggcauucug

SEQ ID NO: 69243 - RNA, 19 nt, Homo sapiens
  misc_RNA (1)...(19): siRNA sense strand
auacagcgauguggagguu

SEQ ID NO: 69244 - RNA, 19 nt, Homo sapiens
  misc_RNA (1)...(19): siRNA sense strand
agaacuggcuacccuuauc

SEQ ID NO: 69245 - RNA, 19 nt, Homo sapiens
  misc_RNA (1)...(19): siRNA sense strand
uuacauccauaaccuugug

SEQ ID NO: 69246 - RNA, 19 nt, Homo sapiens
  misc_RNA (1)...(19): siRNA sense strand
gagggauggcugccuuaaa

SEQ ID NO: 69247 - RNA, 19 nt, Homo sapiens
  misc_RNA (1)...(19): siRNA sense strand
guuacuccuuugcuaguga

SEQ ID NO: 69248 - RNA, 19 nt, Homo sapiens
  misc_RNA (1)...(19): siRNA sense strand
acagaacuggcuacccuua

SEQ ID NO: 69249 - RNA, 19 nt, Homo sapiens
  misc_RNA (1)...(19): siRNA sense strand
gaugagaacaacccagagu

SEQ ID NO: 69250 - RNA, 19 nt, Homo sapiens
  misc_RNA (1)...(19): siRNA sense strand
ggagggauggcugccuuaa

SEQ ID NO: 69251 - RNA, 19 nt, Homo sapiens
  misc_RNA (1)...(19): siRNA sense strand
gccaggacuucaacaugau

SEQ ID NO: 69252 - RNA, 19 nt, Homo sapiens
  misc_RNA (1)...(19): siRNA sense strand
aagaggguguccaugauuc

SEQ ID NO: 69253 - RNA, 19 nt, Homo sapiens
  misc_RNA (1)...(19): siRNA sense strand
gacaaaggagagaaguuau

SEQ ID NO: 69254 - RNA, 19 nt, Homo sapiens
  misc_RNA (1)...(19): siRNA sense strand
gauggcugccuuaaacaug

SEQ ID NO: 69255 - RNA, 19 nt, Homo sapiens
  misc_RNA (1)...(19): siRNA sense strand
ccuccaaggccaucauuga

SEQ ID NO: 69256 - RNA, 19 nt, Homo sapiens
  misc_RNA (1)...(19): siRNA sense strand
cagaauuuacaggacauua

SEQ ID NO: 69257 - RNA, 19 nt, Homo sapiens
  misc_RNA (1)...(19): siRNA sense strand
uggcuacccuuaucgauac

SEQ ID NO: 69258 - RNA, 19 nt, Homo sapiens
  misc_RNA (1)...(19): siRNA sense strand
gaaccaugggcucguguca

SEQ ID NO: 69259 - RNA, 19 nt, Homo sapiens
  misc_RNA (1)...(19): siRNA sense strand
agggauggcugccuuaaac

SEQ ID NO: 69260 - RNA, 19 nt, Homo sapiens
  misc_RNA (1)...(19): siRNA sense strand
ggcccucagucccagguuu

SEQ ID NO: 69261 - RNA, 19 nt, Homo sapiens
  misc_RNA (1)...(19): siRNA sense strand
ugaggaggccuucuauuac

SEQ ID NO: 69262 - RNA, 19 nt, Homo sapiens
  misc_RNA (1)...(19): siRNA sense strand
ugcggucucugcaaugaaa

SEQ ID NO: 69263 - RNA, 19 nt, Homo sapiens
  misc_RNA (1)...(19): siRNA sense strand
gauauaguagaucguggaa

SEQ ID NO: 69264 - RNA, 19 nt, Homo sapiens
  misc_RNA (1)...(19): siRNA sense strand
gguggucucagcuuaucua

SEQ ID NO: 69265 - RNA, 19 nt, Homo sapiens
  misc_RNA (1)...(19): siRNA sense strand
gguauggugacuccuguga

SEQ ID NO: 69266 - RNA, 19 nt, Homo sapiens
  misc_RNA (1)...(19): siRNA sense strand
cuaaagaggauggacauag

SEQ ID NO: 69267 - RNA, 19 nt, Homo sapiens
  misc_RNA (1)...(19): siRNA sense strand
aaugauacaggagcaauuu

SEQ ID NO: 69268 - RNA, 19 nt, Homo sapiens
  misc_RNA (1)...(19): siRNA sense strand
cgaauguaccaaaugucua

SEQ ID NO: 69269 - RNA, 19 nt, Homo sapiens
  misc_RNA (1)...(19): siRNA sense strand
caaugauacaggagcaauu

SEQ ID NO: 69270 - RNA, 19 nt, Homo sapiens
  misc_RNA (1)...(19): siRNA sense strand
caggagaugaggaacaaga

SEQ ID NO: 69271 - RNA, 19 nt, Homo sapiens
  misc_RNA (1)...(19): siRNA sense strand
ccaccucugcugucccuaa

SEQ ID NO: 69272 - RNA, 19 nt, Homo sapiens
  misc_RNA (1)...(19): siRNA sense strand
ccucccaaguggcagauug

SEQ ID NO: 69273 - RNA, 19 nt, Homo sapiens
  misc_RNA (1)...(19): siRNA sense strand
ggccuucuauuacauccau

SEQ ID NO: 69274 - RNA, 19 nt, Homo sapiens
  misc_RNA (1)...(19): siRNA sense strand
ggaggcgcuuucccuugga

SEQ ID NO: 69275 - RNA, 19 nt, Homo sapiens
  misc_RNA (1)...(19): siRNA sense strand
ccuuacacucugcaauuua

SEQ ID NO: 69276 - RNA, 19 nt, Homo sapiens
  misc_RNA (1)...(19): siRNA sense strand
cauccaguuugguuaagau

SEQ ID NO: 69277 - RNA, 19 nt, Homo sapiens
  misc_RNA (1)...(19): siRNA sense strand
gccuuaaacaugagucuug

SEQ ID NO: 69278 - RNA, 19 nt, Homo sapiens
  misc_RNA (1)...(19): siRNA sense strand
gauacaggagcaauuuaag

SEQ ID NO: 69279 - RNA, 19 nt, Homo sapiens
  misc_RNA (1)...(19): siRNA sense strand
aaagaggauggacauagaa

SEQ ID NO: 69280 - RNA, 19 nt, Homo sapiens
  misc_RNA (1)...(19): siRNA sense strand
gcugaauccugagaaguac

SEQ ID NO: 69281 - RNA, 19 nt, Homo sapiens
  misc_RNA (1)...(19): siRNA sense strand
aaagagguccaggagauga

SEQ ID NO: 69282 - RNA, 19 nt, Homo sapiens
  misc_RNA (1)...(19): siRNA sense strand
auacaggagcaauuuaaga

SEQ ID NO: 69283 - RNA, 19 nt, Homo sapiens
  misc_RNA (1)...(19): siRNA sense strand
agaacaacccagaguacuu

SEQ ID NO: 69284 - RNA, 19 nt, Homo sapiens
  misc_RNA (1)...(19): siRNA sense strand
ggagaugaggaacaagauc

SEQ ID NO: 69285 - RNA, 19 nt, Homo sapiens
  misc_RNA (1)...(19): siRNA sense strand
cagcuuaucuacaaucaua

SEQ ID NO: 69286 - RNA, 19 nt, Homo sapiens
  misc_RNA (1)...(19): siRNA sense strand
ggucucagcuuaucuacaa

SEQ ID NO: 69287 - RNA, 19 nt, Homo sapiens
  misc_RNA (1)...(19): siRNA sense strand
gcagggagguggagaggaa

SEQ ID NO: 69288 - RNA, 19 nt, Homo sapiens
  misc_RNA (1)...(19): siRNA sense strand
uaaagaggauggacauaga

SEQ ID NO: 69289 - RNA, 19 nt, Homo sapiens
  misc_RNA (1)...(19): siRNA sense strand
caaaggagagaaguuauua

SEQ ID NO: 69290 - RNA, 19 nt, Homo sapiens
  misc_RNA (1)...(19): siRNA sense strand
gaacauggcaccagaccuu

SEQ ID NO: 69291 - RNA, 19 nt, Homo sapiens
  misc_RNA (1)...(19): siRNA sense strand
gagaaguuauuacggugua

SEQ ID NO: 69292 - RNA, 19 nt, Homo sapiens
  misc_RNA (1)...(19): siRNA sense strand
ugacaaaggagagaaguua

SEQ ID NO: 69293 - RNA, 19 nt, Homo sapiens
  misc_RNA (1)...(19): siRNA sense strand
gaacaacccagaguacuug

SEQ ID NO: 69294 - RNA, 19 nt, Homo sapiens
  misc_RNA (1)...(19): siRNA sense strand
gaggaggccuucuauuaca

SEQ ID NO: 69295 - RNA, 19 nt, Homo sapiens
  misc_RNA (1)...(19): siRNA sense strand
ccacaggccuauuggcauu

SEQ ID NO: 69296 - RNA, 19 nt, Homo sapiens
  misc_RNA (1)...(19): siRNA sense strand
ccacgaauguaccaaaugu

SEQ ID NO: 69297 - RNA, 19 nt, Homo sapiens
  misc_RNA (1)...(19): siRNA sense strand
gaagaggguguccaugauu

SEQ ID NO: 69298 - RNA, 19 nt, Homo sapiens
  misc_RNA (1)...(19): siRNA sense strand
ggacgaggcuagagaacag

SEQ ID NO: 69299 - RNA, 19 nt, Homo sapiens
  misc_RNA (1)...(19): siRNA sense strand
ugucacagguuacuccuuu

SEQ ID NO: 69300 - RNA, 19 nt, Homo sapiens
  misc_RNA (1)...(19): siRNA sense strand
aaacaugagucuugguaug

SEQ ID NO: 69301 - RNA, 19 nt, Homo sapiens
  misc_RNA (1)...(19): siRNA sense strand
uacagcagauugcagauuu

SEQ ID NO: 69302 - RNA, 19 nt, Homo sapiens
  misc_RNA (1)...(19): siRNA sense strand
acaaggagauauaguagau

SEQ ID NO: 69303 - RNA, 19 nt, Homo sapiens
  misc_RNA (1)...(19): siRNA sense strand
aaugaaauguggccucuug

SEQ ID NO: 69304 - RNA, 19 nt, Homo sapiens
  misc_RNA (1)...(19): siRNA sense strand
uugaggaggccuucuauua

SEQ ID NO: 69305 - RNA, 19 nt, Homo sapiens
  misc_RNA (1)...(19): siRNA sense strand
cgccaggacuucaacauga

SEQ ID NO: 69306 - RNA, 19 nt, Homo sapiens
  misc_RNA (1)...(19): siRNA sense strand
gaagcagucccaagucgaa

SEQ ID NO: 69307 - RNA, 19 nt, Homo sapiens
  misc_RNA (1)...(19): siRNA sense strand
caaaagagguccaggagau

SEQ ID NO: 69308 - RNA, 19 nt, Homo sapiens
  misc_RNA (1)...(19): siRNA sense strand
uaaccuguuuguuccauug

SEQ ID NO: 69309 - RNA, 19 nt, Homo sapiens
  misc_RNA (1)...(19): siRNA sense strand
uagacuagcagaucucuuu

SEQ ID NO: 69310 - RNA, 19 nt, Homo sapiens
  misc_RNA (1)...(19): siRNA sense strand
gaccacgaauguaccaaau

SEQ ID NO: 69311 - RNA, 19 nt, Homo sapiens
  misc_RNA (1)...(19): siRNA sense strand
aaagcaagguucuuauucu

SEQ ID NO: 69312 - RNA, 19 nt, Homo sapiens
  misc_RNA (1)...(19): siRNA sense strand
cugauucuauugcguauga

SEQ ID NO: 69313 - RNA, 19 nt, Homo sapiens
  misc_RNA (1)...(19): siRNA sense strand
cugcuagugucacagguua

SEQ ID NO: 69314 - RNA, 19 nt, Homo sapiens
  misc_RNA (1)...(19): siRNA sense strand
ccaguuugguuaagaucaa

SEQ ID NO: 69315 - RNA, 19 nt, Homo sapiens
  misc_RNA (1)...(19): siRNA sense strand
ucaugcggaugcucgauaa

SEQ ID NO: 69316 - RNA, 19 nt, Homo sapiens
  misc_RNA (1)...(19): siRNA sense strand
gcauucugguugaugaaga

SEQ ID NO: 69317 - RNA, 19 nt, Homo sapiens
  misc_RNA (1)...(19): siRNA sense strand
gggcugcggucucugcaau

SEQ ID NO: 69318 - RNA, 19 nt, Homo sapiens
  misc_RNA (1)...(19): siRNA sense strand
gaggauggacauagaacuu

SEQ ID NO: 69319 - RNA, 19 nt, Homo sapiens
  misc_RNA (1)...(19): siRNA sense strand
ugauacaggagcaauuuaa

SEQ ID NO: 69320 - RNA, 19 nt, Homo sapiens
  misc_RNA (1)...(19): siRNA sense strand
accgugagcuggaggagua

SEQ ID NO: 69321 - RNA, 19 nt, Homo sapiens
  misc_RNA (1)...(19): siRNA sense strand
aggaggaccagacaacuua

SEQ ID NO: 69322 - RNA, 19 nt, Homo sapiens
  misc_RNA (1)...(19): siRNA sense strand
aagaagaggguguccauga

SEQ ID NO: 69323 - RNA, 19 nt, Homo sapiens
  misc_RNA (1)...(19): siRNA sense strand
acagguuacuccuuugcua

SEQ ID NO: 69324 - RNA, 19 nt, Homo sapiens
  misc_RNA (1)...(19): siRNA sense strand
gaucguggaagcacuaauc

SEQ ID NO: 69325 - RNA, 19 nt, Homo sapiens
  misc_RNA (1)...(19): siRNA sense strand
agaagaggguguccaugau

SEQ ID NO: 69326 - RNA, 19 nt, Homo sapiens
  misc_RNA (1)...(19): siRNA sense strand
gaauguaccaaaugucuac

SEQ ID NO: 69327 - RNA, 19 nt, Homo sapiens
  misc_RNA (1)...(19): siRNA sense strand
ucgauacccugcucugaga

SEQ ID NO: 69328 - RNA, 19 nt, Homo sapiens
  misc_RNA (1)...(19): siRNA sense strand
caacuuaguccugcugaau

SEQ ID NO: 69329 - RNA, 19 nt, Homo sapiens
  misc_RNA (1)...(19): siRNA sense strand
gcugcggucucugcaauga

SEQ ID NO: 69330 - RNA, 19 nt, Homo sapiens
  misc_RNA (1)...(19): siRNA sense strand
gcauccaguuugguuaaga

SEQ ID NO: 69331 - RNA, 19 nt, Homo sapiens
  misc_RNA (1)...(19): siRNA sense strand
cuuacacucugcaauuuau

SEQ ID NO: 69332 - RNA, 19 nt, Homo sapiens
  misc_RNA (1)...(19): siRNA sense strand
uuaaacaugagucuuggua

SEQ ID NO: 69333 - RNA, 19 nt, Homo sapiens
  misc_RNA (1)...(19): siRNA sense strand
ucuacaaggagauauagua

SEQ ID NO: 69334 - RNA, 19 nt, Homo sapiens
  misc_RNA (1)...(19): siRNA sense strand
uacaggagcaauuuaagaa

SEQ ID NO: 69335 - RNA, 19 nt, Homo sapiens
  misc_RNA (1)...(19): siRNA sense strand
gcuagagaacagaaagaaa

SEQ ID NO: 69336 - RNA, 19 nt, Homo sapiens
  misc_RNA (1)...(19): siRNA sense strand
guagaucguggaagcacua

SEQ ID NO: 69337 - RNA, 19 nt, Homo sapiens
  misc_RNA (1)...(19): siRNA sense strand
acaaaggagagaaguuauu

SEQ ID NO: 69338 - RNA, 19 nt, Homo sapiens
  misc_RNA (1)...(19): siRNA sense strand
caccuuacacucugcaauu

SEQ ID NO: 69339 - RNA, 19 nt, Homo sapiens
  misc_RNA (1)...(19): siRNA sense strand
ccaaggccaucauugaaaa

SEQ ID NO: 69340 - RNA, 19 nt, Homo sapiens
  misc_RNA (1)...(19): siRNA sense strand
ugacuaccauggcauucug

SEQ ID NO: 69341 - RNA, 19 nt, Homo sapiens
  misc_RNA (1)...(19): siRNA sense strand
auacagcgauguggagguu

SEQ ID NO: 69342 - RNA, 19 nt, Homo sapiens
  misc_RNA (1)...(19): siRNA sense strand
agaacuggcuacccuuauc

SEQ ID NO: 69343 - RNA, 19 nt, Homo sapiens
  misc_RNA (1)...(19): siRNA sense strand
uuacauccauaaccuugug

SEQ ID NO: 69344 - RNA, 19 nt, Homo sapiens
  misc_RNA (1)...(19): siRNA sense strand
gagggauggcugccuuaaa

SEQ ID NO: 69345 - RNA, 19 nt, Homo sapiens
  misc_RNA (1)...(19): siRNA sense strand
guuacuccuuugcuaguga

SEQ ID NO: 69346 - RNA, 19 nt, Homo sapiens
  misc_RNA (1)...(19): siRNA sense strand
acagaacuggcuacccuua

SEQ ID NO: 69347 - RNA, 19 nt, Homo sapiens
  misc_RNA (1)...(19): siRNA sense strand
gaugagaacaacccagagu

SEQ ID NO: 69348 - RNA, 19 nt, Homo sapiens
  misc_RNA (1)...(19): siRNA sense strand
gccaggacuucaacaugau

SEQ ID NO: 69349 - RNA, 19 nt, Homo sapiens
  misc_RNA (1)...(19): siRNA sense strand
gacaaaggagagaaguuau

SEQ ID NO: 69350 - RNA, 19 nt, Homo sapiens
  misc_RNA (1)...(19): siRNA sense strand
ggagggauggcugccuuaa

SEQ ID NO: 69351 - RNA, 19 nt, Homo sapiens
  misc_RNA (1)...(19): siRNA sense strand
aagaggguguccaugauuc

SEQ ID NO: 69352 - RNA, 19 nt, Homo sapiens
  misc_RNA (1)...(19): siRNA sense strand
gauggcugccuuaaacaug

SEQ ID NO: 69353 - RNA, 19 nt, Homo sapiens
  misc_RNA (1)...(19): siRNA sense strand
ccuccaaggccaucauuga

SEQ ID NO: 69354 - RNA, 19 nt, Homo sapiens
  misc_RNA (1)...(19): siRNA sense strand
uggcuacccuuaucgauac

SEQ ID NO: 69355 - RNA, 19 nt, Homo sapiens
  misc_RNA (1)...(19): siRNA sense strand
gaaccaugggcucguguca

SEQ ID NO: 69356 - RNA, 19 nt, Homo sapiens
  misc_RNA (1)...(19): siRNA sense strand
agggauggcugccuuaaac

SEQ ID NO: 69357 - RNA, 19 nt, Homo sapiens
  misc_RNA (1)...(19): siRNA sense strand
ggcccucagucccagguuu

SEQ ID NO: 69358 - RNA, 19 nt, Homo sapiens
  misc_RNA (1)...(19): siRNA sense strand
ugaggaggccuucuauuac

SEQ ID NO: 69359 - RNA, 19 nt, Homo sapiens
  misc_RNA (1)...(19): siRNA sense strand
ugcggucucugcaaugaaa

SEQ ID NO: 69360 - RNA, 19 nt, Homo sapiens
  misc_RNA (1)...(19): siRNA sense strand
gauauaguagaucguggaa

SEQ ID NO: 69361 - RNA, 19 nt, Homo sapiens
  misc_RNA (1)...(19): siRNA sense strand
gguggucucagcuuaucua

SEQ ID NO: 69362 - RNA, 19 nt, Homo sapiens
  misc_RNA (1)...(19): siRNA sense strand
gguauggugacuccuguga

SEQ ID NO: 69363 - RNA, 19 nt, Homo sapiens
  misc_RNA (1)...(19): siRNA sense strand
cuaaagaggauggacauag

SEQ ID NO: 69364 - RNA, 19 nt, Homo sapiens
  misc_RNA (1)...(19): siRNA sense strand
aaugauacaggagcaauuu

SEQ ID NO: 69365 - RNA, 19 nt, Homo sapiens
  misc_RNA (1)...(19): siRNA sense strand
cgaauguaccaaaugucua

SEQ ID NO: 69366 - RNA, 19 nt, Homo sapiens
  misc_RNA (1)...(19): siRNA sense strand
caaugauacaggagcaauu

SEQ ID NO: 69367 - RNA, 19 nt, Homo sapiens
  misc_RNA (1)...(19): siRNA sense strand
caggagaugaggaacaaga

SEQ ID NO: 69368 - RNA, 19 nt, Homo sapiens
  misc_RNA (1)...(19): siRNA sense strand
ccaccucugcugucccuaa

SEQ ID NO: 69369 - RNA, 19 nt, Homo sapiens
  misc_RNA (1)...(19): siRNA sense strand
ccucccaaguggcagauug

SEQ ID NO: 69370 - RNA, 19 nt, Homo sapiens
  misc_RNA (1)...(19): siRNA sense strand
ggccuucuauuacauccau

SEQ ID NO: 69371 - RNA, 19 nt, Homo sapiens
  misc_RNA (1)...(19): siRNA sense strand
ggaggcgcuuucccuugga

SEQ ID NO: 69372 - RNA, 19 nt, Homo sapiens
  misc_RNA (1)...(19): siRNA sense strand
ccuuacacucugcaauuua

SEQ ID NO: 69373 - RNA, 19 nt, Homo sapiens
  misc_RNA (1)...(19): siRNA sense strand
cauccaguuugguuaagau

SEQ ID NO: 69374 - RNA, 19 nt, Homo sapiens
  misc_RNA (1)...(19): siRNA sense strand
gccuuaaacaugagucuug

SEQ ID NO: 69375 - RNA, 19 nt, Homo sapiens
  misc_RNA (1)...(19): siRNA sense strand
aaagaggauggacauagaa

SEQ ID NO: 69376 - RNA, 19 nt, Homo sapiens
  misc_RNA (1)...(19): siRNA sense strand
gcugaauccugagaaguac

SEQ ID NO: 69377 - RNA, 19 nt, Homo sapiens
  misc_RNA (1)...(19): siRNA sense strand
gauacaggagcaauuuaag

SEQ ID NO: 69378 - RNA, 19 nt, Homo sapiens
  misc_RNA (1)...(19): siRNA sense strand
ugacuccugugaacgaucu

SEQ ID NO: 69379 - RNA, 19 nt, Homo sapiens
  misc_RNA (1)...(19): siRNA sense strand
ggagaugaggaacaagauc

SEQ ID NO: 69380 - RNA, 19 nt, Homo sapiens
  misc_RNA (1)...(19): siRNA sense strand
aaagagguccaggagauga

SEQ ID NO: 69381 - RNA, 19 nt, Homo sapiens
  misc_RNA (1)...(19): siRNA sense strand
gauguggagguuccugcua

SEQ ID NO: 69382 - RNA, 19 nt, Homo sapiens
  misc_RNA (1)...(19): siRNA sense strand
gaacuggcuacccuuaucg

SEQ ID NO: 69383 - RNA, 19 nt, Homo sapiens
  misc_RNA (1)...(19): siRNA sense strand
agaacaacccagaguacuu

SEQ ID NO: 69384 - RNA, 19 nt, Homo sapiens
  misc_RNA (1)...(19): siRNA sense strand
uuuggguggucucagcuua

SEQ ID NO: 69385 - RNA, 19 nt, Homo sapiens
  misc_RNA (1)...(19): siRNA sense strand
ggacaaagauuuccuugau

SEQ ID NO: 69386 - RNA, 19 nt, Homo sapiens
  misc_RNA (1)...(19): siRNA sense strand
gcagcaagcaucauaauua

SEQ ID NO: 69387 - RNA, 19 nt, Homo sapiens
  misc_RNA (1)...(19): siRNA sense strand
gaaucuaucugcaccguuu

SEQ ID NO: 69388 - RNA, 19 nt, Homo sapiens
  misc_RNA (1)...(19): siRNA sense strand
gagcaaggcuuugagacua

SEQ ID NO: 69389 - RNA, 19 nt, Homo sapiens
  misc_RNA (1)...(19): siRNA sense strand
acaaggaacuguuugauga

SEQ ID NO: 69390 - RNA, 19 nt, Homo sapiens
  misc_RNA (1)...(19): siRNA sense strand
gacaaagauuuccuugaua

SEQ ID NO: 69391 - RNA, 19 nt, Homo sapiens
  misc_RNA (1)...(19): siRNA sense strand
gaaaccaaaugaccaaauc

SEQ ID NO: 69392 - RNA, 19 nt, Homo sapiens
  misc_RNA (1)...(19): siRNA sense strand
gcaagaguuuguuauauag

SEQ ID NO: 69393 - RNA, 19 nt, Homo sapiens
  misc_RNA (1)...(19): siRNA sense strand
gcauugggauagauaaauu

SEQ ID NO: 69394 - RNA, 19 nt, Homo sapiens
  misc_RNA (1)...(19): siRNA sense strand
acacaaagcagcaacauuu

SEQ ID NO: 69395 - RNA, 19 nt, Homo sapiens
  misc_RNA (1)...(19): siRNA sense strand
ugacaucucugcuguagug

SEQ ID NO: 69396 - RNA, 19 nt, Homo sapiens
  misc_RNA (1)...(19): siRNA sense strand
ugaugaaaguuaugccuua

SEQ ID NO: 69397 - RNA, 19 nt, Homo sapiens
  misc_RNA (1)...(19): siRNA sense strand
gaaauccucugcuugacau

SEQ ID NO: 69398 - RNA, 19 nt, Homo sapiens
  misc_RNA (1)...(19): siRNA sense strand
gaucaagaccagaaagaaa

SEQ ID NO: 69399 - RNA, 19 nt, Homo sapiens
  misc_RNA (1)...(19): siRNA sense strand
gacaacaggucccucauag

SEQ ID NO: 69400 - RNA, 19 nt, Homo sapiens
  misc_RNA (1)...(19): siRNA sense strand
uauaauggcuacagaaagu

SEQ ID NO: 69401 - RNA, 19 nt, Homo sapiens
  misc_RNA (1)...(19): siRNA sense strand
ugccaaagaugaacucaaa

SEQ ID NO: 69402 - RNA, 19 nt, Homo sapiens
  misc_RNA (1)...(19): siRNA sense strand
gggagauccugaagagaaa

SEQ ID NO: 69403 - RNA, 19 nt, Homo sapiens
  misc_RNA (1)...(19): siRNA sense strand
caauggagcuggagaugca

SEQ ID NO: 69404 - RNA, 19 nt, Homo sapiens
  misc_RNA (1)...(19): siRNA sense strand
ggaacuguuugaugaacuu

SEQ ID NO: 69405 - RNA, 19 nt, Homo sapiens
  misc_RNA (1)...(19): siRNA sense strand
agggagagaugacacuaua

SEQ ID NO: 69406 - RNA, 19 nt, Homo sapiens
  misc_RNA (1)...(19): siRNA sense strand
gacagaagcugccacuuuu

SEQ ID NO: 69407 - RNA, 19 nt, Homo sapiens
  misc_RNA (1)...(19): siRNA sense strand
ugaaaguuaugccuuaugu

SEQ ID NO: 69408 - RNA, 19 nt, Homo sapiens
  misc_RNA (1)...(19): siRNA sense strand
cagcaagcaucauaauuag

SEQ ID NO: 69409 - RNA, 19 nt, Homo sapiens
  misc_RNA (1)...(19): siRNA sense strand
agacagaagcugccacuuu

SEQ ID NO: 69410 - RNA, 19 nt, Homo sapiens
  misc_RNA (1)...(19): siRNA sense strand
acaggucccucauagcuaa

SEQ ID NO: 69411 - RNA, 19 nt, Homo sapiens
  misc_RNA (1)...(19): siRNA sense strand
gaccagaaagaaauuauug

SEQ ID NO: 69412 - RNA, 19 nt, Homo sapiens
  misc_RNA (1)...(19): siRNA sense strand
ggagagaugacacuauaau

SEQ ID NO: 69413 - RNA, 19 nt, Homo sapiens
  misc_RNA (1)...(19): siRNA sense strand
gaugaaaguuaugccuuau

SEQ ID NO: 69414 - RNA, 19 nt, Homo sapiens
  misc_RNA (1)...(19): siRNA sense strand
gcaaggcuuugagacuaaa

SEQ ID NO: 69415 - RNA, 19 nt, Homo sapiens
  misc_RNA (1)...(19): siRNA sense strand
aaaguuaugccuuauguug

SEQ ID NO: 69416 - RNA, 19 nt, Homo sapiens
  misc_RNA (1)...(19): siRNA sense strand
ugucucaacuggucucuga

SEQ ID NO: 69417 - RNA, 19 nt, Homo sapiens
  misc_RNA (1)...(19): siRNA sense strand
ccaaagaugaacucaaaga

SEQ ID NO: 69418 - RNA, 19 nt, Homo sapiens
  misc_RNA (1)...(19): siRNA sense strand
cacaagcccugccaaagau

SEQ ID NO: 69419 - RNA, 19 nt, Homo sapiens
  misc_RNA (1)...(19): siRNA sense strand
ugacaagccucugacugaa

SEQ ID NO: 69420 - RNA, 19 nt, Homo sapiens
  misc_RNA (1)...(19): siRNA sense strand
ugacaacaggucccucaua

SEQ ID NO: 69421 - RNA, 19 nt, Homo sapiens
  misc_RNA (1)...(19): siRNA sense strand
acacaagcccugccaaaga

SEQ ID NO: 69422 - RNA, 19 nt, Homo sapiens
  misc_RNA (1)...(19): siRNA sense strand
aguauucucugaaaccaaa

SEQ ID NO: 69423 - RNA, 19 nt, Homo sapiens
  misc_RNA (1)...(19): siRNA sense strand
cuugauaaguauucucuga

SEQ ID NO: 69424 - RNA, 19 nt, Homo sapiens
  misc_RNA (1)...(19): siRNA sense strand
acaagccucugacugaaug

SEQ ID NO: 69425 - RNA, 19 nt, Homo sapiens
  misc_RNA (1)...(19): siRNA sense strand
ggaaauccucugcuugaca

SEQ ID NO: 69426 - RNA, 19 nt, Homo sapiens
  misc_RNA (1)...(19): siRNA sense strand
gcaagcaucauaauuagac

SEQ ID NO: 69427 - RNA, 19 nt, Homo sapiens
  misc_RNA (1)...(19): siRNA sense strand
ccucauagcuaaucuugcu

SEQ ID NO: 69428 - RNA, 19 nt, Homo sapiens
  misc_RNA (1)...(19): siRNA sense strand
gaacuugugcugcaugcau

SEQ ID NO: 69429 - RNA, 19 nt, Homo sapiens
  misc_RNA (1)...(19): siRNA sense strand
caacaggucccucauagcu

SEQ ID NO: 69430 - RNA, 19 nt, Homo sapiens
  misc_RNA (1)...(19): siRNA sense strand
gagagaugacacuauaaug

SEQ ID NO: 69431 - RNA, 19 nt, Homo sapiens
  misc_RNA (1)...(19): siRNA sense strand
caagaccagaaagaaauua

SEQ ID NO: 69432 - RNA, 19 nt, Homo sapiens
  misc_RNA (1)...(19): siRNA sense strand
gauaaguauucucugaaac

SEQ ID NO: 69433 - RNA, 19 nt, Homo sapiens
  misc_RNA (1)...(19): siRNA sense strand
caacaggauuuucacuuug

SEQ ID NO: 69434 - RNA, 19 nt, Homo sapiens
  misc_RNA (1)...(19): siRNA sense strand
ggaucaagaccagaaagaa

SEQ ID NO: 69435 - RNA, 19 nt, Homo sapiens
  misc_RNA (1)...(19): siRNA sense strand
gaaaguuaugccuuauguu

SEQ ID NO: 69436 - RNA, 19 nt, Homo sapiens
  misc_RNA (1)...(19): siRNA sense strand
acacuauaauggcuacaga

SEQ ID NO: 69437 - RNA, 19 nt, Homo sapiens
  misc_RNA (1)...(19): siRNA sense strand
ggaugcauugggauagaua

SEQ ID NO: 69438 - RNA, 19 nt, Homo sapiens
  misc_RNA (1)...(19): siRNA sense strand
uauccgugcuggccacuau

SEQ ID NO: 69439 - RNA, 19 nt, Homo sapiens
  misc_RNA (1)...(19): siRNA sense strand
caaggaacuguuugaugaa

SEQ ID NO: 69440 - RNA, 19 nt, Homo sapiens
  misc_RNA (1)...(19): siRNA sense strand
ccauguggaugcucauuac

SEQ ID NO: 69441 - RNA, 19 nt, Homo sapiens
  misc_RNA (1)...(19): siRNA sense strand
gcucuacccagaauucaau

SEQ ID NO: 69442 - RNA, 19 nt, Homo sapiens
  misc_RNA (1)...(19): siRNA sense strand
guuaugccuuauguugaua

SEQ ID NO: 69443 - RNA, 19 nt, Homo sapiens
  misc_RNA (1)...(19): siRNA sense strand
ugggaaauccucugcuuga

SEQ ID NO: 69444 - RNA, 19 nt, Homo sapiens
  misc_RNA (1)...(19): siRNA sense strand
cuaucugcaccguuuauua

SEQ ID NO: 69445 - RNA, 19 nt, Homo sapiens
  misc_RNA (1)...(19): siRNA sense strand
acaacaggauuuucacuuu

SEQ ID NO: 69446 - RNA, 19 nt, Homo sapiens
  misc_RNA (1)...(19): siRNA sense strand
uaucugcaccguuuauuag

SEQ ID NO: 69447 - RNA, 19 nt, Homo sapiens
  misc_RNA (1)...(19): siRNA sense strand
cugacaagccucugacuga

SEQ ID NO: 69448 - RNA, 19 nt, Homo sapiens
  misc_RNA (1)...(19): siRNA sense strand
ucaagaccagaaagaaauu

SEQ ID NO: 69449 - RNA, 19 nt, Homo sapiens
  misc_RNA (1)...(19): siRNA sense strand
cagagucaguauuaaaggu

SEQ ID NO: 69450 - RNA, 19 nt, Homo sapiens
  misc_RNA (1)...(19): siRNA sense strand
cggacuggcugcaccuuuc

SEQ ID NO: 69451 - RNA, 19 nt, Homo sapiens
  misc_RNA (1)...(19): siRNA sense strand
cagcgaaucgugaucuuca

SEQ ID NO: 69452 - RNA, 19 nt, Homo sapiens
  misc_RNA (1)...(19): siRNA sense strand
ucaaagaggcagcgaaucg

SEQ ID NO: 69453 - RNA, 19 nt, Homo sapiens
  misc_RNA (1)...(19): siRNA sense strand
aaugggaaauccucugcuu

SEQ ID NO: 69454 - RNA, 19 nt, Homo sapiens
  misc_RNA (1)...(19): siRNA sense strand
ggcugcaccuuuccugaga

SEQ ID NO: 69455 - RNA, 19 nt, Homo sapiens
  misc_RNA (1)...(19): siRNA sense strand
agcaaggcuuugagacuaa

SEQ ID NO: 69456 - RNA, 19 nt, Homo sapiens
  misc_RNA (1)...(19): siRNA sense strand
uaaucuugcugcugccaau

SEQ ID NO: 69457 - RNA, 19 nt, Homo sapiens
  misc_RNA (1)...(19): siRNA sense strand
gggagagaugacacuauaa

SEQ ID NO: 69458 - RNA, 19 nt, Homo sapiens
  misc_RNA (1)...(19): siRNA sense strand
agacacaagcccugccaaa

SEQ ID NO: 69459 - RNA, 19 nt, Homo sapiens
  misc_RNA (1)...(19): siRNA sense strand
gacuaaagacauuaaagag

SEQ ID NO: 69460 - RNA, 19 nt, Homo sapiens
  misc_RNA (1)...(19): siRNA sense strand
cuagagagcaaggcuuuga

SEQ ID NO: 69461 - RNA, 19 nt, Homo sapiens
  misc_RNA (1)...(19): siRNA sense strand
gagacuaaagacauuaaag

SEQ ID NO: 69462 - RNA, 19 nt, Homo sapiens
  misc_RNA (1)...(19): siRNA sense strand
gagcuggagaugcauuugu

SEQ ID NO: 69463 - RNA, 19 nt, Homo sapiens
  misc_RNA (1)...(19): siRNA sense strand
agagaugacacuauaaugg

SEQ ID NO: 69464 - RNA, 19 nt, Homo sapiens
  misc_RNA (1)...(19): siRNA sense strand
caaagaugaacucaaagag

SEQ ID NO: 69465 - RNA, 19 nt, Homo sapiens
  misc_RNA (1)...(19): siRNA sense strand
gaagagaaaagcugcugaa

SEQ ID NO: 69466 - RNA, 19 nt, Homo sapiens
  misc_RNA (1)...(19): siRNA sense strand
uaaguauucucugaaacca

SEQ ID NO: 69467 - RNA, 19 nt, Homo sapiens
  misc_RNA (1)...(19): siRNA sense strand
cacaaggaacuguuugaug

SEQ ID NO: 69468 - RNA, 19 nt, Homo sapiens
  misc_RNA (1)...(19): siRNA sense strand
caagggagagaugacacua

SEQ ID NO: 69469 - RNA, 19 nt, Homo sapiens
  misc_RNA (1)...(19): siRNA sense strand
cauuaaagagauagccaaa

SEQ ID NO: 69470 - RNA, 19 nt, Homo sapiens
  misc_RNA (1)...(19): siRNA sense strand
ugaagacaaacacaaggaa

SEQ ID NO: 69471 - RNA, 19 nt, Homo sapiens
  misc_RNA (1)...(19): siRNA sense strand
guucuacaaggaaucauug

SEQ ID NO: 69472 - RNA, 19 nt, Homo sapiens
  misc_RNA (1)...(19): siRNA sense strand
uugcugcugccaauuguua

SEQ ID NO: 69473 - RNA, 19 nt, Homo sapiens
  misc_RNA (1)...(19): siRNA sense strand
gcugcugccaauuguuaua

SEQ ID NO: 69474 - RNA, 19 nt, Homo sapiens
  misc_RNA (1)...(19): siRNA sense strand
gacaagccucugacugaau

SEQ ID NO: 69475 - RNA, 19 nt, Homo sapiens
  misc_RNA (1)...(19): siRNA sense strand
gauucaacagccacacaaa

SEQ ID NO: 69476 - RNA, 19 nt, Homo sapiens
  misc_RNA (1)...(19): siRNA sense strand
caaagucgaauaucaugcu

SEQ ID NO: 69477 - RNA, 19 nt, Homo sapiens
  misc_RNA (1)...(19): siRNA sense strand
gaugcauugggauagauaa

SEQ ID NO: 69478 - RNA, 19 nt, Homo sapiens
  misc_RNA (1)...(19): siRNA sense strand
gcugcaccuuuccugagaa

SEQ ID NO: 69479 - RNA, 19 nt, Homo sapiens
  misc_RNA (1)...(19): siRNA sense strand
uaauggcuacagaaaguga

SEQ ID NO: 69480 - RNA, 19 nt, Homo sapiens
  misc_RNA (1)...(19): siRNA sense strand
acuauaauggcuacagaaa

SEQ ID NO: 69481 - RNA, 19 nt, Homo sapiens
  misc_RNA (1)...(19): siRNA sense strand
aguuaugccuuauguugau

SEQ ID NO: 69482 - RNA, 19 nt, Homo sapiens
  misc_RNA (1)...(19): siRNA sense strand
uuagccaguucuacaagga

SEQ ID NO: 69483 - RNA, 19 nt, Homo sapiens
  misc_RNA (1)...(19): siRNA sense strand
ugaaaccaaaugaccaaau

SEQ ID NO: 69484 - RNA, 19 nt, Homo sapiens
  misc_RNA (1)...(19): siRNA sense strand
uguggaugcucauuacuac

SEQ ID NO: 69485 - RNA, 19 nt, Homo sapiens
  misc_RNA (1)...(19): siRNA sense strand
ggacaaagauuuccuugau

SEQ ID NO: 69486 - RNA, 19 nt, Homo sapiens
  misc_RNA (1)...(19): siRNA sense strand
gcagcaagcaucauaauua

SEQ ID NO: 69487 - RNA, 19 nt, Homo sapiens
  misc_RNA (1)...(19): siRNA sense strand
gaaucuaucugcaccguuu

SEQ ID NO: 69488 - RNA, 19 nt, Homo sapiens
  misc_RNA (1)...(19): siRNA sense strand
gagcaaggcuuugagacua

SEQ ID NO: 69489 - RNA, 19 nt, Homo sapiens
  misc_RNA (1)...(19): siRNA sense strand
acaaggaacuguuugauga

SEQ ID NO: 69490 - RNA, 19 nt, Homo sapiens
  misc_RNA (1)...(19): siRNA sense strand
gacaaagauuuccuugaua

SEQ ID NO: 69491 - RNA, 19 nt, Homo sapiens
  misc_RNA (1)...(19): siRNA sense strand
gaaaccaaaugaccaaauc

SEQ ID NO: 69492 - RNA, 19 nt, Homo sapiens
  misc_RNA (1)...(19): siRNA sense strand
gcaagaguuuguuauauag

SEQ ID NO: 69493 - RNA, 19 nt, Homo sapiens
  misc_RNA (1)...(19): siRNA sense strand
gcauugggauagauaaauu

SEQ ID NO: 69494 - RNA, 19 nt, Homo sapiens
  misc_RNA (1)...(19): siRNA sense strand
acacaaagcagcaacauuu

SEQ ID NO: 69495 - RNA, 19 nt, Homo sapiens
  misc_RNA (1)...(19): siRNA sense strand
ugacaucucugcuguagug

SEQ ID NO: 69496 - RNA, 19 nt, Homo sapiens
  misc_RNA (1)...(19): siRNA sense strand
ugaugaaaguuaugccuua

SEQ ID NO: 69497 - RNA, 19 nt, Homo sapiens
  misc_RNA (1)...(19): siRNA sense strand
gaaauccucugcuugacau

SEQ ID NO: 69498 - RNA, 19 nt, Homo sapiens
  misc_RNA (1)...(19): siRNA sense strand
gaucaagaccagaaagaaa

SEQ ID NO: 69499 - RNA, 19 nt, Homo sapiens
  misc_RNA (1)...(19): siRNA sense strand
gacaacaggucccucauag

SEQ ID NO: 69500 - RNA, 19 nt, Homo sapiens
  misc_RNA (1)...(19): siRNA sense strand
uauaauggcuacagaaagu

SEQ ID NO: 69501 - RNA, 19 nt, Homo sapiens
  misc_RNA (1)...(19): siRNA sense strand
ugccaaagaugaacucaaa

SEQ ID NO: 69502 - RNA, 19 nt, Homo sapiens
  misc_RNA (1)...(19): siRNA sense strand
gggagauccugaagagaaa

SEQ ID NO: 69503 - RNA, 19 nt, Homo sapiens
  misc_RNA (1)...(19): siRNA sense strand
caauggagcuggagaugca

SEQ ID NO: 69504 - RNA, 19 nt, Homo sapiens
  misc_RNA (1)...(19): siRNA sense strand
ggaacuguuugaugaacuu

SEQ ID NO: 69505 - RNA, 19 nt, Homo sapiens
  misc_RNA (1)...(19): siRNA sense strand
agggagagaugacacuaua

SEQ ID NO: 69506 - RNA, 19 nt, Homo sapiens
  misc_RNA (1)...(19): siRNA sense strand
gacagaagcugccacuuuu

SEQ ID NO: 69507 - RNA, 19 nt, Homo sapiens
  misc_RNA (1)...(19): siRNA sense strand
ugaaaguuaugccuuaugu

SEQ ID NO: 69508 - RNA, 19 nt, Homo sapiens
  misc_RNA (1)...(19): siRNA sense strand
cagcaagcaucauaauuag

SEQ ID NO: 69509 - RNA, 19 nt, Homo sapiens
  misc_RNA (1)...(19): siRNA sense strand
agacagaagcugccacuuu

SEQ ID NO: 69510 - RNA, 19 nt, Homo sapiens
  misc_RNA (1)...(19): siRNA sense strand
acaggucccucauagcuaa

SEQ ID NO: 69511 - RNA, 19 nt, Homo sapiens
  misc_RNA (1)...(19): siRNA sense strand
gaccagaaagaaauuauug

SEQ ID NO: 69512 - RNA, 19 nt, Homo sapiens
  misc_RNA (1)...(19): siRNA sense strand
ggagagaugacacuauaau

SEQ ID NO: 69513 - RNA, 19 nt, Homo sapiens
  misc_RNA (1)...(19): siRNA sense strand
gaugaaaguuaugccuuau

SEQ ID NO: 69514 - RNA, 19 nt, Homo sapiens
  misc_RNA (1)...(19): siRNA sense strand
gcaaggcuuugagacuaaa

SEQ ID NO: 69515 - RNA, 19 nt, Homo sapiens
  misc_RNA (1)...(19): siRNA sense strand
aaaguuaugccuuauguug

SEQ ID NO: 69516 - RNA, 19 nt, Homo sapiens
  misc_RNA (1)...(19): siRNA sense strand
ugucucaacuggucucuga

SEQ ID NO: 69517 - RNA, 19 nt, Homo sapiens
  misc_RNA (1)...(19): siRNA sense strand
ccaaagaugaacucaaaga

SEQ ID NO: 69518 - RNA, 19 nt, Homo sapiens
  misc_RNA (1)...(19): siRNA sense strand
cacaagcccugccaaagau

SEQ ID NO: 69519 - RNA, 19 nt, Homo sapiens
  misc_RNA (1)...(19): siRNA sense strand
ugacaagccucugacugaa

SEQ ID NO: 69520 - RNA, 19 nt, Homo sapiens
  misc_RNA (1)...(19): siRNA sense strand
ugacaacaggucccucaua

SEQ ID NO: 69521 - RNA, 19 nt, Homo sapiens
  misc_RNA (1)...(19): siRNA sense strand
acacaagcccugccaaaga

SEQ ID NO: 69522 - RNA, 19 nt, Homo sapiens
  misc_RNA (1)...(19): siRNA sense strand
aguauucucugaaaccaaa

SEQ ID NO: 69523 - RNA, 19 nt, Homo sapiens
  misc_RNA (1)...(19): siRNA sense strand
cuugauaaguauucucuga

SEQ ID NO: 69524 - RNA, 19 nt, Homo sapiens
  misc_RNA (1)...(19): siRNA sense strand
acaagccucugacugaaug

SEQ ID NO: 69525 - RNA, 19 nt, Homo sapiens
  misc_RNA (1)...(19): siRNA sense strand
ggaaauccucugcuugaca

SEQ ID NO: 69526 - RNA, 19 nt, Homo sapiens
  misc_RNA (1)...(19): siRNA sense strand
gcaagcaucauaauuagac

SEQ ID NO: 69527 - RNA, 19 nt, Homo sapiens
  misc_RNA (1)...(19): siRNA sense strand
ccucauagcuaaucuugcu

SEQ ID NO: 69528 - RNA, 19 nt, Homo sapiens
  misc_RNA (1)...(19): siRNA sense strand
gaacuugugcugcaugcau

SEQ ID NO: 69529 - RNA, 19 nt, Homo sapiens
  misc_RNA (1)...(19): siRNA sense strand
caacaggucccucauagcu

SEQ ID NO: 69530 - RNA, 19 nt, Homo sapiens
  misc_RNA (1)...(19): siRNA sense strand
gagagaugacacuauaaug

SEQ ID NO: 69531 - RNA, 19 nt, Homo sapiens
  misc_RNA (1)...(19): siRNA sense strand
caagaccagaaagaaauua

SEQ ID NO: 69532 - RNA, 19 nt, Homo sapiens
  misc_RNA (1)...(19): siRNA sense strand
gauaaguauucucugaaac

SEQ ID NO: 69533 - RNA, 19 nt, Homo sapiens
  misc_RNA (1)...(19): siRNA sense strand
caacaggauuuucacuuug

SEQ ID NO: 69534 - RNA, 19 nt, Homo sapiens
  misc_RNA (1)...(19): siRNA sense strand
ggaucaagaccagaaagaa

SEQ ID NO: 69535 - RNA, 19 nt, Homo sapiens
  misc_RNA (1)...(19): siRNA sense strand
gaaaguuaugccuuauguu

SEQ ID NO: 69536 - RNA, 19 nt, Homo sapiens
  misc_RNA (1)...(19): siRNA sense strand
acacuauaauggcuacaga

SEQ ID NO: 69537 - RNA, 19 nt, Homo sapiens
  misc_RNA (1)...(19): siRNA sense strand
ggaugcauugggauagaua

SEQ ID NO: 69538 - RNA, 19 nt, Homo sapiens
  misc_RNA (1)...(19): siRNA sense strand
uauccgugcuggccacuau

SEQ ID NO: 69539 - RNA, 19 nt, Homo sapiens
  misc_RNA (1)...(19): siRNA sense strand
caaggaacuguuugaugaa

SEQ ID NO: 69540 - RNA, 19 nt, Homo sapiens
  misc_RNA (1)...(19): siRNA sense strand
ccauguggaugcucauuac

SEQ ID NO: 69541 - RNA, 19 nt, Homo sapiens
  misc_RNA (1)...(19): siRNA sense strand
gcucuacccagaauucaau

SEQ ID NO: 69542 - RNA, 19 nt, Homo sapiens
  misc_RNA (1)...(19): siRNA sense strand
guuaugccuuauguugaua

SEQ ID NO: 69543 - RNA, 19 nt, Homo sapiens
  misc_RNA (1)...(19): siRNA sense strand
ugggaaauccucugcuuga

SEQ ID NO: 69544 - RNA, 19 nt, Homo sapiens
  misc_RNA (1)...(19): siRNA sense strand
cuaucugcaccguuuauua

SEQ ID NO: 69545 - RNA, 19 nt, Homo sapiens
  misc_RNA (1)...(19): siRNA sense strand
acaacaggauuuucacuuu

SEQ ID NO: 69546 - RNA, 19 nt, Homo sapiens
  misc_RNA (1)...(19): siRNA sense strand
uaucugcaccguuuauuag

SEQ ID NO: 69547 - RNA, 19 nt, Homo sapiens
  misc_RNA (1)...(19): siRNA sense strand
cugacaagccucugacuga

SEQ ID NO: 69548 - RNA, 19 nt, Homo sapiens
  misc_RNA (1)...(19): siRNA sense strand
ucaagaccagaaagaaauu

SEQ ID NO: 69549 - RNA, 19 nt, Homo sapiens
  misc_RNA (1)...(19): siRNA sense strand
cagagucaguauuaaaggu

SEQ ID NO: 69550 - RNA, 19 nt, Homo sapiens
  misc_RNA (1)...(19): siRNA sense strand
cggacuggcugcaccuuuc

SEQ ID NO: 69551 - RNA, 19 nt, Homo sapiens
  misc_RNA (1)...(19): siRNA sense strand
cagcgaaucgugaucuuca

SEQ ID NO: 69552 - RNA, 19 nt, Homo sapiens
  misc_RNA (1)...(19): siRNA sense strand
ucaaagaggcagcgaaucg

SEQ ID NO: 69553 - RNA, 19 nt, Homo sapiens
  misc_RNA (1)...(19): siRNA sense strand
aaugggaaauccucugcuu

SEQ ID NO: 69554 - RNA, 19 nt, Homo sapiens
  misc_RNA (1)...(19): siRNA sense strand
ggcugcaccuuuccugaga

SEQ ID NO: 69555 - RNA, 19 nt, Homo sapiens
  misc_RNA (1)...(19): siRNA sense strand
agcaaggcuuugagacuaa

SEQ ID NO: 69556 - RNA, 19 nt, Homo sapiens
  misc_RNA (1)...(19): siRNA sense strand
uaaucuugcugcugccaau

SEQ ID NO: 69557 - RNA, 19 nt, Homo sapiens
  misc_RNA (1)...(19): siRNA sense strand
gggagagaugacacuauaa

SEQ ID NO: 69558 - RNA, 19 nt, Homo sapiens
  misc_RNA (1)...(19): siRNA sense strand
agacacaagcccugccaaa

SEQ ID NO: 69559 - RNA, 19 nt, Homo sapiens
  misc_RNA (1)...(19): siRNA sense strand
gacuaaagacauuaaagag

SEQ ID NO: 69560 - RNA, 19 nt, Homo sapiens
  misc_RNA (1)...(19): siRNA sense strand
cuagagagcaaggcuuuga

SEQ ID NO: 69561 - RNA, 19 nt, Homo sapiens
  misc_RNA (1)...(19): siRNA sense strand
gagacuaaagacauuaaag

SEQ ID NO: 69562 - RNA, 19 nt, Homo sapiens
  misc_RNA (1)...(19): siRNA sense strand
gagcuggagaugcauuugu

SEQ ID NO: 69563 - RNA, 19 nt, Homo sapiens
  misc_RNA (1)...(19): siRNA sense strand
agagaugacacuauaaugg

SEQ ID NO: 69564 - RNA, 19 nt, Homo sapiens
  misc_RNA (1)...(19): siRNA sense strand
caaagaugaacucaaagag

SEQ ID NO: 69565 - RNA, 19 nt, Homo sapiens
  misc_RNA (1)...(19): siRNA sense strand
gaagagaaaagcugcugaa

SEQ ID NO: 69566 - RNA, 19 nt, Homo sapiens
  misc_RNA (1)...(19): siRNA sense strand
uaaguauucucugaaacca

SEQ ID NO: 69567 - RNA, 19 nt, Homo sapiens
  misc_RNA (1)...(19): siRNA sense strand
cacaaggaacuguuugaug

SEQ ID NO: 69568 - RNA, 19 nt, Homo sapiens
  misc_RNA (1)...(19): siRNA sense strand
caagggagagaugacacua

SEQ ID NO: 69569 - RNA, 19 nt, Homo sapiens
  misc_RNA (1)...(19): siRNA sense strand
cauuaaagagauagccaaa

SEQ ID NO: 69570 - RNA, 19 nt, Homo sapiens
  misc_RNA (1)...(19): siRNA sense strand
ugaagacaaacacaaggaa

SEQ ID NO: 69571 - RNA, 19 nt, Homo sapiens
  misc_RNA (1)...(19): siRNA sense strand
guucuacaaggaaucauug

SEQ ID NO: 69572 - RNA, 19 nt, Homo sapiens
  misc_RNA (1)...(19): siRNA sense strand
uugcugcugccaauuguua

SEQ ID NO: 69573 - RNA, 19 nt, Homo sapiens
  misc_RNA (1)...(19): siRNA sense strand
gcugcugccaauuguuaua

SEQ ID NO: 69574 - RNA, 19 nt, Homo sapiens
  misc_RNA (1)...(19): siRNA sense strand
gacaagccucugacugaau

SEQ ID NO: 69575 - RNA, 19 nt, Homo sapiens
  misc_RNA (1)...(19): siRNA sense strand
gauucaacagccacacaaa

SEQ ID NO: 69576 - RNA, 19 nt, Homo sapiens
  misc_RNA (1)...(19): siRNA sense strand
caaagucgaauaucaugcu

SEQ ID NO: 69577 - RNA, 19 nt, Homo sapiens
  misc_RNA (1)...(19): siRNA sense strand
gaugcauugggauagauaa

SEQ ID NO: 69578 - RNA, 19 nt, Homo sapiens
  misc_RNA (1)...(19): siRNA sense strand
gcugcaccuuuccugagaa

SEQ ID NO: 69579 - RNA, 19 nt, Homo sapiens
  misc_RNA (1)...(19): siRNA sense strand
uaauggcuacagaaaguga

SEQ ID NO: 69580 - RNA, 19 nt, Homo sapiens
  misc_RNA (1)...(19): siRNA sense strand
acuauaauggcuacagaaa

SEQ ID NO: 69581 - RNA, 19 nt, Homo sapiens
  misc_RNA (1)...(19): siRNA sense strand
aguuaugccuuauguugau

SEQ ID NO: 69582 - RNA, 19 nt, Homo sapiens
  misc_RNA (1)...(19): siRNA sense strand
uuagccaguucuacaagga

SEQ ID NO: 69583 - RNA, 19 nt, Homo sapiens
  misc_RNA (1)...(19): siRNA sense strand
ugaaaccaaaugaccaaau

SEQ ID NO: 69584 - RNA, 19 nt, Homo sapiens
  misc_RNA (1)...(19): siRNA sense strand
uguggaugcucauuacuac

SEQ ID NO: 69585 - RNA, 19 nt, Homo sapiens
  misc_RNA (1)...(19): siRNA sense strand
cgaaagaaguggaauaagu

SEQ ID NO: 69586 - RNA, 19 nt, Homo sapiens
  misc_RNA (1)...(19): siRNA sense strand
ggacucuggugucuucuaa

SEQ ID NO: 69587 - RNA, 19 nt, Homo sapiens
  misc_RNA (1)...(19): siRNA sense strand
gaaagaaguggaauaagug

SEQ ID NO: 69588 - RNA, 19 nt, Homo sapiens
  misc_RNA (1)...(19): siRNA sense strand
caccagaucuaccaguuca

SEQ ID NO: 69589 - RNA, 19 nt, Homo sapiens
  misc_RNA (1)...(19): siRNA sense strand
uggaauaagugggcucuga

SEQ ID NO: 69590 - RNA, 19 nt, Homo sapiens
  misc_RNA (1)...(19): siRNA sense strand
ucacagauaaggacaagga

SEQ ID NO: 69591 - RNA, 19 nt, Homo sapiens
  misc_RNA (1)...(19): siRNA sense strand
gccagagcaugaacaacuu

SEQ ID NO: 69592 - RNA, 19 nt, Homo sapiens
  misc_RNA (1)...(19): siRNA sense strand
cgucggaguuucgaaagaa

SEQ ID NO: 69593 - RNA, 19 nt, Homo sapiens
  misc_RNA (1)...(19): siRNA sense strand
ucuaccaguucacagauaa

SEQ ID NO: 69594 - RNA, 19 nt, Homo sapiens
  misc_RNA (1)...(19): siRNA sense strand
ggaugucgcgucggaguuu

SEQ ID NO: 69595 - RNA, 19 nt, Homo sapiens
  misc_RNA (1)...(19): siRNA sense strand
cacaccagaucuaccaguu

SEQ ID NO: 69596 - RNA, 19 nt, Homo sapiens
  misc_RNA (1)...(19): siRNA sense strand
cagauaaggacaaggacaa

SEQ ID NO: 69597 - RNA, 19 nt, Homo sapiens
  misc_RNA (1)...(19): siRNA sense strand
gaauaagugggcucugagu

SEQ ID NO: 69598 - RNA, 19 nt, Homo sapiens
  misc_RNA (1)...(19): siRNA sense strand
gcgucggaguuucgaaaga

SEQ ID NO: 69599 - RNA, 19 nt, Homo sapiens
  misc_RNA (1)...(19): siRNA sense strand
gucggacucuggugucuuc

SEQ ID NO: 69600 - RNA, 19 nt, Homo sapiens
  misc_RNA (1)...(19): siRNA sense strand
guucacagauaaggacaag

SEQ ID NO: 69601 - RNA, 19 nt, Homo sapiens
  misc_RNA (1)...(19): siRNA sense strand
gcucugagucgugggaaga

SEQ ID NO: 69602 - RNA, 19 nt, Homo sapiens
  misc_RNA (1)...(19): siRNA sense strand
agagggaacugcggauguc

SEQ ID NO: 69603 - RNA, 19 nt, Homo sapiens
  misc_RNA (1)...(19): siRNA sense strand
gugggaagguggagaguua

SEQ ID NO: 69604 - RNA, 19 nt, Homo sapiens
  misc_RNA (1)...(19): siRNA sense strand
uguauuaccuccuugcuaa

SEQ ID NO: 69605 - RNA, 19 nt, Homo sapiens
  misc_RNA (1)...(19): siRNA sense strand
gaagauacaccggcaguug

SEQ ID NO: 69606 - RNA, 19 nt, Homo sapiens
  misc_RNA (1)...(19): siRNA sense strand
ccaaucaggcuacuuugua

SEQ ID NO: 69607 - RNA, 19 nt, Homo sapiens
  misc_RNA (1)...(19): siRNA sense strand
gcacuuggccacagcagaa

SEQ ID NO: 69608 - RNA, 19 nt, Homo sapiens
  misc_RNA (1)...(19): siRNA sense strand
acacuguaauuucccuuua

SEQ ID NO: 69609 - RNA, 19 nt, Homo sapiens
  misc_RNA (1)...(19): siRNA sense strand
agagacagcuagggcuuua

SEQ ID NO: 69610 - RNA, 19 nt, Homo sapiens
  misc_RNA (1)...(19): siRNA sense strand
agaaguauguggcugcuau

SEQ ID NO: 69611 - RNA, 19 nt, Homo sapiens
  misc_RNA (1)...(19): siRNA sense strand
ggagagggaucaguucuac

SEQ ID NO: 69612 - RNA, 19 nt, Homo sapiens
  misc_RNA (1)...(19): siRNA sense strand
gaaacuagaauacagaaac

SEQ ID NO: 69613 - RNA, 19 nt, Homo sapiens
  misc_RNA (1)...(19): siRNA sense strand
gaagguggagaguuaguga

SEQ ID NO: 69614 - RNA, 19 nt, Homo sapiens
  misc_RNA (1)...(19): siRNA sense strand
ggaguuauguaugguuuua

SEQ ID NO: 69615 - RNA, 19 nt, Homo sapiens
  misc_RNA (1)...(19): siRNA sense strand
cccaauggcuggaggauuc

SEQ ID NO: 69616 - RNA, 19 nt, Homo sapiens
  misc_RNA (1)...(19): siRNA sense strand
uauauucucucgggucaaa

SEQ ID NO: 69617 - RNA, 19 nt, Homo sapiens
  misc_RNA (1)...(19): siRNA sense strand
agcagaagcucuuguggaa

SEQ ID NO: 69618 - RNA, 19 nt, Homo sapiens
  misc_RNA (1)...(19): siRNA sense strand
cagcuagggcuuuauauuc

SEQ ID NO: 69619 - RNA, 19 nt, Homo sapiens
  misc_RNA (1)...(19): siRNA sense strand
gcuggaggauucccuucaa

SEQ ID NO: 69620 - RNA, 19 nt, Homo sapiens
  misc_RNA (1)...(19): siRNA sense strand
gugagucccuccaacuaug

SEQ ID NO: 69621 - RNA, 19 nt, Homo sapiens
  misc_RNA (1)...(19): siRNA sense strand
agacagcuagggcuuuaua

SEQ ID NO: 69622 - RNA, 19 nt, Homo sapiens
  misc_RNA (1)...(19): siRNA sense strand
gagugagucccuccaacua

SEQ ID NO: 69623 - RNA, 19 nt, Homo sapiens
  misc_RNA (1)...(19): siRNA sense strand
gagaaacuagaauacagaa

SEQ ID NO: 69624 - RNA, 19 nt, Homo sapiens
  misc_RNA (1)...(19): siRNA sense strand
gagaguuagugacgacaca

SEQ ID NO: 69625 - RNA, 19 nt, Homo sapiens
  misc_RNA (1)...(19): siRNA sense strand
gaaggagagggaucaguuc

SEQ ID NO: 69626 - RNA, 19 nt, Homo sapiens
  misc_RNA (1)...(19): siRNA sense strand
ugaaggagagggaucaguu

SEQ ID NO: 69627 - RNA, 19 nt, Homo sapiens
  misc_RNA (1)...(19): siRNA sense strand
ugacucaacuguauuaccu

SEQ ID NO: 69628 - RNA, 19 nt, Homo sapiens
  misc_RNA (1)...(19): siRNA sense strand
aagaagacacuguaauuuc

SEQ ID NO: 69629 - RNA, 19 nt, Homo sapiens
  misc_RNA (1)...(19): siRNA sense strand
caacuaugagaaacuagaa

SEQ ID NO: 69630 - RNA, 19 nt, Homo sapiens
  misc_RNA (1)...(19): siRNA sense strand
ucaacuguauuaccuccuu

SEQ ID NO: 69631 - RNA, 19 nt, Homo sapiens
  misc_RNA (1)...(19): siRNA sense strand
gguccuacuuccaaaccaa

SEQ ID NO: 69632 - RNA, 19 nt, Homo sapiens
  misc_RNA (1)...(19): siRNA sense strand
gcccuugcgucugcucuuu

SEQ ID NO: 69633 - RNA, 19 nt, Homo sapiens
  misc_RNA (1)...(19): siRNA sense strand
acagaaaccggcuggaaga

SEQ ID NO: 69634 - RNA, 19 nt, Homo sapiens
  misc_RNA (1)...(19): siRNA sense strand
agaagacacuguaauuucc

SEQ ID NO: 69635 - RNA, 19 nt, Homo sapiens
  misc_RNA (1)...(19): siRNA sense strand
gagaugcccugggguacua

SEQ ID NO: 69636 - RNA, 19 nt, Homo sapiens
  misc_RNA (1)...(19): siRNA sense strand
ugagaaacuagaauacaga

SEQ ID NO: 69637 - RNA, 19 nt, Homo sapiens
  misc_RNA (1)...(19): siRNA sense strand
uuaccaagacugcauggaa

SEQ ID NO: 69638 - RNA, 19 nt, Homo sapiens
  misc_RNA (1)...(19): siRNA sense strand
caaaccaaaugggaaaauu

SEQ ID NO: 69639 - RNA, 19 nt, Homo sapiens
  misc_RNA (1)...(19): siRNA sense strand
uguccaaucaggcuacuuu

SEQ ID NO: 69640 - RNA, 19 nt, Homo sapiens
  misc_RNA (1)...(19): siRNA sense strand
acacugguccuacuuccaa

SEQ ID NO: 69641 - RNA, 19 nt, Homo sapiens
  misc_RNA (1)...(19): siRNA sense strand
gcugcuaccagaagcuaaa

SEQ ID NO: 69642 - RNA, 19 nt, Homo sapiens
  misc_RNA (1)...(19): siRNA sense strand
acagcuagggcuuuauauu

SEQ ID NO: 69643 - RNA, 19 nt, Homo sapiens
  misc_RNA (1)...(19): siRNA sense strand
ccaacuaugagaaacuaga

SEQ ID NO: 69644 - RNA, 19 nt, Homo sapiens
  misc_RNA (1)...(19): siRNA sense strand
cuaccuucccugagucuuu

SEQ ID NO: 69645 - RNA, 19 nt, Homo sapiens
  misc_RNA (1)...(19): siRNA sense strand
cuacgaugcuguucuugcu

SEQ ID NO: 69646 - RNA, 19 nt, Homo sapiens
  misc_RNA (1)...(19): siRNA sense strand
cuccaacuaugagaaacua

SEQ ID NO: 69647 - RNA, 19 nt, Homo sapiens
  misc_RNA (1)...(19): siRNA sense strand
gcuaagcauuaccaagacu

SEQ ID NO: 69648 - RNA, 19 nt, Homo sapiens
  misc_RNA (1)...(19): siRNA sense strand
gacacuguaauuucccuuu

SEQ ID NO: 69649 - RNA, 19 nt, Homo sapiens
  misc_RNA (1)...(19): siRNA sense strand
gcuagggcuuuauauucuc

SEQ ID NO: 69650 - RNA, 19 nt, Homo sapiens
  misc_RNA (1)...(19): siRNA sense strand
gaaguauguggcugcuaug

SEQ ID NO: 69651 - RNA, 19 nt, Homo sapiens
  misc_RNA (1)...(19): siRNA sense strand
acaacgccaugcagcugaa

SEQ ID NO: 69652 - RNA, 19 nt, Homo sapiens
  misc_RNA (1)...(19): siRNA sense strand
aaacuagaauacagaaacc

SEQ ID NO: 69653 - RNA, 19 nt, Homo sapiens
  misc_RNA (1)...(19): siRNA sense strand
guuagugacgacacaguga

SEQ ID NO: 69654 - RNA, 19 nt, Homo sapiens
  misc_RNA (1)...(19): siRNA sense strand
ggaggauucccuucaacag

SEQ ID NO: 69655 - RNA, 19 nt, Homo sapiens
  misc_RNA (1)...(19): siRNA sense strand
ggaagguggagaguuagug

SEQ ID NO: 69656 - RNA, 19 nt, Homo sapiens
  misc_RNA (1)...(19): siRNA sense strand
ggccacagcagaagcucuu

SEQ ID NO: 69657 - RNA, 19 nt, Homo sapiens
  misc_RNA (1)...(19): siRNA sense strand
ugccuacgaugcuguucuu

SEQ ID NO: 69658 - RNA, 19 nt, Homo sapiens
  misc_RNA (1)...(19): siRNA sense strand
caaaagaagacacuguaau

SEQ ID NO: 69659 - RNA, 19 nt, Homo sapiens
  misc_RNA (1)...(19): siRNA sense strand
gggaaagccccuaaguuga

SEQ ID NO: 69660 - RNA, 19 nt, Homo sapiens
  misc_RNA (1)...(19): siRNA sense strand
cacuguaauuucccuuuag

SEQ ID NO: 69661 - RNA, 19 nt, Homo sapiens
  misc_RNA (1)...(19): siRNA sense strand
ggggaguuauguaugguuu

SEQ ID NO: 69662 - RNA, 19 nt, Homo sapiens
  misc_RNA (1)...(19): siRNA sense strand
cuucaacacugguccuacu

SEQ ID NO: 69663 - RNA, 19 nt, Homo sapiens
  misc_RNA (1)...(19): siRNA sense strand
uggcagagcugaaagagua

SEQ ID NO: 69664 - RNA, 19 nt, Homo sapiens
  misc_RNA (1)...(19): siRNA sense strand
ggacgaggauccauaugug

SEQ ID NO: 69665 - RNA, 19 nt, Homo sapiens
  misc_RNA (1)...(19): siRNA sense strand
ucauggagauguugucuaa

SEQ ID NO: 69666 - RNA, 19 nt, Homo sapiens
  misc_RNA (1)...(19): siRNA sense strand
aggcagagcucaacaguga

SEQ ID NO: 69667 - RNA, 19 nt, Homo sapiens
  misc_RNA (1)...(19): siRNA sense strand
ugaaggugcugaugaaguu

SEQ ID NO: 69668 - RNA, 19 nt, Homo sapiens
  misc_RNA (1)...(19): siRNA sense strand
uagacgagcuuaucugcua

SEQ ID NO: 69669 - RNA, 19 nt, Homo sapiens
  misc_RNA (1)...(19): siRNA sense strand
gaaagaguacgcaacagaa

SEQ ID NO: 69670 - RNA, 19 nt, Homo sapiens
  misc_RNA (1)...(19): siRNA sense strand
gcagcgcucucagaaauug

SEQ ID NO: 69671 - RNA, 19 nt, Homo sapiens
  misc_RNA (1)...(19): siRNA sense strand
gcagcaacaucuucacugu

SEQ ID NO: 69672 - RNA, 19 nt, Homo sapiens
  misc_RNA (1)...(19): siRNA sense strand
gcaaguaccccaacaagua

SEQ ID NO: 69673 - RNA, 19 nt, Homo sapiens
  misc_RNA (1)...(19): siRNA sense strand
cuaaggacuuggacuacua

SEQ ID NO: 69674 - RNA, 19 nt, Homo sapiens
  misc_RNA (1)...(19): siRNA sense strand
ccaacuauaugcccaagga

SEQ ID NO: 69675 - RNA, 19 nt, Homo sapiens
  misc_RNA (1)...(19): siRNA sense strand
gaaggaggcagugaagaaa

SEQ ID NO: 69676 - RNA, 19 nt, Homo sapiens
  misc_RNA (1)...(19): siRNA sense strand
gaugggagcuguggaccuu

SEQ ID NO: 69677 - RNA, 19 nt, Homo sapiens
  misc_RNA (1)...(19): siRNA sense strand
gaaggacgaggauccauau

SEQ ID NO: 69678 - RNA, 19 nt, Homo sapiens
  misc_RNA (1)...(19): siRNA sense strand
guauaccucuacuugauga

SEQ ID NO: 69679 - RNA, 19 nt, Homo sapiens
  misc_RNA (1)...(19): siRNA sense strand
gcacacugcucaagaagcu

SEQ ID NO: 69680 - RNA, 19 nt, Homo sapiens
  misc_RNA (1)...(19): siRNA sense strand
agccagagcugcaguaugu

SEQ ID NO: 69681 - RNA, 19 nt, Homo sapiens
  misc_RNA (1)...(19): siRNA sense strand
uggcagcgcucucagaaau

SEQ ID NO: 69682 - RNA, 19 nt, Homo sapiens
  misc_RNA (1)...(19): siRNA sense strand
agaagccacucaucucuga

SEQ ID NO: 69683 - RNA, 19 nt, Homo sapiens
  misc_RNA (1)...(19): siRNA sense strand
gcucaacagugacaagaag

SEQ ID NO: 69684 - RNA, 19 nt, Homo sapiens
  misc_RNA (1)...(19): siRNA sense strand
ccacucaggacucagauaa

SEQ ID NO: 69685 - RNA, 19 nt, Homo sapiens
  misc_RNA (1)...(19): siRNA sense strand
gcaaccugcucgaucugaa

SEQ ID NO: 69686 - RNA, 19 nt, Homo sapiens
  misc_RNA (1)...(19): siRNA sense strand
gauguugucuaaggacuug

SEQ ID NO: 69687 - RNA, 19 nt, Homo sapiens
  misc_RNA (1)...(19): siRNA sense strand
ugaagaagcuaguauaccu

SEQ ID NO: 69688 - RNA, 19 nt, Homo sapiens
  misc_RNA (1)...(19): siRNA sense strand
gaagauggaccggcagaug

SEQ ID NO: 69689 - RNA, 19 nt, Homo sapiens
  misc_RNA (1)...(19): siRNA sense strand
caucgagcccacacuguua

SEQ ID NO: 69690 - RNA, 19 nt, Homo sapiens
  misc_RNA (1)...(19): siRNA sense strand
gaagaaggaggcagugaag

SEQ ID NO: 69691 - RNA, 19 nt, Homo sapiens
  misc_RNA (1)...(19): siRNA sense strand
cuaaagaagccaacagaga

SEQ ID NO: 69692 - RNA, 19 nt, Homo sapiens
  misc_RNA (1)...(19): siRNA sense strand
ggaaggcugugcgugcuau

SEQ ID NO: 69693 - RNA, 19 nt, Homo sapiens
  misc_RNA (1)...(19): siRNA sense strand
guacaacgacccuaucuac

SEQ ID NO: 69694 - RNA, 19 nt, Homo sapiens
  misc_RNA (1)...(19): siRNA sense strand
ggccugagauccugaagca

SEQ ID NO: 69695 - RNA, 19 nt, Homo sapiens
  misc_RNA (1)...(19): siRNA sense strand
acaagaaggagaagaagaa

SEQ ID NO: 69696 - RNA, 19 nt, Homo sapiens
  misc_RNA (1)...(19): siRNA sense strand
ugacagccauugugaaacu

SEQ ID NO: 69697 - RNA, 19 nt, Homo sapiens
  misc_RNA (1)...(19): siRNA sense strand
uugacaagaucacagagua

SEQ ID NO: 69698 - RNA, 19 nt, Homo sapiens
  misc_RNA (1)...(19): siRNA sense strand
uggcuuccgucuaccauaa

SEQ ID NO: 69699 - RNA, 19 nt, Homo sapiens
  misc_RNA (1)...(19): siRNA sense strand
agaaagugauugcaucgau

SEQ ID NO: 69700 - RNA, 19 nt, Homo sapiens
  misc_RNA (1)...(19): siRNA sense strand
uggagaagcuggacaucau

SEQ ID NO: 69701 - RNA, 19 nt, Homo sapiens
  misc_RNA (1)...(19): siRNA sense strand
ugaaagaguacgcaacaga

SEQ ID NO: 69702 - RNA, 19 nt, Homo sapiens
  misc_RNA (1)...(19): siRNA sense strand
ugaauuacgccaagaguca

SEQ ID NO: 69703 - RNA, 19 nt, Homo sapiens
  misc_RNA (1)...(19): siRNA sense strand
gaccucaucuccgacucua

SEQ ID NO: 69704 - RNA, 19 nt, Homo sapiens
  misc_RNA (1)...(19): siRNA sense strand
ugaaggacgaggauccaua

SEQ ID NO: 69705 - RNA, 19 nt, Homo sapiens
  misc_RNA (1)...(19): siRNA sense strand
gaagauggagccucugaac

SEQ ID NO: 69706 - RNA, 19 nt, Homo sapiens
  misc_RNA (1)...(19): siRNA sense strand
ggacugccucgccaacuau

SEQ ID NO: 69707 - RNA, 19 nt, Homo sapiens
  misc_RNA (1)...(19): siRNA sense strand
gcaguaccagccaaucuug

SEQ ID NO: 69708 - RNA, 19 nt, Homo sapiens
  misc_RNA (1)...(19): siRNA sense strand
ugcagcagguccucaguuu

SEQ ID NO: 69709 - RNA, 19 nt, Homo sapiens
  misc_RNA (1)...(19): siRNA sense strand
agaaggaggcagugaagaa

SEQ ID NO: 69710 - RNA, 19 nt, Homo sapiens
  misc_RNA (1)...(19): siRNA sense strand
gagaagcuggacaucauga

SEQ ID NO: 69711 - RNA, 19 nt, Homo sapiens
  misc_RNA (1)...(19): siRNA sense strand
gaaggcagagcucaacagu

SEQ ID NO: 69712 - RNA, 19 nt, Homo sapiens
  misc_RNA (1)...(19): siRNA sense strand
gcagagcagcaacaucuuc

SEQ ID NO: 69713 - RNA, 19 nt, Homo sapiens
  misc_RNA (1)...(19): siRNA sense strand
acuuagagcugucccugaa

SEQ ID NO: 69714 - RNA, 19 nt, Homo sapiens
  misc_RNA (1)...(19): siRNA sense strand
gaaguacaacgacccuauc

SEQ ID NO: 69715 - RNA, 19 nt, Homo sapiens
  misc_RNA (1)...(19): siRNA sense strand
agaaggagaagaagaagga

SEQ ID NO: 69716 - RNA, 19 nt, Homo sapiens
  misc_RNA (1)...(19): siRNA sense strand
ggacaucuuccgcaaguac

SEQ ID NO: 69717 - RNA, 19 nt, Homo sapiens
  misc_RNA (1)...(19): siRNA sense strand
cggacaaccuggagcugaa

SEQ ID NO: 69718 - RNA, 19 nt, Homo sapiens
  misc_RNA (1)...(19): siRNA sense strand
gggcugccaugaucuggau

SEQ ID NO: 69719 - RNA, 19 nt, Homo sapiens
  misc_RNA (1)...(19): siRNA sense strand
ccaucaagguggagcaauc

SEQ ID NO: 69720 - RNA, 19 nt, Homo sapiens
  misc_RNA (1)...(19): siRNA sense strand
gcugaaagaguacgcaaca

SEQ ID NO: 69721 - RNA, 19 nt, Homo sapiens
  misc_RNA (1)...(19): siRNA sense strand
gaagcuaguauaccucuac

SEQ ID NO: 69722 - RNA, 19 nt, Homo sapiens
  misc_RNA (1)...(19): siRNA sense strand
gaaggauauucccaaugag

SEQ ID NO: 69723 - RNA, 19 nt, Homo sapiens
  misc_RNA (1)...(19): siRNA sense strand
ccacugcacauccucuuug

SEQ ID NO: 69724 - RNA, 19 nt, Homo sapiens
  misc_RNA (1)...(19): siRNA sense strand
agauggagccucugaacaa

SEQ ID NO: 69725 - RNA, 19 nt, Homo sapiens
  misc_RNA (1)...(19): siRNA sense strand
gcacgcugcucgaccucau

SEQ ID NO: 69726 - RNA, 19 nt, Homo sapiens
  misc_RNA (1)...(19): siRNA sense strand
gacaagaaggagaagaaga

SEQ ID NO: 69727 - RNA, 19 nt, Homo sapiens
  misc_RNA (1)...(19): siRNA sense strand
uggacugccucgccaacua

SEQ ID NO: 69728 - RNA, 19 nt, Homo sapiens
  misc_RNA (1)...(19): siRNA sense strand
cugagauccugaagcauga

SEQ ID NO: 69729 - RNA, 19 nt, Homo sapiens
  misc_RNA (1)...(19): siRNA sense strand
gaggugguguuggcugaga

SEQ ID NO: 69730 - RNA, 19 nt, Homo sapiens
  misc_RNA (1)...(19): siRNA sense strand
aaggacaucuuccgcaagu

SEQ ID NO: 69731 - RNA, 19 nt, Homo sapiens
  misc_RNA (1)...(19): siRNA sense strand
ggucaucaaggacaucuuc

SEQ ID NO: 69732 - RNA, 19 nt, Homo sapiens
  misc_RNA (1)...(19): siRNA sense strand
gaagcuggacaucaugauc

SEQ ID NO: 69733 - RNA, 19 nt, Homo sapiens
  misc_RNA (1)...(19): siRNA sense strand
uaccucuacuugaugaauu

SEQ ID NO: 69734 - RNA, 19 nt, Homo sapiens
  misc_RNA (1)...(19): siRNA sense strand
gugacaagaaggagaagaa

SEQ ID NO: 69735 - RNA, 19 nt, Homo sapiens
  misc_RNA (1)...(19): siRNA sense strand
guacgcaacagaaguggau

SEQ ID NO: 69736 - RNA, 19 nt, Homo sapiens
  misc_RNA (1)...(19): siRNA sense strand
gcagagcucaacagugaca

SEQ ID NO: 69737 - RNA, 19 nt, Homo sapiens
  misc_RNA (1)...(19): siRNA sense strand
gcugugaaggugcugauga

SEQ ID NO: 69738 - RNA, 19 nt, Homo sapiens
  misc_RNA (1)...(19): siRNA sense strand
guggugcucucugcuguga

SEQ ID NO: 69739 - RNA, 19 nt, Homo sapiens
  misc_RNA (1)...(19): siRNA sense strand
ggagaagcuggacaucaug

SEQ ID NO: 69740 - RNA, 19 nt, Homo sapiens
  misc_RNA (1)...(19): siRNA sense strand
acgagaccauccucaagaa

SEQ ID NO: 69741 - RNA, 19 nt, Homo sapiens
  misc_RNA (1)...(19): siRNA sense strand
gccaggacaugcucuacca

SEQ ID NO: 69742 - RNA, 19 nt, Homo sapiens
  misc_RNA (1)...(19): siRNA sense strand
gcucggucaugaagaugga

SEQ ID NO: 69743 - RNA, 19 nt, Homo sapiens
  misc_RNA (1)...(19): siRNA sense strand
cgacuuugccauccaguuc

SEQ ID NO: 69744 - RNA, 19 nt, Homo sapiens
  misc_RNA (1)...(19): siRNA sense strand
gaccguggcuacaucuacu

SEQ ID NO: 69745 - RNA, 19 nt, Homo sapiens
  misc_RNA (1)...(19): siRNA sense strand
gaaguucauggagauguug

SEQ ID NO: 69746 - RNA, 19 nt, Homo sapiens
  misc_RNA (1)...(19): siRNA sense strand
uggccugagugaccucuuu

SEQ ID NO: 69747 - RNA, 19 nt, Homo sapiens
  misc_RNA (1)...(19): siRNA sense strand
gagcucaacagugacaaga

SEQ ID NO: 69748 - RNA, 19 nt, Homo sapiens
  misc_RNA (1)...(19): siRNA sense strand
aaagugauugcaucgauga

SEQ ID NO: 69749 - RNA, 19 nt, Homo sapiens
  misc_RNA (1)...(19): siRNA sense strand
gcagugaagaaagugauug

SEQ ID NO: 69750 - RNA, 19 nt, Homo sapiens
  misc_RNA (1)...(19): siRNA sense strand
ugaaguacaacgacccuau

SEQ ID NO: 69751 - RNA, 19 nt, Homo sapiens
  misc_RNA (1)...(19): siRNA sense strand
ucaaucucaucgugcagaa

SEQ ID NO: 69752 - RNA, 19 nt, Homo sapiens
  misc_RNA (1)...(19): siRNA sense strand
ggugcucucugcugugaag

SEQ ID NO: 69753 - RNA, 19 nt, Homo sapiens
  misc_RNA (1)...(19): siRNA sense strand
gauggagccucugaacaac

SEQ ID NO: 69754 - RNA, 19 nt, Homo sapiens
  misc_RNA (1)...(19): siRNA sense strand
cagcagguccucaguuugg

SEQ ID NO: 69755 - RNA, 19 nt, Homo sapiens
  misc_RNA (1)...(19): siRNA sense strand
ggaucgacaacgcagauga

SEQ ID NO: 69756 - RNA, 19 nt, Homo sapiens
  misc_RNA (1)...(19): siRNA sense strand
agcaugagaugaagguguu

SEQ ID NO: 69757 - RNA, 19 nt, Homo sapiens
  misc_RNA (1)...(19): siRNA sense strand
ugucuaaggacuuggacua

SEQ ID NO: 69758 - RNA, 19 nt, Homo sapiens
  misc_RNA (1)...(19): siRNA sense strand
caaguaugagagugugauu

SEQ ID NO: 69759 - RNA, 19 nt, Homo sapiens
  misc_RNA (1)...(19): siRNA sense strand
uuagagcugucccugaagu

SEQ ID NO: 69760 - RNA, 19 nt, Homo sapiens
  misc_RNA (1)...(19): siRNA sense strand
guucaaccgcaacagcuuu

SEQ ID NO: 69761 - RNA, 19 nt, Homo sapiens
  misc_RNA (1)...(19): siRNA sense strand
gcagcagguccucaguuug

SEQ ID NO: 69762 - RNA, 19 nt, Homo sapiens
  misc_RNA (1)...(19): siRNA sense strand
gaaucuggacucccuggau

SEQ ID NO: 69763 - RNA, 19 nt, Homo sapiens
  misc_RNA (1)...(19): siRNA sense strand
uggcagagcugaaagagua

SEQ ID NO: 69764 - RNA, 19 nt, Homo sapiens
  misc_RNA (1)...(19): siRNA sense strand
ggacgaggauccauaugug

SEQ ID NO: 69765 - RNA, 19 nt, Homo sapiens
  misc_RNA (1)...(19): siRNA sense strand
ucauggagauguugucuaa

SEQ ID NO: 69766 - RNA, 19 nt, Homo sapiens
  misc_RNA (1)...(19): siRNA sense strand
aggcagagcucaacaguga

SEQ ID NO: 69767 - RNA, 19 nt, Homo sapiens
  misc_RNA (1)...(19): siRNA sense strand
ugaaggugcugaugaaguu

SEQ ID NO: 69768 - RNA, 19 nt, Homo sapiens
  misc_RNA (1)...(19): siRNA sense strand
uagacgagcuuaucugcua

SEQ ID NO: 69769 - RNA, 19 nt, Homo sapiens
  misc_RNA (1)...(19): siRNA sense strand
gaaagaguacgcaacagaa

SEQ ID NO: 69770 - RNA, 19 nt, Homo sapiens
  misc_RNA (1)...(19): siRNA sense strand
gcagcgcucucagaaauug

SEQ ID NO: 69771 - RNA, 19 nt, Homo sapiens
  misc_RNA (1)...(19): siRNA sense strand
gcagcaacaucuucacugu

SEQ ID NO: 69772 - RNA, 19 nt, Homo sapiens
  misc_RNA (1)...(19): siRNA sense strand
gcaaguaccccaacaagua

SEQ ID NO: 69773 - RNA, 19 nt, Homo sapiens
  misc_RNA (1)...(19): siRNA sense strand
cuaaggacuuggacuacua

SEQ ID NO: 69774 - RNA, 19 nt, Homo sapiens
  misc_RNA (1)...(19): siRNA sense strand
ccaacuauaugcccaagga

SEQ ID NO: 69775 - RNA, 19 nt, Homo sapiens
  misc_RNA (1)...(19): siRNA sense strand
gaaggaggcagugaagaaa

SEQ ID NO: 69776 - RNA, 19 nt, Homo sapiens
  misc_RNA (1)...(19): siRNA sense strand
gaugggagcuguggaccuu

SEQ ID NO: 69777 - RNA, 19 nt, Homo sapiens
  misc_RNA (1)...(19): siRNA sense strand
gaaggacgaggauccauau

SEQ ID NO: 69778 - RNA, 19 nt, Homo sapiens
  misc_RNA (1)...(19): siRNA sense strand
guauaccucuacuugauga

SEQ ID NO: 69779 - RNA, 19 nt, Homo sapiens
  misc_RNA (1)...(19): siRNA sense strand
gcacacugcucaagaagcu

SEQ ID NO: 69780 - RNA, 19 nt, Homo sapiens
  misc_RNA (1)...(19): siRNA sense strand
agccagagcugcaguaugu

SEQ ID NO: 69781 - RNA, 19 nt, Homo sapiens
  misc_RNA (1)...(19): siRNA sense strand
uggcagcgcucucagaaau

SEQ ID NO: 69782 - RNA, 19 nt, Homo sapiens
  misc_RNA (1)...(19): siRNA sense strand
agaagccacucaucucuga

SEQ ID NO: 69783 - RNA, 19 nt, Homo sapiens
  misc_RNA (1)...(19): siRNA sense strand
gcucaacagugacaagaag

SEQ ID NO: 69784 - RNA, 19 nt, Homo sapiens
  misc_RNA (1)...(19): siRNA sense strand
ccacucaggacucagauaa

SEQ ID NO: 69785 - RNA, 19 nt, Homo sapiens
  misc_RNA (1)...(19): siRNA sense strand
gcaaccugcucgaucugaa

SEQ ID NO: 69786 - RNA, 19 nt, Homo sapiens
  misc_RNA (1)...(19): siRNA sense strand
gauguugucuaaggacuug

SEQ ID NO: 69787 - RNA, 19 nt, Homo sapiens
  misc_RNA (1)...(19): siRNA sense strand
ugaagaagcuaguauaccu

SEQ ID NO: 69788 - RNA, 19 nt, Homo sapiens
  misc_RNA (1)...(19): siRNA sense strand
gaagauggaccggcagaug

SEQ ID NO: 69789 - RNA, 19 nt, Homo sapiens
  misc_RNA (1)...(19): siRNA sense strand
caucgagcccacacuguua

SEQ ID NO: 69790 - RNA, 19 nt, Homo sapiens
  misc_RNA (1)...(19): siRNA sense strand
gaagaaggaggcagugaag

SEQ ID NO: 69791 - RNA, 19 nt, Homo sapiens
  misc_RNA (1)...(19): siRNA sense strand
cuaaagaagccaacagaga

SEQ ID NO: 69792 - RNA, 19 nt, Homo sapiens
  misc_RNA (1)...(19): siRNA sense strand
ggaaggcugugcgugcuau

SEQ ID NO: 69793 - RNA, 19 nt, Homo sapiens
  misc_RNA (1)...(19): siRNA sense strand
guacaacgacccuaucuac

SEQ ID NO: 69794 - RNA, 19 nt, Homo sapiens
  misc_RNA (1)...(19): siRNA sense strand
ggccugagauccugaagca

SEQ ID NO: 69795 - RNA, 19 nt, Homo sapiens
  misc_RNA (1)...(19): siRNA sense strand
acaagaaggagaagaagaa

SEQ ID NO: 69796 - RNA, 19 nt, Homo sapiens
  misc_RNA (1)...(19): siRNA sense strand
ugacagccauugugaaacu

SEQ ID NO: 69797 - RNA, 19 nt, Homo sapiens
  misc_RNA (1)...(19): siRNA sense strand
uugacaagaucacagagua

SEQ ID NO: 69798 - RNA, 19 nt, Homo sapiens
  misc_RNA (1)...(19): siRNA sense strand
uggcuuccgucuaccauaa

SEQ ID NO: 69799 - RNA, 19 nt, Homo sapiens
  misc_RNA (1)...(19): siRNA sense strand
agaaagugauugcaucgau

SEQ ID NO: 69800 - RNA, 19 nt, Homo sapiens
  misc_RNA (1)...(19): siRNA sense strand
uggagaagcuggacaucau

SEQ ID NO: 69801 - RNA, 19 nt, Homo sapiens
  misc_RNA (1)...(19): siRNA sense strand
ugaaagaguacgcaacaga

SEQ ID NO: 69802 - RNA, 19 nt, Homo sapiens
  misc_RNA (1)...(19): siRNA sense strand
ugaauuacgccaagaguca

SEQ ID NO: 69803 - RNA, 19 nt, Homo sapiens
  misc_RNA (1)...(19): siRNA sense strand
gaccucaucuccgacucua

SEQ ID NO: 69804 - RNA, 19 nt, Homo sapiens
  misc_RNA (1)...(19): siRNA sense strand
ugaaggacgaggauccaua

SEQ ID NO: 69805 - RNA, 19 nt, Homo sapiens
  misc_RNA (1)...(19): siRNA sense strand
gaagauggagccucugaac

SEQ ID NO: 69806 - RNA, 19 nt, Homo sapiens
  misc_RNA (1)...(19): siRNA sense strand
ggacugccucgccaacuau

SEQ ID NO: 69807 - RNA, 19 nt, Homo sapiens
  misc_RNA (1)...(19): siRNA sense strand
gcaguaccagccaaucuug

SEQ ID NO: 69808 - RNA, 19 nt, Homo sapiens
  misc_RNA (1)...(19): siRNA sense strand
ugcagcagguccucaguuu

SEQ ID NO: 69809 - RNA, 19 nt, Homo sapiens
  misc_RNA (1)...(19): siRNA sense strand
agaaggaggcagugaagaa

SEQ ID NO: 69810 - RNA, 19 nt, Homo sapiens
  misc_RNA (1)...(19): siRNA sense strand
gagaagcuggacaucauga

SEQ ID NO: 69811 - RNA, 19 nt, Homo sapiens
  misc_RNA (1)...(19): siRNA sense strand
gaaggcagagcucaacagu

SEQ ID NO: 69812 - RNA, 19 nt, Homo sapiens
  misc_RNA (1)...(19): siRNA sense strand
gcagagcagcaacaucuuc

SEQ ID NO: 69813 - RNA, 19 nt, Homo sapiens
  misc_RNA (1)...(19): siRNA sense strand
acuuagagcugucccugaa

SEQ ID NO: 69814 - RNA, 19 nt, Homo sapiens
  misc_RNA (1)...(19): siRNA sense strand
gaaguacaacgacccuauc

SEQ ID NO: 69815 - RNA, 19 nt, Homo sapiens
  misc_RNA (1)...(19): siRNA sense strand
agaaggagaagaagaagga

SEQ ID NO: 69816 - RNA, 19 nt, Homo sapiens
  misc_RNA (1)...(19): siRNA sense strand
ggacaucuuccgcaaguac

SEQ ID NO: 69817 - RNA, 19 nt, Homo sapiens
  misc_RNA (1)...(19): siRNA sense strand
cggacaaccuggagcugaa

SEQ ID NO: 69818 - RNA, 19 nt, Homo sapiens
  misc_RNA (1)...(19): siRNA sense strand
gggcugccaugaucuggau

SEQ ID NO: 69819 - RNA, 19 nt, Homo sapiens
  misc_RNA (1)...(19): siRNA sense strand
ccaucaagguggagcaauc

SEQ ID NO: 69820 - RNA, 19 nt, Homo sapiens
  misc_RNA (1)...(19): siRNA sense strand
gcugaaagaguacgcaaca

SEQ ID NO: 69821 - RNA, 19 nt, Homo sapiens
  misc_RNA (1)...(19): siRNA sense strand
gaagcuaguauaccucuac

SEQ ID NO: 69822 - RNA, 19 nt, Homo sapiens
  misc_RNA (1)...(19): siRNA sense strand
gaaggauauucccaaugag

SEQ ID NO: 69823 - RNA, 19 nt, Homo sapiens
  misc_RNA (1)...(19): siRNA sense strand
ccacugcacauccucuuug

SEQ ID NO: 69824 - RNA, 19 nt, Homo sapiens
  misc_RNA (1)...(19): siRNA sense strand
agauggagccucugaacaa

SEQ ID NO: 69825 - RNA, 19 nt, Homo sapiens
  misc_RNA (1)...(19): siRNA sense strand
gcacgcugcucgaccucau

SEQ ID NO: 69826 - RNA, 19 nt, Homo sapiens
  misc_RNA (1)...(19): siRNA sense strand
gacaagaaggagaagaaga

SEQ ID NO: 69827 - RNA, 19 nt, Homo sapiens
  misc_RNA (1)...(19): siRNA sense strand
uggacugccucgccaacua

SEQ ID NO: 69828 - RNA, 19 nt, Homo sapiens
  misc_RNA (1)...(19): siRNA sense strand
cugagauccugaagcauga

SEQ ID NO: 69829 - RNA, 19 nt, Homo sapiens
  misc_RNA (1)...(19): siRNA sense strand
gaggugguguuggcugaga

SEQ ID NO: 69830 - RNA, 19 nt, Homo sapiens
  misc_RNA (1)...(19): siRNA sense strand
aaggacaucuuccgcaagu

SEQ ID NO: 69831 - RNA, 19 nt, Homo sapiens
  misc_RNA (1)...(19): siRNA sense strand
ggucaucaaggacaucuuc

SEQ ID NO: 69832 - RNA, 19 nt, Homo sapiens
  misc_RNA (1)...(19): siRNA sense strand
gaagcuggacaucaugauc

SEQ ID NO: 69833 - RNA, 19 nt, Homo sapiens
  misc_RNA (1)...(19): siRNA sense strand
uaccucuacuugaugaauu

SEQ ID NO: 69834 - RNA, 19 nt, Homo sapiens
  misc_RNA (1)...(19): siRNA sense strand
gugacaagaaggagaagaa

SEQ ID NO: 69835 - RNA, 19 nt, Homo sapiens
  misc_RNA (1)...(19): siRNA sense strand
guacgcaacagaaguggau

SEQ ID NO: 69836 - RNA, 19 nt, Homo sapiens
  misc_RNA (1)...(19): siRNA sense strand
gcagagcucaacagugaca

SEQ ID NO: 69837 - RNA, 19 nt, Homo sapiens
  misc_RNA (1)...(19): siRNA sense strand
gcugugaaggugcugauga

SEQ ID NO: 69838 - RNA, 19 nt, Homo sapiens
  misc_RNA (1)...(19): siRNA sense strand
guggugcucucugcuguga

SEQ ID NO: 69839 - RNA, 19 nt, Homo sapiens
  misc_RNA (1)...(19): siRNA sense strand
ggagaagcuggacaucaug

SEQ ID NO: 69840 - RNA, 19 nt, Homo sapiens
  misc_RNA (1)...(19): siRNA sense strand
acgagaccauccucaagaa

SEQ ID NO: 69841 - RNA, 19 nt, Homo sapiens
  misc_RNA (1)...(19): siRNA sense strand
gccaggacaugcucuacca

SEQ ID NO: 69842 - RNA, 19 nt, Homo sapiens
  misc_RNA (1)...(19): siRNA sense strand
gcucggucaugaagaugga

SEQ ID NO: 69843 - RNA, 19 nt, Homo sapiens
  misc_RNA (1)...(19): siRNA sense strand
cgacuuugccauccaguuc

SEQ ID NO: 69844 - RNA, 19 nt, Homo sapiens
  misc_RNA (1)...(19): siRNA sense strand
gaccguggcuacaucuacu

SEQ ID NO: 69845 - RNA, 19 nt, Homo sapiens
  misc_RNA (1)...(19): siRNA sense strand
gaaguucauggagauguug

SEQ ID NO: 69846 - RNA, 19 nt, Homo sapiens
  misc_RNA (1)...(19): siRNA sense strand
uggccugagugaccucuuu

SEQ ID NO: 69847 - RNA, 19 nt, Homo sapiens
  misc_RNA (1)...(19): siRNA sense strand
gagcucaacagugacaaga

SEQ ID NO: 69848 - RNA, 19 nt, Homo sapiens
  misc_RNA (1)...(19): siRNA sense strand
aaagugauugcaucgauga

SEQ ID NO: 69849 - RNA, 19 nt, Homo sapiens
  misc_RNA (1)...(19): siRNA sense strand
gcagugaagaaagugauug

SEQ ID NO: 69850 - RNA, 19 nt, Homo sapiens
  misc_RNA (1)...(19): siRNA sense strand
ugaaguacaacgacccuau

SEQ ID NO: 69851 - RNA, 19 nt, Homo sapiens
  misc_RNA (1)...(19): siRNA sense strand
ucaaucucaucgugcagaa

SEQ ID NO: 69852 - RNA, 19 nt, Homo sapiens
  misc_RNA (1)...(19): siRNA sense strand
ggugcucucugcugugaag

SEQ ID NO: 69853 - RNA, 19 nt, Homo sapiens
  misc_RNA (1)...(19): siRNA sense strand
gauggagccucugaacaac

SEQ ID NO: 69854 - RNA, 19 nt, Homo sapiens
  misc_RNA (1)...(19): siRNA sense strand
cagcagguccucaguuugg

SEQ ID NO: 69855 - RNA, 19 nt, Homo sapiens
  misc_RNA (1)...(19): siRNA sense strand
ggaucgacaacgcagauga

SEQ ID NO: 69856 - RNA, 19 nt, Homo sapiens
  misc_RNA (1)...(19): siRNA sense strand
agcaugagaugaagguguu

SEQ ID NO: 69857 - RNA, 19 nt, Homo sapiens
  misc_RNA (1)...(19): siRNA sense strand
ugucuaaggacuuggacua

SEQ ID NO: 69858 - RNA, 19 nt, Homo sapiens
  misc_RNA (1)...(19): siRNA sense strand
caaguaugagagugugauu

SEQ ID NO: 69859 - RNA, 19 nt, Homo sapiens
  misc_RNA (1)...(19): siRNA sense strand
uuagagcugucccugaagu

SEQ ID NO: 69860 - RNA, 19 nt, Homo sapiens
  misc_RNA (1)...(19): siRNA sense strand
guucaaccgcaacagcuuu

SEQ ID NO: 69861 - RNA, 19 nt, Homo sapiens
  misc_RNA (1)...(19): siRNA sense strand
gcagcagguccucaguuug

SEQ ID NO: 69862 - RNA, 19 nt, Homo sapiens
  misc_RNA (1)...(19): siRNA sense strand
gaaucuggacucccuggau

SEQ ID NO: 69863 - RNA, 19 nt, Homo sapiens
  misc_RNA (1)...(19): siRNA sense strand
ugaaagacaugguagaaua

SEQ ID NO: 69864 - RNA, 19 nt, Homo sapiens
  misc_RNA (1)...(19): siRNA sense strand
gaagacaaauucaaugaga

SEQ ID NO: 69865 - RNA, 19 nt, Homo sapiens
  misc_RNA (1)...(19): siRNA sense strand
ggaaggaugguuugaaaua

SEQ ID NO: 69866 - RNA, 19 nt, Homo sapiens
  misc_RNA (1)...(19): siRNA sense strand
gaagcaaccuuugaagaaa

SEQ ID NO: 69867 - RNA, 19 nt, Homo sapiens
  misc_RNA (1)...(19): siRNA sense strand
gagcugcagucuuuguuua

SEQ ID NO: 69868 - RNA, 19 nt, Homo sapiens
  misc_RNA (1)...(19): siRNA sense strand
caaaucauguugugaagaa

SEQ ID NO: 69869 - RNA, 19 nt, Homo sapiens
  misc_RNA (1)...(19): siRNA sense strand
ccaaaggauuuaucucuaa

SEQ ID NO: 69870 - RNA, 19 nt, Homo sapiens
  misc_RNA (1)...(19): siRNA sense strand
gaaauaccauuaccucauc

SEQ ID NO: 69871 - RNA, 19 nt, Homo sapiens
  misc_RNA (1)...(19): siRNA sense strand
ggaagcaaccuuugaagaa

SEQ ID NO: 69872 - RNA, 19 nt, Homo sapiens
  misc_RNA (1)...(19): siRNA sense strand
aaagucaacugccuucaaa

SEQ ID NO: 69873 - RNA, 19 nt, Homo sapiens
  misc_RNA (1)...(19): siRNA sense strand
gaugauagaccaaaggauu

SEQ ID NO: 69874 - RNA, 19 nt, Homo sapiens
  misc_RNA (1)...(19): siRNA sense strand
caauaccugucacacaaua

SEQ ID NO: 69875 - RNA, 19 nt, Homo sapiens
  misc_RNA (1)...(19): siRNA sense strand
ggcaauaccugucacacaa

SEQ ID NO: 69876 - RNA, 19 nt, Homo sapiens
  misc_RNA (1)...(19): siRNA sense strand
gaacuucaauaguacucaa

SEQ ID NO: 69877 - RNA, 19 nt, Homo sapiens
  misc_RNA (1)...(19): siRNA sense strand
gaagucugcuuuaaugaag

SEQ ID NO: 69878 - RNA, 19 nt, Homo sapiens
  misc_RNA (1)...(19): siRNA sense strand
gagcuuauuucucuuguag

SEQ ID NO: 69879 - RNA, 19 nt, Homo sapiens
  misc_RNA (1)...(19): siRNA sense strand
gaauacaucaccaucauug

SEQ ID NO: 69880 - RNA, 19 nt, Homo sapiens
  misc_RNA (1)...(19): siRNA sense strand
gagaaucccuuuuaaauca

SEQ ID NO: 69881 - RNA, 19 nt, Homo sapiens
  misc_RNA (1)...(19): siRNA sense strand
gaagauagcuccccaacuc

SEQ ID NO: 69882 - RNA, 19 nt, Homo sapiens
  misc_RNA (1)...(19): siRNA sense strand
uagugaagcugaagcauga

SEQ ID NO: 69883 - RNA, 19 nt, Homo sapiens
  misc_RNA (1)...(19): siRNA sense strand
ggagaguuauguggaguaa

SEQ ID NO: 69884 - RNA, 19 nt, Homo sapiens
  misc_RNA (1)...(19): siRNA sense strand
gaguuugccuguguugaua

SEQ ID NO: 69885 - RNA, 19 nt, Homo sapiens
  misc_RNA (1)...(19): siRNA sense strand
ucgcaaauguaguggauaa

SEQ ID NO: 69886 - RNA, 19 nt, Homo sapiens
  misc_RNA (1)...(19): siRNA sense strand
uaacagagaaucccuuuua

SEQ ID NO: 69887 - RNA, 19 nt, Homo sapiens
  misc_RNA (1)...(19): siRNA sense strand
ccugaagucugcuuuaaug

SEQ ID NO: 69888 - RNA, 19 nt, Homo sapiens
  misc_RNA (1)...(19): siRNA sense strand
caaauguaguggauaagug

SEQ ID NO: 69889 - RNA, 19 nt, Homo sapiens
  misc_RNA (1)...(19): siRNA sense strand
ugacagcuuucacuacuug

SEQ ID NO: 69890 - RNA, 19 nt, Homo sapiens
  misc_RNA (1)...(19): siRNA sense strand
gugaagaguuugccugugu

SEQ ID NO: 69891 - RNA, 19 nt, Homo sapiens
  misc_RNA (1)...(19): siRNA sense strand
gaaggaugguuugaaauac

SEQ ID NO: 69892 - RNA, 19 nt, Homo sapiens
  misc_RNA (1)...(19): siRNA sense strand
agaguuauguggaguaaau

SEQ ID NO: 69893 - RNA, 19 nt, Homo sapiens
  misc_RNA (1)...(19): siRNA sense strand
gaaaugccaggcuuaugaa

SEQ ID NO: 69894 - RNA, 19 nt, Homo sapiens
  misc_RNA (1)...(19): siRNA sense strand
ccaccuuucucucaagauu

SEQ ID NO: 69895 - RNA, 19 nt, Homo sapiens
  misc_RNA (1)...(19): siRNA sense strand
gaaggaacccauuugucuu

SEQ ID NO: 69896 - RNA, 19 nt, Homo sapiens
  misc_RNA (1)...(19): siRNA sense strand
agaaggcccugcuuugaga

SEQ ID NO: 69897 - RNA, 19 nt, Homo sapiens
  misc_RNA (1)...(19): siRNA sense strand
gaaggaaaauuuacugaca

SEQ ID NO: 69898 - RNA, 19 nt, Homo sapiens
  misc_RNA (1)...(19): siRNA sense strand
agaaaugccaggcuuauga

SEQ ID NO: 69899 - RNA, 19 nt, Homo sapiens
  misc_RNA (1)...(19): siRNA sense strand
gaggaagacagacagguuu

SEQ ID NO: 69900 - RNA, 19 nt, Homo sapiens
  misc_RNA (1)...(19): siRNA sense strand
uggaaaagcuggugaaaga

SEQ ID NO: 69901 - RNA, 19 nt, Homo sapiens
  misc_RNA (1)...(19): siRNA sense strand
caagaugguacaacaagaa

SEQ ID NO: 69902 - RNA, 19 nt, Homo sapiens
  misc_RNA (1)...(19): siRNA sense strand
cacacaaccucgggauaua

SEQ ID NO: 69903 - RNA, 19 nt, Homo sapiens
  misc_RNA (1)...(19): siRNA sense strand
gcucaaagaagacucuguu

SEQ ID NO: 69904 - RNA, 19 nt, Homo sapiens
  misc_RNA (1)...(19): siRNA sense strand
ggauauagagaacuucaau

SEQ ID NO: 69905 - RNA, 19 nt, Homo sapiens
  misc_RNA (1)...(19): siRNA sense strand
ggagcuuauuucucuugua

SEQ ID NO: 69906 - RNA, 19 nt, Homo sapiens
  misc_RNA (1)...(19): siRNA sense strand
ggagguggccaaaucaugu

SEQ ID NO: 69907 - RNA, 19 nt, Homo sapiens
  misc_RNA (1)...(19): siRNA sense strand
uaacuguugcuguucauuu

SEQ ID NO: 69908 - RNA, 19 nt, Homo sapiens
  misc_RNA (1)...(19): siRNA sense strand
caaagaugauagaccaaag

SEQ ID NO: 69909 - RNA, 19 nt, Homo sapiens
  misc_RNA (1)...(19): siRNA sense strand
agcaugaacucacagauga

SEQ ID NO: 69910 - RNA, 19 nt, Homo sapiens
  misc_RNA (1)...(19): siRNA sense strand
cagguuucuugucaacuua

SEQ ID NO: 69911 - RNA, 19 nt, Homo sapiens
  misc_RNA (1)...(19): siRNA sense strand
caaaggauuuaucucuaag

SEQ ID NO: 69912 - RNA, 19 nt, Homo sapiens
  misc_RNA (1)...(19): siRNA sense strand
gaaaaugugugucaagaac

SEQ ID NO: 69913 - RNA, 19 nt, Homo sapiens
  misc_RNA (1)...(19): siRNA sense strand
ucaaugagacaacugagaa

SEQ ID NO: 69914 - RNA, 19 nt, Homo sapiens
  misc_RNA (1)...(19): siRNA sense strand
gaaagacaugguagaauac

SEQ ID NO: 69915 - RNA, 19 nt, Homo sapiens
  misc_RNA (1)...(19): siRNA sense strand
gcugaagcaugaacucaca

SEQ ID NO: 69916 - RNA, 19 nt, Homo sapiens
  misc_RNA (1)...(19): siRNA sense strand
augaggagcuucagaggaa

SEQ ID NO: 69917 - RNA, 19 nt, Homo sapiens
  misc_RNA (1)...(19): siRNA sense strand
uauaugaaguugccagaag

SEQ ID NO: 69918 - RNA, 19 nt, Homo sapiens
  misc_RNA (1)...(19): siRNA sense strand
gaccaaaggauuuaucucu

SEQ ID NO: 69919 - RNA, 19 nt, Homo sapiens
  misc_RNA (1)...(19): siRNA sense strand
guccugaagucugcuuuaa

SEQ ID NO: 69920 - RNA, 19 nt, Homo sapiens
  misc_RNA (1)...(19): siRNA sense strand
guugauaauuuggcagauu

SEQ ID NO: 69921 - RNA, 19 nt, Homo sapiens
  misc_RNA (1)...(19): siRNA sense strand
cugaagaacuggugucucu

SEQ ID NO: 69922 - RNA, 19 nt, Homo sapiens
  misc_RNA (1)...(19): siRNA sense strand
gaugguacaacaagaaugu

SEQ ID NO: 69923 - RNA, 19 nt, Homo sapiens
  misc_RNA (1)...(19): siRNA sense strand
gacucuguuucuucuauaa

SEQ ID NO: 69924 - RNA, 19 nt, Homo sapiens
  misc_RNA (1)...(19): siRNA sense strand
ucaagaugguacaacaaga

SEQ ID NO: 69925 - RNA, 19 nt, Homo sapiens
  misc_RNA (1)...(19): siRNA sense strand
ucaacugccuucaaacaag

SEQ ID NO: 69926 - RNA, 19 nt, Homo sapiens
  misc_RNA (1)...(19): siRNA sense strand
ccacacaaccucgggauau

SEQ ID NO: 69927 - RNA, 19 nt, Homo sapiens
  misc_RNA (1)...(19): siRNA sense strand
guggauaagugcugcaaag

SEQ ID NO: 69928 - RNA, 19 nt, Homo sapiens
  misc_RNA (1)...(19): siRNA sense strand
cauaugugccuccaccuuu

SEQ ID NO: 69929 - RNA, 19 nt, Homo sapiens
  misc_RNA (1)...(19): siRNA sense strand
gcuguacgcuaagugaaga

SEQ ID NO: 69930 - RNA, 19 nt, Homo sapiens
  misc_RNA (1)...(19): siRNA sense strand
uaccagagcuuuuaagaau

SEQ ID NO: 69931 - RNA, 19 nt, Homo sapiens
  misc_RNA (1)...(19): siRNA sense strand
gguagaauacaaagacaga

SEQ ID NO: 69932 - RNA, 19 nt, Homo sapiens
  misc_RNA (1)...(19): siRNA sense strand
uaugauggaugcugugaag

SEQ ID NO: 69933 - RNA, 19 nt, Homo sapiens
  misc_RNA (1)...(19): siRNA sense strand
caaagucaacugccuucaa

SEQ ID NO: 69934 - RNA, 19 nt, Homo sapiens
  misc_RNA (1)...(19): siRNA sense strand
ggccaaaucauguugugaa

SEQ ID NO: 69935 - RNA, 19 nt, Homo sapiens
  misc_RNA (1)...(19): siRNA sense strand
acagauguauggcugacaa

SEQ ID NO: 69936 - RNA, 19 nt, Homo sapiens
  misc_RNA (1)...(19): siRNA sense strand
gcaaauguaguggauaagu

SEQ ID NO: 69937 - RNA, 19 nt, Homo sapiens
  misc_RNA (1)...(19): siRNA sense strand
accuuucucucaagauuua

SEQ ID NO: 69938 - RNA, 19 nt, Homo sapiens
  misc_RNA (1)...(19): siRNA sense strand
ucagaaggcccugcuuuga

SEQ ID NO: 69939 - RNA, 19 nt, Homo sapiens
  misc_RNA (1)...(19): siRNA sense strand
uacgcuaagugaagaguuu

SEQ ID NO: 69940 - RNA, 19 nt, Homo sapiens
  misc_RNA (1)...(19): siRNA sense strand
caaauucaaugagacaacu

SEQ ID NO: 69941 - RNA, 19 nt, Homo sapiens
  misc_RNA (1)...(19): siRNA sense strand
ugauagaccaaaggauuua

SEQ ID NO: 69942 - RNA, 19 nt, Homo sapiens
  misc_RNA (1)...(19): siRNA sense strand
agacucuguuucuucuaua

SEQ ID NO: 69943 - RNA, 19 nt, Homo sapiens
  misc_RNA (1)...(19): siRNA sense strand
agacaugguagaauacaaa

SEQ ID NO: 69944 - RNA, 19 nt, Homo sapiens
  misc_RNA (1)...(19): siRNA sense strand
ugaagucugcuuuaaugaa

SEQ ID NO: 69945 - RNA, 19 nt, Homo sapiens
  misc_RNA (1)...(19): siRNA sense strand
uagagaacuucaauaguac

SEQ ID NO: 69946 - RNA, 19 nt, Homo sapiens
  misc_RNA (1)...(19): siRNA sense strand
ggugaaagacaugguagaa

SEQ ID NO: 69947 - RNA, 19 nt, Homo sapiens
  misc_RNA (1)...(19): siRNA sense strand
acagguuucuugucaacuu

SEQ ID NO: 69948 - RNA, 19 nt, Homo sapiens
  misc_RNA (1)...(19): siRNA sense strand
ucauugcauuugcucagua

SEQ ID NO: 69949 - RNA, 19 nt, Homo sapiens
  misc_RNA (1)...(19): siRNA sense strand
ggggaaggaugguuugaaa

SEQ ID NO: 69950 - RNA, 19 nt, Homo sapiens
  misc_RNA (1)...(19): siRNA sense strand
uaacaagaaaucugaugug

SEQ ID NO: 69951 - RNA, 19 nt, Homo sapiens
  misc_RNA (1)...(19): siRNA sense strand
ucaaagaagacucuguuuc

SEQ ID NO: 69952 - RNA, 19 nt, Homo sapiens
  misc_RNA (1)...(19): siRNA sense strand
uugccuguguugauaauuu

SEQ ID NO: 69953 - RNA, 19 nt, Homo sapiens
  misc_RNA (1)...(19): siRNA sense strand
gaagaguuugccuguguug

SEQ ID NO: 69954 - RNA, 19 nt, Homo sapiens
  misc_RNA (1)...(19): siRNA sense strand
cggaagacaaauucaauga

SEQ ID NO: 69955 - RNA, 19 nt, Homo sapiens
  misc_RNA (1)...(19): siRNA sense strand
accaaaggauuuaucucua

SEQ ID NO: 69956 - RNA, 19 nt, Homo sapiens
  misc_RNA (1)...(19): siRNA sense strand
ugggauuucugccuccuuu

SEQ ID NO: 69957 - RNA, 19 nt, Homo sapiens
  misc_RNA (1)...(19): siRNA sense strand
ucaucaggcucacgaagau

SEQ ID NO: 69958 - RNA, 19 nt, Homo sapiens
  misc_RNA (1)...(19): siRNA sense strand
gauucuaucuccagcaaaa

SEQ ID NO: 69959 - RNA, 19 nt, Homo sapiens
  misc_RNA (1)...(19): siRNA sense strand
aagcaaccuuugaagaaau

SEQ ID NO: 69960 - RNA, 19 nt, Homo sapiens
  misc_RNA (1)...(19): siRNA sense strand
ccagagcuuuuaagaauug

SEQ ID NO: 69961 - RNA, 19 nt, Homo sapiens
  misc_RNA (1)...(19): siRNA sense strand
ucaggaagcaaccuuugaa

SEQ ID NO: 69962 - RNA, 19 nt, Homo sapiens
  misc_RNA (1)...(19): siRNA sense strand
ugaagaguuugccuguguu

SEQ ID NO: 69963 - RNA, 19 nt, Homo sapiens
  misc_RNA (1)...(19): siRNA sense strand
ccagaacacugcauagaaa

SEQ ID NO: 69964 - RNA, 19 nt, Homo sapiens
  misc_RNA (1)...(19): siRNA sense strand
gaacguggucaauguauaa

SEQ ID NO: 69965 - RNA, 19 nt, Homo sapiens
  misc_RNA (1)...(19): siRNA sense strand
ccaauguacugcagagaua

SEQ ID NO: 69966 - RNA, 19 nt, Homo sapiens
  misc_RNA (1)...(19): siRNA sense strand
gaggagaugugcuggauug

SEQ ID NO: 69967 - RNA, 19 nt, Homo sapiens
  misc_RNA (1)...(19): siRNA sense strand
gaagaacuuugccaugaga

SEQ ID NO: 69968 - RNA, 19 nt, Homo sapiens
  misc_RNA (1)...(19): siRNA sense strand
aagcaagaguuucucauua

SEQ ID NO: 69969 - RNA, 19 nt, Homo sapiens
  misc_RNA (1)...(19): siRNA sense strand
gaaggucuaucuccaaauc

SEQ ID NO: 69970 - RNA, 19 nt, Homo sapiens
  misc_RNA (1)...(19): siRNA sense strand
ugaccuggcuaccauauuu

SEQ ID NO: 69971 - RNA, 19 nt, Homo sapiens
  misc_RNA (1)...(19): siRNA sense strand
ggaacguggucaauguaua

SEQ ID NO: 69972 - RNA, 19 nt, Homo sapiens
  misc_RNA (1)...(19): siRNA sense strand
gaaacccacuggagaugaa

SEQ ID NO: 69973 - RNA, 19 nt, Homo sapiens
  misc_RNA (1)...(19): siRNA sense strand
gcaguugaaugcuuccaaa

SEQ ID NO: 69974 - RNA, 19 nt, Homo sapiens
  misc_RNA (1)...(19): siRNA sense strand
gggagcggcugacauuauu

SEQ ID NO: 69975 - RNA, 19 nt, Homo sapiens
  misc_RNA (1)...(19): siRNA sense strand
gaagcaagaguuucucauu

SEQ ID NO: 69976 - RNA, 19 nt, Homo sapiens
  misc_RNA (1)...(19): siRNA sense strand
uaaaggauaccaggaguua

SEQ ID NO: 69977 - RNA, 19 nt, Homo sapiens
  misc_RNA (1)...(19): siRNA sense strand
gaacacugcauagaaauga

SEQ ID NO: 69978 - RNA, 19 nt, Homo sapiens
  misc_RNA (1)...(19): siRNA sense strand
ugaaaugacuccaguaaac

SEQ ID NO: 69979 - RNA, 19 nt, Homo sapiens
  misc_RNA (1)...(19): siRNA sense strand
gcaccuacaauucuucuuu

SEQ ID NO: 69980 - RNA, 19 nt, Homo sapiens
  misc_RNA (1)...(19): siRNA sense strand
acagaaugcugcaaacuga

SEQ ID NO: 69981 - RNA, 19 nt, Homo sapiens
  misc_RNA (1)...(19): siRNA sense strand
ggugguggaugaaacauau

SEQ ID NO: 69982 - RNA, 19 nt, Homo sapiens
  misc_RNA (1)...(19): siRNA sense strand
gaacaggaagucugcuuug

SEQ ID NO: 69983 - RNA, 19 nt, Homo sapiens
  misc_RNA (1)...(19): siRNA sense strand
agacauaacuguuuucuug

SEQ ID NO: 69984 - RNA, 19 nt, Homo sapiens
  misc_RNA (1)...(19): siRNA sense strand
gaaacuaggagaauauuac

SEQ ID NO: 69985 - RNA, 19 nt, Homo sapiens
  misc_RNA (1)...(19): siRNA sense strand
uggaagaacuuugccauga

SEQ ID NO: 69986 - RNA, 19 nt, Homo sapiens
  misc_RNA (1)...(19): siRNA sense strand
gagaugugcuggauugucu

SEQ ID NO: 69987 - RNA, 19 nt, Homo sapiens
  misc_RNA (1)...(19): siRNA sense strand
ggugaaagaugcauugacu

SEQ ID NO: 69988 - RNA, 19 nt, Homo sapiens
  misc_RNA (1)...(19): siRNA sense strand
ucuaagaguugcuaaagga

SEQ ID NO: 69989 - RNA, 19 nt, Homo sapiens
  misc_RNA (1)...(19): siRNA sense strand
guugaaugcuuccaaacaa

SEQ ID NO: 69990 - RNA, 19 nt, Homo sapiens
  misc_RNA (1)...(19): siRNA sense strand
ggaagaacuuugccaugag

SEQ ID NO: 69991 - RNA, 19 nt, Homo sapiens
  misc_RNA (1)...(19): siRNA sense strand
agcaagaguuucucauuaa

SEQ ID NO: 69992 - RNA, 19 nt, Homo sapiens
  misc_RNA (1)...(19): siRNA sense strand
gcuggaacguggucaaugu

SEQ ID NO: 69993 - RNA, 19 nt, Homo sapiens
  misc_RNA (1)...(19): siRNA sense strand
gaaguggguggaaucaauu

SEQ ID NO: 69994 - RNA, 19 nt, Homo sapiens
  misc_RNA (1)...(19): siRNA sense strand
uaacagaggaacaacuuga

SEQ ID NO: 69995 - RNA, 19 nt, Homo sapiens
  misc_RNA (1)...(19): siRNA sense strand
ggagaaguguuuccagacu

SEQ ID NO: 69996 - RNA, 19 nt, Homo sapiens
  misc_RNA (1)...(19): siRNA sense strand
gcagcuuggugguggauga

SEQ ID NO: 69997 - RNA, 19 nt, Homo sapiens
  misc_RNA (1)...(19): siRNA sense strand
acaaaggcagcaacaguua

SEQ ID NO: 69998 - RNA, 19 nt, Homo sapiens
  misc_RNA (1)...(19): siRNA sense strand
guacugcagagauaaguuu

SEQ ID NO: 69999 - RNA, 19 nt, Homo sapiens
  misc_RNA (1)...(19): siRNA sense strand
gagaagaagaauuacagaa

SEQ ID NO: 70000 - RNA, 19 nt, Homo sapiens
  misc_RNA (1)...(19): siRNA sense strand
ggagaaguacggacauuca

SEQ ID NO: 70001 - RNA, 19 nt, Homo sapiens
  misc_RNA (1)...(19): siRNA sense strand
ucauuaaccuugugaagca

SEQ ID NO: 70002 - RNA, 19 nt, Homo sapiens
  misc_RNA (1)...(19): siRNA sense strand
gcaagaguuucucauuaac

SEQ ID NO: 70003 - RNA, 19 nt, Homo sapiens
  misc_RNA (1)...(19): siRNA sense strand
gaagagggaagacauaacu

SEQ ID NO: 70004 - RNA, 19 nt, Homo sapiens
  misc_RNA (1)...(19): siRNA sense strand
gaagacagggagacauuca

SEQ ID NO: 70005 - RNA, 19 nt, Homo sapiens
  misc_RNA (1)...(19): siRNA sense strand
ggaacaggaagucugcuuu

SEQ ID NO: 70006 - RNA, 19 nt, Homo sapiens
  misc_RNA (1)...(19): siRNA sense strand
agaagccacuuacaaggaa

SEQ ID NO: 70007 - RNA, 19 nt, Homo sapiens
  misc_RNA (1)...(19): siRNA sense strand
caugaaaugacuccaguaa

SEQ ID NO: 70008 - RNA, 19 nt, Homo sapiens
  misc_RNA (1)...(19): siRNA sense strand
cgagggagcggcugacauu

SEQ ID NO: 70009 - RNA, 19 nt, Homo sapiens
  misc_RNA (1)...(19): siRNA sense strand
gggagacauucaugaacaa

SEQ ID NO: 70010 - RNA, 19 nt, Homo sapiens
  misc_RNA (1)...(19): siRNA sense strand
uaucagacaugaaaugacu

SEQ ID NO: 70011 - RNA, 19 nt, Homo sapiens
  misc_RNA (1)...(19): siRNA sense strand
aagaagacauccucagcuu

SEQ ID NO: 70012 - RNA, 19 nt, Homo sapiens
  misc_RNA (1)...(19): siRNA sense strand
gaauccagaacacugcaua

SEQ ID NO: 70013 - RNA, 19 nt, Homo sapiens
  misc_RNA (1)...(19): siRNA sense strand
ggaagucugcuuugcugaa

SEQ ID NO: 70014 - RNA, 19 nt, Homo sapiens
  misc_RNA (1)...(19): siRNA sense strand
gugccaagcucagggugua

SEQ ID NO: 70015 - RNA, 19 nt, Homo sapiens
  misc_RNA (1)...(19): siRNA sense strand
ccacagcagccacuuguug

SEQ ID NO: 70016 - RNA, 19 nt, Homo sapiens
  misc_RNA (1)...(19): siRNA sense strand
uaagaguugcuaaaggaua

SEQ ID NO: 70017 - RNA, 19 nt, Homo sapiens
  misc_RNA (1)...(19): siRNA sense strand
ucagaaguuuaccaaaguu

SEQ ID NO: 70018 - RNA, 19 nt, Homo sapiens
  misc_RNA (1)...(19): siRNA sense strand
gaagucugcuuugcugaag

SEQ ID NO: 70019 - RNA, 19 nt, Homo sapiens
  misc_RNA (1)...(19): siRNA sense strand
agaaguguuuccagacuga

SEQ ID NO: 70020 - RNA, 19 nt, Homo sapiens
  misc_RNA (1)...(19): siRNA sense strand
gucagaaguuuaccaaagu

SEQ ID NO: 70021 - RNA, 19 nt, Homo sapiens
  misc_RNA (1)...(19): siRNA sense strand
ccagaaacuaggagaauau

SEQ ID NO: 70022 - RNA, 19 nt, Homo sapiens
  misc_RNA (1)...(19): siRNA sense strand
uuacugaaauccagaaacu

SEQ ID NO: 70023 - RNA, 19 nt, Homo sapiens
  misc_RNA (1)...(19): siRNA sense strand
gggaagacauaacuguuuu

SEQ ID NO: 70024 - RNA, 19 nt, Homo sapiens
  misc_RNA (1)...(19): siRNA sense strand
gaagcaaaagccacaaaua

SEQ ID NO: 70025 - RNA, 19 nt, Homo sapiens
  misc_RNA (1)...(19): siRNA sense strand
ucaagaagccacuuacaag

SEQ ID NO: 70026 - RNA, 19 nt, Homo sapiens
  misc_RNA (1)...(19): siRNA sense strand
caccuacaauucuucuuug

SEQ ID NO: 70027 - RNA, 19 nt, Homo sapiens
  misc_RNA (1)...(19): siRNA sense strand
ugcaaacgaugaagcaaga

SEQ ID NO: 70028 - RNA, 19 nt, Homo sapiens
  misc_RNA (1)...(19): siRNA sense strand
cuccaaaucuaaacagguu

SEQ ID NO: 70029 - RNA, 19 nt, Homo sapiens
  misc_RNA (1)...(19): siRNA sense strand
cguggucaauguauaauuc

SEQ ID NO: 70030 - RNA, 19 nt, Homo sapiens
  misc_RNA (1)...(19): siRNA sense strand
aaacaaaggcagcaacagu

SEQ ID NO: 70031 - RNA, 19 nt, Homo sapiens
  misc_RNA (1)...(19): siRNA sense strand
guaugcaccuacaauucuu

SEQ ID NO: 70032 - RNA, 19 nt, Homo sapiens
  misc_RNA (1)...(19): siRNA sense strand
uccagaaacuaggagaaua

SEQ ID NO: 70033 - RNA, 19 nt, Homo sapiens
  misc_RNA (1)...(19): siRNA sense strand
ggagaagaagaauuacaga

SEQ ID NO: 70034 - RNA, 19 nt, Homo sapiens
  misc_RNA (1)...(19): siRNA sense strand
cugaaggucuaucuccaaa

SEQ ID NO: 70035 - RNA, 19 nt, Homo sapiens
  misc_RNA (1)...(19): siRNA sense strand
agauaaaggagaagaagaa

SEQ ID NO: 70036 - RNA, 19 nt, Homo sapiens
  misc_RNA (1)...(19): siRNA sense strand
ccagcuaccugccuuucug

SEQ ID NO: 70037 - RNA, 19 nt, Homo sapiens
  misc_RNA (1)...(19): siRNA sense strand
acaaauaacagaggaacaa

SEQ ID NO: 70038 - RNA, 19 nt, Homo sapiens
  misc_RNA (1)...(19): siRNA sense strand
guguagcgcugcaaacgau

SEQ ID NO: 70039 - RNA, 19 nt, Homo sapiens
  misc_RNA (1)...(19): siRNA sense strand
ucaguaauucuaagaguug

SEQ ID NO: 70040 - RNA, 19 nt, Homo sapiens
  misc_RNA (1)...(19): siRNA sense strand
gaaacuaguccuggaugug

SEQ ID NO: 70041 - RNA, 19 nt, Homo sapiens
  misc_RNA (1)...(19): siRNA sense strand
agucagaaguuuaccaaag

SEQ ID NO: 70042 - RNA, 19 nt, Homo sapiens
  misc_RNA (1)...(19): siRNA sense strand
cagcaucgaucccacuuuu

SEQ ID NO: 70043 - RNA, 19 nt, Homo sapiens
  misc_RNA (1)...(19): siRNA sense strand
gagggaagacauaacuguu

SEQ ID NO: 70044 - RNA, 19 nt, Homo sapiens
  misc_RNA (1)...(19): siRNA sense strand
ugaagcauaugaagaagac

SEQ ID NO: 70045 - RNA, 19 nt, Homo sapiens
  misc_RNA (1)...(19): siRNA sense strand
gagcggcugacauuauuau

SEQ ID NO: 70046 - RNA, 19 nt, Homo sapiens
  misc_RNA (1)...(19): siRNA sense strand
gcugcggccucuuccagaa

SEQ ID NO: 70047 - RNA, 19 nt, Homo sapiens
  misc_RNA (1)...(19): siRNA sense strand
cagaggagaugugcuggau

SEQ ID NO: 70048 - RNA, 19 nt, Homo sapiens
  misc_RNA (1)...(19): siRNA sense strand
cagaaguuuaccaaaguua

SEQ ID NO: 70049 - RNA, 19 nt, Homo sapiens
  misc_RNA (1)...(19): siRNA sense strand
cagcaacaguuacaaaaga

SEQ ID NO: 70050 - RNA, 19 nt, Homo sapiens
  misc_RNA (1)...(19): siRNA sense strand
ggagcggcugacauuauua

SEQ ID NO: 70051 - RNA, 19 nt, Homo sapiens
  misc_RNA (1)...(19): siRNA sense strand
ucagugaggacaaacuauu

SEQ ID NO: 70052 - RNA, 19 nt, Homo sapiens
  misc_RNA (1)...(19): siRNA sense strand
aaggauaccaggaguuauu

SEQ ID NO: 70053 - RNA, 19 nt, Homo sapiens
  misc_RNA (1)...(19): siRNA sense strand
gcaaaagccacaaauaaca

SEQ ID NO: 70054 - RNA, 19 nt, Homo sapiens
  misc_RNA (1)...(19): siRNA sense strand
gugcugcuuugggaguuua

SEQ ID NO: 70055 - RNA, 19 nt, Homo sapiens
  misc_RNA (1)...(19): siRNA sense strand
gaaagaaauuuuggagaag

SEQ ID NO: 70056 - RNA, 19 nt, Homo sapiens
  misc_RNA (1)...(19): siRNA sense strand
gagaaacccacuggagaug

SEQ ID NO: 70057 - RNA, 19 nt, Homo sapiens
  misc_RNA (1)...(19): siRNA sense strand
uugaaugcuuccaaacaaa

SEQ ID NO: 70058 - RNA, 19 nt, Homo sapiens
  misc_RNA (1)...(19): siRNA sense strand
uaagcaaaauggugaaaga

SEQ ID NO: 70059 - RNA, 19 nt, Homo sapiens
  misc_RNA (1)...(19): siRNA sense strand
gugaagagggaagacauaa

SEQ ID NO: 70060 - RNA, 19 nt, Homo sapiens
  misc_RNA (1)...(19): siRNA sense strand
aggcaucccuuccuguaug

SEQ ID NO: 70061 - RNA, 19 nt, Homo sapiens
  misc_RNA (1)...(19): siRNA sense strand
augcguuucucguugcuua

SEQ ID NO: 70062 - RNA, 19 nt, Homo sapiens
  misc_RNA (1)...(19): siRNA sense strand
ggucuaucuccaaaucuaa

SEQ ID NO: 70063 - RNA, 19 nt, Homo sapiens
  misc_RNA (1)...(19): siRNA sense strand
ggaaauaccuggacucuuu

SEQ ID NO: 70064 - RNA, 19 nt, Homo sapiens
  misc_RNA (1)...(19): siRNA sense strand
cuacacaggugaagacuuu

SEQ ID NO: 70065 - RNA, 19 nt, Homo sapiens
  misc_RNA (1)...(19): siRNA sense strand
caaccagccugacaacuuu

SEQ ID NO: 70066 - RNA, 19 nt, Homo sapiens
  misc_RNA (1)...(19): siRNA sense strand
gcagaacagugccaucauu

SEQ ID NO: 70067 - RNA, 19 nt, Homo sapiens
  misc_RNA (1)...(19): siRNA sense strand
gaacuuugguggaaucugu

SEQ ID NO: 70068 - RNA, 19 nt, Homo sapiens
  misc_RNA (1)...(19): siRNA sense strand
uaaagaagaagaaggcuua

SEQ ID NO: 70069 - RNA, 19 nt, Homo sapiens
  misc_RNA (1)...(19): siRNA sense strand
ggucuucccucuggauuua

SEQ ID NO: 70070 - RNA, 19 nt, Homo sapiens
  misc_RNA (1)...(19): siRNA sense strand
gaauagaggaugucaguga

SEQ ID NO: 70071 - RNA, 19 nt, Homo sapiens
  misc_RNA (1)...(19): siRNA sense strand
ggaaacaucuggagugacu

SEQ ID NO: 70072 - RNA, 19 nt, Homo sapiens
  misc_RNA (1)...(19): siRNA sense strand
caacagagaccuacgaugu

SEQ ID NO: 70073 - RNA, 19 nt, Homo sapiens
  misc_RNA (1)...(19): siRNA sense strand
gcuacucgcugaccuuuga

SEQ ID NO: 70074 - RNA, 19 nt, Homo sapiens
  misc_RNA (1)...(19): siRNA sense strand
gcacuggaguucugugaau

SEQ ID NO: 70075 - RNA, 19 nt, Homo sapiens
  misc_RNA (1)...(19): siRNA sense strand
gaggagcccuucacguuug

SEQ ID NO: 70076 - RNA, 19 nt, Homo sapiens
  misc_RNA (1)...(19): siRNA sense strand
gaggagggcuggaacaagu

SEQ ID NO: 70077 - RNA, 19 nt, Homo sapiens
  misc_RNA (1)...(19): siRNA sense strand
ucgcugagguugagaauga

SEQ ID NO: 70078 - RNA, 19 nt, Homo sapiens
  misc_RNA (1)...(19): siRNA sense strand
gaagagccguauacaccuu

SEQ ID NO: 70079 - RNA, 19 nt, Homo sapiens
  misc_RNA (1)...(19): siRNA sense strand
agacagaacuuugguggaa

SEQ ID NO: 70080 - RNA, 19 nt, Homo sapiens
  misc_RNA (1)...(19): siRNA sense strand
ggagacuacugccauccua

SEQ ID NO: 70081 - RNA, 19 nt, Homo sapiens
  misc_RNA (1)...(19): siRNA sense strand
ccacacgccuugagcaguu

SEQ ID NO: 70082 - RNA, 19 nt, Homo sapiens
  misc_RNA (1)...(19): siRNA sense strand
gagaagagacucacacagu

SEQ ID NO: 70083 - RNA, 19 nt, Homo sapiens
  misc_RNA (1)...(19): siRNA sense strand
gcagagacgcaucuagaaa

SEQ ID NO: 70084 - RNA, 19 nt, Homo sapiens
  misc_RNA (1)...(19): siRNA sense strand
ggagaggccucaggacuuc

SEQ ID NO: 70085 - RNA, 19 nt, Homo sapiens
  misc_RNA (1)...(19): siRNA sense strand
gcuacacccucgacuuuga

SEQ ID NO: 70086 - RNA, 19 nt, Homo sapiens
  misc_RNA (1)...(19): siRNA sense strand
gauggagggugaggucuuu

SEQ ID NO: 70087 - RNA, 19 nt, Homo sapiens
  misc_RNA (1)...(19): siRNA sense strand
gaccucugcuucuggagua

SEQ ID NO: 70088 - RNA, 19 nt, Homo sapiens
  misc_RNA (1)...(19): siRNA sense strand
agacgcaucuagaaauuga

SEQ ID NO: 70089 - RNA, 19 nt, Homo sapiens
  misc_RNA (1)...(19): siRNA sense strand
ccuaguggauucuacauug

SEQ ID NO: 70090 - RNA, 19 nt, Homo sapiens
  misc_RNA (1)...(19): siRNA sense strand
cggcagcacuuugacauuu

SEQ ID NO: 70091 - RNA, 19 nt, Homo sapiens
  misc_RNA (1)...(19): siRNA sense strand
ugagaacggucuaccucua

SEQ ID NO: 70092 - RNA, 19 nt, Homo sapiens
  misc_RNA (1)...(19): siRNA sense strand
caacaacaaugcccaagac

SEQ ID NO: 70093 - RNA, 19 nt, Homo sapiens
  misc_RNA (1)...(19): siRNA sense strand
ggacaagccaggcgugaga

SEQ ID NO: 70094 - RNA, 19 nt, Homo sapiens
  misc_RNA (1)...(19): siRNA sense strand
ggagaagcaucuggaguuc

SEQ ID NO: 70095 - RNA, 19 nt, Homo sapiens
  misc_RNA (1)...(19): siRNA sense strand
cgaggcagcgugauccuua

SEQ ID NO: 70096 - RNA, 19 nt, Homo sapiens
  misc_RNA (1)...(19): siRNA sense strand
ggaauucaguggccuacca

SEQ ID NO: 70097 - RNA, 19 nt, Homo sapiens
  misc_RNA (1)...(19): siRNA sense strand
gcagaucugucaggcaaau

SEQ ID NO: 70098 - RNA, 19 nt, Homo sapiens
  misc_RNA (1)...(19): siRNA sense strand
uggcauaacugaucugagu

SEQ ID NO: 70099 - RNA, 19 nt, Homo sapiens
  misc_RNA (1)...(19): siRNA sense strand
ggacagccaucaggguuuc

SEQ ID NO: 70100 - RNA, 19 nt, Homo sapiens
  misc_RNA (1)...(19): siRNA sense strand
agagacgcaucuagaaauu

SEQ ID NO: 70101 - RNA, 19 nt, Homo sapiens
  misc_RNA (1)...(19): siRNA sense strand
caacaaugcccaagacuac

SEQ ID NO: 70102 - RNA, 19 nt, Homo sapiens
  misc_RNA (1)...(19): siRNA sense strand
ggaauggaaacgugaauca

SEQ ID NO: 70103 - RNA, 19 nt, Homo sapiens
  misc_RNA (1)...(19): siRNA sense strand
gaucgugacccaagugguu

SEQ ID NO: 70104 - RNA, 19 nt, Homo sapiens
  misc_RNA (1)...(19): siRNA sense strand
caacgagaccuaugaugug

SEQ ID NO: 70105 - RNA, 19 nt, Homo sapiens
  misc_RNA (1)...(19): siRNA sense strand
gaaacgugaaucagaauca

SEQ ID NO: 70106 - RNA, 19 nt, Homo sapiens
  misc_RNA (1)...(19): siRNA sense strand
caucaguggugcaggagaa

SEQ ID NO: 70107 - RNA, 19 nt, Homo sapiens
  misc_RNA (1)...(19): siRNA sense strand
uuuaaucacuucugaguuc

SEQ ID NO: 70108 - RNA, 19 nt, Homo sapiens
  misc_RNA (1)...(19): siRNA sense strand
agucaacccuuuggcauaa

SEQ ID NO: 70109 - RNA, 19 nt, Homo sapiens
  misc_RNA (1)...(19): siRNA sense strand
gagcaggaguuugucaaca

SEQ ID NO: 70110 - RNA, 19 nt, Homo sapiens
  misc_RNA (1)...(19): siRNA sense strand
gaguagaaguaucaucagu

SEQ ID NO: 70111 - RNA, 19 nt, Homo sapiens
  misc_RNA (1)...(19): siRNA sense strand
caccagguacuccauauuu

SEQ ID NO: 70112 - RNA, 19 nt, Homo sapiens
  misc_RNA (1)...(19): siRNA sense strand
ccagggauccuuccuacuu

SEQ ID NO: 70113 - RNA, 19 nt, Homo sapiens
  misc_RNA (1)...(19): siRNA sense strand
gagaagggcgaguggaaug

SEQ ID NO: 70114 - RNA, 19 nt, Homo sapiens
  misc_RNA (1)...(19): siRNA sense strand
caucuggaguucuuuaugg

SEQ ID NO: 70115 - RNA, 19 nt, Homo sapiens
  misc_RNA (1)...(19): siRNA sense strand
gaaauaccuggacucuuug

SEQ ID NO: 70116 - RNA, 19 nt, Homo sapiens
  misc_RNA (1)...(19): siRNA sense strand
caaacugccuucuggaacu

SEQ ID NO: 70117 - RNA, 19 nt, Homo sapiens
  misc_RNA (1)...(19): siRNA sense strand
cuacugccauccuagaguu

SEQ ID NO: 70118 - RNA, 19 nt, Homo sapiens
  misc_RNA (1)...(19): siRNA sense strand
gcagcacuuugacauuuca

SEQ ID NO: 70119 - RNA, 19 nt, Homo sapiens
  misc_RNA (1)...(19): siRNA sense strand
ccuaugauguguacugcuu

SEQ ID NO: 70120 - RNA, 19 nt, Homo sapiens
  misc_RNA (1)...(19): siRNA sense strand
gaacucaguggugcucauu

SEQ ID NO: 70121 - RNA, 19 nt, Homo sapiens
  misc_RNA (1)...(19): siRNA sense strand
gggaccagaccgucagaua

SEQ ID NO: 70122 - RNA, 19 nt, Homo sapiens
  misc_RNA (1)...(19): siRNA sense strand
ccaacgagaccuaugaugu

SEQ ID NO: 70123 - RNA, 19 nt, Homo sapiens
  misc_RNA (1)...(19): siRNA sense strand
ccaaccagccugacaacuu

SEQ ID NO: 70124 - RNA, 19 nt, Homo sapiens
  misc_RNA (1)...(19): siRNA sense strand
ggagacaggacugaaauca

SEQ ID NO: 70125 - RNA, 19 nt, Homo sapiens
  misc_RNA (1)...(19): siRNA sense strand
uaucaucagucccagaauc

SEQ ID NO: 70126 - RNA, 19 nt, Homo sapiens
  misc_RNA (1)...(19): siRNA sense strand
acagugaccuggccugaca

SEQ ID NO: 70127 - RNA, 19 nt, Homo sapiens
  misc_RNA (1)...(19): siRNA sense strand
gaaugauguucccugcaau

SEQ ID NO: 70128 - RNA, 19 nt, Homo sapiens
  misc_RNA (1)...(19): siRNA sense strand
aauagaggaugucagugaa

SEQ ID NO: 70129 - RNA, 19 nt, Homo sapiens
  misc_RNA (1)...(19): siRNA sense strand
ggaaccaucagccucagaa

SEQ ID NO: 70130 - RNA, 19 nt, Homo sapiens
  misc_RNA (1)...(19): siRNA sense strand
cgaggagcccuucacguuu

SEQ ID NO: 70131 - RNA, 19 nt, Homo sapiens
  misc_RNA (1)...(19): siRNA sense strand
uguagaaacuucagaccau

SEQ ID NO: 70132 - RNA, 19 nt, Homo sapiens
  misc_RNA (1)...(19): siRNA sense strand
guuacugaaccaacuauuu

SEQ ID NO: 70133 - RNA, 19 nt, Homo sapiens
  misc_RNA (1)...(19): siRNA sense strand
gagaucagcgggcuuccuu

SEQ ID NO: 70134 - RNA, 19 nt, Homo sapiens
  misc_RNA (1)...(19): siRNA sense strand
gagaucagcgggcuuccuu

SEQ ID NO: 70135 - RNA, 19 nt, Homo sapiens
  misc_RNA (1)...(19): siRNA sense strand
cagggauccuuccuacuug

SEQ ID NO: 70136 - RNA, 19 nt, Homo sapiens
  misc_RNA (1)...(19): siRNA sense strand
ggugaaaggcaucguguuc

SEQ ID NO: 70137 - RNA, 19 nt, Homo sapiens
  misc_RNA (1)...(19): siRNA sense strand
gaacgacaggaccaucgaa

SEQ ID NO: 70138 - RNA, 19 nt, Homo sapiens
  misc_RNA (1)...(19): siRNA sense strand
caauguaaguggagaaucc

SEQ ID NO: 70139 - RNA, 19 nt, Homo sapiens
  misc_RNA (1)...(19): siRNA sense strand
ccgaggagcccuucacguu

SEQ ID NO: 70140 - RNA, 19 nt, Homo sapiens
  misc_RNA (1)...(19): siRNA sense strand
cacugcagcugucacugua

SEQ ID NO: 70141 - RNA, 19 nt, Homo sapiens
  misc_RNA (1)...(19): siRNA sense strand
aaacgugaaucagaaucaa

SEQ ID NO: 70142 - RNA, 19 nt, Homo sapiens
  misc_RNA (1)...(19): siRNA sense strand
ugaaaccaccucugcauuc

SEQ ID NO: 70143 - RNA, 19 nt, Homo sapiens
  misc_RNA (1)...(19): siRNA sense strand
aaucugggaugguggaugu

SEQ ID NO: 70144 - RNA, 19 nt, Homo sapiens
  misc_RNA (1)...(19): siRNA sense strand
ggaagggagggucuagaga

SEQ ID NO: 70145 - RNA, 19 nt, Homo sapiens
  misc_RNA (1)...(19): siRNA sense strand
gagagguuguagagacuuc

SEQ ID NO: 70146 - RNA, 19 nt, Homo sapiens
  misc_RNA (1)...(19): siRNA sense strand
gaaugggaaccagccuaua

SEQ ID NO: 70147 - RNA, 19 nt, Homo sapiens
  misc_RNA (1)...(19): siRNA sense strand
uuacugaaccaacuauuuc

SEQ ID NO: 70148 - RNA, 19 nt, Homo sapiens
  misc_RNA (1)...(19): siRNA sense strand
ggagcauucuggauuucug

SEQ ID NO: 70149 - RNA, 19 nt, Homo sapiens
  misc_RNA (1)...(19): siRNA sense strand
cuucugggauuacauuugu

SEQ ID NO: 70150 - RNA, 19 nt, Homo sapiens
  misc_RNA (1)...(19): siRNA sense strand
gacauuagugggagagcua

SEQ ID NO: 70151 - RNA, 19 nt, Homo sapiens
  misc_RNA (1)...(19): siRNA sense strand
ugggcaagcuccagaaaca

SEQ ID NO: 70152 - RNA, 19 nt, Homo sapiens
  misc_RNA (1)...(19): siRNA sense strand
gauuucugccucuggauuu

SEQ ID NO: 70153 - RNA, 19 nt, Homo sapiens
  misc_RNA (1)...(19): siRNA sense strand
ggacuccaguggucuuacu

SEQ ID NO: 70154 - RNA, 19 nt, Homo sapiens
  misc_RNA (1)...(19): siRNA sense strand
gugaagacuuuguggacau

SEQ ID NO: 70155 - RNA, 19 nt, Homo sapiens
  misc_RNA (1)...(19): siRNA sense strand
gacuuccgcuggucagaug

SEQ ID NO: 70156 - RNA, 19 nt, Homo sapiens
  misc_RNA (1)...(19): siRNA sense strand
ccucaagccuccuguacuc

SEQ ID NO: 70157 - RNA, 19 nt, Homo sapiens
  misc_RNA (1)...(19): siRNA sense strand
cagagacgcaucuagaaau

SEQ ID NO: 70158 - RNA, 19 nt, Homo sapiens
  misc_RNA (1)...(19): siRNA sense strand
gaaaccaccucugcauucc

SEQ ID NO: 70159 - RNA, 19 nt, Homo sapiens
  misc_RNA (1)...(19): siRNA sense strand
gccagcaccaccaauguaa

SEQ ID NO: 70160 - RNA, 19 nt, Homo sapiens
  misc_RNA (1)...(19): siRNA sense strand
ccuacuacauuuaaagaag

SEQ ID NO: 70161 - RNA, 19 nt, Homo sapiens
  misc_RNA (1)...(19): siRNA sense strand
ggaguucuuuauggcacua

SEQ ID NO: 70162 - RNA, 19 nt, Homo sapiens
  misc_RNA (1)...(19): siRNA sense strand
ggaccagaccgucagauac

SEQ ID NO: 70163 - RNA, 19 nt, Homo sapiens
  misc_RNA (1)...(19): siRNA sense strand
ggaaauaccuggacucuuu

SEQ ID NO: 70164 - RNA, 19 nt, Homo sapiens
  misc_RNA (1)...(19): siRNA sense strand
cuacacaggugaagacuuu

SEQ ID NO: 70165 - RNA, 19 nt, Homo sapiens
  misc_RNA (1)...(19): siRNA sense strand
caaccagccugacaacuuu

SEQ ID NO: 70166 - RNA, 19 nt, Homo sapiens
  misc_RNA (1)...(19): siRNA sense strand
gcagaacagugccaucauu

SEQ ID NO: 70167 - RNA, 19 nt, Homo sapiens
  misc_RNA (1)...(19): siRNA sense strand
gaacuuugguggaaucugu

SEQ ID NO: 70168 - RNA, 19 nt, Homo sapiens
  misc_RNA (1)...(19): siRNA sense strand
uaaagaagaagaaggcuua

SEQ ID NO: 70169 - RNA, 19 nt, Homo sapiens
  misc_RNA (1)...(19): siRNA sense strand
ggucuucccucuggauuua

SEQ ID NO: 70170 - RNA, 19 nt, Homo sapiens
  misc_RNA (1)...(19): siRNA sense strand
gaauagaggaugucaguga

SEQ ID NO: 70171 - RNA, 19 nt, Homo sapiens
  misc_RNA (1)...(19): siRNA sense strand
ggaaacaucuggagugacu

SEQ ID NO: 70172 - RNA, 19 nt, Homo sapiens
  misc_RNA (1)...(19): siRNA sense strand
caacagagaccuacgaugu

SEQ ID NO: 70173 - RNA, 19 nt, Homo sapiens
  misc_RNA (1)...(19): siRNA sense strand
gcuacucgcugaccuuuga

SEQ ID NO: 70174 - RNA, 19 nt, Homo sapiens
  misc_RNA (1)...(19): siRNA sense strand
gcacuggaguucugugaau

SEQ ID NO: 70175 - RNA, 19 nt, Homo sapiens
  misc_RNA (1)...(19): siRNA sense strand
gaggagcccuucacguuug

SEQ ID NO: 70176 - RNA, 19 nt, Homo sapiens
  misc_RNA (1)...(19): siRNA sense strand
gaggagggcuggaacaagu

SEQ ID NO: 70177 - RNA, 19 nt, Homo sapiens
  misc_RNA (1)...(19): siRNA sense strand
ucgcugagguugagaauga

SEQ ID NO: 70178 - RNA, 19 nt, Homo sapiens
  misc_RNA (1)...(19): siRNA sense strand
gaagagccguauacaccuu

SEQ ID NO: 70179 - RNA, 19 nt, Homo sapiens
  misc_RNA (1)...(19): siRNA sense strand
agacagaacuuugguggaa

SEQ ID NO: 70180 - RNA, 19 nt, Homo sapiens
  misc_RNA (1)...(19): siRNA sense strand
ggagacuacugccauccua

SEQ ID NO: 70181 - RNA, 19 nt, Homo sapiens
  misc_RNA (1)...(19): siRNA sense strand
ccacacgccuugagcaguu

SEQ ID NO: 70182 - RNA, 19 nt, Homo sapiens
  misc_RNA (1)...(19): siRNA sense strand
gagaagagacucacacagu

SEQ ID NO: 70183 - RNA, 19 nt, Homo sapiens
  misc_RNA (1)...(19): siRNA sense strand
gcagagacgcaucuagaaa

SEQ ID NO: 70184 - RNA, 19 nt, Homo sapiens
  misc_RNA (1)...(19): siRNA sense strand
ggagaggccucaggacuuc

SEQ ID NO: 70185 - RNA, 19 nt, Homo sapiens
  misc_RNA (1)...(19): siRNA sense strand
gcuacacccucgacuuuga

SEQ ID NO: 70186 - RNA, 19 nt, Homo sapiens
  misc_RNA (1)...(19): siRNA sense strand
gauggagggugaggucuuu

SEQ ID NO: 70187 - RNA, 19 nt, Homo sapiens
  misc_RNA (1)...(19): siRNA sense strand
gaccucugcuucuggagua

SEQ ID NO: 70188 - RNA, 19 nt, Homo sapiens
  misc_RNA (1)...(19): siRNA sense strand
agacgcaucuagaaauuga

SEQ ID NO: 70189 - RNA, 19 nt, Homo sapiens
  misc_RNA (1)...(19): siRNA sense strand
ccuaguggauucuacauug

SEQ ID NO: 70190 - RNA, 19 nt, Homo sapiens
  misc_RNA (1)...(19): siRNA sense strand
cggcagcacuuugacauuu

SEQ ID NO: 70191 - RNA, 19 nt, Homo sapiens
  misc_RNA (1)...(19): siRNA sense strand
ugagaacggucuaccucua

SEQ ID NO: 70192 - RNA, 19 nt, Homo sapiens
  misc_RNA (1)...(19): siRNA sense strand
caacaacaaugcccaagac

SEQ ID NO: 70193 - RNA, 19 nt, Homo sapiens
  misc_RNA (1)...(19): siRNA sense strand
ggacaagccaggcgugaga

SEQ ID NO: 70194 - RNA, 19 nt, Homo sapiens
  misc_RNA (1)...(19): siRNA sense strand
ggagaagcaucuggaguuc

SEQ ID NO: 70195 - RNA, 19 nt, Homo sapiens
  misc_RNA (1)...(19): siRNA sense strand
cgaggcagcgugauccuua

SEQ ID NO: 70196 - RNA, 19 nt, Homo sapiens
  misc_RNA (1)...(19): siRNA sense strand
ggaauucaguggccuacca

SEQ ID NO: 70197 - RNA, 19 nt, Homo sapiens
  misc_RNA (1)...(19): siRNA sense strand
gcagaucugucaggcaaau

SEQ ID NO: 70198 - RNA, 19 nt, Homo sapiens
  misc_RNA (1)...(19): siRNA sense strand
uggcauaacugaucugagu

SEQ ID NO: 70199 - RNA, 19 nt, Homo sapiens
  misc_RNA (1)...(19): siRNA sense strand
ggacagccaucaggguuuc

SEQ ID NO: 70200 - RNA, 19 nt, Homo sapiens
  misc_RNA (1)...(19): siRNA sense strand
agagacgcaucuagaaauu

SEQ ID NO: 70201 - RNA, 19 nt, Homo sapiens
  misc_RNA (1)...(19): siRNA sense strand
caacaaugcccaagacuac

SEQ ID NO: 70202 - RNA, 19 nt, Homo sapiens
  misc_RNA (1)...(19): siRNA sense strand
ggaauggaaacgugaauca

SEQ ID NO: 70203 - RNA, 19 nt, Homo sapiens
  misc_RNA (1)...(19): siRNA sense strand
gaucgugacccaagugguu

SEQ ID NO: 70204 - RNA, 19 nt, Homo sapiens
  misc_RNA (1)...(19): siRNA sense strand
caacgagaccuaugaugug

SEQ ID NO: 70205 - RNA, 19 nt, Homo sapiens
  misc_RNA (1)...(19): siRNA sense strand
gaaacgugaaucagaauca

SEQ ID NO: 70206 - RNA, 19 nt, Homo sapiens
  misc_RNA (1)...(19): siRNA sense strand
caucaguggugcaggagaa

SEQ ID NO: 70207 - RNA, 19 nt, Homo sapiens
  misc_RNA (1)...(19): siRNA sense strand
uuuaaucacuucugaguuc

SEQ ID NO: 70208 - RNA, 19 nt, Homo sapiens
  misc_RNA (1)...(19): siRNA sense strand
agucaacccuuuggcauaa

SEQ ID NO: 70209 - RNA, 19 nt, Homo sapiens
  misc_RNA (1)...(19): siRNA sense strand
gagcaggaguuugucaaca

SEQ ID NO: 70210 - RNA, 19 nt, Homo sapiens
  misc_RNA (1)...(19): siRNA sense strand
gaguagaaguaucaucagu

SEQ ID NO: 70211 - RNA, 19 nt, Homo sapiens
  misc_RNA (1)...(19): siRNA sense strand
caccagguacuccauauuu

SEQ ID NO: 70212 - RNA, 19 nt, Homo sapiens
  misc_RNA (1)...(19): siRNA sense strand
ccagggauccuuccuacuu

SEQ ID NO: 70213 - RNA, 19 nt, Homo sapiens
  misc_RNA (1)...(19): siRNA sense strand
gagaagggcgaguggaaug

SEQ ID NO: 70214 - RNA, 19 nt, Homo sapiens
  misc_RNA (1)...(19): siRNA sense strand
caucuggaguucuuuaugg

SEQ ID NO: 70215 - RNA, 19 nt, Homo sapiens
  misc_RNA (1)...(19): siRNA sense strand
gaaauaccuggacucuuug

SEQ ID NO: 70216 - RNA, 19 nt, Homo sapiens
  misc_RNA (1)...(19): siRNA sense strand
caaacugccuucuggaacu

SEQ ID NO: 70217 - RNA, 19 nt, Homo sapiens
  misc_RNA (1)...(19): siRNA sense strand
cuacugccauccuagaguu

SEQ ID NO: 70218 - RNA, 19 nt, Homo sapiens
  misc_RNA (1)...(19): siRNA sense strand
gcagcacuuugacauuuca

SEQ ID NO: 70219 - RNA, 19 nt, Homo sapiens
  misc_RNA (1)...(19): siRNA sense strand
ccuaugauguguacugcuu

SEQ ID NO: 70220 - RNA, 19 nt, Homo sapiens
  misc_RNA (1)...(19): siRNA sense strand
gaacucaguggugcucauu

SEQ ID NO: 70221 - RNA, 19 nt, Homo sapiens
  misc_RNA (1)...(19): siRNA sense strand
gggaccagaccgucagaua

SEQ ID NO: 70222 - RNA, 19 nt, Homo sapiens
  misc_RNA (1)...(19): siRNA sense strand
ccaacgagaccuaugaugu

SEQ ID NO: 70223 - RNA, 19 nt, Homo sapiens
  misc_RNA (1)...(19): siRNA sense strand
ccaaccagccugacaacuu

SEQ ID NO: 70224 - RNA, 19 nt, Homo sapiens
  misc_RNA (1)...(19): siRNA sense strand
ggagacaggacugaaauca

SEQ ID NO: 70225 - RNA, 19 nt, Homo sapiens
  misc_RNA (1)...(19): siRNA sense strand
uaucaucagucccagaauc

SEQ ID NO: 70226 - RNA, 19 nt, Homo sapiens
  misc_RNA (1)...(19): siRNA sense strand
acagugaccuggccugaca

SEQ ID NO: 70227 - RNA, 19 nt, Homo sapiens
  misc_RNA (1)...(19): siRNA sense strand
gaaugauguucccugcaau

SEQ ID NO: 70228 - RNA, 19 nt, Homo sapiens
  misc_RNA (1)...(19): siRNA sense strand
aauagaggaugucagugaa

SEQ ID NO: 70229 - RNA, 19 nt, Homo sapiens
  misc_RNA (1)...(19): siRNA sense strand
ggaaccaucagccucagaa

SEQ ID NO: 70230 - RNA, 19 nt, Homo sapiens
  misc_RNA (1)...(19): siRNA sense strand
cgaggagcccuucacguuu

SEQ ID NO: 70231 - RNA, 19 nt, Homo sapiens
  misc_RNA (1)...(19): siRNA sense strand
uguagaaacuucagaccau

SEQ ID NO: 70232 - RNA, 19 nt, Homo sapiens
  misc_RNA (1)...(19): siRNA sense strand
guuacugaaccaacuauuu

SEQ ID NO: 70233 - RNA, 19 nt, Homo sapiens
  misc_RNA (1)...(19): siRNA sense strand
gagaucagcgggcuuccuu

SEQ ID NO: 70234 - RNA, 19 nt, Homo sapiens
  misc_RNA (1)...(19): siRNA sense strand
gagaucagcgggcuuccuu

SEQ ID NO: 70235 - RNA, 19 nt, Homo sapiens
  misc_RNA (1)...(19): siRNA sense strand
cagggauccuuccuacuug

SEQ ID NO: 70236 - RNA, 19 nt, Homo sapiens
  misc_RNA (1)...(19): siRNA sense strand
ggugaaaggcaucguguuc

SEQ ID NO: 70237 - RNA, 19 nt, Homo sapiens
  misc_RNA (1)...(19): siRNA sense strand
gaacgacaggaccaucgaa

SEQ ID NO: 70238 - RNA, 19 nt, Homo sapiens
  misc_RNA (1)...(19): siRNA sense strand
caauguaaguggagaaucc

SEQ ID NO: 70239 - RNA, 19 nt, Homo sapiens
  misc_RNA (1)...(19): siRNA sense strand
ccgaggagcccuucacguu

SEQ ID NO: 70240 - RNA, 19 nt, Homo sapiens
  misc_RNA (1)...(19): siRNA sense strand
cacugcagcugucacugua

SEQ ID NO: 70241 - RNA, 19 nt, Homo sapiens
  misc_RNA (1)...(19): siRNA sense strand
aaacgugaaucagaaucaa

SEQ ID NO: 70242 - RNA, 19 nt, Homo sapiens
  misc_RNA (1)...(19): siRNA sense strand
ugaaaccaccucugcauuc

SEQ ID NO: 70243 - RNA, 19 nt, Homo sapiens
  misc_RNA (1)...(19): siRNA sense strand
aaucugggaugguggaugu

SEQ ID NO: 70244 - RNA, 19 nt, Homo sapiens
  misc_RNA (1)...(19): siRNA sense strand
ggaagggagggucuagaga

SEQ ID NO: 70245 - RNA, 19 nt, Homo sapiens
  misc_RNA (1)...(19): siRNA sense strand
gagagguuguagagacuuc

SEQ ID NO: 70246 - RNA, 19 nt, Homo sapiens
  misc_RNA (1)...(19): siRNA sense strand
gaaugggaaccagccuaua

SEQ ID NO: 70247 - RNA, 19 nt, Homo sapiens
  misc_RNA (1)...(19): siRNA sense strand
uuacugaaccaacuauuuc

SEQ ID NO: 70248 - RNA, 19 nt, Homo sapiens
  misc_RNA (1)...(19): siRNA sense strand
ggagcauucuggauuucug

SEQ ID NO: 70249 - RNA, 19 nt, Homo sapiens
  misc_RNA (1)...(19): siRNA sense strand
cuucugggauuacauuugu

SEQ ID NO: 70250 - RNA, 19 nt, Homo sapiens
  misc_RNA (1)...(19): siRNA sense strand
gacauuagugggagagcua

SEQ ID NO: 70251 - RNA, 19 nt, Homo sapiens
  misc_RNA (1)...(19): siRNA sense strand
ugggcaagcuccagaaaca

SEQ ID NO: 70252 - RNA, 19 nt, Homo sapiens
  misc_RNA (1)...(19): siRNA sense strand
gauuucugccucuggauuu

SEQ ID NO: 70253 - RNA, 19 nt, Homo sapiens
  misc_RNA (1)...(19): siRNA sense strand
ggacuccaguggucuuacu

SEQ ID NO: 70254 - RNA, 19 nt, Homo sapiens
  misc_RNA (1)...(19): siRNA sense strand
gugaagacuuuguggacau

SEQ ID NO: 70255 - RNA, 19 nt, Homo sapiens
  misc_RNA (1)...(19): siRNA sense strand
gacuuccgcuggucagaug

SEQ ID NO: 70256 - RNA, 19 nt, Homo sapiens
  misc_RNA (1)...(19): siRNA sense strand
ccucaagccuccuguacuc

SEQ ID NO: 70257 - RNA, 19 nt, Homo sapiens
  misc_RNA (1)...(19): siRNA sense strand
cagagacgcaucuagaaau

SEQ ID NO: 70258 - RNA, 19 nt, Homo sapiens
  misc_RNA (1)...(19): siRNA sense strand
gaaaccaccucugcauucc

SEQ ID NO: 70259 - RNA, 19 nt, Homo sapiens
  misc_RNA (1)...(19): siRNA sense strand
gccagcaccaccaauguaa

SEQ ID NO: 70260 - RNA, 19 nt, Homo sapiens
  misc_RNA (1)...(19): siRNA sense strand
ccuacuacauuuaaagaag

SEQ ID NO: 70261 - RNA, 19 nt, Homo sapiens
  misc_RNA (1)...(19): siRNA sense strand
ggaguucuuuauggcacua

SEQ ID NO: 70262 - RNA, 19 nt, Homo sapiens
  misc_RNA (1)...(19): siRNA sense strand
ggaccagaccgucagauac

SEQ ID NO: 70263 - RNA, 19 nt, Homo sapiens
  misc_RNA (1)...(19): siRNA sense strand
gaagacaacugcagaacag

SEQ ID NO: 70264 - RNA, 19 nt, Homo sapiens
  misc_RNA (1)...(19): siRNA sense strand
gaagaagacaacugcagaa

SEQ ID NO: 70265 - RNA, 19 nt, Homo sapiens
  misc_RNA (1)...(19): siRNA sense strand
gcuggguacugccaugaau

SEQ ID NO: 70266 - RNA, 19 nt, Homo sapiens
  misc_RNA (1)...(19): siRNA sense strand
ggccuuggcagagguacua

SEQ ID NO: 70267 - RNA, 19 nt, Homo sapiens
  misc_RNA (1)...(19): siRNA sense strand
cuacugccgcuucuucaau

SEQ ID NO: 70268 - RNA, 19 nt, Homo sapiens
  misc_RNA (1)...(19): siRNA sense strand
ccacugaagaagacaacug

SEQ ID NO: 70269 - RNA, 19 nt, Homo sapiens
  misc_RNA (1)...(19): siRNA sense strand
uacugccgcuucuucaaug

SEQ ID NO: 70270 - RNA, 19 nt, Homo sapiens
  misc_RNA (1)...(19): siRNA sense strand
gaagacaacugcagaacag

SEQ ID NO: 70271 - RNA, 19 nt, Homo sapiens
  misc_RNA (1)...(19): siRNA sense strand
gaagaagacaacugcagaa

SEQ ID NO: 70272 - RNA, 19 nt, Homo sapiens
  misc_RNA (1)...(19): siRNA sense strand
gcuggguacugccaugaau

SEQ ID NO: 70273 - RNA, 19 nt, Homo sapiens
  misc_RNA (1)...(19): siRNA sense strand
ggccuuggcagagguacua

SEQ ID NO: 70274 - RNA, 19 nt, Homo sapiens
  misc_RNA (1)...(19): siRNA sense strand
cuacugccgcuucuucaau

SEQ ID NO: 70275 - RNA, 19 nt, Homo sapiens
  misc_RNA (1)...(19): siRNA sense strand
ccacugaagaagacaacug

SEQ ID NO: 70276 - RNA, 19 nt, Homo sapiens
  misc_RNA (1)...(19): siRNA sense strand
uacugccgcuucuucaaug

SEQ ID NO: 70277 - RNA, 19 nt, Homo sapiens
  misc_RNA (1)...(19): siRNA sense strand
ugaagcagcugaacuauuc

SEQ ID NO: 70278 - RNA, 19 nt, Homo sapiens
  misc_RNA (1)...(19): siRNA sense strand
gaacuauucucuccugugu

SEQ ID NO: 70279 - RNA, 19 nt, Homo sapiens
  misc_RNA (1)...(19): siRNA sense strand
gggaagcccuggugcagua

SEQ ID NO: 70280 - RNA, 19 nt, Homo sapiens
  misc_RNA (1)...(19): siRNA sense strand
ccaaaggccuggcaacaug

SEQ ID NO: 70281 - RNA, 19 nt, Homo sapiens
  misc_RNA (1)...(19): siRNA sense strand
gcaggaggaugccuucuuc

SEQ ID NO: 70282 - RNA, 19 nt, Homo sapiens
  misc_RNA (1)...(19): siRNA sense strand
ggaggagucugaaugagau

SEQ ID NO: 70283 - RNA, 19 nt, Homo sapiens
  misc_RNA (1)...(19): siRNA sense strand
gaugaugggaugcagauuu

SEQ ID NO: 70284 - RNA, 19 nt, Homo sapiens
  misc_RNA (1)...(19): siRNA sense strand
gauacacccugcacaucaa

SEQ ID NO: 70285 - RNA, 19 nt, Homo sapiens
  misc_RNA (1)...(19): siRNA sense strand
caaggagccuggagaccaa

SEQ ID NO: 70286 - RNA, 19 nt, Homo sapiens
  misc_RNA (1)...(19): siRNA sense strand
cagcugagcacgcauuuga

SEQ ID NO: 70287 - RNA, 19 nt, Homo sapiens
  misc_RNA (1)...(19): siRNA sense strand
ccacaggcaucggcauuga

SEQ ID NO: 70288 - RNA, 19 nt, Homo sapiens
  misc_RNA (1)...(19): siRNA sense strand
gucacuaccucccaaagaa

SEQ ID NO: 70289 - RNA, 19 nt, Homo sapiens
  misc_RNA (1)...(19): siRNA sense strand
ccaagaaugccaacuuuua

SEQ ID NO: 70290 - RNA, 19 nt, Homo sapiens
  misc_RNA (1)...(19): siRNA sense strand
ggaacgcuuugucucugaa

SEQ ID NO: 70291 - RNA, 19 nt, Homo sapiens
  misc_RNA (1)...(19): siRNA sense strand
ggagcucaauaucaaauac

SEQ ID NO: 70292 - RNA, 19 nt, Homo sapiens
  misc_RNA (1)...(19): siRNA sense strand
ucucugaaaucaucgguau

SEQ ID NO: 70293 - RNA, 19 nt, Homo sapiens
  misc_RNA (1)...(19): siRNA sense strand
caugguggccucauuguug

SEQ ID NO: 70294 - RNA, 19 nt, Homo sapiens
  misc_RNA (1)...(19): siRNA sense strand
gaaaucaucgguaucuacu

SEQ ID NO: 70295 - RNA, 19 nt, Homo sapiens
  misc_RNA (1)...(19): siRNA sense strand
caaugacccugcuauacca

SEQ ID NO: 70296 - RNA, 19 nt, Homo sapiens
  misc_RNA (1)...(19): siRNA sense strand
aggcuucucugaguugaua

SEQ ID NO: 70297 - RNA, 19 nt, Homo sapiens
  misc_RNA (1)...(19): siRNA sense strand
ugaugagucuguccaagau

SEQ ID NO: 70298 - RNA, 19 nt, Homo sapiens
  misc_RNA (1)...(19): siRNA sense strand
gaagacuuggagcucaaua

SEQ ID NO: 70299 - RNA, 19 nt, Homo sapiens
  misc_RNA (1)...(19): siRNA sense strand
acaugaagcagcugaacua

SEQ ID NO: 70300 - RNA, 19 nt, Homo sapiens
  misc_RNA (1)...(19): siRNA sense strand
ucucaacccuguccugauc

SEQ ID NO: 70301 - RNA, 19 nt, Homo sapiens
  misc_RNA (1)...(19): siRNA sense strand
agccaagaaugccaacuuu

SEQ ID NO: 70302 - RNA, 19 nt, Homo sapiens
  misc_RNA (1)...(19): siRNA sense strand
ccgaggaguugaagacauc

SEQ ID NO: 70303 - RNA, 19 nt, Homo sapiens
  misc_RNA (1)...(19): siRNA sense strand
cggaugagcacuucacaga

SEQ ID NO: 70304 - RNA, 19 nt, Homo sapiens
  misc_RNA (1)...(19): siRNA sense strand
ugaaugagaugaaaaggau

SEQ ID NO: 70305 - RNA, 19 nt, Homo sapiens
  misc_RNA (1)...(19): siRNA sense strand
caggagagcucagguaucc

SEQ ID NO: 70306 - RNA, 19 nt, Homo sapiens
  misc_RNA (1)...(19): siRNA sense strand
acuuggagcucaauaucaa

SEQ ID NO: 70307 - RNA, 19 nt, Homo sapiens
  misc_RNA (1)...(19): siRNA sense strand
aaucaucgguaucuacuac

SEQ ID NO: 70308 - RNA, 19 nt, Homo sapiens
  misc_RNA (1)...(19): siRNA sense strand
gaaaaggaucuucaacuuc

SEQ ID NO: 70309 - RNA, 19 nt, Homo sapiens
  misc_RNA (1)...(19): siRNA sense strand
aaagacaguggaagacuug

SEQ ID NO: 70310 - RNA, 19 nt, Homo sapiens
  misc_RNA (1)...(19): siRNA sense strand
gugaugagucuguccaaga

SEQ ID NO: 70311 - RNA, 19 nt, Homo sapiens
  misc_RNA (1)...(19): siRNA sense strand
cgauacacccugcacauca

SEQ ID NO: 70312 - RNA, 19 nt, Homo sapiens
  misc_RNA (1)...(19): siRNA sense strand
gcaaugccgaguucuccuu

SEQ ID NO: 70313 - RNA, 19 nt, Homo sapiens
  misc_RNA (1)...(19): siRNA sense strand
gagucugaaugagaugaaa

SEQ ID NO: 70314 - RNA, 19 nt, Homo sapiens
  misc_RNA (1)...(19): siRNA sense strand
caguuugacuccugugcuu

SEQ ID NO: 70315 - RNA, 19 nt, Homo sapiens
  misc_RNA (1)...(19): siRNA sense strand
augaugggaugcagauuug

SEQ ID NO: 70316 - RNA, 19 nt, Homo sapiens
  misc_RNA (1)...(19): siRNA sense strand
gaacgcuuugucucugaaa

SEQ ID NO: 70317 - RNA, 19 nt, Homo sapiens
  misc_RNA (1)...(19): siRNA sense strand
ccaucuuccugcccacuga

SEQ ID NO: 70318 - RNA, 19 nt, Homo sapiens
  misc_RNA (1)...(19): siRNA sense strand
ccaagggcuuccuaaacca

SEQ ID NO: 70319 - RNA, 19 nt, Homo sapiens
  misc_RNA (1)...(19): siRNA sense strand
gcaguggaacgcuuugucu

SEQ ID NO: 70320 - RNA, 19 nt, Homo sapiens
  misc_RNA (1)...(19): siRNA sense strand
gaacaugaagcagcugaac

SEQ ID NO: 70321 - RNA, 19 nt, Homo sapiens
  misc_RNA (1)...(19): siRNA sense strand
ccacugccacccucucuuc

SEQ ID NO: 70322 - RNA, 19 nt, Homo sapiens
  misc_RNA (1)...(19): siRNA sense strand
uggaacgcuuugucucuga

SEQ ID NO: 70323 - RNA, 19 nt, Homo sapiens
  misc_RNA (1)...(19): siRNA sense strand
gaagacaucccaggcuacu

SEQ ID NO: 70324 - RNA, 19 nt, Homo sapiens
  misc_RNA (1)...(19): siRNA sense strand
uggaagacuuggagcucaa

SEQ ID NO: 70325 - RNA, 19 nt, Homo sapiens
  misc_RNA (1)...(19): siRNA sense strand
acuauucucuccugugucu

SEQ ID NO: 70326 - RNA, 19 nt, Homo sapiens
  misc_RNA (1)...(19): siRNA sense strand
ugauacagaggaacaugaa

SEQ ID NO: 70327 - RNA, 19 nt, Homo sapiens
  misc_RNA (1)...(19): siRNA sense strand
cagccaagaaugccaacuu

SEQ ID NO: 70328 - RNA, 19 nt, Homo sapiens
  misc_RNA (1)...(19): siRNA sense strand
uggacaaucucggcaagga

SEQ ID NO: 70329 - RNA, 19 nt, Homo sapiens
  misc_RNA (1)...(19): siRNA sense strand
ggugcgcaaugccgaguuc

SEQ ID NO: 70330 - RNA, 19 nt, Homo sapiens
  misc_RNA (1)...(19): siRNA sense strand
ggagucugaaugagaugaa

SEQ ID NO: 70331 - RNA, 19 nt, Homo sapiens
  misc_RNA (1)...(19): siRNA sense strand
augagucuguccaagauga

SEQ ID NO: 70332 - RNA, 19 nt, Homo sapiens
  misc_RNA (1)...(19): siRNA sense strand
ugaaaucaucgguaucuac

SEQ ID NO: 70333 - RNA, 19 nt, Homo sapiens
  misc_RNA (1)...(19): siRNA sense strand
caagaaugccaacuuuuau

SEQ ID NO: 70334 - RNA, 19 nt, Homo sapiens
  misc_RNA (1)...(19): siRNA sense strand
ggaacaugaagcagcugaa

SEQ ID NO: 70335 - RNA, 19 nt, Homo sapiens
  misc_RNA (1)...(19): siRNA sense strand
uggaggagucugaaugaga

SEQ ID NO: 70336 - RNA, 19 nt, Homo sapiens
  misc_RNA (1)...(19): siRNA sense strand
gucaaugccacaugugaug

SEQ ID NO: 70337 - RNA, 19 nt, Homo sapiens
  misc_RNA (1)...(19): siRNA sense strand
cuacccaagugaugagucu

SEQ ID NO: 70338 - RNA, 19 nt, Homo sapiens
  misc_RNA (1)...(19): siRNA sense strand
cuucuucgccucccaguuc

SEQ ID NO: 70339 - RNA, 19 nt, Homo sapiens
  misc_RNA (1)...(19): siRNA sense strand
gacuuggagcucaauauca

SEQ ID NO: 70340 - RNA, 19 nt, Homo sapiens
  misc_RNA (1)...(19): siRNA sense strand
aacaugcgagggcuucaua

SEQ ID NO: 70341 - RNA, 19 nt, Homo sapiens
  misc_RNA (1)...(19): siRNA sense strand
ccaaugacccugcuauacc

SEQ ID NO: 70342 - RNA, 19 nt, Homo sapiens
  misc_RNA (1)...(19): siRNA sense strand
gaacuuccccgucacugau

SEQ ID NO: 70343 - RNA, 19 nt, Homo sapiens
  misc_RNA (1)...(19): siRNA sense strand
agacaucccaggcuacuac

SEQ ID NO: 70344 - RNA, 19 nt, Homo sapiens
  misc_RNA (1)...(19): siRNA sense strand
agacuuggagcucaauauc

SEQ ID NO: 70345 - RNA, 19 nt, Homo sapiens
  misc_RNA (1)...(19): siRNA sense strand
uccaagggcuuccuaaacc

SEQ ID NO: 70346 - RNA, 19 nt, Homo sapiens
  misc_RNA (1)...(19): siRNA sense strand
aaaagacaguggaagacuu

SEQ ID NO: 70347 - RNA, 19 nt, Homo sapiens
  misc_RNA (1)...(19): siRNA sense strand
gauuuggggugcaguggaa

SEQ ID NO: 70348 - RNA, 19 nt, Homo sapiens
  misc_RNA (1)...(19): siRNA sense strand
cgaguucuccuuccaugag

SEQ ID NO: 70349 - RNA, 19 nt, Homo sapiens
  misc_RNA (1)...(19): siRNA sense strand
gauaagaccaccauacucu

SEQ ID NO: 70350 - RNA, 19 nt, Homo sapiens
  misc_RNA (1)...(19): siRNA sense strand
uauaucaacuucagcuaug

SEQ ID NO: 70351 - RNA, 19 nt, Homo sapiens
  misc_RNA (1)...(19): siRNA sense strand
caacagacaagaccaagca

SEQ ID NO: 70352 - RNA, 19 nt, Homo sapiens
  misc_RNA (1)...(19): siRNA sense strand
gcaggaggaaguggauuaa

SEQ ID NO: 70353 - RNA, 19 nt, Homo sapiens
  misc_RNA (1)...(19): siRNA sense strand
gcacccugguuauaucaac

SEQ ID NO: 70354 - RNA, 19 nt, Homo sapiens
  misc_RNA (1)...(19): siRNA sense strand
gcagucucaucaccacauc

SEQ ID NO: 70355 - RNA, 19 nt, Homo sapiens
  misc_RNA (1)...(19): siRNA sense strand
uaccagagcaugauaagac

SEQ ID NO: 70356 - RNA, 19 nt, Homo sapiens
  misc_RNA (1)...(19): siRNA sense strand
ccaccucugccuccaaugu

SEQ ID NO: 70357 - RNA, 19 nt, Homo sapiens
  misc_RNA (1)...(19): siRNA sense strand
ggaccuggauuuuguuugc

SEQ ID NO: 70358 - RNA, 19 nt, Homo sapiens
  misc_RNA (1)...(19): siRNA sense strand
aagcuuggccagcaacaga

SEQ ID NO: 70359 - RNA, 19 nt, Homo sapiens
  misc_RNA (1)...(19): siRNA sense strand
agaccaagcaggaggaagu

SEQ ID NO: 70360 - RNA, 19 nt, Homo sapiens
  misc_RNA (1)...(19): siRNA sense strand
caugauaagaccaccauac

SEQ ID NO: 70361 - RNA, 19 nt, Homo sapiens
  misc_RNA (1)...(19): siRNA sense strand
cauacuuccugaucugcau

SEQ ID NO: 70362 - RNA, 19 nt, Homo sapiens
  misc_RNA (1)...(19): siRNA sense strand
cagcaacagacaagaccaa

SEQ ID NO: 70363 - RNA, 19 nt, Homo sapiens
  misc_RNA (1)...(19): siRNA sense strand
agcaggaggaaguggauua

SEQ ID NO: 70364 - RNA, 19 nt, Homo sapiens
  misc_RNA (1)...(19): siRNA sense strand
gcaaagacaucaacacauu

SEQ ID NO: 70365 - RNA, 19 nt, Homo sapiens
  misc_RNA (1)...(19): siRNA sense strand
gaauaagcaagucuucuuu

SEQ ID NO: 70366 - RNA, 19 nt, Homo sapiens
  misc_RNA (1)...(19): siRNA sense strand
ggucaccacuugcaagcua

SEQ ID NO: 70367 - RNA, 19 nt, Homo sapiens
  misc_RNA (1)...(19): siRNA sense strand
ccacuuggaucagucaauu

SEQ ID NO: 70368 - RNA, 19 nt, Homo sapiens
  misc_RNA (1)...(19): siRNA sense strand
uggcuuaccuguccacuug

SEQ ID NO: 70369 - RNA, 19 nt, Homo sapiens
  misc_RNA (1)...(19): siRNA sense strand
gcacuaugaugccaaacca

SEQ ID NO: 70370 - RNA, 19 nt, Homo sapiens
  misc_RNA (1)...(19): siRNA sense strand
gaauggaaacccucacaga

SEQ ID NO: 70371 - RNA, 19 nt, Homo sapiens
  misc_RNA (1)...(19): siRNA sense strand
caggauaacuccagguaca

SEQ ID NO: 70372 - RNA, 19 nt, Homo sapiens
  misc_RNA (1)...(19): siRNA sense strand
uggaaacccucacagagaa

SEQ ID NO: 70373 - RNA, 19 nt, Homo sapiens
  misc_RNA (1)...(19): siRNA sense strand
gacaucaacacauuuauuc

SEQ ID NO: 70374 - RNA, 19 nt, Homo sapiens
  misc_RNA (1)...(19): siRNA sense strand
caaagacaucaacacauuu

SEQ ID NO: 70375 - RNA, 19 nt, Homo sapiens
  misc_RNA (1)...(19): siRNA sense strand
gcaucaaggccaucuguga

SEQ ID NO: 70376 - RNA, 19 nt, Homo sapiens
  misc_RNA (1)...(19): siRNA sense strand
guucagaaacguuguuguu

SEQ ID NO: 70377 - RNA, 19 nt, Homo sapiens
  misc_RNA (1)...(19): siRNA sense strand
gcaacaagcgcagcaucaa

SEQ ID NO: 70378 - RNA, 19 nt, Homo sapiens
  misc_RNA (1)...(19): siRNA sense strand
ccagcacuaugaugccaaa

SEQ ID NO: 70379 - RNA, 19 nt, Homo sapiens
  misc_RNA (1)...(19): siRNA sense strand
caucaaggccaucugugaa

SEQ ID NO: 70380 - RNA, 19 nt, Homo sapiens
  misc_RNA (1)...(19): siRNA sense strand
ggaaacccucacagagaaa

SEQ ID NO: 70381 - RNA, 19 nt, Homo sapiens
  misc_RNA (1)...(19): siRNA sense strand
aaacguuguuguugcuugu

SEQ ID NO: 70382 - RNA, 19 nt, Homo sapiens
  misc_RNA (1)...(19): siRNA sense strand
gagaaaaccuaagaauaag

SEQ ID NO: 70383 - RNA, 19 nt, Homo sapiens
  misc_RNA (1)...(19): siRNA sense strand
cagagaaaaccuaagaaua

SEQ ID NO: 70384 - RNA, 19 nt, Homo sapiens
  misc_RNA (1)...(19): siRNA sense strand
cagaaacguuguuguugcu

SEQ ID NO: 70385 - RNA, 19 nt, Homo sapiens
  misc_RNA (1)...(19): siRNA sense strand
caacaagcgcagcaucaag

SEQ ID NO: 70386 - RNA, 19 nt, Homo sapiens
  misc_RNA (1)...(19): siRNA sense strand
gugaugggccugggcguuu

SEQ ID NO: 70387 - RNA, 19 nt, Homo sapiens
  misc_RNA (1)...(19): siRNA sense strand
ggcaacaagcgcagcauca

SEQ ID NO: 70388 - RNA, 19 nt, Homo sapiens
  misc_RNA (1)...(19): siRNA sense strand
ugaccucacccugcaaaga

SEQ ID NO: 70389 - RNA, 19 nt, Homo sapiens
  misc_RNA (1)...(19): siRNA sense strand
ggauaacuccagguacaca

SEQ ID NO: 70390 - RNA, 19 nt, Homo sapiens
  misc_RNA (1)...(19): siRNA sense strand
ucacagagaaaaccuaaga

SEQ ID NO: 70391 - RNA, 19 nt, Homo sapiens
  misc_RNA (1)...(19): siRNA sense strand
cagcaucaaggccaucugu

SEQ ID NO: 70392 - RNA, 19 nt, Homo sapiens
  misc_RNA (1)...(19): siRNA sense strand
gaccucacccugcaaagac

SEQ ID NO: 70393 - RNA, 19 nt, Homo sapiens
  misc_RNA (1)...(19): siRNA sense strand
gaaaaccuaagaauaagca

SEQ ID NO: 70394 - RNA, 19 nt, Homo sapiens
  misc_RNA (1)...(19): siRNA sense strand
cugcaaagacaucaacaca

SEQ ID NO: 70395 - RNA, 19 nt, Homo sapiens
  misc_RNA (1)...(19): siRNA sense strand
gaaguuaacugauguggaa

SEQ ID NO: 70396 - RNA, 19 nt, Homo sapiens
  misc_RNA (1)...(19): siRNA sense strand
ggaggcggguggacaauua

SEQ ID NO: 70397 - RNA, 19 nt, Homo sapiens
  misc_RNA (1)...(19): siRNA sense strand
ggacaaaccuguugaacca

SEQ ID NO: 70398 - RNA, 19 nt, Homo sapiens
  misc_RNA (1)...(19): siRNA sense strand
gugaagaacucaauuauag

SEQ ID NO: 70399 - RNA, 19 nt, Homo sapiens
  misc_RNA (1)...(19): siRNA sense strand
gaaagaaaugguagagaua

SEQ ID NO: 70400 - RNA, 19 nt, Homo sapiens
  misc_RNA (1)...(19): siRNA sense strand
uaagaacaguuuccuagaa

SEQ ID NO: 70401 - RNA, 19 nt, Homo sapiens
  misc_RNA (1)...(19): siRNA sense strand
gaacauuucuaucucucaa

SEQ ID NO: 70402 - RNA, 19 nt, Homo sapiens
  misc_RNA (1)...(19): siRNA sense strand
ggacuuggaaagaauauaa

SEQ ID NO: 70403 - RNA, 19 nt, Homo sapiens
  misc_RNA (1)...(19): siRNA sense strand
gaacucaauuauaggauuc

SEQ ID NO: 70404 - RNA, 19 nt, Homo sapiens
  misc_RNA (1)...(19): siRNA sense strand
uauaacaacuuucggaaga

SEQ ID NO: 70405 - RNA, 19 nt, Homo sapiens
  misc_RNA (1)...(19): siRNA sense strand
caaaucagcuucagagacu

SEQ ID NO: 70406 - RNA, 19 nt, Homo sapiens
  misc_RNA (1)...(19): siRNA sense strand
gagcaaacgcggaaguuaa

SEQ ID NO: 70407 - RNA, 19 nt, Homo sapiens
  misc_RNA (1)...(19): siRNA sense strand
caagugaagaacucaauua

SEQ ID NO: 70408 - RNA, 19 nt, Homo sapiens
  misc_RNA (1)...(19): siRNA sense strand
caaauggcaucuacacguu

SEQ ID NO: 70409 - RNA, 19 nt, Homo sapiens
  misc_RNA (1)...(19): siRNA sense strand
uguggaagcccaaguauua

SEQ ID NO: 70410 - RNA, 19 nt, Homo sapiens
  misc_RNA (1)...(19): siRNA sense strand
ccagacggcugugaugaua

SEQ ID NO: 70411 - RNA, 19 nt, Homo sapiens
  misc_RNA (1)...(19): siRNA sense strand
ggaccagaccagugaaaua

SEQ ID NO: 70412 - RNA, 19 nt, Homo sapiens
  misc_RNA (1)...(19): siRNA sense strand
gagcugugaucuugucuug

SEQ ID NO: 70413 - RNA, 19 nt, Homo sapiens
  misc_RNA (1)...(19): siRNA sense strand
ggaauguacuauccacaga

SEQ ID NO: 70414 - RNA, 19 nt, Homo sapiens
  misc_RNA (1)...(19): siRNA sense strand
cagagacugugcugaagua

SEQ ID NO: 70415 - RNA, 19 nt, Homo sapiens
  misc_RNA (1)...(19): siRNA sense strand
gaagaacucaauuauagga

SEQ ID NO: 70416 - RNA, 19 nt, Homo sapiens
  misc_RNA (1)...(19): siRNA sense strand
gaccagaccagugaaauaa

SEQ ID NO: 70417 - RNA, 19 nt, Homo sapiens
  misc_RNA (1)...(19): siRNA sense strand
agaaagaaaugguagagau

SEQ ID NO: 70418 - RNA, 19 nt, Homo sapiens
  misc_RNA (1)...(19): siRNA sense strand
agacugugcugaaguauuc

SEQ ID NO: 70419 - RNA, 19 nt, Homo sapiens
  misc_RNA (1)...(19): siRNA sense strand
aauauuggcugggaaauga

SEQ ID NO: 70420 - RNA, 19 nt, Homo sapiens
  misc_RNA (1)...(19): siRNA sense strand
gcccaaguauuaaaucaga

SEQ ID NO: 70421 - RNA, 19 nt, Homo sapiens
  misc_RNA (1)...(19): siRNA sense strand
ggagacaacgacaaaugua

SEQ ID NO: 70422 - RNA, 19 nt, Homo sapiens
  misc_RNA (1)...(19): siRNA sense strand
gggaagggaaugaggcuua

SEQ ID NO: 70423 - RNA, 19 nt, Homo sapiens
  misc_RNA (1)...(19): siRNA sense strand
gcauaggaaagaagcaaua

SEQ ID NO: 70424 - RNA, 19 nt, Homo sapiens
  misc_RNA (1)...(19): siRNA sense strand
gcaacgcuaugugcuuaaa

SEQ ID NO: 70425 - RNA, 19 nt, Homo sapiens
  misc_RNA (1)...(19): siRNA sense strand
ucagaggacuuggaaagaa

SEQ ID NO: 70426 - RNA, 19 nt, Homo sapiens
  misc_RNA (1)...(19): siRNA sense strand
gaaccaaacagcugagcaa

SEQ ID NO: 70427 - RNA, 19 nt, Homo sapiens
  misc_RNA (1)...(19): siRNA sense strand
agaauuauauccaggacaa

SEQ ID NO: 70428 - RNA, 19 nt, Homo sapiens
  misc_RNA (1)...(19): siRNA sense strand
gaagagcauggacagcaua

SEQ ID NO: 70429 - RNA, 19 nt, Homo sapiens
  misc_RNA (1)...(19): siRNA sense strand
gaauauaaagugggauuug

SEQ ID NO: 70430 - RNA, 19 nt, Homo sapiens
  misc_RNA (1)...(19): siRNA sense strand
uugcaaauguucacaaaug

SEQ ID NO: 70431 - RNA, 19 nt, Homo sapiens
  misc_RNA (1)...(19): siRNA sense strand
ggaagagcauggacagcau

SEQ ID NO: 70432 - RNA, 19 nt, Homo sapiens
  misc_RNA (1)...(19): siRNA sense strand
caacaugaagaaagaaaug

SEQ ID NO: 70433 - RNA, 19 nt, Homo sapiens
  misc_RNA (1)...(19): siRNA sense strand
ggauggagacaacgacaaa

SEQ ID NO: 70434 - RNA, 19 nt, Homo sapiens
  misc_RNA (1)...(19): siRNA sense strand
gcacaaaggauggagacaa

SEQ ID NO: 70435 - RNA, 19 nt, Homo sapiens
  misc_RNA (1)...(19): siRNA sense strand
ucauggagacaguuaauaa

SEQ ID NO: 70436 - RNA, 19 nt, Homo sapiens
  misc_RNA (1)...(19): siRNA sense strand
ugacugccacggugaauaa

SEQ ID NO: 70437 - RNA, 19 nt, Homo sapiens
  misc_RNA (1)...(19): siRNA sense strand
acaggaggcuggugguuug

SEQ ID NO: 70438 - RNA, 19 nt, Homo sapiens
  misc_RNA (1)...(19): siRNA sense strand
acaaaccuguugaaccaaa

SEQ ID NO: 70439 - RNA, 19 nt, Homo sapiens
  misc_RNA (1)...(19): siRNA sense strand
uaaaugguacuacuggaaa

SEQ ID NO: 70440 - RNA, 19 nt, Homo sapiens
  misc_RNA (1)...(19): siRNA sense strand
caaauguucacaaaugcua

SEQ ID NO: 70441 - RNA, 19 nt, Homo sapiens
  misc_RNA (1)...(19): siRNA sense strand
acucugagcugugaucuug

SEQ ID NO: 70442 - RNA, 19 nt, Homo sapiens
  misc_RNA (1)...(19): siRNA sense strand
gaacacucccucucgacaa

SEQ ID NO: 70443 - RNA, 19 nt, Homo sapiens
  misc_RNA (1)...(19): siRNA sense strand
ccaaacagcugagcaaacg

SEQ ID NO: 70444 - RNA, 19 nt, Homo sapiens
  misc_RNA (1)...(19): siRNA sense strand
gaaccagacggcugugaug

SEQ ID NO: 70445 - RNA, 19 nt, Homo sapiens
  misc_RNA (1)...(19): siRNA sense strand
gagaauauuggcugggaaa

SEQ ID NO: 70446 - RNA, 19 nt, Homo sapiens
  misc_RNA (1)...(19): siRNA sense strand
ccacaucaaacucagcuaa

SEQ ID NO: 70447 - RNA, 19 nt, Homo sapiens
  misc_RNA (1)...(19): siRNA sense strand
gaaaagaaggugcuagcua

SEQ ID NO: 70448 - RNA, 19 nt, Homo sapiens
  misc_RNA (1)...(19): siRNA sense strand
gagcauggacagcauagga

SEQ ID NO: 70449 - RNA, 19 nt, Homo sapiens
  misc_RNA (1)...(19): siRNA sense strand
gcaucuacacguuaacauu

SEQ ID NO: 70450 - RNA, 19 nt, Homo sapiens
  misc_RNA (1)...(19): siRNA sense strand
cagaggacuuggaaagaau

SEQ ID NO: 70451 - RNA, 19 nt, Homo sapiens
  misc_RNA (1)...(19): siRNA sense strand
ccacagaggcagaacacaa

SEQ ID NO: 70452 - RNA, 19 nt, Homo sapiens
  misc_RNA (1)...(19): siRNA sense strand
uaaguucaacggcauuaaa

SEQ ID NO: 70453 - RNA, 19 nt, Homo sapiens
  misc_RNA (1)...(19): siRNA sense strand
guagagauacagcagaaug

SEQ ID NO: 70454 - RNA, 19 nt, Homo sapiens
  misc_RNA (1)...(19): siRNA sense strand
uggaaaggcucaggcuauu

SEQ ID NO: 70455 - RNA, 19 nt, Homo sapiens
  misc_RNA (1)...(19): siRNA sense strand
ggaggcuggugguuugaug

SEQ ID NO: 70456 - RNA, 19 nt, Homo sapiens
  misc_RNA (1)...(19): siRNA sense strand
uaggaaagaagcaauauca

SEQ ID NO: 70457 - RNA, 19 nt, Homo sapiens
  misc_RNA (1)...(19): siRNA sense strand
uaacauucccuaauucuac

SEQ ID NO: 70458 - RNA, 19 nt, Homo sapiens
  misc_RNA (1)...(19): siRNA sense strand
agacggcugugaugauaga

SEQ ID NO: 70459 - RNA, 19 nt, Homo sapiens
  misc_RNA (1)...(19): siRNA sense strand
gcugggaaaugaguuuguu

SEQ ID NO: 70460 - RNA, 19 nt, Homo sapiens
  misc_RNA (1)...(19): siRNA sense strand
aaaagaaggugcuagcuau

SEQ ID NO: 70461 - RNA, 19 nt, Homo sapiens
  misc_RNA (1)...(19): siRNA sense strand
gaagaaagaaaugguagag

SEQ ID NO: 70462 - RNA, 19 nt, Homo sapiens
  misc_RNA (1)...(19): siRNA sense strand
agaggcagaacacaaauaa

SEQ ID NO: 70463 - RNA, 19 nt, Homo sapiens
  misc_RNA (1)...(19): siRNA sense strand
gagacaacgacaaauguau

SEQ ID NO: 70464 - RNA, 19 nt, Homo sapiens
  misc_RNA (1)...(19): siRNA sense strand
uuucgcaacugacuaauca

SEQ ID NO: 70465 - RNA, 19 nt, Homo sapiens
  misc_RNA (1)...(19): siRNA sense strand
gaauauuggcugggaaaug

SEQ ID NO: 70466 - RNA, 19 nt, Homo sapiens
  misc_RNA (1)...(19): siRNA sense strand
gaggauggcagcguugauu

SEQ ID NO: 70467 - RNA, 19 nt, Homo sapiens
  misc_RNA (1)...(19): siRNA sense strand
ugauagaaauagggacaaa

SEQ ID NO: 70468 - RNA, 19 nt, Homo sapiens
  misc_RNA (1)...(19): siRNA sense strand
ggccuacugugacauggaa

SEQ ID NO: 70469 - RNA, 19 nt, Homo sapiens
  misc_RNA (1)...(19): siRNA sense strand
caagcaaaauuccaucauu

SEQ ID NO: 70470 - RNA, 19 nt, Homo sapiens
  misc_RNA (1)...(19): siRNA sense strand
aaucagaccacgagacuug

SEQ ID NO: 70471 - RNA, 19 nt, Homo sapiens
  misc_RNA (1)...(19): siRNA sense strand
ggaagcccaaguauuaaau

SEQ ID NO: 70472 - RNA, 19 nt, Homo sapiens
  misc_RNA (1)...(19): siRNA sense strand
uauaaagugggauuuggua

SEQ ID NO: 70473 - RNA, 19 nt, Homo sapiens
  misc_RNA (1)...(19): siRNA sense strand
gauccgaccagcagauuuc

SEQ ID NO: 70474 - RNA, 19 nt, Homo sapiens
  misc_RNA (1)...(19): siRNA sense strand
gaaaggcucaggcuauucg

SEQ ID NO: 70475 - RNA, 19 nt, Homo sapiens
  misc_RNA (1)...(19): siRNA sense strand
guaugaacauuucuaucuc

SEQ ID NO: 70476 - RNA, 19 nt, Homo sapiens
  misc_RNA (1)...(19): siRNA sense strand
caacuacagucaauaaaag

SEQ ID NO: 70477 - RNA, 19 nt, Homo sapiens
  misc_RNA (1)...(19): siRNA sense strand
agacaacgacaaauguauu

SEQ ID NO: 70478 - RNA, 19 nt, Homo sapiens
  misc_RNA (1)...(19): siRNA sense strand
aauggcaucuacacguuaa

SEQ ID NO: 70479 - RNA, 19 nt, Homo sapiens
  misc_RNA (1)...(19): siRNA sense strand
caucauugaagaacuagaa

SEQ ID NO: 70480 - RNA, 19 nt, Homo sapiens
  misc_RNA (1)...(19): siRNA sense strand
aagaucagcuacagguguu

SEQ ID NO: 70481 - RNA, 19 nt, Homo sapiens
  misc_RNA (1)...(19): siRNA sense strand
aggacaacaugaagaaaga

SEQ ID NO: 70482 - RNA, 19 nt, Homo sapiens
  misc_RNA (1)...(19): siRNA sense strand
caacuugaacggaauguac

SEQ ID NO: 70483 - RNA, 19 nt, Homo sapiens
  misc_RNA (1)...(19): siRNA sense strand
gaggcuuacucauuguaug

SEQ ID NO: 70484 - RNA, 19 nt, Homo sapiens
  misc_RNA (1)...(19): siRNA sense strand
ugccagagauggacaacug

SEQ ID NO: 70485 - RNA, 19 nt, Homo sapiens
  misc_RNA (1)...(19): siRNA sense strand
acguuaacauucccuaauu

SEQ ID NO: 70486 - RNA, 19 nt, Homo sapiens
  misc_RNA (1)...(19): siRNA sense strand
gcuaaagaagaacaaauca

SEQ ID NO: 70487 - RNA, 19 nt, Homo sapiens
  misc_RNA (1)...(19): siRNA sense strand
ccagaccagugaaauaaac

SEQ ID NO: 70488 - RNA, 19 nt, Homo sapiens
  misc_RNA (1)...(19): siRNA sense strand
caugaagaaagaaauggua

SEQ ID NO: 70489 - RNA, 19 nt, Homo sapiens
  misc_RNA (1)...(19): siRNA sense strand
cuaaugaagcuugagaauu

SEQ ID NO: 70490 - RNA, 19 nt, Homo sapiens
  misc_RNA (1)...(19): siRNA sense strand
gcauggacagcauaggaaa

SEQ ID NO: 70491 - RNA, 19 nt, Homo sapiens
  misc_RNA (1)...(19): siRNA sense strand
ggaagggaaugaggcuuac

SEQ ID NO: 70492 - RNA, 19 nt, Homo sapiens
  misc_RNA (1)...(19): siRNA sense strand
ggaagacaagcacaucauc

SEQ ID NO: 70493 - RNA, 19 nt, Homo sapiens
  misc_RNA (1)...(19): siRNA sense strand
gacaacaugaagaaagaaa

SEQ ID NO: 70494 - RNA, 19 nt, Homo sapiens
  misc_RNA (1)...(19): siRNA sense strand
ggcagaacacaaauaaguu

SEQ ID NO: 70495 - RNA, 19 nt, Homo sapiens
  misc_RNA (1)...(19): siRNA sense strand
gaacagacaccuuuacaua

SEQ ID NO: 70496 - RNA, 19 nt, Homo sapiens
  misc_RNA (1)...(19): siRNA sense strand
gcacauagcugcacauuac

SEQ ID NO: 70497 - RNA, 19 nt, Homo sapiens
  misc_RNA (1)...(19): siRNA sense strand
gagcaaauguuaacgcaaa

SEQ ID NO: 70498 - RNA, 19 nt, Homo sapiens
  misc_RNA (1)...(19): siRNA sense strand
uaaagaagguuacuaggaa

SEQ ID NO: 70499 - RNA, 19 nt, Homo sapiens
  misc_RNA (1)...(19): siRNA sense strand
ggagcaagcuguuucuaaa

SEQ ID NO: 70500 - RNA, 19 nt, Homo sapiens
  misc_RNA (1)...(19): siRNA sense strand
gaaauuaucugcguaccuu

SEQ ID NO: 70501 - RNA, 19 nt, Homo sapiens
  misc_RNA (1)...(19): siRNA sense strand
gaaauugaacagaccauua

SEQ ID NO: 70502 - RNA, 19 nt, Homo sapiens
  misc_RNA (1)...(19): siRNA sense strand
gaacuacgccauuaacauu

SEQ ID NO: 70503 - RNA, 19 nt, Homo sapiens
  misc_RNA (1)...(19): siRNA sense strand
gaagauaaagugaauguug

SEQ ID NO: 70504 - RNA, 19 nt, Homo sapiens
  misc_RNA (1)...(19): siRNA sense strand
gaagaagaauacauugaug

SEQ ID NO: 70505 - RNA, 19 nt, Homo sapiens
  misc_RNA (1)...(19): siRNA sense strand
acagugagcugguuaagaa

SEQ ID NO: 70506 - RNA, 19 nt, Homo sapiens
  misc_RNA (1)...(19): siRNA sense strand
gcaccaaccuuaagauuac

SEQ ID NO: 70507 - RNA, 19 nt, Homo sapiens
  misc_RNA (1)...(19): siRNA sense strand
ggacagaauuagcaagaga

SEQ ID NO: 70508 - RNA, 19 nt, Homo sapiens
  misc_RNA (1)...(19): siRNA sense strand
ggaaggagccaauauuaau

SEQ ID NO: 70509 - RNA, 19 nt, Homo sapiens
  misc_RNA (1)...(19): siRNA sense strand
ccacaaugcugacguacaa

SEQ ID NO: 70510 - RNA, 19 nt, Homo sapiens
  misc_RNA (1)...(19): siRNA sense strand
caaugaauguguuuccuuu

SEQ ID NO: 70511 - RNA, 19 nt, Homo sapiens
  misc_RNA (1)...(19): siRNA sense strand
caagugaugucauguugaa

SEQ ID NO: 70512 - RNA, 19 nt, Homo sapiens
  misc_RNA (1)...(19): siRNA sense strand
gaauggcuauacuccguua

SEQ ID NO: 70513 - RNA, 19 nt, Homo sapiens
  misc_RNA (1)...(19): siRNA sense strand
ccagagcccugaaugguuu

SEQ ID NO: 70514 - RNA, 19 nt, Homo sapiens
  misc_RNA (1)...(19): siRNA sense strand
ggccaaauuuguaguguuu

SEQ ID NO: 70515 - RNA, 19 nt, Homo sapiens
  misc_RNA (1)...(19): siRNA sense strand
aaacgaaucugccgcauca

SEQ ID NO: 70516 - RNA, 19 nt, Homo sapiens
  misc_RNA (1)...(19): siRNA sense strand
cagaauggcuuuacuccuu

SEQ ID NO: 70517 - RNA, 19 nt, Homo sapiens
  misc_RNA (1)...(19): siRNA sense strand
gcauggagcugaucaggau

SEQ ID NO: 70518 - RNA, 19 nt, Homo sapiens
  misc_RNA (1)...(19): siRNA sense strand
uauaaagcguguuguauug

SEQ ID NO: 70519 - RNA, 19 nt, Homo sapiens
  misc_RNA (1)...(19): siRNA sense strand
acagacaccuuuacauauu

SEQ ID NO: 70520 - RNA, 19 nt, Homo sapiens
  misc_RNA (1)...(19): siRNA sense strand
gaauggauauuguucaucu

SEQ ID NO: 70521 - RNA, 19 nt, Homo sapiens
  misc_RNA (1)...(19): siRNA sense strand
gaaaggcuggcuuauauug

SEQ ID NO: 70522 - RNA, 19 nt, Homo sapiens
  misc_RNA (1)...(19): siRNA sense strand
ugacugagguucuugaugu

SEQ ID NO: 70523 - RNA, 19 nt, Homo sapiens
  misc_RNA (1)...(19): siRNA sense strand
caagaagucugacagcaau

SEQ ID NO: 70524 - RNA, 19 nt, Homo sapiens
  misc_RNA (1)...(19): siRNA sense strand
gaagguggcgcugcuguua

SEQ ID NO: 70525 - RNA, 19 nt, Homo sapiens
  misc_RNA (1)...(19): siRNA sense strand
caagacaccugaggaaguu

SEQ ID NO: 70526 - RNA, 19 nt, Homo sapiens
  misc_RNA (1)...(19): siRNA sense strand
ucaaaguucuuguuaagga

SEQ ID NO: 70527 - RNA, 19 nt, Homo sapiens
  misc_RNA (1)...(19): siRNA sense strand
ugacuacacugaagaugaa

SEQ ID NO: 70528 - RNA, 19 nt, Homo sapiens
  misc_RNA (1)...(19): siRNA sense strand
ggaaauaccgcucuucaca

SEQ ID NO: 70529 - RNA, 19 nt, Homo sapiens
  misc_RNA (1)...(19): siRNA sense strand
gugaaagacucgaugaaga

SEQ ID NO: 70530 - RNA, 19 nt, Homo sapiens
  misc_RNA (1)...(19): siRNA sense strand
aggaaaggcuggcuuauau

SEQ ID NO: 70531 - RNA, 19 nt, Homo sapiens
  misc_RNA (1)...(19): siRNA sense strand
gcaguggugucucguauca

SEQ ID NO: 70532 - RNA, 19 nt, Homo sapiens
  misc_RNA (1)...(19): siRNA sense strand
caacguggcucuuucuucu

SEQ ID NO: 70533 - RNA, 19 nt, Homo sapiens
  misc_RNA (1)...(19): siRNA sense strand
gagaaauggugcccuuguu

SEQ ID NO: 70534 - RNA, 19 nt, Homo sapiens
  misc_RNA (1)...(19): siRNA sense strand
gaauggcuuuacuccuuua

SEQ ID NO: 70535 - RNA, 19 nt, Homo sapiens
  misc_RNA (1)...(19): siRNA sense strand
aaauaccgcucuucacauu

SEQ ID NO: 70536 - RNA, 19 nt, Homo sapiens
  misc_RNA (1)...(19): siRNA sense strand
gucaugcacuguugaagua

SEQ ID NO: 70537 - RNA, 19 nt, Homo sapiens
  misc_RNA (1)...(19): siRNA sense strand
gaggaaaggcuggcuuaua

SEQ ID NO: 70538 - RNA, 19 nt, Homo sapiens
  misc_RNA (1)...(19): siRNA sense strand
caagcuauuugcaacuuaa

SEQ ID NO: 70539 - RNA, 19 nt, Homo sapiens
  misc_RNA (1)...(19): siRNA sense strand
ucacaaguauacagagaaa

SEQ ID NO: 70540 - RNA, 19 nt, Homo sapiens
  misc_RNA (1)...(19): siRNA sense strand
uggaacugcuggugaaaua

SEQ ID NO: 70541 - RNA, 19 nt, Homo sapiens
  misc_RNA (1)...(19): siRNA sense strand
aaacaucacuuugccgauu

SEQ ID NO: 70542 - RNA, 19 nt, Homo sapiens
  misc_RNA (1)...(19): siRNA sense strand
ggauggcuauuccaaaguu

SEQ ID NO: 70543 - RNA, 19 nt, Homo sapiens
  misc_RNA (1)...(19): siRNA sense strand
gaagacauuucuguugguu

SEQ ID NO: 70544 - RNA, 19 nt, Homo sapiens
  misc_RNA (1)...(19): siRNA sense strand
gaaauggugcccuuguuga

SEQ ID NO: 70545 - RNA, 19 nt, Homo sapiens
  misc_RNA (1)...(19): siRNA sense strand
gaauguguuuccuuuacaa

SEQ ID NO: 70546 - RNA, 19 nt, Homo sapiens
  misc_RNA (1)...(19): siRNA sense strand
ggaaagacgacaccaaauc

SEQ ID NO: 70547 - RNA, 19 nt, Homo sapiens
  misc_RNA (1)...(19): siRNA sense strand
gagacgauaugccugaaau

SEQ ID NO: 70548 - RNA, 19 nt, Homo sapiens
  misc_RNA (1)...(19): siRNA sense strand
gcgcaucagucauaguuau

SEQ ID NO: 70549 - RNA, 19 nt, Homo sapiens
  misc_RNA (1)...(19): siRNA sense strand
gcagggauguggagguguu

SEQ ID NO: 70550 - RNA, 19 nt, Homo sapiens
  misc_RNA (1)...(19): siRNA sense strand
gaagccagguugagguguu

SEQ ID NO: 70551 - RNA, 19 nt, Homo sapiens
  misc_RNA (1)...(19): siRNA sense strand
uaccuuauauggccaaauu

SEQ ID NO: 70552 - RNA, 19 nt, Homo sapiens
  misc_RNA (1)...(19): siRNA sense strand
acacagauaugguuaccuu

SEQ ID NO: 70553 - RNA, 19 nt, Homo sapiens
  misc_RNA (1)...(19): siRNA sense strand
ccaagaugauggugaauag

SEQ ID NO: 70554 - RNA, 19 nt, Homo sapiens
  misc_RNA (1)...(19): siRNA sense strand
ggagaugcaccaaccuuaa

SEQ ID NO: 70555 - RNA, 19 nt, Homo sapiens
  misc_RNA (1)...(19): siRNA sense strand
gaugucauguugaaugguu

SEQ ID NO: 70556 - RNA, 19 nt, Homo sapiens
  misc_RNA (1)...(19): siRNA sense strand
gcacugagaacuuagacaa

SEQ ID NO: 70557 - RNA, 19 nt, Homo sapiens
  misc_RNA (1)...(19): siRNA sense strand
ccaggaagauaaagugaau

SEQ ID NO: 70558 - RNA, 19 nt, Homo sapiens
  misc_RNA (1)...(19): siRNA sense strand
gcauguagcagccaaguau

SEQ ID NO: 70559 - RNA, 19 nt, Homo sapiens
  misc_RNA (1)...(19): siRNA sense strand
cagaaacagucacagaaga

SEQ ID NO: 70560 - RNA, 19 nt, Homo sapiens
  misc_RNA (1)...(19): siRNA sense strand
cugcaugacugaugauaaa

SEQ ID NO: 70561 - RNA, 19 nt, Homo sapiens
  misc_RNA (1)...(19): siRNA sense strand
gcacaaggcaccuguugau

SEQ ID NO: 70562 - RNA, 19 nt, Homo sapiens
  misc_RNA (1)...(19): siRNA sense strand
caagagaacuggauuucac

SEQ ID NO: 70563 - RNA, 19 nt, Homo sapiens
  misc_RNA (1)...(19): siRNA sense strand
gaagggaaauaccgcucuu

SEQ ID NO: 70564 - RNA, 19 nt, Homo sapiens
  misc_RNA (1)...(19): siRNA sense strand
cgagaggccuggugcauca

SEQ ID NO: 70565 - RNA, 19 nt, Homo sapiens
  misc_RNA (1)...(19): siRNA sense strand
ccaucuacguugauuguuu

SEQ ID NO: 70566 - RNA, 19 nt, Homo sapiens
  misc_RNA (1)...(19): siRNA sense strand
gaagauauuacaggaacua

SEQ ID NO: 70567 - RNA, 19 nt, Homo sapiens
  misc_RNA (1)...(19): siRNA sense strand
ccacuaccguguaaccaaa

SEQ ID NO: 70568 - RNA, 19 nt, Homo sapiens
  misc_RNA (1)...(19): siRNA sense strand
gaaggagccaauauuaaug

SEQ ID NO: 70569 - RNA, 19 nt, Homo sapiens
  misc_RNA (1)...(19): siRNA sense strand
uaaagcguguuguauugaa

SEQ ID NO: 70570 - RNA, 19 nt, Homo sapiens
  misc_RNA (1)...(19): siRNA sense strand
ggauaagacccuugaacaa

SEQ ID NO: 70571 - RNA, 19 nt, Homo sapiens
  misc_RNA (1)...(19): siRNA sense strand
uaaaagaacugggugauga

SEQ ID NO: 70572 - RNA, 19 nt, Homo sapiens
  misc_RNA (1)...(19): siRNA sense strand
uuaccuugcuucuggauaa

SEQ ID NO: 70573 - RNA, 19 nt, Homo sapiens
  misc_RNA (1)...(19): siRNA sense strand
caaggcaccuguugaugau

SEQ ID NO: 70574 - RNA, 19 nt, Homo sapiens
  misc_RNA (1)...(19): siRNA sense strand
uggcaacucuucuucuaaa

SEQ ID NO: 70575 - RNA, 19 nt, Homo sapiens
  misc_RNA (1)...(19): siRNA sense strand
gaaagacgacaccaaaucu

SEQ ID NO: 70576 - RNA, 19 nt, Homo sapiens
  misc_RNA (1)...(19): siRNA sense strand
caccaaaucugccgcacuu

SEQ ID NO: 70577 - RNA, 19 nt, Homo sapiens
  misc_RNA (1)...(19): siRNA sense strand
uggaauaucagcaggaaua

SEQ ID NO: 70578 - RNA, 19 nt, Homo sapiens
  misc_RNA (1)...(19): siRNA sense strand
agucaucucuggaauauca

SEQ ID NO: 70579 - RNA, 19 nt, Homo sapiens
  misc_RNA (1)...(19): siRNA sense strand
agacauuucuguugguuau

SEQ ID NO: 70580 - RNA, 19 nt, Homo sapiens
  misc_RNA (1)...(19): siRNA sense strand
ggauauuguucaucucaug

SEQ ID NO: 70581 - RNA, 19 nt, Homo sapiens
  misc_RNA (1)...(19): siRNA sense strand
gacguacaauccaagauga

SEQ ID NO: 70582 - RNA, 19 nt, Homo sapiens
  misc_RNA (1)...(19): siRNA sense strand
gaaaaccagccucguaaua

SEQ ID NO: 70583 - RNA, 19 nt, Homo sapiens
  misc_RNA (1)...(19): siRNA sense strand
gaggaagacauuucuguug

SEQ ID NO: 70584 - RNA, 19 nt, Homo sapiens
  misc_RNA (1)...(19): siRNA sense strand
gaaagaggagcaagcuguu

SEQ ID NO: 70585 - RNA, 19 nt, Homo sapiens
  misc_RNA (1)...(19): siRNA sense strand
caacuuaaacaucacuuug

SEQ ID NO: 70586 - RNA, 19 nt, Homo sapiens
  misc_RNA (1)...(19): siRNA sense strand
gcuauacuccguuacauau

SEQ ID NO: 70587 - RNA, 19 nt, Homo sapiens
  misc_RNA (1)...(19): siRNA sense strand
gaacugcuggugaaauaug

SEQ ID NO: 70588 - RNA, 19 nt, Homo sapiens
  misc_RNA (1)...(19): siRNA sense strand
gaaauacaaacauggugaa

SEQ ID NO: 70589 - RNA, 19 nt, Homo sapiens
  misc_RNA (1)...(19): siRNA sense strand
aaacaggacagcaaucuga

SEQ ID NO: 70590 - RNA, 19 nt, Homo sapiens
  misc_RNA (1)...(19): siRNA sense strand
gcacagagaaagaagagau

SEQ ID NO: 70591 - RNA, 19 nt, Homo sapiens
  misc_RNA (1)...(19): siRNA sense strand
ggacacaccgugguaaaga

SEQ ID NO: 70592 - RNA, 19 nt, Homo sapiens
  misc_RNA (1)...(19): siRNA sense strand
ggagcaaguucaacaggau

SEQ ID NO: 70593 - RNA, 19 nt, Homo sapiens
  misc_RNA (1)...(19): siRNA sense strand
ggaaacaugcuacagauac

SEQ ID NO: 70594 - RNA, 19 nt, Homo sapiens
  misc_RNA (1)...(19): siRNA sense strand
uacaggaacuacgccauua

SEQ ID NO: 70595 - RNA, 19 nt, Homo sapiens
  misc_RNA (1)...(19): siRNA sense strand
gaacagacaccuuuacaua

SEQ ID NO: 70596 - RNA, 19 nt, Homo sapiens
  misc_RNA (1)...(19): siRNA sense strand
gcacauagcugcacauuac

SEQ ID NO: 70597 - RNA, 19 nt, Homo sapiens
  misc_RNA (1)...(19): siRNA sense strand
gagcaaauguuaacgcaaa

SEQ ID NO: 70598 - RNA, 19 nt, Homo sapiens
  misc_RNA (1)...(19): siRNA sense strand
uaaagaagguuacuaggaa

SEQ ID NO: 70599 - RNA, 19 nt, Homo sapiens
  misc_RNA (1)...(19): siRNA sense strand
ggagcaagcuguuucuaaa

SEQ ID NO: 70600 - RNA, 19 nt, Homo sapiens
  misc_RNA (1)...(19): siRNA sense strand
gaaauuaucugcguaccuu

SEQ ID NO: 70601 - RNA, 19 nt, Homo sapiens
  misc_RNA (1)...(19): siRNA sense strand
gaaauugaacagaccauua

SEQ ID NO: 70602 - RNA, 19 nt, Homo sapiens
  misc_RNA (1)...(19): siRNA sense strand
gaacuacgccauuaacauu

SEQ ID NO: 70603 - RNA, 19 nt, Homo sapiens
  misc_RNA (1)...(19): siRNA sense strand
gaagauaaagugaauguug

SEQ ID NO: 70604 - RNA, 19 nt, Homo sapiens
  misc_RNA (1)...(19): siRNA sense strand
gaagaagaauacauugaug

SEQ ID NO: 70605 - RNA, 19 nt, Homo sapiens
  misc_RNA (1)...(19): siRNA sense strand
acagugagcugguuaagaa

SEQ ID NO: 70606 - RNA, 19 nt, Homo sapiens
  misc_RNA (1)...(19): siRNA sense strand
gcaccaaccuuaagauuac

SEQ ID NO: 70607 - RNA, 19 nt, Homo sapiens
  misc_RNA (1)...(19): siRNA sense strand
ggacagaauuagcaagaga

SEQ ID NO: 70608 - RNA, 19 nt, Homo sapiens
  misc_RNA (1)...(19): siRNA sense strand
ggaaggagccaauauuaau

SEQ ID NO: 70609 - RNA, 19 nt, Homo sapiens
  misc_RNA (1)...(19): siRNA sense strand
ccacaaugcugacguacaa

SEQ ID NO: 70610 - RNA, 19 nt, Homo sapiens
  misc_RNA (1)...(19): siRNA sense strand
caaugaauguguuuccuuu

SEQ ID NO: 70611 - RNA, 19 nt, Homo sapiens
  misc_RNA (1)...(19): siRNA sense strand
caagugaugucauguugaa

SEQ ID NO: 70612 - RNA, 19 nt, Homo sapiens
  misc_RNA (1)...(19): siRNA sense strand
gaauggcuauacuccguua

SEQ ID NO: 70613 - RNA, 19 nt, Homo sapiens
  misc_RNA (1)...(19): siRNA sense strand
ccagagcccugaaugguuu

SEQ ID NO: 70614 - RNA, 19 nt, Homo sapiens
  misc_RNA (1)...(19): siRNA sense strand
ggccaaauuuguaguguuu

SEQ ID NO: 70615 - RNA, 19 nt, Homo sapiens
  misc_RNA (1)...(19): siRNA sense strand
aaacgaaucugccgcauca

SEQ ID NO: 70616 - RNA, 19 nt, Homo sapiens
  misc_RNA (1)...(19): siRNA sense strand
cagaauggcuuuacuccuu

SEQ ID NO: 70617 - RNA, 19 nt, Homo sapiens
  misc_RNA (1)...(19): siRNA sense strand
gcauggagcugaucaggau

SEQ ID NO: 70618 - RNA, 19 nt, Homo sapiens
  misc_RNA (1)...(19): siRNA sense strand
uauaaagcguguuguauug

SEQ ID NO: 70619 - RNA, 19 nt, Homo sapiens
  misc_RNA (1)...(19): siRNA sense strand
acagacaccuuuacauauu

SEQ ID NO: 70620 - RNA, 19 nt, Homo sapiens
  misc_RNA (1)...(19): siRNA sense strand
gaauggauauuguucaucu

SEQ ID NO: 70621 - RNA, 19 nt, Homo sapiens
  misc_RNA (1)...(19): siRNA sense strand
gaaaggcuggcuuauauug

SEQ ID NO: 70622 - RNA, 19 nt, Homo sapiens
  misc_RNA (1)...(19): siRNA sense strand
ugacugagguucuugaugu

SEQ ID NO: 70623 - RNA, 19 nt, Homo sapiens
  misc_RNA (1)...(19): siRNA sense strand
caagaagucugacagcaau

SEQ ID NO: 70624 - RNA, 19 nt, Homo sapiens
  misc_RNA (1)...(19): siRNA sense strand
gaagguggcgcugcuguua

SEQ ID NO: 70625 - RNA, 19 nt, Homo sapiens
  misc_RNA (1)...(19): siRNA sense strand
caagacaccugaggaaguu

SEQ ID NO: 70626 - RNA, 19 nt, Homo sapiens
  misc_RNA (1)...(19): siRNA sense strand
ucaaaguucuuguuaagga

SEQ ID NO: 70627 - RNA, 19 nt, Homo sapiens
  misc_RNA (1)...(19): siRNA sense strand
ugacuacacugaagaugaa

SEQ ID NO: 70628 - RNA, 19 nt, Homo sapiens
  misc_RNA (1)...(19): siRNA sense strand
ggaaauaccgcucuucaca

SEQ ID NO: 70629 - RNA, 19 nt, Homo sapiens
  misc_RNA (1)...(19): siRNA sense strand
gugaaagacucgaugaaga

SEQ ID NO: 70630 - RNA, 19 nt, Homo sapiens
  misc_RNA (1)...(19): siRNA sense strand
aggaaaggcuggcuuauau

SEQ ID NO: 70631 - RNA, 19 nt, Homo sapiens
  misc_RNA (1)...(19): siRNA sense strand
gcaguggugucucguauca

SEQ ID NO: 70632 - RNA, 19 nt, Homo sapiens
  misc_RNA (1)...(19): siRNA sense strand
caacguggcucuuucuucu

SEQ ID NO: 70633 - RNA, 19 nt, Homo sapiens
  misc_RNA (1)...(19): siRNA sense strand
gagaaauggugcccuuguu

SEQ ID NO: 70634 - RNA, 19 nt, Homo sapiens
  misc_RNA (1)...(19): siRNA sense strand
gaauggcuuuacuccuuua

SEQ ID NO: 70635 - RNA, 19 nt, Homo sapiens
  misc_RNA (1)...(19): siRNA sense strand
aaauaccgcucuucacauu

SEQ ID NO: 70636 - RNA, 19 nt, Homo sapiens
  misc_RNA (1)...(19): siRNA sense strand
gucaugcacuguugaagua

SEQ ID NO: 70637 - RNA, 19 nt, Homo sapiens
  misc_RNA (1)...(19): siRNA sense strand
gaggaaaggcuggcuuaua

SEQ ID NO: 70638 - RNA, 19 nt, Homo sapiens
  misc_RNA (1)...(19): siRNA sense strand
caagcuauuugcaacuuaa

SEQ ID NO: 70639 - RNA, 19 nt, Homo sapiens
  misc_RNA (1)...(19): siRNA sense strand
ucacaaguauacagagaaa

SEQ ID NO: 70640 - RNA, 19 nt, Homo sapiens
  misc_RNA (1)...(19): siRNA sense strand
uggaacugcuggugaaaua

SEQ ID NO: 70641 - RNA, 19 nt, Homo sapiens
  misc_RNA (1)...(19): siRNA sense strand
aaacaucacuuugccgauu

SEQ ID NO: 70642 - RNA, 19 nt, Homo sapiens
  misc_RNA (1)...(19): siRNA sense strand
ggauggcuauuccaaaguu

SEQ ID NO: 70643 - RNA, 19 nt, Homo sapiens
  misc_RNA (1)...(19): siRNA sense strand
gaagacauuucuguugguu

SEQ ID NO: 70644 - RNA, 19 nt, Homo sapiens
  misc_RNA (1)...(19): siRNA sense strand
gaaauggugcccuuguuga

SEQ ID NO: 70645 - RNA, 19 nt, Homo sapiens
  misc_RNA (1)...(19): siRNA sense strand
gaauguguuuccuuuacaa

SEQ ID NO: 70646 - RNA, 19 nt, Homo sapiens
  misc_RNA (1)...(19): siRNA sense strand
ggaaagacgacaccaaauc

SEQ ID NO: 70647 - RNA, 19 nt, Homo sapiens
  misc_RNA (1)...(19): siRNA sense strand
gagacgauaugccugaaau

SEQ ID NO: 70648 - RNA, 19 nt, Homo sapiens
  misc_RNA (1)...(19): siRNA sense strand
gcgcaucagucauaguuau

SEQ ID NO: 70649 - RNA, 19 nt, Homo sapiens
  misc_RNA (1)...(19): siRNA sense strand
gcagggauguggagguguu

SEQ ID NO: 70650 - RNA, 19 nt, Homo sapiens
  misc_RNA (1)...(19): siRNA sense strand
gaagccagguugagguguu

SEQ ID NO: 70651 - RNA, 19 nt, Homo sapiens
  misc_RNA (1)...(19): siRNA sense strand
uaccuuauauggccaaauu

SEQ ID NO: 70652 - RNA, 19 nt, Homo sapiens
  misc_RNA (1)...(19): siRNA sense strand
acacagauaugguuaccuu

SEQ ID NO: 70653 - RNA, 19 nt, Homo sapiens
  misc_RNA (1)...(19): siRNA sense strand
ccaagaugauggugaauag

SEQ ID NO: 70654 - RNA, 19 nt, Homo sapiens
  misc_RNA (1)...(19): siRNA sense strand
ggagaugcaccaaccuuaa

SEQ ID NO: 70655 - RNA, 19 nt, Homo sapiens
  misc_RNA (1)...(19): siRNA sense strand
gaugucauguugaaugguu

SEQ ID NO: 70656 - RNA, 19 nt, Homo sapiens
  misc_RNA (1)...(19): siRNA sense strand
gcacugagaacuuagacaa

SEQ ID NO: 70657 - RNA, 19 nt, Homo sapiens
  misc_RNA (1)...(19): siRNA sense strand
ccaggaagauaaagugaau

SEQ ID NO: 70658 - RNA, 19 nt, Homo sapiens
  misc_RNA (1)...(19): siRNA sense strand
gcauguagcagccaaguau

SEQ ID NO: 70659 - RNA, 19 nt, Homo sapiens
  misc_RNA (1)...(19): siRNA sense strand
cagaaacagucacagaaga

SEQ ID NO: 70660 - RNA, 19 nt, Homo sapiens
  misc_RNA (1)...(19): siRNA sense strand
cugcaugacugaugauaaa

SEQ ID NO: 70661 - RNA, 19 nt, Homo sapiens
  misc_RNA (1)...(19): siRNA sense strand
gcacaaggcaccuguugau

SEQ ID NO: 70662 - RNA, 19 nt, Homo sapiens
  misc_RNA (1)...(19): siRNA sense strand
caagagaacuggauuucac

SEQ ID NO: 70663 - RNA, 19 nt, Homo sapiens
  misc_RNA (1)...(19): siRNA sense strand
gaagggaaauaccgcucuu

SEQ ID NO: 70664 - RNA, 19 nt, Homo sapiens
  misc_RNA (1)...(19): siRNA sense strand
cgagaggccuggugcauca

SEQ ID NO: 70665 - RNA, 19 nt, Homo sapiens
  misc_RNA (1)...(19): siRNA sense strand
ccaucuacguugauuguuu

SEQ ID NO: 70666 - RNA, 19 nt, Homo sapiens
  misc_RNA (1)...(19): siRNA sense strand
gaagauauuacaggaacua

SEQ ID NO: 70667 - RNA, 19 nt, Homo sapiens
  misc_RNA (1)...(19): siRNA sense strand
ccacuaccguguaaccaaa

SEQ ID NO: 70668 - RNA, 19 nt, Homo sapiens
  misc_RNA (1)...(19): siRNA sense strand
gaaggagccaauauuaaug

SEQ ID NO: 70669 - RNA, 19 nt, Homo sapiens
  misc_RNA (1)...(19): siRNA sense strand
uaaagcguguuguauugaa

SEQ ID NO: 70670 - RNA, 19 nt, Homo sapiens
  misc_RNA (1)...(19): siRNA sense strand
ggauaagacccuugaacaa

SEQ ID NO: 70671 - RNA, 19 nt, Homo sapiens
  misc_RNA (1)...(19): siRNA sense strand
uaaaagaacugggugauga

SEQ ID NO: 70672 - RNA, 19 nt, Homo sapiens
  misc_RNA (1)...(19): siRNA sense strand
uuaccuugcuucuggauaa

SEQ ID NO: 70673 - RNA, 19 nt, Homo sapiens
  misc_RNA (1)...(19): siRNA sense strand
caaggcaccuguugaugau

SEQ ID NO: 70674 - RNA, 19 nt, Homo sapiens
  misc_RNA (1)...(19): siRNA sense strand
uggcaacucuucuucuaaa

SEQ ID NO: 70675 - RNA, 19 nt, Homo sapiens
  misc_RNA (1)...(19): siRNA sense strand
gaaagacgacaccaaaucu

SEQ ID NO: 70676 - RNA, 19 nt, Homo sapiens
  misc_RNA (1)...(19): siRNA sense strand
caccaaaucugccgcacuu

SEQ ID NO: 70677 - RNA, 19 nt, Homo sapiens
  misc_RNA (1)...(19): siRNA sense strand
uggaauaucagcaggaaua

SEQ ID NO: 70678 - RNA, 19 nt, Homo sapiens
  misc_RNA (1)...(19): siRNA sense strand
agucaucucuggaauauca

SEQ ID NO: 70679 - RNA, 19 nt, Homo sapiens
  misc_RNA (1)...(19): siRNA sense strand
agacauuucuguugguuau

SEQ ID NO: 70680 - RNA, 19 nt, Homo sapiens
  misc_RNA (1)...(19): siRNA sense strand
ggauauuguucaucucaug

SEQ ID NO: 70681 - RNA, 19 nt, Homo sapiens
  misc_RNA (1)...(19): siRNA sense strand
gacguacaauccaagauga

SEQ ID NO: 70682 - RNA, 19 nt, Homo sapiens
  misc_RNA (1)...(19): siRNA sense strand
gaaaaccagccucguaaua

SEQ ID NO: 70683 - RNA, 19 nt, Homo sapiens
  misc_RNA (1)...(19): siRNA sense strand
gaggaagacauuucuguug

SEQ ID NO: 70684 - RNA, 19 nt, Homo sapiens
  misc_RNA (1)...(19): siRNA sense strand
gaaagaggagcaagcuguu

SEQ ID NO: 70685 - RNA, 19 nt, Homo sapiens
  misc_RNA (1)...(19): siRNA sense strand
caacuuaaacaucacuuug

SEQ ID NO: 70686 - RNA, 19 nt, Homo sapiens
  misc_RNA (1)...(19): siRNA sense strand
gcuauacuccguuacauau

SEQ ID NO: 70687 - RNA, 19 nt, Homo sapiens
  misc_RNA (1)...(19): siRNA sense strand
gaacugcuggugaaauaug

SEQ ID NO: 70688 - RNA, 19 nt, Homo sapiens
  misc_RNA (1)...(19): siRNA sense strand
gaaauacaaacauggugaa

SEQ ID NO: 70689 - RNA, 19 nt, Homo sapiens
  misc_RNA (1)...(19): siRNA sense strand
aaacaggacagcaaucuga

SEQ ID NO: 70690 - RNA, 19 nt, Homo sapiens
  misc_RNA (1)...(19): siRNA sense strand
gcacagagaaagaagagau

SEQ ID NO: 70691 - RNA, 19 nt, Homo sapiens
  misc_RNA (1)...(19): siRNA sense strand
ggacacaccgugguaaaga

SEQ ID NO: 70692 - RNA, 19 nt, Homo sapiens
  misc_RNA (1)...(19): siRNA sense strand
ggagcaaguucaacaggau

SEQ ID NO: 70693 - RNA, 19 nt, Homo sapiens
  misc_RNA (1)...(19): siRNA sense strand
ggaaacaugcuacagauac

SEQ ID NO: 70694 - RNA, 19 nt, Homo sapiens
  misc_RNA (1)...(19): siRNA sense strand
uacaggaacuacgccauua

SEQ ID NO: 70695 - RNA, 19 nt, Homo sapiens
  misc_RNA (1)...(19): siRNA sense strand
gaagaaaccagcaagcuua

SEQ ID NO: 70696 - RNA, 19 nt, Homo sapiens
  misc_RNA (1)...(19): siRNA sense strand
ucagaaaucucuagaagaa

SEQ ID NO: 70697 - RNA, 19 nt, Homo sapiens
  misc_RNA (1)...(19): siRNA sense strand
gagauuccauuaccucaua

SEQ ID NO: 70698 - RNA, 19 nt, Homo sapiens
  misc_RNA (1)...(19): siRNA sense strand
gaacaacuccuuugacguu

SEQ ID NO: 70699 - RNA, 19 nt, Homo sapiens
  misc_RNA (1)...(19): siRNA sense strand
aagcguaucugcaggauua

SEQ ID NO: 70700 - RNA, 19 nt, Homo sapiens
  misc_RNA (1)...(19): siRNA sense strand
ggaaggagcaucaguuuga

SEQ ID NO: 70701 - RNA, 19 nt, Homo sapiens
  misc_RNA (1)...(19): siRNA sense strand
uaacuucggucuugacaaa

SEQ ID NO: 70702 - RNA, 19 nt, Homo sapiens
  misc_RNA (1)...(19): siRNA sense strand
aggagaagcuggcaaauuu

SEQ ID NO: 70703 - RNA, 19 nt, Homo sapiens
  misc_RNA (1)...(19): siRNA sense strand
gaaaccagcaagcuuauaa

SEQ ID NO: 70704 - RNA, 19 nt, Homo sapiens
  misc_RNA (1)...(19): siRNA sense strand
cagauucucuuagacauua

SEQ ID NO: 70705 - RNA, 19 nt, Homo sapiens
  misc_RNA (1)...(19): siRNA sense strand
gcaaagauauugagguucu

SEQ ID NO: 70706 - RNA, 19 nt, Homo sapiens
  misc_RNA (1)...(19): siRNA sense strand
cgucuucucuguagcauua

SEQ ID NO: 70707 - RNA, 19 nt, Homo sapiens
  misc_RNA (1)...(19): siRNA sense strand
gcagugguuucccggauua

SEQ ID NO: 70708 - RNA, 19 nt, Homo sapiens
  misc_RNA (1)...(19): siRNA sense strand
ggagagggauuagccagua

SEQ ID NO: 70709 - RNA, 19 nt, Homo sapiens
  misc_RNA (1)...(19): siRNA sense strand
ccagcaagcuuauaauaga

SEQ ID NO: 70710 - RNA, 19 nt, Homo sapiens
  misc_RNA (1)...(19): siRNA sense strand
gaaauuccauaaaccaauc

SEQ ID NO: 70711 - RNA, 19 nt, Homo sapiens
  misc_RNA (1)...(19): siRNA sense strand
ucucagagcuucauguuau

SEQ ID NO: 70712 - RNA, 19 nt, Homo sapiens
  misc_RNA (1)...(19): siRNA sense strand
ggacaaaacuuuagagcaa

SEQ ID NO: 70713 - RNA, 19 nt, Homo sapiens
  misc_RNA (1)...(19): siRNA sense strand
gcuagaaggaccaauauuu

SEQ ID NO: 70714 - RNA, 19 nt, Homo sapiens
  misc_RNA (1)...(19): siRNA sense strand
gcagacaccuuagacaaug

SEQ ID NO: 70715 - RNA, 19 nt, Homo sapiens
  misc_RNA (1)...(19): siRNA sense strand
gcaagaagcaaagauauug

SEQ ID NO: 70716 - RNA, 19 nt, Homo sapiens
  misc_RNA (1)...(19): siRNA sense strand
cacaggaccuuaaggaauu

SEQ ID NO: 70717 - RNA, 19 nt, Homo sapiens
  misc_RNA (1)...(19): siRNA sense strand
ccacgcaacuguacagaga

SEQ ID NO: 70718 - RNA, 19 nt, Homo sapiens
  misc_RNA (1)...(19): siRNA sense strand
ggaccaauauuugauuaug

SEQ ID NO: 70719 - RNA, 19 nt, Homo sapiens
  misc_RNA (1)...(19): siRNA sense strand
ggacuuaguuggacagaac

SEQ ID NO: 70720 - RNA, 19 nt, Homo sapiens
  misc_RNA (1)...(19): siRNA sense strand
gaacagaagcuccuaugca

SEQ ID NO: 70721 - RNA, 19 nt, Homo sapiens
  misc_RNA (1)...(19): siRNA sense strand
gaaccagcaucaccacuag

SEQ ID NO: 70722 - RNA, 19 nt, Homo sapiens
  misc_RNA (1)...(19): siRNA sense strand
gcaggauuaucacgaaaga

SEQ ID NO: 70723 - RNA, 19 nt, Homo sapiens
  misc_RNA (1)...(19): siRNA sense strand
gaaccaagaagacggaaau

SEQ ID NO: 70724 - RNA, 19 nt, Homo sapiens
  misc_RNA (1)...(19): siRNA sense strand
ugacagcccugaccagugu

SEQ ID NO: 70725 - RNA, 19 nt, Homo sapiens
  misc_RNA (1)...(19): siRNA sense strand
aagcaaagauauugagguu

SEQ ID NO: 70726 - RNA, 19 nt, Homo sapiens
  misc_RNA (1)...(19): siRNA sense strand
aaagauccuuggaaacaaa

SEQ ID NO: 70727 - RNA, 19 nt, Homo sapiens
  misc_RNA (1)...(19): siRNA sense strand
gacaucaaguggaaaccua

SEQ ID NO: 70728 - RNA, 19 nt, Homo sapiens
  misc_RNA (1)...(19): siRNA sense strand
gaaggaccaauauuugauu

SEQ ID NO: 70729 - RNA, 19 nt, Homo sapiens
  misc_RNA (1)...(19): siRNA sense strand
caacugaugccuuaacuuc

SEQ ID NO: 70730 - RNA, 19 nt, Homo sapiens
  misc_RNA (1)...(19): siRNA sense strand
ugccacaacugaugccuua

SEQ ID NO: 70731 - RNA, 19 nt, Homo sapiens
  misc_RNA (1)...(19): siRNA sense strand
caugacagaugacaaagug

SEQ ID NO: 70732 - RNA, 19 nt, Homo sapiens
  misc_RNA (1)...(19): siRNA sense strand
ggacacagacaaauaucuu

SEQ ID NO: 70733 - RNA, 19 nt, Homo sapiens
  misc_RNA (1)...(19): siRNA sense strand
agaaaucacuccagaagca

SEQ ID NO: 70734 - RNA, 19 nt, Homo sapiens
  misc_RNA (1)...(19): siRNA sense strand
guacagagaauugauaugu

SEQ ID NO: 70735 - RNA, 19 nt, Homo sapiens
  misc_RNA (1)...(19): siRNA sense strand
gcacgggacagcaugauga

SEQ ID NO: 70736 - RNA, 19 nt, Homo sapiens
  misc_RNA (1)...(19): siRNA sense strand
uaucagaaaucucuagaag

SEQ ID NO: 70737 - RNA, 19 nt, Homo sapiens
  misc_RNA (1)...(19): siRNA sense strand
caucaccacuagcagcaua

SEQ ID NO: 70738 - RNA, 19 nt, Homo sapiens
  misc_RNA (1)...(19): siRNA sense strand
caaaggagaagcuggcaaa

SEQ ID NO: 70739 - RNA, 19 nt, Homo sapiens
  misc_RNA (1)...(19): siRNA sense strand
gagaagguguauccaaugg

SEQ ID NO: 70740 - RNA, 19 nt, Homo sapiens
  misc_RNA (1)...(19): siRNA sense strand
ggaagucgcaagaagcaaa

SEQ ID NO: 70741 - RNA, 19 nt, Homo sapiens
  misc_RNA (1)...(19): siRNA sense strand
caaugucaaucuuguuuca

SEQ ID NO: 70742 - RNA, 19 nt, Homo sapiens
  misc_RNA (1)...(19): siRNA sense strand
caacuccuuugacguuuau

SEQ ID NO: 70743 - RNA, 19 nt, Homo sapiens
  misc_RNA (1)...(19): siRNA sense strand
ggauuaagcaggaaagcaa

SEQ ID NO: 70744 - RNA, 19 nt, Homo sapiens
  misc_RNA (1)...(19): siRNA sense strand
gagaagcuggcaaauuuga

SEQ ID NO: 70745 - RNA, 19 nt, Homo sapiens
  misc_RNA (1)...(19): siRNA sense strand
gaaucuuccuugcgauguu

SEQ ID NO: 70746 - RNA, 19 nt, Homo sapiens
  misc_RNA (1)...(19): siRNA sense strand
cgaaucaccugccguuugg

SEQ ID NO: 70747 - RNA, 19 nt, Homo sapiens
  misc_RNA (1)...(19): siRNA sense strand
cagcaagcuuauaauagaa

SEQ ID NO: 70748 - RNA, 19 nt, Homo sapiens
  misc_RNA (1)...(19): siRNA sense strand
aggaaacucugaaaccaaa

SEQ ID NO: 70749 - RNA, 19 nt, Homo sapiens
  misc_RNA (1)...(19): siRNA sense strand
caaggaaacucugaaacca

SEQ ID NO: 70750 - RNA, 19 nt, Homo sapiens
  misc_RNA (1)...(19): siRNA sense strand
gaagacaucacaggaacaa

SEQ ID NO: 70751 - RNA, 19 nt, Homo sapiens
  misc_RNA (1)...(19): siRNA sense strand
gggacagcaugaugauuga

SEQ ID NO: 70752 - RNA, 19 nt, Homo sapiens
  misc_RNA (1)...(19): siRNA sense strand
aaugagacaucaaguggaa

SEQ ID NO: 70753 - RNA, 19 nt, Homo sapiens
  misc_RNA (1)...(19): siRNA sense strand
acagagaauugauaugugu

SEQ ID NO: 70754 - RNA, 19 nt, Homo sapiens
  misc_RNA (1)...(19): siRNA sense strand
gcaggaaagcaaccagauu

SEQ ID NO: 70755 - RNA, 19 nt, Homo sapiens
  misc_RNA (1)...(19): siRNA sense strand
uggcauggaugaagaacuu

SEQ ID NO: 70756 - RNA, 19 nt, Homo sapiens
  misc_RNA (1)...(19): siRNA sense strand
ugauucagauucucuuaga

SEQ ID NO: 70757 - RNA, 19 nt, Homo sapiens
  misc_RNA (1)...(19): siRNA sense strand
gcaagcuuauaauagaaga

SEQ ID NO: 70758 - RNA, 19 nt, Homo sapiens
  misc_RNA (1)...(19): siRNA sense strand
ucgaauagauauagugaca

SEQ ID NO: 70759 - RNA, 19 nt, Homo sapiens
  misc_RNA (1)...(19): siRNA sense strand
gaauugauauguguuccau

SEQ ID NO: 70760 - RNA, 19 nt, Homo sapiens
  misc_RNA (1)...(19): siRNA sense strand
cauaaaccaaucacaauga

SEQ ID NO: 70761 - RNA, 19 nt, Homo sapiens
  misc_RNA (1)...(19): siRNA sense strand
ugauagcccagaagaguua

SEQ ID NO: 70762 - RNA, 19 nt, Homo sapiens
  misc_RNA (1)...(19): siRNA sense strand
cauucuggguuucugguua

SEQ ID NO: 70763 - RNA, 19 nt, Homo sapiens
  misc_RNA (1)...(19): siRNA sense strand
gaucuggucauguugaaga

SEQ ID NO: 70764 - RNA, 19 nt, Homo sapiens
  misc_RNA (1)...(19): siRNA sense strand
aaacagaguaccaaggaaa

SEQ ID NO: 70765 - RNA, 19 nt, Homo sapiens
  misc_RNA (1)...(19): siRNA sense strand
gcaacuguacagagaauug

SEQ ID NO: 70766 - RNA, 19 nt, Homo sapiens
  misc_RNA (1)...(19): siRNA sense strand
acaacuccuuugacguuua

SEQ ID NO: 70767 - RNA, 19 nt, Homo sapiens
  misc_RNA (1)...(19): siRNA sense strand
agaaagaaauccggcaugu

SEQ ID NO: 70768 - RNA, 19 nt, Homo sapiens
  misc_RNA (1)...(19): siRNA sense strand
ccaaaaugauguaggaaaa

SEQ ID NO: 70769 - RNA, 19 nt, Homo sapiens
  misc_RNA (1)...(19): siRNA sense strand
uccauuaccucauaucuca

SEQ ID NO: 70770 - RNA, 19 nt, Homo sapiens
  misc_RNA (1)...(19): siRNA sense strand
gcucaagcucgaagaguaa

SEQ ID NO: 70771 - RNA, 19 nt, Homo sapiens
  misc_RNA (1)...(19): siRNA sense strand
cuagaaggaccaauauuug

SEQ ID NO: 70772 - RNA, 19 nt, Homo sapiens
  misc_RNA (1)...(19): siRNA sense strand
ggaggacagcaacuuguuu

SEQ ID NO: 70773 - RNA, 19 nt, Homo sapiens
  misc_RNA (1)...(19): siRNA sense strand
ugaaugaucccguagaauc

SEQ ID NO: 70774 - RNA, 19 nt, Homo sapiens
  misc_RNA (1)...(19): siRNA sense strand
aaagagagagaacucauug

SEQ ID NO: 70775 - RNA, 19 nt, Homo sapiens
  misc_RNA (1)...(19): siRNA sense strand
gaaagaaccaaagacaaca

SEQ ID NO: 70776 - RNA, 19 nt, Homo sapiens
  misc_RNA (1)...(19): siRNA sense strand
ccacaggaccuuaaggaau

SEQ ID NO: 70777 - RNA, 19 nt, Homo sapiens
  misc_RNA (1)...(19): siRNA sense strand
uuaauggcauggaugaaga

SEQ ID NO: 70778 - RNA, 19 nt, Homo sapiens
  misc_RNA (1)...(19): siRNA sense strand
uagaaggaccaauauuuga

SEQ ID NO: 70779 - RNA, 19 nt, Homo sapiens
  misc_RNA (1)...(19): siRNA sense strand
caggaaagcaaccagauug

SEQ ID NO: 70780 - RNA, 19 nt, Homo sapiens
  misc_RNA (1)...(19): siRNA sense strand
guggaaaucccucacuuug

SEQ ID NO: 70781 - RNA, 19 nt, Homo sapiens
  misc_RNA (1)...(19): siRNA sense strand
agaaaucucuagaagaaac

SEQ ID NO: 70782 - RNA, 19 nt, Homo sapiens
  misc_RNA (1)...(19): siRNA sense strand
guuacuagaucgacuggau

SEQ ID NO: 70783 - RNA, 19 nt, Homo sapiens
  misc_RNA (1)...(19): siRNA sense strand
gaccaauauuugauuaugg

SEQ ID NO: 70784 - RNA, 19 nt, Homo sapiens
  misc_RNA (1)...(19): siRNA sense strand
gcgguuugcaacuuaaaua

SEQ ID NO: 70785 - RNA, 19 nt, Homo sapiens
  misc_RNA (1)...(19): siRNA sense strand
ggagaagguguauccaaug

SEQ ID NO: 70786 - RNA, 19 nt, Homo sapiens
  misc_RNA (1)...(19): siRNA sense strand
ggauuaucacgaaagauuu

SEQ ID NO: 70787 - RNA, 19 nt, Homo sapiens
  misc_RNA (1)...(19): siRNA sense strand
gguggaaggagagggauua

SEQ ID NO: 70788 - RNA, 19 nt, Homo sapiens
  misc_RNA (1)...(19): siRNA sense strand
aaagaagagccacucguaa

SEQ ID NO: 70789 - RNA, 19 nt, Homo sapiens
  misc_RNA (1)...(19): siRNA sense strand
gaaaacagaguaccaagga

SEQ ID NO: 70790 - RNA, 19 nt, Homo sapiens
  misc_RNA (1)...(19): siRNA sense strand
aaugaaugaucccguagaa

SEQ ID NO: 70791 - RNA, 19 nt, Homo sapiens
  misc_RNA (1)...(19): siRNA sense strand
agacugccaucaaguuuua

SEQ ID NO: 70792 - RNA, 19 nt, Homo sapiens
  misc_RNA (1)...(19): siRNA sense strand
ccaaagagcagcaucuaac

SEQ ID NO: 70793 - RNA, 19 nt, Homo sapiens
  misc_RNA (1)...(19): siRNA sense strand
gaacuggcaagggaacuga

SEQ ID NO: 70794 - RNA, 19 nt, Homo sapiens
  misc_RNA (1)...(19): siRNA sense strand
caagaagcaaagauauuga

SEQ ID NO: 70795 - RNA, 19 nt, Homo sapiens
  misc_RNA (1)...(19): siRNA sense strand
gaagaaaccagcaagcuua

SEQ ID NO: 70796 - RNA, 19 nt, Homo sapiens
  misc_RNA (1)...(19): siRNA sense strand
ucagaaaucucuagaagaa

SEQ ID NO: 70797 - RNA, 19 nt, Homo sapiens
  misc_RNA (1)...(19): siRNA sense strand
gagauuccauuaccucaua

SEQ ID NO: 70798 - RNA, 19 nt, Homo sapiens
  misc_RNA (1)...(19): siRNA sense strand
gaacaacuccuuugacguu

SEQ ID NO: 70799 - RNA, 19 nt, Homo sapiens
  misc_RNA (1)...(19): siRNA sense strand
aagcguaucugcaggauua

SEQ ID NO: 70800 - RNA, 19 nt, Homo sapiens
  misc_RNA (1)...(19): siRNA sense strand
ggaaggagcaucaguuuga

SEQ ID NO: 70801 - RNA, 19 nt, Homo sapiens
  misc_RNA (1)...(19): siRNA sense strand
uaacuucggucuugacaaa

SEQ ID NO: 70802 - RNA, 19 nt, Homo sapiens
  misc_RNA (1)...(19): siRNA sense strand
aggagaagcuggcaaauuu

SEQ ID NO: 70803 - RNA, 19 nt, Homo sapiens
  misc_RNA (1)...(19): siRNA sense strand
gaaaccagcaagcuuauaa

SEQ ID NO: 70804 - RNA, 19 nt, Homo sapiens
  misc_RNA (1)...(19): siRNA sense strand
cagauucucuuagacauua

SEQ ID NO: 70805 - RNA, 19 nt, Homo sapiens
  misc_RNA (1)...(19): siRNA sense strand
gcaaagauauugagguucu

SEQ ID NO: 70806 - RNA, 19 nt, Homo sapiens
  misc_RNA (1)...(19): siRNA sense strand
cgucuucucuguagcauua

SEQ ID NO: 70807 - RNA, 19 nt, Homo sapiens
  misc_RNA (1)...(19): siRNA sense strand
gcagugguuucccggauua

SEQ ID NO: 70808 - RNA, 19 nt, Homo sapiens
  misc_RNA (1)...(19): siRNA sense strand
ggagagggauuagccagua

SEQ ID NO: 70809 - RNA, 19 nt, Homo sapiens
  misc_RNA (1)...(19): siRNA sense strand
ccagcaagcuuauaauaga

SEQ ID NO: 70810 - RNA, 19 nt, Homo sapiens
  misc_RNA (1)...(19): siRNA sense strand
gaaauuccauaaaccaauc

SEQ ID NO: 70811 - RNA, 19 nt, Homo sapiens
  misc_RNA (1)...(19): siRNA sense strand
ucucagagcuucauguuau

SEQ ID NO: 70812 - RNA, 19 nt, Homo sapiens
  misc_RNA (1)...(19): siRNA sense strand
ggacaaaacuuuagagcaa

SEQ ID NO: 70813 - RNA, 19 nt, Homo sapiens
  misc_RNA (1)...(19): siRNA sense strand
gcuagaaggaccaauauuu

SEQ ID NO: 70814 - RNA, 19 nt, Homo sapiens
  misc_RNA (1)...(19): siRNA sense strand
gcagacaccuuagacaaug

SEQ ID NO: 70815 - RNA, 19 nt, Homo sapiens
  misc_RNA (1)...(19): siRNA sense strand
gcaagaagcaaagauauug

SEQ ID NO: 70816 - RNA, 19 nt, Homo sapiens
  misc_RNA (1)...(19): siRNA sense strand
cacaggaccuuaaggaauu

SEQ ID NO: 70817 - RNA, 19 nt, Homo sapiens
  misc_RNA (1)...(19): siRNA sense strand
ccacgcaacuguacagaga

SEQ ID NO: 70818 - RNA, 19 nt, Homo sapiens
  misc_RNA (1)...(19): siRNA sense strand
ggaccaauauuugauuaug

SEQ ID NO: 70819 - RNA, 19 nt, Homo sapiens
  misc_RNA (1)...(19): siRNA sense strand
ggacuuaguuggacagaac

SEQ ID NO: 70820 - RNA, 19 nt, Homo sapiens
  misc_RNA (1)...(19): siRNA sense strand
gaacagaagcuccuaugca

SEQ ID NO: 70821 - RNA, 19 nt, Homo sapiens
  misc_RNA (1)...(19): siRNA sense strand
gaaccagcaucaccacuag

SEQ ID NO: 70822 - RNA, 19 nt, Homo sapiens
  misc_RNA (1)...(19): siRNA sense strand
gcaggauuaucacgaaaga

SEQ ID NO: 70823 - RNA, 19 nt, Homo sapiens
  misc_RNA (1)...(19): siRNA sense strand
gaaccaagaagacggaaau

SEQ ID NO: 70824 - RNA, 19 nt, Homo sapiens
  misc_RNA (1)...(19): siRNA sense strand
ugacagcccugaccagugu

SEQ ID NO: 70825 - RNA, 19 nt, Homo sapiens
  misc_RNA (1)...(19): siRNA sense strand
aagcaaagauauugagguu

SEQ ID NO: 70826 - RNA, 19 nt, Homo sapiens
  misc_RNA (1)...(19): siRNA sense strand
aaagauccuuggaaacaaa

SEQ ID NO: 70827 - RNA, 19 nt, Homo sapiens
  misc_RNA (1)...(19): siRNA sense strand
gacaucaaguggaaaccua

SEQ ID NO: 70828 - RNA, 19 nt, Homo sapiens
  misc_RNA (1)...(19): siRNA sense strand
gaaggaccaauauuugauu

SEQ ID NO: 70829 - RNA, 19 nt, Homo sapiens
  misc_RNA (1)...(19): siRNA sense strand
caacugaugccuuaacuuc

SEQ ID NO: 70830 - RNA, 19 nt, Homo sapiens
  misc_RNA (1)...(19): siRNA sense strand
ugccacaacugaugccuua

SEQ ID NO: 70831 - RNA, 19 nt, Homo sapiens
  misc_RNA (1)...(19): siRNA sense strand
caugacagaugacaaagug

SEQ ID NO: 70832 - RNA, 19 nt, Homo sapiens
  misc_RNA (1)...(19): siRNA sense strand
ggacacagacaaauaucuu

SEQ ID NO: 70833 - RNA, 19 nt, Homo sapiens
  misc_RNA (1)...(19): siRNA sense strand
agaaaucacuccagaagca

SEQ ID NO: 70834 - RNA, 19 nt, Homo sapiens
  misc_RNA (1)...(19): siRNA sense strand
guacagagaauugauaugu

SEQ ID NO: 70835 - RNA, 19 nt, Homo sapiens
  misc_RNA (1)...(19): siRNA sense strand
gcacgggacagcaugauga

SEQ ID NO: 70836 - RNA, 19 nt, Homo sapiens
  misc_RNA (1)...(19): siRNA sense strand
uaucagaaaucucuagaag

SEQ ID NO: 70837 - RNA, 19 nt, Homo sapiens
  misc_RNA (1)...(19): siRNA sense strand
caucaccacuagcagcaua

SEQ ID NO: 70838 - RNA, 19 nt, Homo sapiens
  misc_RNA (1)...(19): siRNA sense strand
caaaggagaagcuggcaaa

SEQ ID NO: 70839 - RNA, 19 nt, Homo sapiens
  misc_RNA (1)...(19): siRNA sense strand
gagaagguguauccaaugg

SEQ ID NO: 70840 - RNA, 19 nt, Homo sapiens
  misc_RNA (1)...(19): siRNA sense strand
ggaagucgcaagaagcaaa

SEQ ID NO: 70841 - RNA, 19 nt, Homo sapiens
  misc_RNA (1)...(19): siRNA sense strand
caaugucaaucuuguuuca

SEQ ID NO: 70842 - RNA, 19 nt, Homo sapiens
  misc_RNA (1)...(19): siRNA sense strand
caacuccuuugacguuuau

SEQ ID NO: 70843 - RNA, 19 nt, Homo sapiens
  misc_RNA (1)...(19): siRNA sense strand
ggauuaagcaggaaagcaa

SEQ ID NO: 70844 - RNA, 19 nt, Homo sapiens
  misc_RNA (1)...(19): siRNA sense strand
gagaagcuggcaaauuuga

SEQ ID NO: 70845 - RNA, 19 nt, Homo sapiens
  misc_RNA (1)...(19): siRNA sense strand
gaaucuuccuugcgauguu

SEQ ID NO: 70846 - RNA, 19 nt, Homo sapiens
  misc_RNA (1)...(19): siRNA sense strand
cgaaucaccugccguuugg

SEQ ID NO: 70847 - RNA, 19 nt, Homo sapiens
  misc_RNA (1)...(19): siRNA sense strand
cagcaagcuuauaauagaa

SEQ ID NO: 70848 - RNA, 19 nt, Homo sapiens
  misc_RNA (1)...(19): siRNA sense strand
aggaaacucugaaaccaaa

SEQ ID NO: 70849 - RNA, 19 nt, Homo sapiens
  misc_RNA (1)...(19): siRNA sense strand
caaggaaacucugaaacca

SEQ ID NO: 70850 - RNA, 19 nt, Homo sapiens
  misc_RNA (1)...(19): siRNA sense strand
gaagacaucacaggaacaa

SEQ ID NO: 70851 - RNA, 19 nt, Homo sapiens
  misc_RNA (1)...(19): siRNA sense strand
gggacagcaugaugauuga

SEQ ID NO: 70852 - RNA, 19 nt, Homo sapiens
  misc_RNA (1)...(19): siRNA sense strand
aaugagacaucaaguggaa

SEQ ID NO: 70853 - RNA, 19 nt, Homo sapiens
  misc_RNA (1)...(19): siRNA sense strand
acagagaauugauaugugu

SEQ ID NO: 70854 - RNA, 19 nt, Homo sapiens
  misc_RNA (1)...(19): siRNA sense strand
gcaggaaagcaaccagauu

SEQ ID NO: 70855 - RNA, 19 nt, Homo sapiens
  misc_RNA (1)...(19): siRNA sense strand
uggcauggaugaagaacuu

SEQ ID NO: 70856 - RNA, 19 nt, Homo sapiens
  misc_RNA (1)...(19): siRNA sense strand
ugauucagauucucuuaga

SEQ ID NO: 70857 - RNA, 19 nt, Homo sapiens
  misc_RNA (1)...(19): siRNA sense strand
gcaagcuuauaauagaaga

SEQ ID NO: 70858 - RNA, 19 nt, Homo sapiens
  misc_RNA (1)...(19): siRNA sense strand
ucgaauagauauagugaca

SEQ ID NO: 70859 - RNA, 19 nt, Homo sapiens
  misc_RNA (1)...(19): siRNA sense strand
gaauugauauguguuccau

SEQ ID NO: 70860 - RNA, 19 nt, Homo sapiens
  misc_RNA (1)...(19): siRNA sense strand
cauaaaccaaucacaauga

SEQ ID NO: 70861 - RNA, 19 nt, Homo sapiens
  misc_RNA (1)...(19): siRNA sense strand
ugauagcccagaagaguua

SEQ ID NO: 70862 - RNA, 19 nt, Homo sapiens
  misc_RNA (1)...(19): siRNA sense strand
cauucuggguuucugguua

SEQ ID NO: 70863 - RNA, 19 nt, Homo sapiens
  misc_RNA (1)...(19): siRNA sense strand
gaucuggucauguugaaga

SEQ ID NO: 70864 - RNA, 19 nt, Homo sapiens
  misc_RNA (1)...(19): siRNA sense strand
aaacagaguaccaaggaaa

SEQ ID NO: 70865 - RNA, 19 nt, Homo sapiens
  misc_RNA (1)...(19): siRNA sense strand
gcaacuguacagagaauug

SEQ ID NO: 70866 - RNA, 19 nt, Homo sapiens
  misc_RNA (1)...(19): siRNA sense strand
acaacuccuuugacguuua

SEQ ID NO: 70867 - RNA, 19 nt, Homo sapiens
  misc_RNA (1)...(19): siRNA sense strand
agaaagaaauccggcaugu

SEQ ID NO: 70868 - RNA, 19 nt, Homo sapiens
  misc_RNA (1)...(19): siRNA sense strand
ccaaaaugauguaggaaaa

SEQ ID NO: 70869 - RNA, 19 nt, Homo sapiens
  misc_RNA (1)...(19): siRNA sense strand
uccauuaccucauaucuca

SEQ ID NO: 70870 - RNA, 19 nt, Homo sapiens
  misc_RNA (1)...(19): siRNA sense strand
gcucaagcucgaagaguaa

SEQ ID NO: 70871 - RNA, 19 nt, Homo sapiens
  misc_RNA (1)...(19): siRNA sense strand
cuagaaggaccaauauuug

SEQ ID NO: 70872 - RNA, 19 nt, Homo sapiens
  misc_RNA (1)...(19): siRNA sense strand
ggaggacagcaacuuguuu

SEQ ID NO: 70873 - RNA, 19 nt, Homo sapiens
  misc_RNA (1)...(19): siRNA sense strand
ugaaugaucccguagaauc

SEQ ID NO: 70874 - RNA, 19 nt, Homo sapiens
  misc_RNA (1)...(19): siRNA sense strand
aaagagagagaacucauug

SEQ ID NO: 70875 - RNA, 19 nt, Homo sapiens
  misc_RNA (1)...(19): siRNA sense strand
gaaagaaccaaagacaaca

SEQ ID NO: 70876 - RNA, 19 nt, Homo sapiens
  misc_RNA (1)...(19): siRNA sense strand
ccacaggaccuuaaggaau

SEQ ID NO: 70877 - RNA, 19 nt, Homo sapiens
  misc_RNA (1)...(19): siRNA sense strand
uuaauggcauggaugaaga

SEQ ID NO: 70878 - RNA, 19 nt, Homo sapiens
  misc_RNA (1)...(19): siRNA sense strand
uagaaggaccaauauuuga

SEQ ID NO: 70879 - RNA, 19 nt, Homo sapiens
  misc_RNA (1)...(19): siRNA sense strand
caggaaagcaaccagauug

SEQ ID NO: 70880 - RNA, 19 nt, Homo sapiens
  misc_RNA (1)...(19): siRNA sense strand
guggaaaucccucacuuug

SEQ ID NO: 70881 - RNA, 19 nt, Homo sapiens
  misc_RNA (1)...(19): siRNA sense strand
agaaaucucuagaagaaac

SEQ ID NO: 70882 - RNA, 19 nt, Homo sapiens
  misc_RNA (1)...(19): siRNA sense strand
guuacuagaucgacuggau

SEQ ID NO: 70883 - RNA, 19 nt, Homo sapiens
  misc_RNA (1)...(19): siRNA sense strand
gaccaauauuugauuaugg

SEQ ID NO: 70884 - RNA, 19 nt, Homo sapiens
  misc_RNA (1)...(19): siRNA sense strand
gcgguuugcaacuuaaaua

SEQ ID NO: 70885 - RNA, 19 nt, Homo sapiens
  misc_RNA (1)...(19): siRNA sense strand
ggagaagguguauccaaug

SEQ ID NO: 70886 - RNA, 19 nt, Homo sapiens
  misc_RNA (1)...(19): siRNA sense strand
ggauuaucacgaaagauuu

SEQ ID NO: 70887 - RNA, 19 nt, Homo sapiens
  misc_RNA (1)...(19): siRNA sense strand
gguggaaggagagggauua

SEQ ID NO: 70888 - RNA, 19 nt, Homo sapiens
  misc_RNA (1)...(19): siRNA sense strand
aaagaagagccacucguaa

SEQ ID NO: 70889 - RNA, 19 nt, Homo sapiens
  misc_RNA (1)...(19): siRNA sense strand
gaaaacagaguaccaagga

SEQ ID NO: 70890 - RNA, 19 nt, Homo sapiens
  misc_RNA (1)...(19): siRNA sense strand
aaugaaugaucccguagaa

SEQ ID NO: 70891 - RNA, 19 nt, Homo sapiens
  misc_RNA (1)...(19): siRNA sense strand
agacugccaucaaguuuua

SEQ ID NO: 70892 - RNA, 19 nt, Homo sapiens
  misc_RNA (1)...(19): siRNA sense strand
ccaaagagcagcaucuaac

SEQ ID NO: 70893 - RNA, 19 nt, Homo sapiens
  misc_RNA (1)...(19): siRNA sense strand
gaacuggcaagggaacuga

SEQ ID NO: 70894 - RNA, 19 nt, Homo sapiens
  misc_RNA (1)...(19): siRNA sense strand
caagaagcaaagauauuga

SEQ ID NO: 70895 - RNA, 19 nt, Homo sapiens
  misc_RNA (1)...(19): siRNA sense strand
gaagagaacuggaggaaga

SEQ ID NO: 70896 - RNA, 19 nt, Homo sapiens
  misc_RNA (1)...(19): siRNA sense strand
gccaagggcuucuauauuu

SEQ ID NO: 70897 - RNA, 19 nt, Homo sapiens
  misc_RNA (1)...(19): siRNA sense strand
ggaggaagauucagacuca

SEQ ID NO: 70898 - RNA, 19 nt, Homo sapiens
  misc_RNA (1)...(19): siRNA sense strand
gcaagaagcucaacuacac

SEQ ID NO: 70899 - RNA, 19 nt, Homo sapiens
  misc_RNA (1)...(19): siRNA sense strand
gaaauaauaccaacaacug

SEQ ID NO: 70900 - RNA, 19 nt, Homo sapiens
  misc_RNA (1)...(19): siRNA sense strand
ggaaugaccuguggcugaa

SEQ ID NO: 70901 - RNA, 19 nt, Homo sapiens
  misc_RNA (1)...(19): siRNA sense strand
caacggaguuccagagugu

SEQ ID NO: 70902 - RNA, 19 nt, Homo sapiens
  misc_RNA (1)...(19): siRNA sense strand
guaaagcguggaaucguua

SEQ ID NO: 70903 - RNA, 19 nt, Homo sapiens
  misc_RNA (1)...(19): siRNA sense strand
gcagacagcagcaggacua

SEQ ID NO: 70904 - RNA, 19 nt, Homo sapiens
  misc_RNA (1)...(19): siRNA sense strand
agacucagcugcagagaga

SEQ ID NO: 70905 - RNA, 19 nt, Homo sapiens
  misc_RNA (1)...(19): siRNA sense strand
guaccugggugcugacuau

SEQ ID NO: 70906 - RNA, 19 nt, Homo sapiens
  misc_RNA (1)...(19): siRNA sense strand
ucaagugggugaaggagaa

SEQ ID NO: 70907 - RNA, 19 nt, Homo sapiens
  misc_RNA (1)...(19): siRNA sense strand
gagcccaccuggaacuuga

SEQ ID NO: 70908 - RNA, 19 nt, Homo sapiens
  misc_RNA (1)...(19): siRNA sense strand
gcuauuaccgggugaacua

SEQ ID NO: 70909 - RNA, 19 nt, Homo sapiens
  misc_RNA (1)...(19): siRNA sense strand
ccagaucagugagcuguuu

SEQ ID NO: 70910 - RNA, 19 nt, Homo sapiens
  misc_RNA (1)...(19): siRNA sense strand
ggccaucccugucaucaau

SEQ ID NO: 70911 - RNA, 19 nt, Homo sapiens
  misc_RNA (1)...(19): siRNA sense strand
gaacuugaaagaccucaug

SEQ ID NO: 70912 - RNA, 19 nt, Homo sapiens
  misc_RNA (1)...(19): siRNA sense strand
caacaugcuucccaaaggu

SEQ ID NO: 70913 - RNA, 19 nt, Homo sapiens
  misc_RNA (1)...(19): siRNA sense strand
gaacuacgacgaagagaac

SEQ ID NO: 70914 - RNA, 19 nt, Homo sapiens
  misc_RNA (1)...(19): siRNA sense strand
gaacaaccgguccauccaa

SEQ ID NO: 70915 - RNA, 19 nt, Homo sapiens
  misc_RNA (1)...(19): siRNA sense strand
ggagggcaaugucagaaag

SEQ ID NO: 70916 - RNA, 19 nt, Homo sapiens
  misc_RNA (1)...(19): siRNA sense strand
ggacagccaguaugagaug

SEQ ID NO: 70917 - RNA, 19 nt, Homo sapiens
  misc_RNA (1)...(19): siRNA sense strand
agaacuaccugaagaagca

SEQ ID NO: 70918 - RNA, 19 nt, Homo sapiens
  misc_RNA (1)...(19): siRNA sense strand
ccaagggcuucuauauuuc

SEQ ID NO: 70919 - RNA, 19 nt, Homo sapiens
  misc_RNA (1)...(19): siRNA sense strand
ggaggccacugacgucauc

SEQ ID NO: 70920 - RNA, 19 nt, Homo sapiens
  misc_RNA (1)...(19): siRNA sense strand
ccacugacgucaucaucau

SEQ ID NO: 70921 - RNA, 19 nt, Homo sapiens
  misc_RNA (1)...(19): siRNA sense strand
gaguucaacaucacgcuua

SEQ ID NO: 70922 - RNA, 19 nt, Homo sapiens
  misc_RNA (1)...(19): siRNA sense strand
ugaaggacagccaguauga

SEQ ID NO: 70923 - RNA, 19 nt, Homo sapiens
  misc_RNA (1)...(19): siRNA sense strand
ggccaagggcuucuauauu

SEQ ID NO: 70924 - RNA, 19 nt, Homo sapiens
  misc_RNA (1)...(19): siRNA sense strand
ucaaugugacgggcuauua

SEQ ID NO: 70925 - RNA, 19 nt, Homo sapiens
  misc_RNA (1)...(19): siRNA sense strand
gcaggaggcugugaacaac

SEQ ID NO: 70926 - RNA, 19 nt, Homo sapiens
  misc_RNA (1)...(19): siRNA sense strand
caagaaggacaacgaggaa

SEQ ID NO: 70927 - RNA, 19 nt, Homo sapiens
  misc_RNA (1)...(19): siRNA sense strand
gcaggacuacuggcugaua

SEQ ID NO: 70928 - RNA, 19 nt, Homo sapiens
  misc_RNA (1)...(19): siRNA sense strand
ggucuggucugggacuuug

SEQ ID NO: 70929 - RNA, 19 nt, Homo sapiens
  misc_RNA (1)...(19): siRNA sense strand
caaaguaaagcguggaauc

SEQ ID NO: 70930 - RNA, 19 nt, Homo sapiens
  misc_RNA (1)...(19): siRNA sense strand
cuucuuugcuggucauuau

SEQ ID NO: 70931 - RNA, 19 nt, Homo sapiens
  misc_RNA (1)...(19): siRNA sense strand
cgcccaagauguccacgua

SEQ ID NO: 70932 - RNA, 19 nt, Homo sapiens
  misc_RNA (1)...(19): siRNA sense strand
gacgaaagccaacaucaag

SEQ ID NO: 70933 - RNA, 19 nt, Homo sapiens
  misc_RNA (1)...(19): siRNA sense strand
gagcaagcccuggagaaga

SEQ ID NO: 70934 - RNA, 19 nt, Homo sapiens
  misc_RNA (1)...(19): siRNA sense strand
gcaaagaguuguggauccu

SEQ ID NO: 70935 - RNA, 19 nt, Homo sapiens
  misc_RNA (1)...(19): siRNA sense strand
gcagccgugugcacaauca

SEQ ID NO: 70936 - RNA, 19 nt, Homo sapiens
  misc_RNA (1)...(19): siRNA sense strand
ccaacaugcuucccaaagg

SEQ ID NO: 70937 - RNA, 19 nt, Homo sapiens
  misc_RNA (1)...(19): siRNA sense strand
augaagaacuaccugaaga

SEQ ID NO: 70938 - RNA, 19 nt, Homo sapiens
  misc_RNA (1)...(19): siRNA sense strand
gagaagcaggcauccaaug

SEQ ID NO: 70939 - RNA, 19 nt, Homo sapiens
  misc_RNA (1)...(19): siRNA sense strand
gaagaacuaccugaagaag

SEQ ID NO: 70940 - RNA, 19 nt, Homo sapiens
  misc_RNA (1)...(19): siRNA sense strand
ucaggaugcucuccagcuu

SEQ ID NO: 70941 - RNA, 19 nt, Homo sapiens
  misc_RNA (1)...(19): siRNA sense strand
gcagugacacgacgauucu

SEQ ID NO: 70942 - RNA, 19 nt, Homo sapiens
  misc_RNA (1)...(19): siRNA sense strand
ggcauccaauggugucuug

SEQ ID NO: 70943 - RNA, 19 nt, Homo sapiens
  misc_RNA (1)...(19): siRNA sense strand
gacgccaccucuaccauca

SEQ ID NO: 70944 - RNA, 19 nt, Homo sapiens
  misc_RNA (1)...(19): siRNA sense strand
gaaaugccacacuggucaa

SEQ ID NO: 70945 - RNA, 19 nt, Homo sapiens
  misc_RNA (1)...(19): siRNA sense strand
cuacuucaagcucauguuu

SEQ ID NO: 70946 - RNA, 19 nt, Homo sapiens
  misc_RNA (1)...(19): siRNA sense strand
cugcugaaccucaauguga

SEQ ID NO: 70947 - RNA, 19 nt, Homo sapiens
  misc_RNA (1)...(19): siRNA sense strand
cguccuaccuccacaccuu

SEQ ID NO: 70948 - RNA, 19 nt, Homo sapiens
  misc_RNA (1)...(19): siRNA sense strand
cgaaagccaacaucaagug

SEQ ID NO: 70949 - RNA, 19 nt, Homo sapiens
  misc_RNA (1)...(19): siRNA sense strand
gaaggacaacgaggaaaca

SEQ ID NO: 70950 - RNA, 19 nt, Homo sapiens
  misc_RNA (1)...(19): siRNA sense strand
aguaaagcguggaaucguu

SEQ ID NO: 70951 - RNA, 19 nt, Homo sapiens
  misc_RNA (1)...(19): siRNA sense strand
ccaacuggaaugucacuga

SEQ ID NO: 70952 - RNA, 19 nt, Homo sapiens
  misc_RNA (1)...(19): siRNA sense strand
ugaagaacuaccugaagaa

SEQ ID NO: 70953 - RNA, 19 nt, Homo sapiens
  misc_RNA (1)...(19): siRNA sense strand
acuacuggcugauagaugu

SEQ ID NO: 70954 - RNA, 19 nt, Homo sapiens
  misc_RNA (1)...(19): siRNA sense strand
ucagugaguucgacuacgu

SEQ ID NO: 70955 - RNA, 19 nt, Homo sapiens
  misc_RNA (1)...(19): siRNA sense strand
gaagacgaaagccaacauc

SEQ ID NO: 70956 - RNA, 19 nt, Homo sapiens
  misc_RNA (1)...(19): siRNA sense strand
ucuaccaucaucagcauua

SEQ ID NO: 70957 - RNA, 19 nt, Homo sapiens
  misc_RNA (1)...(19): siRNA sense strand
ugggagcaguuccgaaaug

SEQ ID NO: 70958 - RNA, 19 nt, Homo sapiens
  misc_RNA (1)...(19): siRNA sense strand
ggauggagaaccccaauaa

SEQ ID NO: 70959 - RNA, 19 nt, Homo sapiens
  misc_RNA (1)...(19): siRNA sense strand
gcuucuauauuuccaaguc

SEQ ID NO: 70960 - RNA, 19 nt, Homo sapiens
  misc_RNA (1)...(19): siRNA sense strand
ucaacuacguguggauugu

SEQ ID NO: 70961 - RNA, 19 nt, Homo sapiens
  misc_RNA (1)...(19): siRNA sense strand
ccaccuggaacuugaaaga

SEQ ID NO: 70962 - RNA, 19 nt, Homo sapiens
  misc_RNA (1)...(19): siRNA sense strand
ggugaaggacagccaguau

SEQ ID NO: 70963 - RNA, 19 nt, Homo sapiens
  misc_RNA (1)...(19): siRNA sense strand
ccucuucauucacuucaga

SEQ ID NO: 70964 - RNA, 19 nt, Homo sapiens
  misc_RNA (1)...(19): siRNA sense strand
ccucagaauucaacuacgu

SEQ ID NO: 70965 - RNA, 19 nt, Homo sapiens
  misc_RNA (1)...(19): siRNA sense strand
gaagcaggcauccaauggu

SEQ ID NO: 70966 - RNA, 19 nt, Homo sapiens
  misc_RNA (1)...(19): siRNA sense strand
gaaggccgaguucaacauc

SEQ ID NO: 70967 - RNA, 19 nt, Homo sapiens
  misc_RNA (1)...(19): siRNA sense strand
gaacaccaucuaccugaac

SEQ ID NO: 70968 - RNA, 19 nt, Homo sapiens
  misc_RNA (1)...(19): siRNA sense strand
uggagcaguucaagaagga

SEQ ID NO: 70969 - RNA, 19 nt, Homo sapiens
  misc_RNA (1)...(19): siRNA sense strand
gcccaucacauccaucaga

SEQ ID NO: 70970 - RNA, 19 nt, Homo sapiens
  misc_RNA (1)...(19): siRNA sense strand
ggagaagcaggcauccaau

SEQ ID NO: 70971 - RNA, 19 nt, Homo sapiens
  misc_RNA (1)...(19): siRNA sense strand
ggagcaagcccuggagaag

SEQ ID NO: 70972 - RNA, 19 nt, Homo sapiens
  misc_RNA (1)...(19): siRNA sense strand
aaucgggcacagaucauua

SEQ ID NO: 70973 - RNA, 19 nt, Homo sapiens
  misc_RNA (1)...(19): siRNA sense strand
gguggccacuacacagaug

SEQ ID NO: 70974 - RNA, 19 nt, Homo sapiens
  misc_RNA (1)...(19): siRNA sense strand
agacgaaagccaacaucaa

SEQ ID NO: 70975 - RNA, 19 nt, Homo sapiens
  misc_RNA (1)...(19): siRNA sense strand
ucaaugaggcugacaagcu

SEQ ID NO: 70976 - RNA, 19 nt, Homo sapiens
  misc_RNA (1)...(19): siRNA sense strand
gauggucucuggccuuuuc

SEQ ID NO: 70977 - RNA, 19 nt, Homo sapiens
  misc_RNA (1)...(19): siRNA sense strand
gacagcagcaggacuacug

SEQ ID NO: 70978 - RNA, 19 nt, Homo sapiens
  misc_RNA (1)...(19): siRNA sense strand
agaacaccaucuaccugaa

SEQ ID NO: 70979 - RNA, 19 nt, Homo sapiens
  misc_RNA (1)...(19): siRNA sense strand
uaacuucuuugcuggucau

SEQ ID NO: 70980 - RNA, 19 nt, Homo sapiens
  misc_RNA (1)...(19): siRNA sense strand
uugcuggccuucauuguca

SEQ ID NO: 70981 - RNA, 19 nt, Homo sapiens
  misc_RNA (1)...(19): siRNA sense strand
guacuugcuggccuucauu

SEQ ID NO: 70982 - RNA, 19 nt, Homo sapiens
  misc_RNA (1)...(19): siRNA sense strand
acuggaaugucacugaguu

SEQ ID NO: 70983 - RNA, 19 nt, Homo sapiens
  misc_RNA (1)...(19): siRNA sense strand
ccacaccacgcccaagaug

SEQ ID NO: 70984 - RNA, 19 nt, Homo sapiens
  misc_RNA (1)...(19): siRNA sense strand
cuccagugguucacagaaa

SEQ ID NO: 70985 - RNA, 19 nt, Homo sapiens
  misc_RNA (1)...(19): siRNA sense strand
augccacacuggucaauga

SEQ ID NO: 70986 - RNA, 19 nt, Homo sapiens
  misc_RNA (1)...(19): siRNA sense strand
uggagaaccccaauaauaa

SEQ ID NO: 70987 - RNA, 19 nt, Homo sapiens
  misc_RNA (1)...(19): siRNA sense strand
acagcaagaagcucaacua

SEQ ID NO: 70988 - RNA, 19 nt, Homo sapiens
  misc_RNA (1)...(19): siRNA sense strand
caggacuacuggcugauag

SEQ ID NO: 70989 - RNA, 19 nt, Homo sapiens
  misc_RNA (1)...(19): siRNA sense strand
caucacauccaucagagau

SEQ ID NO: 70990 - RNA, 19 nt, Homo sapiens
  misc_RNA (1)...(19): siRNA sense strand
ccauagagugguggaauga

SEQ ID NO: 70991 - RNA, 19 nt, Homo sapiens
  misc_RNA (1)...(19): siRNA sense strand
uaagagcccagaacgaucu

SEQ ID NO: 70992 - RNA, 19 nt, Homo sapiens
  misc_RNA (1)...(19): siRNA sense strand
gagaacuggaggaagauuc

SEQ ID NO: 70993 - RNA, 19 nt, Homo sapiens
  misc_RNA (1)...(19): siRNA sense strand
ucaucagcauuaccaacaa

SEQ ID NO: 70994 - RNA, 19 nt, Homo sapiens
  misc_RNA (1)...(19): siRNA sense strand
ucacagaaaacagcaaaua

SEQ ID NO: 70995 - RNA, 19 nt, Homo sapiens
  misc_RNA (1)...(19): siRNA sense strand
gaaagucucuguacucguu

SEQ ID NO: 70996 - RNA, 19 nt, Homo sapiens
  misc_RNA (1)...(19): siRNA sense strand
gaugagggcugccuaauug

SEQ ID NO: 70997 - RNA, 19 nt, Homo sapiens
  misc_RNA (1)...(19): siRNA sense strand
gaaaucaccuguugcaugu

SEQ ID NO: 70998 - RNA, 19 nt, Homo sapiens
  misc_RNA (1)...(19): siRNA sense strand
gaaccgaaaucaccuguug

SEQ ID NO: 70999 - RNA, 19 nt, Homo sapiens
  misc_RNA (1)...(19): siRNA sense strand
gagcagaaauugacauguu

SEQ ID NO: 71000 - RNA, 19 nt, Homo sapiens
  misc_RNA (1)...(19): siRNA sense strand
caaaggagguacugucaaa

SEQ ID NO: 71001 - RNA, 19 nt, Homo sapiens
  misc_RNA (1)...(19): siRNA sense strand
gaaauugacauguuggaua

SEQ ID NO: 71002 - RNA, 19 nt, Homo sapiens
  misc_RNA (1)...(19): siRNA sense strand
gaugaagacgccauuauua

SEQ ID NO: 71003 - RNA, 19 nt, Homo sapiens
  misc_RNA (1)...(19): siRNA sense strand
ugaaacaucugguagcuuu

SEQ ID NO: 71004 - RNA, 19 nt, Homo sapiens
  misc_RNA (1)...(19): siRNA sense strand
ggacagaugaggugaaauu

SEQ ID NO: 71005 - RNA, 19 nt, Homo sapiens
  misc_RNA (1)...(19): siRNA sense strand
gaggugaaauuucuaacug

SEQ ID NO: 71006 - RNA, 19 nt, Homo sapiens
  misc_RNA (1)...(19): siRNA sense strand
ggaaaguacugcuuguucu

SEQ ID NO: 71007 - RNA, 19 nt, Homo sapiens
  misc_RNA (1)...(19): siRNA sense strand
cagaugaggugaaauuucu

SEQ ID NO: 71008 - RNA, 19 nt, Homo sapiens
  misc_RNA (1)...(19): siRNA sense strand
ugacacaucuggagacuac

SEQ ID NO: 71009 - RNA, 19 nt, Homo sapiens
  misc_RNA (1)...(19): siRNA sense strand
gaagggagccggcacugau

SEQ ID NO: 71010 - RNA, 19 nt, Homo sapiens
  misc_RNA (1)...(19): siRNA sense strand
ggugaaauuucuaacuguu

SEQ ID NO: 71011 - RNA, 19 nt, Homo sapiens
  misc_RNA (1)...(19): siRNA sense strand
aaaccuaccagcagcaaua

SEQ ID NO: 71012 - RNA, 19 nt, Homo sapiens
  misc_RNA (1)...(19): siRNA sense strand
gaaaagcucuauaaaucga

SEQ ID NO: 71013 - RNA, 19 nt, Homo sapiens
  misc_RNA (1)...(19): siRNA sense strand
ggagggaugaaggaaauua

SEQ ID NO: 71014 - RNA, 19 nt, Homo sapiens
  misc_RNA (1)...(19): siRNA sense strand
caucaagggugacacaucu

SEQ ID NO: 71015 - RNA, 19 nt, Homo sapiens
  misc_RNA (1)...(19): siRNA sense strand
guaugaggcuggagagaag

SEQ ID NO: 71016 - RNA, 19 nt, Homo sapiens
  misc_RNA (1)...(19): siRNA sense strand
uaaagugcaugaggaacaa

SEQ ID NO: 71017 - RNA, 19 nt, Homo sapiens
  misc_RNA (1)...(19): siRNA sense strand
cgaugaagacgccauuauu

SEQ ID NO: 71018 - RNA, 19 nt, Homo sapiens
  misc_RNA (1)...(19): siRNA sense strand
gaaggauauugaacagagu

SEQ ID NO: 71019 - RNA, 19 nt, Homo sapiens
  misc_RNA (1)...(19): siRNA sense strand
gcauguguuugaugaauac

SEQ ID NO: 71020 - RNA, 19 nt, Homo sapiens
  misc_RNA (1)...(19): siRNA sense strand
gaugaggugaaauuucuaa

SEQ ID NO: 71021 - RNA, 19 nt, Homo sapiens
  misc_RNA (1)...(19): siRNA sense strand
guaaagugcaugaggaaca

SEQ ID NO: 71022 - RNA, 19 nt, Homo sapiens
  misc_RNA (1)...(19): siRNA sense strand
cugaaaagcucuauaaauc

SEQ ID NO: 71023 - RNA, 19 nt, Homo sapiens
  misc_RNA (1)...(19): siRNA sense strand
ucugguagcuuugaagaug

SEQ ID NO: 71024 - RNA, 19 nt, Homo sapiens
  misc_RNA (1)...(19): siRNA sense strand
gaggaacaaaucugcauau

SEQ ID NO: 71025 - RNA, 19 nt, Homo sapiens
  misc_RNA (1)...(19): siRNA sense strand
aagaugcucugcuggcuau

SEQ ID NO: 71026 - RNA, 19 nt, Homo sapiens
  misc_RNA (1)...(19): siRNA sense strand
aagaugacauucgcucuga

SEQ ID NO: 71027 - RNA, 19 nt, Homo sapiens
  misc_RNA (1)...(19): siRNA sense strand
gcucugcuggcuauaguaa

SEQ ID NO: 71028 - RNA, 19 nt, Homo sapiens
  misc_RNA (1)...(19): siRNA sense strand
gacauucgcucugacacau

SEQ ID NO: 71029 - RNA, 19 nt, Homo sapiens
  misc_RNA (1)...(19): siRNA sense strand
gaucaggacagccuacaag

SEQ ID NO: 71030 - RNA, 19 nt, Homo sapiens
  misc_RNA (1)...(19): siRNA sense strand
caacuucgagcaggugauu

SEQ ID NO: 71031 - RNA, 19 nt, Homo sapiens
  misc_RNA (1)...(19): siRNA sense strand
gauagacgaccugaaguca

SEQ ID NO: 71032 - RNA, 19 nt, Homo sapiens
  misc_RNA (1)...(19): siRNA sense strand
ugggagggaugaaggaaau

SEQ ID NO: 71033 - RNA, 19 nt, Homo sapiens
  misc_RNA (1)...(19): siRNA sense strand
ugcauguguuugaugaaua

SEQ ID NO: 71034 - RNA, 19 nt, Homo sapiens
  misc_RNA (1)...(19): siRNA sense strand
gaaaguacugcuuguucuc

SEQ ID NO: 71035 - RNA, 19 nt, Homo sapiens
  misc_RNA (1)...(19): siRNA sense strand
caucggcagggacuugaua

SEQ ID NO: 71036 - RNA, 19 nt, Homo sapiens
  misc_RNA (1)...(19): siRNA sense strand
aggaacaaaucugcauauu

SEQ ID NO: 71037 - RNA, 19 nt, Homo sapiens
  misc_RNA (1)...(19): siRNA sense strand
ugaugagggcugccuaauu

SEQ ID NO: 71038 - RNA, 19 nt, Homo sapiens
  misc_RNA (1)...(19): siRNA sense strand
agaacugaguggcaacuuc

SEQ ID NO: 71039 - RNA, 19 nt, Homo sapiens
  misc_RNA (1)...(19): siRNA sense strand
gacagaugaggugaaauuu

SEQ ID NO: 71040 - RNA, 19 nt, Homo sapiens
  misc_RNA (1)...(19): siRNA sense strand
ucucuguacucguucauca

SEQ ID NO: 71041 - RNA, 19 nt, Homo sapiens
  misc_RNA (1)...(19): siRNA sense strand
aaucaccuguugcaugugu

SEQ ID NO: 71042 - RNA, 19 nt, Homo sapiens
  misc_RNA (1)...(19): siRNA sense strand
aaacaucugguagcuuuga

SEQ ID NO: 71043 - RNA, 19 nt, Homo sapiens
  misc_RNA (1)...(19): siRNA sense strand
acagaaggauauugaacag

SEQ ID NO: 71044 - RNA, 19 nt, Homo sapiens
  misc_RNA (1)...(19): siRNA sense strand
gagggcugccuaauugaga

SEQ ID NO: 71045 - RNA, 19 nt, Homo sapiens
  misc_RNA (1)...(19): siRNA sense strand
gggcacacuucaagagacu

SEQ ID NO: 71046 - RNA, 19 nt, Homo sapiens
  misc_RNA (1)...(19): siRNA sense strand
ugaggaacaaaucugcaua

SEQ ID NO: 71047 - RNA, 19 nt, Homo sapiens
  misc_RNA (1)...(19): siRNA sense strand
acaaaaggauaucacagaa

SEQ ID NO: 71048 - RNA, 19 nt, Homo sapiens
  misc_RNA (1)...(19): siRNA sense strand
gagggaugaaggaaauuau

SEQ ID NO: 71049 - RNA, 19 nt, Homo sapiens
  misc_RNA (1)...(19): siRNA sense strand
aggauucaaugccauggaa

SEQ ID NO: 71050 - RNA, 19 nt, Homo sapiens
  misc_RNA (1)...(19): siRNA sense strand
agcagaaauugacauguug

SEQ ID NO: 71051 - RNA, 19 nt, Homo sapiens
  misc_RNA (1)...(19): siRNA sense strand
gcuauaguaaagugcauga

SEQ ID NO: 71052 - RNA, 19 nt, Homo sapiens
  misc_RNA (1)...(19): siRNA sense strand
ugaggaaggccaugaaagg

SEQ ID NO: 71053 - RNA, 19 nt, Homo sapiens
  misc_RNA (1)...(19): siRNA sense strand
acaggaaaguacugcuugu

SEQ ID NO: 71054 - RNA, 19 nt, Homo sapiens
  misc_RNA (1)...(19): siRNA sense strand
ggccauggcaaccaaagga

SEQ ID NO: 71055 - RNA, 19 nt, Homo sapiens
  misc_RNA (1)...(19): siRNA sense strand
ggauauccgggcacacuuc

SEQ ID NO: 71056 - RNA, 19 nt, Homo sapiens
  misc_RNA (1)...(19): siRNA sense strand
gauucaaugccauggaaga

SEQ ID NO: 71057 - RNA, 19 nt, Homo sapiens
  misc_RNA (1)...(19): siRNA sense strand
gagcugcgaagggccauga

SEQ ID NO: 71058 - RNA, 19 nt, Homo sapiens
  misc_RNA (1)...(19): siRNA sense strand
uguugcauguguuugauga

SEQ ID NO: 71059 - RNA, 19 nt, Homo sapiens
  misc_RNA (1)...(19): siRNA sense strand
gggaugaaggaaauuaucu

SEQ ID NO: 71060 - RNA, 19 nt, Homo sapiens
  misc_RNA (1)...(19): siRNA sense strand
auaacacccucaucagagu

SEQ ID NO: 71061 - RNA, 19 nt, Homo sapiens
  misc_RNA (1)...(19): siRNA sense strand
ggaugaaggaaauuaucug

SEQ ID NO: 71062 - RNA, 19 nt, Homo sapiens
  misc_RNA (1)...(19): siRNA sense strand
ggugcuguaugacgugcaa

SEQ ID NO: 71063 - RNA, 19 nt, Homo sapiens
  misc_RNA (1)...(19): siRNA sense strand
gaugacauucgcucugaca

SEQ ID NO: 71064 - RNA, 19 nt, Homo sapiens
  misc_RNA (1)...(19): siRNA sense strand
gcugaaaagcucuauaaau

SEQ ID NO: 71065 - RNA, 19 nt, Homo sapiens
  misc_RNA (1)...(19): siRNA sense strand
cacagaaggauauugaaca

SEQ ID NO: 71066 - RNA, 19 nt, Homo sapiens
  misc_RNA (1)...(19): siRNA sense strand
ggauauugaacagaguauu

SEQ ID NO: 71067 - RNA, 19 nt, Homo sapiens
  misc_RNA (1)...(19): siRNA sense strand
ccaaaggagguacugucaa

SEQ ID NO: 71068 - RNA, 19 nt, Homo sapiens
  misc_RNA (1)...(19): siRNA sense strand
gaaacaucugguagcuuug

SEQ ID NO: 71069 - RNA, 19 nt, Homo sapiens
  misc_RNA (1)...(19): siRNA sense strand
caucugguagcuuugaaga

SEQ ID NO: 71070 - RNA, 19 nt, Homo sapiens
  misc_RNA (1)...(19): siRNA sense strand
ggggacagaugaggugaaa

SEQ ID NO: 71071 - RNA, 19 nt, Homo sapiens
  misc_RNA (1)...(19): siRNA sense strand
ggagacuacaggaaaguac

SEQ ID NO: 71072 - RNA, 19 nt, Homo sapiens
  misc_RNA (1)...(19): siRNA sense strand
gauauccgggcacacuuca

SEQ ID NO: 71073 - RNA, 19 nt, Homo sapiens
  misc_RNA (1)...(19): siRNA sense strand
ccgaugaagacgccauuau

SEQ ID NO: 71074 - RNA, 19 nt, Homo sapiens
  misc_RNA (1)...(19): siRNA sense strand
ucugcuggcuauaguaaag

SEQ ID NO: 71075 - RNA, 19 nt, Homo sapiens
  misc_RNA (1)...(19): siRNA sense strand
acagaugaggugaaauuuc

SEQ ID NO: 71076 - RNA, 19 nt, Homo sapiens
  misc_RNA (1)...(19): siRNA sense strand
cuacaggaaaguacugcuu

SEQ ID NO: 71077 - RNA, 19 nt, Homo sapiens
  misc_RNA (1)...(19): siRNA sense strand
uauggaaagucucuguacu

SEQ ID NO: 71078 - RNA, 19 nt, Homo sapiens
  misc_RNA (1)...(19): siRNA sense strand
gaagggagcuggaacaaau

SEQ ID NO: 71079 - RNA, 19 nt, Homo sapiens
  misc_RNA (1)...(19): siRNA sense strand
gaaagguguuugacaagua

SEQ ID NO: 71080 - RNA, 19 nt, Homo sapiens
  misc_RNA (1)...(19): siRNA sense strand
gcagggaucuucuggauga

SEQ ID NO: 71081 - RNA, 19 nt, Homo sapiens
  misc_RNA (1)...(19): siRNA sense strand
gcucaagccuggaagauga

SEQ ID NO: 71082 - RNA, 19 nt, Homo sapiens
  misc_RNA (1)...(19): siRNA sense strand
ggaaggaguuuaggaagaa

SEQ ID NO: 71083 - RNA, 19 nt, Homo sapiens
  misc_RNA (1)...(19): siRNA sense strand
cgagacuucuggcaauuua

SEQ ID NO: 71084 - RNA, 19 nt, Homo sapiens
  misc_RNA (1)...(19): siRNA sense strand
gaagggagcugggacagau

SEQ ID NO: 71085 - RNA, 19 nt, Homo sapiens
  misc_RNA (1)...(19): siRNA sense strand
ggaaaucucugcagcuuuu

SEQ ID NO: 71086 - RNA, 19 nt, Homo sapiens
  misc_RNA (1)...(19): siRNA sense strand
ugagaaagguguuugacaa

SEQ ID NO: 71087 - RNA, 19 nt, Homo sapiens
  misc_RNA (1)...(19): siRNA sense strand
cgaagugugucucauuuga

SEQ ID NO: 71088 - RNA, 19 nt, Homo sapiens
  misc_RNA (1)...(19): siRNA sense strand
gaaauuauugcuucaagga

SEQ ID NO: 71089 - RNA, 19 nt, Homo sapiens
  misc_RNA (1)...(19): siRNA sense strand
aaucagaacuaacuggaaa

SEQ ID NO: 71090 - RNA, 19 nt, Homo sapiens
  misc_RNA (1)...(19): siRNA sense strand
gaaacccucucggcuuuau

SEQ ID NO: 71091 - RNA, 19 nt, Homo sapiens
  misc_RNA (1)...(19): siRNA sense strand
acaagaugcucaggcuuua

SEQ ID NO: 71092 - RNA, 19 nt, Homo sapiens
  misc_RNA (1)...(19): siRNA sense strand
guacugacagaaauuauug

SEQ ID NO: 71093 - RNA, 19 nt, Homo sapiens
  misc_RNA (1)...(19): siRNA sense strand
gaacugagagccaucaaac

SEQ ID NO: 71094 - RNA, 19 nt, Homo sapiens
  misc_RNA (1)...(19): siRNA sense strand
guugugaaaucuauucgaa

SEQ ID NO: 71095 - RNA, 19 nt, Homo sapiens
  misc_RNA (1)...(19): siRNA sense strand
acaaguacaugacuauauc

SEQ ID NO: 71096 - RNA, 19 nt, Homo sapiens
  misc_RNA (1)...(19): siRNA sense strand
ugacuucccuggauuugau

SEQ ID NO: 71097 - RNA, 19 nt, Homo sapiens
  misc_RNA (1)...(19): siRNA sense strand
cacgaagugugucucauuu

SEQ ID NO: 71098 - RNA, 19 nt, Homo sapiens
  misc_RNA (1)...(19): siRNA sense strand
ugacugacuucccuggauu

SEQ ID NO: 71099 - RNA, 19 nt, Homo sapiens
  misc_RNA (1)...(19): siRNA sense strand
gaacugaaacaugccuuga

SEQ ID NO: 71100 - RNA, 19 nt, Homo sapiens
  misc_RNA (1)...(19): siRNA sense strand
gagacccucuauuaugcua

SEQ ID NO: 71101 - RNA, 19 nt, Homo sapiens
  misc_RNA (1)...(19): siRNA sense strand
gaagaagaauauggcucaa

SEQ ID NO: 71102 - RNA, 19 nt, Homo sapiens
  misc_RNA (1)...(19): siRNA sense strand
gacaaguacaugacuauau

SEQ ID NO: 71103 - RNA, 19 nt, Homo sapiens
  misc_RNA (1)...(19): siRNA sense strand
caggaaaucucugcagcuu

SEQ ID NO: 71104 - RNA, 19 nt, Homo sapiens
  misc_RNA (1)...(19): siRNA sense strand
ugagcgggcugaugcagaa

SEQ ID NO: 71105 - RNA, 19 nt, Homo sapiens
  misc_RNA (1)...(19): siRNA sense strand
ggagcuggaacaaaugaaa

SEQ ID NO: 71106 - RNA, 19 nt, Homo sapiens
  misc_RNA (1)...(19): siRNA sense strand
gacagaaauuauugcuuca

SEQ ID NO: 71107 - RNA, 19 nt, Homo sapiens
  misc_RNA (1)...(19): siRNA sense strand
ccaccucucuuuauuccau

SEQ ID NO: 71108 - RNA, 19 nt, Homo sapiens
  misc_RNA (1)...(19): siRNA sense strand
ugagagccaucaaacaagu

SEQ ID NO: 71109 - RNA, 19 nt, Homo sapiens
  misc_RNA (1)...(19): siRNA sense strand
gcuuuaugaugcuuaugaa

SEQ ID NO: 71110 - RNA, 19 nt, Homo sapiens
  misc_RNA (1)...(19): siRNA sense strand
ugugaaaucuauucgaagu

SEQ ID NO: 71111 - RNA, 19 nt, Homo sapiens
  misc_RNA (1)...(19): siRNA sense strand
cagaaauuauugcuucaag

SEQ ID NO: 71112 - RNA, 19 nt, Homo sapiens
  misc_RNA (1)...(19): siRNA sense strand
gcacagaugaggagagcau

SEQ ID NO: 71113 - RNA, 19 nt, Homo sapiens
  misc_RNA (1)...(19): siRNA sense strand
augaaacccucucggcuuu

SEQ ID NO: 71114 - RNA, 19 nt, Homo sapiens
  misc_RNA (1)...(19): siRNA sense strand
gaaggaguuuaggaagaau

SEQ ID NO: 71115 - RNA, 19 nt, Homo sapiens
  misc_RNA (1)...(19): siRNA sense strand
aaguauaccugccuaccuu

SEQ ID NO: 71116 - RNA, 19 nt, Homo sapiens
  misc_RNA (1)...(19): siRNA sense strand
caaauugaggaaaccauug

SEQ ID NO: 71117 - RNA, 19 nt, Homo sapiens
  misc_RNA (1)...(19): siRNA sense strand
uaacagagacccugaugcu

SEQ ID NO: 71118 - RNA, 19 nt, Homo sapiens
  misc_RNA (1)...(19): siRNA sense strand
gaacuaacuggaaaauuug

SEQ ID NO: 71119 - RNA, 19 nt, Homo sapiens
  misc_RNA (1)...(19): siRNA sense strand
aaggacaccugaagaacug

SEQ ID NO: 71120 - RNA, 19 nt, Homo sapiens
  misc_RNA (1)...(19): siRNA sense strand
aggaaggaguuuaggaaga

SEQ ID NO: 71121 - RNA, 19 nt, Homo sapiens
  misc_RNA (1)...(19): siRNA sense strand
gagcugggacagaugauca

SEQ ID NO: 71122 - RNA, 19 nt, Homo sapiens
  misc_RNA (1)...(19): siRNA sense strand
gacccucuauuaugcuaug

SEQ ID NO: 71123 - RNA, 19 nt, Homo sapiens
  misc_RNA (1)...(19): siRNA sense strand
cuguugacaucccgaagua

SEQ ID NO: 71124 - RNA, 19 nt, Homo sapiens
  misc_RNA (1)...(19): siRNA sense strand
ucaggaaggaguuuaggaa

SEQ ID NO: 71125 - RNA, 19 nt, Homo sapiens
  misc_RNA (1)...(19): siRNA sense strand
gacuauaucaggauuucaa

SEQ ID NO: 71126 - RNA, 19 nt, Homo sapiens
  misc_RNA (1)...(19): siRNA sense strand
gaagaacugagagccauca

SEQ ID NO: 71127 - RNA, 19 nt, Homo sapiens
  misc_RNA (1)...(19): siRNA sense strand
uggcagggaucuucuggau

SEQ ID NO: 71128 - RNA, 19 nt, Homo sapiens
  misc_RNA (1)...(19): siRNA sense strand
gagaaagguguuugacaag

SEQ ID NO: 71129 - RNA, 19 nt, Homo sapiens
  misc_RNA (1)...(19): siRNA sense strand
aauuguggcucugaugaaa

SEQ ID NO: 71130 - RNA, 19 nt, Homo sapiens
  misc_RNA (1)...(19): siRNA sense strand
gaggcacugugacugacuu

SEQ ID NO: 71131 - RNA, 19 nt, Homo sapiens
  misc_RNA (1)...(19): siRNA sense strand
uaacaucaggaaggaguuu

SEQ ID NO: 71132 - RNA, 19 nt, Homo sapiens
  misc_RNA (1)...(19): siRNA sense strand
acuccuugcuguugugaaa

SEQ ID NO: 71133 - RNA, 19 nt, Homo sapiens
  misc_RNA (1)...(19): siRNA sense strand
ccgcgagacuucuggcaau

SEQ ID NO: 71134 - RNA, 19 nt, Homo sapiens
  misc_RNA (1)...(19): siRNA sense strand
ugacaaguacaugacuaua

SEQ ID NO: 71135 - RNA, 19 nt, Homo sapiens
  misc_RNA (1)...(19): siRNA sense strand
agaaagguguuugacaagu

SEQ ID NO: 71136 - RNA, 19 nt, Homo sapiens
  misc_RNA (1)...(19): siRNA sense strand
ggacagaugaagaaaaguu

SEQ ID NO: 71137 - RNA, 19 nt, Homo sapiens
  misc_RNA (1)...(19): siRNA sense strand
ugaaaggcuugggcacaga

SEQ ID NO: 71138 - RNA, 19 nt, Homo sapiens
  misc_RNA (1)...(19): siRNA sense strand
aacaagaugcucaggcuuu

SEQ ID NO: 71139 - RNA, 19 nt, Homo sapiens
  misc_RNA (1)...(19): siRNA sense strand
uuaugaugcuuaugaacug

SEQ ID NO: 71140 - RNA, 19 nt, Homo sapiens
  misc_RNA (1)...(19): siRNA sense strand
gaaaggcuugggcacagau

SEQ ID NO: 71141 - RNA, 19 nt, Homo sapiens
  misc_RNA (1)...(19): siRNA sense strand
caauuuagagcaacuacuc

SEQ ID NO: 71142 - RNA, 19 nt, Homo sapiens
  misc_RNA (1)...(19): siRNA sense strand
gugacugacuucccuggau

SEQ ID NO: 71143 - RNA, 19 nt, Homo sapiens
  misc_RNA (1)...(19): siRNA sense strand
gcgagacuucuggcaauuu

SEQ ID NO: 71144 - RNA, 19 nt, Homo sapiens
  misc_RNA (1)...(19): siRNA sense strand
aaauugaggaaaccauuga

SEQ ID NO: 71145 - RNA, 19 nt, Homo sapiens
  misc_RNA (1)...(19): siRNA sense strand
aaagguguuugacaaguac

SEQ ID NO: 71146 - RNA, 19 nt, Homo sapiens
  misc_RNA (1)...(19): siRNA sense strand
gcuaacagagacccugaug

SEQ ID NO: 71147 - RNA, 19 nt, Homo sapiens
  misc_RNA (1)...(19): siRNA sense strand
gcuuaugaacugaaacaug

SEQ ID NO: 71148 - RNA, 19 nt, Homo sapiens
  misc_RNA (1)...(19): siRNA sense strand
caaggacaccugaagaacu

SEQ ID NO: 71149 - RNA, 19 nt, Homo sapiens
  misc_RNA (1)...(19): siRNA sense strand
guucucagaggcacuguga

SEQ ID NO: 71150 - RNA, 19 nt, Homo sapiens
  misc_RNA (1)...(19): siRNA sense strand
acugagagccaucaaacaa

SEQ ID NO: 71151 - RNA, 19 nt, Homo sapiens
  misc_RNA (1)...(19): siRNA sense strand
acugaaacaugccuugaag

SEQ ID NO: 71152 - RNA, 19 nt, Homo sapiens
  misc_RNA (1)...(19): siRNA sense strand
gcugcucuguggagaagau

SEQ ID NO: 71153 - RNA, 19 nt, Homo sapiens
  misc_RNA (1)...(19): siRNA sense strand
ggggacagaugaagaaaag

SEQ ID NO: 71154 - RNA, 19 nt, Homo sapiens
  misc_RNA (1)...(19): siRNA sense strand
ggcuuuaugaugcuuauga

SEQ ID NO: 71155 - RNA, 19 nt, Homo sapiens
  misc_RNA (1)...(19): siRNA sense strand
gugaaaucuauucgaagua

SEQ ID NO: 71156 - RNA, 19 nt, Homo sapiens
  misc_RNA (1)...(19): siRNA sense strand
aagaugcucaggcuuuauu

SEQ ID NO: 71157 - RNA, 19 nt, Homo sapiens
  misc_RNA (1)...(19): siRNA sense strand
gagcauccugacucuguug

SEQ ID NO: 71158 - RNA, 19 nt, Homo sapiens
  misc_RNA (1)...(19): siRNA sense strand
agacccugaugcuggaauu

SEQ ID NO: 71159 - RNA, 19 nt, Homo sapiens
  misc_RNA (1)...(19): siRNA sense strand
gcucagcgccaggaaaucu

SEQ ID NO: 71160 - RNA, 19 nt, Homo sapiens
  misc_RNA (1)...(19): siRNA sense strand
guugacaucccgaaguaau

SEQ ID NO: 71161 - RNA, 19 nt, Homo sapiens
  misc_RNA (1)...(19): siRNA sense strand
ccauugaccgcgagacuuc

SEQ ID NO: 71162 - RNA, 19 nt, Homo sapiens
  misc_RNA (1)...(19): siRNA sense strand
uuaauuguggcucugauga

SEQ ID NO: 71163 - RNA, 19 nt, Homo sapiens
  misc_RNA (1)...(19): siRNA sense strand
cauccugacucuguugaca

SEQ ID NO: 71164 - RNA, 19 nt, Homo sapiens
  misc_RNA (1)...(19): siRNA sense strand
gaaguauaccugccuaccu

SEQ ID NO: 71165 - RNA, 19 nt, Homo sapiens
  misc_RNA (1)...(19): siRNA sense strand
ugaugcuuaugaacugaaa

SEQ ID NO: 71166 - RNA, 19 nt, Homo sapiens
  misc_RNA (1)...(19): siRNA sense strand
caaguacaugacuauauca

SEQ ID NO: 71167 - RNA, 19 nt, Homo sapiens
  misc_RNA (1)...(19): siRNA sense strand
uuugccaccucucuuuauu

SEQ ID NO: 71168 - RNA, 19 nt, Homo sapiens
  misc_RNA (1)...(19): siRNA sense strand
acaugacuauaucaggauu

SEQ ID NO: 71169 - RNA, 19 nt, Homo sapiens
  misc_RNA (1)...(19): siRNA sense strand
uaugaugcuuaugaacuga

SEQ ID NO: 71170 - RNA, 19 nt, Homo sapiens
  misc_RNA (1)...(19): siRNA sense strand
uuugacaaguacaugacua

SEQ ID NO: 71171 - RNA, 19 nt, Homo sapiens
  misc_RNA (1)...(19): siRNA sense strand
uaauuguggcucugaugaa

SEQ ID NO: 71172 - RNA, 19 nt, Homo sapiens
  misc_RNA (1)...(19): siRNA sense strand
guacuaccagcggauguug

SEQ ID NO: 71173 - RNA, 19 nt, Homo sapiens
  misc_RNA (1)...(19): siRNA sense strand
ugaagggagcuggaacaaa

SEQ ID NO: 71174 - RNA, 19 nt, Homo sapiens
  misc_RNA (1)...(19): siRNA sense strand
ucuucuggaugaccugaaa

SEQ ID NO: 71175 - RNA, 19 nt, Homo sapiens
  misc_RNA (1)...(19): siRNA sense strand
ccucuauuaugcuaugaag

SEQ ID NO: 71176 - RNA, 19 nt, Homo sapiens
  misc_RNA (1)...(19): siRNA sense strand
ugaaacccucucggcuuua

SEQ ID NO: 71177 - RNA, 19 nt, Homo sapiens
  misc_RNA (1)...(19): siRNA sense strand
agacuucuggcaauuuaga

SEQ ID NO: 71178 - RNA, 19 nt, Homo sapiens
  misc_RNA (1)...(19): siRNA sense strand
gaacaagccucucuucuuu

SEQ ID NO: 71179 - RNA, 19 nt, Homo sapiens
  misc_RNA (1)...(19): siRNA sense strand
gggaauucauugagaaaua

SEQ ID NO: 71180 - RNA, 19 nt, Homo sapiens
  misc_RNA (1)...(19): siRNA sense strand
ggaccucauugcugauuua

SEQ ID NO: 71181 - RNA, 19 nt, Homo sapiens
  misc_RNA (1)...(19): siRNA sense strand
uaucagaugugggaacuua

SEQ ID NO: 71182 - RNA, 19 nt, Homo sapiens
  misc_RNA (1)...(19): siRNA sense strand
gaagacacaaucaucgaua

SEQ ID NO: 71183 - RNA, 19 nt, Homo sapiens
  misc_RNA (1)...(19): siRNA sense strand
ggagggaauucauugagaa

SEQ ID NO: 71184 - RNA, 19 nt, Homo sapiens
  misc_RNA (1)...(19): siRNA sense strand
ggaggaggaugacguagug

SEQ ID NO: 71185 - RNA, 19 nt, Homo sapiens
  misc_RNA (1)...(19): siRNA sense strand
ugacaagucucuccaccaa

SEQ ID NO: 71186 - RNA, 19 nt, Homo sapiens
  misc_RNA (1)...(19): siRNA sense strand
gcgaggaccugguacaaca

SEQ ID NO: 71187 - RNA, 19 nt, Homo sapiens
  misc_RNA (1)...(19): siRNA sense strand
gaacagaugaagcccaguu

SEQ ID NO: 71188 - RNA, 19 nt, Homo sapiens
  misc_RNA (1)...(19): siRNA sense strand
agacacaucuggccacuuc

SEQ ID NO: 71189 - RNA, 19 nt, Homo sapiens
  misc_RNA (1)...(19): siRNA sense strand
gcagguggccuaucagaug

SEQ ID NO: 71190 - RNA, 19 nt, Homo sapiens
  misc_RNA (1)...(19): siRNA sense strand
ccucauugcugauuuaaag

SEQ ID NO: 71191 - RNA, 19 nt, Homo sapiens
  misc_RNA (1)...(19): siRNA sense strand
ugagaaauaugacaagucu

SEQ ID NO: 71192 - RNA, 19 nt, Homo sapiens
  misc_RNA (1)...(19): siRNA sense strand
ugaaaaggcucuuauugaa

SEQ ID NO: 71193 - RNA, 19 nt, Homo sapiens
  misc_RNA (1)...(19): siRNA sense strand
cgacaccucuggccacuuc

SEQ ID NO: 71194 - RNA, 19 nt, Homo sapiens
  misc_RNA (1)...(19): siRNA sense strand
ccgacaaacuuuacaaauc

SEQ ID NO: 71195 - RNA, 19 nt, Homo sapiens
  misc_RNA (1)...(19): siRNA sense strand
ucaaugaggccuauaagga

SEQ ID NO: 71196 - RNA, 19 nt, Homo sapiens
  misc_RNA (1)...(19): siRNA sense strand
gaaccagggaggaggauga

SEQ ID NO: 71197 - RNA, 19 nt, Homo sapiens
  misc_RNA (1)...(19): siRNA sense strand
cgacaaacuuuacaaaucc

SEQ ID NO: 71198 - RNA, 19 nt, Homo sapiens
  misc_RNA (1)...(19): siRNA sense strand
ccaguucauuuacaucuug

SEQ ID NO: 71199 - RNA, 19 nt, Homo sapiens
  misc_RNA (1)...(19): siRNA sense strand
ucauuuacaucuugggaaa

SEQ ID NO: 71200 - RNA, 19 nt, Homo sapiens
  misc_RNA (1)...(19): siRNA sense strand
cagcgcagguggccuauca

SEQ ID NO: 71201 - RNA, 19 nt, Homo sapiens
  misc_RNA (1)...(19): siRNA sense strand
caagaagacucugcugaag

SEQ ID NO: 71202 - RNA, 19 nt, Homo sapiens
  misc_RNA (1)...(19): siRNA sense strand
ugaauugacgggcaaguuu

SEQ ID NO: 71203 - RNA, 19 nt, Homo sapiens
  misc_RNA (1)...(19): siRNA sense strand
gcacagaugagaagacucu

SEQ ID NO: 71204 - RNA, 19 nt, Homo sapiens
  misc_RNA (1)...(19): siRNA sense strand
ugaagggacucgggacuga

SEQ ID NO: 71205 - RNA, 19 nt, Homo sapiens
  misc_RNA (1)...(19): siRNA sense strand
ggagagucuuccaggaguu

SEQ ID NO: 71206 - RNA, 19 nt, Homo sapiens
  misc_RNA (1)...(19): siRNA sense strand
ucaagaugaccaacuauga

SEQ ID NO: 71207 - RNA, 19 nt, Homo sapiens
  misc_RNA (1)...(19): siRNA sense strand
gaagcccaguucauuuaca

SEQ ID NO: 71208 - RNA, 19 nt, Homo sapiens
  misc_RNA (1)...(19): siRNA sense strand
gaaaaggcucuuauugaaa

SEQ ID NO: 71209 - RNA, 19 nt, Homo sapiens
  misc_RNA (1)...(19): siRNA sense strand
gaauugacgggcaaguuug

SEQ ID NO: 71210 - RNA, 19 nt, Homo sapiens
  misc_RNA (1)...(19): siRNA sense strand
agaagacucugaccaggau

SEQ ID NO: 71211 - RNA, 19 nt, Homo sapiens
  misc_RNA (1)...(19): siRNA sense strand
ccaaagcgcugcggaaagc

SEQ ID NO: 71212 - RNA, 19 nt, Homo sapiens
  misc_RNA (1)...(19): siRNA sense strand
ccaccugccuauugugaug

SEQ ID NO: 71213 - RNA, 19 nt, Homo sapiens
  misc_RNA (1)...(19): siRNA sense strand
acagcaugaucaagaauga

SEQ ID NO: 71214 - RNA, 19 nt, Homo sapiens
  misc_RNA (1)...(19): siRNA sense strand
ugacaccucuggcgaguac

SEQ ID NO: 71215 - RNA, 19 nt, Homo sapiens
  misc_RNA (1)...(19): siRNA sense strand
ugucagggaugcauuugug

SEQ ID NO: 71216 - RNA, 19 nt, Homo sapiens
  misc_RNA (1)...(19): siRNA sense strand
acaagaagacucugcugaa

SEQ ID NO: 71217 - RNA, 19 nt, Homo sapiens
  misc_RNA (1)...(19): siRNA sense strand
ccacagggaagccgaugaa

SEQ ID NO: 71218 - RNA, 19 nt, Homo sapiens
  misc_RNA (1)...(19): siRNA sense strand
cggagggaauucauugaga

SEQ ID NO: 71219 - RNA, 19 nt, Homo sapiens
  misc_RNA (1)...(19): siRNA sense strand
ggaugucagggaugcauuu

SEQ ID NO: 71220 - RNA, 19 nt, Homo sapiens
  misc_RNA (1)...(19): siRNA sense strand
cuuaaugacugaccugaag

SEQ ID NO: 71221 - RNA, 19 nt, Homo sapiens
  misc_RNA (1)...(19): siRNA sense strand
ggacugacgaagacacaau

SEQ ID NO: 71222 - RNA, 19 nt, Homo sapiens
  misc_RNA (1)...(19): siRNA sense strand
gagggaauucauugagaaa

SEQ ID NO: 71223 - RNA, 19 nt, Homo sapiens
  misc_RNA (1)...(19): siRNA sense strand
cuauugugaugccaaagaa

SEQ ID NO: 71224 - RNA, 19 nt, Homo sapiens
  misc_RNA (1)...(19): siRNA sense strand
ccuauaaggaggacuauca

SEQ ID NO: 71225 - RNA, 19 nt, Homo sapiens
  misc_RNA (1)...(19): siRNA sense strand
agaagucccucuacagcau

SEQ ID NO: 71226 - RNA, 19 nt, Homo sapiens
  misc_RNA (1)...(19): siRNA sense strand
uaugagaagucccucuaca

SEQ ID NO: 71227 - RNA, 19 nt, Homo sapiens
  misc_RNA (1)...(19): siRNA sense strand
ccuggaggcugacaucauc

SEQ ID NO: 71228 - RNA, 19 nt, Homo sapiens
  misc_RNA (1)...(19): siRNA sense strand
guagugaguuggacaugcu

SEQ ID NO: 71229 - RNA, 19 nt, Homo sapiens
  misc_RNA (1)...(19): siRNA sense strand
ggaccaaguaugagaaguc

SEQ ID NO: 71230 - RNA, 19 nt, Homo sapiens
  misc_RNA (1)...(19): siRNA sense strand
gcauuggcacugaugagaa

SEQ ID NO: 71231 - RNA, 19 nt, Homo sapiens
  misc_RNA (1)...(19): siRNA sense strand
gaccugaagucugagaucu

SEQ ID NO: 71232 - RNA, 19 nt, Homo sapiens
  misc_RNA (1)...(19): siRNA sense strand
aagacacaaucaucgauau

SEQ ID NO: 71233 - RNA, 19 nt, Homo sapiens
  misc_RNA (1)...(19): siRNA sense strand
ugacgaagacacaaucauc

SEQ ID NO: 71234 - RNA, 19 nt, Homo sapiens
  misc_RNA (1)...(19): siRNA sense strand
agaagacucugcugaagcu

SEQ ID NO: 71235 - RNA, 19 nt, Homo sapiens
  misc_RNA (1)...(19): siRNA sense strand
gguugguguucgaugagua

SEQ ID NO: 71236 - RNA, 19 nt, Homo sapiens
  misc_RNA (1)...(19): siRNA sense strand
ucuacagcaugaucaagaa

SEQ ID NO: 71237 - RNA, 19 nt, Homo sapiens
  misc_RNA (1)...(19): siRNA sense strand
ggucucccguagugaguug

SEQ ID NO: 71238 - RNA, 19 nt, Homo sapiens
  misc_RNA (1)...(19): siRNA sense strand
gguggcagcauacaaagau

SEQ ID NO: 71239 - RNA, 19 nt, Homo sapiens
  misc_RNA (1)...(19): siRNA sense strand
ugacaccuccggagacuuc

SEQ ID NO: 71240 - RNA, 19 nt, Homo sapiens
  misc_RNA (1)...(19): siRNA sense strand
ccaucaaugaggccuauaa

SEQ ID NO: 71241 - RNA, 19 nt, Homo sapiens
  misc_RNA (1)...(19): siRNA sense strand
gaugaaaaggcucuuauug

SEQ ID NO: 71242 - RNA, 19 nt, Homo sapiens
  misc_RNA (1)...(19): siRNA sense strand
cuucaacccugacgcagau

SEQ ID NO: 71243 - RNA, 19 nt, Homo sapiens
  misc_RNA (1)...(19): siRNA sense strand
cagguggccuaucagaugu

SEQ ID NO: 71244 - RNA, 19 nt, Homo sapiens
  misc_RNA (1)...(19): siRNA sense strand
gccaaagaaauuaaagaug

SEQ ID NO: 71245 - RNA, 19 nt, Homo sapiens
  misc_RNA (1)...(19): siRNA sense strand
uaaggaggacuaucacaag

SEQ ID NO: 71246 - RNA, 19 nt, Homo sapiens
  misc_RNA (1)...(19): siRNA sense strand
gagcgaggaccugguacaa

SEQ ID NO: 71247 - RNA, 19 nt, Homo sapiens
  misc_RNA (1)...(19): siRNA sense strand
gccgggacuuaaugacuga

SEQ ID NO: 71248 - RNA, 19 nt, Homo sapiens
  misc_RNA (1)...(19): siRNA sense strand
gacacaaucaucgauauca

SEQ ID NO: 71249 - RNA, 19 nt, Homo sapiens
  misc_RNA (1)...(19): siRNA sense strand
ugaagggcuuuggcaguga

SEQ ID NO: 71250 - RNA, 19 nt, Homo sapiens
  misc_RNA (1)...(19): siRNA sense strand
ggagcaccccggaauauuu

SEQ ID NO: 71251 - RNA, 19 nt, Homo sapiens
  misc_RNA (1)...(19): siRNA sense strand
acacaaucaucgauaucau

SEQ ID NO: 71252 - RNA, 19 nt, Homo sapiens
  misc_RNA (1)...(19): siRNA sense strand
agaaauaugacaagucucu

SEQ ID NO: 71253 - RNA, 19 nt, Homo sapiens
  misc_RNA (1)...(19): siRNA sense strand
ggaugcauuuguggccauu

SEQ ID NO: 71254 - RNA, 19 nt, Homo sapiens
  misc_RNA (1)...(19): siRNA sense strand
uccaggaguucaucaagau

SEQ ID NO: 71255 - RNA, 19 nt, Homo sapiens
  misc_RNA (1)...(19): siRNA sense strand
ucaugacgauccuguguac

SEQ ID NO: 71256 - RNA, 19 nt, Homo sapiens
  misc_RNA (1)...(19): siRNA sense strand
cauuggcacugaugagaag

SEQ ID NO: 71257 - RNA, 19 nt, Homo sapiens
  misc_RNA (1)...(19): siRNA sense strand
ugugaugccaaagaaauua

SEQ ID NO: 71258 - RNA, 19 nt, Homo sapiens
  misc_RNA (1)...(19): siRNA sense strand
gaacugaaauggggaacag

SEQ ID NO: 71259 - RNA, 19 nt, Homo sapiens
  misc_RNA (1)...(19): siRNA sense strand
ggaccuggaggcugacauc

SEQ ID NO: 71260 - RNA, 19 nt, Homo sapiens
  misc_RNA (1)...(19): siRNA sense strand
gacaaacuuuacaaaucca

SEQ ID NO: 71261 - RNA, 19 nt, Homo sapiens
  misc_RNA (1)...(19): siRNA sense strand
acaagccucucuucuuugc

SEQ ID NO: 71262 - RNA, 19 nt, Homo sapiens
  misc_RNA (1)...(19): siRNA sense strand
uucaaagugucaagaacaa

SEQ ID NO: 71263 - RNA, 19 nt, Homo sapiens
  misc_RNA (1)...(19): siRNA sense strand
aaggaggacuaucacaagu

SEQ ID NO: 71264 - RNA, 19 nt, Homo sapiens
  misc_RNA (1)...(19): siRNA sense strand
gaucuuccggaccaaguau

SEQ ID NO: 71265 - RNA, 19 nt, Homo sapiens
  misc_RNA (1)...(19): siRNA sense strand
ggagcugucuggggacuuu

SEQ ID NO: 71266 - RNA, 19 nt, Homo sapiens
  misc_RNA (1)...(19): siRNA sense strand
gguguucgaugaguaucug

SEQ ID NO: 71267 - RNA, 19 nt, Homo sapiens
  misc_RNA (1)...(19): siRNA sense strand
gccgacaaacuuuacaaau

SEQ ID NO: 71268 - RNA, 19 nt, Homo sapiens
  misc_RNA (1)...(19): siRNA sense strand
gcauuuguggccauuguuc

SEQ ID NO: 71269 - RNA, 19 nt, Homo sapiens
  misc_RNA (1)...(19): siRNA sense strand
ggaccaggcacgggaagau

SEQ ID NO: 71270 - RNA, 19 nt, Homo sapiens
  misc_RNA (1)...(19): siRNA sense strand
gcgcagguggccuaucaga

SEQ ID NO: 71271 - RNA, 19 nt, Homo sapiens
  misc_RNA (1)...(19): siRNA sense strand
gugaugccaaagaaauuaa

SEQ ID NO: 71272 - RNA, 19 nt, Homo sapiens
  misc_RNA (1)...(19): siRNA sense strand
ggacuuugagaagcuaaug

SEQ ID NO: 71273 - RNA, 19 nt, Homo sapiens
  misc_RNA (1)...(19): siRNA sense strand
gagcaccccggaauauuuu

SEQ ID NO: 71274 - RNA, 19 nt, Homo sapiens
  misc_RNA (1)...(19): siRNA sense strand
caagaugaccaacuaugac

SEQ ID NO: 71275 - RNA, 19 nt, Homo sapiens
  misc_RNA (1)...(19): siRNA sense strand
agacacguuucaugacgau

SEQ ID NO: 71276 - RNA, 19 nt, Homo sapiens
  misc_RNA (1)...(19): siRNA sense strand
acaaucaucgauaucauca

SEQ ID NO: 71277 - RNA, 19 nt, Homo sapiens
  misc_RNA (1)...(19): siRNA sense strand
gcgcccagccaaugacuuc

SEQ ID NO: 71278 - RNA, 19 nt, Homo sapiens
  misc_RNA (1)...(19): siRNA sense strand
gaacaagccucucuucuuu

SEQ ID NO: 71279 - RNA, 19 nt, Homo sapiens
  misc_RNA (1)...(19): siRNA sense strand
gggaauucauugagaaaua

SEQ ID NO: 71280 - RNA, 19 nt, Homo sapiens
  misc_RNA (1)...(19): siRNA sense strand
ggaccucauugcugauuua

SEQ ID NO: 71281 - RNA, 19 nt, Homo sapiens
  misc_RNA (1)...(19): siRNA sense strand
uaucagaugugggaacuua

SEQ ID NO: 71282 - RNA, 19 nt, Homo sapiens
  misc_RNA (1)...(19): siRNA sense strand
gaagacacaaucaucgaua

SEQ ID NO: 71283 - RNA, 19 nt, Homo sapiens
  misc_RNA (1)...(19): siRNA sense strand
ggagggaauucauugagaa

SEQ ID NO: 71284 - RNA, 19 nt, Homo sapiens
  misc_RNA (1)...(19): siRNA sense strand
ggaggaggaugacguagug

SEQ ID NO: 71285 - RNA, 19 nt, Homo sapiens
  misc_RNA (1)...(19): siRNA sense strand
ugacaagucucuccaccaa

SEQ ID NO: 71286 - RNA, 19 nt, Homo sapiens
  misc_RNA (1)...(19): siRNA sense strand
gcgaggaccugguacaaca

SEQ ID NO: 71287 - RNA, 19 nt, Homo sapiens
  misc_RNA (1)...(19): siRNA sense strand
gaacagaugaagcccaguu

SEQ ID NO: 71288 - RNA, 19 nt, Homo sapiens
  misc_RNA (1)...(19): siRNA sense strand
agacacaucuggccacuuc

SEQ ID NO: 71289 - RNA, 19 nt, Homo sapiens
  misc_RNA (1)...(19): siRNA sense strand
gcagguggccuaucagaug

SEQ ID NO: 71290 - RNA, 19 nt, Homo sapiens
  misc_RNA (1)...(19): siRNA sense strand
ccucauugcugauuuaaag

SEQ ID NO: 71291 - RNA, 19 nt, Homo sapiens
  misc_RNA (1)...(19): siRNA sense strand
ugagaaauaugacaagucu

SEQ ID NO: 71292 - RNA, 19 nt, Homo sapiens
  misc_RNA (1)...(19): siRNA sense strand
ugaaaaggcucuuauugaa

SEQ ID NO: 71293 - RNA, 19 nt, Homo sapiens
  misc_RNA (1)...(19): siRNA sense strand
cgacaccucuggccacuuc

SEQ ID NO: 71294 - RNA, 19 nt, Homo sapiens
  misc_RNA (1)...(19): siRNA sense strand
ccgacaaacuuuacaaauc

SEQ ID NO: 71295 - RNA, 19 nt, Homo sapiens
  misc_RNA (1)...(19): siRNA sense strand
ucaaugaggccuauaagga

SEQ ID NO: 71296 - RNA, 19 nt, Homo sapiens
  misc_RNA (1)...(19): siRNA sense strand
gaaccagggaggaggauga

SEQ ID NO: 71297 - RNA, 19 nt, Homo sapiens
  misc_RNA (1)...(19): siRNA sense strand
cgacaaacuuuacaaaucc

SEQ ID NO: 71298 - RNA, 19 nt, Homo sapiens
  misc_RNA (1)...(19): siRNA sense strand
ccaguucauuuacaucuug

SEQ ID NO: 71299 - RNA, 19 nt, Homo sapiens
  misc_RNA (1)...(19): siRNA sense strand
ucauuuacaucuugggaaa

SEQ ID NO: 71300 - RNA, 19 nt, Homo sapiens
  misc_RNA (1)...(19): siRNA sense strand
cagcgcagguggccuauca

SEQ ID NO: 71301 - RNA, 19 nt, Homo sapiens
  misc_RNA (1)...(19): siRNA sense strand
caagaagacucugcugaag

SEQ ID NO: 71302 - RNA, 19 nt, Homo sapiens
  misc_RNA (1)...(19): siRNA sense strand
ugaauugacgggcaaguuu

SEQ ID NO: 71303 - RNA, 19 nt, Homo sapiens
  misc_RNA (1)...(19): siRNA sense strand
gcacagaugagaagacucu

SEQ ID NO: 71304 - RNA, 19 nt, Homo sapiens
  misc_RNA (1)...(19): siRNA sense strand
gaaauagcagacacaccua

SEQ ID NO: 71305 - RNA, 19 nt, Homo sapiens
  misc_RNA (1)...(19): siRNA sense strand
ugaagggacucgggacuga

SEQ ID NO: 71306 - RNA, 19 nt, Homo sapiens
  misc_RNA (1)...(19): siRNA sense strand
ggagagucuuccaggaguu

SEQ ID NO: 71307 - RNA, 19 nt, Homo sapiens
  misc_RNA (1)...(19): siRNA sense strand
ucaagaugaccaacuauga

SEQ ID NO: 71308 - RNA, 19 nt, Homo sapiens
  misc_RNA (1)...(19): siRNA sense strand
gaagcccaguucauuuaca

SEQ ID NO: 71309 - RNA, 19 nt, Homo sapiens
  misc_RNA (1)...(19): siRNA sense strand
gaaaaggcucuuauugaaa

SEQ ID NO: 71310 - RNA, 19 nt, Homo sapiens
  misc_RNA (1)...(19): siRNA sense strand
gaauugacgggcaaguuug

SEQ ID NO: 71311 - RNA, 19 nt, Homo sapiens
  misc_RNA (1)...(19): siRNA sense strand
agaagacucugaccaggau

SEQ ID NO: 71312 - RNA, 19 nt, Homo sapiens
  misc_RNA (1)...(19): siRNA sense strand
ccaaagcgcugcggaaagc

SEQ ID NO: 71313 - RNA, 19 nt, Homo sapiens
  misc_RNA (1)...(19): siRNA sense strand
ccaccugccuauugugaug

SEQ ID NO: 71314 - RNA, 19 nt, Homo sapiens
  misc_RNA (1)...(19): siRNA sense strand
acagcaugaucaagaauga

SEQ ID NO: 71315 - RNA, 19 nt, Homo sapiens
  misc_RNA (1)...(19): siRNA sense strand
ugacaccucuggcgaguac

SEQ ID NO: 71316 - RNA, 19 nt, Homo sapiens
  misc_RNA (1)...(19): siRNA sense strand
ugucagggaugcauuugug

SEQ ID NO: 71317 - RNA, 19 nt, Homo sapiens
  misc_RNA (1)...(19): siRNA sense strand
acaagaagacucugcugaa

SEQ ID NO: 71318 - RNA, 19 nt, Homo sapiens
  misc_RNA (1)...(19): siRNA sense strand
ccacagggaagccgaugaa

SEQ ID NO: 71319 - RNA, 19 nt, Homo sapiens
  misc_RNA (1)...(19): siRNA sense strand
cggagggaauucauugaga

SEQ ID NO: 71320 - RNA, 19 nt, Homo sapiens
  misc_RNA (1)...(19): siRNA sense strand
ggaugucagggaugcauuu

SEQ ID NO: 71321 - RNA, 19 nt, Homo sapiens
  misc_RNA (1)...(19): siRNA sense strand
cuuaaugacugaccugaag

SEQ ID NO: 71322 - RNA, 19 nt, Homo sapiens
  misc_RNA (1)...(19): siRNA sense strand
ggacugacgaagacacaau

SEQ ID NO: 71323 - RNA, 19 nt, Homo sapiens
  misc_RNA (1)...(19): siRNA sense strand
gagggaauucauugagaaa

SEQ ID NO: 71324 - RNA, 19 nt, Homo sapiens
  misc_RNA (1)...(19): siRNA sense strand
cuauugugaugccaaagaa

SEQ ID NO: 71325 - RNA, 19 nt, Homo sapiens
  misc_RNA (1)...(19): siRNA sense strand
ccuauaaggaggacuauca

SEQ ID NO: 71326 - RNA, 19 nt, Homo sapiens
  misc_RNA (1)...(19): siRNA sense strand
agaagucccucuacagcau

SEQ ID NO: 71327 - RNA, 19 nt, Homo sapiens
  misc_RNA (1)...(19): siRNA sense strand
uaugagaagucccucuaca

SEQ ID NO: 71328 - RNA, 19 nt, Homo sapiens
  misc_RNA (1)...(19): siRNA sense strand
ccuggaggcugacaucauc

SEQ ID NO: 71329 - RNA, 19 nt, Homo sapiens
  misc_RNA (1)...(19): siRNA sense strand
guagugaguuggacaugcu

SEQ ID NO: 71330 - RNA, 19 nt, Homo sapiens
  misc_RNA (1)...(19): siRNA sense strand
ggaccaaguaugagaaguc

SEQ ID NO: 71331 - RNA, 19 nt, Homo sapiens
  misc_RNA (1)...(19): siRNA sense strand
gcauuggcacugaugagaa

SEQ ID NO: 71332 - RNA, 19 nt, Homo sapiens
  misc_RNA (1)...(19): siRNA sense strand
gaccugaagucugagaucu

SEQ ID NO: 71333 - RNA, 19 nt, Homo sapiens
  misc_RNA (1)...(19): siRNA sense strand
aagacacaaucaucgauau

SEQ ID NO: 71334 - RNA, 19 nt, Homo sapiens
  misc_RNA (1)...(19): siRNA sense strand
ugacgaagacacaaucauc

SEQ ID NO: 71335 - RNA, 19 nt, Homo sapiens
  misc_RNA (1)...(19): siRNA sense strand
agaagacucugcugaagcu

SEQ ID NO: 71336 - RNA, 19 nt, Homo sapiens
  misc_RNA (1)...(19): siRNA sense strand
gguugguguucgaugagua

SEQ ID NO: 71337 - RNA, 19 nt, Homo sapiens
  misc_RNA (1)...(19): siRNA sense strand
ucuacagcaugaucaagaa

SEQ ID NO: 71338 - RNA, 19 nt, Homo sapiens
  misc_RNA (1)...(19): siRNA sense strand
ggucucccguagugaguug

SEQ ID NO: 71339 - RNA, 19 nt, Homo sapiens
  misc_RNA (1)...(19): siRNA sense strand
gguggcagcauacaaagau

SEQ ID NO: 71340 - RNA, 19 nt, Homo sapiens
  misc_RNA (1)...(19): siRNA sense strand
ugacaccuccggagacuuc

SEQ ID NO: 71341 - RNA, 19 nt, Homo sapiens
  misc_RNA (1)...(19): siRNA sense strand
ccaucaaugaggccuauaa

SEQ ID NO: 71342 - RNA, 19 nt, Homo sapiens
  misc_RNA (1)...(19): siRNA sense strand
gaugaaaaggcucuuauug

SEQ ID NO: 71343 - RNA, 19 nt, Homo sapiens
  misc_RNA (1)...(19): siRNA sense strand
cuucaacccugacgcagau

SEQ ID NO: 71344 - RNA, 19 nt, Homo sapiens
  misc_RNA (1)...(19): siRNA sense strand
cagguggccuaucagaugu

SEQ ID NO: 71345 - RNA, 19 nt, Homo sapiens
  misc_RNA (1)...(19): siRNA sense strand
gccaaagaaauuaaagaug

SEQ ID NO: 71346 - RNA, 19 nt, Homo sapiens
  misc_RNA (1)...(19): siRNA sense strand
uaaggaggacuaucacaag

SEQ ID NO: 71347 - RNA, 19 nt, Homo sapiens
  misc_RNA (1)...(19): siRNA sense strand
gagcgaggaccugguacaa

SEQ ID NO: 71348 - RNA, 19 nt, Homo sapiens
  misc_RNA (1)...(19): siRNA sense strand
gccgggacuuaaugacuga

SEQ ID NO: 71349 - RNA, 19 nt, Homo sapiens
  misc_RNA (1)...(19): siRNA sense strand
gacacaaucaucgauauca

SEQ ID NO: 71350 - RNA, 19 nt, Homo sapiens
  misc_RNA (1)...(19): siRNA sense strand
ugaagggcuuuggcaguga

SEQ ID NO: 71351 - RNA, 19 nt, Homo sapiens
  misc_RNA (1)...(19): siRNA sense strand
ggagcaccccggaauauuu

SEQ ID NO: 71352 - RNA, 19 nt, Homo sapiens
  misc_RNA (1)...(19): siRNA sense strand
acacaaucaucgauaucau

SEQ ID NO: 71353 - RNA, 19 nt, Homo sapiens
  misc_RNA (1)...(19): siRNA sense strand
agaaauaugacaagucucu

SEQ ID NO: 71354 - RNA, 19 nt, Homo sapiens
  misc_RNA (1)...(19): siRNA sense strand
ggaugcauuuguggccauu

SEQ ID NO: 71355 - RNA, 19 nt, Homo sapiens
  misc_RNA (1)...(19): siRNA sense strand
uccaggaguucaucaagau

SEQ ID NO: 71356 - RNA, 19 nt, Homo sapiens
  misc_RNA (1)...(19): siRNA sense strand
ucaugacgauccuguguac

SEQ ID NO: 71357 - RNA, 19 nt, Homo sapiens
  misc_RNA (1)...(19): siRNA sense strand
cauuggcacugaugagaag

SEQ ID NO: 71358 - RNA, 19 nt, Homo sapiens
  misc_RNA (1)...(19): siRNA sense strand
ugugaugccaaagaaauua

SEQ ID NO: 71359 - RNA, 19 nt, Homo sapiens
  misc_RNA (1)...(19): siRNA sense strand
gaacugaaauggggaacag

SEQ ID NO: 71360 - RNA, 19 nt, Homo sapiens
  misc_RNA (1)...(19): siRNA sense strand
ggaccuggaggcugacauc

SEQ ID NO: 71361 - RNA, 19 nt, Homo sapiens
  misc_RNA (1)...(19): siRNA sense strand
gacaaacuuuacaaaucca

SEQ ID NO: 71362 - RNA, 19 nt, Homo sapiens
  misc_RNA (1)...(19): siRNA sense strand
acaagccucucuucuuugc

SEQ ID NO: 71363 - RNA, 19 nt, Homo sapiens
  misc_RNA (1)...(19): siRNA sense strand
uucaaagugucaagaacaa

SEQ ID NO: 71364 - RNA, 19 nt, Homo sapiens
  misc_RNA (1)...(19): siRNA sense strand
aaggaggacuaucacaagu

SEQ ID NO: 71365 - RNA, 19 nt, Homo sapiens
  misc_RNA (1)...(19): siRNA sense strand
gaucuuccggaccaaguau

SEQ ID NO: 71366 - RNA, 19 nt, Homo sapiens
  misc_RNA (1)...(19): siRNA sense strand
ggagcugucuggggacuuu

SEQ ID NO: 71367 - RNA, 19 nt, Homo sapiens
  misc_RNA (1)...(19): siRNA sense strand
gguguucgaugaguaucug

SEQ ID NO: 71368 - RNA, 19 nt, Homo sapiens
  misc_RNA (1)...(19): siRNA sense strand
gccgacaaacuuuacaaau

SEQ ID NO: 71369 - RNA, 19 nt, Homo sapiens
  misc_RNA (1)...(19): siRNA sense strand
gcauuuguggccauuguuc

SEQ ID NO: 71370 - RNA, 19 nt, Homo sapiens
  misc_RNA (1)...(19): siRNA sense strand
ggaccaggcacgggaagau

SEQ ID NO: 71371 - RNA, 19 nt, Homo sapiens
  misc_RNA (1)...(19): siRNA sense strand
gcgcagguggccuaucaga

SEQ ID NO: 71372 - RNA, 19 nt, Homo sapiens
  misc_RNA (1)...(19): siRNA sense strand
gugaugccaaagaaauuaa

SEQ ID NO: 71373 - RNA, 19 nt, Homo sapiens
  misc_RNA (1)...(19): siRNA sense strand
ggacuuugagaagcuaaug

SEQ ID NO: 71374 - RNA, 19 nt, Homo sapiens
  misc_RNA (1)...(19): siRNA sense strand
gcgcccagccaaugacuuc

SEQ ID NO: 71375 - RNA, 19 nt, Homo sapiens
  misc_RNA (1)...(19): siRNA sense strand
caagaugaccaacuaugac

SEQ ID NO: 71376 - RNA, 19 nt, Homo sapiens
  misc_RNA (1)...(19): siRNA sense strand
agacacguuucaugacgau

SEQ ID NO: 71377 - RNA, 19 nt, Homo sapiens
  misc_RNA (1)...(19): siRNA sense strand
acaaucaucgauaucauca

SEQ ID NO: 71378 - RNA, 19 nt, Homo sapiens
  misc_RNA (1)...(19): siRNA sense strand
ucaaagaucucaaaucaga

SEQ ID NO: 71379 - RNA, 19 nt, Homo sapiens
  misc_RNA (1)...(19): siRNA sense strand
gaaccgcccugccuucuuu

SEQ ID NO: 71380 - RNA, 19 nt, Homo sapiens
  misc_RNA (1)...(19): siRNA sense strand
gaacguguauugauugaga

SEQ ID NO: 71381 - RNA, 19 nt, Homo sapiens
  misc_RNA (1)...(19): siRNA sense strand
gaagugagauugaccuugu

SEQ ID NO: 71382 - RNA, 19 nt, Homo sapiens
  misc_RNA (1)...(19): siRNA sense strand
gaugagaaccagaguauaa

SEQ ID NO: 71383 - RNA, 19 nt, Homo sapiens
  misc_RNA (1)...(19): siRNA sense strand
gagaaauugucagauguua

SEQ ID NO: 71384 - RNA, 19 nt, Homo sapiens
  misc_RNA (1)...(19): siRNA sense strand
gagcuaccauggaggcuua

SEQ ID NO: 71385 - RNA, 19 nt, Homo sapiens
  misc_RNA (1)...(19): siRNA sense strand
gaaucuugcuuuaacauga

SEQ ID NO: 71386 - RNA, 19 nt, Homo sapiens
  misc_RNA (1)...(19): siRNA sense strand
guaaggcaaugaaggguuu

SEQ ID NO: 71387 - RNA, 19 nt, Homo sapiens
  misc_RNA (1)...(19): siRNA sense strand
gaggacagaugccuucuca

SEQ ID NO: 71388 - RNA, 19 nt, Homo sapiens
  misc_RNA (1)...(19): siRNA sense strand
gcucuacuaugcuaugaaa

SEQ ID NO: 71389 - RNA, 19 nt, Homo sapiens
  misc_RNA (1)...(19): siRNA sense strand
ccaaauggcucaggaagau

SEQ ID NO: 71390 - RNA, 19 nt, Homo sapiens
  misc_RNA (1)...(19): siRNA sense strand
gauguucgcucagauguau

SEQ ID NO: 71391 - RNA, 19 nt, Homo sapiens
  misc_RNA (1)...(19): siRNA sense strand
gcucagauguaucagaaga

SEQ ID NO: 71392 - RNA, 19 nt, Homo sapiens
  misc_RNA (1)...(19): siRNA sense strand
gaucucaaaucagaguuaa

SEQ ID NO: 71393 - RNA, 19 nt, Homo sapiens
  misc_RNA (1)...(19): siRNA sense strand
gaguggagauuaccgaaga

SEQ ID NO: 71394 - RNA, 19 nt, Homo sapiens
  misc_RNA (1)...(19): siRNA sense strand
gaaauugucagauguuauc

SEQ ID NO: 71395 - RNA, 19 nt, Homo sapiens
  misc_RNA (1)...(19): siRNA sense strand
ucaggaacguguauugauu

SEQ ID NO: 71396 - RNA, 19 nt, Homo sapiens
  misc_RNA (1)...(19): siRNA sense strand
gauguuaucagucagaauu

SEQ ID NO: 71397 - RNA, 19 nt, Homo sapiens
  misc_RNA (1)...(19): siRNA sense strand
acagaugccuucucaguau

SEQ ID NO: 71398 - RNA, 19 nt, Homo sapiens
  misc_RNA (1)...(19): siRNA sense strand
ggacagaugccuucucagu

SEQ ID NO: 71399 - RNA, 19 nt, Homo sapiens
  misc_RNA (1)...(19): siRNA sense strand
ucagauacaucaggacauu

SEQ ID NO: 71400 - RNA, 19 nt, Homo sapiens
  misc_RNA (1)...(19): siRNA sense strand
ugucagauguuaucaguca

SEQ ID NO: 71401 - RNA, 19 nt, Homo sapiens
  misc_RNA (1)...(19): siRNA sense strand
gaguauaaaccaccaaaug

SEQ ID NO: 71402 - RNA, 19 nt, Homo sapiens
  misc_RNA (1)...(19): siRNA sense strand
agaguuaaguggaaauaug

SEQ ID NO: 71403 - RNA, 19 nt, Homo sapiens
  misc_RNA (1)...(19): siRNA sense strand
ggaaauauggaagaacuga

SEQ ID NO: 71404 - RNA, 19 nt, Homo sapiens
  misc_RNA (1)...(19): siRNA sense strand
gacagaugccuucucagua

SEQ ID NO: 71405 - RNA, 19 nt, Homo sapiens
  misc_RNA (1)...(19): siRNA sense strand
gacauuaggucagauacau

SEQ ID NO: 71406 - RNA, 19 nt, Homo sapiens
  misc_RNA (1)...(19): siRNA sense strand
caggaaauccgagaaauug

SEQ ID NO: 71407 - RNA, 19 nt, Homo sapiens
  misc_RNA (1)...(19): siRNA sense strand
guagaaagugguuugaaga

SEQ ID NO: 71408 - RNA, 19 nt, Homo sapiens
  misc_RNA (1)...(19): siRNA sense strand
ccuaguggcuuuccuccaa

SEQ ID NO: 71409 - RNA, 19 nt, Homo sapiens
  misc_RNA (1)...(19): siRNA sense strand
ggacagaugagcaggcaau

SEQ ID NO: 71410 - RNA, 19 nt, Homo sapiens
  misc_RNA (1)...(19): siRNA sense strand
cgaugaaucuugcuuuaac

SEQ ID NO: 71411 - RNA, 19 nt, Homo sapiens
  misc_RNA (1)...(19): siRNA sense strand
gaugaaucuugcuuuaaca

SEQ ID NO: 71412 - RNA, 19 nt, Homo sapiens
  misc_RNA (1)...(19): siRNA sense strand
gauccuggcccucuucaug

SEQ ID NO: 71413 - RNA, 19 nt, Homo sapiens
  misc_RNA (1)...(19): siRNA sense strand
gcuaaucgagacuuguuaa

SEQ ID NO: 71414 - RNA, 19 nt, Homo sapiens
  misc_RNA (1)...(19): siRNA sense strand
gaaauccgagaaauuguca

SEQ ID NO: 71415 - RNA, 19 nt, Homo sapiens
  misc_RNA (1)...(19): siRNA sense strand
ucaugccuccuacguauua

SEQ ID NO: 71416 - RNA, 19 nt, Homo sapiens
  misc_RNA (1)...(19): siRNA sense strand
ggaggugccuacccacaag

SEQ ID NO: 71417 - RNA, 19 nt, Homo sapiens
  misc_RNA (1)...(19): siRNA sense strand
cagaugagcaggcaauugu

SEQ ID NO: 71418 - RNA, 19 nt, Homo sapiens
  misc_RNA (1)...(19): siRNA sense strand
ucgcucagauguaucagaa

SEQ ID NO: 71419 - RNA, 19 nt, Homo sapiens
  misc_RNA (1)...(19): siRNA sense strand
ccaacaggcuacccaccuu

SEQ ID NO: 71420 - RNA, 19 nt, Homo sapiens
  misc_RNA (1)...(19): siRNA sense strand
cuucaugccuccuacguau

SEQ ID NO: 71421 - RNA, 19 nt, Homo sapiens
  misc_RNA (1)...(19): siRNA sense strand
ccacaagugccaaguagug

SEQ ID NO: 71422 - RNA, 19 nt, Homo sapiens
  misc_RNA (1)...(19): siRNA sense strand
aaucgagacuuguuaagca

SEQ ID NO: 71423 - RNA, 19 nt, Homo sapiens
  misc_RNA (1)...(19): siRNA sense strand
caagaacaaaucaggaaau

SEQ ID NO: 71424 - RNA, 19 nt, Homo sapiens
  misc_RNA (1)...(19): siRNA sense strand
ucaggaaauccgagaaauu

SEQ ID NO: 71425 - RNA, 19 nt, Homo sapiens
  misc_RNA (1)...(19): siRNA sense strand
ggaaauccgagaaauuguc

SEQ ID NO: 71426 - RNA, 19 nt, Homo sapiens
  misc_RNA (1)...(19): siRNA sense strand
ccgaccagcugccaacuuc

SEQ ID NO: 71427 - RNA, 19 nt, Homo sapiens
  misc_RNA (1)...(19): siRNA sense strand
caacaggcuacccaccuuu

SEQ ID NO: 71428 - RNA, 19 nt, Homo sapiens
  misc_RNA (1)...(19): siRNA sense strand
gugaugagaaccagaguau

SEQ ID NO: 71429 - RNA, 19 nt, Homo sapiens
  misc_RNA (1)...(19): siRNA sense strand
ccgagaaauugucagaugu

SEQ ID NO: 71430 - RNA, 19 nt, Homo sapiens
  misc_RNA (1)...(19): siRNA sense strand
gccuggagcuuacggaaag

SEQ ID NO: 71431 - RNA, 19 nt, Homo sapiens
  misc_RNA (1)...(19): siRNA sense strand
guggaaauauggaagaacu

SEQ ID NO: 71432 - RNA, 19 nt, Homo sapiens
  misc_RNA (1)...(19): siRNA sense strand
caaccuacuuacccuaguc

SEQ ID NO: 71433 - RNA, 19 nt, Homo sapiens
  misc_RNA (1)...(19): siRNA sense strand
gauggcuaaucgagacuug

SEQ ID NO: 71434 - RNA, 19 nt, Homo sapiens
  misc_RNA (1)...(19): siRNA sense strand
accgaugaaucuugcuuua

SEQ ID NO: 71435 - RNA, 19 nt, Homo sapiens
  misc_RNA (1)...(19): siRNA sense strand
ccagggaaaucgugaugag

SEQ ID NO: 71436 - RNA, 19 nt, Homo sapiens
  misc_RNA (1)...(19): siRNA sense strand
gaacucaggaacguguauu

SEQ ID NO: 71437 - RNA, 19 nt, Homo sapiens
  misc_RNA (1)...(19): siRNA sense strand
ggccaaccguuccaaugau

SEQ ID NO: 71438 - RNA, 19 nt, Homo sapiens
  misc_RNA (1)...(19): siRNA sense strand
uguagaaagugguuugaag

SEQ ID NO: 71439 - RNA, 19 nt, Homo sapiens
  misc_RNA (1)...(19): siRNA sense strand
aaucagaguuaaguggaaa

SEQ ID NO: 71440 - RNA, 19 nt, Homo sapiens
  misc_RNA (1)...(19): siRNA sense strand
agaagacucugggcacaau

SEQ ID NO: 71441 - RNA, 19 nt, Homo sapiens
  misc_RNA (1)...(19): siRNA sense strand
ugacacgaguggagauuac

SEQ ID NO: 71442 - RNA, 19 nt, Homo sapiens
  misc_RNA (1)...(19): siRNA sense strand
aagaacaaaucaggaaauc

SEQ ID NO: 71443 - RNA, 19 nt, Homo sapiens
  misc_RNA (1)...(19): siRNA sense strand
ccauggaggcuuauucuag

SEQ ID NO: 71444 - RNA, 19 nt, Homo sapiens
  misc_RNA (1)...(19): siRNA sense strand
cgagaaauugucagauguu

SEQ ID NO: 71445 - RNA, 19 nt, Homo sapiens
  misc_RNA (1)...(19): siRNA sense strand
gcuauaagagaugcagaaa

SEQ ID NO: 71446 - RNA, 19 nt, Homo sapiens
  misc_RNA (1)...(19): siRNA sense strand
ggacauuaggucagauaca

SEQ ID NO: 71447 - RNA, 19 nt, Homo sapiens
  misc_RNA (1)...(19): siRNA sense strand
uccgagaaauugucagaug

SEQ ID NO: 71448 - RNA, 19 nt, Homo sapiens
  misc_RNA (1)...(19): siRNA sense strand
cacaagaacaaaucaggaa

SEQ ID NO: 71449 - RNA, 19 nt, Homo sapiens
  misc_RNA (1)...(19): siRNA sense strand
ucaggucacucaaggaacu

SEQ ID NO: 71450 - RNA, 19 nt, Homo sapiens
  misc_RNA (1)...(19): siRNA sense strand
aaaucagaguuaaguggaa

SEQ ID NO: 71451 - RNA, 19 nt, Homo sapiens
  misc_RNA (1)...(19): siRNA sense strand
gggaaaucgugaugagaac

SEQ ID NO: 71452 - RNA, 19 nt, Homo sapiens
  misc_RNA (1)...(19): siRNA sense strand
caggucaggagucaucuuu

SEQ ID NO: 71453 - RNA, 19 nt, Homo sapiens
  misc_RNA (1)...(19): siRNA sense strand
gccaaccguuccaaugauc

SEQ ID NO: 71454 - RNA, 19 nt, Homo sapiens
  misc_RNA (1)...(19): siRNA sense strand
cuucuggucaguauccuua

SEQ ID NO: 71455 - RNA, 19 nt, Homo sapiens
  misc_RNA (1)...(19): siRNA sense strand
uuacgaugccuggagcuua

SEQ ID NO: 71456 - RNA, 19 nt, Homo sapiens
  misc_RNA (1)...(19): siRNA sense strand
uaaguggaaauauggaaga

SEQ ID NO: 71457 - RNA, 19 nt, Homo sapiens
  misc_RNA (1)...(19): siRNA sense strand
gcauuuaagaccuccuaug

SEQ ID NO: 71458 - RNA, 19 nt, Homo sapiens
  misc_RNA (1)...(19): siRNA sense strand
gcaggcaauuguggaugug

SEQ ID NO: 71459 - RNA, 19 nt, Homo sapiens
  misc_RNA (1)...(19): siRNA sense strand
ggauauguagaaagugguu

SEQ ID NO: 71460 - RNA, 19 nt, Homo sapiens
  misc_RNA (1)...(19): siRNA sense strand
gaccgaugaaucuugcuuu

SEQ ID NO: 71461 - RNA, 19 nt, Homo sapiens
  misc_RNA (1)...(19): siRNA sense strand
gagacuagggaccgaugaa

SEQ ID NO: 71462 - RNA, 19 nt, Homo sapiens
  misc_RNA (1)...(19): siRNA sense strand
ggucaggagucaucuuuuc

SEQ ID NO: 71463 - RNA, 19 nt, Homo sapiens
  misc_RNA (1)...(19): siRNA sense strand
gaaauauggaagaacugau

SEQ ID NO: 71464 - RNA, 19 nt, Homo sapiens
  misc_RNA (1)...(19): siRNA sense strand
gaguuaaguggaaauaugg

SEQ ID NO: 71465 - RNA, 19 nt, Homo sapiens
  misc_RNA (1)...(19): siRNA sense strand
gcucagcgucucuaucaag

SEQ ID NO: 71466 - RNA, 19 nt, Homo sapiens
  misc_RNA (1)...(19): siRNA sense strand
gaaaucgugaugagaacca

SEQ ID NO: 71467 - RNA, 19 nt, Homo sapiens
  misc_RNA (1)...(19): siRNA sense strand
ucaguauccuuauccuagu

SEQ ID NO: 71468 - RNA, 19 nt, Homo sapiens
  misc_RNA (1)...(19): siRNA sense strand
ccacagccaccuucacagu

SEQ ID NO: 71469 - RNA, 19 nt, Homo sapiens
  misc_RNA (1)...(19): siRNA sense strand
caggaacguguauugauug

SEQ ID NO: 71470 - RNA, 19 nt, Homo sapiens
  misc_RNA (1)...(19): siRNA sense strand
cauuuaagaccuccuaugg

SEQ ID NO: 71471 - RNA, 19 nt, Homo sapiens
  misc_RNA (1)...(19): siRNA sense strand
ggucaguauccuuauccua

SEQ ID NO: 71472 - RNA, 19 nt, Homo sapiens
  misc_RNA (1)...(19): siRNA sense strand
ucagaguuaaguggaaaua

SEQ ID NO: 71473 - RNA, 19 nt, Homo sapiens
  misc_RNA (1)...(19): siRNA sense strand
cagauguuaucagucagaa

SEQ ID NO: 71474 - RNA, 19 nt, Homo sapiens
  misc_RNA (1)...(19): siRNA sense strand
ggaacucaggaacguguau

SEQ ID NO: 71475 - RNA, 19 nt, Homo sapiens
  misc_RNA (1)...(19): siRNA sense strand
uuugaacguuuacuugugu

SEQ ID NO: 71476 - RNA, 19 nt, Homo sapiens
  misc_RNA (1)...(19): siRNA sense strand
ggaccgaugaaucuugcuu

SEQ ID NO: 71477 - RNA, 19 nt, Homo sapiens
  misc_RNA (1)...(19): siRNA sense strand
gaagaugcucagcgucucu

SEQ ID NO: 71478 - RNA, 19 nt, Homo sapiens
  misc_RNA (1)...(19): siRNA sense strand
ucaaagaucucaaaucaga

SEQ ID NO: 71479 - RNA, 19 nt, Homo sapiens
  misc_RNA (1)...(19): siRNA sense strand
gaaccgcccugccuucuuu

SEQ ID NO: 71480 - RNA, 19 nt, Homo sapiens
  misc_RNA (1)...(19): siRNA sense strand
gaacguguauugauugaga

SEQ ID NO: 71481 - RNA, 19 nt, Homo sapiens
  misc_RNA (1)...(19): siRNA sense strand
gaagugagauugaccuugu

SEQ ID NO: 71482 - RNA, 19 nt, Homo sapiens
  misc_RNA (1)...(19): siRNA sense strand
gaugagaaccagaguauaa

SEQ ID NO: 71483 - RNA, 19 nt, Homo sapiens
  misc_RNA (1)...(19): siRNA sense strand
gagaaauugucagauguua

SEQ ID NO: 71484 - RNA, 19 nt, Homo sapiens
  misc_RNA (1)...(19): siRNA sense strand
gagcuaccauggaggcuua

SEQ ID NO: 71485 - RNA, 19 nt, Homo sapiens
  misc_RNA (1)...(19): siRNA sense strand
gaaucuugcuuuaacauga

SEQ ID NO: 71486 - RNA, 19 nt, Homo sapiens
  misc_RNA (1)...(19): siRNA sense strand
guaaggcaaugaaggguuu

SEQ ID NO: 71487 - RNA, 19 nt, Homo sapiens
  misc_RNA (1)...(19): siRNA sense strand
gaggacagaugccuucuca

SEQ ID NO: 71488 - RNA, 19 nt, Homo sapiens
  misc_RNA (1)...(19): siRNA sense strand
gcucuacuaugcuaugaaa

SEQ ID NO: 71489 - RNA, 19 nt, Homo sapiens
  misc_RNA (1)...(19): siRNA sense strand
ccaaauggcucaggaagau

SEQ ID NO: 71490 - RNA, 19 nt, Homo sapiens
  misc_RNA (1)...(19): siRNA sense strand
gauguucgcucagauguau

SEQ ID NO: 71491 - RNA, 19 nt, Homo sapiens
  misc_RNA (1)...(19): siRNA sense strand
gcucagauguaucagaaga

SEQ ID NO: 71492 - RNA, 19 nt, Homo sapiens
  misc_RNA (1)...(19): siRNA sense strand
gaucucaaaucagaguuaa

SEQ ID NO: 71493 - RNA, 19 nt, Homo sapiens
  misc_RNA (1)...(19): siRNA sense strand
gaguggagauuaccgaaga

SEQ ID NO: 71494 - RNA, 19 nt, Homo sapiens
  misc_RNA (1)...(19): siRNA sense strand
gaaauugucagauguuauc

SEQ ID NO: 71495 - RNA, 19 nt, Homo sapiens
  misc_RNA (1)...(19): siRNA sense strand
ucaggaacguguauugauu

SEQ ID NO: 71496 - RNA, 19 nt, Homo sapiens
  misc_RNA (1)...(19): siRNA sense strand
gauguuaucagucagaauu

SEQ ID NO: 71497 - RNA, 19 nt, Homo sapiens
  misc_RNA (1)...(19): siRNA sense strand
acagaugccuucucaguau

SEQ ID NO: 71498 - RNA, 19 nt, Homo sapiens
  misc_RNA (1)...(19): siRNA sense strand
ggacagaugccuucucagu

SEQ ID NO: 71499 - RNA, 19 nt, Homo sapiens
  misc_RNA (1)...(19): siRNA sense strand
ucagauacaucaggacauu

SEQ ID NO: 71500 - RNA, 19 nt, Homo sapiens
  misc_RNA (1)...(19): siRNA sense strand
ugucagauguuaucaguca

SEQ ID NO: 71501 - RNA, 19 nt, Homo sapiens
  misc_RNA (1)...(19): siRNA sense strand
gaguauaaaccaccaaaug

SEQ ID NO: 71502 - RNA, 19 nt, Homo sapiens
  misc_RNA (1)...(19): siRNA sense strand
agaguuaaguggaaauaug

SEQ ID NO: 71503 - RNA, 19 nt, Homo sapiens
  misc_RNA (1)...(19): siRNA sense strand
ggaaauauggaagaacuga

SEQ ID NO: 71504 - RNA, 19 nt, Homo sapiens
  misc_RNA (1)...(19): siRNA sense strand
gacagaugccuucucagua

SEQ ID NO: 71505 - RNA, 19 nt, Homo sapiens
  misc_RNA (1)...(19): siRNA sense strand
gacauuaggucagauacau

SEQ ID NO: 71506 - RNA, 19 nt, Homo sapiens
  misc_RNA (1)...(19): siRNA sense strand
caggaaauccgagaaauug

SEQ ID NO: 71507 - RNA, 19 nt, Homo sapiens
  misc_RNA (1)...(19): siRNA sense strand
guagaaagugguuugaaga

SEQ ID NO: 71508 - RNA, 19 nt, Homo sapiens
  misc_RNA (1)...(19): siRNA sense strand
ccuaguggcuuuccuccaa

SEQ ID NO: 71509 - RNA, 19 nt, Homo sapiens
  misc_RNA (1)...(19): siRNA sense strand
ggacagaugagcaggcaau

SEQ ID NO: 71510 - RNA, 19 nt, Homo sapiens
  misc_RNA (1)...(19): siRNA sense strand
cgaugaaucuugcuuuaac

SEQ ID NO: 71511 - RNA, 19 nt, Homo sapiens
  misc_RNA (1)...(19): siRNA sense strand
gaugaaucuugcuuuaaca

SEQ ID NO: 71512 - RNA, 19 nt, Homo sapiens
  misc_RNA (1)...(19): siRNA sense strand
gauccuggcccucuucaug

SEQ ID NO: 71513 - RNA, 19 nt, Homo sapiens
  misc_RNA (1)...(19): siRNA sense strand
gcuaaucgagacuuguuaa

SEQ ID NO: 71514 - RNA, 19 nt, Homo sapiens
  misc_RNA (1)...(19): siRNA sense strand
gaaauccgagaaauuguca

SEQ ID NO: 71515 - RNA, 19 nt, Homo sapiens
  misc_RNA (1)...(19): siRNA sense strand
ucaugccuccuacguauua

SEQ ID NO: 71516 - RNA, 19 nt, Homo sapiens
  misc_RNA (1)...(19): siRNA sense strand
ggaggugccuacccacaag

SEQ ID NO: 71517 - RNA, 19 nt, Homo sapiens
  misc_RNA (1)...(19): siRNA sense strand
cagaugagcaggcaauugu

SEQ ID NO: 71518 - RNA, 19 nt, Homo sapiens
  misc_RNA (1)...(19): siRNA sense strand
ucgcucagauguaucagaa

SEQ ID NO: 71519 - RNA, 19 nt, Homo sapiens
  misc_RNA (1)...(19): siRNA sense strand
ccaacaggcuacccaccuu

SEQ ID NO: 71520 - RNA, 19 nt, Homo sapiens
  misc_RNA (1)...(19): siRNA sense strand
cuucaugccuccuacguau

SEQ ID NO: 71521 - RNA, 19 nt, Homo sapiens
  misc_RNA (1)...(19): siRNA sense strand
ccacaagugccaaguagug

SEQ ID NO: 71522 - RNA, 19 nt, Homo sapiens
  misc_RNA (1)...(19): siRNA sense strand
aaucgagacuuguuaagca

SEQ ID NO: 71523 - RNA, 19 nt, Homo sapiens
  misc_RNA (1)...(19): siRNA sense strand
caagaacaaaucaggaaau

SEQ ID NO: 71524 - RNA, 19 nt, Homo sapiens
  misc_RNA (1)...(19): siRNA sense strand
ucaggaaauccgagaaauu

SEQ ID NO: 71525 - RNA, 19 nt, Homo sapiens
  misc_RNA (1)...(19): siRNA sense strand
ggaaauccgagaaauuguc

SEQ ID NO: 71526 - RNA, 19 nt, Homo sapiens
  misc_RNA (1)...(19): siRNA sense strand
ccgaccagcugccaacuuc

SEQ ID NO: 71527 - RNA, 19 nt, Homo sapiens
  misc_RNA (1)...(19): siRNA sense strand
caacaggcuacccaccuuu

SEQ ID NO: 71528 - RNA, 19 nt, Homo sapiens
  misc_RNA (1)...(19): siRNA sense strand
gugaugagaaccagaguau

SEQ ID NO: 71529 - RNA, 19 nt, Homo sapiens
  misc_RNA (1)...(19): siRNA sense strand
ccgagaaauugucagaugu

SEQ ID NO: 71530 - RNA, 19 nt, Homo sapiens
  misc_RNA (1)...(19): siRNA sense strand
gccuggagcuuacggaaag

SEQ ID NO: 71531 - RNA, 19 nt, Homo sapiens
  misc_RNA (1)...(19): siRNA sense strand
guggaaauauggaagaacu

SEQ ID NO: 71532 - RNA, 19 nt, Homo sapiens
  misc_RNA (1)...(19): siRNA sense strand
caaccuacuuacccuaguc

SEQ ID NO: 71533 - RNA, 19 nt, Homo sapiens
  misc_RNA (1)...(19): siRNA sense strand
gauggcuaaucgagacuug

SEQ ID NO: 71534 - RNA, 19 nt, Homo sapiens
  misc_RNA (1)...(19): siRNA sense strand
accgaugaaucuugcuuua

SEQ ID NO: 71535 - RNA, 19 nt, Homo sapiens
  misc_RNA (1)...(19): siRNA sense strand
ccagggaaaucgugaugag

SEQ ID NO: 71536 - RNA, 19 nt, Homo sapiens
  misc_RNA (1)...(19): siRNA sense strand
gaacucaggaacguguauu

SEQ ID NO: 71537 - RNA, 19 nt, Homo sapiens
  misc_RNA (1)...(19): siRNA sense strand
ggccaaccguuccaaugau

SEQ ID NO: 71538 - RNA, 19 nt, Homo sapiens
  misc_RNA (1)...(19): siRNA sense strand
uguagaaagugguuugaag

SEQ ID NO: 71539 - RNA, 19 nt, Homo sapiens
  misc_RNA (1)...(19): siRNA sense strand
aaucagaguuaaguggaaa

SEQ ID NO: 71540 - RNA, 19 nt, Homo sapiens
  misc_RNA (1)...(19): siRNA sense strand
agaagacucugggcacaau

SEQ ID NO: 71541 - RNA, 19 nt, Homo sapiens
  misc_RNA (1)...(19): siRNA sense strand
ugacacgaguggagauuac

SEQ ID NO: 71542 - RNA, 19 nt, Homo sapiens
  misc_RNA (1)...(19): siRNA sense strand
aagaacaaaucaggaaauc

SEQ ID NO: 71543 - RNA, 19 nt, Homo sapiens
  misc_RNA (1)...(19): siRNA sense strand
ccauggaggcuuauucuag

SEQ ID NO: 71544 - RNA, 19 nt, Homo sapiens
  misc_RNA (1)...(19): siRNA sense strand
cgagaaauugucagauguu

SEQ ID NO: 71545 - RNA, 19 nt, Homo sapiens
  misc_RNA (1)...(19): siRNA sense strand
gcuauaagagaugcagaaa

SEQ ID NO: 71546 - RNA, 19 nt, Homo sapiens
  misc_RNA (1)...(19): siRNA sense strand
ggacauuaggucagauaca

SEQ ID NO: 71547 - RNA, 19 nt, Homo sapiens
  misc_RNA (1)...(19): siRNA sense strand
uccgagaaauugucagaug

SEQ ID NO: 71548 - RNA, 19 nt, Homo sapiens
  misc_RNA (1)...(19): siRNA sense strand
cacaagaacaaaucaggaa

SEQ ID NO: 71549 - RNA, 19 nt, Homo sapiens
  misc_RNA (1)...(19): siRNA sense strand
ucaggucacucaaggaacu

SEQ ID NO: 71550 - RNA, 19 nt, Homo sapiens
  misc_RNA (1)...(19): siRNA sense strand
aaaucagaguuaaguggaa

SEQ ID NO: 71551 - RNA, 19 nt, Homo sapiens
  misc_RNA (1)...(19): siRNA sense strand
gggaaaucgugaugagaac

SEQ ID NO: 71552 - RNA, 19 nt, Homo sapiens
  misc_RNA (1)...(19): siRNA sense strand
caggucaggagucaucuuu

SEQ ID NO: 71553 - RNA, 19 nt, Homo sapiens
  misc_RNA (1)...(19): siRNA sense strand
gccaaccguuccaaugauc

SEQ ID NO: 71554 - RNA, 19 nt, Homo sapiens
  misc_RNA (1)...(19): siRNA sense strand
cuucuggucaguauccuua

SEQ ID NO: 71555 - RNA, 19 nt, Homo sapiens
  misc_RNA (1)...(19): siRNA sense strand
uuacgaugccuggagcuua

SEQ ID NO: 71556 - RNA, 19 nt, Homo sapiens
  misc_RNA (1)...(19): siRNA sense strand
uaaguggaaauauggaaga

SEQ ID NO: 71557 - RNA, 19 nt, Homo sapiens
  misc_RNA (1)...(19): siRNA sense strand
gcauuuaagaccuccuaug

SEQ ID NO: 71558 - RNA, 19 nt, Homo sapiens
  misc_RNA (1)...(19): siRNA sense strand
gcaggcaauuguggaugug

SEQ ID NO: 71559 - RNA, 19 nt, Homo sapiens
  misc_RNA (1)...(19): siRNA sense strand
ggauauguagaaagugguu

SEQ ID NO: 71560 - RNA, 19 nt, Homo sapiens
  misc_RNA (1)...(19): siRNA sense strand
gaccgaugaaucuugcuuu

SEQ ID NO: 71561 - RNA, 19 nt, Homo sapiens
  misc_RNA (1)...(19): siRNA sense strand
gagacuagggaccgaugaa

SEQ ID NO: 71562 - RNA, 19 nt, Homo sapiens
  misc_RNA (1)...(19): siRNA sense strand
ggucaggagucaucuuuuc

SEQ ID NO: 71563 - RNA, 19 nt, Homo sapiens
  misc_RNA (1)...(19): siRNA sense strand
gaaauauggaagaacugau

SEQ ID NO: 71564 - RNA, 19 nt, Homo sapiens
  misc_RNA (1)...(19): siRNA sense strand
gaguuaaguggaaauaugg

SEQ ID NO: 71565 - RNA, 19 nt, Homo sapiens
  misc_RNA (1)...(19): siRNA sense strand
gcucagcgucucuaucaag

SEQ ID NO: 71566 - RNA, 19 nt, Homo sapiens
  misc_RNA (1)...(19): siRNA sense strand
gaaaucgugaugagaacca

SEQ ID NO: 71567 - RNA, 19 nt, Homo sapiens
  misc_RNA (1)...(19): siRNA sense strand
ucaguauccuuauccuagu

SEQ ID NO: 71568 - RNA, 19 nt, Homo sapiens
  misc_RNA (1)...(19): siRNA sense strand
ccacagccaccuucacagu

SEQ ID NO: 71569 - RNA, 19 nt, Homo sapiens
  misc_RNA (1)...(19): siRNA sense strand
caggaacguguauugauug

SEQ ID NO: 71570 - RNA, 19 nt, Homo sapiens
  misc_RNA (1)...(19): siRNA sense strand
cauuuaagaccuccuaugg

SEQ ID NO: 71571 - RNA, 19 nt, Homo sapiens
  misc_RNA (1)...(19): siRNA sense strand
ggucaguauccuuauccua

SEQ ID NO: 71572 - RNA, 19 nt, Homo sapiens
  misc_RNA (1)...(19): siRNA sense strand
ucagaguuaaguggaaaua

SEQ ID NO: 71573 - RNA, 19 nt, Homo sapiens
  misc_RNA (1)...(19): siRNA sense strand
cagauguuaucagucagaa

SEQ ID NO: 71574 - RNA, 19 nt, Homo sapiens
  misc_RNA (1)...(19): siRNA sense strand
ggaacucaggaacguguau

SEQ ID NO: 71575 - RNA, 19 nt, Homo sapiens
  misc_RNA (1)...(19): siRNA sense strand
uuugaacguuuacuugugu

SEQ ID NO: 71576 - RNA, 19 nt, Homo sapiens
  misc_RNA (1)...(19): siRNA sense strand
ggaccgaugaaucuugcuu

SEQ ID NO: 71577 - RNA, 19 nt, Homo sapiens
  misc_RNA (1)...(19): siRNA sense strand
gaagaugcucagcgucucu

SEQ ID NO: 71578 - RNA, 19 nt, Homo sapiens
  misc_RNA (1)...(19): siRNA sense strand
gaugaagccugccugauug

SEQ ID NO: 71579 - RNA, 19 nt, Homo sapiens
  misc_RNA (1)...(19): siRNA sense strand
gaacagacgaguccaaguu

SEQ ID NO: 71580 - RNA, 19 nt, Homo sapiens
  misc_RNA (1)...(19): siRNA sense strand
ugaaaugucucaagaauac

SEQ ID NO: 71581 - RNA, 19 nt, Homo sapiens
  misc_RNA (1)...(19): siRNA sense strand
gcacaaacguggacauguc

SEQ ID NO: 71582 - RNA, 19 nt, Homo sapiens
  misc_RNA (1)...(19): siRNA sense strand
cuacaaagcagaauucaaa

SEQ ID NO: 71583 - RNA, 19 nt, Homo sapiens
  misc_RNA (1)...(19): siRNA sense strand
ggaagauucugcugaagau

SEQ ID NO: 71584 - RNA, 19 nt, Homo sapiens
  misc_RNA (1)...(19): siRNA sense strand
gaagaucugugguggcaau

SEQ ID NO: 71585 - RNA, 19 nt, Homo sapiens
  misc_RNA (1)...(19): siRNA sense strand
aaacagagccuacaaagca

SEQ ID NO: 71586 - RNA, 19 nt, Homo sapiens
  misc_RNA (1)...(19): siRNA sense strand
ggugaaaugucucaagaau

SEQ ID NO: 71587 - RNA, 19 nt, Homo sapiens
  misc_RNA (1)...(19): siRNA sense strand
gagcacauccgagaauuaa

SEQ ID NO: 71588 - RNA, 19 nt, Homo sapiens
  misc_RNA (1)...(19): siRNA sense strand
gacaucagaucagaguaua

SEQ ID NO: 71589 - RNA, 19 nt, Homo sapiens
  misc_RNA (1)...(19): siRNA sense strand
gaucugaaaucugaacugu

SEQ ID NO: 71590 - RNA, 19 nt, Homo sapiens
  misc_RNA (1)...(19): siRNA sense strand
ucugaaaucugaacuguca

SEQ ID NO: 71591 - RNA, 19 nt, Homo sapiens
  misc_RNA (1)...(19): siRNA sense strand
ggacaucagaucagaguau

SEQ ID NO: 71592 - RNA, 19 nt, Homo sapiens
  misc_RNA (1)...(19): siRNA sense strand
ucaggaaacuuugagaaga

SEQ ID NO: 71593 - RNA, 19 nt, Homo sapiens
  misc_RNA (1)...(19): siRNA sense strand
ccaguccucuuugacauuu

SEQ ID NO: 71594 - RNA, 19 nt, Homo sapiens
  misc_RNA (1)...(19): siRNA sense strand
ccuccaggaugcccucaua

SEQ ID NO: 71595 - RNA, 19 nt, Homo sapiens
  misc_RNA (1)...(19): siRNA sense strand
guggugaaaugucucaaga

SEQ ID NO: 71596 - RNA, 19 nt, Homo sapiens
  misc_RNA (1)...(19): siRNA sense strand
ugaugaagccugccugauu

SEQ ID NO: 71597 - RNA, 19 nt, Homo sapiens
  misc_RNA (1)...(19): siRNA sense strand
gauccuacuuuccuucaag

SEQ ID NO: 71598 - RNA, 19 nt, Homo sapiens
  misc_RNA (1)...(19): siRNA sense strand
gugaaaugucucaagaaua

SEQ ID NO: 71599 - RNA, 19 nt, Homo sapiens
  misc_RNA (1)...(19): siRNA sense strand
gaacugucaggaaacuuug

SEQ ID NO: 71600 - RNA, 19 nt, Homo sapiens
  misc_RNA (1)...(19): siRNA sense strand
gcacauccgagaauuaaac

SEQ ID NO: 71601 - RNA, 19 nt, Homo sapiens
  misc_RNA (1)...(19): siRNA sense strand
gauaaaggaagccaucaag

SEQ ID NO: 71602 - RNA, 19 nt, Homo sapiens
  misc_RNA (1)...(19): siRNA sense strand
ggcagcagauccuacuuuc

SEQ ID NO: 71603 - RNA, 19 nt, Homo sapiens
  misc_RNA (1)...(19): siRNA sense strand
gagaugcccaggagcugua

SEQ ID NO: 71604 - RNA, 19 nt, Homo sapiens
  misc_RNA (1)...(19): siRNA sense strand
caacaugcccaaccuguac

SEQ ID NO: 71605 - RNA, 19 nt, Homo sapiens
  misc_RNA (1)...(19): siRNA sense strand
gggaaaccgugaugaaagc

SEQ ID NO: 71606 - RNA, 19 nt, Homo sapiens
  misc_RNA (1)...(19): siRNA sense strand
ugaacugucaggaaacuuu

SEQ ID NO: 71607 - RNA, 19 nt, Homo sapiens
  misc_RNA (1)...(19): siRNA sense strand
gaagccugccugauugaga

SEQ ID NO: 71608 - RNA, 19 nt, Homo sapiens
  misc_RNA (1)...(19): siRNA sense strand
ugagcacauccgagaauua

SEQ ID NO: 71609 - RNA, 19 nt, Homo sapiens
  misc_RNA (1)...(19): siRNA sense strand
ccaacaugcccaaccugua

SEQ ID NO: 71610 - RNA, 19 nt, Homo sapiens
  misc_RNA (1)...(19): siRNA sense strand
gaaacccacccuccaggau

SEQ ID NO: 71611 - RNA, 19 nt, Homo sapiens
  misc_RNA (1)...(19): siRNA sense strand
caaaggaccggacccugau

SEQ ID NO: 71612 - RNA, 19 nt, Homo sapiens
  misc_RNA (1)...(19): siRNA sense strand
gaaacuuugagaagacaau

SEQ ID NO: 71613 - RNA, 19 nt, Homo sapiens
  misc_RNA (1)...(19): siRNA sense strand
gggauuaccggaagauucu

SEQ ID NO: 71614 - RNA, 19 nt, Homo sapiens
  misc_RNA (1)...(19): siRNA sense strand
cauccgagaauuaaacaga

SEQ ID NO: 71615 - RNA, 19 nt, Homo sapiens
  misc_RNA (1)...(19): siRNA sense strand
caggaaacuuugagaagac

SEQ ID NO: 71616 - RNA, 19 nt, Homo sapiens
  misc_RNA (1)...(19): siRNA sense strand
ucaaugaguaccagagaau

SEQ ID NO: 71617 - RNA, 19 nt, Homo sapiens
  misc_RNA (1)...(19): siRNA sense strand
gcaguucaaccaggacuau

SEQ ID NO: 71618 - RNA, 19 nt, Homo sapiens
  misc_RNA (1)...(19): siRNA sense strand
gugccgagcuacccaggau

SEQ ID NO: 71619 - RNA, 19 nt, Homo sapiens
  misc_RNA (1)...(19): siRNA sense strand
cagggaaaccgugaugaaa

SEQ ID NO: 71620 - RNA, 19 nt, Homo sapiens
  misc_RNA (1)...(19): siRNA sense strand
aaucuuggcucugaugaag

SEQ ID NO: 71621 - RNA, 19 nt, Homo sapiens
  misc_RNA (1)...(19): siRNA sense strand
ucagggaaaccgugaugaa

SEQ ID NO: 71622 - RNA, 19 nt, Homo sapiens
  misc_RNA (1)...(19): siRNA sense strand
gagccuacaaagcagaauu

SEQ ID NO: 71623 - RNA, 19 nt, Homo sapiens
  misc_RNA (1)...(19): siRNA sense strand
gacuaucucucgggaaugg

SEQ ID NO: 71624 - RNA, 19 nt, Homo sapiens
  misc_RNA (1)...(19): siRNA sense strand
cggcuuacggcaaggauuu

SEQ ID NO: 71625 - RNA, 19 nt, Homo sapiens
  misc_RNA (1)...(19): siRNA sense strand
gaucugugguggcaaugac

SEQ ID NO: 71626 - RNA, 19 nt, Homo sapiens
  misc_RNA (1)...(19): siRNA sense strand
agaccgaccuccuggacau

SEQ ID NO: 71627 - RNA, 19 nt, Homo sapiens
  misc_RNA (1)...(19): siRNA sense strand
gaauuaaacagagccuaca

SEQ ID NO: 71628 - RNA, 19 nt, Homo sapiens
  misc_RNA (1)...(19): siRNA sense strand
gagccaacaugcccaaccu

SEQ ID NO: 71629 - RNA, 19 nt, Homo sapiens
  misc_RNA (1)...(19): siRNA sense strand
cggaagauucugcugaaga

SEQ ID NO: 71630 - RNA, 19 nt, Homo sapiens
  misc_RNA (1)...(19): siRNA sense strand
gccgggacauugagaagag

SEQ ID NO: 71631 - RNA, 19 nt, Homo sapiens
  misc_RNA (1)...(19): siRNA sense strand
caaguucaaugcgguucug

SEQ ID NO: 71632 - RNA, 19 nt, Homo sapiens
  misc_RNA (1)...(19): siRNA sense strand
ggagauacuucaggggauu

SEQ ID NO: 71633 - RNA, 19 nt, Homo sapiens
  misc_RNA (1)...(19): siRNA sense strand
caucagaucagaguauaag

SEQ ID NO: 71634 - RNA, 19 nt, Homo sapiens
  misc_RNA (1)...(19): siRNA sense strand
cggcagcagauccuacuuu

SEQ ID NO: 71635 - RNA, 19 nt, Homo sapiens
  misc_RNA (1)...(19): siRNA sense strand
cgacacaucagggcacuuc

SEQ ID NO: 71636 - RNA, 19 nt, Homo sapiens
  misc_RNA (1)...(19): siRNA sense strand
cagaguauaagcggaugua

SEQ ID NO: 71637 - RNA, 19 nt, Homo sapiens
  misc_RNA (1)...(19): siRNA sense strand
cacugaugcucccggcuuu

SEQ ID NO: 71638 - RNA, 19 nt, Homo sapiens
  misc_RNA (1)...(19): siRNA sense strand
aggacuaucucucgggaau

SEQ ID NO: 71639 - RNA, 19 nt, Homo sapiens
  misc_RNA (1)...(19): siRNA sense strand
acagacgaguccaaguuca

SEQ ID NO: 71640 - RNA, 19 nt, Homo sapiens
  misc_RNA (1)...(19): siRNA sense strand
gaauaccccagccuucuuu

SEQ ID NO: 71641 - RNA, 19 nt, Homo sapiens
  misc_RNA (1)...(19): siRNA sense strand
aagccugccugauugagau

SEQ ID NO: 71642 - RNA, 19 nt, Homo sapiens
  misc_RNA (1)...(19): siRNA sense strand
uuaaacagagccuacaaag

SEQ ID NO: 71643 - RNA, 19 nt, Homo sapiens
  misc_RNA (1)...(19): siRNA sense strand
gacaaucuuggcucugaug

SEQ ID NO: 71644 - RNA, 19 nt, Homo sapiens
  misc_RNA (1)...(19): siRNA sense strand
cagcagauccuacuuuccu

SEQ ID NO: 71645 - RNA, 19 nt, Homo sapiens
  misc_RNA (1)...(19): siRNA sense strand
aaugaguaccagagaauga

SEQ ID NO: 71646 - RNA, 19 nt, Homo sapiens
  misc_RNA (1)...(19): siRNA sense strand
gcagccuguuccucccuau

SEQ ID NO: 71647 - RNA, 19 nt, Homo sapiens
  misc_RNA (1)...(19): siRNA sense strand
ggaacagacgaguccaagu

SEQ ID NO: 71648 - RNA, 19 nt, Homo sapiens
  misc_RNA (1)...(19): siRNA sense strand
gagauaaaggaagccauca

SEQ ID NO: 71649 - RNA, 19 nt, Homo sapiens
  misc_RNA (1)...(19): siRNA sense strand
ggagaaccgccugggaaca

SEQ ID NO: 71650 - RNA, 19 nt, Homo sapiens
  misc_RNA (1)...(19): siRNA sense strand
acaagcagcggcagcagau

SEQ ID NO: 71651 - RNA, 19 nt, Homo sapiens
  misc_RNA (1)...(19): siRNA sense strand
accggaagauucugcugaa

SEQ ID NO: 71652 - RNA, 19 nt, Homo sapiens
  misc_RNA (1)...(19): siRNA sense strand
cagacgaguccaaguucaa

SEQ ID NO: 71653 - RNA, 19 nt, Homo sapiens
  misc_RNA (1)...(19): siRNA sense strand
gagaaccgccugggaacag

SEQ ID NO: 71654 - RNA, 19 nt, Homo sapiens
  misc_RNA (1)...(19): siRNA sense strand
gaugaagccugccugauug

SEQ ID NO: 71655 - RNA, 19 nt, Homo sapiens
  misc_RNA (1)...(19): siRNA sense strand
gaacagacgaguccaaguu

SEQ ID NO: 71656 - RNA, 19 nt, Homo sapiens
  misc_RNA (1)...(19): siRNA sense strand
ugaaaugucucaagaauac

SEQ ID NO: 71657 - RNA, 19 nt, Homo sapiens
  misc_RNA (1)...(19): siRNA sense strand
gcacaaacguggacauguc

SEQ ID NO: 71658 - RNA, 19 nt, Homo sapiens
  misc_RNA (1)...(19): siRNA sense strand
cuacaaagcagaauucaaa

SEQ ID NO: 71659 - RNA, 19 nt, Homo sapiens
  misc_RNA (1)...(19): siRNA sense strand
ggaagauucugcugaagau

SEQ ID NO: 71660 - RNA, 19 nt, Homo sapiens
  misc_RNA (1)...(19): siRNA sense strand
gaagaucugugguggcaau

SEQ ID NO: 71661 - RNA, 19 nt, Homo sapiens
  misc_RNA (1)...(19): siRNA sense strand
aaacagagccuacaaagca

SEQ ID NO: 71662 - RNA, 19 nt, Homo sapiens
  misc_RNA (1)...(19): siRNA sense strand
ggugaaaugucucaagaau

SEQ ID NO: 71663 - RNA, 19 nt, Homo sapiens
  misc_RNA (1)...(19): siRNA sense strand
gagcacauccgagaauuaa

SEQ ID NO: 71664 - RNA, 19 nt, Homo sapiens
  misc_RNA (1)...(19): siRNA sense strand
gacaucagaucagaguaua

SEQ ID NO: 71665 - RNA, 19 nt, Homo sapiens
  misc_RNA (1)...(19): siRNA sense strand
gaucugaaaucugaacugu

SEQ ID NO: 71666 - RNA, 19 nt, Homo sapiens
  misc_RNA (1)...(19): siRNA sense strand
ucugaaaucugaacuguca

SEQ ID NO: 71667 - RNA, 19 nt, Homo sapiens
  misc_RNA (1)...(19): siRNA sense strand
ggacaucagaucagaguau

SEQ ID NO: 71668 - RNA, 19 nt, Homo sapiens
  misc_RNA (1)...(19): siRNA sense strand
ucaggaaacuuugagaaga

SEQ ID NO: 71669 - RNA, 19 nt, Homo sapiens
  misc_RNA (1)...(19): siRNA sense strand
ccaguccucuuugacauuu

SEQ ID NO: 71670 - RNA, 19 nt, Homo sapiens
  misc_RNA (1)...(19): siRNA sense strand
ccuccaggaugcccucaua

SEQ ID NO: 71671 - RNA, 19 nt, Homo sapiens
  misc_RNA (1)...(19): siRNA sense strand
guggugaaaugucucaaga

SEQ ID NO: 71672 - RNA, 19 nt, Homo sapiens
  misc_RNA (1)...(19): siRNA sense strand
ugaugaagccugccugauu

SEQ ID NO: 71673 - RNA, 19 nt, Homo sapiens
  misc_RNA (1)...(19): siRNA sense strand
gauccuacuuuccuucaag

SEQ ID NO: 71674 - RNA, 19 nt, Homo sapiens
  misc_RNA (1)...(19): siRNA sense strand
gugaaaugucucaagaaua

SEQ ID NO: 71675 - RNA, 19 nt, Homo sapiens
  misc_RNA (1)...(19): siRNA sense strand
gaacugucaggaaacuuug

SEQ ID NO: 71676 - RNA, 19 nt, Homo sapiens
  misc_RNA (1)...(19): siRNA sense strand
gcacauccgagaauuaaac

SEQ ID NO: 71677 - RNA, 19 nt, Homo sapiens
  misc_RNA (1)...(19): siRNA sense strand
gauaaaggaagccaucaag

SEQ ID NO: 71678 - RNA, 19 nt, Homo sapiens
  misc_RNA (1)...(19): siRNA sense strand
ggcagcagauccuacuuuc

SEQ ID NO: 71679 - RNA, 19 nt, Homo sapiens
  misc_RNA (1)...(19): siRNA sense strand
gagaugcccaggagcugua

SEQ ID NO: 71680 - RNA, 19 nt, Homo sapiens
  misc_RNA (1)...(19): siRNA sense strand
caacaugcccaaccuguac

SEQ ID NO: 71681 - RNA, 19 nt, Homo sapiens
  misc_RNA (1)...(19): siRNA sense strand
gggaaaccgugaugaaagc

SEQ ID NO: 71682 - RNA, 19 nt, Homo sapiens
  misc_RNA (1)...(19): siRNA sense strand
ugaacugucaggaaacuuu

SEQ ID NO: 71683 - RNA, 19 nt, Homo sapiens
  misc_RNA (1)...(19): siRNA sense strand
gaagccugccugauugaga

SEQ ID NO: 71684 - RNA, 19 nt, Homo sapiens
  misc_RNA (1)...(19): siRNA sense strand
ugagcacauccgagaauua

SEQ ID NO: 71685 - RNA, 19 nt, Homo sapiens
  misc_RNA (1)...(19): siRNA sense strand
ccaacaugcccaaccugua

SEQ ID NO: 71686 - RNA, 19 nt, Homo sapiens
  misc_RNA (1)...(19): siRNA sense strand
gaaacccacccuccaggau

SEQ ID NO: 71687 - RNA, 19 nt, Homo sapiens
  misc_RNA (1)...(19): siRNA sense strand
caaaggaccggacccugau

SEQ ID NO: 71688 - RNA, 19 nt, Homo sapiens
  misc_RNA (1)...(19): siRNA sense strand
gaaacuuugagaagacaau

SEQ ID NO: 71689 - RNA, 19 nt, Homo sapiens
  misc_RNA (1)...(19): siRNA sense strand
gggauuaccggaagauucu

SEQ ID NO: 71690 - RNA, 19 nt, Homo sapiens
  misc_RNA (1)...(19): siRNA sense strand
cauccgagaauuaaacaga

SEQ ID NO: 71691 - RNA, 19 nt, Homo sapiens
  misc_RNA (1)...(19): siRNA sense strand
caggaaacuuugagaagac

SEQ ID NO: 71692 - RNA, 19 nt, Homo sapiens
  misc_RNA (1)...(19): siRNA sense strand
ucaaugaguaccagagaau

SEQ ID NO: 71693 - RNA, 19 nt, Homo sapiens
  misc_RNA (1)...(19): siRNA sense strand
gcaguucaaccaggacuau

SEQ ID NO: 71694 - RNA, 19 nt, Homo sapiens
  misc_RNA (1)...(19): siRNA sense strand
gugccgagcuacccaggau

SEQ ID NO: 71695 - RNA, 19 nt, Homo sapiens
  misc_RNA (1)...(19): siRNA sense strand
cagggaaaccgugaugaaa

SEQ ID NO: 71696 - RNA, 19 nt, Homo sapiens
  misc_RNA (1)...(19): siRNA sense strand
aaucuuggcucugaugaag

SEQ ID NO: 71697 - RNA, 19 nt, Homo sapiens
  misc_RNA (1)...(19): siRNA sense strand
ucagggaaaccgugaugaa

SEQ ID NO: 71698 - RNA, 19 nt, Homo sapiens
  misc_RNA (1)...(19): siRNA sense strand
gagccuacaaagcagaauu

SEQ ID NO: 71699 - RNA, 19 nt, Homo sapiens
  misc_RNA (1)...(19): siRNA sense strand
gacuaucucucgggaaugg

SEQ ID NO: 71700 - RNA, 19 nt, Homo sapiens
  misc_RNA (1)...(19): siRNA sense strand
cggcuuacggcaaggauuu

SEQ ID NO: 71701 - RNA, 19 nt, Homo sapiens
  misc_RNA (1)...(19): siRNA sense strand
gaucugugguggcaaugac

SEQ ID NO: 71702 - RNA, 19 nt, Homo sapiens
  misc_RNA (1)...(19): siRNA sense strand
agaccgaccuccuggacau

SEQ ID NO: 71703 - RNA, 19 nt, Homo sapiens
  misc_RNA (1)...(19): siRNA sense strand
gaauuaaacagagccuaca

SEQ ID NO: 71704 - RNA, 19 nt, Homo sapiens
  misc_RNA (1)...(19): siRNA sense strand
gagccaacaugcccaaccu

SEQ ID NO: 71705 - RNA, 19 nt, Homo sapiens
  misc_RNA (1)...(19): siRNA sense strand
cggaagauucugcugaaga

SEQ ID NO: 71706 - RNA, 19 nt, Homo sapiens
  misc_RNA (1)...(19): siRNA sense strand
gccgggacauugagaagag

SEQ ID NO: 71707 - RNA, 19 nt, Homo sapiens
  misc_RNA (1)...(19): siRNA sense strand
caaguucaaugcgguucug

SEQ ID NO: 71708 - RNA, 19 nt, Homo sapiens
  misc_RNA (1)...(19): siRNA sense strand
ggagauacuucaggggauu

SEQ ID NO: 71709 - RNA, 19 nt, Homo sapiens
  misc_RNA (1)...(19): siRNA sense strand
caucagaucagaguauaag

SEQ ID NO: 71710 - RNA, 19 nt, Homo sapiens
  misc_RNA (1)...(19): siRNA sense strand
cggcagcagauccuacuuu

SEQ ID NO: 71711 - RNA, 19 nt, Homo sapiens
  misc_RNA (1)...(19): siRNA sense strand
cgacacaucagggcacuuc

SEQ ID NO: 71712 - RNA, 19 nt, Homo sapiens
  misc_RNA (1)...(19): siRNA sense strand
cagaguauaagcggaugua

SEQ ID NO: 71713 - RNA, 19 nt, Homo sapiens
  misc_RNA (1)...(19): siRNA sense strand
cacugaugcucccggcuuu

SEQ ID NO: 71714 - RNA, 19 nt, Homo sapiens
  misc_RNA (1)...(19): siRNA sense strand
aggacuaucucucgggaau

SEQ ID NO: 71715 - RNA, 19 nt, Homo sapiens
  misc_RNA (1)...(19): siRNA sense strand
acagacgaguccaaguuca

SEQ ID NO: 71716 - RNA, 19 nt, Homo sapiens
  misc_RNA (1)...(19): siRNA sense strand
gaauaccccagccuucuuu

SEQ ID NO: 71717 - RNA, 19 nt, Homo sapiens
  misc_RNA (1)...(19): siRNA sense strand
aagccugccugauugagau

SEQ ID NO: 71718 - RNA, 19 nt, Homo sapiens
  misc_RNA (1)...(19): siRNA sense strand
uuaaacagagccuacaaag

SEQ ID NO: 71719 - RNA, 19 nt, Homo sapiens
  misc_RNA (1)...(19): siRNA sense strand
gacaaucuuggcucugaug

SEQ ID NO: 71720 - RNA, 19 nt, Homo sapiens
  misc_RNA (1)...(19): siRNA sense strand
cagcagauccuacuuuccu

SEQ ID NO: 71721 - RNA, 19 nt, Homo sapiens
  misc_RNA (1)...(19): siRNA sense strand
aaugaguaccagagaauga

SEQ ID NO: 71722 - RNA, 19 nt, Homo sapiens
  misc_RNA (1)...(19): siRNA sense strand
gcagccuguuccucccuau

SEQ ID NO: 71723 - RNA, 19 nt, Homo sapiens
  misc_RNA (1)...(19): siRNA sense strand
ggaacagacgaguccaagu

SEQ ID NO: 71724 - RNA, 19 nt, Homo sapiens
  misc_RNA (1)...(19): siRNA sense strand
gagauaaaggaagccauca

SEQ ID NO: 71725 - RNA, 19 nt, Homo sapiens
  misc_RNA (1)...(19): siRNA sense strand
ggagaaccgccugggaaca

SEQ ID NO: 71726 - RNA, 19 nt, Homo sapiens
  misc_RNA (1)...(19): siRNA sense strand
acaagcagcggcagcagau

SEQ ID NO: 71727 - RNA, 19 nt, Homo sapiens
  misc_RNA (1)...(19): siRNA sense strand
accggaagauucugcugaa

SEQ ID NO: 71728 - RNA, 19 nt, Homo sapiens
  misc_RNA (1)...(19): siRNA sense strand
cagacgaguccaaguucaa

SEQ ID NO: 71729 - RNA, 19 nt, Homo sapiens
  misc_RNA (1)...(19): siRNA sense strand
gagaaccgccugggaacag

SEQ ID NO: 71730 - RNA, 19 nt, Homo sapiens
  misc_RNA (1)...(19): siRNA sense strand
gaugaagccugccugauug

SEQ ID NO: 71731 - RNA, 19 nt, Homo sapiens
  misc_RNA (1)...(19): siRNA sense strand
gaacagacgaguccaaguu

SEQ ID NO: 71732 - RNA, 19 nt, Homo sapiens
  misc_RNA (1)...(19): siRNA sense strand
ugaaaugucucaagaauac

SEQ ID NO: 71733 - RNA, 19 nt, Homo sapiens
  misc_RNA (1)...(19): siRNA sense strand
gcacaaacguggacauguc

SEQ ID NO: 71734 - RNA, 19 nt, Homo sapiens
  misc_RNA (1)...(19): siRNA sense strand
cuacaaagcagaauucaaa

SEQ ID NO: 71735 - RNA, 19 nt, Homo sapiens
  misc_RNA (1)...(19): siRNA sense strand
ggaagauucugcugaagau

SEQ ID NO: 71736 - RNA, 19 nt, Homo sapiens
  misc_RNA (1)...(19): siRNA sense strand
gaagaucugugguggcaau

SEQ ID NO: 71737 - RNA, 19 nt, Homo sapiens
  misc_RNA (1)...(19): siRNA sense strand
aaacagagccuacaaagca

SEQ ID NO: 71738 - RNA, 19 nt, Homo sapiens
  misc_RNA (1)...(19): siRNA sense strand
ggugaaaugucucaagaau

SEQ ID NO: 71739 - RNA, 19 nt, Homo sapiens
  misc_RNA (1)...(19): siRNA sense strand
gagcacauccgagaauuaa

SEQ ID NO: 71740 - RNA, 19 nt, Homo sapiens
  misc_RNA (1)...(19): siRNA sense strand
gacaucagaucagaguaua

SEQ ID NO: 71741 - RNA, 19 nt, Homo sapiens
  misc_RNA (1)...(19): siRNA sense strand
gaucugaaaucugaacugu

SEQ ID NO: 71742 - RNA, 19 nt, Homo sapiens
  misc_RNA (1)...(19): siRNA sense strand
ucugaaaucugaacuguca

SEQ ID NO: 71743 - RNA, 19 nt, Homo sapiens
  misc_RNA (1)...(19): siRNA sense strand
ggacaucagaucagaguau

SEQ ID NO: 71744 - RNA, 19 nt, Homo sapiens
  misc_RNA (1)...(19): siRNA sense strand
ucaggaaacuuugagaaga

SEQ ID NO: 71745 - RNA, 19 nt, Homo sapiens
  misc_RNA (1)...(19): siRNA sense strand
ccaguccucuuugacauuu

SEQ ID NO: 71746 - RNA, 19 nt, Homo sapiens
  misc_RNA (1)...(19): siRNA sense strand
ccuccaggaugcccucaua

SEQ ID NO: 71747 - RNA, 19 nt, Homo sapiens
  misc_RNA (1)...(19): siRNA sense strand
guggugaaaugucucaaga

SEQ ID NO: 71748 - RNA, 19 nt, Homo sapiens
  misc_RNA (1)...(19): siRNA sense strand
ugaugaagccugccugauu

SEQ ID NO: 71749 - RNA, 19 nt, Homo sapiens
  misc_RNA (1)...(19): siRNA sense strand
gauccuacuuuccuucaag

SEQ ID NO: 71750 - RNA, 19 nt, Homo sapiens
  misc_RNA (1)...(19): siRNA sense strand
gugaaaugucucaagaaua

SEQ ID NO: 71751 - RNA, 19 nt, Homo sapiens
  misc_RNA (1)...(19): siRNA sense strand
gaacugucaggaaacuuug

SEQ ID NO: 71752 - RNA, 19 nt, Homo sapiens
  misc_RNA (1)...(19): siRNA sense strand
gcacauccgagaauuaaac

SEQ ID NO: 71753 - RNA, 19 nt, Homo sapiens
  misc_RNA (1)...(19): siRNA sense strand
gauaaaggaagccaucaag

SEQ ID NO: 71754 - RNA, 19 nt, Homo sapiens
  misc_RNA (1)...(19): siRNA sense strand
ggcagcagauccuacuuuc

SEQ ID NO: 71755 - RNA, 19 nt, Homo sapiens
  misc_RNA (1)...(19): siRNA sense strand
gagaugcccaggagcugua

SEQ ID NO: 71756 - RNA, 19 nt, Homo sapiens
  misc_RNA (1)...(19): siRNA sense strand
caacaugcccaaccuguac

SEQ ID NO: 71757 - RNA, 19 nt, Homo sapiens
  misc_RNA (1)...(19): siRNA sense strand
gggaaaccgugaugaaagc

SEQ ID NO: 71758 - RNA, 19 nt, Homo sapiens
  misc_RNA (1)...(19): siRNA sense strand
ugaacugucaggaaacuuu

SEQ ID NO: 71759 - RNA, 19 nt, Homo sapiens
  misc_RNA (1)...(19): siRNA sense strand
gaagccugccugauugaga

SEQ ID NO: 71760 - RNA, 19 nt, Homo sapiens
  misc_RNA (1)...(19): siRNA sense strand
ugagcacauccgagaauua

SEQ ID NO: 71761 - RNA, 19 nt, Homo sapiens
  misc_RNA (1)...(19): siRNA sense strand
ccaacaugcccaaccugua

SEQ ID NO: 71762 - RNA, 19 nt, Homo sapiens
  misc_RNA (1)...(19): siRNA sense strand
gaaacccacccuccaggau

SEQ ID NO: 71763 - RNA, 19 nt, Homo sapiens
  misc_RNA (1)...(19): siRNA sense strand
caaaggaccggacccugau

SEQ ID NO: 71764 - RNA, 19 nt, Homo sapiens
  misc_RNA (1)...(19): siRNA sense strand
gaaacuuugagaagacaau

SEQ ID NO: 71765 - RNA, 19 nt, Homo sapiens
  misc_RNA (1)...(19): siRNA sense strand
gggauuaccggaagauucu

SEQ ID NO: 71766 - RNA, 19 nt, Homo sapiens
  misc_RNA (1)...(19): siRNA sense strand
cauccgagaauuaaacaga

SEQ ID NO: 71767 - RNA, 19 nt, Homo sapiens
  misc_RNA (1)...(19): siRNA sense strand
caggaaacuuugagaagac

SEQ ID NO: 71768 - RNA, 19 nt, Homo sapiens
  misc_RNA (1)...(19): siRNA sense strand
ucaaugaguaccagagaau

SEQ ID NO: 71769 - RNA, 19 nt, Homo sapiens
  misc_RNA (1)...(19): siRNA sense strand
gcaguucaaccaggacuau

SEQ ID NO: 71770 - RNA, 19 nt, Homo sapiens
  misc_RNA (1)...(19): siRNA sense strand
gugccgagcuacccaggau

SEQ ID NO: 71771 - RNA, 19 nt, Homo sapiens
  misc_RNA (1)...(19): siRNA sense strand
cagggaaaccgugaugaaa

SEQ ID NO: 71772 - RNA, 19 nt, Homo sapiens
  misc_RNA (1)...(19): siRNA sense strand
aaucuuggcucugaugaag

SEQ ID NO: 71773 - RNA, 19 nt, Homo sapiens
  misc_RNA (1)...(19): siRNA sense strand
ucagggaaaccgugaugaa

SEQ ID NO: 71774 - RNA, 19 nt, Homo sapiens
  misc_RNA (1)...(19): siRNA sense strand
gagccuacaaagcagaauu

SEQ ID NO: 71775 - RNA, 19 nt, Homo sapiens
  misc_RNA (1)...(19): siRNA sense strand
gacuaucucucgggaaugg

SEQ ID NO: 71776 - RNA, 19 nt, Homo sapiens
  misc_RNA (1)...(19): siRNA sense strand
cggcuuacggcaaggauuu

SEQ ID NO: 71777 - RNA, 19 nt, Homo sapiens
  misc_RNA (1)...(19): siRNA sense strand
gaucugugguggcaaugac

SEQ ID NO: 71778 - RNA, 19 nt, Homo sapiens
  misc_RNA (1)...(19): siRNA sense strand
agaccgaccuccuggacau

SEQ ID NO: 71779 - RNA, 19 nt, Homo sapiens
  misc_RNA (1)...(19): siRNA sense strand
gaauuaaacagagccuaca

SEQ ID NO: 71780 - RNA, 19 nt, Homo sapiens
  misc_RNA (1)...(19): siRNA sense strand
gagccaacaugcccaaccu

SEQ ID NO: 71781 - RNA, 19 nt, Homo sapiens
  misc_RNA (1)...(19): siRNA sense strand
cggaagauucugcugaaga

SEQ ID NO: 71782 - RNA, 19 nt, Homo sapiens
  misc_RNA (1)...(19): siRNA sense strand
gccgggacauugagaagag

SEQ ID NO: 71783 - RNA, 19 nt, Homo sapiens
  misc_RNA (1)...(19): siRNA sense strand
caaguucaaugcgguucug

SEQ ID NO: 71784 - RNA, 19 nt, Homo sapiens
  misc_RNA (1)...(19): siRNA sense strand
ggagauacuucaggggauu

SEQ ID NO: 71785 - RNA, 19 nt, Homo sapiens
  misc_RNA (1)...(19): siRNA sense strand
caucagaucagaguauaag

SEQ ID NO: 71786 - RNA, 19 nt, Homo sapiens
  misc_RNA (1)...(19): siRNA sense strand
cggcagcagauccuacuuu

SEQ ID NO: 71787 - RNA, 19 nt, Homo sapiens
  misc_RNA (1)...(19): siRNA sense strand
cgacacaucagggcacuuc

SEQ ID NO: 71788 - RNA, 19 nt, Homo sapiens
  misc_RNA (1)...(19): siRNA sense strand
cagaguauaagcggaugua

SEQ ID NO: 71789 - RNA, 19 nt, Homo sapiens
  misc_RNA (1)...(19): siRNA sense strand
cacugaugcucccggcuuu

SEQ ID NO: 71790 - RNA, 19 nt, Homo sapiens
  misc_RNA (1)...(19): siRNA sense strand
aggacuaucucucgggaau

SEQ ID NO: 71791 - RNA, 19 nt, Homo sapiens
  misc_RNA (1)...(19): siRNA sense strand
acagacgaguccaaguuca

SEQ ID NO: 71792 - RNA, 19 nt, Homo sapiens
  misc_RNA (1)...(19): siRNA sense strand
gaauaccccagccuucuuu

SEQ ID NO: 71793 - RNA, 19 nt, Homo sapiens
  misc_RNA (1)...(19): siRNA sense strand
aagccugccugauugagau

SEQ ID NO: 71794 - RNA, 19 nt, Homo sapiens
  misc_RNA (1)...(19): siRNA sense strand
uuaaacagagccuacaaag

SEQ ID NO: 71795 - RNA, 19 nt, Homo sapiens
  misc_RNA (1)...(19): siRNA sense strand
gacaaucuuggcucugaug

SEQ ID NO: 71796 - RNA, 19 nt, Homo sapiens
  misc_RNA (1)...(19): siRNA sense strand
cagcagauccuacuuuccu

SEQ ID NO: 71797 - RNA, 19 nt, Homo sapiens
  misc_RNA (1)...(19): siRNA sense strand
aaugaguaccagagaauga

SEQ ID NO: 71798 - RNA, 19 nt, Homo sapiens
  misc_RNA (1)...(19): siRNA sense strand
gcagccuguuccucccuau

SEQ ID NO: 71799 - RNA, 19 nt, Homo sapiens
  misc_RNA (1)...(19): siRNA sense strand
ggaacagacgaguccaagu

SEQ ID NO: 71800 - RNA, 19 nt, Homo sapiens
  misc_RNA (1)...(19): siRNA sense strand
gagauaaaggaagccauca

SEQ ID NO: 71801 - RNA, 19 nt, Homo sapiens
  misc_RNA (1)...(19): siRNA sense strand
ggagaaccgccugggaaca

SEQ ID NO: 71802 - RNA, 19 nt, Homo sapiens
  misc_RNA (1)...(19): siRNA sense strand
acaagcagcggcagcagau

SEQ ID NO: 71803 - RNA, 19 nt, Homo sapiens
  misc_RNA (1)...(19): siRNA sense strand
accggaagauucugcugaa

SEQ ID NO: 71804 - RNA, 19 nt, Homo sapiens
  misc_RNA (1)...(19): siRNA sense strand
cagacgaguccaaguucaa

SEQ ID NO: 71805 - RNA, 19 nt, Homo sapiens
  misc_RNA (1)...(19): siRNA sense strand
gagaaccgccugggaacag

SEQ ID NO: 71806 - RNA, 19 nt, Homo sapiens
  misc_RNA (1)...(19): siRNA sense strand
gaacagaguuggcuucuug

SEQ ID NO: 71807 - RNA, 19 nt, Homo sapiens
  misc_RNA (1)...(19): siRNA sense strand
gcacuacuaugcagacuug

SEQ ID NO: 71808 - RNA, 19 nt, Homo sapiens
  misc_RNA (1)...(19): siRNA sense strand
ggacauccauauauuagug

SEQ ID NO: 71809 - RNA, 19 nt, Homo sapiens
  misc_RNA (1)...(19): siRNA sense strand
gggcaacuaugacuacauu

SEQ ID NO: 71810 - RNA, 19 nt, Homo sapiens
  misc_RNA (1)...(19): siRNA sense strand
gagcugaguuuacacagau

SEQ ID NO: 71811 - RNA, 19 nt, Homo sapiens
  misc_RNA (1)...(19): siRNA sense strand
cugaagacgugguguuuaa

SEQ ID NO: 71812 - RNA, 19 nt, Homo sapiens
  misc_RNA (1)...(19): siRNA sense strand
caacaaugaaacccucuua

SEQ ID NO: 71813 - RNA, 19 nt, Homo sapiens
  misc_RNA (1)...(19): siRNA sense strand
gcugagagcugaguuuaca

SEQ ID NO: 71814 - RNA, 19 nt, Homo sapiens
  misc_RNA (1)...(19): siRNA sense strand
gaugcugacucgcuauuug

SEQ ID NO: 71815 - RNA, 19 nt, Homo sapiens
  misc_RNA (1)...(19): siRNA sense strand
gaaaggaggaggagucaca

SEQ ID NO: 71816 - RNA, 19 nt, Homo sapiens
  misc_RNA (1)...(19): siRNA sense strand
gcaccacaauuaccuucaa

SEQ ID NO: 71817 - RNA, 19 nt, Homo sapiens
  misc_RNA (1)...(19): siRNA sense strand
gcaaggaaaccugguggua

SEQ ID NO: 71818 - RNA, 19 nt, Homo sapiens
  misc_RNA (1)...(19): siRNA sense strand
ccuauaacuucuuugauga

SEQ ID NO: 71819 - RNA, 19 nt, Homo sapiens
  misc_RNA (1)...(19): siRNA sense strand
gcaacuaugacuacauuug

SEQ ID NO: 71820 - RNA, 19 nt, Homo sapiens
  misc_RNA (1)...(19): siRNA sense strand
acacaugccuuccacuuca

SEQ ID NO: 71821 - RNA, 19 nt, Homo sapiens
  misc_RNA (1)...(19): siRNA sense strand
gcaucuaucaccagaauga

SEQ ID NO: 71822 - RNA, 19 nt, Homo sapiens
  misc_RNA (1)...(19): siRNA sense strand
caaugaaacccucuuagga

SEQ ID NO: 71823 - RNA, 19 nt, Homo sapiens
  misc_RNA (1)...(19): siRNA sense strand
aggaggaccugacagcuuu

SEQ ID NO: 71824 - RNA, 19 nt, Homo sapiens
  misc_RNA (1)...(19): siRNA sense strand
ggacaacugcaucuucuca

SEQ ID NO: 71825 - RNA, 19 nt, Homo sapiens
  misc_RNA (1)...(19): siRNA sense strand
uagcaucuaucaccagaau

SEQ ID NO: 71826 - RNA, 19 nt, Homo sapiens
  misc_RNA (1)...(19): siRNA sense strand
ucacagagcaguagcaucu

SEQ ID NO: 71827 - RNA, 19 nt, Homo sapiens
  misc_RNA (1)...(19): siRNA sense strand
ugacuacauuugggacuuu

SEQ ID NO: 71828 - RNA, 19 nt, Homo sapiens
  misc_RNA (1)...(19): siRNA sense strand
cccuauaacuucuuugaug

SEQ ID NO: 71829 - RNA, 19 nt, Homo sapiens
  misc_RNA (1)...(19): siRNA sense strand
ggccagagccagcuguuug

SEQ ID NO: 71830 - RNA, 19 nt, Homo sapiens
  misc_RNA (1)...(19): siRNA sense strand
ggucaggucugugucaucu

SEQ ID NO: 71831 - RNA, 19 nt, Homo sapiens
  misc_RNA (1)...(19): siRNA sense strand
ucugaaagauguggagcua

SEQ ID NO: 71832 - RNA, 19 nt, Homo sapiens
  misc_RNA (1)...(19): siRNA sense strand
ggaguugacagcugugaug

SEQ ID NO: 71833 - RNA, 19 nt, Homo sapiens
  misc_RNA (1)...(19): siRNA sense strand
gaguguguaucuaucuaug

SEQ ID NO: 71834 - RNA, 19 nt, Homo sapiens
  misc_RNA (1)...(19): siRNA sense strand
gcuccgacccuauaacuuc

SEQ ID NO: 71835 - RNA, 19 nt, Homo sapiens
  misc_RNA (1)...(19): siRNA sense strand
gcugugaugcgcuuucuga

SEQ ID NO: 71836 - RNA, 19 nt, Homo sapiens
  misc_RNA (1)...(19): siRNA sense strand
gcuagcaaccagacuaaug

SEQ ID NO: 71837 - RNA, 19 nt, Homo sapiens
  misc_RNA (1)...(19): siRNA sense strand
cugacucgcuauuuggaua

SEQ ID NO: 71838 - RNA, 19 nt, Homo sapiens
  misc_RNA (1)...(19): siRNA sense strand
guuccagggugagcgaaua

SEQ ID NO: 71839 - RNA, 19 nt, Homo sapiens
  misc_RNA (1)...(19): siRNA sense strand
caaggaaaccuggugguau

SEQ ID NO: 71840 - RNA, 19 nt, Homo sapiens
  misc_RNA (1)...(19): siRNA sense strand
aaggaaaccuggugguauc

SEQ ID NO: 71841 - RNA, 19 nt, Homo sapiens
  misc_RNA (1)...(19): siRNA sense strand
gcugaagacgugguguuua

SEQ ID NO: 71842 - RNA, 19 nt, Homo sapiens
  misc_RNA (1)...(19): siRNA sense strand
acagagcaguagcaucuau

SEQ ID NO: 71843 - RNA, 19 nt, Homo sapiens
  misc_RNA (1)...(19): siRNA sense strand
ggaacagaguuggcuucuu

SEQ ID NO: 71844 - RNA, 19 nt, Homo sapiens
  misc_RNA (1)...(19): siRNA sense strand
caccacaauuaccuucaaa

SEQ ID NO: 71845 - RNA, 19 nt, Homo sapiens
  misc_RNA (1)...(19): siRNA sense strand
caacuaugacuacauuugg

SEQ ID NO: 71846 - RNA, 19 nt, Homo sapiens
  misc_RNA (1)...(19): siRNA sense strand
ucaggucugugucaucugu

SEQ ID NO: 71847 - RNA, 19 nt, Homo sapiens
  misc_RNA (1)...(19): siRNA sense strand
gugcugagagcugaguuua

SEQ ID NO: 71848 - RNA, 19 nt, Homo sapiens
  misc_RNA (1)...(19): siRNA sense strand
ucauuucuauggugguuug

SEQ ID NO: 71849 - RNA, 19 nt, Homo sapiens
  misc_RNA (1)...(19): siRNA sense strand
uaucuauggugccgauuca

SEQ ID NO: 71850 - RNA, 19 nt, Homo sapiens
  misc_RNA (1)...(19): siRNA sense strand
gacccuauaacuucuuuga

SEQ ID NO: 71851 - RNA, 19 nt, Homo sapiens
  misc_RNA (1)...(19): siRNA sense strand
gguuggaagugguuagagu

SEQ ID NO: 71852 - RNA, 19 nt, Homo sapiens
  misc_RNA (1)...(19): siRNA sense strand
ugucaucugugggcaacua

SEQ ID NO: 71853 - RNA, 19 nt, Homo sapiens
  misc_RNA (1)...(19): siRNA sense strand
uucgaaggcaccacaauua

SEQ ID NO: 71854 - RNA, 19 nt, Homo sapiens
  misc_RNA (1)...(19): siRNA sense strand
ccaggaguguguaucuauc

SEQ ID NO: 71855 - RNA, 19 nt, Homo sapiens
  misc_RNA (1)...(19): siRNA sense strand
ggcaguguguacuuugaga

SEQ ID NO: 71856 - RNA, 19 nt, Homo sapiens
  misc_RNA (1)...(19): siRNA sense strand
gaagacgugguguuuaaac

SEQ ID NO: 71857 - RNA, 19 nt, Homo sapiens
  misc_RNA (1)...(19): siRNA sense strand
gcuuuggacucggccguaa

SEQ ID NO: 71858 - RNA, 19 nt, Homo sapiens
  misc_RNA (1)...(19): siRNA sense strand
gcacugucccucauuacca

SEQ ID NO: 71859 - RNA, 19 nt, Homo sapiens
  misc_RNA (1)...(19): siRNA sense strand
uaccuuugcugacuucauc

SEQ ID NO: 71860 - RNA, 19 nt, Homo sapiens
  misc_RNA (1)...(19): siRNA sense strand
gagaaaggaggaggaguca

SEQ ID NO: 71861 - RNA, 19 nt, Homo sapiens
  misc_RNA (1)...(19): siRNA sense strand
ccaguacagugugcaagga

SEQ ID NO: 71862 - RNA, 19 nt, Homo sapiens
  misc_RNA (1)...(19): siRNA sense strand
ggauguggcagggcugaaa

SEQ ID NO: 71863 - RNA, 19 nt, Homo sapiens
  misc_RNA (1)...(19): siRNA sense strand
ggaguguguaucuaucuau

SEQ ID NO: 71864 - RNA, 19 nt, Homo sapiens
  misc_RNA (1)...(19): siRNA sense strand
uauccucccucuggucauu

SEQ ID NO: 71865 - RNA, 19 nt, Homo sapiens
  misc_RNA (1)...(19): siRNA sense strand
ggaacgggaguuuaagucu

SEQ ID NO: 71866 - RNA, 19 nt, Homo sapiens
  misc_RNA (1)...(19): siRNA sense strand
ccucuggucauuuaccuuu

SEQ ID NO: 71867 - RNA, 19 nt, Homo sapiens
  misc_RNA (1)...(19): siRNA sense strand
cuggcacugucccucauua

SEQ ID NO: 71868 - RNA, 19 nt, Homo sapiens
  misc_RNA (1)...(19): siRNA sense strand
ggacacccacaguuaccuu

SEQ ID NO: 71869 - RNA, 19 nt, Homo sapiens
  misc_RNA (1)...(19): siRNA sense strand
caucugugggcaacuauga

SEQ ID NO: 71870 - RNA, 19 nt, Homo sapiens
  misc_RNA (1)...(19): siRNA sense strand
gcucagcccucggacaacu

SEQ ID NO: 71871 - RNA, 19 nt, Homo sapiens
  misc_RNA (1)...(19): siRNA sense strand
ccucuaccauaacaucuca

SEQ ID NO: 71872 - RNA, 19 nt, Homo sapiens
  misc_RNA (1)...(19): siRNA sense strand
agagcugaguuuacacaga

SEQ ID NO: 71873 - RNA, 19 nt, Homo sapiens
  misc_RNA (1)...(19): siRNA sense strand
gggaaaggaggaccugaca

SEQ ID NO: 71874 - RNA, 19 nt, Homo sapiens
  misc_RNA (1)...(19): siRNA sense strand
uuugggacuuuguguugua

SEQ ID NO: 71875 - RNA, 19 nt, Homo sapiens
  misc_RNA (1)...(19): siRNA sense strand
guccaggaguguguaucua

SEQ ID NO: 71876 - RNA, 19 nt, Homo sapiens
  misc_RNA (1)...(19): siRNA sense strand
gaaggcaccacaauuaccu

SEQ ID NO: 71877 - RNA, 19 nt, Homo sapiens
  misc_RNA (1)...(19): siRNA sense strand
gaggagucacagagcagua

SEQ ID NO: 71878 - RNA, 19 nt, Homo sapiens
  misc_RNA (1)...(19): siRNA sense strand
cauuugggacuuuguguug

SEQ ID NO: 71879 - RNA, 19 nt, Homo sapiens
  misc_RNA (1)...(19): siRNA sense strand
uugcugacuucaucaacaa

SEQ ID NO: 71880 - RNA, 19 nt, Homo sapiens
  misc_RNA (1)...(19): siRNA sense strand
gcaguguguacuuugagaa

SEQ ID NO: 71881 - RNA, 19 nt, Homo sapiens
  misc_RNA (1)...(19): siRNA sense strand
ugggaacggugcacacaca

SEQ ID NO: 71882 - RNA, 19 nt, Homo sapiens
  misc_RNA (1)...(19): siRNA sense strand
acaguuaccuuugcugacu

SEQ ID NO: 71883 - RNA, 19 nt, Homo sapiens
  misc_RNA (1)...(19): siRNA sense strand
caucuggacacccacaguu

SEQ ID NO: 71884 - RNA, 19 nt, Homo sapiens
  misc_RNA (1)...(19): siRNA sense strand
ggaacggugcacacacaug

SEQ ID NO: 71885 - RNA, 19 nt, Homo sapiens
  misc_RNA (1)...(19): siRNA sense strand
ccaguuggaacgggaguuu

SEQ ID NO: 71886 - RNA, 19 nt, Homo sapiens
  misc_RNA (1)...(19): siRNA sense strand
ggacaaccccaacccaaug

SEQ ID NO: 71887 - RNA, 19 nt, Homo sapiens
  misc_RNA (1)...(19): siRNA sense strand
acacacaugccuuccacuu

SEQ ID NO: 71888 - RNA, 19 nt, Homo sapiens
  misc_RNA (1)...(19): siRNA sense strand
gguuauaucaacacagcuu

SEQ ID NO: 71889 - RNA, 19 nt, Homo sapiens
  misc_RNA (1)...(19): siRNA sense strand
aaucauuucuauggugguu

SEQ ID NO: 71890 - RNA, 19 nt, Homo sapiens
  misc_RNA (1)...(19): siRNA sense strand
aggaguguguaucuaucua

SEQ ID NO: 71891 - RNA, 19 nt, Homo sapiens
  misc_RNA (1)...(19): siRNA sense strand
ccgacccuauaacuucuuu

SEQ ID NO: 71892 - RNA, 19 nt, Homo sapiens
  misc_RNA (1)...(19): siRNA sense strand
ucuuugcccuggccuaugu

SEQ ID NO: 71893 - RNA, 19 nt, Homo sapiens
  misc_RNA (1)...(19): siRNA sense strand
guguguaucuaucuauggu

SEQ ID NO: 71894 - RNA, 19 nt, Homo sapiens
  misc_RNA (1)...(19): siRNA sense strand
gaacucuccagguccucuu

SEQ ID NO: 71895 - RNA, 19 nt, Homo sapiens
  misc_RNA (1)...(19): siRNA sense strand
ucggacaacugcaucuucu

SEQ ID NO: 71896 - RNA, 19 nt, Homo sapiens
  misc_RNA (1)...(19): siRNA sense strand
cuucgaaggcaccacaauu

SEQ ID NO: 71897 - RNA, 19 nt, Homo sapiens
  misc_RNA (1)...(19): siRNA sense strand
ugucguccaccuucaacua

SEQ ID NO: 71898 - RNA, 19 nt, Homo sapiens
  misc_RNA (1)...(19): siRNA sense strand
guccaugccacggguuaua

SEQ ID NO: 71899 - RNA, 19 nt, Homo sapiens
  misc_RNA (1)...(19): siRNA sense strand
uguggaggcaucugaaaga

SEQ ID NO: 71900 - RNA, 19 nt, Homo sapiens
  misc_RNA (1)...(19): siRNA sense strand
ggaguggacugccccuauc

SEQ ID NO: 71901 - RNA, 19 nt, Homo sapiens
  misc_RNA (1)...(19): siRNA sense strand
gacacccacaguuaccuuu

SEQ ID NO: 71902 - RNA, 19 nt, Homo sapiens
  misc_RNA (1)...(19): siRNA sense strand
gacuacauuugggacuuug

SEQ ID NO: 71903 - RNA, 19 nt, Homo sapiens
  misc_RNA (1)...(19): siRNA sense strand
gggcuguguguguauuuga

SEQ ID NO: 71904 - RNA, 19 nt, Homo sapiens
  misc_RNA (1)...(19): siRNA sense strand
ugaagacgugguguuuaaa

SEQ ID NO: 71905 - RNA, 19 nt, Homo sapiens
  misc_RNA (1)...(19): siRNA sense strand
acaaugaaacccucuuagg

SEQ ID NO: 71906 - RNA, 19 nt, Homo sapiens
  misc_RNA (1)...(19): siRNA sense strand
gaacagaguuggcuucuug

SEQ ID NO: 71907 - RNA, 19 nt, Homo sapiens
  misc_RNA (1)...(19): siRNA sense strand
gcacuacuaugcagacuug

SEQ ID NO: 71908 - RNA, 19 nt, Homo sapiens
  misc_RNA (1)...(19): siRNA sense strand
ggacauccauauauuagug

SEQ ID NO: 71909 - RNA, 19 nt, Homo sapiens
  misc_RNA (1)...(19): siRNA sense strand
gggcaacuaugacuacauu

SEQ ID NO: 71910 - RNA, 19 nt, Homo sapiens
  misc_RNA (1)...(19): siRNA sense strand
gagcugaguuuacacagau

SEQ ID NO: 71911 - RNA, 19 nt, Homo sapiens
  misc_RNA (1)...(19): siRNA sense strand
cugaagacgugguguuuaa

SEQ ID NO: 71912 - RNA, 19 nt, Homo sapiens
  misc_RNA (1)...(19): siRNA sense strand
caacaaugaaacccucuua

SEQ ID NO: 71913 - RNA, 19 nt, Homo sapiens
  misc_RNA (1)...(19): siRNA sense strand
gcugagagcugaguuuaca

SEQ ID NO: 71914 - RNA, 19 nt, Homo sapiens
  misc_RNA (1)...(19): siRNA sense strand
gaugcugacucgcuauuug

SEQ ID NO: 71915 - RNA, 19 nt, Homo sapiens
  misc_RNA (1)...(19): siRNA sense strand
gaaaggaggaggagucaca

SEQ ID NO: 71916 - RNA, 19 nt, Homo sapiens
  misc_RNA (1)...(19): siRNA sense strand
gcaccacaauuaccuucaa

SEQ ID NO: 71917 - RNA, 19 nt, Homo sapiens
  misc_RNA (1)...(19): siRNA sense strand
gcaaggaaaccugguggua

SEQ ID NO: 71918 - RNA, 19 nt, Homo sapiens
  misc_RNA (1)...(19): siRNA sense strand
ccuauaacuucuuugauga

SEQ ID NO: 71919 - RNA, 19 nt, Homo sapiens
  misc_RNA (1)...(19): siRNA sense strand
gcaacuaugacuacauuug

SEQ ID NO: 71920 - RNA, 19 nt, Homo sapiens
  misc_RNA (1)...(19): siRNA sense strand
acacaugccuuccacuuca

SEQ ID NO: 71921 - RNA, 19 nt, Homo sapiens
  misc_RNA (1)...(19): siRNA sense strand
gcaucuaucaccagaauga

SEQ ID NO: 71922 - RNA, 19 nt, Homo sapiens
  misc_RNA (1)...(19): siRNA sense strand
caaugaaacccucuuagga

SEQ ID NO: 71923 - RNA, 19 nt, Homo sapiens
  misc_RNA (1)...(19): siRNA sense strand
aggaggaccugacagcuuu

SEQ ID NO: 71924 - RNA, 19 nt, Homo sapiens
  misc_RNA (1)...(19): siRNA sense strand
ggacaacugcaucuucuca

SEQ ID NO: 71925 - RNA, 19 nt, Homo sapiens
  misc_RNA (1)...(19): siRNA sense strand
uagcaucuaucaccagaau

SEQ ID NO: 71926 - RNA, 19 nt, Homo sapiens
  misc_RNA (1)...(19): siRNA sense strand
ucacagagcaguagcaucu

SEQ ID NO: 71927 - RNA, 19 nt, Homo sapiens
  misc_RNA (1)...(19): siRNA sense strand
ugacuacauuugggacuuu

SEQ ID NO: 71928 - RNA, 19 nt, Homo sapiens
  misc_RNA (1)...(19): siRNA sense strand
cccuauaacuucuuugaug

SEQ ID NO: 71929 - RNA, 19 nt, Homo sapiens
  misc_RNA (1)...(19): siRNA sense strand
ggccagagccagcuguuug

SEQ ID NO: 71930 - RNA, 19 nt, Homo sapiens
  misc_RNA (1)...(19): siRNA sense strand
ggucaggucugugucaucu

SEQ ID NO: 71931 - RNA, 19 nt, Homo sapiens
  misc_RNA (1)...(19): siRNA sense strand
ucugaaagauguggagcua

SEQ ID NO: 71932 - RNA, 19 nt, Homo sapiens
  misc_RNA (1)...(19): siRNA sense strand
ggaguugacagcugugaug

SEQ ID NO: 71933 - RNA, 19 nt, Homo sapiens
  misc_RNA (1)...(19): siRNA sense strand
gaguguguaucuaucuaug

SEQ ID NO: 71934 - RNA, 19 nt, Homo sapiens
  misc_RNA (1)...(19): siRNA sense strand
gcuccgacccuauaacuuc

SEQ ID NO: 71935 - RNA, 19 nt, Homo sapiens
  misc_RNA (1)...(19): siRNA sense strand
gcugugaugcgcuuucuga

SEQ ID NO: 71936 - RNA, 19 nt, Homo sapiens
  misc_RNA (1)...(19): siRNA sense strand
gcuagcaaccagacuaaug

SEQ ID NO: 71937 - RNA, 19 nt, Homo sapiens
  misc_RNA (1)...(19): siRNA sense strand
cugacucgcuauuuggaua

SEQ ID NO: 71938 - RNA, 19 nt, Homo sapiens
  misc_RNA (1)...(19): siRNA sense strand
guuccagggugagcgaaua

SEQ ID NO: 71939 - RNA, 19 nt, Homo sapiens
  misc_RNA (1)...(19): siRNA sense strand
caaggaaaccuggugguau

SEQ ID NO: 71940 - RNA, 19 nt, Homo sapiens
  misc_RNA (1)...(19): siRNA sense strand
aaggaaaccuggugguauc

SEQ ID NO: 71941 - RNA, 19 nt, Homo sapiens
  misc_RNA (1)...(19): siRNA sense strand
gcugaagacgugguguuua

SEQ ID NO: 71942 - RNA, 19 nt, Homo sapiens
  misc_RNA (1)...(19): siRNA sense strand
acagagcaguagcaucuau

SEQ ID NO: 71943 - RNA, 19 nt, Homo sapiens
  misc_RNA (1)...(19): siRNA sense strand
ggaacagaguuggcuucuu

SEQ ID NO: 71944 - RNA, 19 nt, Homo sapiens
  misc_RNA (1)...(19): siRNA sense strand
caccacaauuaccuucaaa

SEQ ID NO: 71945 - RNA, 19 nt, Homo sapiens
  misc_RNA (1)...(19): siRNA sense strand
caacuaugacuacauuugg

SEQ ID NO: 71946 - RNA, 19 nt, Homo sapiens
  misc_RNA (1)...(19): siRNA sense strand
ucaggucugugucaucugu

SEQ ID NO: 71947 - RNA, 19 nt, Homo sapiens
  misc_RNA (1)...(19): siRNA sense strand
gugcugagagcugaguuua

SEQ ID NO: 71948 - RNA, 19 nt, Homo sapiens
  misc_RNA (1)...(19): siRNA sense strand
ucauuucuauggugguuug

SEQ ID NO: 71949 - RNA, 19 nt, Homo sapiens
  misc_RNA (1)...(19): siRNA sense strand
uaucuauggugccgauuca

SEQ ID NO: 71950 - RNA, 19 nt, Homo sapiens
  misc_RNA (1)...(19): siRNA sense strand
gacccuauaacuucuuuga

SEQ ID NO: 71951 - RNA, 19 nt, Homo sapiens
  misc_RNA (1)...(19): siRNA sense strand
gguuggaagugguuagagu

SEQ ID NO: 71952 - RNA, 19 nt, Homo sapiens
  misc_RNA (1)...(19): siRNA sense strand
ugucaucugugggcaacua

SEQ ID NO: 71953 - RNA, 19 nt, Homo sapiens
  misc_RNA (1)...(19): siRNA sense strand
uucgaaggcaccacaauua

SEQ ID NO: 71954 - RNA, 19 nt, Homo sapiens
  misc_RNA (1)...(19): siRNA sense strand
ccaggaguguguaucuauc

SEQ ID NO: 71955 - RNA, 19 nt, Homo sapiens
  misc_RNA (1)...(19): siRNA sense strand
ggcaguguguacuuugaga

SEQ ID NO: 71956 - RNA, 19 nt, Homo sapiens
  misc_RNA (1)...(19): siRNA sense strand
gaagacgugguguuuaaac

SEQ ID NO: 71957 - RNA, 19 nt, Homo sapiens
  misc_RNA (1)...(19): siRNA sense strand
gcuuuggacucggccguaa

SEQ ID NO: 71958 - RNA, 19 nt, Homo sapiens
  misc_RNA (1)...(19): siRNA sense strand
gcacugucccucauuacca

SEQ ID NO: 71959 - RNA, 19 nt, Homo sapiens
  misc_RNA (1)...(19): siRNA sense strand
uaccuuugcugacuucauc

SEQ ID NO: 71960 - RNA, 19 nt, Homo sapiens
  misc_RNA (1)...(19): siRNA sense strand
gagaaaggaggaggaguca

SEQ ID NO: 71961 - RNA, 19 nt, Homo sapiens
  misc_RNA (1)...(19): siRNA sense strand
ccaguacagugugcaagga

SEQ ID NO: 71962 - RNA, 19 nt, Homo sapiens
  misc_RNA (1)...(19): siRNA sense strand
ggauguggcagggcugaaa

SEQ ID NO: 71963 - RNA, 19 nt, Homo sapiens
  misc_RNA (1)...(19): siRNA sense strand
ggaguguguaucuaucuau

SEQ ID NO: 71964 - RNA, 19 nt, Homo sapiens
  misc_RNA (1)...(19): siRNA sense strand
uauccucccucuggucauu

SEQ ID NO: 71965 - RNA, 19 nt, Homo sapiens
  misc_RNA (1)...(19): siRNA sense strand
ggaacgggaguuuaagucu

SEQ ID NO: 71966 - RNA, 19 nt, Homo sapiens
  misc_RNA (1)...(19): siRNA sense strand
ccucuggucauuuaccuuu

SEQ ID NO: 71967 - RNA, 19 nt, Homo sapiens
  misc_RNA (1)...(19): siRNA sense strand
cuggcacugucccucauua

SEQ ID NO: 71968 - RNA, 19 nt, Homo sapiens
  misc_RNA (1)...(19): siRNA sense strand
ggacacccacaguuaccuu

SEQ ID NO: 71969 - RNA, 19 nt, Homo sapiens
  misc_RNA (1)...(19): siRNA sense strand
caucugugggcaacuauga

SEQ ID NO: 71970 - RNA, 19 nt, Homo sapiens
  misc_RNA (1)...(19): siRNA sense strand
gcucagcccucggacaacu

SEQ ID NO: 71971 - RNA, 19 nt, Homo sapiens
  misc_RNA (1)...(19): siRNA sense strand
ccucuaccauaacaucuca

SEQ ID NO: 71972 - RNA, 19 nt, Homo sapiens
  misc_RNA (1)...(19): siRNA sense strand
agagcugaguuuacacaga

SEQ ID NO: 71973 - RNA, 19 nt, Homo sapiens
  misc_RNA (1)...(19): siRNA sense strand
gggaaaggaggaccugaca

SEQ ID NO: 71974 - RNA, 19 nt, Homo sapiens
  misc_RNA (1)...(19): siRNA sense strand
uuugggacuuuguguugua

SEQ ID NO: 71975 - RNA, 19 nt, Homo sapiens
  misc_RNA (1)...(19): siRNA sense strand
guccaggaguguguaucua

SEQ ID NO: 71976 - RNA, 19 nt, Homo sapiens
  misc_RNA (1)...(19): siRNA sense strand
gaaggcaccacaauuaccu

SEQ ID NO: 71977 - RNA, 19 nt, Homo sapiens
  misc_RNA (1)...(19): siRNA sense strand
gaggagucacagagcagua

SEQ ID NO: 71978 - RNA, 19 nt, Homo sapiens
  misc_RNA (1)...(19): siRNA sense strand
cauuugggacuuuguguug

SEQ ID NO: 71979 - RNA, 19 nt, Homo sapiens
  misc_RNA (1)...(19): siRNA sense strand
uugcugacuucaucaacaa

SEQ ID NO: 71980 - RNA, 19 nt, Homo sapiens
  misc_RNA (1)...(19): siRNA sense strand
gcaguguguacuuugagaa

SEQ ID NO: 71981 - RNA, 19 nt, Homo sapiens
  misc_RNA (1)...(19): siRNA sense strand
ugggaacggugcacacaca

SEQ ID NO: 71982 - RNA, 19 nt, Homo sapiens
  misc_RNA (1)...(19): siRNA sense strand
acaguuaccuuugcugacu

SEQ ID NO: 71983 - RNA, 19 nt, Homo sapiens
  misc_RNA (1)...(19): siRNA sense strand
caucuggacacccacaguu

SEQ ID NO: 71984 - RNA, 19 nt, Homo sapiens
  misc_RNA (1)...(19): siRNA sense strand
ggaacggugcacacacaug

SEQ ID NO: 71985 - RNA, 19 nt, Homo sapiens
  misc_RNA (1)...(19): siRNA sense strand
ccaguuggaacgggaguuu

SEQ ID NO: 71986 - RNA, 19 nt, Homo sapiens
  misc_RNA (1)...(19): siRNA sense strand
ggacaaccccaacccaaug

SEQ ID NO: 71987 - RNA, 19 nt, Homo sapiens
  misc_RNA (1)...(19): siRNA sense strand
acacacaugccuuccacuu

SEQ ID NO: 71988 - RNA, 19 nt, Homo sapiens
  misc_RNA (1)...(19): siRNA sense strand
gguuauaucaacacagcuu

SEQ ID NO: 71989 - RNA, 19 nt, Homo sapiens
  misc_RNA (1)...(19): siRNA sense strand
aaucauuucuauggugguu

SEQ ID NO: 71990 - RNA, 19 nt, Homo sapiens
  misc_RNA (1)...(19): siRNA sense strand
aggaguguguaucuaucua

SEQ ID NO: 71991 - RNA, 19 nt, Homo sapiens
  misc_RNA (1)...(19): siRNA sense strand
ccgacccuauaacuucuuu

SEQ ID NO: 71992 - RNA, 19 nt, Homo sapiens
  misc_RNA (1)...(19): siRNA sense strand
ucuuugcccuggccuaugu

SEQ ID NO: 71993 - RNA, 19 nt, Homo sapiens
  misc_RNA (1)...(19): siRNA sense strand
guguguaucuaucuauggu

SEQ ID NO: 71994 - RNA, 19 nt, Homo sapiens
  misc_RNA (1)...(19): siRNA sense strand
gaacucuccagguccucuu

SEQ ID NO: 71995 - RNA, 19 nt, Homo sapiens
  misc_RNA (1)...(19): siRNA sense strand
ucggacaacugcaucuucu

SEQ ID NO: 71996 - RNA, 19 nt, Homo sapiens
  misc_RNA (1)...(19): siRNA sense strand
cuucgaaggcaccacaauu

SEQ ID NO: 71997 - RNA, 19 nt, Homo sapiens
  misc_RNA (1)...(19): siRNA sense strand
ugucguccaccuucaacua

SEQ ID NO: 71998 - RNA, 19 nt, Homo sapiens
  misc_RNA (1)...(19): siRNA sense strand
guccaugccacggguuaua

SEQ ID NO: 71999 - RNA, 19 nt, Homo sapiens
  misc_RNA (1)...(19): siRNA sense strand
uguggaggcaucugaaaga

SEQ ID NO: 72000 - RNA, 19 nt, Homo sapiens
  misc_RNA (1)...(19): siRNA sense strand
ggaguggacugccccuauc

SEQ ID NO: 72001 - RNA, 19 nt, Homo sapiens
  misc_RNA (1)...(19): siRNA sense strand
gacacccacaguuaccuuu

SEQ ID NO: 72002 - RNA, 19 nt, Homo sapiens
  misc_RNA (1)...(19): siRNA sense strand
gacuacauuugggacuuug

SEQ ID NO: 72003 - RNA, 19 nt, Homo sapiens
  misc_RNA (1)...(19): siRNA sense strand
gggcuguguguguauuuga

SEQ ID NO: 72004 - RNA, 19 nt, Homo sapiens
  misc_RNA (1)...(19): siRNA sense strand
ugaagacgugguguuuaaa

SEQ ID NO: 72005 - RNA, 19 nt, Homo sapiens
  misc_RNA (1)...(19): siRNA sense strand
acaaugaaacccucuuagg

SEQ ID NO: 72006 - RNA, 19 nt, Homo sapiens
  misc_RNA (1)...(19): siRNA sense strand
ggaagaagcuggugaaugc

SEQ ID NO: 72007 - RNA, 19 nt, Homo sapiens
  misc_RNA (1)...(19): siRNA sense strand
gaacaagcucauaguauua

SEQ ID NO: 72008 - RNA, 19 nt, Homo sapiens
  misc_RNA (1)...(19): siRNA sense strand
cagaagcucuccaaauuga

SEQ ID NO: 72009 - RNA, 19 nt, Homo sapiens
  misc_RNA (1)...(19): siRNA sense strand
ucacagaccuucuacacaa

SEQ ID NO: 72010 - RNA, 19 nt, Homo sapiens
  misc_RNA (1)...(19): siRNA sense strand
agaacaagcucauaguauu

SEQ ID NO: 72011 - RNA, 19 nt, Homo sapiens
  misc_RNA (1)...(19): siRNA sense strand
gauaaugauuccuacguau

SEQ ID NO: 72012 - RNA, 19 nt, Homo sapiens
  misc_RNA (1)...(19): siRNA sense strand
acaaauggaaccaaucuua

SEQ ID NO: 72013 - RNA, 19 nt, Homo sapiens
  misc_RNA (1)...(19): siRNA sense strand
gaucuuggaugauguuugg

SEQ ID NO: 72014 - RNA, 19 nt, Homo sapiens
  misc_RNA (1)...(19): siRNA sense strand
caaauggaaccaaucuuaa

SEQ ID NO: 72015 - RNA, 19 nt, Homo sapiens
  misc_RNA (1)...(19): siRNA sense strand
ccacagaggccaguuguuu

SEQ ID NO: 72016 - RNA, 19 nt, Homo sapiens
  misc_RNA (1)...(19): siRNA sense strand
aguaauggguccuaaauau

SEQ ID NO: 72017 - RNA, 19 nt, Homo sapiens
  misc_RNA (1)...(19): siRNA sense strand
agcagaagcucuccaaauu

SEQ ID NO: 72018 - RNA, 19 nt, Homo sapiens
  misc_RNA (1)...(19): siRNA sense strand
caagacauccuacaucaug

SEQ ID NO: 72019 - RNA, 19 nt, Homo sapiens
  misc_RNA (1)...(19): siRNA sense strand
acaaugcucuacuacauga

SEQ ID NO: 72020 - RNA, 19 nt, Homo sapiens
  misc_RNA (1)...(19): siRNA sense strand
caugauuagugauggauuu

SEQ ID NO: 72021 - RNA, 19 nt, Homo sapiens
  misc_RNA (1)...(19): siRNA sense strand
aaucugggcuucugaugaa

SEQ ID NO: 72022 - RNA, 19 nt, Homo sapiens
  misc_RNA (1)...(19): siRNA sense strand
gaagcucuccaaauugaaa

SEQ ID NO: 72023 - RNA, 19 nt, Homo sapiens
  misc_RNA (1)...(19): siRNA sense strand
gcagaagcucuccaaauug

SEQ ID NO: 72024 - RNA, 19 nt, Homo sapiens
  misc_RNA (1)...(19): siRNA sense strand
cuacaaugcucuacuacau

SEQ ID NO: 72025 - RNA, 19 nt, Homo sapiens
  misc_RNA (1)...(19): siRNA sense strand
gacaagaguguuacagauu

SEQ ID NO: 72026 - RNA, 19 nt, Homo sapiens
  misc_RNA (1)...(19): siRNA sense strand
ugaugaaacugcagaaucu

SEQ ID NO: 72027 - RNA, 19 nt, Homo sapiens
  misc_RNA (1)...(19): siRNA sense strand
cccagaggcuuccacuuaa

SEQ ID NO: 72028 - RNA, 19 nt, Homo sapiens
  misc_RNA (1)...(19): siRNA sense strand
gagaagcucuggaaaagga

SEQ ID NO: 72029 - RNA, 19 nt, Homo sapiens
  misc_RNA (1)...(19): siRNA sense strand
agauaaugauuccuacgua

SEQ ID NO: 72030 - RNA, 19 nt, Homo sapiens
  misc_RNA (1)...(19): siRNA sense strand
ucccagaggcuuccacuua

SEQ ID NO: 72031 - RNA, 19 nt, Homo sapiens
  misc_RNA (1)...(19): siRNA sense strand
acaagaguguuacagauuc

SEQ ID NO: 72032 - RNA, 19 nt, Homo sapiens
  misc_RNA (1)...(19): siRNA sense strand
cuacacaaauggaaccaau

SEQ ID NO: 72033 - RNA, 19 nt, Homo sapiens
  misc_RNA (1)...(19): siRNA sense strand
ccagaacaagcucauagua

SEQ ID NO: 72034 - RNA, 19 nt, Homo sapiens
  misc_RNA (1)...(19): siRNA sense strand
caugaaggauauaaagauc

SEQ ID NO: 72035 - RNA, 19 nt, Homo sapiens
  misc_RNA (1)...(19): siRNA sense strand
agacaagaguguuacagau

SEQ ID NO: 72036 - RNA, 19 nt, Homo sapiens
  misc_RNA (1)...(19): siRNA sense strand
gagacaagaguguuacaga

SEQ ID NO: 72037 - RNA, 19 nt, Homo sapiens
  misc_RNA (1)...(19): siRNA sense strand
caagaguguuacagauuca

SEQ ID NO: 72038 - RNA, 19 nt, Homo sapiens
  misc_RNA (1)...(19): siRNA sense strand
guaauggguccuaaauaug

SEQ ID NO: 72039 - RNA, 19 nt, Homo sapiens
  misc_RNA (1)...(19): siRNA sense strand
caugauggcauuccuguug

SEQ ID NO: 72040 - RNA, 19 nt, Homo sapiens
  misc_RNA (1)...(19): siRNA sense strand
uggaaccaaucuuaagaaa

SEQ ID NO: 72041 - RNA, 19 nt, Homo sapiens
  misc_RNA (1)...(19): siRNA sense strand
gaccgucuccgcauucuga

SEQ ID NO: 72042 - RNA, 19 nt, Homo sapiens
  misc_RNA (1)...(19): siRNA sense strand
ugcagaagcuguuagagau

SEQ ID NO: 72043 - RNA, 19 nt, Homo sapiens
  misc_RNA (1)...(19): siRNA sense strand
cauaugugacuguggauaa

SEQ ID NO: 72044 - RNA, 19 nt, Homo sapiens
  misc_RNA (1)...(19): siRNA sense strand
cagaacaagcucauaguau

SEQ ID NO: 72045 - RNA, 19 nt, Homo sapiens
  misc_RNA (1)...(19): siRNA sense strand
cagaggcuuccacuuaaua

SEQ ID NO: 72046 - RNA, 19 nt, Homo sapiens
  misc_RNA (1)...(19): siRNA sense strand
agacaaaucugggcuucug

SEQ ID NO: 72047 - RNA, 19 nt, Homo sapiens
  misc_RNA (1)...(19): siRNA sense strand
cuacguaucauucuacaau

SEQ ID NO: 72048 - RNA, 19 nt, Homo sapiens
  misc_RNA (1)...(19): siRNA sense strand
uaauggguccuaaauaugu

SEQ ID NO: 72049 - RNA, 19 nt, Homo sapiens
  misc_RNA (1)...(19): siRNA sense strand
gcauuccuguugucucuuc

SEQ ID NO: 72050 - RNA, 19 nt, Homo sapiens
  misc_RNA (1)...(19): siRNA sense strand
ucuacuacaugaaggauau

SEQ ID NO: 72051 - RNA, 19 nt, Homo sapiens
  misc_RNA (1)...(19): siRNA sense strand
cagaagcuguuagagauca

SEQ ID NO: 72052 - RNA, 19 nt, Homo sapiens
  misc_RNA (1)...(19): siRNA sense strand
ccagaggcuuccacuuaau

SEQ ID NO: 72053 - RNA, 19 nt, Homo sapiens
  misc_RNA (1)...(19): siRNA sense strand
caaggaagaagcuggugaa

SEQ ID NO: 72054 - RNA, 19 nt, Homo sapiens
  misc_RNA (1)...(19): siRNA sense strand
cgaaauuguuugcuucaac

SEQ ID NO: 72055 - RNA, 19 nt, Homo sapiens
  misc_RNA (1)...(19): siRNA sense strand
cagcagaagcucuccaaau

SEQ ID NO: 72056 - RNA, 19 nt, Homo sapiens
  misc_RNA (1)...(19): siRNA sense strand
ggcuuccacuuaauauuga

SEQ ID NO: 72057 - RNA, 19 nt, Homo sapiens
  misc_RNA (1)...(19): siRNA sense strand
caaaagcucgaaauuguuu

SEQ ID NO: 72058 - RNA, 19 nt, Homo sapiens
  misc_RNA (1)...(19): siRNA sense strand
guggauaaucuugguauuu

SEQ ID NO: 72059 - RNA, 19 nt, Homo sapiens
  misc_RNA (1)...(19): siRNA sense strand
guugaaagcuuuugacagu

SEQ ID NO: 72060 - RNA, 19 nt, Homo sapiens
  misc_RNA (1)...(19): siRNA sense strand
cacagaccuucuacacaaa

SEQ ID NO: 72061 - RNA, 19 nt, Homo sapiens
  misc_RNA (1)...(19): siRNA sense strand
uugcugcccuucuccauga

SEQ ID NO: 72062 - RNA, 19 nt, Homo sapiens
  misc_RNA (1)...(19): siRNA sense strand
caguaauggguccuaaaua

SEQ ID NO: 72063 - RNA, 19 nt, Homo sapiens
  misc_RNA (1)...(19): siRNA sense strand
gggagugcauuggguuuca

SEQ ID NO: 72064 - RNA, 19 nt, Homo sapiens
  misc_RNA (1)...(19): siRNA sense strand
aacaauaucagaagaggaa

SEQ ID NO: 72065 - RNA, 19 nt, Homo sapiens
  misc_RNA (1)...(19): siRNA sense strand
caacagcaaagagcagcua

SEQ ID NO: 72066 - RNA, 19 nt, Homo sapiens
  misc_RNA (1)...(19): siRNA sense strand
gaagcuggugaaugcaauu

SEQ ID NO: 72067 - RNA, 19 nt, Homo sapiens
  misc_RNA (1)...(19): siRNA sense strand
aauggguccuaaauaugua

SEQ ID NO: 72068 - RNA, 19 nt, Homo sapiens
  misc_RNA (1)...(19): siRNA sense strand
caucaagacauccuacauc

SEQ ID NO: 72069 - RNA, 19 nt, Homo sapiens
  misc_RNA (1)...(19): siRNA sense strand
auucuacaaugcucuacua

SEQ ID NO: 72070 - RNA, 19 nt, Homo sapiens
  misc_RNA (1)...(19): siRNA sense strand
ugaaacugcagaaucuuug

SEQ ID NO: 72071 - RNA, 19 nt, Homo sapiens
  misc_RNA (1)...(19): siRNA sense strand
gcaaacacccaaggucucu

SEQ ID NO: 72072 - RNA, 19 nt, Homo sapiens
  misc_RNA (1)...(19): siRNA sense strand
ucaguaauggguccuaaau

SEQ ID NO: 72073 - RNA, 19 nt, Homo sapiens
  misc_RNA (1)...(19): siRNA sense strand
cuacaugaaggauauaaag

SEQ ID NO: 72074 - RNA, 19 nt, Homo sapiens
  misc_RNA (1)...(19): siRNA sense strand
gaguguuacagauucagua

SEQ ID NO: 72075 - RNA, 19 nt, Homo sapiens
  misc_RNA (1)...(19): siRNA sense strand
ugcaaaagcucgaaauugu

SEQ ID NO: 72076 - RNA, 19 nt, Homo sapiens
  misc_RNA (1)...(19): siRNA sense strand
cagugucagauucuucuua

SEQ ID NO: 72077 - RNA, 19 nt, Homo sapiens
  misc_RNA (1)...(19): siRNA sense strand
aaaaggacaucaagacauc

SEQ ID NO: 72078 - RNA, 19 nt, Homo sapiens
  misc_RNA (1)...(19): siRNA sense strand
ugucagauucuucuuacaa

SEQ ID NO: 72079 - RNA, 19 nt, Homo sapiens
  misc_RNA (1)...(19): siRNA sense strand
uagagaucauucccuuuua

SEQ ID NO: 72080 - RNA, 19 nt, Homo sapiens
  misc_RNA (1)...(19): siRNA sense strand
gaaaaggacaucaagacau

SEQ ID NO: 72081 - RNA, 19 nt, Homo sapiens
  misc_RNA (1)...(19): siRNA sense strand
gcagaagcuguuagagauc

SEQ ID NO: 72082 - RNA, 19 nt, Homo sapiens
  misc_RNA (1)...(19): siRNA sense strand
uggaucaggaugagaguuu

SEQ ID NO: 72083 - RNA, 19 nt, Homo sapiens
  misc_RNA (1)...(19): siRNA sense strand
caaauugaaaggugaacca

SEQ ID NO: 72084 - RNA, 19 nt, Homo sapiens
  misc_RNA (1)...(19): siRNA sense strand
auaugaagaaggcagauuu

SEQ ID NO: 72085 - RNA, 19 nt, Homo sapiens
  misc_RNA (1)...(19): siRNA sense strand
aucaagacauccuacauca

SEQ ID NO: 72086 - RNA, 19 nt, Homo sapiens
  misc_RNA (1)...(19): siRNA sense strand
gaugauguuugggacucuu

SEQ ID NO: 72087 - RNA, 19 nt, Homo sapiens
  misc_RNA (1)...(19): siRNA sense strand
gugcauuggguuucaguug

SEQ ID NO: 72088 - RNA, 19 nt, Homo sapiens
  misc_RNA (1)...(19): siRNA sense strand
cugcagaagcuguuagaga

SEQ ID NO: 72089 - RNA, 19 nt, Homo sapiens
  misc_RNA (1)...(19): siRNA sense strand
uggcauuccuguugucucu

SEQ ID NO: 72090 - RNA, 19 nt, Homo sapiens
  misc_RNA (1)...(19): siRNA sense strand
gcaaaagcucgaaauuguu

SEQ ID NO: 72091 - RNA, 19 nt, Homo sapiens
  misc_RNA (1)...(19): siRNA sense strand
ugggaagucuguauuagcu

SEQ ID NO: 72092 - RNA, 19 nt, Homo sapiens
  misc_RNA (1)...(19): siRNA sense strand
gugugaagguggaguacca

SEQ ID NO: 72093 - RNA, 19 nt, Homo sapiens
  misc_RNA (1)...(19): siRNA sense strand
aggcuuccacuuaauauug

SEQ ID NO: 72094 - RNA, 19 nt, Homo sapiens
  misc_RNA (1)...(19): siRNA sense strand
gaggcuuccacuuaauauu

SEQ ID NO: 72095 - RNA, 19 nt, Homo sapiens
  misc_RNA (1)...(19): siRNA sense strand
gcugugggaagucuguauu

SEQ ID NO: 72096 - RNA, 19 nt, Homo sapiens
  misc_RNA (1)...(19): siRNA sense strand
caaaucugggcuucugaug

SEQ ID NO: 72097 - RNA, 19 nt, Homo sapiens
  misc_RNA (1)...(19): siRNA sense strand
aauggaaccaaucuuaaga

SEQ ID NO: 72098 - RNA, 19 nt, Homo sapiens
  misc_RNA (1)...(19): siRNA sense strand
acacaaauggaaccaaucu

SEQ ID NO: 72099 - RNA, 19 nt, Homo sapiens
  misc_RNA (1)...(19): siRNA sense strand
cagaccuucuacacaaaug

SEQ ID NO: 72100 - RNA, 19 nt, Homo sapiens
  misc_RNA (1)...(19): siRNA sense strand
uaugaagaaggcagauuug

SEQ ID NO: 72101 - RNA, 19 nt, Homo sapiens
  misc_RNA (1)...(19): siRNA sense strand
ggaaaaggacaucaagaca

SEQ ID NO: 72102 - RNA, 19 nt, Homo sapiens
  misc_RNA (1)...(19): siRNA sense strand
aaaucugggcuucugauga

SEQ ID NO: 72103 - RNA, 19 nt, Homo sapiens
  misc_RNA (1)...(19): siRNA sense strand
agaagcuggugaaugcaau

SEQ ID NO: 72104 - RNA, 19 nt, Homo sapiens
  misc_RNA (1)...(19): siRNA sense strand
aaauggaaccaaucuuaag

SEQ ID NO: 72105 - RNA, 19 nt, Homo sapiens
  misc_RNA (1)...(19): siRNA sense strand
caaccagagacaagagugu

SEQ ID NO: 72106 - RNA, 19 nt, Homo sapiens
  misc_RNA (1)...(19): siRNA sense strand
ggaagaagcuggugaaugc

SEQ ID NO: 72107 - RNA, 19 nt, Homo sapiens
  misc_RNA (1)...(19): siRNA sense strand
gaacaagcucauaguauua

SEQ ID NO: 72108 - RNA, 19 nt, Homo sapiens
  misc_RNA (1)...(19): siRNA sense strand
cagaagcucuccaaauuga

SEQ ID NO: 72109 - RNA, 19 nt, Homo sapiens
  misc_RNA (1)...(19): siRNA sense strand
ucacagaccuucuacacaa

SEQ ID NO: 72110 - RNA, 19 nt, Homo sapiens
  misc_RNA (1)...(19): siRNA sense strand
agaacaagcucauaguauu

SEQ ID NO: 72111 - RNA, 19 nt, Homo sapiens
  misc_RNA (1)...(19): siRNA sense strand
gauaaugauuccuacguau

SEQ ID NO: 72112 - RNA, 19 nt, Homo sapiens
  misc_RNA (1)...(19): siRNA sense strand
acaaauggaaccaaucuua

SEQ ID NO: 72113 - RNA, 19 nt, Homo sapiens
  misc_RNA (1)...(19): siRNA sense strand
gaucuuggaugauguuugg

SEQ ID NO: 72114 - RNA, 19 nt, Homo sapiens
  misc_RNA (1)...(19): siRNA sense strand
caaauggaaccaaucuuaa

SEQ ID NO: 72115 - RNA, 19 nt, Homo sapiens
  misc_RNA (1)...(19): siRNA sense strand
ccacagaggccaguuguuu

SEQ ID NO: 72116 - RNA, 19 nt, Homo sapiens
  misc_RNA (1)...(19): siRNA sense strand
aguaauggguccuaaauau

SEQ ID NO: 72117 - RNA, 19 nt, Homo sapiens
  misc_RNA (1)...(19): siRNA sense strand
agcagaagcucuccaaauu

SEQ ID NO: 72118 - RNA, 19 nt, Homo sapiens
  misc_RNA (1)...(19): siRNA sense strand
caagacauccuacaucaug

SEQ ID NO: 72119 - RNA, 19 nt, Homo sapiens
  misc_RNA (1)...(19): siRNA sense strand
acaaugcucuacuacauga

SEQ ID NO: 72120 - RNA, 19 nt, Homo sapiens
  misc_RNA (1)...(19): siRNA sense strand
caugauuagugauggauuu

SEQ ID NO: 72121 - RNA, 19 nt, Homo sapiens
  misc_RNA (1)...(19): siRNA sense strand
aaucugggcuucugaugaa

SEQ ID NO: 72122 - RNA, 19 nt, Homo sapiens
  misc_RNA (1)...(19): siRNA sense strand
gaagcucuccaaauugaaa

SEQ ID NO: 72123 - RNA, 19 nt, Homo sapiens
  misc_RNA (1)...(19): siRNA sense strand
gcagaagcucuccaaauug

SEQ ID NO: 72124 - RNA, 19 nt, Homo sapiens
  misc_RNA (1)...(19): siRNA sense strand
cuacaaugcucuacuacau

SEQ ID NO: 72125 - RNA, 19 nt, Homo sapiens
  misc_RNA (1)...(19): siRNA sense strand
gacaagaguguuacagauu

SEQ ID NO: 72126 - RNA, 19 nt, Homo sapiens
  misc_RNA (1)...(19): siRNA sense strand
ugaugaaacugcagaaucu

SEQ ID NO: 72127 - RNA, 19 nt, Homo sapiens
  misc_RNA (1)...(19): siRNA sense strand
cccagaggcuuccacuuaa

SEQ ID NO: 72128 - RNA, 19 nt, Homo sapiens
  misc_RNA (1)...(19): siRNA sense strand
gagaagcucuggaaaagga

SEQ ID NO: 72129 - RNA, 19 nt, Homo sapiens
  misc_RNA (1)...(19): siRNA sense strand
agauaaugauuccuacgua

SEQ ID NO: 72130 - RNA, 19 nt, Homo sapiens
  misc_RNA (1)...(19): siRNA sense strand
ucccagaggcuuccacuua

SEQ ID NO: 72131 - RNA, 19 nt, Homo sapiens
  misc_RNA (1)...(19): siRNA sense strand
acaagaguguuacagauuc

SEQ ID NO: 72132 - RNA, 19 nt, Homo sapiens
  misc_RNA (1)...(19): siRNA sense strand
cuacacaaauggaaccaau

SEQ ID NO: 72133 - RNA, 19 nt, Homo sapiens
  misc_RNA (1)...(19): siRNA sense strand
ccagaacaagcucauagua

SEQ ID NO: 72134 - RNA, 19 nt, Homo sapiens
  misc_RNA (1)...(19): siRNA sense strand
caugaaggauauaaagauc

SEQ ID NO: 72135 - RNA, 19 nt, Homo sapiens
  misc_RNA (1)...(19): siRNA sense strand
agacaagaguguuacagau

SEQ ID NO: 72136 - RNA, 19 nt, Homo sapiens
  misc_RNA (1)...(19): siRNA sense strand
gagacaagaguguuacaga

SEQ ID NO: 72137 - RNA, 19 nt, Homo sapiens
  misc_RNA (1)...(19): siRNA sense strand
caagaguguuacagauuca

SEQ ID NO: 72138 - RNA, 19 nt, Homo sapiens
  misc_RNA (1)...(19): siRNA sense strand
guaauggguccuaaauaug

SEQ ID NO: 72139 - RNA, 19 nt, Homo sapiens
  misc_RNA (1)...(19): siRNA sense strand
caugauggcauuccuguug

SEQ ID NO: 72140 - RNA, 19 nt, Homo sapiens
  misc_RNA (1)...(19): siRNA sense strand
uggaaccaaucuuaagaaa

SEQ ID NO: 72141 - RNA, 19 nt, Homo sapiens
  misc_RNA (1)...(19): siRNA sense strand
gaccgucuccgcauucuga

SEQ ID NO: 72142 - RNA, 19 nt, Homo sapiens
  misc_RNA (1)...(19): siRNA sense strand
ugcagaagcuguuagagau

SEQ ID NO: 72143 - RNA, 19 nt, Homo sapiens
  misc_RNA (1)...(19): siRNA sense strand
cauaugugacuguggauaa

SEQ ID NO: 72144 - RNA, 19 nt, Homo sapiens
  misc_RNA (1)...(19): siRNA sense strand
cagaacaagcucauaguau

SEQ ID NO: 72145 - RNA, 19 nt, Homo sapiens
  misc_RNA (1)...(19): siRNA sense strand
cagaggcuuccacuuaaua

SEQ ID NO: 72146 - RNA, 19 nt, Homo sapiens
  misc_RNA (1)...(19): siRNA sense strand
agacaaaucugggcuucug

SEQ ID NO: 72147 - RNA, 19 nt, Homo sapiens
  misc_RNA (1)...(19): siRNA sense strand
cuacguaucauucuacaau

SEQ ID NO: 72148 - RNA, 19 nt, Homo sapiens
  misc_RNA (1)...(19): siRNA sense strand
uaauggguccuaaauaugu

SEQ ID NO: 72149 - RNA, 19 nt, Homo sapiens
  misc_RNA (1)...(19): siRNA sense strand
gcauuccuguugucucuuc

SEQ ID NO: 72150 - RNA, 19 nt, Homo sapiens
  misc_RNA (1)...(19): siRNA sense strand
ucuacuacaugaaggauau

SEQ ID NO: 72151 - RNA, 19 nt, Homo sapiens
  misc_RNA (1)...(19): siRNA sense strand
cagaagcuguuagagauca

SEQ ID NO: 72152 - RNA, 19 nt, Homo sapiens
  misc_RNA (1)...(19): siRNA sense strand
ccagaggcuuccacuuaau

SEQ ID NO: 72153 - RNA, 19 nt, Homo sapiens
  misc_RNA (1)...(19): siRNA sense strand
caaggaagaagcuggugaa

SEQ ID NO: 72154 - RNA, 19 nt, Homo sapiens
  misc_RNA (1)...(19): siRNA sense strand
cgaaauuguuugcuucaac

SEQ ID NO: 72155 - RNA, 19 nt, Homo sapiens
  misc_RNA (1)...(19): siRNA sense strand
cagcagaagcucuccaaau

SEQ ID NO: 72156 - RNA, 19 nt, Homo sapiens
  misc_RNA (1)...(19): siRNA sense strand
ggcuuccacuuaauauuga

SEQ ID NO: 72157 - RNA, 19 nt, Homo sapiens
  misc_RNA (1)...(19): siRNA sense strand
caaaagcucgaaauuguuu

SEQ ID NO: 72158 - RNA, 19 nt, Homo sapiens
  misc_RNA (1)...(19): siRNA sense strand
guggauaaucuugguauuu

SEQ ID NO: 72159 - RNA, 19 nt, Homo sapiens
  misc_RNA (1)...(19): siRNA sense strand
guugaaagcuuuugacagu

SEQ ID NO: 72160 - RNA, 19 nt, Homo sapiens
  misc_RNA (1)...(19): siRNA sense strand
cacagaccuucuacacaaa

SEQ ID NO: 72161 - RNA, 19 nt, Homo sapiens
  misc_RNA (1)...(19): siRNA sense strand
uugcugcccuucuccauga

SEQ ID NO: 72162 - RNA, 19 nt, Homo sapiens
  misc_RNA (1)...(19): siRNA sense strand
caguaauggguccuaaaua

SEQ ID NO: 72163 - RNA, 19 nt, Homo sapiens
  misc_RNA (1)...(19): siRNA sense strand
gggagugcauuggguuuca

SEQ ID NO: 72164 - RNA, 19 nt, Homo sapiens
  misc_RNA (1)...(19): siRNA sense strand
aacaauaucagaagaggaa

SEQ ID NO: 72165 - RNA, 19 nt, Homo sapiens
  misc_RNA (1)...(19): siRNA sense strand
caacagcaaagagcagcua

SEQ ID NO: 72166 - RNA, 19 nt, Homo sapiens
  misc_RNA (1)...(19): siRNA sense strand
gaagcuggugaaugcaauu

SEQ ID NO: 72167 - RNA, 19 nt, Homo sapiens
  misc_RNA (1)...(19): siRNA sense strand
aauggguccuaaauaugua

SEQ ID NO: 72168 - RNA, 19 nt, Homo sapiens
  misc_RNA (1)...(19): siRNA sense strand
caucaagacauccuacauc

SEQ ID NO: 72169 - RNA, 19 nt, Homo sapiens
  misc_RNA (1)...(19): siRNA sense strand
auucuacaaugcucuacua

SEQ ID NO: 72170 - RNA, 19 nt, Homo sapiens
  misc_RNA (1)...(19): siRNA sense strand
ugaaacugcagaaucuuug

SEQ ID NO: 72171 - RNA, 19 nt, Homo sapiens
  misc_RNA (1)...(19): siRNA sense strand
gcaaacacccaaggucucu

SEQ ID NO: 72172 - RNA, 19 nt, Homo sapiens
  misc_RNA (1)...(19): siRNA sense strand
ucaguaauggguccuaaau

SEQ ID NO: 72173 - RNA, 19 nt, Homo sapiens
  misc_RNA (1)...(19): siRNA sense strand
cuacaugaaggauauaaag

SEQ ID NO: 72174 - RNA, 19 nt, Homo sapiens
  misc_RNA (1)...(19): siRNA sense strand
gaguguuacagauucagua

SEQ ID NO: 72175 - RNA, 19 nt, Homo sapiens
  misc_RNA (1)...(19): siRNA sense strand
ugcaaaagcucgaaauugu

SEQ ID NO: 72176 - RNA, 19 nt, Homo sapiens
  misc_RNA (1)...(19): siRNA sense strand
cagugucagauucuucuua

SEQ ID NO: 72177 - RNA, 19 nt, Homo sapiens
  misc_RNA (1)...(19): siRNA sense strand
aaaaggacaucaagacauc

SEQ ID NO: 72178 - RNA, 19 nt, Homo sapiens
  misc_RNA (1)...(19): siRNA sense strand
ugucagauucuucuuacaa

SEQ ID NO: 72179 - RNA, 19 nt, Homo sapiens
  misc_RNA (1)...(19): siRNA sense strand
uagagaucauucccuuuua

SEQ ID NO: 72180 - RNA, 19 nt, Homo sapiens
  misc_RNA (1)...(19): siRNA sense strand
gaaaaggacaucaagacau

SEQ ID NO: 72181 - RNA, 19 nt, Homo sapiens
  misc_RNA (1)...(19): siRNA sense strand
gcagaagcuguuagagauc

SEQ ID NO: 72182 - RNA, 19 nt, Homo sapiens
  misc_RNA (1)...(19): siRNA sense strand
uggaucaggaugagaguuu

SEQ ID NO: 72183 - RNA, 19 nt, Homo sapiens
  misc_RNA (1)...(19): siRNA sense strand
caaauugaaaggugaacca

SEQ ID NO: 72184 - RNA, 19 nt, Homo sapiens
  misc_RNA (1)...(19): siRNA sense strand
auaugaagaaggcagauuu

SEQ ID NO: 72185 - RNA, 19 nt, Homo sapiens
  misc_RNA (1)...(19): siRNA sense strand
aucaagacauccuacauca

SEQ ID NO: 72186 - RNA, 19 nt, Homo sapiens
  misc_RNA (1)...(19): siRNA sense strand
gaugauguuugggacucuu

SEQ ID NO: 72187 - RNA, 19 nt, Homo sapiens
  misc_RNA (1)...(19): siRNA sense strand
gugcauuggguuucaguug

SEQ ID NO: 72188 - RNA, 19 nt, Homo sapiens
  misc_RNA (1)...(19): siRNA sense strand
cugcagaagcuguuagaga

SEQ ID NO: 72189 - RNA, 19 nt, Homo sapiens
  misc_RNA (1)...(19): siRNA sense strand
uggcauuccuguugucucu

SEQ ID NO: 72190 - RNA, 19 nt, Homo sapiens
  misc_RNA (1)...(19): siRNA sense strand
gcaaaagcucgaaauuguu

SEQ ID NO: 72191 - RNA, 19 nt, Homo sapiens
  misc_RNA (1)...(19): siRNA sense strand
ugggaagucuguauuagcu

SEQ ID NO: 72192 - RNA, 19 nt, Homo sapiens
  misc_RNA (1)...(19): siRNA sense strand
gugugaagguggaguacca

SEQ ID NO: 72193 - RNA, 19 nt, Homo sapiens
  misc_RNA (1)...(19): siRNA sense strand
aggcuuccacuuaauauug

SEQ ID NO: 72194 - RNA, 19 nt, Homo sapiens
  misc_RNA (1)...(19): siRNA sense strand
gaggcuuccacuuaauauu

SEQ ID NO: 72195 - RNA, 19 nt, Homo sapiens
  misc_RNA (1)...(19): siRNA sense strand
gcugugggaagucuguauu

SEQ ID NO: 72196 - RNA, 19 nt, Homo sapiens
  misc_RNA (1)...(19): siRNA sense strand
caaaucugggcuucugaug

SEQ ID NO: 72197 - RNA, 19 nt, Homo sapiens
  misc_RNA (1)...(19): siRNA sense strand
aauggaaccaaucuuaaga

SEQ ID NO: 72198 - RNA, 19 nt, Homo sapiens
  misc_RNA (1)...(19): siRNA sense strand
acacaaauggaaccaaucu

SEQ ID NO: 72199 - RNA, 19 nt, Homo sapiens
  misc_RNA (1)...(19): siRNA sense strand
cagaccuucuacacaaaug

SEQ ID NO: 72200 - RNA, 19 nt, Homo sapiens
  misc_RNA (1)...(19): siRNA sense strand
uaugaagaaggcagauuug

SEQ ID NO: 72201 - RNA, 19 nt, Homo sapiens
  misc_RNA (1)...(19): siRNA sense strand
ggaaaaggacaucaagaca

SEQ ID NO: 72202 - RNA, 19 nt, Homo sapiens
  misc_RNA (1)...(19): siRNA sense strand
aaaucugggcuucugauga

SEQ ID NO: 72203 - RNA, 19 nt, Homo sapiens
  misc_RNA (1)...(19): siRNA sense strand
agaagcuggugaaugcaau

SEQ ID NO: 72204 - RNA, 19 nt, Homo sapiens
  misc_RNA (1)...(19): siRNA sense strand
aaauggaaccaaucuuaag

SEQ ID NO: 72205 - RNA, 19 nt, Homo sapiens
  misc_RNA (1)...(19): siRNA sense strand
caaccagagacaagagugu

SEQ ID NO: 72206 - RNA, 19 nt, Homo sapiens
  misc_RNA (1)...(19): siRNA sense strand
ggaagaagcuggugaaugc

SEQ ID NO: 72207 - RNA, 19 nt, Homo sapiens
  misc_RNA (1)...(19): siRNA sense strand
gaacaagcucauaguauua

SEQ ID NO: 72208 - RNA, 19 nt, Homo sapiens
  misc_RNA (1)...(19): siRNA sense strand
cagaagcucuccaaauuga

SEQ ID NO: 72209 - RNA, 19 nt, Homo sapiens
  misc_RNA (1)...(19): siRNA sense strand
ucacagaccuucuacacaa

SEQ ID NO: 72210 - RNA, 19 nt, Homo sapiens
  misc_RNA (1)...(19): siRNA sense strand
agaacaagcucauaguauu

SEQ ID NO: 72211 - RNA, 19 nt, Homo sapiens
  misc_RNA (1)...(19): siRNA sense strand
gauaaugauuccuacguau

SEQ ID NO: 72212 - RNA, 19 nt, Homo sapiens
  misc_RNA (1)...(19): siRNA sense strand
acaaauggaaccaaucuua

SEQ ID NO: 72213 - RNA, 19 nt, Homo sapiens
  misc_RNA (1)...(19): siRNA sense strand
gaucuuggaugauguuugg

SEQ ID NO: 72214 - RNA, 19 nt, Homo sapiens
  misc_RNA (1)...(19): siRNA sense strand
caaauggaaccaaucuuaa

SEQ ID NO: 72215 - RNA, 19 nt, Homo sapiens
  misc_RNA (1)...(19): siRNA sense strand
ccacagaggccaguuguuu

SEQ ID NO: 72216 - RNA, 19 nt, Homo sapiens
  misc_RNA (1)...(19): siRNA sense strand
aguaauggguccuaaauau

SEQ ID NO: 72217 - RNA, 19 nt, Homo sapiens
  misc_RNA (1)...(19): siRNA sense strand
agcagaagcucuccaaauu

SEQ ID NO: 72218 - RNA, 19 nt, Homo sapiens
  misc_RNA (1)...(19): siRNA sense strand
caagacauccuacaucaug

SEQ ID NO: 72219 - RNA, 19 nt, Homo sapiens
  misc_RNA (1)...(19): siRNA sense strand
acaaugcucuacuacauga

SEQ ID NO: 72220 - RNA, 19 nt, Homo sapiens
  misc_RNA (1)...(19): siRNA sense strand
caugauuagugauggauuu

SEQ ID NO: 72221 - RNA, 19 nt, Homo sapiens
  misc_RNA (1)...(19): siRNA sense strand
aaucugggcuucugaugaa

SEQ ID NO: 72222 - RNA, 19 nt, Homo sapiens
  misc_RNA (1)...(19): siRNA sense strand
gaagcucuccaaauugaaa

SEQ ID NO: 72223 - RNA, 19 nt, Homo sapiens
  misc_RNA (1)...(19): siRNA sense strand
gcagaagcucuccaaauug

SEQ ID NO: 72224 - RNA, 19 nt, Homo sapiens
  misc_RNA (1)...(19): siRNA sense strand
cuacaaugcucuacuacau

SEQ ID NO: 72225 - RNA, 19 nt, Homo sapiens
  misc_RNA (1)...(19): siRNA sense strand
gacaagaguguuacagauu

SEQ ID NO: 72226 - RNA, 19 nt, Homo sapiens
  misc_RNA (1)...(19): siRNA sense strand
ugaugaaacugcagaaucu

SEQ ID NO: 72227 - RNA, 19 nt, Homo sapiens
  misc_RNA (1)...(19): siRNA sense strand
cccagaggcuuccacuuaa

SEQ ID NO: 72228 - RNA, 19 nt, Homo sapiens
  misc_RNA (1)...(19): siRNA sense strand
gagaagcucuggaaaagga

SEQ ID NO: 72229 - RNA, 19 nt, Homo sapiens
  misc_RNA (1)...(19): siRNA sense strand
agauaaugauuccuacgua

SEQ ID NO: 72230 - RNA, 19 nt, Homo sapiens
  misc_RNA (1)...(19): siRNA sense strand
ucccagaggcuuccacuua

SEQ ID NO: 72231 - RNA, 19 nt, Homo sapiens
  misc_RNA (1)...(19): siRNA sense strand
acaagaguguuacagauuc

SEQ ID NO: 72232 - RNA, 19 nt, Homo sapiens
  misc_RNA (1)...(19): siRNA sense strand
cuacacaaauggaaccaau

SEQ ID NO: 72233 - RNA, 19 nt, Homo sapiens
  misc_RNA (1)...(19): siRNA sense strand
ccagaacaagcucauagua

SEQ ID NO: 72234 - RNA, 19 nt, Homo sapiens
  misc_RNA (1)...(19): siRNA sense strand
caugaaggauauaaagauc

SEQ ID NO: 72235 - RNA, 19 nt, Homo sapiens
  misc_RNA (1)...(19): siRNA sense strand
agacaagaguguuacagau

SEQ ID NO: 72236 - RNA, 19 nt, Homo sapiens
  misc_RNA (1)...(19): siRNA sense strand
gagacaagaguguuacaga

SEQ ID NO: 72237 - RNA, 19 nt, Homo sapiens
  misc_RNA (1)...(19): siRNA sense strand
caagaguguuacagauuca

SEQ ID NO: 72238 - RNA, 19 nt, Homo sapiens
  misc_RNA (1)...(19): siRNA sense strand
guaauggguccuaaauaug

SEQ ID NO: 72239 - RNA, 19 nt, Homo sapiens
  misc_RNA (1)...(19): siRNA sense strand
caugauggcauuccuguug

SEQ ID NO: 72240 - RNA, 19 nt, Homo sapiens
  misc_RNA (1)...(19): siRNA sense strand
uggaaccaaucuuaagaaa

SEQ ID NO: 72241 - RNA, 19 nt, Homo sapiens
  misc_RNA (1)...(19): siRNA sense strand
gaccgucuccgcauucuga

SEQ ID NO: 72242 - RNA, 19 nt, Homo sapiens
  misc_RNA (1)...(19): siRNA sense strand
ugcagaagcuguuagagau

SEQ ID NO: 72243 - RNA, 19 nt, Homo sapiens
  misc_RNA (1)...(19): siRNA sense strand
cauaugugacuguggauaa

SEQ ID NO: 72244 - RNA, 19 nt, Homo sapiens
  misc_RNA (1)...(19): siRNA sense strand
cagaacaagcucauaguau

SEQ ID NO: 72245 - RNA, 19 nt, Homo sapiens
  misc_RNA (1)...(19): siRNA sense strand
cagaggcuuccacuuaaua

SEQ ID NO: 72246 - RNA, 19 nt, Homo sapiens
  misc_RNA (1)...(19): siRNA sense strand
agacaaaucugggcuucug

SEQ ID NO: 72247 - RNA, 19 nt, Homo sapiens
  misc_RNA (1)...(19): siRNA sense strand
cuacguaucauucuacaau

SEQ ID NO: 72248 - RNA, 19 nt, Homo sapiens
  misc_RNA (1)...(19): siRNA sense strand
uaauggguccuaaauaugu

SEQ ID NO: 72249 - RNA, 19 nt, Homo sapiens
  misc_RNA (1)...(19): siRNA sense strand
gcauuccuguugucucuuc

SEQ ID NO: 72250 - RNA, 19 nt, Homo sapiens
  misc_RNA (1)...(19): siRNA sense strand
ucuacuacaugaaggauau

SEQ ID NO: 72251 - RNA, 19 nt, Homo sapiens
  misc_RNA (1)...(19): siRNA sense strand
cagaagcuguuagagauca

SEQ ID NO: 72252 - RNA, 19 nt, Homo sapiens
  misc_RNA (1)...(19): siRNA sense strand
ccagaggcuuccacuuaau

SEQ ID NO: 72253 - RNA, 19 nt, Homo sapiens
  misc_RNA (1)...(19): siRNA sense strand
caaggaagaagcuggugaa

SEQ ID NO: 72254 - RNA, 19 nt, Homo sapiens
  misc_RNA (1)...(19): siRNA sense strand
cgaaauuguuugcuucaac

SEQ ID NO: 72255 - RNA, 19 nt, Homo sapiens
  misc_RNA (1)...(19): siRNA sense strand
cagcagaagcucuccaaau

SEQ ID NO: 72256 - RNA, 19 nt, Homo sapiens
  misc_RNA (1)...(19): siRNA sense strand
ggcuuccacuuaauauuga

SEQ ID NO: 72257 - RNA, 19 nt, Homo sapiens
  misc_RNA (1)...(19): siRNA sense strand
caaaagcucgaaauuguuu

SEQ ID NO: 72258 - RNA, 19 nt, Homo sapiens
  misc_RNA (1)...(19): siRNA sense strand
guggauaaucuugguauuu

SEQ ID NO: 72259 - RNA, 19 nt, Homo sapiens
  misc_RNA (1)...(19): siRNA sense strand
guugaaagcuuuugacagu

SEQ ID NO: 72260 - RNA, 19 nt, Homo sapiens
  misc_RNA (1)...(19): siRNA sense strand
cacagaccuucuacacaaa

SEQ ID NO: 72261 - RNA, 19 nt, Homo sapiens
  misc_RNA (1)...(19): siRNA sense strand
uugcugcccuucuccauga

SEQ ID NO: 72262 - RNA, 19 nt, Homo sapiens
  misc_RNA (1)...(19): siRNA sense strand
caguaauggguccuaaaua

SEQ ID NO: 72263 - RNA, 19 nt, Homo sapiens
  misc_RNA (1)...(19): siRNA sense strand
gggagugcauuggguuuca

SEQ ID NO: 72264 - RNA, 19 nt, Homo sapiens
  misc_RNA (1)...(19): siRNA sense strand
aacaauaucagaagaggaa

SEQ ID NO: 72265 - RNA, 19 nt, Homo sapiens
  misc_RNA (1)...(19): siRNA sense strand
caacagcaaagagcagcua

SEQ ID NO: 72266 - RNA, 19 nt, Homo sapiens
  misc_RNA (1)...(19): siRNA sense strand
gaagcuggugaaugcaauu

SEQ ID NO: 72267 - RNA, 19 nt, Homo sapiens
  misc_RNA (1)...(19): siRNA sense strand
aauggguccuaaauaugua

SEQ ID NO: 72268 - RNA, 19 nt, Homo sapiens
  misc_RNA (1)...(19): siRNA sense strand
caucaagacauccuacauc

SEQ ID NO: 72269 - RNA, 19 nt, Homo sapiens
  misc_RNA (1)...(19): siRNA sense strand
auucuacaaugcucuacua

SEQ ID NO: 72270 - RNA, 19 nt, Homo sapiens
  misc_RNA (1)...(19): siRNA sense strand
ugaaacugcagaaucuuug

SEQ ID NO: 72271 - RNA, 19 nt, Homo sapiens
  misc_RNA (1)...(19): siRNA sense strand
gcaaacacccaaggucucu

SEQ ID NO: 72272 - RNA, 19 nt, Homo sapiens
  misc_RNA (1)...(19): siRNA sense strand
ucaguaauggguccuaaau

SEQ ID NO: 72273 - RNA, 19 nt, Homo sapiens
  misc_RNA (1)...(19): siRNA sense strand
cuacaugaaggauauaaag

SEQ ID NO: 72274 - RNA, 19 nt, Homo sapiens
  misc_RNA (1)...(19): siRNA sense strand
gaguguuacagauucagua

SEQ ID NO: 72275 - RNA, 19 nt, Homo sapiens
  misc_RNA (1)...(19): siRNA sense strand
ugcaaaagcucgaaauugu

SEQ ID NO: 72276 - RNA, 19 nt, Homo sapiens
  misc_RNA (1)...(19): siRNA sense strand
cagugucagauucuucuua

SEQ ID NO: 72277 - RNA, 19 nt, Homo sapiens
  misc_RNA (1)...(19): siRNA sense strand
aaaaggacaucaagacauc

SEQ ID NO: 72278 - RNA, 19 nt, Homo sapiens
  misc_RNA (1)...(19): siRNA sense strand
ugucagauucuucuuacaa

SEQ ID NO: 72279 - RNA, 19 nt, Homo sapiens
  misc_RNA (1)...(19): siRNA sense strand
uagagaucauucccuuuua

SEQ ID NO: 72280 - RNA, 19 nt, Homo sapiens
  misc_RNA (1)...(19): siRNA sense strand
gaaaaggacaucaagacau

SEQ ID NO: 72281 - RNA, 19 nt, Homo sapiens
  misc_RNA (1)...(19): siRNA sense strand
gcagaagcuguuagagauc

SEQ ID NO: 72282 - RNA, 19 nt, Homo sapiens
  misc_RNA (1)...(19): siRNA sense strand
uggaucaggaugagaguuu

SEQ ID NO: 72283 - RNA, 19 nt, Homo sapiens
  misc_RNA (1)...(19): siRNA sense strand
caaauugaaaggugaacca

SEQ ID NO: 72284 - RNA, 19 nt, Homo sapiens
  misc_RNA (1)...(19): siRNA sense strand
auaugaagaaggcagauuu

SEQ ID NO: 72285 - RNA, 19 nt, Homo sapiens
  misc_RNA (1)...(19): siRNA sense strand
aucaagacauccuacauca

SEQ ID NO: 72286 - RNA, 19 nt, Homo sapiens
  misc_RNA (1)...(19): siRNA sense strand
gaugauguuugggacucuu

SEQ ID NO: 72287 - RNA, 19 nt, Homo sapiens
  misc_RNA (1)...(19): siRNA sense strand
gugcauuggguuucaguug

SEQ ID NO: 72288 - RNA, 19 nt, Homo sapiens
  misc_RNA (1)...(19): siRNA sense strand
cugcagaagcuguuagaga

SEQ ID NO: 72289 - RNA, 19 nt, Homo sapiens
  misc_RNA (1)...(19): siRNA sense strand
uggcauuccuguugucucu

SEQ ID NO: 72290 - RNA, 19 nt, Homo sapiens
  misc_RNA (1)...(19): siRNA sense strand
gcaaaagcucgaaauuguu

SEQ ID NO: 72291 - RNA, 19 nt, Homo sapiens
  misc_RNA (1)...(19): siRNA sense strand
ugggaagucuguauuagcu

SEQ ID NO: 72292 - RNA, 19 nt, Homo sapiens
  misc_RNA (1)...(19): siRNA sense strand
gugugaagguggaguacca

SEQ ID NO: 72293 - RNA, 19 nt, Homo sapiens
  misc_RNA (1)...(19): siRNA sense strand
aggcuuccacuuaauauug

SEQ ID NO: 72294 - RNA, 19 nt, Homo sapiens
  misc_RNA (1)...(19): siRNA sense strand
gaggcuuccacuuaauauu

SEQ ID NO: 72295 - RNA, 19 nt, Homo sapiens
  misc_RNA (1)...(19): siRNA sense strand
gcugugggaagucuguauu

SEQ ID NO: 72296 - RNA, 19 nt, Homo sapiens
  misc_RNA (1)...(19): siRNA sense strand
caaaucugggcuucugaug

SEQ ID NO: 72297 - RNA, 19 nt, Homo sapiens
  misc_RNA (1)...(19): siRNA sense strand
aauggaaccaaucuuaaga

SEQ ID NO: 72298 - RNA, 19 nt, Homo sapiens
  misc_RNA (1)...(19): siRNA sense strand
acacaaauggaaccaaucu

SEQ ID NO: 72299 - RNA, 19 nt, Homo sapiens
  misc_RNA (1)...(19): siRNA sense strand
cagaccuucuacacaaaug

SEQ ID NO: 72300 - RNA, 19 nt, Homo sapiens
  misc_RNA (1)...(19): siRNA sense strand
uaugaagaaggcagauuug

SEQ ID NO: 72301 - RNA, 19 nt, Homo sapiens
  misc_RNA (1)...(19): siRNA sense strand
ggaaaaggacaucaagaca

SEQ ID NO: 72302 - RNA, 19 nt, Homo sapiens
  misc_RNA (1)...(19): siRNA sense strand
aaaucugggcuucugauga

SEQ ID NO: 72303 - RNA, 19 nt, Homo sapiens
  misc_RNA (1)...(19): siRNA sense strand
agaagcuggugaaugcaau

SEQ ID NO: 72304 - RNA, 19 nt, Homo sapiens
  misc_RNA (1)...(19): siRNA sense strand
aaauggaaccaaucuuaag

SEQ ID NO: 72305 - RNA, 19 nt, Homo sapiens
  misc_RNA (1)...(19): siRNA sense strand
caaccagagacaagagugu

SEQ ID NO: 72306 - RNA, 19 nt, Homo sapiens
  misc_RNA (1)...(19): siRNA sense strand
ggaagaagcuggugaaugc

SEQ ID NO: 72307 - RNA, 19 nt, Homo sapiens
  misc_RNA (1)...(19): siRNA sense strand
gaacaagcucauaguauua

SEQ ID NO: 72308 - RNA, 19 nt, Homo sapiens
  misc_RNA (1)...(19): siRNA sense strand
cagaagcucuccaaauuga

SEQ ID NO: 72309 - RNA, 19 nt, Homo sapiens
  misc_RNA (1)...(19): siRNA sense strand
ucacagaccuucuacacaa

SEQ ID NO: 72310 - RNA, 19 nt, Homo sapiens
  misc_RNA (1)...(19): siRNA sense strand
agaacaagcucauaguauu

SEQ ID NO: 72311 - RNA, 19 nt, Homo sapiens
  misc_RNA (1)...(19): siRNA sense strand
gauaaugauuccuacguau

SEQ ID NO: 72312 - RNA, 19 nt, Homo sapiens
  misc_RNA (1)...(19): siRNA sense strand
acaaauggaaccaaucuua

SEQ ID NO: 72313 - RNA, 19 nt, Homo sapiens
  misc_RNA (1)...(19): siRNA sense strand
gaucuuggaugauguuugg

SEQ ID NO: 72314 - RNA, 19 nt, Homo sapiens
  misc_RNA (1)...(19): siRNA sense strand
caaauggaaccaaucuuaa

SEQ ID NO: 72315 - RNA, 19 nt, Homo sapiens
  misc_RNA (1)...(19): siRNA sense strand
ccacagaggccaguuguuu

SEQ ID NO: 72316 - RNA, 19 nt, Homo sapiens
  misc_RNA (1)...(19): siRNA sense strand
aguaauggguccuaaauau

SEQ ID NO: 72317 - RNA, 19 nt, Homo sapiens
  misc_RNA (1)...(19): siRNA sense strand
agcagaagcucuccaaauu

SEQ ID NO: 72318 - RNA, 19 nt, Homo sapiens
  misc_RNA (1)...(19): siRNA sense strand
caagacauccuacaucaug

SEQ ID NO: 72319 - RNA, 19 nt, Homo sapiens
  misc_RNA (1)...(19): siRNA sense strand
acaaugcucuacuacauga

SEQ ID NO: 72320 - RNA, 19 nt, Homo sapiens
  misc_RNA (1)...(19): siRNA sense strand
caugauuagugauggauuu

SEQ ID NO: 72321 - RNA, 19 nt, Homo sapiens
  misc_RNA (1)...(19): siRNA sense strand
aaucugggcuucugaugaa

SEQ ID NO: 72322 - RNA, 19 nt, Homo sapiens
  misc_RNA (1)...(19): siRNA sense strand
gaagcucuccaaauugaaa

SEQ ID NO: 72323 - RNA, 19 nt, Homo sapiens
  misc_RNA (1)...(19): siRNA sense strand
gcagaagcucuccaaauug

SEQ ID NO: 72324 - RNA, 19 nt, Homo sapiens
  misc_RNA (1)...(19): siRNA sense strand
cuacaaugcucuacuacau

SEQ ID NO: 72325 - RNA, 19 nt, Homo sapiens
  misc_RNA (1)...(19): siRNA sense strand
gacaagaguguuacagauu

SEQ ID NO: 72326 - RNA, 19 nt, Homo sapiens
  misc_RNA (1)...(19): siRNA sense strand
ugaugaaacugcagaaucu

SEQ ID NO: 72327 - RNA, 19 nt, Homo sapiens
  misc_RNA (1)...(19): siRNA sense strand
cccagaggcuuccacuuaa

SEQ ID NO: 72328 - RNA, 19 nt, Homo sapiens
  misc_RNA (1)...(19): siRNA sense strand
gagaagcucuggaaaagga

SEQ ID NO: 72329 - RNA, 19 nt, Homo sapiens
  misc_RNA (1)...(19): siRNA sense strand
agauaaugauuccuacgua

SEQ ID NO: 72330 - RNA, 19 nt, Homo sapiens
  misc_RNA (1)...(19): siRNA sense strand
ucccagaggcuuccacuua

SEQ ID NO: 72331 - RNA, 19 nt, Homo sapiens
  misc_RNA (1)...(19): siRNA sense strand
acaagaguguuacagauuc

SEQ ID NO: 72332 - RNA, 19 nt, Homo sapiens
  misc_RNA (1)...(19): siRNA sense strand
cuacacaaauggaaccaau

SEQ ID NO: 72333 - RNA, 19 nt, Homo sapiens
  misc_RNA (1)...(19): siRNA sense strand
ccagaacaagcucauagua

SEQ ID NO: 72334 - RNA, 19 nt, Homo sapiens
  misc_RNA (1)...(19): siRNA sense strand
caugaaggauauaaagauc

SEQ ID NO: 72335 - RNA, 19 nt, Homo sapiens
  misc_RNA (1)...(19): siRNA sense strand
agacaagaguguuacagau

SEQ ID NO: 72336 - RNA, 19 nt, Homo sapiens
  misc_RNA (1)...(19): siRNA sense strand
gagacaagaguguuacaga

SEQ ID NO: 72337 - RNA, 19 nt, Homo sapiens
  misc_RNA (1)...(19): siRNA sense strand
caagaguguuacagauuca

SEQ ID NO: 72338 - RNA, 19 nt, Homo sapiens
  misc_RNA (1)...(19): siRNA sense strand
guaauggguccuaaauaug

SEQ ID NO: 72339 - RNA, 19 nt, Homo sapiens
  misc_RNA (1)...(19): siRNA sense strand
caugauggcauuccuguug

SEQ ID NO: 72340 - RNA, 19 nt, Homo sapiens
  misc_RNA (1)...(19): siRNA sense strand
uggaaccaaucuuaagaaa

SEQ ID NO: 72341 - RNA, 19 nt, Homo sapiens
  misc_RNA (1)...(19): siRNA sense strand
gaccgucuccgcauucuga

SEQ ID NO: 72342 - RNA, 19 nt, Homo sapiens
  misc_RNA (1)...(19): siRNA sense strand
ugcagaagcuguuagagau

SEQ ID NO: 72343 - RNA, 19 nt, Homo sapiens
  misc_RNA (1)...(19): siRNA sense strand
cauaugugacuguggauaa

SEQ ID NO: 72344 - RNA, 19 nt, Homo sapiens
  misc_RNA (1)...(19): siRNA sense strand
cagaacaagcucauaguau

SEQ ID NO: 72345 - RNA, 19 nt, Homo sapiens
  misc_RNA (1)...(19): siRNA sense strand
cagaggcuuccacuuaaua

SEQ ID NO: 72346 - RNA, 19 nt, Homo sapiens
  misc_RNA (1)...(19): siRNA sense strand
agacaaaucugggcuucug

SEQ ID NO: 72347 - RNA, 19 nt, Homo sapiens
  misc_RNA (1)...(19): siRNA sense strand
cuacguaucauucuacaau

SEQ ID NO: 72348 - RNA, 19 nt, Homo sapiens
  misc_RNA (1)...(19): siRNA sense strand
uaauggguccuaaauaugu

SEQ ID NO: 72349 - RNA, 19 nt, Homo sapiens
  misc_RNA (1)...(19): siRNA sense strand
gcauuccuguugucucuuc

SEQ ID NO: 72350 - RNA, 19 nt, Homo sapiens
  misc_RNA (1)...(19): siRNA sense strand
ucuacuacaugaaggauau

SEQ ID NO: 72351 - RNA, 19 nt, Homo sapiens
  misc_RNA (1)...(19): siRNA sense strand
cagaagcuguuagagauca

SEQ ID NO: 72352 - RNA, 19 nt, Homo sapiens
  misc_RNA (1)...(19): siRNA sense strand
ccagaggcuuccacuuaau

SEQ ID NO: 72353 - RNA, 19 nt, Homo sapiens
  misc_RNA (1)...(19): siRNA sense strand
caaggaagaagcuggugaa

SEQ ID NO: 72354 - RNA, 19 nt, Homo sapiens
  misc_RNA (1)...(19): siRNA sense strand
cgaaauuguuugcuucaac

SEQ ID NO: 72355 - RNA, 19 nt, Homo sapiens
  misc_RNA (1)...(19): siRNA sense strand
cagcagaagcucuccaaau

SEQ ID NO: 72356 - RNA, 19 nt, Homo sapiens
  misc_RNA (1)...(19): siRNA sense strand
ggcuuccacuuaauauuga

SEQ ID NO: 72357 - RNA, 19 nt, Homo sapiens
  misc_RNA (1)...(19): siRNA sense strand
caaaagcucgaaauuguuu

SEQ ID NO: 72358 - RNA, 19 nt, Homo sapiens
  misc_RNA (1)...(19): siRNA sense strand
guggauaaucuugguauuu

SEQ ID NO: 72359 - RNA, 19 nt, Homo sapiens
  misc_RNA (1)...(19): siRNA sense strand
guugaaagcuuuugacagu

SEQ ID NO: 72360 - RNA, 19 nt, Homo sapiens
  misc_RNA (1)...(19): siRNA sense strand
cacagaccuucuacacaaa

SEQ ID NO: 72361 - RNA, 19 nt, Homo sapiens
  misc_RNA (1)...(19): siRNA sense strand
uugcugcccuucuccauga

SEQ ID NO: 72362 - RNA, 19 nt, Homo sapiens
  misc_RNA (1)...(19): siRNA sense strand
caguaauggguccuaaaua

SEQ ID NO: 72363 - RNA, 19 nt, Homo sapiens
  misc_RNA (1)...(19): siRNA sense strand
gggagugcauuggguuuca

SEQ ID NO: 72364 - RNA, 19 nt, Homo sapiens
  misc_RNA (1)...(19): siRNA sense strand
aacaauaucagaagaggaa

SEQ ID NO: 72365 - RNA, 19 nt, Homo sapiens
  misc_RNA (1)...(19): siRNA sense strand
caacagcaaagagcagcua

SEQ ID NO: 72366 - RNA, 19 nt, Homo sapiens
  misc_RNA (1)...(19): siRNA sense strand
gaagcuggugaaugcaauu

SEQ ID NO: 72367 - RNA, 19 nt, Homo sapiens
  misc_RNA (1)...(19): siRNA sense strand
aauggguccuaaauaugua

SEQ ID NO: 72368 - RNA, 19 nt, Homo sapiens
  misc_RNA (1)...(19): siRNA sense strand
caucaagacauccuacauc

SEQ ID NO: 72369 - RNA, 19 nt, Homo sapiens
  misc_RNA (1)...(19): siRNA sense strand
auucuacaaugcucuacua

SEQ ID NO: 72370 - RNA, 19 nt, Homo sapiens
  misc_RNA (1)...(19): siRNA sense strand
ugaaacugcagaaucuuug

SEQ ID NO: 72371 - RNA, 19 nt, Homo sapiens
  misc_RNA (1)...(19): siRNA sense strand
gcaaacacccaaggucucu

SEQ ID NO: 72372 - RNA, 19 nt, Homo sapiens
  misc_RNA (1)...(19): siRNA sense strand
ucaguaauggguccuaaau

SEQ ID NO: 72373 - RNA, 19 nt, Homo sapiens
  misc_RNA (1)...(19): siRNA sense strand
cuacaugaaggauauaaag

SEQ ID NO: 72374 - RNA, 19 nt, Homo sapiens
  misc_RNA (1)...(19): siRNA sense strand
gaguguuacagauucagua

SEQ ID NO: 72375 - RNA, 19 nt, Homo sapiens
  misc_RNA (1)...(19): siRNA sense strand
ugcaaaagcucgaaauugu

SEQ ID NO: 72376 - RNA, 19 nt, Homo sapiens
  misc_RNA (1)...(19): siRNA sense strand
cagugucagauucuucuua

SEQ ID NO: 72377 - RNA, 19 nt, Homo sapiens
  misc_RNA (1)...(19): siRNA sense strand
aaaaggacaucaagacauc

SEQ ID NO: 72378 - RNA, 19 nt, Homo sapiens
  misc_RNA (1)...(19): siRNA sense strand
ugucagauucuucuuacaa

SEQ ID NO: 72379 - RNA, 19 nt, Homo sapiens
  misc_RNA (1)...(19): siRNA sense strand
uagagaucauucccuuuua

SEQ ID NO: 72380 - RNA, 19 nt, Homo sapiens
  misc_RNA (1)...(19): siRNA sense strand
gaaaaggacaucaagacau

SEQ ID NO: 72381 - RNA, 19 nt, Homo sapiens
  misc_RNA (1)...(19): siRNA sense strand
gcagaagcuguuagagauc

SEQ ID NO: 72382 - RNA, 19 nt, Homo sapiens
  misc_RNA (1)...(19): siRNA sense strand
uggaucaggaugagaguuu

SEQ ID NO: 72383 - RNA, 19 nt, Homo sapiens
  misc_RNA (1)...(19): siRNA sense strand
caaauugaaaggugaacca

SEQ ID NO: 72384 - RNA, 19 nt, Homo sapiens
  misc_RNA (1)...(19): siRNA sense strand
auaugaagaaggcagauuu

SEQ ID NO: 72385 - RNA, 19 nt, Homo sapiens
  misc_RNA (1)...(19): siRNA sense strand
aucaagacauccuacauca

SEQ ID NO: 72386 - RNA, 19 nt, Homo sapiens
  misc_RNA (1)...(19): siRNA sense strand
gaugauguuugggacucuu

SEQ ID NO: 72387 - RNA, 19 nt, Homo sapiens
  misc_RNA (1)...(19): siRNA sense strand
gugcauuggguuucaguug

SEQ ID NO: 72388 - RNA, 19 nt, Homo sapiens
  misc_RNA (1)...(19): siRNA sense strand
cugcagaagcuguuagaga

SEQ ID NO: 72389 - RNA, 19 nt, Homo sapiens
  misc_RNA (1)...(19): siRNA sense strand
uggcauuccuguugucucu

SEQ ID NO: 72390 - RNA, 19 nt, Homo sapiens
  misc_RNA (1)...(19): siRNA sense strand
gcaaaagcucgaaauuguu

SEQ ID NO: 72391 - RNA, 19 nt, Homo sapiens
  misc_RNA (1)...(19): siRNA sense strand
ugggaagucuguauuagcu

SEQ ID NO: 72392 - RNA, 19 nt, Homo sapiens
  misc_RNA (1)...(19): siRNA sense strand
gugugaagguggaguacca

SEQ ID NO: 72393 - RNA, 19 nt, Homo sapiens
  misc_RNA (1)...(19): siRNA sense strand
aggcuuccacuuaauauug

SEQ ID NO: 72394 - RNA, 19 nt, Homo sapiens
  misc_RNA (1)...(19): siRNA sense strand
gaggcuuccacuuaauauu

SEQ ID NO: 72395 - RNA, 19 nt, Homo sapiens
  misc_RNA (1)...(19): siRNA sense strand
gcugugggaagucuguauu

SEQ ID NO: 72396 - RNA, 19 nt, Homo sapiens
  misc_RNA (1)...(19): siRNA sense strand
caaaucugggcuucugaug

SEQ ID NO: 72397 - RNA, 19 nt, Homo sapiens
  misc_RNA (1)...(19): siRNA sense strand
aauggaaccaaucuuaaga

SEQ ID NO: 72398 - RNA, 19 nt, Homo sapiens
  misc_RNA (1)...(19): siRNA sense strand
acacaaauggaaccaaucu

SEQ ID NO: 72399 - RNA, 19 nt, Homo sapiens
  misc_RNA (1)...(19): siRNA sense strand
cagaccuucuacacaaaug

SEQ ID NO: 72400 - RNA, 19 nt, Homo sapiens
  misc_RNA (1)...(19): siRNA sense strand
uaugaagaaggcagauuug

SEQ ID NO: 72401 - RNA, 19 nt, Homo sapiens
  misc_RNA (1)...(19): siRNA sense strand
ggaaaaggacaucaagaca

SEQ ID NO: 72402 - RNA, 19 nt, Homo sapiens
  misc_RNA (1)...(19): siRNA sense strand
aaaucugggcuucugauga

SEQ ID NO: 72403 - RNA, 19 nt, Homo sapiens
  misc_RNA (1)...(19): siRNA sense strand
agaagcuggugaaugcaau

SEQ ID NO: 72404 - RNA, 19 nt, Homo sapiens
  misc_RNA (1)...(19): siRNA sense strand
aaauggaaccaaucuuaag

SEQ ID NO: 72405 - RNA, 19 nt, Homo sapiens
  misc_RNA (1)...(19): siRNA sense strand
caaccagagacaagagugu

SEQ ID NO: 72406 - RNA, 19 nt, Homo sapiens
  misc_RNA (1)...(19): siRNA sense strand
ggaagaagcuggugaaugc

SEQ ID NO: 72407 - RNA, 19 nt, Homo sapiens
  misc_RNA (1)...(19): siRNA sense strand
gaacaagcucauaguauua

SEQ ID NO: 72408 - RNA, 19 nt, Homo sapiens
  misc_RNA (1)...(19): siRNA sense strand
cagaagcucuccaaauuga

SEQ ID NO: 72409 - RNA, 19 nt, Homo sapiens
  misc_RNA (1)...(19): siRNA sense strand
ucacagaccuucuacacaa

SEQ ID NO: 72410 - RNA, 19 nt, Homo sapiens
  misc_RNA (1)...(19): siRNA sense strand
agaacaagcucauaguauu

SEQ ID NO: 72411 - RNA, 19 nt, Homo sapiens
  misc_RNA (1)...(19): siRNA sense strand
gauaaugauuccuacguau

SEQ ID NO: 72412 - RNA, 19 nt, Homo sapiens
  misc_RNA (1)...(19): siRNA sense strand
acaaauggaaccaaucuua

SEQ ID NO: 72413 - RNA, 19 nt, Homo sapiens
  misc_RNA (1)...(19): siRNA sense strand
gaucuuggaugauguuugg

SEQ ID NO: 72414 - RNA, 19 nt, Homo sapiens
  misc_RNA (1)...(19): siRNA sense strand
caaauggaaccaaucuuaa

SEQ ID NO: 72415 - RNA, 19 nt, Homo sapiens
  misc_RNA (1)...(19): siRNA sense strand
ccacagaggccaguuguuu

SEQ ID NO: 72416 - RNA, 19 nt, Homo sapiens
  misc_RNA (1)...(19): siRNA sense strand
aguaauggguccuaaauau

SEQ ID NO: 72417 - RNA, 19 nt, Homo sapiens
  misc_RNA (1)...(19): siRNA sense strand
agcagaagcucuccaaauu

SEQ ID NO: 72418 - RNA, 19 nt, Homo sapiens
  misc_RNA (1)...(19): siRNA sense strand
caagacauccuacaucaug

SEQ ID NO: 72419 - RNA, 19 nt, Homo sapiens
  misc_RNA (1)...(19): siRNA sense strand
acaaugcucuacuacauga

SEQ ID NO: 72420 - RNA, 19 nt, Homo sapiens
  misc_RNA (1)...(19): siRNA sense strand
caugauuagugauggauuu

SEQ ID NO: 72421 - RNA, 19 nt, Homo sapiens
  misc_RNA (1)...(19): siRNA sense strand
aaucugggcuucugaugaa

SEQ ID NO: 72422 - RNA, 19 nt, Homo sapiens
  misc_RNA (1)...(19): siRNA sense strand
gaagcucuccaaauugaaa

SEQ ID NO: 72423 - RNA, 19 nt, Homo sapiens
  misc_RNA (1)...(19): siRNA sense strand
gcagaagcucuccaaauug

SEQ ID NO: 72424 - RNA, 19 nt, Homo sapiens
  misc_RNA (1)...(19): siRNA sense strand
cuacaaugcucuacuacau

SEQ ID NO: 72425 - RNA, 19 nt, Homo sapiens
  misc_RNA (1)...(19): siRNA sense strand
gacaagaguguuacagauu

SEQ ID NO: 72426 - RNA, 19 nt, Homo sapiens
  misc_RNA (1)...(19): siRNA sense strand
ugaugaaacugcagaaucu

SEQ ID NO: 72427 - RNA, 19 nt, Homo sapiens
  misc_RNA (1)...(19): siRNA sense strand
cccagaggcuuccacuuaa

SEQ ID NO: 72428 - RNA, 19 nt, Homo sapiens
  misc_RNA (1)...(19): siRNA sense strand
gagaagcucuggaaaagga

SEQ ID NO: 72429 - RNA, 19 nt, Homo sapiens
  misc_RNA (1)...(19): siRNA sense strand
agauaaugauuccuacgua

SEQ ID NO: 72430 - RNA, 19 nt, Homo sapiens
  misc_RNA (1)...(19): siRNA sense strand
ucccagaggcuuccacuua

SEQ ID NO: 72431 - RNA, 19 nt, Homo sapiens
  misc_RNA (1)...(19): siRNA sense strand
acaagaguguuacagauuc

SEQ ID NO: 72432 - RNA, 19 nt, Homo sapiens
  misc_RNA (1)...(19): siRNA sense strand
cuacacaaauggaaccaau

SEQ ID NO: 72433 - RNA, 19 nt, Homo sapiens
  misc_RNA (1)...(19): siRNA sense strand
ccagaacaagcucauagua

SEQ ID NO: 72434 - RNA, 19 nt, Homo sapiens
  misc_RNA (1)...(19): siRNA sense strand
caugaaggauauaaagauc

SEQ ID NO: 72435 - RNA, 19 nt, Homo sapiens
  misc_RNA (1)...(19): siRNA sense strand
agacaagaguguuacagau

SEQ ID NO: 72436 - RNA, 19 nt, Homo sapiens
  misc_RNA (1)...(19): siRNA sense strand
gagacaagaguguuacaga

SEQ ID NO: 72437 - RNA, 19 nt, Homo sapiens
  misc_RNA (1)...(19): siRNA sense strand
caagaguguuacagauuca

SEQ ID NO: 72438 - RNA, 19 nt, Homo sapiens
  misc_RNA (1)...(19): siRNA sense strand
guaauggguccuaaauaug

SEQ ID NO: 72439 - RNA, 19 nt, Homo sapiens
  misc_RNA (1)...(19): siRNA sense strand
caugauggcauuccuguug

SEQ ID NO: 72440 - RNA, 19 nt, Homo sapiens
  misc_RNA (1)...(19): siRNA sense strand
gaccgucuccgcauucuga

SEQ ID NO: 72441 - RNA, 19 nt, Homo sapiens
  misc_RNA (1)...(19): siRNA sense strand
ugcagaagcuguuagagau

SEQ ID NO: 72442 - RNA, 19 nt, Homo sapiens
  misc_RNA (1)...(19): siRNA sense strand
cagaacaagcucauaguau

SEQ ID NO: 72443 - RNA, 19 nt, Homo sapiens
  misc_RNA (1)...(19): siRNA sense strand
cagaggcuuccacuuaaua

SEQ ID NO: 72444 - RNA, 19 nt, Homo sapiens
  misc_RNA (1)...(19): siRNA sense strand
agacaaaucugggcuucug

SEQ ID NO: 72445 - RNA, 19 nt, Homo sapiens
  misc_RNA (1)...(19): siRNA sense strand
cuacguaucauucuacaau

SEQ ID NO: 72446 - RNA, 19 nt, Homo sapiens
  misc_RNA (1)...(19): siRNA sense strand
uaauggguccuaaauaugu

SEQ ID NO: 72447 - RNA, 19 nt, Homo sapiens
  misc_RNA (1)...(19): siRNA sense strand
gcauuccuguugucucuuc

SEQ ID NO: 72448 - RNA, 19 nt, Homo sapiens
  misc_RNA (1)...(19): siRNA sense strand
ucuacuacaugaaggauau

SEQ ID NO: 72449 - RNA, 19 nt, Homo sapiens
  misc_RNA (1)...(19): siRNA sense strand
cagaagcuguuagagauca

SEQ ID NO: 72450 - RNA, 19 nt, Homo sapiens
  misc_RNA (1)...(19): siRNA sense strand
ccagaggcuuccacuuaau

SEQ ID NO: 72451 - RNA, 19 nt, Homo sapiens
  misc_RNA (1)...(19): siRNA sense strand
caaggaagaagcuggugaa

SEQ ID NO: 72452 - RNA, 19 nt, Homo sapiens
  misc_RNA (1)...(19): siRNA sense strand
cgaaauuguuugcuucaac

SEQ ID NO: 72453 - RNA, 19 nt, Homo sapiens
  misc_RNA (1)...(19): siRNA sense strand
cagcagaagcucuccaaau

SEQ ID NO: 72454 - RNA, 19 nt, Homo sapiens
  misc_RNA (1)...(19): siRNA sense strand
ggcuuccacuuaauauuga

SEQ ID NO: 72455 - RNA, 19 nt, Homo sapiens
  misc_RNA (1)...(19): siRNA sense strand
caaaagcucgaaauuguuu

SEQ ID NO: 72456 - RNA, 19 nt, Homo sapiens
  misc_RNA (1)...(19): siRNA sense strand
guugaaagcuuuugacagu

SEQ ID NO: 72457 - RNA, 19 nt, Homo sapiens
  misc_RNA (1)...(19): siRNA sense strand
cacagaccuucuacacaaa

SEQ ID NO: 72458 - RNA, 19 nt, Homo sapiens
  misc_RNA (1)...(19): siRNA sense strand
uugcugcccuucuccauga

SEQ ID NO: 72459 - RNA, 19 nt, Homo sapiens
  misc_RNA (1)...(19): siRNA sense strand
caguaauggguccuaaaua

SEQ ID NO: 72460 - RNA, 19 nt, Homo sapiens
  misc_RNA (1)...(19): siRNA sense strand
aacaauaucagaagaggaa

SEQ ID NO: 72461 - RNA, 19 nt, Homo sapiens
  misc_RNA (1)...(19): siRNA sense strand
caacagcaaagagcagcua

SEQ ID NO: 72462 - RNA, 19 nt, Homo sapiens
  misc_RNA (1)...(19): siRNA sense strand
gggagugcauuggguuuca

SEQ ID NO: 72463 - RNA, 19 nt, Homo sapiens
  misc_RNA (1)...(19): siRNA sense strand
auucuacaaugcucuacua

SEQ ID NO: 72464 - RNA, 19 nt, Homo sapiens
  misc_RNA (1)...(19): siRNA sense strand
aauggguccuaaauaugua

SEQ ID NO: 72465 - RNA, 19 nt, Homo sapiens
  misc_RNA (1)...(19): siRNA sense strand
caucaagacauccuacauc

SEQ ID NO: 72466 - RNA, 19 nt, Homo sapiens
  misc_RNA (1)...(19): siRNA sense strand
ugaaacugcagaaucuuug

SEQ ID NO: 72467 - RNA, 19 nt, Homo sapiens
  misc_RNA (1)...(19): siRNA sense strand
gaagcuggugaaugcaauu

SEQ ID NO: 72468 - RNA, 19 nt, Homo sapiens
  misc_RNA (1)...(19): siRNA sense strand
gcaaacacccaaggucucu

SEQ ID NO: 72469 - RNA, 19 nt, Homo sapiens
  misc_RNA (1)...(19): siRNA sense strand
ucaguaauggguccuaaau

SEQ ID NO: 72470 - RNA, 19 nt, Homo sapiens
  misc_RNA (1)...(19): siRNA sense strand
cuacaugaaggauauaaag

SEQ ID NO: 72471 - RNA, 19 nt, Homo sapiens
  misc_RNA (1)...(19): siRNA sense strand
gaguguuacagauucagua

SEQ ID NO: 72472 - RNA, 19 nt, Homo sapiens
  misc_RNA (1)...(19): siRNA sense strand
ugcaaaagcucgaaauugu

SEQ ID NO: 72473 - RNA, 19 nt, Homo sapiens
  misc_RNA (1)...(19): siRNA sense strand
cagugucagauucuucuua

SEQ ID NO: 72474 - RNA, 19 nt, Homo sapiens
  misc_RNA (1)...(19): siRNA sense strand
aaaaggacaucaagacauc

SEQ ID NO: 72475 - RNA, 19 nt, Homo sapiens
  misc_RNA (1)...(19): siRNA sense strand
ugucagauucuucuuacaa

SEQ ID NO: 72476 - RNA, 19 nt, Homo sapiens
  misc_RNA (1)...(19): siRNA sense strand
gaaaaggacaucaagacau

SEQ ID NO: 72477 - RNA, 19 nt, Homo sapiens
  misc_RNA (1)...(19): siRNA sense strand
uagagaucauucccuuuua

SEQ ID NO: 72478 - RNA, 19 nt, Homo sapiens
  misc_RNA (1)...(19): siRNA sense strand
gcagaagcuguuagagauc

SEQ ID NO: 72479 - RNA, 19 nt, Homo sapiens
  misc_RNA (1)...(19): siRNA sense strand
uggaucaggaugagaguuu

SEQ ID NO: 72480 - RNA, 19 nt, Homo sapiens
  misc_RNA (1)...(19): siRNA sense strand
caaauugaaaggugaacca

SEQ ID NO: 72481 - RNA, 19 nt, Homo sapiens
  misc_RNA (1)...(19): siRNA sense strand
auaugaagaaggcagauuu

SEQ ID NO: 72482 - RNA, 19 nt, Homo sapiens
  misc_RNA (1)...(19): siRNA sense strand
aucaagacauccuacauca

SEQ ID NO: 72483 - RNA, 19 nt, Homo sapiens
  misc_RNA (1)...(19): siRNA sense strand
gaugauguuugggacucuu

SEQ ID NO: 72484 - RNA, 19 nt, Homo sapiens
  misc_RNA (1)...(19): siRNA sense strand
gugcauuggguuucaguug

SEQ ID NO: 72485 - RNA, 19 nt, Homo sapiens
  misc_RNA (1)...(19): siRNA sense strand
cugcagaagcuguuagaga

SEQ ID NO: 72486 - RNA, 19 nt, Homo sapiens
  misc_RNA (1)...(19): siRNA sense strand
uggcauuccuguugucucu

SEQ ID NO: 72487 - RNA, 19 nt, Homo sapiens
  misc_RNA (1)...(19): siRNA sense strand
gcaaaagcucgaaauuguu

SEQ ID NO: 72488 - RNA, 19 nt, Homo sapiens
  misc_RNA (1)...(19): siRNA sense strand
ugggaagucuguauuagcu

SEQ ID NO: 72489 - RNA, 19 nt, Homo sapiens
  misc_RNA (1)...(19): siRNA sense strand
gugugaagguggaguacca

SEQ ID NO: 72490 - RNA, 19 nt, Homo sapiens
  misc_RNA (1)...(19): siRNA sense strand
aggcuuccacuuaauauug

SEQ ID NO: 72491 - RNA, 19 nt, Homo sapiens
  misc_RNA (1)...(19): siRNA sense strand
gaggcuuccacuuaauauu

SEQ ID NO: 72492 - RNA, 19 nt, Homo sapiens
  misc_RNA (1)...(19): siRNA sense strand
gcugugggaagucuguauu

SEQ ID NO: 72493 - RNA, 19 nt, Homo sapiens
  misc_RNA (1)...(19): siRNA sense strand
caaaucugggcuucugaug

SEQ ID NO: 72494 - RNA, 19 nt, Homo sapiens
  misc_RNA (1)...(19): siRNA sense strand
acacaaauggaaccaaucu

SEQ ID NO: 72495 - RNA, 19 nt, Homo sapiens
  misc_RNA (1)...(19): siRNA sense strand
cagaccuucuacacaaaug

SEQ ID NO: 72496 - RNA, 19 nt, Homo sapiens
  misc_RNA (1)...(19): siRNA sense strand
uaugaagaaggcagauuug

SEQ ID NO: 72497 - RNA, 19 nt, Homo sapiens
  misc_RNA (1)...(19): siRNA sense strand
ggaaaaggacaucaagaca

SEQ ID NO: 72498 - RNA, 19 nt, Homo sapiens
  misc_RNA (1)...(19): siRNA sense strand
aaaucugggcuucugauga

SEQ ID NO: 72499 - RNA, 19 nt, Homo sapiens
  misc_RNA (1)...(19): siRNA sense strand
guaccacagaggccaguug

SEQ ID NO: 72500 - RNA, 19 nt, Homo sapiens
  misc_RNA (1)...(19): siRNA sense strand
caaccagagacaagagugu

SEQ ID NO: 72501 - RNA, 19 nt, Homo sapiens
  misc_RNA (1)...(19): siRNA sense strand
agaagcuggugaaugcaau

SEQ ID NO: 72502 - RNA, 19 nt, Homo sapiens
  misc_RNA (1)...(19): siRNA sense strand
gaagcuguuagagaucauu

SEQ ID NO: 72503 - RNA, 19 nt, Homo sapiens
  misc_RNA (1)...(19): siRNA sense strand
gucagauucuucuuacaac

SEQ ID NO: 72504 - RNA, 19 nt, Homo sapiens
  misc_RNA (1)...(19): siRNA sense strand
aaagggaacucaauuaugu

SEQ ID NO: 72505 - RNA, 19 nt, Homo sapiens
  misc_RNA (1)...(19): siRNA sense strand
gaaggacaccaguuucuuu

SEQ ID NO: 72506 - RNA, 19 nt, Homo sapiens
  misc_RNA (1)...(19): siRNA sense strand
gaaggcagcgcuccaagaa

SEQ ID NO: 72507 - RNA, 19 nt, Homo sapiens
  misc_RNA (1)...(19): siRNA sense strand
ucaauuauguggccaggaa

SEQ ID NO: 72508 - RNA, 19 nt, Homo sapiens
  misc_RNA (1)...(19): siRNA sense strand
gcauguggcuugaucaucu

SEQ ID NO: 72509 - RNA, 19 nt, Homo sapiens
  misc_RNA (1)...(19): siRNA sense strand
ccaagaaggacaccaguuu

SEQ ID NO: 72510 - RNA, 19 nt, Homo sapiens
  misc_RNA (1)...(19): siRNA sense strand
ucacuggacuccucccaaa

SEQ ID NO: 72511 - RNA, 19 nt, Homo sapiens
  misc_RNA (1)...(19): siRNA sense strand
gcaggccagcugaccauua

SEQ ID NO: 72512 - RNA, 19 nt, Homo sapiens
  misc_RNA (1)...(19): siRNA sense strand
gagagcauguggcuugauc

SEQ ID NO: 72513 - RNA, 19 nt, Homo sapiens
  misc_RNA (1)...(19): siRNA sense strand
uggcggaggugaaggacua

SEQ ID NO: 72514 - RNA, 19 nt, Homo sapiens
  misc_RNA (1)...(19): siRNA sense strand
caggccagcugaccauuau

SEQ ID NO: 72515 - RNA, 19 nt, Homo sapiens
  misc_RNA (1)...(19): siRNA sense strand
ccaagaggaagcaggcaua

SEQ ID NO: 72516 - RNA, 19 nt, Homo sapiens
  misc_RNA (1)...(19): siRNA sense strand
agaggaagcaggcauagaa

SEQ ID NO: 72517 - RNA, 19 nt, Homo sapiens
  misc_RNA (1)...(19): siRNA sense strand
ggacaccaguuucuuugcu

SEQ ID NO: 72518 - RNA, 19 nt, Homo sapiens
  misc_RNA (1)...(19): siRNA sense strand
gaggaugacuuggaaacag

SEQ ID NO: 72519 - RNA, 19 nt, Homo sapiens
  misc_RNA (1)...(19): siRNA sense strand
ccaguuucuuugcuccaua

SEQ ID NO: 72520 - RNA, 19 nt, Homo sapiens
  misc_RNA (1)...(19): siRNA sense strand
ccaguuggcucaguucaag

SEQ ID NO: 72521 - RNA, 19 nt, Homo sapiens
  misc_RNA (1)...(19): siRNA sense strand
gagggagacccaagaggaa

SEQ ID NO: 72522 - RNA, 19 nt, Homo sapiens
  misc_RNA (1)...(19): siRNA sense strand
ggaagcaggcauagaagca

SEQ ID NO: 72523 - RNA, 19 nt, Homo sapiens
  misc_RNA (1)...(19): siRNA sense strand
ucaaaagggaacucaauua

SEQ ID NO: 72524 - RNA, 19 nt, Homo sapiens
  misc_RNA (1)...(19): siRNA sense strand
caagaaggacaccaguuuc

SEQ ID NO: 72525 - RNA, 19 nt, Homo sapiens
  misc_RNA (1)...(19): siRNA sense strand
aggagaggaugacuuggaa

SEQ ID NO: 72526 - RNA, 19 nt, Homo sapiens
  misc_RNA (1)...(19): siRNA sense strand
ggaacaagccuaaaacagu

SEQ ID NO: 72527 - RNA, 19 nt, Homo sapiens
  misc_RNA (1)...(19): siRNA sense strand
caaaagggaacucaauuau

SEQ ID NO: 72528 - RNA, 19 nt, Homo sapiens
  misc_RNA (1)...(19): siRNA sense strand
ggccagcugaccauuauug

SEQ ID NO: 72529 - RNA, 19 nt, Homo sapiens
  misc_RNA (1)...(19): siRNA sense strand
caaaggccauguggaacca

SEQ ID NO: 72530 - RNA, 19 nt, Homo sapiens
  misc_RNA (1)...(19): siRNA sense strand
caaaguggacaacaaugca

SEQ ID NO: 72531 - RNA, 19 nt, Homo sapiens
  misc_RNA (1)...(19): siRNA sense strand
uuccgaagaugccucauuc

SEQ ID NO: 72532 - RNA, 19 nt, Homo sapiens
  misc_RNA (1)...(19): siRNA sense strand
caggagaggaugacuugga

SEQ ID NO: 72533 - RNA, 19 nt, Homo sapiens
  misc_RNA (1)...(19): siRNA sense strand
ucccaaaggccauguggaa

SEQ ID NO: 72534 - RNA, 19 nt, Homo sapiens
  misc_RNA (1)...(19): siRNA sense strand
gaugaaggcagcgcuccaa

SEQ ID NO: 72535 - RNA, 19 nt, Homo sapiens
  misc_RNA (1)...(19): siRNA sense strand
ggagaggaugacuuggaaa

SEQ ID NO: 72536 - RNA, 19 nt, Homo sapiens
  misc_RNA (1)...(19): siRNA sense strand
gagaggaugacuuggaaac

SEQ ID NO: 72537 - RNA, 19 nt, Homo sapiens
  misc_RNA (1)...(19): siRNA sense strand
ggacuaugacguggagauc

SEQ ID NO: 72538 - RNA, 19 nt, Homo sapiens
  misc_RNA (1)...(19): siRNA sense strand
ugaaggcagcgcuccaaga

SEQ ID NO: 72539 - RNA, 19 nt, Homo sapiens
  misc_RNA (1)...(19): siRNA sense strand
gagcauguggcuugaucau

SEQ ID NO: 72540 - RNA, 19 nt, Homo sapiens
  misc_RNA (1)...(19): siRNA sense strand
cauguggcuugaucaucuu

SEQ ID NO: 72541 - RNA, 19 nt, Homo sapiens
  misc_RNA (1)...(19): siRNA sense strand
ccaaaguggacaacaaugc

SEQ ID NO: 72542 - RNA, 19 nt, Homo sapiens
  misc_RNA (1)...(19): siRNA sense strand
gaggaagcaggcauagaag

SEQ ID NO: 72543 - RNA, 19 nt, Homo sapiens
  misc_RNA (1)...(19): siRNA sense strand
uggcucaguucaaggagau

SEQ ID NO: 72544 - RNA, 19 nt, Homo sapiens
  misc_RNA (1)...(19): siRNA sense strand
aaagggaacucaauuaugu

SEQ ID NO: 72545 - RNA, 19 nt, Homo sapiens
  misc_RNA (1)...(19): siRNA sense strand
gaaggacaccaguuucuuu

SEQ ID NO: 72546 - RNA, 19 nt, Homo sapiens
  misc_RNA (1)...(19): siRNA sense strand
gaaggcagcgcuccaagaa

SEQ ID NO: 72547 - RNA, 19 nt, Homo sapiens
  misc_RNA (1)...(19): siRNA sense strand
ucaauuauguggccaggaa

SEQ ID NO: 72548 - RNA, 19 nt, Homo sapiens
  misc_RNA (1)...(19): siRNA sense strand
gcauguggcuugaucaucu

SEQ ID NO: 72549 - RNA, 19 nt, Homo sapiens
  misc_RNA (1)...(19): siRNA sense strand
ccaagaaggacaccaguuu

SEQ ID NO: 72550 - RNA, 19 nt, Homo sapiens
  misc_RNA (1)...(19): siRNA sense strand
ucacuggacuccucccaaa

SEQ ID NO: 72551 - RNA, 19 nt, Homo sapiens
  misc_RNA (1)...(19): siRNA sense strand
gcaggccagcugaccauua

SEQ ID NO: 72552 - RNA, 19 nt, Homo sapiens
  misc_RNA (1)...(19): siRNA sense strand
gagagcauguggcuugauc

SEQ ID NO: 72553 - RNA, 19 nt, Homo sapiens
  misc_RNA (1)...(19): siRNA sense strand
uggcggaggugaaggacua

SEQ ID NO: 72554 - RNA, 19 nt, Homo sapiens
  misc_RNA (1)...(19): siRNA sense strand
caggccagcugaccauuau

SEQ ID NO: 72555 - RNA, 19 nt, Homo sapiens
  misc_RNA (1)...(19): siRNA sense strand
ccaagaggaagcaggcaua

SEQ ID NO: 72556 - RNA, 19 nt, Homo sapiens
  misc_RNA (1)...(19): siRNA sense strand
agaggaagcaggcauagaa

SEQ ID NO: 72557 - RNA, 19 nt, Homo sapiens
  misc_RNA (1)...(19): siRNA sense strand
ggacaccaguuucuuugcu

SEQ ID NO: 72558 - RNA, 19 nt, Homo sapiens
  misc_RNA (1)...(19): siRNA sense strand
gaggaugacuuggaaacag

SEQ ID NO: 72559 - RNA, 19 nt, Homo sapiens
  misc_RNA (1)...(19): siRNA sense strand
ccaguuucuuugcuccaua

SEQ ID NO: 72560 - RNA, 19 nt, Homo sapiens
  misc_RNA (1)...(19): siRNA sense strand
ccaguuggcucaguucaag

SEQ ID NO: 72561 - RNA, 19 nt, Homo sapiens
  misc_RNA (1)...(19): siRNA sense strand
gagggagacccaagaggaa

SEQ ID NO: 72562 - RNA, 19 nt, Homo sapiens
  misc_RNA (1)...(19): siRNA sense strand
ggaagcaggcauagaagca

SEQ ID NO: 72563 - RNA, 19 nt, Homo sapiens
  misc_RNA (1)...(19): siRNA sense strand
ucaaaagggaacucaauua

SEQ ID NO: 72564 - RNA, 19 nt, Homo sapiens
  misc_RNA (1)...(19): siRNA sense strand
caagaaggacaccaguuuc

SEQ ID NO: 72565 - RNA, 19 nt, Homo sapiens
  misc_RNA (1)...(19): siRNA sense strand
aggagaggaugacuuggaa

SEQ ID NO: 72566 - RNA, 19 nt, Homo sapiens
  misc_RNA (1)...(19): siRNA sense strand
ggaacaagccuaaaacagu

SEQ ID NO: 72567 - RNA, 19 nt, Homo sapiens
  misc_RNA (1)...(19): siRNA sense strand
caaaagggaacucaauuau

SEQ ID NO: 72568 - RNA, 19 nt, Homo sapiens
  misc_RNA (1)...(19): siRNA sense strand
ggccagcugaccauuauug

SEQ ID NO: 72569 - RNA, 19 nt, Homo sapiens
  misc_RNA (1)...(19): siRNA sense strand
caaaggccauguggaacca

SEQ ID NO: 72570 - RNA, 19 nt, Homo sapiens
  misc_RNA (1)...(19): siRNA sense strand
caaaguggacaacaaugca

SEQ ID NO: 72571 - RNA, 19 nt, Homo sapiens
  misc_RNA (1)...(19): siRNA sense strand
uuccgaagaugccucauuc

SEQ ID NO: 72572 - RNA, 19 nt, Homo sapiens
  misc_RNA (1)...(19): siRNA sense strand
caggagaggaugacuugga

SEQ ID NO: 72573 - RNA, 19 nt, Homo sapiens
  misc_RNA (1)...(19): siRNA sense strand
ucccaaaggccauguggaa

SEQ ID NO: 72574 - RNA, 19 nt, Homo sapiens
  misc_RNA (1)...(19): siRNA sense strand
gaugaaggcagcgcuccaa

SEQ ID NO: 72575 - RNA, 19 nt, Homo sapiens
  misc_RNA (1)...(19): siRNA sense strand
ggagaggaugacuuggaaa

SEQ ID NO: 72576 - RNA, 19 nt, Homo sapiens
  misc_RNA (1)...(19): siRNA sense strand
gagaggaugacuuggaaac

SEQ ID NO: 72577 - RNA, 19 nt, Homo sapiens
  misc_RNA (1)...(19): siRNA sense strand
ggacuaugacguggagauc

SEQ ID NO: 72578 - RNA, 19 nt, Homo sapiens
  misc_RNA (1)...(19): siRNA sense strand
ugaaggcagcgcuccaaga

SEQ ID NO: 72579 - RNA, 19 nt, Homo sapiens
  misc_RNA (1)...(19): siRNA sense strand
gagcauguggcuugaucau

SEQ ID NO: 72580 - RNA, 19 nt, Homo sapiens
  misc_RNA (1)...(19): siRNA sense strand
cauguggcuugaucaucuu

SEQ ID NO: 72581 - RNA, 19 nt, Homo sapiens
  misc_RNA (1)...(19): siRNA sense strand
ccaaaguggacaacaaugc

SEQ ID NO: 72582 - RNA, 19 nt, Homo sapiens
  misc_RNA (1)...(19): siRNA sense strand
gaggaagcaggcauagaag

SEQ ID NO: 72583 - RNA, 19 nt, Homo sapiens
  misc_RNA (1)...(19): siRNA sense strand
uggcucaguucaaggagau

SEQ ID NO: 72584 - RNA, 19 nt, Homo sapiens
  misc_RNA (1)...(19): siRNA sense strand
aaagggaacucaauuaugu

SEQ ID NO: 72585 - RNA, 19 nt, Homo sapiens
  misc_RNA (1)...(19): siRNA sense strand
gaaggacaccaguuucuuu

SEQ ID NO: 72586 - RNA, 19 nt, Homo sapiens
  misc_RNA (1)...(19): siRNA sense strand
gaaggcagcgcuccaagaa

SEQ ID NO: 72587 - RNA, 19 nt, Homo sapiens
  misc_RNA (1)...(19): siRNA sense strand
ucaauuauguggccaggaa

SEQ ID NO: 72588 - RNA, 19 nt, Homo sapiens
  misc_RNA (1)...(19): siRNA sense strand
gcauguggcuugaucaucu

SEQ ID NO: 72589 - RNA, 19 nt, Homo sapiens
  misc_RNA (1)...(19): siRNA sense strand
ccaagaaggacaccaguuu

SEQ ID NO: 72590 - RNA, 19 nt, Homo sapiens
  misc_RNA (1)...(19): siRNA sense strand
ucacuggacuccucccaaa

SEQ ID NO: 72591 - RNA, 19 nt, Homo sapiens
  misc_RNA (1)...(19): siRNA sense strand
gcaggccagcugaccauua

SEQ ID NO: 72592 - RNA, 19 nt, Homo sapiens
  misc_RNA (1)...(19): siRNA sense strand
gagagcauguggcuugauc

SEQ ID NO: 72593 - RNA, 19 nt, Homo sapiens
  misc_RNA (1)...(19): siRNA sense strand
uggcggaggugaaggacua

SEQ ID NO: 72594 - RNA, 19 nt, Homo sapiens
  misc_RNA (1)...(19): siRNA sense strand
caggccagcugaccauuau

SEQ ID NO: 72595 - RNA, 19 nt, Homo sapiens
  misc_RNA (1)...(19): siRNA sense strand
ccaagaggaagcaggcaua

SEQ ID NO: 72596 - RNA, 19 nt, Homo sapiens
  misc_RNA (1)...(19): siRNA sense strand
agaggaagcaggcauagaa

SEQ ID NO: 72597 - RNA, 19 nt, Homo sapiens
  misc_RNA (1)...(19): siRNA sense strand
ggacaccaguuucuuugcu

SEQ ID NO: 72598 - RNA, 19 nt, Homo sapiens
  misc_RNA (1)...(19): siRNA sense strand
gaggaugacuuggaaacag

SEQ ID NO: 72599 - RNA, 19 nt, Homo sapiens
  misc_RNA (1)...(19): siRNA sense strand
ccaguuucuuugcuccaua

SEQ ID NO: 72600 - RNA, 19 nt, Homo sapiens
  misc_RNA (1)...(19): siRNA sense strand
ccaguuggcucaguucaag

SEQ ID NO: 72601 - RNA, 19 nt, Homo sapiens
  misc_RNA (1)...(19): siRNA sense strand
gagggagacccaagaggaa

SEQ ID NO: 72602 - RNA, 19 nt, Homo sapiens
  misc_RNA (1)...(19): siRNA sense strand
ggaagcaggcauagaagca

SEQ ID NO: 72603 - RNA, 19 nt, Homo sapiens
  misc_RNA (1)...(19): siRNA sense strand
ucaaaagggaacucaauua

SEQ ID NO: 72604 - RNA, 19 nt, Homo sapiens
  misc_RNA (1)...(19): siRNA sense strand
caagaaggacaccaguuuc

SEQ ID NO: 72605 - RNA, 19 nt, Homo sapiens
  misc_RNA (1)...(19): siRNA sense strand
aggagaggaugacuuggaa

SEQ ID NO: 72606 - RNA, 19 nt, Homo sapiens
  misc_RNA (1)...(19): siRNA sense strand
ggaacaagccuaaaacagu

SEQ ID NO: 72607 - RNA, 19 nt, Homo sapiens
  misc_RNA (1)...(19): siRNA sense strand
caaaagggaacucaauuau

SEQ ID NO: 72608 - RNA, 19 nt, Homo sapiens
  misc_RNA (1)...(19): siRNA sense strand
ggccagcugaccauuauug

SEQ ID NO: 72609 - RNA, 19 nt, Homo sapiens
  misc_RNA (1)...(19): siRNA sense strand
caaaggccauguggaacca

SEQ ID NO: 72610 - RNA, 19 nt, Homo sapiens
  misc_RNA (1)...(19): siRNA sense strand
caaaguggacaacaaugca

SEQ ID NO: 72611 - RNA, 19 nt, Homo sapiens
  misc_RNA (1)...(19): siRNA sense strand
uuccgaagaugccucauuc

SEQ ID NO: 72612 - RNA, 19 nt, Homo sapiens
  misc_RNA (1)...(19): siRNA sense strand
caggagaggaugacuugga

SEQ ID NO: 72613 - RNA, 19 nt, Homo sapiens
  misc_RNA (1)...(19): siRNA sense strand
ucccaaaggccauguggaa

SEQ ID NO: 72614 - RNA, 19 nt, Homo sapiens
  misc_RNA (1)...(19): siRNA sense strand
gaugaaggcagcgcuccaa

SEQ ID NO: 72615 - RNA, 19 nt, Homo sapiens
  misc_RNA (1)...(19): siRNA sense strand
ggagaggaugacuuggaaa

SEQ ID NO: 72616 - RNA, 19 nt, Homo sapiens
  misc_RNA (1)...(19): siRNA sense strand
gagaggaugacuuggaaac

SEQ ID NO: 72617 - RNA, 19 nt, Homo sapiens
  misc_RNA (1)...(19): siRNA sense strand
ggacuaugacguggagauc

SEQ ID NO: 72618 - RNA, 19 nt, Homo sapiens
  misc_RNA (1)...(19): siRNA sense strand
ugaaggcagcgcuccaaga

SEQ ID NO: 72619 - RNA, 19 nt, Homo sapiens
  misc_RNA (1)...(19): siRNA sense strand
gagcauguggcuugaucau

SEQ ID NO: 72620 - RNA, 19 nt, Homo sapiens
  misc_RNA (1)...(19): siRNA sense strand
cauguggcuugaucaucuu

SEQ ID NO: 72621 - RNA, 19 nt, Homo sapiens
  misc_RNA (1)...(19): siRNA sense strand
ccaaaguggacaacaaugc

SEQ ID NO: 72622 - RNA, 19 nt, Homo sapiens
  misc_RNA (1)...(19): siRNA sense strand
gaggaagcaggcauagaag

SEQ ID NO: 72623 - RNA, 19 nt, Homo sapiens
  misc_RNA (1)...(19): siRNA sense strand
uggcucaguucaaggagau

SEQ ID NO: 72624 - RNA, 19 nt, Homo sapiens
  misc_RNA (1)...(19): siRNA sense strand
gaauguaccuguugcuaaa

SEQ ID NO: 72625 - RNA, 19 nt, Homo sapiens
  misc_RNA (1)...(19): siRNA sense strand
gcagagauguccacacguu

SEQ ID NO: 72626 - RNA, 19 nt, Homo sapiens
  misc_RNA (1)...(19): siRNA sense strand
caugagaucugcucuaaga

SEQ ID NO: 72627 - RNA, 19 nt, Homo sapiens
  misc_RNA (1)...(19): siRNA sense strand
cuacguagcucgugauaag

SEQ ID NO: 72628 - RNA, 19 nt, Homo sapiens
  misc_RNA (1)...(19): siRNA sense strand
ggaggaugaugaugaugaa

SEQ ID NO: 72629 - RNA, 19 nt, Homo sapiens
  misc_RNA (1)...(19): siRNA sense strand
gugauaagcugacccagau

SEQ ID NO: 72630 - RNA, 19 nt, Homo sapiens
  misc_RNA (1)...(19): siRNA sense strand
ggaauguaccuguugcuaa

SEQ ID NO: 72631 - RNA, 19 nt, Homo sapiens
  misc_RNA (1)...(19): siRNA sense strand
ggaggaggaugaugaugau

SEQ ID NO: 72632 - RNA, 19 nt, Homo sapiens
  misc_RNA (1)...(19): siRNA sense strand
ggaugucccuuuccaagug

SEQ ID NO: 72633 - RNA, 19 nt, Homo sapiens
  misc_RNA (1)...(19): siRNA sense strand
ggaaggaaaggaucugcua

SEQ ID NO: 72634 - RNA, 19 nt, Homo sapiens
  misc_RNA (1)...(19): siRNA sense strand
agaaugaguugguccagaa

SEQ ID NO: 72635 - RNA, 19 nt, Homo sapiens
  misc_RNA (1)...(19): siRNA sense strand
ggaccacucuaaacuugug

SEQ ID NO: 72636 - RNA, 19 nt, Homo sapiens
  misc_RNA (1)...(19): siRNA sense strand
ggguagaugugauuaaugg

SEQ ID NO: 72637 - RNA, 19 nt, Homo sapiens
  misc_RNA (1)...(19): siRNA sense strand
ucagcucucuuaccacaaa

SEQ ID NO: 72638 - RNA, 19 nt, Homo sapiens
  misc_RNA (1)...(19): siRNA sense strand
gcucaagugccacguguuu

SEQ ID NO: 72639 - RNA, 19 nt, Homo sapiens
  misc_RNA (1)...(19): siRNA sense strand
gaggaggacuuaucuucuc

SEQ ID NO: 72640 - RNA, 19 nt, Homo sapiens
  misc_RNA (1)...(19): siRNA sense strand
gaccagaaucgcaauguga

SEQ ID NO: 72641 - RNA, 19 nt, Homo sapiens
  misc_RNA (1)...(19): siRNA sense strand
acucuaaacuuguggaugu

SEQ ID NO: 72642 - RNA, 19 nt, Homo sapiens
  misc_RNA (1)...(19): siRNA sense strand
ggaaggaugaacccaguga

SEQ ID NO: 72643 - RNA, 19 nt, Homo sapiens
  misc_RNA (1)...(19): siRNA sense strand
gaacagugcagccagugau

SEQ ID NO: 72644 - RNA, 19 nt, Homo sapiens
  misc_RNA (1)...(19): siRNA sense strand
gagagugucgggugcguuu

SEQ ID NO: 72645 - RNA, 19 nt, Homo sapiens
  misc_RNA (1)...(19): siRNA sense strand
acccagggaucaaguguuu

SEQ ID NO: 72646 - RNA, 19 nt, Homo sapiens
  misc_RNA (1)...(19): siRNA sense strand
cagcagccgugaacaaugg

SEQ ID NO: 72647 - RNA, 19 nt, Homo sapiens
  misc_RNA (1)...(19): siRNA sense strand
ugacccagaugcucaagug

SEQ ID NO: 72648 - RNA, 19 nt, Homo sapiens
  misc_RNA (1)...(19): siRNA sense strand
ggaugaugaugaugaagag

SEQ ID NO: 72649 - RNA, 19 nt, Homo sapiens
  misc_RNA (1)...(19): siRNA sense strand
agaaguuccaagucuauua

SEQ ID NO: 72650 - RNA, 19 nt, Homo sapiens
  misc_RNA (1)...(19): siRNA sense strand
ugcaugagaucugcucuaa

SEQ ID NO: 72651 - RNA, 19 nt, Homo sapiens
  misc_RNA (1)...(19): siRNA sense strand
ggaugagacacuaaagcua

SEQ ID NO: 72652 - RNA, 19 nt, Homo sapiens
  misc_RNA (1)...(19): siRNA sense strand
cuuugaggauggagaauuu

SEQ ID NO: 72653 - RNA, 19 nt, Homo sapiens
  misc_RNA (1)...(19): siRNA sense strand
gcaaugugaccuugaccuu

SEQ ID NO: 72654 - RNA, 19 nt, Homo sapiens
  misc_RNA (1)...(19): siRNA sense strand
gcuggaggaugagacacua

SEQ ID NO: 72655 - RNA, 19 nt, Homo sapiens
  misc_RNA (1)...(19): siRNA sense strand
ucccagcgccuaagaauga

SEQ ID NO: 72656 - RNA, 19 nt, Homo sapiens
  misc_RNA (1)...(19): siRNA sense strand
ccaccagccugcaugagau

SEQ ID NO: 72657 - RNA, 19 nt, Homo sapiens
  misc_RNA (1)...(19): siRNA sense strand
ggacuuugccuacguagcu

SEQ ID NO: 72658 - RNA, 19 nt, Homo sapiens
  misc_RNA (1)...(19): siRNA sense strand
ccacacguuugcauucauc

SEQ ID NO: 72659 - RNA, 19 nt, Homo sapiens
  misc_RNA (1)...(19): siRNA sense strand
gaaguuccaagucuauuac

SEQ ID NO: 72660 - RNA, 19 nt, Homo sapiens
  misc_RNA (1)...(19): siRNA sense strand
guccagaaguuccaagucu

SEQ ID NO: 72661 - RNA, 19 nt, Homo sapiens
  misc_RNA (1)...(19): siRNA sense strand
gcauccgucagcucucuua

SEQ ID NO: 72662 - RNA, 19 nt, Homo sapiens
  misc_RNA (1)...(19): siRNA sense strand
ggaggaggaggacuuaucu

SEQ ID NO: 72663 - RNA, 19 nt, Homo sapiens
  misc_RNA (1)...(19): siRNA sense strand
uacugcagcuggaggauga

SEQ ID NO: 72664 - RNA, 19 nt, Homo sapiens
  misc_RNA (1)...(19): siRNA sense strand
acaccucagggaccuauua

SEQ ID NO: 72665 - RNA, 19 nt, Homo sapiens
  misc_RNA (1)...(19): siRNA sense strand
cuggaccacucuaaacuug

SEQ ID NO: 72666 - RNA, 19 nt, Homo sapiens
  misc_RNA (1)...(19): siRNA sense strand
ggaggaggacuuaucuucu

SEQ ID NO: 72667 - RNA, 19 nt, Homo sapiens
  misc_RNA (1)...(19): siRNA sense strand
ucuguuccaucaucacuga

SEQ ID NO: 72668 - RNA, 19 nt, Homo sapiens
  misc_RNA (1)...(19): siRNA sense strand
ccagaaguuccaagucuau

SEQ ID NO: 72669 - RNA, 19 nt, Homo sapiens
  misc_RNA (1)...(19): siRNA sense strand
gcagcaguguggcagucaa

SEQ ID NO: 72670 - RNA, 19 nt, Homo sapiens
  misc_RNA (1)...(19): siRNA sense strand
ggaacagugcagccaguga

SEQ ID NO: 72671 - RNA, 19 nt, Homo sapiens
  misc_RNA (1)...(19): siRNA sense strand
ugaccagaaucgcaaugug

SEQ ID NO: 72672 - RNA, 19 nt, Homo sapiens
  misc_RNA (1)...(19): siRNA sense strand
gggaauguaccuguugcua

SEQ ID NO: 72673 - RNA, 19 nt, Homo sapiens
  misc_RNA (1)...(19): siRNA sense strand
ggaggaggaggaugaugau

SEQ ID NO: 72674 - RNA, 19 nt, Homo sapiens
  misc_RNA (1)...(19): siRNA sense strand
uccagaaguuccaagucua

SEQ ID NO: 72675 - RNA, 19 nt, Homo sapiens
  misc_RNA (1)...(19): siRNA sense strand
gaucaucagcacucaagag

SEQ ID NO: 72676 - RNA, 19 nt, Homo sapiens
  misc_RNA (1)...(19): siRNA sense strand
acgaggaccuggccugauc

SEQ ID NO: 72677 - RNA, 19 nt, Homo sapiens
  misc_RNA (1)...(19): siRNA sense strand
aaugcccgcugcuugguaa

SEQ ID NO: 72678 - RNA, 19 nt, Homo sapiens
  misc_RNA (1)...(19): siRNA sense strand
ggacaccucagggaccuau

SEQ ID NO: 72679 - RNA, 19 nt, Homo sapiens
  misc_RNA (1)...(19): siRNA sense strand
gaauucccagcgccuaaga

SEQ ID NO: 72680 - RNA, 19 nt, Homo sapiens
  misc_RNA (1)...(19): siRNA sense strand
gagccagucggccauuaau

SEQ ID NO: 72681 - RNA, 19 nt, Homo sapiens
  misc_RNA (1)...(19): siRNA sense strand
cugcuacccucaccaucuu

SEQ ID NO: 72682 - RNA, 19 nt, Homo sapiens
  misc_RNA (1)...(19): siRNA sense strand
gcccgcugcuugguaaaug

SEQ ID NO: 72683 - RNA, 19 nt, Homo sapiens
  misc_RNA (1)...(19): siRNA sense strand
ccucagggaccuauuacug

SEQ ID NO: 72684 - RNA, 19 nt, Homo sapiens
  misc_RNA (1)...(19): siRNA sense strand
cagaugagggagaggagaa

SEQ ID NO: 72685 - RNA, 19 nt, Homo sapiens
  misc_RNA (1)...(19): siRNA sense strand
gccaccagccugcaugaga

SEQ ID NO: 72686 - RNA, 19 nt, Homo sapiens
  misc_RNA (1)...(19): siRNA sense strand
caagcugggcuaccuuauc

SEQ ID NO: 72687 - RNA, 19 nt, Homo sapiens
  misc_RNA (1)...(19): siRNA sense strand
agagauguccacacguuug

SEQ ID NO: 72688 - RNA, 19 nt, Homo sapiens
  misc_RNA (1)...(19): siRNA sense strand
ggaugaacccagugaugag

SEQ ID NO: 72689 - RNA, 19 nt, Homo sapiens
  misc_RNA (1)...(19): siRNA sense strand
gugccagccuccuguuugg

SEQ ID NO: 72690 - RNA, 19 nt, Homo sapiens
  misc_RNA (1)...(19): siRNA sense strand
guccacacguuugcauuca

SEQ ID NO: 72691 - RNA, 19 nt, Homo sapiens
  misc_RNA (1)...(19): siRNA sense strand
aggaggaggaugaugauga

SEQ ID NO: 72692 - RNA, 19 nt, Homo sapiens
  misc_RNA (1)...(19): siRNA sense strand
agaggaggaggaggacuua

SEQ ID NO: 72693 - RNA, 19 nt, Homo sapiens
  misc_RNA (1)...(19): siRNA sense strand
gaaggaugaacccagugau

SEQ ID NO: 72694 - RNA, 19 nt, Homo sapiens
  misc_RNA (1)...(19): siRNA sense strand
ucccuaggcuggguagaga

SEQ ID NO: 72695 - RNA, 19 nt, Homo sapiens
  misc_RNA (1)...(19): siRNA sense strand
cagagauguccacacguuu

SEQ ID NO: 72696 - RNA, 19 nt, Homo sapiens
  misc_RNA (1)...(19): siRNA sense strand
ugagccagucggccauuaa

SEQ ID NO: 72697 - RNA, 19 nt, Homo sapiens
  misc_RNA (1)...(19): siRNA sense strand
aagcugggcuaccuuaucc

SEQ ID NO: 72698 - RNA, 19 nt, Homo sapiens
  misc_RNA (1)...(19): siRNA sense strand
cugagccagucggccauua

SEQ ID NO: 72699 - RNA, 19 nt, Homo sapiens
  misc_RNA (1)...(19): siRNA sense strand
aggaggaggaggaugauga

SEQ ID NO: 72700 - RNA, 19 nt, Homo sapiens
  misc_RNA (1)...(19): siRNA sense strand
gcagcuggaggaugagaca

SEQ ID NO: 72701 - RNA, 19 nt, Homo sapiens
  misc_RNA (1)...(19): siRNA sense strand
aggaaaggaucugcuacug

SEQ ID NO: 72702 - RNA, 19 nt, Homo sapiens
  misc_RNA (1)...(19): siRNA sense strand
aggaugaacccagugauga

SEQ ID NO: 72703 - RNA, 19 nt, Homo sapiens
  misc_RNA (1)...(19): siRNA sense strand
gcuuugaggauggagaauu

SEQ ID NO: 72704 - RNA, 19 nt, Homo sapiens
  misc_RNA (1)...(19): siRNA sense strand
gagugccagccuccuguuu

SEQ ID NO: 72705 - RNA, 19 nt, Homo sapiens
  misc_RNA (1)...(19): siRNA sense strand
uggagaaggcuuugaggau

SEQ ID NO: 72706 - RNA, 19 nt, Homo sapiens
  misc_RNA (1)...(19): siRNA sense strand
ggcccaccgugaccagaau

SEQ ID NO: 72707 - RNA, 19 nt, Homo sapiens
  misc_RNA (1)...(19): siRNA sense strand
augaguugguccagaaguu

SEQ ID NO: 72708 - RNA, 19 nt, Homo sapiens
  misc_RNA (1)...(19): siRNA sense strand
caacccagggaucaagugu

SEQ ID NO: 72709 - RNA, 19 nt, Homo sapiens
  misc_RNA (1)...(19): siRNA sense strand
gaauguaccuguugcuaaa

SEQ ID NO: 72710 - RNA, 19 nt, Homo sapiens
  misc_RNA (1)...(19): siRNA sense strand
gcagagauguccacacguu

SEQ ID NO: 72711 - RNA, 19 nt, Homo sapiens
  misc_RNA (1)...(19): siRNA sense strand
caugagaucugcucuaaga

SEQ ID NO: 72712 - RNA, 19 nt, Homo sapiens
  misc_RNA (1)...(19): siRNA sense strand
cuacguagcucgugauaag

SEQ ID NO: 72713 - RNA, 19 nt, Homo sapiens
  misc_RNA (1)...(19): siRNA sense strand
ggaggaugaugaugaugaa

SEQ ID NO: 72714 - RNA, 19 nt, Homo sapiens
  misc_RNA (1)...(19): siRNA sense strand
gugauaagcugacccagau

SEQ ID NO: 72715 - RNA, 19 nt, Homo sapiens
  misc_RNA (1)...(19): siRNA sense strand
ggaauguaccuguugcuaa

SEQ ID NO: 72716 - RNA, 19 nt, Homo sapiens
  misc_RNA (1)...(19): siRNA sense strand
ggaggaggaugaugaugau

SEQ ID NO: 72717 - RNA, 19 nt, Homo sapiens
  misc_RNA (1)...(19): siRNA sense strand
ggaugucccuuuccaagug

SEQ ID NO: 72718 - RNA, 19 nt, Homo sapiens
  misc_RNA (1)...(19): siRNA sense strand
ggaaggaaaggaucugcua

SEQ ID NO: 72719 - RNA, 19 nt, Homo sapiens
  misc_RNA (1)...(19): siRNA sense strand
agaaugaguugguccagaa

SEQ ID NO: 72720 - RNA, 19 nt, Homo sapiens
  misc_RNA (1)...(19): siRNA sense strand
ggaccacucuaaacuugug

SEQ ID NO: 72721 - RNA, 19 nt, Homo sapiens
  misc_RNA (1)...(19): siRNA sense strand
ggguagaugugauuaaugg

SEQ ID NO: 72722 - RNA, 19 nt, Homo sapiens
  misc_RNA (1)...(19): siRNA sense strand
ucagcucucuuaccacaaa

SEQ ID NO: 72723 - RNA, 19 nt, Homo sapiens
  misc_RNA (1)...(19): siRNA sense strand
gcucaagugccacguguuu

SEQ ID NO: 72724 - RNA, 19 nt, Homo sapiens
  misc_RNA (1)...(19): siRNA sense strand
gaggaggacuuaucuucuc

SEQ ID NO: 72725 - RNA, 19 nt, Homo sapiens
  misc_RNA (1)...(19): siRNA sense strand
gaccagaaucgcaauguga

SEQ ID NO: 72726 - RNA, 19 nt, Homo sapiens
  misc_RNA (1)...(19): siRNA sense strand
acucuaaacuuguggaugu

SEQ ID NO: 72727 - RNA, 19 nt, Homo sapiens
  misc_RNA (1)...(19): siRNA sense strand
ggaaggaugaacccaguga

SEQ ID NO: 72728 - RNA, 19 nt, Homo sapiens
  misc_RNA (1)...(19): siRNA sense strand
gaacagugcagccagugau

SEQ ID NO: 72729 - RNA, 19 nt, Homo sapiens
  misc_RNA (1)...(19): siRNA sense strand
gagagugucgggugcguuu

SEQ ID NO: 72730 - RNA, 19 nt, Homo sapiens
  misc_RNA (1)...(19): siRNA sense strand
acccagggaucaaguguuu

SEQ ID NO: 72731 - RNA, 19 nt, Homo sapiens
  misc_RNA (1)...(19): siRNA sense strand
cagcagccgugaacaaugg

SEQ ID NO: 72732 - RNA, 19 nt, Homo sapiens
  misc_RNA (1)...(19): siRNA sense strand
ugacccagaugcucaagug

SEQ ID NO: 72733 - RNA, 19 nt, Homo sapiens
  misc_RNA (1)...(19): siRNA sense strand
ggaugaugaugaugaagag

SEQ ID NO: 72734 - RNA, 19 nt, Homo sapiens
  misc_RNA (1)...(19): siRNA sense strand
agaaguuccaagucuauua

SEQ ID NO: 72735 - RNA, 19 nt, Homo sapiens
  misc_RNA (1)...(19): siRNA sense strand
ugcaugagaucugcucuaa

SEQ ID NO: 72736 - RNA, 19 nt, Homo sapiens
  misc_RNA (1)...(19): siRNA sense strand
ggaugagacacuaaagcua

SEQ ID NO: 72737 - RNA, 19 nt, Homo sapiens
  misc_RNA (1)...(19): siRNA sense strand
cuuugaggauggagaauuu

SEQ ID NO: 72738 - RNA, 19 nt, Homo sapiens
  misc_RNA (1)...(19): siRNA sense strand
gcaaugugaccuugaccuu

SEQ ID NO: 72739 - RNA, 19 nt, Homo sapiens
  misc_RNA (1)...(19): siRNA sense strand
gcuggaggaugagacacua

SEQ ID NO: 72740 - RNA, 19 nt, Homo sapiens
  misc_RNA (1)...(19): siRNA sense strand
ucccagcgccuaagaauga

SEQ ID NO: 72741 - RNA, 19 nt, Homo sapiens
  misc_RNA (1)...(19): siRNA sense strand
ccaccagccugcaugagau

SEQ ID NO: 72742 - RNA, 19 nt, Homo sapiens
  misc_RNA (1)...(19): siRNA sense strand
ggacuuugccuacguagcu

SEQ ID NO: 72743 - RNA, 19 nt, Homo sapiens
  misc_RNA (1)...(19): siRNA sense strand
ccacacguuugcauucauc

SEQ ID NO: 72744 - RNA, 19 nt, Homo sapiens
  misc_RNA (1)...(19): siRNA sense strand
gaaguuccaagucuauuac

SEQ ID NO: 72745 - RNA, 19 nt, Homo sapiens
  misc_RNA (1)...(19): siRNA sense strand
guccagaaguuccaagucu

SEQ ID NO: 72746 - RNA, 19 nt, Homo sapiens
  misc_RNA (1)...(19): siRNA sense strand
gcauccgucagcucucuua

SEQ ID NO: 72747 - RNA, 19 nt, Homo sapiens
  misc_RNA (1)...(19): siRNA sense strand
ggaggaggaggacuuaucu

SEQ ID NO: 72748 - RNA, 19 nt, Homo sapiens
  misc_RNA (1)...(19): siRNA sense strand
uacugcagcuggaggauga

SEQ ID NO: 72749 - RNA, 19 nt, Homo sapiens
  misc_RNA (1)...(19): siRNA sense strand
acaccucagggaccuauua

SEQ ID NO: 72750 - RNA, 19 nt, Homo sapiens
  misc_RNA (1)...(19): siRNA sense strand
cuggaccacucuaaacuug

SEQ ID NO: 72751 - RNA, 19 nt, Homo sapiens
  misc_RNA (1)...(19): siRNA sense strand
ggaggaggacuuaucuucu

SEQ ID NO: 72752 - RNA, 19 nt, Homo sapiens
  misc_RNA (1)...(19): siRNA sense strand
ucuguuccaucaucacuga

SEQ ID NO: 72753 - RNA, 19 nt, Homo sapiens
  misc_RNA (1)...(19): siRNA sense strand
ccagaaguuccaagucuau

SEQ ID NO: 72754 - RNA, 19 nt, Homo sapiens
  misc_RNA (1)...(19): siRNA sense strand
gcagcaguguggcagucaa

SEQ ID NO: 72755 - RNA, 19 nt, Homo sapiens
  misc_RNA (1)...(19): siRNA sense strand
ggaacagugcagccaguga

SEQ ID NO: 72756 - RNA, 19 nt, Homo sapiens
  misc_RNA (1)...(19): siRNA sense strand
ugaccagaaucgcaaugug

SEQ ID NO: 72757 - RNA, 19 nt, Homo sapiens
  misc_RNA (1)...(19): siRNA sense strand
gggaauguaccuguugcua

SEQ ID NO: 72758 - RNA, 19 nt, Homo sapiens
  misc_RNA (1)...(19): siRNA sense strand
ggaggaggaggaugaugau

SEQ ID NO: 72759 - RNA, 19 nt, Homo sapiens
  misc_RNA (1)...(19): siRNA sense strand
uccagaaguuccaagucua

SEQ ID NO: 72760 - RNA, 19 nt, Homo sapiens
  misc_RNA (1)...(19): siRNA sense strand
gaucaucagcacucaagag

SEQ ID NO: 72761 - RNA, 19 nt, Homo sapiens
  misc_RNA (1)...(19): siRNA sense strand
acgaggaccuggccugauc

SEQ ID NO: 72762 - RNA, 19 nt, Homo sapiens
  misc_RNA (1)...(19): siRNA sense strand
aaugcccgcugcuugguaa

SEQ ID NO: 72763 - RNA, 19 nt, Homo sapiens
  misc_RNA (1)...(19): siRNA sense strand
ggacaccucagggaccuau

SEQ ID NO: 72764 - RNA, 19 nt, Homo sapiens
  misc_RNA (1)...(19): siRNA sense strand
gaauucccagcgccuaaga

SEQ ID NO: 72765 - RNA, 19 nt, Homo sapiens
  misc_RNA (1)...(19): siRNA sense strand
gagccagucggccauuaau

SEQ ID NO: 72766 - RNA, 19 nt, Homo sapiens
  misc_RNA (1)...(19): siRNA sense strand
cugcuacccucaccaucuu

SEQ ID NO: 72767 - RNA, 19 nt, Homo sapiens
  misc_RNA (1)...(19): siRNA sense strand
gcccgcugcuugguaaaug

SEQ ID NO: 72768 - RNA, 19 nt, Homo sapiens
  misc_RNA (1)...(19): siRNA sense strand
ccucagggaccuauuacug

SEQ ID NO: 72769 - RNA, 19 nt, Homo sapiens
  misc_RNA (1)...(19): siRNA sense strand
cagaugagggagaggagaa

SEQ ID NO: 72770 - RNA, 19 nt, Homo sapiens
  misc_RNA (1)...(19): siRNA sense strand
gccaccagccugcaugaga

SEQ ID NO: 72771 - RNA, 19 nt, Homo sapiens
  misc_RNA (1)...(19): siRNA sense strand
caagcugggcuaccuuauc

SEQ ID NO: 72772 - RNA, 19 nt, Homo sapiens
  misc_RNA (1)...(19): siRNA sense strand
agagauguccacacguuug

SEQ ID NO: 72773 - RNA, 19 nt, Homo sapiens
  misc_RNA (1)...(19): siRNA sense strand
ggaugaacccagugaugag

SEQ ID NO: 72774 - RNA, 19 nt, Homo sapiens
  misc_RNA (1)...(19): siRNA sense strand
gugccagccuccuguuugg

SEQ ID NO: 72775 - RNA, 19 nt, Homo sapiens
  misc_RNA (1)...(19): siRNA sense strand
guccacacguuugcauuca

SEQ ID NO: 72776 - RNA, 19 nt, Homo sapiens
  misc_RNA (1)...(19): siRNA sense strand
aggaggaggaugaugauga

SEQ ID NO: 72777 - RNA, 19 nt, Homo sapiens
  misc_RNA (1)...(19): siRNA sense strand
agaggaggaggaggacuua

SEQ ID NO: 72778 - RNA, 19 nt, Homo sapiens
  misc_RNA (1)...(19): siRNA sense strand
gaaggaugaacccagugau

SEQ ID NO: 72779 - RNA, 19 nt, Homo sapiens
  misc_RNA (1)...(19): siRNA sense strand
ucccuaggcuggguagaga

SEQ ID NO: 72780 - RNA, 19 nt, Homo sapiens
  misc_RNA (1)...(19): siRNA sense strand
cagagauguccacacguuu

SEQ ID NO: 72781 - RNA, 19 nt, Homo sapiens
  misc_RNA (1)...(19): siRNA sense strand
ugagccagucggccauuaa

SEQ ID NO: 72782 - RNA, 19 nt, Homo sapiens
  misc_RNA (1)...(19): siRNA sense strand
aagcugggcuaccuuaucc

SEQ ID NO: 72783 - RNA, 19 nt, Homo sapiens
  misc_RNA (1)...(19): siRNA sense strand
cugagccagucggccauua

SEQ ID NO: 72784 - RNA, 19 nt, Homo sapiens
  misc_RNA (1)...(19): siRNA sense strand
aggaggaggaggaugauga

SEQ ID NO: 72785 - RNA, 19 nt, Homo sapiens
  misc_RNA (1)...(19): siRNA sense strand
gcagcuggaggaugagaca

SEQ ID NO: 72786 - RNA, 19 nt, Homo sapiens
  misc_RNA (1)...(19): siRNA sense strand
aggaaaggaucugcuacug

SEQ ID NO: 72787 - RNA, 19 nt, Homo sapiens
  misc_RNA (1)...(19): siRNA sense strand
aggaugaacccagugauga

SEQ ID NO: 72788 - RNA, 19 nt, Homo sapiens
  misc_RNA (1)...(19): siRNA sense strand
gcuuugaggauggagaauu

SEQ ID NO: 72789 - RNA, 19 nt, Homo sapiens
  misc_RNA (1)...(19): siRNA sense strand
gagugccagccuccuguuu

SEQ ID NO: 72790 - RNA, 19 nt, Homo sapiens
  misc_RNA (1)...(19): siRNA sense strand
uggagaaggcuuugaggau

SEQ ID NO: 72791 - RNA, 19 nt, Homo sapiens
  misc_RNA (1)...(19): siRNA sense strand
ggcccaccgugaccagaau

SEQ ID NO: 72792 - RNA, 19 nt, Homo sapiens
  misc_RNA (1)...(19): siRNA sense strand
augaguugguccagaaguu

SEQ ID NO: 72793 - RNA, 19 nt, Homo sapiens
  misc_RNA (1)...(19): siRNA sense strand
caacccagggaucaagugu

SEQ ID NO: 72794 - RNA, 19 nt, Homo sapiens
  misc_RNA (1)...(19): siRNA sense strand
gaaaugggcuuuaauagag

SEQ ID NO: 72795 - RNA, 19 nt, Homo sapiens
  misc_RNA (1)...(19): siRNA sense strand
gaaauugacucuacauugu

SEQ ID NO: 72796 - RNA, 19 nt, Homo sapiens
  misc_RNA (1)...(19): siRNA sense strand
gaauacaccugugguuaaa

SEQ ID NO: 72797 - RNA, 19 nt, Homo sapiens
  misc_RNA (1)...(19): siRNA sense strand
gaacagaauggcucucuuu

SEQ ID NO: 72798 - RNA, 19 nt, Homo sapiens
  misc_RNA (1)...(19): siRNA sense strand
ggaaaugggcuuuaauaga

SEQ ID NO: 72799 - RNA, 19 nt, Homo sapiens
  misc_RNA (1)...(19): siRNA sense strand
ggauccaccucuaagaaua

SEQ ID NO: 72800 - RNA, 19 nt, Homo sapiens
  misc_RNA (1)...(19): siRNA sense strand
gccaagaguuuguugauga

SEQ ID NO: 72801 - RNA, 19 nt, Homo sapiens
  misc_RNA (1)...(19): siRNA sense strand
aagaauacgucuccaauga

SEQ ID NO: 72802 - RNA, 19 nt, Homo sapiens
  misc_RNA (1)...(19): siRNA sense strand
cagaauggcucucuuucaa

SEQ ID NO: 72803 - RNA, 19 nt, Homo sapiens
  misc_RNA (1)...(19): siRNA sense strand
cgagagaacugauugauac

SEQ ID NO: 72804 - RNA, 19 nt, Homo sapiens
  misc_RNA (1)...(19): siRNA sense strand
ugaaguauauuccaacaga

SEQ ID NO: 72805 - RNA, 19 nt, Homo sapiens
  misc_RNA (1)...(19): siRNA sense strand
gguuaaaucugccuuggaa

SEQ ID NO: 72806 - RNA, 19 nt, Homo sapiens
  misc_RNA (1)...(19): siRNA sense strand
gaaacaaacaguucaaagu

SEQ ID NO: 72807 - RNA, 19 nt, Homo sapiens
  misc_RNA (1)...(19): siRNA sense strand
gaauggcucucuuucaaca

SEQ ID NO: 72808 - RNA, 19 nt, Homo sapiens
  misc_RNA (1)...(19): siRNA sense strand
uaccauauguggccauuaa

SEQ ID NO: 72809 - RNA, 19 nt, Homo sapiens
  misc_RNA (1)...(19): siRNA sense strand
gcaaugaugaugucaaaug

SEQ ID NO: 72810 - RNA, 19 nt, Homo sapiens
  misc_RNA (1)...(19): siRNA sense strand
gaacugauugauaccauuu

SEQ ID NO: 72811 - RNA, 19 nt, Homo sapiens
  misc_RNA (1)...(19): siRNA sense strand
ggacaaacagcaacaaaca

SEQ ID NO: 72812 - RNA, 19 nt, Homo sapiens
  misc_RNA (1)...(19): siRNA sense strand
ccaggucccucguaucaaa

SEQ ID NO: 72813 - RNA, 19 nt, Homo sapiens
  misc_RNA (1)...(19): siRNA sense strand
gaugguggcuugagguguu

SEQ ID NO: 72814 - RNA, 19 nt, Homo sapiens
  misc_RNA (1)...(19): siRNA sense strand
acucugagguuuagcauuu

SEQ ID NO: 72815 - RNA, 19 nt, Homo sapiens
  misc_RNA (1)...(19): siRNA sense strand
ggagacaguccuauucaaa

SEQ ID NO: 72816 - RNA, 19 nt, Homo sapiens
  misc_RNA (1)...(19): siRNA sense strand
gaagaacgaacuuguaaag

SEQ ID NO: 72817 - RNA, 19 nt, Homo sapiens
  misc_RNA (1)...(19): siRNA sense strand
caacuggagagaacuauaa

SEQ ID NO: 72818 - RNA, 19 nt, Homo sapiens
  misc_RNA (1)...(19): siRNA sense strand
caagguagauauccucauc

SEQ ID NO: 72819 - RNA, 19 nt, Homo sapiens
  misc_RNA (1)...(19): siRNA sense strand
gaaguauauuccaacagaa

SEQ ID NO: 72820 - RNA, 19 nt, Homo sapiens
  misc_RNA (1)...(19): siRNA sense strand
caaacccucuuaauucuag

SEQ ID NO: 72821 - RNA, 19 nt, Homo sapiens
  misc_RNA (1)...(19): siRNA sense strand
aaacacagauaccuuuaca

SEQ ID NO: 72822 - RNA, 19 nt, Homo sapiens
  misc_RNA (1)...(19): siRNA sense strand
ugacaugugugcuuccuau

SEQ ID NO: 72823 - RNA, 19 nt, Homo sapiens
  misc_RNA (1)...(19): siRNA sense strand
ucuaaaugcugaagaugaa

SEQ ID NO: 72824 - RNA, 19 nt, Homo sapiens
  misc_RNA (1)...(19): siRNA sense strand
gaagauguuucaggucugu

SEQ ID NO: 72825 - RNA, 19 nt, Homo sapiens
  misc_RNA (1)...(19): siRNA sense strand
aaaacaagcugaagaaaug

SEQ ID NO: 72826 - RNA, 19 nt, Homo sapiens
  misc_RNA (1)...(19): siRNA sense strand
agaagaugcugucaugaug

SEQ ID NO: 72827 - RNA, 19 nt, Homo sapiens
  misc_RNA (1)...(19): siRNA sense strand
gcgagagaacugauugaua

SEQ ID NO: 72828 - RNA, 19 nt, Homo sapiens
  misc_RNA (1)...(19): siRNA sense strand
auagagaccuggugaaaca

SEQ ID NO: 72829 - RNA, 19 nt, Homo sapiens
  misc_RNA (1)...(19): siRNA sense strand
ugaauacaccugugguuaa

SEQ ID NO: 72830 - RNA, 19 nt, Homo sapiens
  misc_RNA (1)...(19): siRNA sense strand
gaacaugccaagugguuuc

SEQ ID NO: 72831 - RNA, 19 nt, Homo sapiens
  misc_RNA (1)...(19): siRNA sense strand
aaugaaaggccaagaguuu

SEQ ID NO: 72832 - RNA, 19 nt, Homo sapiens
  misc_RNA (1)...(19): siRNA sense strand
gagauaggguagccugcuu

SEQ ID NO: 72833 - RNA, 19 nt, Homo sapiens
  misc_RNA (1)...(19): siRNA sense strand
gauauugugucagcacuuc

SEQ ID NO: 72834 - RNA, 19 nt, Homo sapiens
  misc_RNA (1)...(19): siRNA sense strand
ucgcaaugaugaugucaaa

SEQ ID NO: 72835 - RNA, 19 nt, Homo sapiens
  misc_RNA (1)...(19): siRNA sense strand
uaaaguguguauggacaaa

SEQ ID NO: 72836 - RNA, 19 nt, Homo sapiens
  misc_RNA (1)...(19): siRNA sense strand
acaaacagcaacaaacaaa

SEQ ID NO: 72837 - RNA, 19 nt, Homo sapiens
  misc_RNA (1)...(19): siRNA sense strand
cuggauaacuggaaacuag

SEQ ID NO: 72838 - RNA, 19 nt, Homo sapiens
  misc_RNA (1)...(19): siRNA sense strand
aagaagaacgaacuuguaa

SEQ ID NO: 72839 - RNA, 19 nt, Homo sapiens
  misc_RNA (1)...(19): siRNA sense strand
cauaaacagcuauauccua

SEQ ID NO: 72840 - RNA, 19 nt, Homo sapiens
  misc_RNA (1)...(19): siRNA sense strand
gaagccagauuucuuaccu

SEQ ID NO: 72841 - RNA, 19 nt, Homo sapiens
  misc_RNA (1)...(19): siRNA sense strand
gaaugaaaggccaagaguu

SEQ ID NO: 72842 - RNA, 19 nt, Homo sapiens
  misc_RNA (1)...(19): siRNA sense strand
gaugcuggauaacuggaaa

SEQ ID NO: 72843 - RNA, 19 nt, Homo sapiens
  misc_RNA (1)...(19): siRNA sense strand
gaaaugcugcggccaacau

SEQ ID NO: 72844 - RNA, 19 nt, Homo sapiens
  misc_RNA (1)...(19): siRNA sense strand
uaauagagaccuggugaaa

SEQ ID NO: 72845 - RNA, 19 nt, Homo sapiens
  misc_RNA (1)...(19): siRNA sense strand
acaugcagcucgaaugaga

SEQ ID NO: 72846 - RNA, 19 nt, Homo sapiens
  misc_RNA (1)...(19): siRNA sense strand
ggucaaaugcuucuguugu

SEQ ID NO: 72847 - RNA, 19 nt, Homo sapiens
  misc_RNA (1)...(19): siRNA sense strand
agaaauugacucuacauug

SEQ ID NO: 72848 - RNA, 19 nt, Homo sapiens
  misc_RNA (1)...(19): siRNA sense strand
gagaacugauugauaccau

SEQ ID NO: 72849 - RNA, 19 nt, Homo sapiens
  misc_RNA (1)...(19): siRNA sense strand
aaaggaugaugcuauguca

SEQ ID NO: 72850 - RNA, 19 nt, Homo sapiens
  misc_RNA (1)...(19): siRNA sense strand
gucaaaugcuucuguugug

SEQ ID NO: 72851 - RNA, 19 nt, Homo sapiens
  misc_RNA (1)...(19): siRNA sense strand
guucguacauuucucucuu

SEQ ID NO: 72852 - RNA, 19 nt, Homo sapiens
  misc_RNA (1)...(19): siRNA sense strand
agauaccacuggagaagaa

SEQ ID NO: 72853 - RNA, 19 nt, Homo sapiens
  misc_RNA (1)...(19): siRNA sense strand
gcuguagcuuuauucagaa

SEQ ID NO: 72854 - RNA, 19 nt, Homo sapiens
  misc_RNA (1)...(19): siRNA sense strand
aaagagaggaggagaagga

SEQ ID NO: 72855 - RNA, 19 nt, Homo sapiens
  misc_RNA (1)...(19): siRNA sense strand
ugucagcacuucuaaaugc

SEQ ID NO: 72856 - RNA, 19 nt, Homo sapiens
  misc_RNA (1)...(19): siRNA sense strand
uauaggaccuggagauagg

SEQ ID NO: 72857 - RNA, 19 nt, Homo sapiens
  misc_RNA (1)...(19): siRNA sense strand
uuucuuaccuaccauaugu

SEQ ID NO: 72858 - RNA, 19 nt, Homo sapiens
  misc_RNA (1)...(19): siRNA sense strand
ccagauuucuuaccuacca

SEQ ID NO: 72859 - RNA, 19 nt, Homo sapiens
  misc_RNA (1)...(19): siRNA sense strand
gaacucuacagaaugucua

SEQ ID NO: 72860 - RNA, 19 nt, Homo sapiens
  misc_RNA (1)...(19): siRNA sense strand
guuaugcaaugaguacuga

SEQ ID NO: 72861 - RNA, 19 nt, Homo sapiens
  misc_RNA (1)...(19): siRNA sense strand
ugaggagguugcaagaaga

SEQ ID NO: 72862 - RNA, 19 nt, Homo sapiens
  misc_RNA (1)...(19): siRNA sense strand
ugugaacucuacagaaugu

SEQ ID NO: 72863 - RNA, 19 nt, Homo sapiens
  misc_RNA (1)...(19): siRNA sense strand
ggagagaacuauaaaacag

SEQ ID NO: 72864 - RNA, 19 nt, Homo sapiens
  misc_RNA (1)...(19): siRNA sense strand
gauauccucaucuucuuga

SEQ ID NO: 72865 - RNA, 19 nt, Homo sapiens
  misc_RNA (1)...(19): siRNA sense strand
caucuaguguuccaguuca

SEQ ID NO: 72866 - RNA, 19 nt, Homo sapiens
  misc_RNA (1)...(19): siRNA sense strand
ggaugaugcuaugucagaa

SEQ ID NO: 72867 - RNA, 19 nt, Homo sapiens
  misc_RNA (1)...(19): siRNA sense strand
guacugaagaagccagauu

SEQ ID NO: 72868 - RNA, 19 nt, Homo sapiens
  misc_RNA (1)...(19): siRNA sense strand
ucuccaaacccucuuaauu

SEQ ID NO: 72869 - RNA, 19 nt, Homo sapiens
  misc_RNA (1)...(19): siRNA sense strand
aaugcugacccaccaauua

SEQ ID NO: 72870 - RNA, 19 nt, Homo sapiens
  misc_RNA (1)...(19): siRNA sense strand
caaugaugaugucaaaugc

SEQ ID NO: 72871 - RNA, 19 nt, Homo sapiens
  misc_RNA (1)...(19): siRNA sense strand
gaaaggccaagaguuuguu

SEQ ID NO: 72872 - RNA, 19 nt, Homo sapiens
  misc_RNA (1)...(19): siRNA sense strand
uauauaggaccuggagaua

SEQ ID NO: 72873 - RNA, 19 nt, Homo sapiens
  misc_RNA (1)...(19): siRNA sense strand
guggucaucugguaguaug

SEQ ID NO: 72874 - RNA, 19 nt, Homo sapiens
  misc_RNA (1)...(19): siRNA sense strand
acacagauaccuuuacaag

SEQ ID NO: 72875 - RNA, 19 nt, Homo sapiens
  misc_RNA (1)...(19): siRNA sense strand
agaguuuguugaugagauu

SEQ ID NO: 72876 - RNA, 19 nt, Homo sapiens
  misc_RNA (1)...(19): siRNA sense strand
acacaugcagcucgaauga

SEQ ID NO: 72877 - RNA, 19 nt, Homo sapiens
  misc_RNA (1)...(19): siRNA sense strand
ucagaacaccggaggcauu

SEQ ID NO: 72878 - RNA, 19 nt, Homo sapiens
  misc_RNA (1)...(19): siRNA sense strand
gaaucugguuucagcuagu

SEQ ID NO: 72879 - RNA, 19 nt, Homo sapiens
  misc_RNA (1)...(19): siRNA sense strand
gaaugugccccuucucuaa

SEQ ID NO: 72880 - RNA, 19 nt, Homo sapiens
  misc_RNA (1)...(19): siRNA sense strand
cagaagaugcugucaugau

SEQ ID NO: 72881 - RNA, 19 nt, Homo sapiens
  misc_RNA (1)...(19): siRNA sense strand
ggccaagaguuuguugaug

SEQ ID NO: 72882 - RNA, 19 nt, Homo sapiens
  misc_RNA (1)...(19): siRNA sense strand
ugugaguucuugauacgaa

SEQ ID NO: 72883 - RNA, 19 nt, Homo sapiens
  misc_RNA (1)...(19): siRNA sense strand
cuacaguuaugcaaugagu

SEQ ID NO: 72884 - RNA, 19 nt, Homo sapiens
  misc_RNA (1)...(19): siRNA sense strand
cuccaaacccucuuaauuc

SEQ ID NO: 72885 - RNA, 19 nt, Homo sapiens
  misc_RNA (1)...(19): siRNA sense strand
gacaaacagcaacaaacaa

SEQ ID NO: 72886 - RNA, 19 nt, Homo sapiens
  misc_RNA (1)...(19): siRNA sense strand
guacuggccaucuaguguu

SEQ ID NO: 72887 - RNA, 19 nt, Homo sapiens
  misc_RNA (1)...(19): siRNA sense strand
caaaggaugaugcuauguc

SEQ ID NO: 72888 - RNA, 19 nt, Homo sapiens
  misc_RNA (1)...(19): siRNA sense strand
caagcgagagaacugauug

SEQ ID NO: 72889 - RNA, 19 nt, Homo sapiens
  misc_RNA (1)...(19): siRNA sense strand
uuggaaaugggcuuuaaua

SEQ ID NO: 72890 - RNA, 19 nt, Homo sapiens
  misc_RNA (1)...(19): siRNA sense strand
auacaccugugguuaaauc

SEQ ID NO: 72891 - RNA, 19 nt, Homo sapiens
  misc_RNA (1)...(19): siRNA sense strand
gaugaauacaccugugguu

SEQ ID NO: 72892 - RNA, 19 nt, Homo sapiens
  misc_RNA (1)...(19): siRNA sense strand
acccaccaauuauucauuu

SEQ ID NO: 72893 - RNA, 19 nt, Homo sapiens
  misc_RNA (1)...(19): siRNA sense strand
gccaagugguuuccaaggu

SEQ ID NO: 72894 - RNA, 19 nt, Homo sapiens
  misc_RNA (1)...(19): siRNA sense strand
guagauagauggcaauaug

SEQ ID NO: 72895 - RNA, 19 nt, Homo sapiens
  misc_RNA (1)...(19): siRNA sense strand
ggaagaagaauuuguagaa

SEQ ID NO: 72896 - RNA, 19 nt, Homo sapiens
  misc_RNA (1)...(19): siRNA sense strand
gaagggacaagaauauaua

SEQ ID NO: 72897 - RNA, 19 nt, Homo sapiens
  misc_RNA (1)...(19): siRNA sense strand
ccuaauugcuucuuuguuu

SEQ ID NO: 72898 - RNA, 19 nt, Homo sapiens
  misc_RNA (1)...(19): siRNA sense strand
gaggagggcuaacugauug

SEQ ID NO: 72899 - RNA, 19 nt, Homo sapiens
  misc_RNA (1)...(19): siRNA sense strand
ugaagaagcuagauuaaag

SEQ ID NO: 72900 - RNA, 19 nt, Homo sapiens
  misc_RNA (1)...(19): siRNA sense strand
gaggaacccugccauguau

SEQ ID NO: 72901 - RNA, 19 nt, Homo sapiens
  misc_RNA (1)...(19): siRNA sense strand
gcacggaucuuuacuuuug

SEQ ID NO: 72902 - RNA, 19 nt, Homo sapiens
  misc_RNA (1)...(19): siRNA sense strand
ggaacaacaugcuaaaugg

SEQ ID NO: 72903 - RNA, 19 nt, Homo sapiens
  misc_RNA (1)...(19): siRNA sense strand
ggacauggauauacucagu

SEQ ID NO: 72904 - RNA, 19 nt, Homo sapiens
  misc_RNA (1)...(19): siRNA sense strand
gaacagaagggacaagaau

SEQ ID NO: 72905 - RNA, 19 nt, Homo sapiens
  misc_RNA (1)...(19): siRNA sense strand
gagcaggguuucuuuauac

SEQ ID NO: 72906 - RNA, 19 nt, Homo sapiens
  misc_RNA (1)...(19): siRNA sense strand
gaacacaggcgacacuuuc

SEQ ID NO: 72907 - RNA, 19 nt, Homo sapiens
  misc_RNA (1)...(19): siRNA sense strand
cgagcaggguuucuuuaua

SEQ ID NO: 72908 - RNA, 19 nt, Homo sapiens
  misc_RNA (1)...(19): siRNA sense strand
gaagaagaauuuguagaag

SEQ ID NO: 72909 - RNA, 19 nt, Homo sapiens
  misc_RNA (1)...(19): siRNA sense strand
gaacugggcagguuguaga

SEQ ID NO: 72910 - RNA, 19 nt, Homo sapiens
  misc_RNA (1)...(19): siRNA sense strand
gcuacacagucauuacuuu

SEQ ID NO: 72911 - RNA, 19 nt, Homo sapiens
  misc_RNA (1)...(19): siRNA sense strand
gugcaaauaucuguuagaa

SEQ ID NO: 72912 - RNA, 19 nt, Homo sapiens
  misc_RNA (1)...(19): siRNA sense strand
ggacucuacuacacaggua

SEQ ID NO: 72913 - RNA, 19 nt, Homo sapiens
  misc_RNA (1)...(19): siRNA sense strand
ggaagacacaggaaaguau

SEQ ID NO: 72914 - RNA, 19 nt, Homo sapiens
  misc_RNA (1)...(19): siRNA sense strand
aagcacggaucuuuacuuu

SEQ ID NO: 72915 - RNA, 19 nt, Homo sapiens
  misc_RNA (1)...(19): siRNA sense strand
acauggauauacucaguua

SEQ ID NO: 72916 - RNA, 19 nt, Homo sapiens
  misc_RNA (1)...(19): siRNA sense strand
ggaggagggcuaacugauu

SEQ ID NO: 72917 - RNA, 19 nt, Homo sapiens
  misc_RNA (1)...(19): siRNA sense strand
ugagacacaugcagacuau

SEQ ID NO: 72918 - RNA, 19 nt, Homo sapiens
  misc_RNA (1)...(19): siRNA sense strand
gcacgagcaggguuucuuu

SEQ ID NO: 72919 - RNA, 19 nt, Homo sapiens
  misc_RNA (1)...(19): siRNA sense strand
cgaggaacccugccaugua

SEQ ID NO: 72920 - RNA, 19 nt, Homo sapiens
  misc_RNA (1)...(19): siRNA sense strand
ucaugcagcuguagauaga

SEQ ID NO: 72921 - RNA, 19 nt, Homo sapiens
  misc_RNA (1)...(19): siRNA sense strand
gggaacaacaugcuaaaug

SEQ ID NO: 72922 - RNA, 19 nt, Homo sapiens
  misc_RNA (1)...(19): siRNA sense strand
aggcgacacuuuccuaauu

SEQ ID NO: 72923 - RNA, 19 nt, Homo sapiens
  misc_RNA (1)...(19): siRNA sense strand
gagaaaacaccaucacuaa

SEQ ID NO: 72924 - RNA, 19 nt, Homo sapiens
  misc_RNA (1)...(19): siRNA sense strand
ccagaauggucaguacaaa

SEQ ID NO: 72925 - RNA, 19 nt, Homo sapiens
  misc_RNA (1)...(19): siRNA sense strand
ugaagcaguugacaagugu

SEQ ID NO: 72926 - RNA, 19 nt, Homo sapiens
  misc_RNA (1)...(19): siRNA sense strand
aggugaaggugauaaagua

SEQ ID NO: 72927 - RNA, 19 nt, Homo sapiens
  misc_RNA (1)...(19): siRNA sense strand
cugcagacaucaauaagga

SEQ ID NO: 72928 - RNA, 19 nt, Homo sapiens
  misc_RNA (1)...(19): siRNA sense strand
gaucgugccuggucagaac

SEQ ID NO: 72929 - RNA, 19 nt, Homo sapiens
  misc_RNA (1)...(19): siRNA sense strand
gaagaagcuagauuaaagu

SEQ ID NO: 72930 - RNA, 19 nt, Homo sapiens
  misc_RNA (1)...(19): siRNA sense strand
uaucugggagcaacuauaa

SEQ ID NO: 72931 - RNA, 19 nt, Homo sapiens
  misc_RNA (1)...(19): siRNA sense strand
ggcgacacuuuccuaauug

SEQ ID NO: 72932 - RNA, 19 nt, Homo sapiens
  misc_RNA (1)...(19): siRNA sense strand
agauauaucagacaccaua

SEQ ID NO: 72933 - RNA, 19 nt, Homo sapiens
  misc_RNA (1)...(19): siRNA sense strand
ugaagacccuugggaacaa

SEQ ID NO: 72934 - RNA, 19 nt, Homo sapiens
  misc_RNA (1)...(19): siRNA sense strand
gccacgcagucuacaaauu

SEQ ID NO: 72935 - RNA, 19 nt, Homo sapiens
  misc_RNA (1)...(19): siRNA sense strand
uagugaagaagcuagauua

SEQ ID NO: 72936 - RNA, 19 nt, Homo sapiens
  misc_RNA (1)...(19): siRNA sense strand
gccagacuaugcucaccua

SEQ ID NO: 72937 - RNA, 19 nt, Homo sapiens
  misc_RNA (1)...(19): siRNA sense strand
ucuagugaaugcucagaaa

SEQ ID NO: 72938 - RNA, 19 nt, Homo sapiens
  misc_RNA (1)...(19): siRNA sense strand
cuagaagaauugaugauac

SEQ ID NO: 72939 - RNA, 19 nt, Homo sapiens
  misc_RNA (1)...(19): siRNA sense strand
ucacuaacuagaagaauug

SEQ ID NO: 72940 - RNA, 19 nt, Homo sapiens
  misc_RNA (1)...(19): siRNA sense strand
gugauaaaguaaagugcuu

SEQ ID NO: 72941 - RNA, 19 nt, Homo sapiens
  misc_RNA (1)...(19): siRNA sense strand
gaagcacggaucuuuacuu

SEQ ID NO: 72942 - RNA, 19 nt, Homo sapiens
  misc_RNA (1)...(19): siRNA sense strand
ccacgcagucuacaaauuc

SEQ ID NO: 72943 - RNA, 19 nt, Homo sapiens
  misc_RNA (1)...(19): siRNA sense strand
gucauuacuuucaagcaaa

SEQ ID NO: 72944 - RNA, 19 nt, Homo sapiens
  misc_RNA (1)...(19): siRNA sense strand
gguugcagaucuagugaau

SEQ ID NO: 72945 - RNA, 19 nt, Homo sapiens
  misc_RNA (1)...(19): siRNA sense strand
gauauacucaguuaacaag

SEQ ID NO: 72946 - RNA, 19 nt, Homo sapiens
  misc_RNA (1)...(19): siRNA sense strand
agaagaauuuguagaagag

SEQ ID NO: 72947 - RNA, 19 nt, Homo sapiens
  misc_RNA (1)...(19): siRNA sense strand
uaugaagcacggaucuuua

SEQ ID NO: 72948 - RNA, 19 nt, Homo sapiens
  misc_RNA (1)...(19): siRNA sense strand
agacaucaauaaggaagaa

SEQ ID NO: 72949 - RNA, 19 nt, Homo sapiens
  misc_RNA (1)...(19): siRNA sense strand
gugaagaagcuagauuaaa

SEQ ID NO: 72950 - RNA, 19 nt, Homo sapiens
  misc_RNA (1)...(19): siRNA sense strand
cagaagggacaagaauaua

SEQ ID NO: 72951 - RNA, 19 nt, Homo sapiens
  misc_RNA (1)...(19): siRNA sense strand
ggauauacucaguuaacaa

SEQ ID NO: 72952 - RNA, 19 nt, Homo sapiens
  misc_RNA (1)...(19): siRNA sense strand
cauggcagauuaugaagca

SEQ ID NO: 72953 - RNA, 19 nt, Homo sapiens
  misc_RNA (1)...(19): siRNA sense strand
gcugugaguucugauagga

SEQ ID NO: 72954 - RNA, 19 nt, Homo sapiens
  misc_RNA (1)...(19): siRNA sense strand
ccaagagaguuagcaagug

SEQ ID NO: 72955 - RNA, 19 nt, Homo sapiens
  misc_RNA (1)...(19): siRNA sense strand
gaagacacaggaaaguauc

SEQ ID NO: 72956 - RNA, 19 nt, Homo sapiens
  misc_RNA (1)...(19): siRNA sense strand
acacagucauuacuuucaa

SEQ ID NO: 72957 - RNA, 19 nt, Homo sapiens
  misc_RNA (1)...(19): siRNA sense strand
ugaaggugauaaaguaaag

SEQ ID NO: 72958 - RNA, 19 nt, Homo sapiens
  misc_RNA (1)...(19): siRNA sense strand
ccaagugguaguccuguuu

SEQ ID NO: 72959 - RNA, 19 nt, Homo sapiens
  misc_RNA (1)...(19): siRNA sense strand
gaacaacaugcuaaauggu

SEQ ID NO: 72960 - RNA, 19 nt, Homo sapiens
  misc_RNA (1)...(19): siRNA sense strand
ugcaaaaucuguauggaua

SEQ ID NO: 72961 - RNA, 19 nt, Homo sapiens
  misc_RNA (1)...(19): siRNA sense strand
uauacucaguuaacaagga

SEQ ID NO: 72962 - RNA, 19 nt, Homo sapiens
  misc_RNA (1)...(19): siRNA sense strand
acaagugucccaugugcua

SEQ ID NO: 72963 - RNA, 19 nt, Homo sapiens
  misc_RNA (1)...(19): siRNA sense strand
acagaagggacaagaauau

SEQ ID NO: 72964 - RNA, 19 nt, Homo sapiens
  misc_RNA (1)...(19): siRNA sense strand
caccaucacuaacuagaag

SEQ ID NO: 72965 - RNA, 19 nt, Homo sapiens
  misc_RNA (1)...(19): siRNA sense strand
gaaaguauccccaaauugc

SEQ ID NO: 72966 - RNA, 19 nt, Homo sapiens
  misc_RNA (1)...(19): siRNA sense strand
gauaccaucuuccaaaauc

SEQ ID NO: 72967 - RNA, 19 nt, Homo sapiens
  misc_RNA (1)...(19): siRNA sense strand
acaacaugcuaaaugguau

SEQ ID NO: 72968 - RNA, 19 nt, Homo sapiens
  misc_RNA (1)...(19): siRNA sense strand
ugcaagagcuggauuuuau

SEQ ID NO: 72969 - RNA, 19 nt, Homo sapiens
  misc_RNA (1)...(19): siRNA sense strand
agacucagcaguuggaaga

SEQ ID NO: 72970 - RNA, 19 nt, Homo sapiens
  misc_RNA (1)...(19): siRNA sense strand
ggugaaggugauaaaguaa

SEQ ID NO: 72971 - RNA, 19 nt, Homo sapiens
  misc_RNA (1)...(19): siRNA sense strand
uauggagacucagcaguug

SEQ ID NO: 72972 - RNA, 19 nt, Homo sapiens
  misc_RNA (1)...(19): siRNA sense strand
agucauuacuuucaagcaa

SEQ ID NO: 72973 - RNA, 19 nt, Homo sapiens
  misc_RNA (1)...(19): siRNA sense strand
cugaagcaguugacaagug

SEQ ID NO: 72974 - RNA, 19 nt, Homo sapiens
  misc_RNA (1)...(19): siRNA sense strand
cuaacuagaagaauugaug

SEQ ID NO: 72975 - RNA, 19 nt, Homo sapiens
  misc_RNA (1)...(19): siRNA sense strand
gagcuggauuuuaugcuuu

SEQ ID NO: 72976 - RNA, 19 nt, Homo sapiens
  misc_RNA (1)...(19): siRNA sense strand
gaugcugugaguucugaua

SEQ ID NO: 72977 - RNA, 19 nt, Homo sapiens
  misc_RNA (1)...(19): siRNA sense strand
gaauggucaguacaaaguu

SEQ ID NO: 72978 - RNA, 19 nt, Homo sapiens
  misc_RNA (1)...(19): siRNA sense strand
ggagaagcuuugcaaaauc

SEQ ID NO: 72979 - RNA, 19 nt, Homo sapiens
  misc_RNA (1)...(19): siRNA sense strand
agaagggacaagaauauau

SEQ ID NO: 72980 - RNA, 19 nt, Homo sapiens
  misc_RNA (1)...(19): siRNA sense strand
gcagguuguagauauauca

SEQ ID NO: 72981 - RNA, 19 nt, Homo sapiens
  misc_RNA (1)...(19): siRNA sense strand
acacaugcagacuaucuuu

SEQ ID NO: 72982 - RNA, 19 nt, Homo sapiens
  misc_RNA (1)...(19): siRNA sense strand
gugcggugcuuuaguuguc

SEQ ID NO: 72983 - RNA, 19 nt, Homo sapiens
  misc_RNA (1)...(19): siRNA sense strand
gaaaacaccaucacuaacu

SEQ ID NO: 72984 - RNA, 19 nt, Homo sapiens
  misc_RNA (1)...(19): siRNA sense strand
uauccagggugcaaauauc

SEQ ID NO: 72985 - RNA, 19 nt, Homo sapiens
  misc_RNA (1)...(19): siRNA sense strand
ccaaauucaacaaaucuuc

SEQ ID NO: 72986 - RNA, 19 nt, Homo sapiens
  misc_RNA (1)...(19): siRNA sense strand
gaacuggccagacuaugcu

SEQ ID NO: 72987 - RNA, 19 nt, Homo sapiens
  misc_RNA (1)...(19): siRNA sense strand
guaccugcagacaucaaua

SEQ ID NO: 72988 - RNA, 19 nt, Homo sapiens
  misc_RNA (1)...(19): siRNA sense strand
ugccauguauagugaagaa

SEQ ID NO: 72989 - RNA, 19 nt, Homo sapiens
  misc_RNA (1)...(19): siRNA sense strand
gaggagaagcuuugcaaaa

SEQ ID NO: 72990 - RNA, 19 nt, Homo sapiens
  misc_RNA (1)...(19): siRNA sense strand
uugcagaucuagugaaugc

SEQ ID NO: 72991 - RNA, 19 nt, Homo sapiens
  misc_RNA (1)...(19): siRNA sense strand
uaugguacaagaagcuaua

SEQ ID NO: 72992 - RNA, 19 nt, Homo sapiens
  misc_RNA (1)...(19): siRNA sense strand
gggacaagaauauauaaac

SEQ ID NO: 72993 - RNA, 19 nt, Homo sapiens
  misc_RNA (1)...(19): siRNA sense strand
aacaacaugcuaaauggua

SEQ ID NO: 72994 - RNA, 19 nt, Homo sapiens
  misc_RNA (1)...(19): siRNA sense strand
gaagcaguuugaagaauua

SEQ ID NO: 72995 - RNA, 19 nt, Homo sapiens
  misc_RNA (1)...(19): siRNA sense strand
caaaggaaaccaacaauaa

SEQ ID NO: 72996 - RNA, 19 nt, Homo sapiens
  misc_RNA (1)...(19): siRNA sense strand
gaagaaagaauuugaggaa

SEQ ID NO: 72997 - RNA, 19 nt, Homo sapiens
  misc_RNA (1)...(19): siRNA sense strand
gcaaaggaaaccaacaaua

SEQ ID NO: 72998 - RNA, 19 nt, Homo sapiens
  misc_RNA (1)...(19): siRNA sense strand
gaacaaaauugcaaaggaa

SEQ ID NO: 72999 - RNA, 19 nt, Homo sapiens
  misc_RNA (1)...(19): siRNA sense strand
gaaagaauuugaggaaacu

SEQ ID NO: 73000 - RNA, 19 nt, Homo sapiens
  misc_RNA (1)...(19): siRNA sense strand
gaaacuggacagagaaaga

SEQ ID NO: 73001 - RNA, 19 nt, Homo sapiens
  misc_RNA (1)...(19): siRNA sense strand
agaagcaguuugaagaauu

SEQ ID NO: 73002 - RNA, 19 nt, Homo sapiens
  misc_RNA (1)...(19): siRNA sense strand
ugaggaaacugcgaagaaa

SEQ ID NO: 73003 - RNA, 19 nt, Homo sapiens
  misc_RNA (1)...(19): siRNA sense strand
gagaaagagccaagaacaa

SEQ ID NO: 73004 - RNA, 19 nt, Homo sapiens
  misc_RNA (1)...(19): siRNA sense strand
gaaaccaacaauaagaaga

SEQ ID NO: 73005 - RNA, 19 nt, Homo sapiens
  misc_RNA (1)...(19): siRNA sense strand
gaauuaacccuuggugaau

SEQ ID NO: 73006 - RNA, 19 nt, Homo sapiens
  misc_RNA (1)...(19): siRNA sense strand
agaaagagccaagaacaaa

SEQ ID NO: 73007 - RNA, 19 nt, Homo sapiens
  misc_RNA (1)...(19): siRNA sense strand
caagaagcaguuugaagaa

SEQ ID NO: 73008 - RNA, 19 nt, Homo sapiens
  misc_RNA (1)...(19): siRNA sense strand
agaauuaacccuuggugaa

SEQ ID NO: 73009 - RNA, 19 nt, Homo sapiens
  misc_RNA (1)...(19): siRNA sense strand
caccgcaucucuacauuca

SEQ ID NO: 73010 - RNA, 19 nt, Homo sapiens
  misc_RNA (1)...(19): siRNA sense strand
ccaacaauaagaagaaaga

SEQ ID NO: 73011 - RNA, 19 nt, Homo sapiens
  misc_RNA (1)...(19): siRNA sense strand
agaaagaauuugaggaaac

SEQ ID NO: 73012 - RNA, 19 nt, Homo sapiens
  misc_RNA (1)...(19): siRNA sense strand
gcgcuuuccuuucugucaa

SEQ ID NO: 73013 - RNA, 19 nt, Homo sapiens
  misc_RNA (1)...(19): siRNA sense strand
ccgcaucucuacauucaag

SEQ ID NO: 73014 - RNA, 19 nt, Homo sapiens
  misc_RNA (1)...(19): siRNA sense strand
ggaaaccaacaauaagaag

SEQ ID NO: 73015 - RNA, 19 nt, Homo sapiens
  misc_RNA (1)...(19): siRNA sense strand
ugagaacgagccagacuug

SEQ ID NO: 73016 - RNA, 19 nt, Homo sapiens
  misc_RNA (1)...(19): siRNA sense strand
gaaagagccaagaacaaaa

SEQ ID NO: 73017 - RNA, 19 nt, Homo sapiens
  misc_RNA (1)...(19): siRNA sense strand
aaaggaaaccaacaauaag

SEQ ID NO: 73018 - RNA, 19 nt, Homo sapiens
  misc_RNA (1)...(19): siRNA sense strand
aagaagcaguuugaagaau

SEQ ID NO: 73019 - RNA, 19 nt, Homo sapiens
  misc_RNA (1)...(19): siRNA sense strand
aaggaaaccaacaauaaga

SEQ ID NO: 73020 - RNA, 19 nt, Homo sapiens
  misc_RNA (1)...(19): siRNA sense strand
auuaacccuuggugaauuu

SEQ ID NO: 73021 - RNA, 19 nt, Homo sapiens
  misc_RNA (1)...(19): siRNA sense strand
agagaaagagccaagaaca

SEQ ID NO: 73022 - RNA, 19 nt, Homo sapiens
  misc_RNA (1)...(19): siRNA sense strand
gaccaccgcaucucuacau

SEQ ID NO: 73023 - RNA, 19 nt, Homo sapiens
  misc_RNA (1)...(19): siRNA sense strand
gcaucucuacauucaagaa

SEQ ID NO: 73024 - RNA, 19 nt, Homo sapiens
  misc_RNA (1)...(19): siRNA sense strand
acagagaaagagccaagaa

SEQ ID NO: 73025 - RNA, 19 nt, Homo sapiens
  misc_RNA (1)...(19): siRNA sense strand
ggaaacugcgaagaaagug

SEQ ID NO: 73026 - RNA, 19 nt, Homo sapiens
  misc_RNA (1)...(19): siRNA sense strand
gaggaaacugcgaagaaag

SEQ ID NO: 73027 - RNA, 19 nt, Homo sapiens
  misc_RNA (1)...(19): siRNA sense strand
cgguugcgcuuuccuuucu

SEQ ID NO: 73028 - RNA, 19 nt, Homo sapiens
  misc_RNA (1)...(19): siRNA sense strand
cagacuuggcccaguguuu

SEQ ID NO: 73029 - RNA, 19 nt, Homo sapiens
  misc_RNA (1)...(19): siRNA sense strand
agaacaaaauugcaaagga

SEQ ID NO: 73030 - RNA, 19 nt, Homo sapiens
  misc_RNA (1)...(19): siRNA sense strand
caguguuucuucugcuuca

SEQ ID NO: 73031 - RNA, 19 nt, Homo sapiens
  misc_RNA (1)...(19): siRNA sense strand
ucucuacauucaagaacug

SEQ ID NO: 73032 - RNA, 19 nt, Homo sapiens
  misc_RNA (1)...(19): siRNA sense strand
uugaggaaacugcgaagaa

SEQ ID NO: 73033 - RNA, 19 nt, Homo sapiens
  misc_RNA (1)...(19): siRNA sense strand
aggaaaccaacaauaagaa

SEQ ID NO: 73034 - RNA, 19 nt, Homo sapiens
  misc_RNA (1)...(19): siRNA sense strand
agacuuggcccaguguuuc

SEQ ID NO: 73035 - RNA, 19 nt, Homo sapiens
  misc_RNA (1)...(19): siRNA sense strand
gaggagagguucuggaaug

SEQ ID NO: 73036 - RNA, 19 nt, Homo sapiens
  misc_RNA (1)...(19): siRNA sense strand
gcucugcucucuucaucuu

SEQ ID NO: 73037 - RNA, 19 nt, Homo sapiens
  misc_RNA (1)...(19): siRNA sense strand
gcugggcucugcucucuuc

SEQ ID NO: 73038 - RNA, 19 nt, Homo sapiens
  misc_RNA (1)...(19): siRNA sense strand
cucauuaggugcuucauug

SEQ ID NO: 73039 - RNA, 19 nt, Homo sapiens
  misc_RNA (1)...(19): siRNA sense strand
gagagguucuggaaugcau

SEQ ID NO: 73040 - RNA, 19 nt, Homo sapiens
  misc_RNA (1)...(19): siRNA sense strand
gggcucugcucucuucauc

SEQ ID NO: 73041 - RNA, 19 nt, Homo sapiens
  misc_RNA (1)...(19): siRNA sense strand
gagagauagccauguguga

SEQ ID NO: 73042 - RNA, 19 nt, Homo sapiens
  misc_RNA (1)...(19): siRNA sense strand
gagccugaauuuggcaaug

SEQ ID NO: 73043 - RNA, 19 nt, Homo sapiens
  misc_RNA (1)...(19): siRNA sense strand
gguggcgaguguccuggua

SEQ ID NO: 73044 - RNA, 19 nt, Homo sapiens
  misc_RNA (1)...(19): siRNA sense strand
cuuguuggacugcucauua

SEQ ID NO: 73045 - RNA, 19 nt, Homo sapiens
  misc_RNA (1)...(19): siRNA sense strand
gcagccaugucuggucgaa

SEQ ID NO: 73046 - RNA, 19 nt, Homo sapiens
  misc_RNA (1)...(19): siRNA sense strand
ucuggaggcugcaugaauc

SEQ ID NO: 73047 - RNA, 19 nt, Homo sapiens
  misc_RNA (1)...(19): siRNA sense strand
gccugucggucauugagaa

SEQ ID NO: 73048 - RNA, 19 nt, Homo sapiens
  misc_RNA (1)...(19): siRNA sense strand
gggcguugguggcagagau

SEQ ID NO: 73049 - RNA, 19 nt, Homo sapiens
  misc_RNA (1)...(19): siRNA sense strand
gcucauuaggugcuucauu

SEQ ID NO: 73050 - RNA, 19 nt, Homo sapiens
  misc_RNA (1)...(19): siRNA sense strand
caugugugagccugaauuu

SEQ ID NO: 73051 - RNA, 19 nt, Homo sapiens
  misc_RNA (1)...(19): siRNA sense strand
gcgaguguccugguacgaa

SEQ ID NO: 73052 - RNA, 19 nt, Homo sapiens
  misc_RNA (1)...(19): siRNA sense strand
cuggagagauagccaugug

SEQ ID NO: 73053 - RNA, 19 nt, Homo sapiens
  misc_RNA (1)...(19): siRNA sense strand
ugggugccaucaaugagaa

SEQ ID NO: 73054 - RNA, 19 nt, Homo sapiens
  misc_RNA (1)...(19): siRNA sense strand
ugugugagccugaauuugg

SEQ ID NO: 73055 - RNA, 19 nt, Homo sapiens
  misc_RNA (1)...(19): siRNA sense strand
ccaucaaugagaagacaaa

SEQ ID NO: 73056 - RNA, 19 nt, Homo sapiens
  misc_RNA (1)...(19): siRNA sense strand
agacccgccucauccugaa

SEQ ID NO: 73057 - RNA, 19 nt, Homo sapiens
  misc_RNA (1)...(19): siRNA sense strand
gaacgcagcugugaccuuu

SEQ ID NO: 73058 - RNA, 19 nt, Homo sapiens
  misc_RNA (1)...(19): siRNA sense strand
gcaaacaggucuucagcaa

SEQ ID NO: 73059 - RNA, 19 nt, Homo sapiens
  misc_RNA (1)...(19): siRNA sense strand
gcacauaugucaugauggu

SEQ ID NO: 73060 - RNA, 19 nt, Homo sapiens
  misc_RNA (1)...(19): siRNA sense strand
aaacaggucuucagcaaug

SEQ ID NO: 73061 - RNA, 19 nt, Homo sapiens
  misc_RNA (1)...(19): siRNA sense strand
gagcacauaugucaugaug

SEQ ID NO: 73062 - RNA, 19 nt, Homo sapiens
  misc_RNA (1)...(19): siRNA sense strand
uagcaaagauccaggaaau

SEQ ID NO: 73063 - RNA, 19 nt, Homo sapiens
  misc_RNA (1)...(19): siRNA sense strand
gaacagaggcgcuggugau

SEQ ID NO: 73064 - RNA, 19 nt, Homo sapiens
  misc_RNA (1)...(19): siRNA sense strand
gcccauaugguucuaaaua

SEQ ID NO: 73065 - RNA, 19 nt, Homo sapiens
  misc_RNA (1)...(19): siRNA sense strand
ccaccuaccuuccugauca

SEQ ID NO: 73066 - RNA, 19 nt, Homo sapiens
  misc_RNA (1)...(19): siRNA sense strand
gcaaagauccaggaaauac

SEQ ID NO: 73067 - RNA, 19 nt, Homo sapiens
  misc_RNA (1)...(19): siRNA sense strand
gaaauacugcagaggaaga

SEQ ID NO: 73068 - RNA, 19 nt, Homo sapiens
  misc_RNA (1)...(19): siRNA sense strand
cccauaugguucuaaauaa

SEQ ID NO: 73069 - RNA, 19 nt, Homo sapiens
  misc_RNA (1)...(19): siRNA sense strand
gagaguuccuggccgaguu

SEQ ID NO: 73070 - RNA, 19 nt, Homo sapiens
  misc_RNA (1)...(19): siRNA sense strand
guaugaagaccacgggaua

SEQ ID NO: 73071 - RNA, 19 nt, Homo sapiens
  misc_RNA (1)...(19): siRNA sense strand
ggaagauggugcgagaguu

SEQ ID NO: 73072 - RNA, 19 nt, Homo sapiens
  misc_RNA (1)...(19): siRNA sense strand
gaagauggugcgagaguuc

SEQ ID NO: 73073 - RNA, 19 nt, Homo sapiens
  misc_RNA (1)...(19): siRNA sense strand
ggagcuaccuuggugucaa

SEQ ID NO: 73074 - RNA, 19 nt, Homo sapiens
  misc_RNA (1)...(19): siRNA sense strand
cauaugucaugaugguauu

SEQ ID NO: 73075 - RNA, 19 nt, Homo sapiens
  misc_RNA (1)...(19): siRNA sense strand
ggaggauucuguggcguau

SEQ ID NO: 73076 - RNA, 19 nt, Homo sapiens
  misc_RNA (1)...(19): siRNA sense strand
cagaggcgcuggugauagg

SEQ ID NO: 73077 - RNA, 19 nt, Homo sapiens
  misc_RNA (1)...(19): siRNA sense strand
cuaccuuggugucaacuug

SEQ ID NO: 73078 - RNA, 19 nt, Homo sapiens
  misc_RNA (1)...(19): siRNA sense strand
aggauucuguggcguauga

SEQ ID NO: 73079 - RNA, 19 nt, Homo sapiens
  misc_RNA (1)...(19): siRNA sense strand
ucacggaccaggagaacaa

SEQ ID NO: 73080 - RNA, 19 nt, Homo sapiens
  misc_RNA (1)...(19): siRNA sense strand
caucuacagucucuucuac

SEQ ID NO: 73081 - RNA, 19 nt, Homo sapiens
  misc_RNA (1)...(19): siRNA sense strand
gcugugaccuuugcuaacu

SEQ ID NO: 73082 - RNA, 19 nt, Homo sapiens
  misc_RNA (1)...(19): siRNA sense strand
ugugagcccugccaacaga

SEQ ID NO: 73083 - RNA, 19 nt, Homo sapiens
  misc_RNA (1)...(19): siRNA sense strand
gaaguuuccggucuaugug

SEQ ID NO: 73084 - RNA, 19 nt, Homo sapiens
  misc_RNA (1)...(19): siRNA sense strand
aggaaauacugcagaggaa

SEQ ID NO: 73085 - RNA, 19 nt, Homo sapiens
  misc_RNA (1)...(19): siRNA sense strand
cuaccuuccugaucacaug

SEQ ID NO: 73086 - RNA, 19 nt, Homo sapiens
  misc_RNA (1)...(19): siRNA sense strand
acacggccauucuccacuu

SEQ ID NO: 73087 - RNA, 19 nt, Homo sapiens
  misc_RNA (1)...(19): siRNA sense strand
gagcuaccuuggugucaac

SEQ ID NO: 73088 - RNA, 19 nt, Homo sapiens
  misc_RNA (1)...(19): siRNA sense strand
cagcugugaccuuugcuaa

SEQ ID NO: 73089 - RNA, 19 nt, Homo sapiens
  misc_RNA (1)...(19): siRNA sense strand
ccgaguucaugagcacaua

SEQ ID NO: 73090 - RNA, 19 nt, Homo sapiens
  misc_RNA (1)...(19): siRNA sense strand
ugaaauuggaggauucugu

SEQ ID NO: 73091 - RNA, 19 nt, Homo sapiens
  misc_RNA (1)...(19): siRNA sense strand
cuaucuagguggcaucauc

SEQ ID NO: 73092 - RNA, 19 nt, Homo sapiens
  misc_RNA (1)...(19): siRNA sense strand
cacaggauaugccaucaac

SEQ ID NO: 73093 - RNA, 19 nt, Homo sapiens
  misc_RNA (1)...(19): siRNA sense strand
gauagcaaagauccaggaa

SEQ ID NO: 73094 - RNA, 19 nt, Homo sapiens
  misc_RNA (1)...(19): siRNA sense strand
caaacaggucuucagcaau

SEQ ID NO: 73095 - RNA, 19 nt, Homo sapiens
  misc_RNA (1)...(19): siRNA sense strand
ccugguccgugauagcaaa

SEQ ID NO: 73096 - RNA, 19 nt, Homo sapiens
  misc_RNA (1)...(19): siRNA sense strand
ggucuccugguccgugaua

SEQ ID NO: 73097 - RNA, 19 nt, Homo sapiens
  misc_RNA (1)...(19): siRNA sense strand
ucaucuaccuggucuucau

SEQ ID NO: 73098 - RNA, 19 nt, Homo sapiens
  misc_RNA (1)...(19): siRNA sense strand
gcagcugugaccuuugcua

SEQ ID NO: 73099 - RNA, 19 nt, Homo sapiens
  misc_RNA (1)...(19): siRNA sense strand
ccauggcccuagagcacuu

SEQ ID NO: 73100 - RNA, 19 nt, Homo sapiens
  misc_RNA (1)...(19): siRNA sense strand
gggugucccuuggcaugaa

SEQ ID NO: 73101 - RNA, 19 nt, Homo sapiens
  misc_RNA (1)...(19): siRNA sense strand
gguccgugauagcaaagau

SEQ ID NO: 73102 - RNA, 19 nt, Homo sapiens
  misc_RNA (1)...(19): siRNA sense strand
uaaccguauugcccaagau

SEQ ID NO: 73103 - RNA, 19 nt, Homo sapiens
  misc_RNA (1)...(19): siRNA sense strand
uggcccauaugguucuaaa

SEQ ID NO: 73104 - RNA, 19 nt, Homo sapiens
  misc_RNA (1)...(19): siRNA sense strand
uaugaagaccacgggauaa

SEQ ID NO: 73105 - RNA, 19 nt, Homo sapiens
  misc_RNA (1)...(19): siRNA sense strand
aaagauccaggaaauacug

SEQ ID NO: 73106 - RNA, 19 nt, Homo sapiens
  misc_RNA (1)...(19): siRNA sense strand
acauaugucaugaugguau

SEQ ID NO: 73107 - RNA, 19 nt, Homo sapiens
  misc_RNA (1)...(19): siRNA sense strand
ggcaugaacacaggauaug

SEQ ID NO: 73108 - RNA, 19 nt, Homo sapiens
  misc_RNA (1)...(19): siRNA sense strand
caaagauccaggaaauacu

SEQ ID NO: 73109 - RNA, 19 nt, Homo sapiens
  misc_RNA (1)...(19): siRNA sense strand
caucaucuaccuggucuuc

SEQ ID NO: 73110 - RNA, 19 nt, Homo sapiens
  misc_RNA (1)...(19): siRNA sense strand
ccugaucacaugacauugu

SEQ ID NO: 73111 - RNA, 19 nt, Homo sapiens
  misc_RNA (1)...(19): siRNA sense strand
gaucaaaccuuguaucucu

SEQ ID NO: 73112 - RNA, 19 nt, Homo sapiens
  misc_RNA (1)...(19): siRNA sense strand
ucagagaacuacaggauaa

SEQ ID NO: 73113 - RNA, 19 nt, Homo sapiens
  misc_RNA (1)...(19): siRNA sense strand
gaacuaugauauccaguau

SEQ ID NO: 73114 - RNA, 19 nt, Homo sapiens
  misc_RNA (1)...(19): siRNA sense strand
ggacuaaccuaucgagaag

SEQ ID NO: 73115 - RNA, 19 nt, Homo sapiens
  misc_RNA (1)...(19): siRNA sense strand
gcaaguauuguguauauug

SEQ ID NO: 73116 - RNA, 19 nt, Homo sapiens
  misc_RNA (1)...(19): siRNA sense strand
cgagaaggcauguauauug

SEQ ID NO: 73117 - RNA, 19 nt, Homo sapiens
  misc_RNA (1)...(19): siRNA sense strand
ugaaaaggcucuccaguuu

SEQ ID NO: 73118 - RNA, 19 nt, Homo sapiens
  misc_RNA (1)...(19): siRNA sense strand
ggaacuggcugaggugguu

SEQ ID NO: 73119 - RNA, 19 nt, Homo sapiens
  misc_RNA (1)...(19): siRNA sense strand
gacaaagaccaauccauuu

SEQ ID NO: 73120 - RNA, 19 nt, Homo sapiens
  misc_RNA (1)...(19): siRNA sense strand
ugaagucaauccucaguug

SEQ ID NO: 73121 - RNA, 19 nt, Homo sapiens
  misc_RNA (1)...(19): siRNA sense strand
ggucauggaacgaacauuu

SEQ ID NO: 73122 - RNA, 19 nt, Homo sapiens
  misc_RNA (1)...(19): siRNA sense strand
cagcuaaccuggcaguaga

SEQ ID NO: 73123 - RNA, 19 nt, Homo sapiens
  misc_RNA (1)...(19): siRNA sense strand
agacaaagaccaauccauu

SEQ ID NO: 73124 - RNA, 19 nt, Homo sapiens
  misc_RNA (1)...(19): siRNA sense strand
gagaaggcauguauauugc

SEQ ID NO: 73125 - RNA, 19 nt, Homo sapiens
  misc_RNA (1)...(19): siRNA sense strand
acaacaaccugauagugaa

SEQ ID NO: 73126 - RNA, 19 nt, Homo sapiens
  misc_RNA (1)...(19): siRNA sense strand
uagcagagcugugucagau

SEQ ID NO: 73127 - RNA, 19 nt, Homo sapiens
  misc_RNA (1)...(19): siRNA sense strand
cugcaaguauuguguauau

SEQ ID NO: 73128 - RNA, 19 nt, Homo sapiens
  misc_RNA (1)...(19): siRNA sense strand
ggacagccaguuucauuuc

SEQ ID NO: 73129 - RNA, 19 nt, Homo sapiens
  misc_RNA (1)...(19): siRNA sense strand
uaucagcacuggaucuugu

SEQ ID NO: 73130 - RNA, 19 nt, Homo sapiens
  misc_RNA (1)...(19): siRNA sense strand
gauauugaucgacuuggua

SEQ ID NO: 73131 - RNA, 19 nt, Homo sapiens
  misc_RNA (1)...(19): siRNA sense strand
gaccaauccauuugaguuu

SEQ ID NO: 73132 - RNA, 19 nt, Homo sapiens
  misc_RNA (1)...(19): siRNA sense strand
uaccacaacucccaggauu

SEQ ID NO: 73133 - RNA, 19 nt, Homo sapiens
  misc_RNA (1)...(19): siRNA sense strand
gcugaggaaauacacaaua

SEQ ID NO: 73134 - RNA, 19 nt, Homo sapiens
  misc_RNA (1)...(19): siRNA sense strand
caugagagauauugaucga

SEQ ID NO: 73135 - RNA, 19 nt, Homo sapiens
  misc_RNA (1)...(19): siRNA sense strand
gggacuaaccuaucgagaa

SEQ ID NO: 73136 - RNA, 19 nt, Homo sapiens
  misc_RNA (1)...(19): siRNA sense strand
aagcacgugugagaauuua

SEQ ID NO: 73137 - RNA, 19 nt, Homo sapiens
  misc_RNA (1)...(19): siRNA sense strand
gcccagaccuuuguguugu

SEQ ID NO: 73138 - RNA, 19 nt, Homo sapiens
  misc_RNA (1)...(19): siRNA sense strand
ucaagcacgugugagaauu

SEQ ID NO: 73139 - RNA, 19 nt, Homo sapiens
  misc_RNA (1)...(19): siRNA sense strand
uacaacaaccugauaguga

SEQ ID NO: 73140 - RNA, 19 nt, Homo sapiens
  misc_RNA (1)...(19): siRNA sense strand
ggaacgaacauuugaucug

SEQ ID NO: 73141 - RNA, 19 nt, Homo sapiens
  misc_RNA (1)...(19): siRNA sense strand
caaguauuguguauauugg

SEQ ID NO: 73142 - RNA, 19 nt, Homo sapiens
  misc_RNA (1)...(19): siRNA sense strand
cauuugaucugcugauugg

SEQ ID NO: 73143 - RNA, 19 nt, Homo sapiens
  misc_RNA (1)...(19): siRNA sense strand
gaaaaucaagcacguguga

SEQ ID NO: 73144 - RNA, 19 nt, Homo sapiens
  misc_RNA (1)...(19): siRNA sense strand
caagcacgugugagaauuu

SEQ ID NO: 73145 - RNA, 19 nt, Homo sapiens
  misc_RNA (1)...(19): siRNA sense strand
ggcaaucgguaccauuagu

SEQ ID NO: 73146 - RNA, 19 nt, Homo sapiens
  misc_RNA (1)...(19): siRNA sense strand
gaaggagggcauauugucu

SEQ ID NO: 73147 - RNA, 19 nt, Homo sapiens
  misc_RNA (1)...(19): siRNA sense strand
gagagauauugaucgacuu

SEQ ID NO: 73148 - RNA, 19 nt, Homo sapiens
  misc_RNA (1)...(19): siRNA sense strand
ccuuguaucucuucugcaa

SEQ ID NO: 73149 - RNA, 19 nt, Homo sapiens
  misc_RNA (1)...(19): siRNA sense strand
gagaaggagggcauauugu

SEQ ID NO: 73150 - RNA, 19 nt, Homo sapiens
  misc_RNA (1)...(19): siRNA sense strand
agagaaggagggcauauug

SEQ ID NO: 73151 - RNA, 19 nt, Homo sapiens
  misc_RNA (1)...(19): siRNA sense strand
uaucucuucugcaaguauu

SEQ ID NO: 73152 - RNA, 19 nt, Homo sapiens
  misc_RNA (1)...(19): siRNA sense strand
gaacauuugaucugcugau

SEQ ID NO: 73153 - RNA, 19 nt, Homo sapiens
  misc_RNA (1)...(19): siRNA sense strand
agaacuaugauauccagua

SEQ ID NO: 73154 - RNA, 19 nt, Homo sapiens
  misc_RNA (1)...(19): siRNA sense strand
gaggaagaggcgaagacua

SEQ ID NO: 73155 - RNA, 19 nt, Homo sapiens
  misc_RNA (1)...(19): siRNA sense strand
ggcaagagacaaagaccaa

SEQ ID NO: 73156 - RNA, 19 nt, Homo sapiens
  misc_RNA (1)...(19): siRNA sense strand
gaacuggcugaggugguua

SEQ ID NO: 73157 - RNA, 19 nt, Homo sapiens
  misc_RNA (1)...(19): siRNA sense strand
gcaaucgguaccauuagug

SEQ ID NO: 73158 - RNA, 19 nt, Homo sapiens
  misc_RNA (1)...(19): siRNA sense strand
aggcgaagacuacagcuaa

SEQ ID NO: 73159 - RNA, 19 nt, Homo sapiens
  misc_RNA (1)...(19): siRNA sense strand
agaacuacaggauaaggua

SEQ ID NO: 73160 - RNA, 19 nt, Homo sapiens
  misc_RNA (1)...(19): siRNA sense strand
ggacccuccugaacauuuu

SEQ ID NO: 73161 - RNA, 19 nt, Homo sapiens
  misc_RNA (1)...(19): siRNA sense strand
uagaugugauugcuucaag

SEQ ID NO: 73162 - RNA, 19 nt, Homo sapiens
  misc_RNA (1)...(19): siRNA sense strand
uaaccuggcaguagaugug

SEQ ID NO: 73163 - RNA, 19 nt, Homo sapiens
  misc_RNA (1)...(19): siRNA sense strand
aguuugggcugccaccuaa

SEQ ID NO: 73164 - RNA, 19 nt, Homo sapiens
  misc_RNA (1)...(19): siRNA sense strand
cacuggaucuuguugaagu

SEQ ID NO: 73165 - RNA, 19 nt, Homo sapiens
  misc_RNA (1)...(19): siRNA sense strand
caagagacaaagaccaauc

SEQ ID NO: 73166 - RNA, 19 nt, Homo sapiens
  misc_RNA (1)...(19): siRNA sense strand
gacagccaguuucauuucu

SEQ ID NO: 73167 - RNA, 19 nt, Homo sapiens
  misc_RNA (1)...(19): siRNA sense strand
ugcauuccauccugaagaa

SEQ ID NO: 73168 - RNA, 19 nt, Homo sapiens
  misc_RNA (1)...(19): siRNA sense strand
gaggaaauacacaauacag

SEQ ID NO: 73169 - RNA, 19 nt, Homo sapiens
  misc_RNA (1)...(19): siRNA sense strand
agaccaauccauuugaguu

SEQ ID NO: 73170 - RNA, 19 nt, Homo sapiens
  misc_RNA (1)...(19): siRNA sense strand
cgacacugcccagaccuuu

SEQ ID NO: 73171 - RNA, 19 nt, Homo sapiens
  misc_RNA (1)...(19): siRNA sense strand
caauacaggguugcuauca

SEQ ID NO: 73172 - RNA, 19 nt, Homo sapiens
  misc_RNA (1)...(19): siRNA sense strand
aaagaccaauccauuugag

SEQ ID NO: 73173 - RNA, 19 nt, Homo sapiens
  misc_RNA (1)...(19): siRNA sense strand
gaaaaggcucuccaguuug

SEQ ID NO: 73174 - RNA, 19 nt, Homo sapiens
  misc_RNA (1)...(19): siRNA sense strand
aaaucaagcacgugugaga

SEQ ID NO: 73175 - RNA, 19 nt, Homo sapiens
  misc_RNA (1)...(19): siRNA sense strand
uauugucuaugaccaacuu

SEQ ID NO: 73176 - RNA, 19 nt, Homo sapiens
  misc_RNA (1)...(19): siRNA sense strand
cugaggaaauacacaauac

SEQ ID NO: 73177 - RNA, 19 nt, Homo sapiens
  misc_RNA (1)...(19): siRNA sense strand
caacaaccugauagugaau

SEQ ID NO: 73178 - RNA, 19 nt, Homo sapiens
  misc_RNA (1)...(19): siRNA sense strand
uaucgagaaggcauguaua

SEQ ID NO: 73179 - RNA, 19 nt, Homo sapiens
  misc_RNA (1)...(19): siRNA sense strand
ucauggaacgaacauuuga

SEQ ID NO: 73180 - RNA, 19 nt, Homo sapiens
  misc_RNA (1)...(19): siRNA sense strand
cuggcaaucgguaccauua

SEQ ID NO: 73181 - RNA, 19 nt, Homo sapiens
  misc_RNA (1)...(19): siRNA sense strand
cacaauacaggguugcuau

SEQ ID NO: 73182 - RNA, 19 nt, Homo sapiens
  misc_RNA (1)...(19): siRNA sense strand
gaaggucauggaacgaaca

SEQ ID NO: 73183 - RNA, 19 nt, Homo sapiens
  misc_RNA (1)...(19): siRNA sense strand
ccucagagaacuacaggau

SEQ ID NO: 73184 - RNA, 19 nt, Homo sapiens
  misc_RNA (1)...(19): siRNA sense strand
gaggcgaagacuacagcua

SEQ ID NO: 73185 - RNA, 19 nt, Homo sapiens
  misc_RNA (1)...(19): siRNA sense strand
caagagaaggagggcauau

SEQ ID NO: 73186 - RNA, 19 nt, Homo sapiens
  misc_RNA (1)...(19): siRNA sense strand
gaccacagccuggcaaucg

SEQ ID NO: 73187 - RNA, 19 nt, Homo sapiens
  misc_RNA (1)...(19): siRNA sense strand
aaggagggcauauugucua

SEQ ID NO: 73188 - RNA, 19 nt, Homo sapiens
  misc_RNA (1)...(19): siRNA sense strand
ucucuacaacaaccugaua

SEQ ID NO: 73189 - RNA, 19 nt, Homo sapiens
  misc_RNA (1)...(19): siRNA sense strand
ccacaacucccaggauuuu

SEQ ID NO: 73190 - RNA, 19 nt, Homo sapiens
  misc_RNA (1)...(19): siRNA sense strand
cauguauauugcugaggaa

SEQ ID NO: 73191 - RNA, 19 nt, Homo sapiens
  misc_RNA (1)...(19): siRNA sense strand
cagaaggucauggaacgaa

SEQ ID NO: 73192 - RNA, 19 nt, Homo sapiens
  misc_RNA (1)...(19): siRNA sense strand
cguggacccuccugaacau

SEQ ID NO: 73193 - RNA, 19 nt, Homo sapiens
  misc_RNA (1)...(19): siRNA sense strand
gagaacuacaggauaaggu

SEQ ID NO: 73194 - RNA, 19 nt, Homo sapiens
  misc_RNA (1)...(19): siRNA sense strand
gcaguagaugugauugcuu

SEQ ID NO: 73195 - RNA, 19 nt, Homo sapiens
  misc_RNA (1)...(19): siRNA sense strand
cuacaacaaccugauagug

SEQ ID NO: 73196 - RNA, 19 nt, Homo sapiens
  misc_RNA (1)...(19): siRNA sense strand
gcuaucagcacuggaucuu

SEQ ID NO: 73197 - RNA, 19 nt, Homo sapiens
  misc_RNA (1)...(19): siRNA sense strand
gcaagagacaaagaccaau

SEQ ID NO: 73198 - RNA, 19 nt, Homo sapiens
  misc_RNA (1)...(19): siRNA sense strand
gacuugguauccagaaggu

SEQ ID NO: 73199 - RNA, 19 nt, Homo sapiens
  misc_RNA (1)...(19): siRNA sense strand
gacaucaacacaccccuua

SEQ ID NO: 73200 - RNA, 19 nt, Homo sapiens
  misc_RNA (1)...(19): siRNA sense strand
ggcaguagaugugauugcu

SEQ ID NO: 73201 - RNA, 19 nt, Homo sapiens
  misc_RNA (1)...(19): siRNA sense strand
ggaagaggcgaagacuaca

SEQ ID NO: 73202 - RNA, 19 nt, Homo sapiens
  misc_RNA (1)...(19): siRNA sense strand
gugcauuccauccugaaga

SEQ ID NO: 73203 - RNA, 19 nt, Homo sapiens
  misc_RNA (1)...(19): siRNA sense strand
gucauggaacgaacauuug

SEQ ID NO: 73204 - RNA, 19 nt, Homo sapiens
  misc_RNA (1)...(19): siRNA sense strand
aaaaggcucuccaguuugg

SEQ ID NO: 73205 - RNA, 19 nt, Homo sapiens
  misc_RNA (1)...(19): siRNA sense strand
aacauuugaucugcugauu

SEQ ID NO: 73206 - RNA, 19 nt, Homo sapiens
  misc_RNA (1)...(19): siRNA sense strand
aggagggcauauugucuau

SEQ ID NO: 73207 - RNA, 19 nt, Homo sapiens
  misc_RNA (1)...(19): siRNA sense strand
agaaggagggcauauuguc

SEQ ID NO: 73208 - RNA, 19 nt, Homo sapiens
  misc_RNA (1)...(19): siRNA sense strand
gaagaggcgaagacuacag

SEQ ID NO: 73209 - RNA, 19 nt, Homo sapiens
  misc_RNA (1)...(19): siRNA sense strand
ugauauugaugcauuugac

SEQ ID NO: 73210 - RNA, 19 nt, Homo sapiens
  misc_RNA (1)...(19): siRNA sense strand
gauaggagccccguucuca

SEQ ID NO: 73211 - RNA, 19 nt, Homo sapiens
  misc_RNA (1)...(19): siRNA sense strand
gaaguuaugugcuuuguua

SEQ ID NO: 73212 - RNA, 19 nt, Homo sapiens
  misc_RNA (1)...(19): siRNA sense strand
gagagcagauuuccaguua

SEQ ID NO: 73213 - RNA, 19 nt, Homo sapiens
  misc_RNA (1)...(19): siRNA sense strand
ggaugaaacugaccauaua

SEQ ID NO: 73214 - RNA, 19 nt, Homo sapiens
  misc_RNA (1)...(19): siRNA sense strand
gaugagaccugauuugaaa

SEQ ID NO: 73215 - RNA, 19 nt, Homo sapiens
  misc_RNA (1)...(19): siRNA sense strand
caacugagaucacugcuaa

SEQ ID NO: 73216 - RNA, 19 nt, Homo sapiens
  misc_RNA (1)...(19): siRNA sense strand
gaacaagacuuugaacaga

SEQ ID NO: 73217 - RNA, 19 nt, Homo sapiens
  misc_RNA (1)...(19): siRNA sense strand
gaagcugacuugagaauug

SEQ ID NO: 73218 - RNA, 19 nt, Homo sapiens
  misc_RNA (1)...(19): siRNA sense strand
ugagaucacugcuaaauuu

SEQ ID NO: 73219 - RNA, 19 nt, Homo sapiens
  misc_RNA (1)...(19): siRNA sense strand
gaugaagccuacaaauaua

SEQ ID NO: 73220 - RNA, 19 nt, Homo sapiens
  misc_RNA (1)...(19): siRNA sense strand
ggaaaugaguauccuauuc

SEQ ID NO: 73221 - RNA, 19 nt, Homo sapiens
  misc_RNA (1)...(19): siRNA sense strand
gaaccuagauauaaagcuu

SEQ ID NO: 73222 - RNA, 19 nt, Homo sapiens
  misc_RNA (1)...(19): siRNA sense strand
gagaacacauugcaacuga

SEQ ID NO: 73223 - RNA, 19 nt, Homo sapiens
  misc_RNA (1)...(19): siRNA sense strand
ggaugaagccuacaaauau

SEQ ID NO: 73224 - RNA, 19 nt, Homo sapiens
  misc_RNA (1)...(19): siRNA sense strand
guacgaauuugcaaccaua

SEQ ID NO: 73225 - RNA, 19 nt, Homo sapiens
  misc_RNA (1)...(19): siRNA sense strand
ggaguuagaugauaagaag

SEQ ID NO: 73226 - RNA, 19 nt, Homo sapiens
  misc_RNA (1)...(19): siRNA sense strand
ugaaagcgcucguuccaaa

SEQ ID NO: 73227 - RNA, 19 nt, Homo sapiens
  misc_RNA (1)...(19): siRNA sense strand
gucagaagcuuugaaguua

SEQ ID NO: 73228 - RNA, 19 nt, Homo sapiens
  misc_RNA (1)...(19): siRNA sense strand
guacauauccucguaaauu

SEQ ID NO: 73229 - RNA, 19 nt, Homo sapiens
  misc_RNA (1)...(19): siRNA sense strand
gaauaaaacugaccaagaa

SEQ ID NO: 73230 - RNA, 19 nt, Homo sapiens
  misc_RNA (1)...(19): siRNA sense strand
ucaaagaguuaaugacuga

SEQ ID NO: 73231 - RNA, 19 nt, Homo sapiens
  misc_RNA (1)...(19): siRNA sense strand
gaacuucaauccaccaaca

SEQ ID NO: 73232 - RNA, 19 nt, Homo sapiens
  misc_RNA (1)...(19): siRNA sense strand
gcagacaacuuauccaucu

SEQ ID NO: 73233 - RNA, 19 nt, Homo sapiens
  misc_RNA (1)...(19): siRNA sense strand
gagcagauuuccaguuaug

SEQ ID NO: 73234 - RNA, 19 nt, Homo sapiens
  misc_RNA (1)...(19): siRNA sense strand
ggaaaggugguauugauaa

SEQ ID NO: 73235 - RNA, 19 nt, Homo sapiens
  misc_RNA (1)...(19): siRNA sense strand
caaagaagaguuucaagaa

SEQ ID NO: 73236 - RNA, 19 nt, Homo sapiens
  misc_RNA (1)...(19): siRNA sense strand
gcugauacaaccacaauua

SEQ ID NO: 73237 - RNA, 19 nt, Homo sapiens
  misc_RNA (1)...(19): siRNA sense strand
uaaagugccuccaccuauu

SEQ ID NO: 73238 - RNA, 19 nt, Homo sapiens
  misc_RNA (1)...(19): siRNA sense strand
gaaaggugguauugauaau

SEQ ID NO: 73239 - RNA, 19 nt, Homo sapiens
  misc_RNA (1)...(19): siRNA sense strand
gaacaagaaaggccagaaa

SEQ ID NO: 73240 - RNA, 19 nt, Homo sapiens
  misc_RNA (1)...(19): siRNA sense strand
ggagagaagaguauauaaa

SEQ ID NO: 73241 - RNA, 19 nt, Homo sapiens
  misc_RNA (1)...(19): siRNA sense strand
gaaaugaguauccuauuca

SEQ ID NO: 73242 - RNA, 19 nt, Homo sapiens
  misc_RNA (1)...(19): siRNA sense strand
guuaaugacugaaggagaa

SEQ ID NO: 73243 - RNA, 19 nt, Homo sapiens
  misc_RNA (1)...(19): siRNA sense strand
gagauuaucaugcaacuug

SEQ ID NO: 73244 - RNA, 19 nt, Homo sapiens
  misc_RNA (1)...(19): siRNA sense strand
gugaagaaccuagauauaa

SEQ ID NO: 73245 - RNA, 19 nt, Homo sapiens
  misc_RNA (1)...(19): siRNA sense strand
gcaauaggaaguuugauga

SEQ ID NO: 73246 - RNA, 19 nt, Homo sapiens
  misc_RNA (1)...(19): siRNA sense strand
ggaaucaguuaaacacaau

SEQ ID NO: 73247 - RNA, 19 nt, Homo sapiens
  misc_RNA (1)...(19): siRNA sense strand
gaucauggccgcuuaagau

SEQ ID NO: 73248 - RNA, 19 nt, Homo sapiens
  misc_RNA (1)...(19): siRNA sense strand
guacuggggugacauaaua

SEQ ID NO: 73249 - RNA, 19 nt, Homo sapiens
  misc_RNA (1)...(19): siRNA sense strand
gaaauuucauccuguaaac

SEQ ID NO: 73250 - RNA, 19 nt, Homo sapiens
  misc_RNA (1)...(19): siRNA sense strand
gaccaggaguuagaugaua

SEQ ID NO: 73251 - RNA, 19 nt, Homo sapiens
  misc_RNA (1)...(19): siRNA sense strand
cccaagaacuagcaaauga

SEQ ID NO: 73252 - RNA, 19 nt, Homo sapiens
  misc_RNA (1)...(19): siRNA sense strand
aaacugaggucuuuacucu

SEQ ID NO: 73253 - RNA, 19 nt, Homo sapiens
  misc_RNA (1)...(19): siRNA sense strand
ucagagagauuccauuagu

SEQ ID NO: 73254 - RNA, 19 nt, Homo sapiens
  misc_RNA (1)...(19): siRNA sense strand
gagauuccauuaguaagaa

SEQ ID NO: 73255 - RNA, 19 nt, Homo sapiens
  misc_RNA (1)...(19): siRNA sense strand
gcaacuaaaugugaugaau

SEQ ID NO: 73256 - RNA, 19 nt, Homo sapiens
  misc_RNA (1)...(19): siRNA sense strand
gauuagauuuggaaggaaa

SEQ ID NO: 73257 - RNA, 19 nt, Homo sapiens
  misc_RNA (1)...(19): siRNA sense strand
ggaaucaacccaucaaagu

SEQ ID NO: 73258 - RNA, 19 nt, Homo sapiens
  misc_RNA (1)...(19): siRNA sense strand
gaaacacucagcgcaauaa

SEQ ID NO: 73259 - RNA, 19 nt, Homo sapiens
  misc_RNA (1)...(19): siRNA sense strand
gauaagaagaugaagaaga

SEQ ID NO: 73260 - RNA, 19 nt, Homo sapiens
  misc_RNA (1)...(19): siRNA sense strand
gggcuauucugaugagauu

SEQ ID NO: 73261 - RNA, 19 nt, Homo sapiens
  misc_RNA (1)...(19): siRNA sense strand
ggucagaagcuuugaaguu

SEQ ID NO: 73262 - RNA, 19 nt, Homo sapiens
  misc_RNA (1)...(19): siRNA sense strand
caaacagaguucauugaug

SEQ ID NO: 73263 - RNA, 19 nt, Homo sapiens
  misc_RNA (1)...(19): siRNA sense strand
cagagagauuccauuagua

SEQ ID NO: 73264 - RNA, 19 nt, Homo sapiens
  misc_RNA (1)...(19): siRNA sense strand
caacuuagagggaacaaga

SEQ ID NO: 73265 - RNA, 19 nt, Homo sapiens
  misc_RNA (1)...(19): siRNA sense strand
gaagagauugaacauuuga

SEQ ID NO: 73266 - RNA, 19 nt, Homo sapiens
  misc_RNA (1)...(19): siRNA sense strand
gaguuucugucuacuacua

SEQ ID NO: 73267 - RNA, 19 nt, Homo sapiens
  misc_RNA (1)...(19): siRNA sense strand
ucauaccacucuucaauug

SEQ ID NO: 73268 - RNA, 19 nt, Homo sapiens
  misc_RNA (1)...(19): siRNA sense strand
ggacacaauccacugauga

SEQ ID NO: 73269 - RNA, 19 nt, Homo sapiens
  misc_RNA (1)...(19): siRNA sense strand
ggaggaaguuaugugcuuu

SEQ ID NO: 73270 - RNA, 19 nt, Homo sapiens
  misc_RNA (1)...(19): siRNA sense strand
ggaaacacucagcgcaaua

SEQ ID NO: 73271 - RNA, 19 nt, Homo sapiens
  misc_RNA (1)...(19): siRNA sense strand
gaagcaccaccuccuuaua

SEQ ID NO: 73272 - RNA, 19 nt, Homo sapiens
  misc_RNA (1)...(19): siRNA sense strand
caacuuaaacaggaacaua

SEQ ID NO: 73273 - RNA, 19 nt, Homo sapiens
  misc_RNA (1)...(19): siRNA sense strand
ucagauacgugauaacaca

SEQ ID NO: 73274 - RNA, 19 nt, Homo sapiens
  misc_RNA (1)...(19): siRNA sense strand
uauugaagauacaggguua

SEQ ID NO: 73275 - RNA, 19 nt, Homo sapiens
  misc_RNA (1)...(19): siRNA sense strand
guagaaauugggaaaguaa

SEQ ID NO: 73276 - RNA, 19 nt, Homo sapiens
  misc_RNA (1)...(19): siRNA sense strand
gaagacaucguggaaguga

SEQ ID NO: 73277 - RNA, 19 nt, Homo sapiens
  misc_RNA (1)...(19): siRNA sense strand
gcuauucugaugagauuua

SEQ ID NO: 73278 - RNA, 19 nt, Homo sapiens
  misc_RNA (1)...(19): siRNA sense strand
cuaaaccaguuguaccuaa

SEQ ID NO: 73279 - RNA, 19 nt, Homo sapiens
  misc_RNA (1)...(19): siRNA sense strand
gaucacugcuaaauuuaca

SEQ ID NO: 73280 - RNA, 19 nt, Homo sapiens
  misc_RNA (1)...(19): siRNA sense strand
gagaucacugcuaaauuua

SEQ ID NO: 73281 - RNA, 19 nt, Homo sapiens
  misc_RNA (1)...(19): siRNA sense strand
gcgaauacagaucacaaua

SEQ ID NO: 73282 - RNA, 19 nt, Homo sapiens
  misc_RNA (1)...(19): siRNA sense strand
guuauggacugccgccuuu

SEQ ID NO: 73283 - RNA, 19 nt, Homo sapiens
  misc_RNA (1)...(19): siRNA sense strand
caaaugagauaaggacaca

SEQ ID NO: 73284 - RNA, 19 nt, Homo sapiens
  misc_RNA (1)...(19): siRNA sense strand
guaagucaaggaugcaaua

SEQ ID NO: 73285 - RNA, 19 nt, Homo sapiens
  misc_RNA (1)...(19): siRNA sense strand
guaaagccaagucauacua

SEQ ID NO: 73286 - RNA, 19 nt, Homo sapiens
  misc_RNA (1)...(19): siRNA sense strand
gauauggauccuucagaua

SEQ ID NO: 73287 - RNA, 19 nt, Homo sapiens
  misc_RNA (1)...(19): siRNA sense strand
gcugguacauauccucgua

SEQ ID NO: 73288 - RNA, 19 nt, Homo sapiens
  misc_RNA (1)...(19): siRNA sense strand
gggaggaaguuaugugcuu

SEQ ID NO: 73289 - RNA, 19 nt, Homo sapiens
  misc_RNA (1)...(19): siRNA sense strand
ucagaagcuuugaaguuaa

SEQ ID NO: 73290 - RNA, 19 nt, Homo sapiens
  misc_RNA (1)...(19): siRNA sense strand
acaagaaaggccagaaaua

SEQ ID NO: 73291 - RNA, 19 nt, Homo sapiens
  misc_RNA (1)...(19): siRNA sense strand
guagaaacgacaaacauug

SEQ ID NO: 73292 - RNA, 19 nt, Homo sapiens
  misc_RNA (1)...(19): siRNA sense strand
aaugacagcagacaacuua

SEQ ID NO: 73293 - RNA, 19 nt, Homo sapiens
  misc_RNA (1)...(19): siRNA sense strand
caauggaaguaacaguaaa

SEQ ID NO: 73294 - RNA, 19 nt, Homo sapiens
  misc_RNA (1)...(19): siRNA sense strand
gagaagcccauaccacuau

SEQ ID NO: 73295 - RNA, 19 nt, Homo sapiens
  misc_RNA (1)...(19): siRNA sense strand
gaacacauugcaacugaga

SEQ ID NO: 73296 - RNA, 19 nt, Homo sapiens
  misc_RNA (1)...(19): siRNA sense strand
caacaccuaguucagauaa

SEQ ID NO: 73297 - RNA, 19 nt, Homo sapiens
  misc_RNA (1)...(19): siRNA sense strand
gcuuugaaguuaauggaaa

SEQ ID NO: 73298 - RNA, 19 nt, Homo sapiens
  misc_RNA (1)...(19): siRNA sense strand
uuagagaaguucaggcauu

SEQ ID NO: 73299 - RNA, 19 nt, Homo sapiens
  misc_RNA (1)...(19): siRNA sense strand
gaagaaaacccacaaagug

SEQ ID NO: 73300 - RNA, 19 nt, Homo sapiens
  misc_RNA (1)...(19): siRNA sense strand
ccacuucuuucuccuguug

SEQ ID NO: 73301 - RNA, 19 nt, Homo sapiens
  misc_RNA (1)...(19): siRNA sense strand
gaagggcuauucugaugag

SEQ ID NO: 73302 - RNA, 19 nt, Homo sapiens
  misc_RNA (1)...(19): siRNA sense strand
uagauuagauuuggaagga

SEQ ID NO: 73303 - RNA, 19 nt, Homo sapiens
  misc_RNA (1)...(19): siRNA sense strand
guucauggguauauauuag

SEQ ID NO: 73304 - RNA, 19 nt, Homo sapiens
  misc_RNA (1)...(19): siRNA sense strand
gaaaggccagaaauacauu

SEQ ID NO: 73305 - RNA, 19 nt, Homo sapiens
  misc_RNA (1)...(19): siRNA sense strand
uagagaaguucaggcauuu

SEQ ID NO: 73306 - RNA, 19 nt, Homo sapiens
  misc_RNA (1)...(19): siRNA sense strand
ccaaagaagaguuucaaga

SEQ ID NO: 73307 - RNA, 19 nt, Homo sapiens
  misc_RNA (1)...(19): siRNA sense strand
aaacggauccucuugguau

SEQ ID NO: 73308 - RNA, 19 nt, Homo sapiens
  misc_RNA (1)...(19): siRNA sense strand
gauacaaccacaauuacaa

SEQ ID NO: 73309 - RNA, 19 nt, Homo sapiens
  misc_RNA (1)...(19): siRNA sense strand
ccaaggagaugaagaaaau

SEQ ID NO: 73310 - RNA, 19 nt, Homo sapiens
  misc_RNA (1)...(19): siRNA sense strand
cauggccgcuuaagauuau

SEQ ID NO: 73311 - RNA, 19 nt, Homo sapiens
  misc_RNA (1)...(19): siRNA sense strand
gaaagaaacuggauucacu

SEQ ID NO: 73312 - RNA, 19 nt, Homo sapiens
  misc_RNA (1)...(19): siRNA sense strand
gaaacuggauucacuagga

SEQ ID NO: 73313 - RNA, 19 nt, Homo sapiens
  misc_RNA (1)...(19): siRNA sense strand
aaacuuagccaccauauuu

SEQ ID NO: 73314 - RNA, 19 nt, Homo sapiens
  misc_RNA (1)...(19): siRNA sense strand
aaagaacucucaagcagua

SEQ ID NO: 73315 - RNA, 19 nt, Homo sapiens
  misc_RNA (1)...(19): siRNA sense strand
guacacagcuuucaucaac

SEQ ID NO: 73316 - RNA, 19 nt, Homo sapiens
  misc_RNA (1)...(19): siRNA sense strand
aagaaaggcuucccaauca

SEQ ID NO: 73317 - RNA, 19 nt, Homo sapiens
  misc_RNA (1)...(19): siRNA sense strand
caucaucgcuguugugcaa

SEQ ID NO: 73318 - RNA, 19 nt, Homo sapiens
  misc_RNA (1)...(19): siRNA sense strand
gaagucaucagacaaagaa

SEQ ID NO: 73319 - RNA, 19 nt, Homo sapiens
  misc_RNA (1)...(19): siRNA sense strand
gacaaagaauucucaguuc

SEQ ID NO: 73320 - RNA, 19 nt, Homo sapiens
  misc_RNA (1)...(19): siRNA sense strand
gcagaagucaucagacaaa

SEQ ID NO: 73321 - RNA, 19 nt, Homo sapiens
  misc_RNA (1)...(19): siRNA sense strand
acuagaagcuuuacaacuu

SEQ ID NO: 73322 - RNA, 19 nt, Homo sapiens
  misc_RNA (1)...(19): siRNA sense strand
aaagagagugagacaauua

SEQ ID NO: 73323 - RNA, 19 nt, Homo sapiens
  misc_RNA (1)...(19): siRNA sense strand
cgaaugacagggccuauaa

SEQ ID NO: 73324 - RNA, 19 nt, Homo sapiens
  misc_RNA (1)...(19): siRNA sense strand
cuagaagcuuuacaacuuu

SEQ ID NO: 73325 - RNA, 19 nt, Homo sapiens
  misc_RNA (1)...(19): siRNA sense strand
ucaccgaucuugaugacaa

SEQ ID NO: 73326 - RNA, 19 nt, Homo sapiens
  misc_RNA (1)...(19): siRNA sense strand
ccuugcagcuccucauaua

SEQ ID NO: 73327 - RNA, 19 nt, Homo sapiens
  misc_RNA (1)...(19): siRNA sense strand
acaaagaauucucaguuca

SEQ ID NO: 73328 - RNA, 19 nt, Homo sapiens
  misc_RNA (1)...(19): siRNA sense strand
gcccuuaucccaagucauu

SEQ ID NO: 73329 - RNA, 19 nt, Homo sapiens
  misc_RNA (1)...(19): siRNA sense strand
agacaaagaauucucaguu

SEQ ID NO: 73330 - RNA, 19 nt, Homo sapiens
  misc_RNA (1)...(19): siRNA sense strand
gacagggccuauaaacuca

SEQ ID NO: 73331 - RNA, 19 nt, Homo sapiens
  misc_RNA (1)...(19): siRNA sense strand
caagaggucacugggaaua

SEQ ID NO: 73332 - RNA, 19 nt, Homo sapiens
  misc_RNA (1)...(19): siRNA sense strand
gacccaaccugcugcacaa

SEQ ID NO: 73333 - RNA, 19 nt, Homo sapiens
  misc_RNA (1)...(19): siRNA sense strand
aaacuggauucacuaggaa

SEQ ID NO: 73334 - RNA, 19 nt, Homo sapiens
  misc_RNA (1)...(19): siRNA sense strand
gaucaccauucccaaagau

SEQ ID NO: 73335 - RNA, 19 nt, Homo sapiens
  misc_RNA (1)...(19): siRNA sense strand
ggaauuugaccgugggauu

SEQ ID NO: 73336 - RNA, 19 nt, Homo sapiens
  misc_RNA (1)...(19): siRNA sense strand
gcagagggacgagcagaaa

SEQ ID NO: 73337 - RNA, 19 nt, Homo sapiens
  misc_RNA (1)...(19): siRNA sense strand
ggaauaaaaugacaucucu

SEQ ID NO: 73338 - RNA, 19 nt, Homo sapiens
  misc_RNA (1)...(19): siRNA sense strand
uaagaaagaaacuggauuc

SEQ ID NO: 73339 - RNA, 19 nt, Homo sapiens
  misc_RNA (1)...(19): siRNA sense strand
gaauuugaccgugggauug

SEQ ID NO: 73340 - RNA, 19 nt, Homo sapiens
  misc_RNA (1)...(19): siRNA sense strand
aaagaauucucaguucaga

SEQ ID NO: 73341 - RNA, 19 nt, Homo sapiens
  misc_RNA (1)...(19): siRNA sense strand
aagcagaagucaucagaca

SEQ ID NO: 73342 - RNA, 19 nt, Homo sapiens
  misc_RNA (1)...(19): siRNA sense strand
cagcaaagaugggcaagag

SEQ ID NO: 73343 - RNA, 19 nt, Homo sapiens
  misc_RNA (1)...(19): siRNA sense strand
ugacagggccuauaaacuc

SEQ ID NO: 73344 - RNA, 19 nt, Homo sapiens
  misc_RNA (1)...(19): siRNA sense strand
gaaaggcuucccaaucauc

SEQ ID NO: 73345 - RNA, 19 nt, Homo sapiens
  misc_RNA (1)...(19): siRNA sense strand
ccaugucaguggauucuau

SEQ ID NO: 73346 - RNA, 19 nt, Homo sapiens
  misc_RNA (1)...(19): siRNA sense strand
gaaugacagggccuauaaa

SEQ ID NO: 73347 - RNA, 19 nt, Homo sapiens
  misc_RNA (1)...(19): siRNA sense strand
ggagcacaguguucaugau

SEQ ID NO: 73348 - RNA, 19 nt, Homo sapiens
  misc_RNA (1)...(19): siRNA sense strand
gagcacaguguucaugaug

SEQ ID NO: 73349 - RNA, 19 nt, Homo sapiens
  misc_RNA (1)...(19): siRNA sense strand
ccucagaaacaccgaauga

SEQ ID NO: 73350 - RNA, 19 nt, Homo sapiens
  misc_RNA (1)...(19): siRNA sense strand
agaggucacugggaauaaa

SEQ ID NO: 73351 - RNA, 19 nt, Homo sapiens
  misc_RNA (1)...(19): siRNA sense strand
ugaauccuauuuacagaca

SEQ ID NO: 73352 - RNA, 19 nt, Homo sapiens
  misc_RNA (1)...(19): siRNA sense strand
gaggagagcacggccauca

SEQ ID NO: 73353 - RNA, 19 nt, Homo sapiens
  misc_RNA (1)...(19): siRNA sense strand
ggagagcacggccaucauc

SEQ ID NO: 73354 - RNA, 19 nt, Homo sapiens
  misc_RNA (1)...(19): siRNA sense strand
caaagacaaagaauucauc

SEQ ID NO: 73355 - RNA, 19 nt, Homo sapiens
  misc_RNA (1)...(19): siRNA sense strand
aaagaaacuggauucacua

SEQ ID NO: 73356 - RNA, 19 nt, Homo sapiens
  misc_RNA (1)...(19): siRNA sense strand
agcaguaacucaucucuca

SEQ ID NO: 73357 - RNA, 19 nt, Homo sapiens
  misc_RNA (1)...(19): siRNA sense strand
gcgaaugacagggccuaua

SEQ ID NO: 73358 - RNA, 19 nt, Homo sapiens
  misc_RNA (1)...(19): siRNA sense strand
cugaugucguggacuauuu

SEQ ID NO: 73359 - RNA, 19 nt, Homo sapiens
  misc_RNA (1)...(19): siRNA sense strand
uggcuucccuccucccauu

SEQ ID NO: 73360 - RNA, 19 nt, Homo sapiens
  misc_RNA (1)...(19): siRNA sense strand
ggacaaaagagaaagaaau

SEQ ID NO: 73361 - RNA, 19 nt, Homo sapiens
  misc_RNA (1)...(19): siRNA sense strand
gagauaagaaacucagucu

SEQ ID NO: 73362 - RNA, 19 nt, Homo sapiens
  misc_RNA (1)...(19): siRNA sense strand
cagcucaaccucagaaaca

SEQ ID NO: 73363 - RNA, 19 nt, Homo sapiens
  misc_RNA (1)...(19): siRNA sense strand
ucagaucaccauucccaaa

SEQ ID NO: 73364 - RNA, 19 nt, Homo sapiens
  misc_RNA (1)...(19): siRNA sense strand
cguggacuauuuacucaga

SEQ ID NO: 73365 - RNA, 19 nt, Homo sapiens
  misc_RNA (1)...(19): siRNA sense strand
ucagaaacaccgaaugagu

SEQ ID NO: 73366 - RNA, 19 nt, Homo sapiens
  misc_RNA (1)...(19): siRNA sense strand
ugaugucguggacuauuua

SEQ ID NO: 73367 - RNA, 19 nt, Homo sapiens
  misc_RNA (1)...(19): siRNA sense strand
ggaggaggagcacaguguu

SEQ ID NO: 73368 - RNA, 19 nt, Homo sapiens
  misc_RNA (1)...(19): siRNA sense strand
gaggaggggugccauguca

SEQ ID NO: 73369 - RNA, 19 nt, Homo sapiens
  misc_RNA (1)...(19): siRNA sense strand
uaaacuuagccaccauauu

SEQ ID NO: 73370 - RNA, 19 nt, Homo sapiens
  misc_RNA (1)...(19): siRNA sense strand
uagaagcuuuacaacuuuc

SEQ ID NO: 73371 - RNA, 19 nt, Homo sapiens
  misc_RNA (1)...(19): siRNA sense strand
gcaagaggucacugggaau

SEQ ID NO: 73372 - RNA, 19 nt, Homo sapiens
  misc_RNA (1)...(19): siRNA sense strand
ggacuauuuacucagaaga

SEQ ID NO: 73373 - RNA, 19 nt, Homo sapiens
  misc_RNA (1)...(19): siRNA sense strand
cugaucagccuguuagaga

SEQ ID NO: 73374 - RNA, 19 nt, Homo sapiens
  misc_RNA (1)...(19): siRNA sense strand
gagacaauuacgugaggaa

SEQ ID NO: 73375 - RNA, 19 nt, Homo sapiens
  misc_RNA (1)...(19): siRNA sense strand
caaagaauucucaguucag

SEQ ID NO: 73376 - RNA, 19 nt, Homo sapiens
  misc_RNA (1)...(19): siRNA sense strand
acaagcagaagucaucaga

SEQ ID NO: 73377 - RNA, 19 nt, Homo sapiens
  misc_RNA (1)...(19): siRNA sense strand
agaaacaccgaaugaguca

SEQ ID NO: 73378 - RNA, 19 nt, Homo sapiens
  misc_RNA (1)...(19): siRNA sense strand
agaaaggcuucccaaucau

SEQ ID NO: 73379 - RNA, 19 nt, Homo sapiens
  misc_RNA (1)...(19): siRNA sense strand
gucguggacuauuuacuca

SEQ ID NO: 73380 - RNA, 19 nt, Homo sapiens
  misc_RNA (1)...(19): siRNA sense strand
gcacaagcagaagucauca

SEQ ID NO: 73381 - RNA, 19 nt, Homo sapiens
  misc_RNA (1)...(19): siRNA sense strand
gaggagcacaguguucaug

SEQ ID NO: 73382 - RNA, 19 nt, Homo sapiens
  misc_RNA (1)...(19): siRNA sense strand
gaggaggagcacaguguuc

SEQ ID NO: 73383 - RNA, 19 nt, Homo sapiens
  misc_RNA (1)...(19): siRNA sense strand
gacuauuuacucagaagaa

SEQ ID NO: 73384 - RNA, 19 nt, Homo sapiens
  misc_RNA (1)...(19): siRNA sense strand
aggaacagcugggcaccuu

SEQ ID NO: 73385 - RNA, 19 nt, Homo sapiens
  misc_RNA (1)...(19): siRNA sense strand
agaucaccauucccaaaga

SEQ ID NO: 73386 - RNA, 19 nt, Homo sapiens
  misc_RNA (1)...(19): siRNA sense strand
agagaccgauccugauguc

SEQ ID NO: 73387 - RNA, 19 nt, Homo sapiens
  misc_RNA (1)...(19): siRNA sense strand
cagcuuucaucaacacucu

SEQ ID NO: 73388 - RNA, 19 nt, Homo sapiens
  misc_RNA (1)...(19): siRNA sense strand
gcugucagaucaccauucc

SEQ ID NO: 73389 - RNA, 19 nt, Homo sapiens
  misc_RNA (1)...(19): siRNA sense strand
gucaucagacaaagaauuc

SEQ ID NO: 73390 - RNA, 19 nt, Homo sapiens
  misc_RNA (1)...(19): siRNA sense strand
caccuugcagcuccucaua

SEQ ID NO: 73391 - RNA, 19 nt, Homo sapiens
  misc_RNA (1)...(19): siRNA sense strand
uggauucuaucaccgaucu

SEQ ID NO: 73392 - RNA, 19 nt, Homo sapiens
  misc_RNA (1)...(19): siRNA sense strand
uuagagaccgauccugaug

SEQ ID NO: 73393 - RNA, 19 nt, Homo sapiens
  misc_RNA (1)...(19): siRNA sense strand
agaauucucaguucagagu

SEQ ID NO: 73394 - RNA, 19 nt, Homo sapiens
  misc_RNA (1)...(19): siRNA sense strand
uggauucacuaggaaagga

SEQ ID NO: 73395 - RNA, 19 nt, Homo sapiens
  misc_RNA (1)...(19): siRNA sense strand
gaaugcccuuaucccaagu

SEQ ID NO: 73396 - RNA, 19 nt, Homo sapiens
  misc_RNA (1)...(19): siRNA sense strand
aaaagagagugagacaauu

SEQ ID NO: 73397 - RNA, 19 nt, Homo sapiens
  misc_RNA (1)...(19): siRNA sense strand
gauucuaucaccgaucuug

SEQ ID NO: 73398 - RNA, 19 nt, Homo sapiens
  misc_RNA (1)...(19): siRNA sense strand
aacauggccuccagacagu

SEQ ID NO: 73399 - RNA, 19 nt, Homo sapiens
  misc_RNA (1)...(19): siRNA sense strand
cagaagucaucagacaaag

SEQ ID NO: 73400 - RNA, 19 nt, Homo sapiens
  misc_RNA (1)...(19): siRNA sense strand
ugacaacaucagcaaagau

SEQ ID NO: 73401 - RNA, 19 nt, Homo sapiens
  misc_RNA (1)...(19): siRNA sense strand
agagggacgagcagaaaga

SEQ ID NO: 73402 - RNA, 19 nt, Homo sapiens
  misc_RNA (1)...(19): siRNA sense strand
acacagcuuucaucaacac

SEQ ID NO: 73403 - RNA, 19 nt, Homo sapiens
  misc_RNA (1)...(19): siRNA sense strand
agucaucagacaaagaauu

SEQ ID NO: 73404 - RNA, 19 nt, Homo sapiens
  misc_RNA (1)...(19): siRNA sense strand
gaaagaaacuggauucacu

SEQ ID NO: 73405 - RNA, 19 nt, Homo sapiens
  misc_RNA (1)...(19): siRNA sense strand
gaaacuggauucacuagga

SEQ ID NO: 73406 - RNA, 19 nt, Homo sapiens
  misc_RNA (1)...(19): siRNA sense strand
aaacuuagccaccauauuu

SEQ ID NO: 73407 - RNA, 19 nt, Homo sapiens
  misc_RNA (1)...(19): siRNA sense strand
aaagaacucucaagcagua

SEQ ID NO: 73408 - RNA, 19 nt, Homo sapiens
  misc_RNA (1)...(19): siRNA sense strand
guacacagcuuucaucaac

SEQ ID NO: 73409 - RNA, 19 nt, Homo sapiens
  misc_RNA (1)...(19): siRNA sense strand
aagaaaggcuucccaauca

SEQ ID NO: 73410 - RNA, 19 nt, Homo sapiens
  misc_RNA (1)...(19): siRNA sense strand
caucaucgcuguugugcaa

SEQ ID NO: 73411 - RNA, 19 nt, Homo sapiens
  misc_RNA (1)...(19): siRNA sense strand
gaagucaucagacaaagaa

SEQ ID NO: 73412 - RNA, 19 nt, Homo sapiens
  misc_RNA (1)...(19): siRNA sense strand
gacaaagaauucucaguuc

SEQ ID NO: 73413 - RNA, 19 nt, Homo sapiens
  misc_RNA (1)...(19): siRNA sense strand
gcagaagucaucagacaaa

SEQ ID NO: 73414 - RNA, 19 nt, Homo sapiens
  misc_RNA (1)...(19): siRNA sense strand
acuagaagcuuuacaacuu

SEQ ID NO: 73415 - RNA, 19 nt, Homo sapiens
  misc_RNA (1)...(19): siRNA sense strand
aaagagagugagacaauua

SEQ ID NO: 73416 - RNA, 19 nt, Homo sapiens
  misc_RNA (1)...(19): siRNA sense strand
cgaaugacagggccuauaa

SEQ ID NO: 73417 - RNA, 19 nt, Homo sapiens
  misc_RNA (1)...(19): siRNA sense strand
cuagaagcuuuacaacuuu

SEQ ID NO: 73418 - RNA, 19 nt, Homo sapiens
  misc_RNA (1)...(19): siRNA sense strand
cggagaagcuuuacagagu

SEQ ID NO: 73419 - RNA, 19 nt, Homo sapiens
  misc_RNA (1)...(19): siRNA sense strand
ucaccgaucuugaugacaa

SEQ ID NO: 73420 - RNA, 19 nt, Homo sapiens
  misc_RNA (1)...(19): siRNA sense strand
ccuugcagcuccucauaua

SEQ ID NO: 73421 - RNA, 19 nt, Homo sapiens
  misc_RNA (1)...(19): siRNA sense strand
acaaagaauucucaguuca

SEQ ID NO: 73422 - RNA, 19 nt, Homo sapiens
  misc_RNA (1)...(19): siRNA sense strand
ggagggaggcauucaucua

SEQ ID NO: 73423 - RNA, 19 nt, Homo sapiens
  misc_RNA (1)...(19): siRNA sense strand
gcccuuaucccaagucauu

SEQ ID NO: 73424 - RNA, 19 nt, Homo sapiens
  misc_RNA (1)...(19): siRNA sense strand
agacaaagaauucucaguu

SEQ ID NO: 73425 - RNA, 19 nt, Homo sapiens
  misc_RNA (1)...(19): siRNA sense strand
gacagggccuauaaacuca

SEQ ID NO: 73426 - RNA, 19 nt, Homo sapiens
  misc_RNA (1)...(19): siRNA sense strand
caagaggucacugggaaua

SEQ ID NO: 73427 - RNA, 19 nt, Homo sapiens
  misc_RNA (1)...(19): siRNA sense strand
gacccaaccugcugcacaa

SEQ ID NO: 73428 - RNA, 19 nt, Homo sapiens
  misc_RNA (1)...(19): siRNA sense strand
aaacuggauucacuaggaa

SEQ ID NO: 73429 - RNA, 19 nt, Homo sapiens
  misc_RNA (1)...(19): siRNA sense strand
ggaauuugaccgugggauu

SEQ ID NO: 73430 - RNA, 19 nt, Homo sapiens
  misc_RNA (1)...(19): siRNA sense strand
gaucaccauucccaaagau

SEQ ID NO: 73431 - RNA, 19 nt, Homo sapiens
  misc_RNA (1)...(19): siRNA sense strand
gcagagggacgagcagaaa

SEQ ID NO: 73432 - RNA, 19 nt, Homo sapiens
  misc_RNA (1)...(19): siRNA sense strand
ggaauaaaaugacaucucu

SEQ ID NO: 73433 - RNA, 19 nt, Homo sapiens
  misc_RNA (1)...(19): siRNA sense strand
uaagaaagaaacuggauuc

SEQ ID NO: 73434 - RNA, 19 nt, Homo sapiens
  misc_RNA (1)...(19): siRNA sense strand
gaauuugaccgugggauug

SEQ ID NO: 73435 - RNA, 19 nt, Homo sapiens
  misc_RNA (1)...(19): siRNA sense strand
aaagaauucucaguucaga

SEQ ID NO: 73436 - RNA, 19 nt, Homo sapiens
  misc_RNA (1)...(19): siRNA sense strand
aagcagaagucaucagaca

SEQ ID NO: 73437 - RNA, 19 nt, Homo sapiens
  misc_RNA (1)...(19): siRNA sense strand
cagcaaagaugggcaagag

SEQ ID NO: 73438 - RNA, 19 nt, Homo sapiens
  misc_RNA (1)...(19): siRNA sense strand
ugacagggccuauaaacuc

SEQ ID NO: 73439 - RNA, 19 nt, Homo sapiens
  misc_RNA (1)...(19): siRNA sense strand
gaaaggcuucccaaucauc

SEQ ID NO: 73440 - RNA, 19 nt, Homo sapiens
  misc_RNA (1)...(19): siRNA sense strand
ccaugucaguggauucuau

SEQ ID NO: 73441 - RNA, 19 nt, Homo sapiens
  misc_RNA (1)...(19): siRNA sense strand
gaaugacagggccuauaaa

SEQ ID NO: 73442 - RNA, 19 nt, Homo sapiens
  misc_RNA (1)...(19): siRNA sense strand
ggagcacaguguucaugau

SEQ ID NO: 73443 - RNA, 19 nt, Homo sapiens
  misc_RNA (1)...(19): siRNA sense strand
gagcacaguguucaugaug

SEQ ID NO: 73444 - RNA, 19 nt, Homo sapiens
  misc_RNA (1)...(19): siRNA sense strand
ccucagaaacaccgaauga

SEQ ID NO: 73445 - RNA, 19 nt, Homo sapiens
  misc_RNA (1)...(19): siRNA sense strand
agaggucacugggaauaaa

SEQ ID NO: 73446 - RNA, 19 nt, Homo sapiens
  misc_RNA (1)...(19): siRNA sense strand
ugaauccuauuuacagaca

SEQ ID NO: 73447 - RNA, 19 nt, Homo sapiens
  misc_RNA (1)...(19): siRNA sense strand
caaagucaagggaaaguuc

SEQ ID NO: 73448 - RNA, 19 nt, Homo sapiens
  misc_RNA (1)...(19): siRNA sense strand
gaggagagcacggccauca

SEQ ID NO: 73449 - RNA, 19 nt, Homo sapiens
  misc_RNA (1)...(19): siRNA sense strand
ggagagcacggccaucauc

SEQ ID NO: 73450 - RNA, 19 nt, Homo sapiens
  misc_RNA (1)...(19): siRNA sense strand
caaagacaaagaauucauc

SEQ ID NO: 73451 - RNA, 19 nt, Homo sapiens
  misc_RNA (1)...(19): siRNA sense strand
agcaguaacucaucucuca

SEQ ID NO: 73452 - RNA, 19 nt, Homo sapiens
  misc_RNA (1)...(19): siRNA sense strand
aaagaaacuggauucacua

SEQ ID NO: 73453 - RNA, 19 nt, Homo sapiens
  misc_RNA (1)...(19): siRNA sense strand
gcgaaugacagggccuaua

SEQ ID NO: 73454 - RNA, 19 nt, Homo sapiens
  misc_RNA (1)...(19): siRNA sense strand
cugaugucguggacuauuu

SEQ ID NO: 73455 - RNA, 19 nt, Homo sapiens
  misc_RNA (1)...(19): siRNA sense strand
uggcuucccuccucccauu

SEQ ID NO: 73456 - RNA, 19 nt, Homo sapiens
  misc_RNA (1)...(19): siRNA sense strand
ggacaaaagagaaagaaau

SEQ ID NO: 73457 - RNA, 19 nt, Homo sapiens
  misc_RNA (1)...(19): siRNA sense strand
gagauaagaaacucagucu

SEQ ID NO: 73458 - RNA, 19 nt, Homo sapiens
  misc_RNA (1)...(19): siRNA sense strand
cagcucaaccucagaaaca

SEQ ID NO: 73459 - RNA, 19 nt, Homo sapiens
  misc_RNA (1)...(19): siRNA sense strand
ucagaucaccauucccaaa

SEQ ID NO: 73460 - RNA, 19 nt, Homo sapiens
  misc_RNA (1)...(19): siRNA sense strand
cguggacuauuuacucaga

SEQ ID NO: 73461 - RNA, 19 nt, Homo sapiens
  misc_RNA (1)...(19): siRNA sense strand
ucagaaacaccgaaugagu

SEQ ID NO: 73462 - RNA, 19 nt, Homo sapiens
  misc_RNA (1)...(19): siRNA sense strand
ugaugucguggacuauuua

SEQ ID NO: 73463 - RNA, 19 nt, Homo sapiens
  misc_RNA (1)...(19): siRNA sense strand
ggaggaggagcacaguguu

SEQ ID NO: 73464 - RNA, 19 nt, Homo sapiens
  misc_RNA (1)...(19): siRNA sense strand
gagggaggcauucaucuac

SEQ ID NO: 73465 - RNA, 19 nt, Homo sapiens
  misc_RNA (1)...(19): siRNA sense strand
gaggaggggugccauguca

SEQ ID NO: 73466 - RNA, 19 nt, Homo sapiens
  misc_RNA (1)...(19): siRNA sense strand
uaaacuuagccaccauauu

SEQ ID NO: 73467 - RNA, 19 nt, Homo sapiens
  misc_RNA (1)...(19): siRNA sense strand
uagaagcuuuacaacuuuc

SEQ ID NO: 73468 - RNA, 19 nt, Homo sapiens
  misc_RNA (1)...(19): siRNA sense strand
gcaagaggucacugggaau

SEQ ID NO: 73469 - RNA, 19 nt, Homo sapiens
  misc_RNA (1)...(19): siRNA sense strand
ggacuauuuacucagaaga

SEQ ID NO: 73470 - RNA, 19 nt, Homo sapiens
  misc_RNA (1)...(19): siRNA sense strand
cugaucagccuguuagaga

SEQ ID NO: 73471 - RNA, 19 nt, Homo sapiens
  misc_RNA (1)...(19): siRNA sense strand
gagacaauuacgugaggaa

SEQ ID NO: 73472 - RNA, 19 nt, Homo sapiens
  misc_RNA (1)...(19): siRNA sense strand
caaagaauucucaguucag

SEQ ID NO: 73473 - RNA, 19 nt, Homo sapiens
  misc_RNA (1)...(19): siRNA sense strand
acaagcagaagucaucaga

SEQ ID NO: 73474 - RNA, 19 nt, Homo sapiens
  misc_RNA (1)...(19): siRNA sense strand
agaaacaccgaaugaguca

SEQ ID NO: 73475 - RNA, 19 nt, Homo sapiens
  misc_RNA (1)...(19): siRNA sense strand
agaaaggcuucccaaucau

SEQ ID NO: 73476 - RNA, 19 nt, Homo sapiens
  misc_RNA (1)...(19): siRNA sense strand
gucguggacuauuuacuca

SEQ ID NO: 73477 - RNA, 19 nt, Homo sapiens
  misc_RNA (1)...(19): siRNA sense strand
gcacaagcagaagucauca

SEQ ID NO: 73478 - RNA, 19 nt, Homo sapiens
  misc_RNA (1)...(19): siRNA sense strand
gaggagcacaguguucaug

SEQ ID NO: 73479 - RNA, 19 nt, Homo sapiens
  misc_RNA (1)...(19): siRNA sense strand
gaggaggagcacaguguuc

SEQ ID NO: 73480 - RNA, 19 nt, Homo sapiens
  misc_RNA (1)...(19): siRNA sense strand
ggaggcauucaucuacaga

SEQ ID NO: 73481 - RNA, 19 nt, Homo sapiens
  misc_RNA (1)...(19): siRNA sense strand
gacuauuuacucagaagaa

SEQ ID NO: 73482 - RNA, 19 nt, Homo sapiens
  misc_RNA (1)...(19): siRNA sense strand
aggaacagcugggcaccuu

SEQ ID NO: 73483 - RNA, 19 nt, Homo sapiens
  misc_RNA (1)...(19): siRNA sense strand
gcugucagaucaccauucc

SEQ ID NO: 73484 - RNA, 19 nt, Homo sapiens
  misc_RNA (1)...(19): siRNA sense strand
agagaccgauccugauguc

SEQ ID NO: 73485 - RNA, 19 nt, Homo sapiens
  misc_RNA (1)...(19): siRNA sense strand
cagcuuucaucaacacucu

SEQ ID NO: 73486 - RNA, 19 nt, Homo sapiens
  misc_RNA (1)...(19): siRNA sense strand
agaucaccauucccaaaga

SEQ ID NO: 73487 - RNA, 19 nt, Homo sapiens
  misc_RNA (1)...(19): siRNA sense strand
gucaucagacaaagaauuc

SEQ ID NO: 73488 - RNA, 19 nt, Homo sapiens
  misc_RNA (1)...(19): siRNA sense strand
gcucggagaagcuuuacag

SEQ ID NO: 73489 - RNA, 19 nt, Homo sapiens
  misc_RNA (1)...(19): siRNA sense strand
gggaggcauucaucuacag

SEQ ID NO: 73490 - RNA, 19 nt, Homo sapiens
  misc_RNA (1)...(19): siRNA sense strand
caccuugcagcuccucaua

SEQ ID NO: 73491 - RNA, 19 nt, Homo sapiens
  misc_RNA (1)...(19): siRNA sense strand
uggauucuaucaccgaucu

SEQ ID NO: 73492 - RNA, 19 nt, Homo sapiens
  misc_RNA (1)...(19): siRNA sense strand
gaaugcccuuaucccaagu

SEQ ID NO: 73493 - RNA, 19 nt, Homo sapiens
  misc_RNA (1)...(19): siRNA sense strand
uuagagaccgauccugaug

SEQ ID NO: 73494 - RNA, 19 nt, Homo sapiens
  misc_RNA (1)...(19): siRNA sense strand
agaauucucaguucagagu

SEQ ID NO: 73495 - RNA, 19 nt, Homo sapiens
  misc_RNA (1)...(19): siRNA sense strand
aaaagagagugagacaauu

SEQ ID NO: 73496 - RNA, 19 nt, Homo sapiens
  misc_RNA (1)...(19): siRNA sense strand
uggauucacuaggaaagga

SEQ ID NO: 73497 - RNA, 19 nt, Homo sapiens
  misc_RNA (1)...(19): siRNA sense strand
gauucuaucaccgaucuug

SEQ ID NO: 73498 - RNA, 19 nt, Homo sapiens
  misc_RNA (1)...(19): siRNA sense strand
aacauggccuccagacagu

SEQ ID NO: 73499 - RNA, 19 nt, Homo sapiens
  misc_RNA (1)...(19): siRNA sense strand
caucuacagacuccaacaa

SEQ ID NO: 73500 - RNA, 19 nt, Homo sapiens
  misc_RNA (1)...(19): siRNA sense strand
agagggacgagcagaaaga

SEQ ID NO: 73501 - RNA, 19 nt, Homo sapiens
  misc_RNA (1)...(19): siRNA sense strand
cagaagucaucagacaaag

SEQ ID NO: 73502 - RNA, 19 nt, Homo sapiens
  misc_RNA (1)...(19): siRNA sense strand
ugacaacaucagcaaagau

SEQ ID NO: 73503 - RNA, 19 nt, Homo sapiens
  misc_RNA (1)...(19): siRNA sense strand
acacagcuuucaucaacac

SEQ ID NO: 73504 - RNA, 19 nt, Homo sapiens
  misc_RNA (1)...(19): siRNA sense strand
gaaagaaacuggauucacu

SEQ ID NO: 73505 - RNA, 19 nt, Homo sapiens
  misc_RNA (1)...(19): siRNA sense strand
gaaacuggauucacuagga

SEQ ID NO: 73506 - RNA, 19 nt, Homo sapiens
  misc_RNA (1)...(19): siRNA sense strand
aaacuuagccaccauauuu

SEQ ID NO: 73507 - RNA, 19 nt, Homo sapiens
  misc_RNA (1)...(19): siRNA sense strand
aaagaacucucaagcagua

SEQ ID NO: 73508 - RNA, 19 nt, Homo sapiens
  misc_RNA (1)...(19): siRNA sense strand
guacacagcuuucaucaac

SEQ ID NO: 73509 - RNA, 19 nt, Homo sapiens
  misc_RNA (1)...(19): siRNA sense strand
aagaaaggcuucccaauca

SEQ ID NO: 73510 - RNA, 19 nt, Homo sapiens
  misc_RNA (1)...(19): siRNA sense strand
caucaucgcuguugugcaa

SEQ ID NO: 73511 - RNA, 19 nt, Homo sapiens
  misc_RNA (1)...(19): siRNA sense strand
gaagucaucagacaaagaa

SEQ ID NO: 73512 - RNA, 19 nt, Homo sapiens
  misc_RNA (1)...(19): siRNA sense strand
gacaaagaauucucaguuc

SEQ ID NO: 73513 - RNA, 19 nt, Homo sapiens
  misc_RNA (1)...(19): siRNA sense strand
gcagaagucaucagacaaa

SEQ ID NO: 73514 - RNA, 19 nt, Homo sapiens
  misc_RNA (1)...(19): siRNA sense strand
acuagaagcuuuacaacuu

SEQ ID NO: 73515 - RNA, 19 nt, Homo sapiens
  misc_RNA (1)...(19): siRNA sense strand
aaagagagugagacaauua

SEQ ID NO: 73516 - RNA, 19 nt, Homo sapiens
  misc_RNA (1)...(19): siRNA sense strand
cgaaugacagggccuauaa

SEQ ID NO: 73517 - RNA, 19 nt, Homo sapiens
  misc_RNA (1)...(19): siRNA sense strand
cuagaagcuuuacaacuuu

SEQ ID NO: 73518 - RNA, 19 nt, Homo sapiens
  misc_RNA (1)...(19): siRNA sense strand
cggagaagcuuuacagagu

SEQ ID NO: 73519 - RNA, 19 nt, Homo sapiens
  misc_RNA (1)...(19): siRNA sense strand
ucaccgaucuugaugacaa

SEQ ID NO: 73520 - RNA, 19 nt, Homo sapiens
  misc_RNA (1)...(19): siRNA sense strand
ccuugcagcuccucauaua

SEQ ID NO: 73521 - RNA, 19 nt, Homo sapiens
  misc_RNA (1)...(19): siRNA sense strand
acaaagaauucucaguuca

SEQ ID NO: 73522 - RNA, 19 nt, Homo sapiens
  misc_RNA (1)...(19): siRNA sense strand
ggagggaggcauucaucua

SEQ ID NO: 73523 - RNA, 19 nt, Homo sapiens
  misc_RNA (1)...(19): siRNA sense strand
gcccuuaucccaagucauu

SEQ ID NO: 73524 - RNA, 19 nt, Homo sapiens
  misc_RNA (1)...(19): siRNA sense strand
agacaaagaauucucaguu

SEQ ID NO: 73525 - RNA, 19 nt, Homo sapiens
  misc_RNA (1)...(19): siRNA sense strand
gacagggccuauaaacuca

SEQ ID NO: 73526 - RNA, 19 nt, Homo sapiens
  misc_RNA (1)...(19): siRNA sense strand
caagaggucacugggaaua

SEQ ID NO: 73527 - RNA, 19 nt, Homo sapiens
  misc_RNA (1)...(19): siRNA sense strand
gacccaaccugcugcacaa

SEQ ID NO: 73528 - RNA, 19 nt, Homo sapiens
  misc_RNA (1)...(19): siRNA sense strand
aaacuggauucacuaggaa

SEQ ID NO: 73529 - RNA, 19 nt, Homo sapiens
  misc_RNA (1)...(19): siRNA sense strand
ggaauuugaccgugggauu

SEQ ID NO: 73530 - RNA, 19 nt, Homo sapiens
  misc_RNA (1)...(19): siRNA sense strand
gaucaccauucccaaagau

SEQ ID NO: 73531 - RNA, 19 nt, Homo sapiens
  misc_RNA (1)...(19): siRNA sense strand
gcagagggacgagcagaaa

SEQ ID NO: 73532 - RNA, 19 nt, Homo sapiens
  misc_RNA (1)...(19): siRNA sense strand
ggaauaaaaugacaucucu

SEQ ID NO: 73533 - RNA, 19 nt, Homo sapiens
  misc_RNA (1)...(19): siRNA sense strand
uaagaaagaaacuggauuc

SEQ ID NO: 73534 - RNA, 19 nt, Homo sapiens
  misc_RNA (1)...(19): siRNA sense strand
gaauuugaccgugggauug

SEQ ID NO: 73535 - RNA, 19 nt, Homo sapiens
  misc_RNA (1)...(19): siRNA sense strand
aaagaauucucaguucaga

SEQ ID NO: 73536 - RNA, 19 nt, Homo sapiens
  misc_RNA (1)...(19): siRNA sense strand
aagcagaagucaucagaca

SEQ ID NO: 73537 - RNA, 19 nt, Homo sapiens
  misc_RNA (1)...(19): siRNA sense strand
cagcaaagaugggcaagag

SEQ ID NO: 73538 - RNA, 19 nt, Homo sapiens
  misc_RNA (1)...(19): siRNA sense strand
ugacagggccuauaaacuc

SEQ ID NO: 73539 - RNA, 19 nt, Homo sapiens
  misc_RNA (1)...(19): siRNA sense strand
gaaaggcuucccaaucauc

SEQ ID NO: 73540 - RNA, 19 nt, Homo sapiens
  misc_RNA (1)...(19): siRNA sense strand
ccaugucaguggauucuau

SEQ ID NO: 73541 - RNA, 19 nt, Homo sapiens
  misc_RNA (1)...(19): siRNA sense strand
gaaugacagggccuauaaa

SEQ ID NO: 73542 - RNA, 19 nt, Homo sapiens
  misc_RNA (1)...(19): siRNA sense strand
ggagcacaguguucaugau

SEQ ID NO: 73543 - RNA, 19 nt, Homo sapiens
  misc_RNA (1)...(19): siRNA sense strand
gagcacaguguucaugaug

SEQ ID NO: 73544 - RNA, 19 nt, Homo sapiens
  misc_RNA (1)...(19): siRNA sense strand
ccucagaaacaccgaauga

SEQ ID NO: 73545 - RNA, 19 nt, Homo sapiens
  misc_RNA (1)...(19): siRNA sense strand
agaggucacugggaauaaa

SEQ ID NO: 73546 - RNA, 19 nt, Homo sapiens
  misc_RNA (1)...(19): siRNA sense strand
ugaauccuauuuacagaca

SEQ ID NO: 73547 - RNA, 19 nt, Homo sapiens
  misc_RNA (1)...(19): siRNA sense strand
caaagucaagggaaaguuc

SEQ ID NO: 73548 - RNA, 19 nt, Homo sapiens
  misc_RNA (1)...(19): siRNA sense strand
gaggagagcacggccauca

SEQ ID NO: 73549 - RNA, 19 nt, Homo sapiens
  misc_RNA (1)...(19): siRNA sense strand
ggagagcacggccaucauc

SEQ ID NO: 73550 - RNA, 19 nt, Homo sapiens
  misc_RNA (1)...(19): siRNA sense strand
agcaguaacucaucucuca

SEQ ID NO: 73551 - RNA, 19 nt, Homo sapiens
  misc_RNA (1)...(19): siRNA sense strand
caaagacaaagaauucauc

SEQ ID NO: 73552 - RNA, 19 nt, Homo sapiens
  misc_RNA (1)...(19): siRNA sense strand
aaagaaacuggauucacua

SEQ ID NO: 73553 - RNA, 19 nt, Homo sapiens
  misc_RNA (1)...(19): siRNA sense strand
gcgaaugacagggccuaua

SEQ ID NO: 73554 - RNA, 19 nt, Homo sapiens
  misc_RNA (1)...(19): siRNA sense strand
cugaugucguggacuauuu

SEQ ID NO: 73555 - RNA, 19 nt, Homo sapiens
  misc_RNA (1)...(19): siRNA sense strand
uggcuucccuccucccauu

SEQ ID NO: 73556 - RNA, 19 nt, Homo sapiens
  misc_RNA (1)...(19): siRNA sense strand
ggacaaaagagaaagaaau

SEQ ID NO: 73557 - RNA, 19 nt, Homo sapiens
  misc_RNA (1)...(19): siRNA sense strand
gagauaagaaacucagucu

SEQ ID NO: 73558 - RNA, 19 nt, Homo sapiens
  misc_RNA (1)...(19): siRNA sense strand
cagcucaaccucagaaaca

SEQ ID NO: 73559 - RNA, 19 nt, Homo sapiens
  misc_RNA (1)...(19): siRNA sense strand
ucagaucaccauucccaaa

SEQ ID NO: 73560 - RNA, 19 nt, Homo sapiens
  misc_RNA (1)...(19): siRNA sense strand
cguggacuauuuacucaga

SEQ ID NO: 73561 - RNA, 19 nt, Homo sapiens
  misc_RNA (1)...(19): siRNA sense strand
ucagaaacaccgaaugagu

SEQ ID NO: 73562 - RNA, 19 nt, Homo sapiens
  misc_RNA (1)...(19): siRNA sense strand
ugaugucguggacuauuua

SEQ ID NO: 73563 - RNA, 19 nt, Homo sapiens
  misc_RNA (1)...(19): siRNA sense strand
ggaggaggagcacaguguu

SEQ ID NO: 73564 - RNA, 19 nt, Homo sapiens
  misc_RNA (1)...(19): siRNA sense strand
gagggaggcauucaucuac

SEQ ID NO: 73565 - RNA, 19 nt, Homo sapiens
  misc_RNA (1)...(19): siRNA sense strand
gaggaggggugccauguca

SEQ ID NO: 73566 - RNA, 19 nt, Homo sapiens
  misc_RNA (1)...(19): siRNA sense strand
uaaacuuagccaccauauu

SEQ ID NO: 73567 - RNA, 19 nt, Homo sapiens
  misc_RNA (1)...(19): siRNA sense strand
uagaagcuuuacaacuuuc

SEQ ID NO: 73568 - RNA, 19 nt, Homo sapiens
  misc_RNA (1)...(19): siRNA sense strand
gcaagaggucacugggaau

SEQ ID NO: 73569 - RNA, 19 nt, Homo sapiens
  misc_RNA (1)...(19): siRNA sense strand
ggacuauuuacucagaaga

SEQ ID NO: 73570 - RNA, 19 nt, Homo sapiens
  misc_RNA (1)...(19): siRNA sense strand
cugaucagccuguuagaga

SEQ ID NO: 73571 - RNA, 19 nt, Homo sapiens
  misc_RNA (1)...(19): siRNA sense strand
gagacaauuacgugaggaa

SEQ ID NO: 73572 - RNA, 19 nt, Homo sapiens
  misc_RNA (1)...(19): siRNA sense strand
caaagaauucucaguucag

SEQ ID NO: 73573 - RNA, 19 nt, Homo sapiens
  misc_RNA (1)...(19): siRNA sense strand
acaagcagaagucaucaga

SEQ ID NO: 73574 - RNA, 19 nt, Homo sapiens
  misc_RNA (1)...(19): siRNA sense strand
agaaacaccgaaugaguca

SEQ ID NO: 73575 - RNA, 19 nt, Homo sapiens
  misc_RNA (1)...(19): siRNA sense strand
agaaaggcuucccaaucau

SEQ ID NO: 73576 - RNA, 19 nt, Homo sapiens
  misc_RNA (1)...(19): siRNA sense strand
gucguggacuauuuacuca

SEQ ID NO: 73577 - RNA, 19 nt, Homo sapiens
  misc_RNA (1)...(19): siRNA sense strand
gcacaagcagaagucauca

SEQ ID NO: 73578 - RNA, 19 nt, Homo sapiens
  misc_RNA (1)...(19): siRNA sense strand
gaggagcacaguguucaug

SEQ ID NO: 73579 - RNA, 19 nt, Homo sapiens
  misc_RNA (1)...(19): siRNA sense strand
gaggaggagcacaguguuc

SEQ ID NO: 73580 - RNA, 19 nt, Homo sapiens
  misc_RNA (1)...(19): siRNA sense strand
ggaggcauucaucuacaga

SEQ ID NO: 73581 - RNA, 19 nt, Homo sapiens
  misc_RNA (1)...(19): siRNA sense strand
gacuauuuacucagaagaa

SEQ ID NO: 73582 - RNA, 19 nt, Homo sapiens
  misc_RNA (1)...(19): siRNA sense strand
aggaacagcugggcaccuu

SEQ ID NO: 73583 - RNA, 19 nt, Homo sapiens
  misc_RNA (1)...(19): siRNA sense strand
cagcuuucaucaacacucu

SEQ ID NO: 73584 - RNA, 19 nt, Homo sapiens
  misc_RNA (1)...(19): siRNA sense strand
agagaccgauccugauguc

SEQ ID NO: 73585 - RNA, 19 nt, Homo sapiens
  misc_RNA (1)...(19): siRNA sense strand
gcugucagaucaccauucc

SEQ ID NO: 73586 - RNA, 19 nt, Homo sapiens
  misc_RNA (1)...(19): siRNA sense strand
agaucaccauucccaaaga

SEQ ID NO: 73587 - RNA, 19 nt, Homo sapiens
  misc_RNA (1)...(19): siRNA sense strand
gucaucagacaaagaauuc

SEQ ID NO: 73588 - RNA, 19 nt, Homo sapiens
  misc_RNA (1)...(19): siRNA sense strand
gcucggagaagcuuuacag

SEQ ID NO: 73589 - RNA, 19 nt, Homo sapiens
  misc_RNA (1)...(19): siRNA sense strand
gggaggcauucaucuacag

SEQ ID NO: 73590 - RNA, 19 nt, Homo sapiens
  misc_RNA (1)...(19): siRNA sense strand
caccuugcagcuccucaua

SEQ ID NO: 73591 - RNA, 19 nt, Homo sapiens
  misc_RNA (1)...(19): siRNA sense strand
uggauucuaucaccgaucu

SEQ ID NO: 73592 - RNA, 19 nt, Homo sapiens
  misc_RNA (1)...(19): siRNA sense strand
uuagagaccgauccugaug

SEQ ID NO: 73593 - RNA, 19 nt, Homo sapiens
  misc_RNA (1)...(19): siRNA sense strand
agaauucucaguucagagu

SEQ ID NO: 73594 - RNA, 19 nt, Homo sapiens
  misc_RNA (1)...(19): siRNA sense strand
uggauucacuaggaaagga

SEQ ID NO: 73595 - RNA, 19 nt, Homo sapiens
  misc_RNA (1)...(19): siRNA sense strand
gaaugcccuuaucccaagu

SEQ ID NO: 73596 - RNA, 19 nt, Homo sapiens
  misc_RNA (1)...(19): siRNA sense strand
aaaagagagugagacaauu

SEQ ID NO: 73597 - RNA, 19 nt, Homo sapiens
  misc_RNA (1)...(19): siRNA sense strand
gauucuaucaccgaucuug

SEQ ID NO: 73598 - RNA, 19 nt, Homo sapiens
  misc_RNA (1)...(19): siRNA sense strand
agagggacgagcagaaaga

SEQ ID NO: 73599 - RNA, 19 nt, Homo sapiens
  misc_RNA (1)...(19): siRNA sense strand
caucuacagacuccaacaa

SEQ ID NO: 73600 - RNA, 19 nt, Homo sapiens
  misc_RNA (1)...(19): siRNA sense strand
cagaagucaucagacaaag

SEQ ID NO: 73601 - RNA, 19 nt, Homo sapiens
  misc_RNA (1)...(19): siRNA sense strand
ugacaacaucagcaaagau

SEQ ID NO: 73602 - RNA, 19 nt, Homo sapiens
  misc_RNA (1)...(19): siRNA sense strand
acacagcuuucaucaacac

SEQ ID NO: 73603 - RNA, 19 nt, Homo sapiens
  misc_RNA (1)...(19): siRNA sense strand
aacauggccuccagacagu

SEQ ID NO: 73604 - RNA, 19 nt, Homo sapiens
  misc_RNA (1)...(19): siRNA sense strand
gaaagaaacuggauucacu

SEQ ID NO: 73605 - RNA, 19 nt, Homo sapiens
  misc_RNA (1)...(19): siRNA sense strand
gaaacuggauucacuagga

SEQ ID NO: 73606 - RNA, 19 nt, Homo sapiens
  misc_RNA (1)...(19): siRNA sense strand
aaacuuagccaccauauuu

SEQ ID NO: 73607 - RNA, 19 nt, Homo sapiens
  misc_RNA (1)...(19): siRNA sense strand
aaagaacucucaagcagua

SEQ ID NO: 73608 - RNA, 19 nt, Homo sapiens
  misc_RNA (1)...(19): siRNA sense strand
guacacagcuuucaucaac

SEQ ID NO: 73609 - RNA, 19 nt, Homo sapiens
  misc_RNA (1)...(19): siRNA sense strand
aagaaaggcuucccaauca

SEQ ID NO: 73610 - RNA, 19 nt, Homo sapiens
  misc_RNA (1)...(19): siRNA sense strand
caucaucgcuguugugcaa

SEQ ID NO: 73611 - RNA, 19 nt, Homo sapiens
  misc_RNA (1)...(19): siRNA sense strand
gaagucaucagacaaagaa

SEQ ID NO: 73612 - RNA, 19 nt, Homo sapiens
  misc_RNA (1)...(19): siRNA sense strand
gacaaagaauucucaguuc

SEQ ID NO: 73613 - RNA, 19 nt, Homo sapiens
  misc_RNA (1)...(19): siRNA sense strand
gcagaagucaucagacaaa

SEQ ID NO: 73614 - RNA, 19 nt, Homo sapiens
  misc_RNA (1)...(19): siRNA sense strand
acuagaagcuuuacaacuu

SEQ ID NO: 73615 - RNA, 19 nt, Homo sapiens
  misc_RNA (1)...(19): siRNA sense strand
aaagagagugagacaauua

SEQ ID NO: 73616 - RNA, 19 nt, Homo sapiens
  misc_RNA (1)...(19): siRNA sense strand
cgaaugacagggccuauaa

SEQ ID NO: 73617 - RNA, 19 nt, Homo sapiens
  misc_RNA (1)...(19): siRNA sense strand
cuagaagcuuuacaacuuu

SEQ ID NO: 73618 - RNA, 19 nt, Homo sapiens
  misc_RNA (1)...(19): siRNA sense strand
cggagaagcuuuacagagu

SEQ ID NO: 73619 - RNA, 19 nt, Homo sapiens
  misc_RNA (1)...(19): siRNA sense strand
ucaccgaucuugaugacaa

SEQ ID NO: 73620 - RNA, 19 nt, Homo sapiens
  misc_RNA (1)...(19): siRNA sense strand
ccuugcagcuccucauaua

SEQ ID NO: 73621 - RNA, 19 nt, Homo sapiens
  misc_RNA (1)...(19): siRNA sense strand
acaaagaauucucaguuca

SEQ ID NO: 73622 - RNA, 19 nt, Homo sapiens
  misc_RNA (1)...(19): siRNA sense strand
ggagggaggcauucaucua

SEQ ID NO: 73623 - RNA, 19 nt, Homo sapiens
  misc_RNA (1)...(19): siRNA sense strand
gcccuuaucccaagucauu

SEQ ID NO: 73624 - RNA, 19 nt, Homo sapiens
  misc_RNA (1)...(19): siRNA sense strand
agacaaagaauucucaguu

SEQ ID NO: 73625 - RNA, 19 nt, Homo sapiens
  misc_RNA (1)...(19): siRNA sense strand
gacagggccuauaaacuca

SEQ ID NO: 73626 - RNA, 19 nt, Homo sapiens
  misc_RNA (1)...(19): siRNA sense strand
caagaggucacugggaaua

SEQ ID NO: 73627 - RNA, 19 nt, Homo sapiens
  misc_RNA (1)...(19): siRNA sense strand
gacccaaccugcugcacaa

SEQ ID NO: 73628 - RNA, 19 nt, Homo sapiens
  misc_RNA (1)...(19): siRNA sense strand
aaacuggauucacuaggaa

SEQ ID NO: 73629 - RNA, 19 nt, Homo sapiens
  misc_RNA (1)...(19): siRNA sense strand
ggaauuugaccgugggauu

SEQ ID NO: 73630 - RNA, 19 nt, Homo sapiens
  misc_RNA (1)...(19): siRNA sense strand
gaucaccauucccaaagau

SEQ ID NO: 73631 - RNA, 19 nt, Homo sapiens
  misc_RNA (1)...(19): siRNA sense strand
gcagagggacgagcagaaa

SEQ ID NO: 73632 - RNA, 19 nt, Homo sapiens
  misc_RNA (1)...(19): siRNA sense strand
ggaauaaaaugacaucucu

SEQ ID NO: 73633 - RNA, 19 nt, Homo sapiens
  misc_RNA (1)...(19): siRNA sense strand
uaagaaagaaacuggauuc

SEQ ID NO: 73634 - RNA, 19 nt, Homo sapiens
  misc_RNA (1)...(19): siRNA sense strand
gaauuugaccgugggauug

SEQ ID NO: 73635 - RNA, 19 nt, Homo sapiens
  misc_RNA (1)...(19): siRNA sense strand
aaagaauucucaguucaga

SEQ ID NO: 73636 - RNA, 19 nt, Homo sapiens
  misc_RNA (1)...(19): siRNA sense strand
aagcagaagucaucagaca

SEQ ID NO: 73637 - RNA, 19 nt, Homo sapiens
  misc_RNA (1)...(19): siRNA sense strand
cagcaaagaugggcaagag

SEQ ID NO: 73638 - RNA, 19 nt, Homo sapiens
  misc_RNA (1)...(19): siRNA sense strand
ugacagggccuauaaacuc

SEQ ID NO: 73639 - RNA, 19 nt, Homo sapiens
  misc_RNA (1)...(19): siRNA sense strand
gaaaggcuucccaaucauc

SEQ ID NO: 73640 - RNA, 19 nt, Homo sapiens
  misc_RNA (1)...(19): siRNA sense strand
ccaugucaguggauucuau

SEQ ID NO: 73641 - RNA, 19 nt, Homo sapiens
  misc_RNA (1)...(19): siRNA sense strand
gaaugacagggccuauaaa

SEQ ID NO: 73642 - RNA, 19 nt, Homo sapiens
  misc_RNA (1)...(19): siRNA sense strand
ggagcacaguguucaugau

SEQ ID NO: 73643 - RNA, 19 nt, Homo sapiens
  misc_RNA (1)...(19): siRNA sense strand
gagcacaguguucaugaug

SEQ ID NO: 73644 - RNA, 19 nt, Homo sapiens
  misc_RNA (1)...(19): siRNA sense strand
ccucagaaacaccgaauga

SEQ ID NO: 73645 - RNA, 19 nt, Homo sapiens
  misc_RNA (1)...(19): siRNA sense strand
agaggucacugggaauaaa

SEQ ID NO: 73646 - RNA, 19 nt, Homo sapiens
  misc_RNA (1)...(19): siRNA sense strand
ugaauccuauuuacagaca

SEQ ID NO: 73647 - RNA, 19 nt, Homo sapiens
  misc_RNA (1)...(19): siRNA sense strand
caaagucaagggaaaguuc

SEQ ID NO: 73648 - RNA, 19 nt, Homo sapiens
  misc_RNA (1)...(19): siRNA sense strand
gaggagagcacggccauca

SEQ ID NO: 73649 - RNA, 19 nt, Homo sapiens
  misc_RNA (1)...(19): siRNA sense strand
ggagagcacggccaucauc

SEQ ID NO: 73650 - RNA, 19 nt, Homo sapiens
  misc_RNA (1)...(19): siRNA sense strand
agcaguaacucaucucuca

SEQ ID NO: 73651 - RNA, 19 nt, Homo sapiens
  misc_RNA (1)...(19): siRNA sense strand
caaagacaaagaauucauc

SEQ ID NO: 73652 - RNA, 19 nt, Homo sapiens
  misc_RNA (1)...(19): siRNA sense strand
aaagaaacuggauucacua

SEQ ID NO: 73653 - RNA, 19 nt, Homo sapiens
  misc_RNA (1)...(19): siRNA sense strand
gcgaaugacagggccuaua

SEQ ID NO: 73654 - RNA, 19 nt, Homo sapiens
  misc_RNA (1)...(19): siRNA sense strand
cugaugucguggacuauuu

SEQ ID NO: 73655 - RNA, 19 nt, Homo sapiens
  misc_RNA (1)...(19): siRNA sense strand
uggcuucccuccucccauu

SEQ ID NO: 73656 - RNA, 19 nt, Homo sapiens
  misc_RNA (1)...(19): siRNA sense strand
ggacaaaagagaaagaaau

SEQ ID NO: 73657 - RNA, 19 nt, Homo sapiens
  misc_RNA (1)...(19): siRNA sense strand
gagauaagaaacucagucu

SEQ ID NO: 73658 - RNA, 19 nt, Homo sapiens
  misc_RNA (1)...(19): siRNA sense strand
cagcucaaccucagaaaca

SEQ ID NO: 73659 - RNA, 19 nt, Homo sapiens
  misc_RNA (1)...(19): siRNA sense strand
ucagaucaccauucccaaa

SEQ ID NO: 73660 - RNA, 19 nt, Homo sapiens
  misc_RNA (1)...(19): siRNA sense strand
cguggacuauuuacucaga

SEQ ID NO: 73661 - RNA, 19 nt, Homo sapiens
  misc_RNA (1)...(19): siRNA sense strand
ucagaaacaccgaaugagu

SEQ ID NO: 73662 - RNA, 19 nt, Homo sapiens
  misc_RNA (1)...(19): siRNA sense strand
ugaugucguggacuauuua

SEQ ID NO: 73663 - RNA, 19 nt, Homo sapiens
  misc_RNA (1)...(19): siRNA sense strand
ggaggaggagcacaguguu

SEQ ID NO: 73664 - RNA, 19 nt, Homo sapiens
  misc_RNA (1)...(19): siRNA sense strand
gagggaggcauucaucuac

SEQ ID NO: 73665 - RNA, 19 nt, Homo sapiens
  misc_RNA (1)...(19): siRNA sense strand
gaggaggggugccauguca

SEQ ID NO: 73666 - RNA, 19 nt, Homo sapiens
  misc_RNA (1)...(19): siRNA sense strand
uaaacuuagccaccauauu

SEQ ID NO: 73667 - RNA, 19 nt, Homo sapiens
  misc_RNA (1)...(19): siRNA sense strand
uagaagcuuuacaacuuuc

SEQ ID NO: 73668 - RNA, 19 nt, Homo sapiens
  misc_RNA (1)...(19): siRNA sense strand
gcaagaggucacugggaau

SEQ ID NO: 73669 - RNA, 19 nt, Homo sapiens
  misc_RNA (1)...(19): siRNA sense strand
ggacuauuuacucagaaga

SEQ ID NO: 73670 - RNA, 19 nt, Homo sapiens
  misc_RNA (1)...(19): siRNA sense strand
cugaucagccuguuagaga

SEQ ID NO: 73671 - RNA, 19 nt, Homo sapiens
  misc_RNA (1)...(19): siRNA sense strand
gagacaauuacgugaggaa

SEQ ID NO: 73672 - RNA, 19 nt, Homo sapiens
  misc_RNA (1)...(19): siRNA sense strand
caaagaauucucaguucag

SEQ ID NO: 73673 - RNA, 19 nt, Homo sapiens
  misc_RNA (1)...(19): siRNA sense strand
acaagcagaagucaucaga

SEQ ID NO: 73674 - RNA, 19 nt, Homo sapiens
  misc_RNA (1)...(19): siRNA sense strand
agaaacaccgaaugaguca

SEQ ID NO: 73675 - RNA, 19 nt, Homo sapiens
  misc_RNA (1)...(19): siRNA sense strand
agaaaggcuucccaaucau

SEQ ID NO: 73676 - RNA, 19 nt, Homo sapiens
  misc_RNA (1)...(19): siRNA sense strand
gucguggacuauuuacuca

SEQ ID NO: 73677 - RNA, 19 nt, Homo sapiens
  misc_RNA (1)...(19): siRNA sense strand
gcacaagcagaagucauca

SEQ ID NO: 73678 - RNA, 19 nt, Homo sapiens
  misc_RNA (1)...(19): siRNA sense strand
gaggagcacaguguucaug

SEQ ID NO: 73679 - RNA, 19 nt, Homo sapiens
  misc_RNA (1)...(19): siRNA sense strand
gaggaggagcacaguguuc

SEQ ID NO: 73680 - RNA, 19 nt, Homo sapiens
  misc_RNA (1)...(19): siRNA sense strand
ggaggcauucaucuacaga

SEQ ID NO: 73681 - RNA, 19 nt, Homo sapiens
  misc_RNA (1)...(19): siRNA sense strand
gacuauuuacucagaagaa

SEQ ID NO: 73682 - RNA, 19 nt, Homo sapiens
  misc_RNA (1)...(19): siRNA sense strand
aggaacagcugggcaccuu

SEQ ID NO: 73683 - RNA, 19 nt, Homo sapiens
  misc_RNA (1)...(19): siRNA sense strand
cagcuuucaucaacacucu

SEQ ID NO: 73684 - RNA, 19 nt, Homo sapiens
  misc_RNA (1)...(19): siRNA sense strand
agagaccgauccugauguc

SEQ ID NO: 73685 - RNA, 19 nt, Homo sapiens
  misc_RNA (1)...(19): siRNA sense strand
gcugucagaucaccauucc

SEQ ID NO: 73686 - RNA, 19 nt, Homo sapiens
  misc_RNA (1)...(19): siRNA sense strand
agaucaccauucccaaaga

SEQ ID NO: 73687 - RNA, 19 nt, Homo sapiens
  misc_RNA (1)...(19): siRNA sense strand
gucaucagacaaagaauuc

SEQ ID NO: 73688 - RNA, 19 nt, Homo sapiens
  misc_RNA (1)...(19): siRNA sense strand
gcucggagaagcuuuacag

SEQ ID NO: 73689 - RNA, 19 nt, Homo sapiens
  misc_RNA (1)...(19): siRNA sense strand
gggaggcauucaucuacag

SEQ ID NO: 73690 - RNA, 19 nt, Homo sapiens
  misc_RNA (1)...(19): siRNA sense strand
caccuugcagcuccucaua

SEQ ID NO: 73691 - RNA, 19 nt, Homo sapiens
  misc_RNA (1)...(19): siRNA sense strand
uggauucuaucaccgaucu

SEQ ID NO: 73692 - RNA, 19 nt, Homo sapiens
  misc_RNA (1)...(19): siRNA sense strand
uuagagaccgauccugaug

SEQ ID NO: 73693 - RNA, 19 nt, Homo sapiens
  misc_RNA (1)...(19): siRNA sense strand
agaauucucaguucagagu

SEQ ID NO: 73694 - RNA, 19 nt, Homo sapiens
  misc_RNA (1)...(19): siRNA sense strand
uggauucacuaggaaagga

SEQ ID NO: 73695 - RNA, 19 nt, Homo sapiens
  misc_RNA (1)...(19): siRNA sense strand
gaaugcccuuaucccaagu

SEQ ID NO: 73696 - RNA, 19 nt, Homo sapiens
  misc_RNA (1)...(19): siRNA sense strand
aaaagagagugagacaauu

SEQ ID NO: 73697 - RNA, 19 nt, Homo sapiens
  misc_RNA (1)...(19): siRNA sense strand
gauucuaucaccgaucuug

SEQ ID NO: 73698 - RNA, 19 nt, Homo sapiens
  misc_RNA (1)...(19): siRNA sense strand
agagggacgagcagaaaga

SEQ ID NO: 73699 - RNA, 19 nt, Homo sapiens
  misc_RNA (1)...(19): siRNA sense strand
caucuacagacuccaacaa

SEQ ID NO: 73700 - RNA, 19 nt, Homo sapiens
  misc_RNA (1)...(19): siRNA sense strand
cagaagucaucagacaaag

SEQ ID NO: 73701 - RNA, 19 nt, Homo sapiens
  misc_RNA (1)...(19): siRNA sense strand
ugacaacaucagcaaagau

SEQ ID NO: 73702 - RNA, 19 nt, Homo sapiens
  misc_RNA (1)...(19): siRNA sense strand
acacagcuuucaucaacac

SEQ ID NO: 73703 - RNA, 19 nt, Homo sapiens
  misc_RNA (1)...(19): siRNA sense strand
aacauggccuccagacagu

SEQ ID NO: 73704 - RNA, 19 nt, Homo sapiens
  misc_RNA (1)...(19): siRNA sense strand
gaaagaaacuggauucacu

SEQ ID NO: 73705 - RNA, 19 nt, Homo sapiens
  misc_RNA (1)...(19): siRNA sense strand
gaaacuggauucacuagga

SEQ ID NO: 73706 - RNA, 19 nt, Homo sapiens
  misc_RNA (1)...(19): siRNA sense strand
aaacuuagccaccauauuu

SEQ ID NO: 73707 - RNA, 19 nt, Homo sapiens
  misc_RNA (1)...(19): siRNA sense strand
aaagaacucucaagcagua

SEQ ID NO: 73708 - RNA, 19 nt, Homo sapiens
  misc_RNA (1)...(19): siRNA sense strand
guacacagcuuucaucaac

SEQ ID NO: 73709 - RNA, 19 nt, Homo sapiens
  misc_RNA (1)...(19): siRNA sense strand
aagaaaggcuucccaauca

SEQ ID NO: 73710 - RNA, 19 nt, Homo sapiens
  misc_RNA (1)...(19): siRNA sense strand
caucaucgcuguugugcaa

SEQ ID NO: 73711 - RNA, 19 nt, Homo sapiens
  misc_RNA (1)...(19): siRNA sense strand
gaagucaucagacaaagaa

SEQ ID NO: 73712 - RNA, 19 nt, Homo sapiens
  misc_RNA (1)...(19): siRNA sense strand
gacaaagaauucucaguuc

SEQ ID NO: 73713 - RNA, 19 nt, Homo sapiens
  misc_RNA (1)...(19): siRNA sense strand
gcagaagucaucagacaaa

SEQ ID NO: 73714 - RNA, 19 nt, Homo sapiens
  misc_RNA (1)...(19): siRNA sense strand
acuagaagcuuuacaacuu

SEQ ID NO: 73715 - RNA, 19 nt, Homo sapiens
  misc_RNA (1)...(19): siRNA sense strand
aaagagagugagacaauua

SEQ ID NO: 73716 - RNA, 19 nt, Homo sapiens
  misc_RNA (1)...(19): siRNA sense strand
cgaaugacagggccuauaa

SEQ ID NO: 73717 - RNA, 19 nt, Homo sapiens
  misc_RNA (1)...(19): siRNA sense strand
cuagaagcuuuacaacuuu

SEQ ID NO: 73718 - RNA, 19 nt, Homo sapiens
  misc_RNA (1)...(19): siRNA sense strand
cggagaagcuuuacagagu

SEQ ID NO: 73719 - RNA, 19 nt, Homo sapiens
  misc_RNA (1)...(19): siRNA sense strand
ucaccgaucuugaugacaa

SEQ ID NO: 73720 - RNA, 19 nt, Homo sapiens
  misc_RNA (1)...(19): siRNA sense strand
ccuugcagcuccucauaua

SEQ ID NO: 73721 - RNA, 19 nt, Homo sapiens
  misc_RNA (1)...(19): siRNA sense strand
acaaagaauucucaguuca

SEQ ID NO: 73722 - RNA, 19 nt, Homo sapiens
  misc_RNA (1)...(19): siRNA sense strand
ggagggaggcauucaucua

SEQ ID NO: 73723 - RNA, 19 nt, Homo sapiens
  misc_RNA (1)...(19): siRNA sense strand
gcccuuaucccaagucauu

SEQ ID NO: 73724 - RNA, 19 nt, Homo sapiens
  misc_RNA (1)...(19): siRNA sense strand
agacaaagaauucucaguu

SEQ ID NO: 73725 - RNA, 19 nt, Homo sapiens
  misc_RNA (1)...(19): siRNA sense strand
gacagggccuauaaacuca

SEQ ID NO: 73726 - RNA, 19 nt, Homo sapiens
  misc_RNA (1)...(19): siRNA sense strand
caagaggucacugggaaua

SEQ ID NO: 73727 - RNA, 19 nt, Homo sapiens
  misc_RNA (1)...(19): siRNA sense strand
gacccaaccugcugcacaa

SEQ ID NO: 73728 - RNA, 19 nt, Homo sapiens
  misc_RNA (1)...(19): siRNA sense strand
aaacuggauucacuaggaa

SEQ ID NO: 73729 - RNA, 19 nt, Homo sapiens
  misc_RNA (1)...(19): siRNA sense strand
ggaauuugaccgugggauu

SEQ ID NO: 73730 - RNA, 19 nt, Homo sapiens
  misc_RNA (1)...(19): siRNA sense strand
gaucaccauucccaaagau

SEQ ID NO: 73731 - RNA, 19 nt, Homo sapiens
  misc_RNA (1)...(19): siRNA sense strand
gcagagggacgagcagaaa

SEQ ID NO: 73732 - RNA, 19 nt, Homo sapiens
  misc_RNA (1)...(19): siRNA sense strand
ggaauaaaaugacaucucu

SEQ ID NO: 73733 - RNA, 19 nt, Homo sapiens
  misc_RNA (1)...(19): siRNA sense strand
uaagaaagaaacuggauuc

SEQ ID NO: 73734 - RNA, 19 nt, Homo sapiens
  misc_RNA (1)...(19): siRNA sense strand
gaauuugaccgugggauug

SEQ ID NO: 73735 - RNA, 19 nt, Homo sapiens
  misc_RNA (1)...(19): siRNA sense strand
aaagaauucucaguucaga

SEQ ID NO: 73736 - RNA, 19 nt, Homo sapiens
  misc_RNA (1)...(19): siRNA sense strand
aagcagaagucaucagaca

SEQ ID NO: 73737 - RNA, 19 nt, Homo sapiens
  misc_RNA (1)...(19): siRNA sense strand
cagcaaagaugggcaagag

SEQ ID NO: 73738 - RNA, 19 nt, Homo sapiens
  misc_RNA (1)...(19): siRNA sense strand
ugacagggccuauaaacuc

SEQ ID NO: 73739 - RNA, 19 nt, Homo sapiens
  misc_RNA (1)...(19): siRNA sense strand
gaaaggcuucccaaucauc

SEQ ID NO: 73740 - RNA, 19 nt, Homo sapiens
  misc_RNA (1)...(19): siRNA sense strand
ccaugucaguggauucuau

SEQ ID NO: 73741 - RNA, 19 nt, Homo sapiens
  misc_RNA (1)...(19): siRNA sense strand
gaaugacagggccuauaaa

SEQ ID NO: 73742 - RNA, 19 nt, Homo sapiens
  misc_RNA (1)...(19): siRNA sense strand
ggagcacaguguucaugau

SEQ ID NO: 73743 - RNA, 19 nt, Homo sapiens
  misc_RNA (1)...(19): siRNA sense strand
gagcacaguguucaugaug

SEQ ID NO: 73744 - RNA, 19 nt, Homo sapiens
  misc_RNA (1)...(19): siRNA sense strand
ccucagaaacaccgaauga

SEQ ID NO: 73745 - RNA, 19 nt, Homo sapiens
  misc_RNA (1)...(19): siRNA sense strand
agaggucacugggaauaaa

SEQ ID NO: 73746 - RNA, 19 nt, Homo sapiens
  misc_RNA (1)...(19): siRNA sense strand
ugaauccuauuuacagaca

SEQ ID NO: 73747 - RNA, 19 nt, Homo sapiens
  misc_RNA (1)...(19): siRNA sense strand
caaagucaagggaaaguuc

SEQ ID NO: 73748 - RNA, 19 nt, Homo sapiens
  misc_RNA (1)...(19): siRNA sense strand
gaggagagcacggccauca

SEQ ID NO: 73749 - RNA, 19 nt, Homo sapiens
  misc_RNA (1)...(19): siRNA sense strand
ggagagcacggccaucauc

SEQ ID NO: 73750 - RNA, 19 nt, Homo sapiens
  misc_RNA (1)...(19): siRNA sense strand
caaagacaaagaauucauc

SEQ ID NO: 73751 - RNA, 19 nt, Homo sapiens
  misc_RNA (1)...(19): siRNA sense strand
agcaguaacucaucucuca

SEQ ID NO: 73752 - RNA, 19 nt, Homo sapiens
  misc_RNA (1)...(19): siRNA sense strand
aaagaaacuggauucacua

SEQ ID NO: 73753 - RNA, 19 nt, Homo sapiens
  misc_RNA (1)...(19): siRNA sense strand
gcgaaugacagggccuaua

SEQ ID NO: 73754 - RNA, 19 nt, Homo sapiens
  misc_RNA (1)...(19): siRNA sense strand
cugaugucguggacuauuu

SEQ ID NO: 73755 - RNA, 19 nt, Homo sapiens
  misc_RNA (1)...(19): siRNA sense strand
uggcuucccuccucccauu

SEQ ID NO: 73756 - RNA, 19 nt, Homo sapiens
  misc_RNA (1)...(19): siRNA sense strand
ggacaaaagagaaagaaau

SEQ ID NO: 73757 - RNA, 19 nt, Homo sapiens
  misc_RNA (1)...(19): siRNA sense strand
gagauaagaaacucagucu

SEQ ID NO: 73758 - RNA, 19 nt, Homo sapiens
  misc_RNA (1)...(19): siRNA sense strand
cagcucaaccucagaaaca

SEQ ID NO: 73759 - RNA, 19 nt, Homo sapiens
  misc_RNA (1)...(19): siRNA sense strand
ucagaucaccauucccaaa

SEQ ID NO: 73760 - RNA, 19 nt, Homo sapiens
  misc_RNA (1)...(19): siRNA sense strand
cguggacuauuuacucaga

SEQ ID NO: 73761 - RNA, 19 nt, Homo sapiens
  misc_RNA (1)...(19): siRNA sense strand
ucagaaacaccgaaugagu

SEQ ID NO: 73762 - RNA, 19 nt, Homo sapiens
  misc_RNA (1)...(19): siRNA sense strand
ugaugucguggacuauuua

SEQ ID NO: 73763 - RNA, 19 nt, Homo sapiens
  misc_RNA (1)...(19): siRNA sense strand
ggaggaggagcacaguguu

SEQ ID NO: 73764 - RNA, 19 nt, Homo sapiens
  misc_RNA (1)...(19): siRNA sense strand
gagggaggcauucaucuac

SEQ ID NO: 73765 - RNA, 19 nt, Homo sapiens
  misc_RNA (1)...(19): siRNA sense strand
gaggaggggugccauguca

SEQ ID NO: 73766 - RNA, 19 nt, Homo sapiens
  misc_RNA (1)...(19): siRNA sense strand
uaaacuuagccaccauauu

SEQ ID NO: 73767 - RNA, 19 nt, Homo sapiens
  misc_RNA (1)...(19): siRNA sense strand
uagaagcuuuacaacuuuc

SEQ ID NO: 73768 - RNA, 19 nt, Homo sapiens
  misc_RNA (1)...(19): siRNA sense strand
gcaagaggucacugggaau

SEQ ID NO: 73769 - RNA, 19 nt, Homo sapiens
  misc_RNA (1)...(19): siRNA sense strand
ggacuauuuacucagaaga

SEQ ID NO: 73770 - RNA, 19 nt, Homo sapiens
  misc_RNA (1)...(19): siRNA sense strand
cugaucagccuguuagaga

SEQ ID NO: 73771 - RNA, 19 nt, Homo sapiens
  misc_RNA (1)...(19): siRNA sense strand
gagacaauuacgugaggaa

SEQ ID NO: 73772 - RNA, 19 nt, Homo sapiens
  misc_RNA (1)...(19): siRNA sense strand
caaagaauucucaguucag

SEQ ID NO: 73773 - RNA, 19 nt, Homo sapiens
  misc_RNA (1)...(19): siRNA sense strand
acaagcagaagucaucaga

SEQ ID NO: 73774 - RNA, 19 nt, Homo sapiens
  misc_RNA (1)...(19): siRNA sense strand
agaaacaccgaaugaguca

SEQ ID NO: 73775 - RNA, 19 nt, Homo sapiens
  misc_RNA (1)...(19): siRNA sense strand
agaaaggcuucccaaucau

SEQ ID NO: 73776 - RNA, 19 nt, Homo sapiens
  misc_RNA (1)...(19): siRNA sense strand
gucguggacuauuuacuca

SEQ ID NO: 73777 - RNA, 19 nt, Homo sapiens
  misc_RNA (1)...(19): siRNA sense strand
gcacaagcagaagucauca

SEQ ID NO: 73778 - RNA, 19 nt, Homo sapiens
  misc_RNA (1)...(19): siRNA sense strand
gaggagcacaguguucaug

SEQ ID NO: 73779 - RNA, 19 nt, Homo sapiens
  misc_RNA (1)...(19): siRNA sense strand
gaggaggagcacaguguuc

SEQ ID NO: 73780 - RNA, 19 nt, Homo sapiens
  misc_RNA (1)...(19): siRNA sense strand
ggaggcauucaucuacaga

SEQ ID NO: 73781 - RNA, 19 nt, Homo sapiens
  misc_RNA (1)...(19): siRNA sense strand
gacuauuuacucagaagaa

SEQ ID NO: 73782 - RNA, 19 nt, Homo sapiens
  misc_RNA (1)...(19): siRNA sense strand
aggaacagcugggcaccuu

SEQ ID NO: 73783 - RNA, 19 nt, Homo sapiens
  misc_RNA (1)...(19): siRNA sense strand
gcugucagaucaccauucc

SEQ ID NO: 73784 - RNA, 19 nt, Homo sapiens
  misc_RNA (1)...(19): siRNA sense strand
agagaccgauccugauguc

SEQ ID NO: 73785 - RNA, 19 nt, Homo sapiens
  misc_RNA (1)...(19): siRNA sense strand
cagcuuucaucaacacucu

SEQ ID NO: 73786 - RNA, 19 nt, Homo sapiens
  misc_RNA (1)...(19): siRNA sense strand
agaucaccauucccaaaga

SEQ ID NO: 73787 - RNA, 19 nt, Homo sapiens
  misc_RNA (1)...(19): siRNA sense strand
gucaucagacaaagaauuc

SEQ ID NO: 73788 - RNA, 19 nt, Homo sapiens
  misc_RNA (1)...(19): siRNA sense strand
gcucggagaagcuuuacag

SEQ ID NO: 73789 - RNA, 19 nt, Homo sapiens
  misc_RNA (1)...(19): siRNA sense strand
gggaggcauucaucuacag

SEQ ID NO: 73790 - RNA, 19 nt, Homo sapiens
  misc_RNA (1)...(19): siRNA sense strand
caccuugcagcuccucaua

SEQ ID NO: 73791 - RNA, 19 nt, Homo sapiens
  misc_RNA (1)...(19): siRNA sense strand
uggauucuaucaccgaucu

SEQ ID NO: 73792 - RNA, 19 nt, Homo sapiens
  misc_RNA (1)...(19): siRNA sense strand
gaaugcccuuaucccaagu

SEQ ID NO: 73793 - RNA, 19 nt, Homo sapiens
  misc_RNA (1)...(19): siRNA sense strand
uuagagaccgauccugaug

SEQ ID NO: 73794 - RNA, 19 nt, Homo sapiens
  misc_RNA (1)...(19): siRNA sense strand
agaauucucaguucagagu

SEQ ID NO: 73795 - RNA, 19 nt, Homo sapiens
  misc_RNA (1)...(19): siRNA sense strand
aaaagagagugagacaauu

SEQ ID NO: 73796 - RNA, 19 nt, Homo sapiens
  misc_RNA (1)...(19): siRNA sense strand
uggauucacuaggaaagga

SEQ ID NO: 73797 - RNA, 19 nt, Homo sapiens
  misc_RNA (1)...(19): siRNA sense strand
gauucuaucaccgaucuug

SEQ ID NO: 73798 - RNA, 19 nt, Homo sapiens
  misc_RNA (1)...(19): siRNA sense strand
aacauggccuccagacagu

SEQ ID NO: 73799 - RNA, 19 nt, Homo sapiens
  misc_RNA (1)...(19): siRNA sense strand
caucuacagacuccaacaa

SEQ ID NO: 73800 - RNA, 19 nt, Homo sapiens
  misc_RNA (1)...(19): siRNA sense strand
agagggacgagcagaaaga

SEQ ID NO: 73801 - RNA, 19 nt, Homo sapiens
  misc_RNA (1)...(19): siRNA sense strand
cagaagucaucagacaaag

SEQ ID NO: 73802 - RNA, 19 nt, Homo sapiens
  misc_RNA (1)...(19): siRNA sense strand
ugacaacaucagcaaagau

SEQ ID NO: 73803 - RNA, 19 nt, Homo sapiens
  misc_RNA (1)...(19): siRNA sense strand
acacagcuuucaucaacac

SEQ ID NO: 73804 - RNA, 19 nt, Homo sapiens
  misc_RNA (1)...(19): siRNA sense strand
gccaaggacuuucaagaua

SEQ ID NO: 73805 - RNA, 19 nt, Homo sapiens
  misc_RNA (1)...(19): siRNA sense strand
gagccaagcuggagaaaca

SEQ ID NO: 73806 - RNA, 19 nt, Homo sapiens
  misc_RNA (1)...(19): siRNA sense strand
gagcagaaauucauuguac

SEQ ID NO: 73807 - RNA, 19 nt, Homo sapiens
  misc_RNA (1)...(19): siRNA sense strand
ccaaggacuuucaagauau

SEQ ID NO: 73808 - RNA, 19 nt, Homo sapiens
  misc_RNA (1)...(19): siRNA sense strand
gggcugaggcggagaagua

SEQ ID NO: 73809 - RNA, 19 nt, Homo sapiens
  misc_RNA (1)...(19): siRNA sense strand
gcccugcucuuccaucuga

SEQ ID NO: 73810 - RNA, 19 nt, Homo sapiens
  misc_RNA (1)...(19): siRNA sense strand
ucacucagccagauaauug

SEQ ID NO: 73811 - RNA, 19 nt, Homo sapiens
  misc_RNA (1)...(19): siRNA sense strand
gaaauucauuguacaacac

SEQ ID NO: 73812 - RNA, 19 nt, Homo sapiens
  misc_RNA (1)...(19): siRNA sense strand
ugacggagguccaggcaau

SEQ ID NO: 73813 - RNA, 19 nt, Homo sapiens
  misc_RNA (1)...(19): siRNA sense strand
gcagaaauucauuguacaa

SEQ ID NO: 73814 - RNA, 19 nt, Homo sapiens
  misc_RNA (1)...(19): siRNA sense strand
caagaucacaucccuagga

SEQ ID NO: 73815 - RNA, 19 nt, Homo sapiens
  misc_RNA (1)...(19): siRNA sense strand
caaggacuuucaagauauc

SEQ ID NO: 73816 - RNA, 19 nt, Homo sapiens
  misc_RNA (1)...(19): siRNA sense strand
agugauggcucuuggaaau

SEQ ID NO: 73817 - RNA, 19 nt, Homo sapiens
  misc_RNA (1)...(19): siRNA sense strand
uacaagaacugggcuguca

SEQ ID NO: 73818 - RNA, 19 nt, Homo sapiens
  misc_RNA (1)...(19): siRNA sense strand
gaagugaagacuguguuga

SEQ ID NO: 73819 - RNA, 19 nt, Homo sapiens
  misc_RNA (1)...(19): siRNA sense strand
cagcgugggugacaagauc

SEQ ID NO: 73820 - RNA, 19 nt, Homo sapiens
  misc_RNA (1)...(19): siRNA sense strand
ggagcagaaauucauugua

SEQ ID NO: 73821 - RNA, 19 nt, Homo sapiens
  misc_RNA (1)...(19): siRNA sense strand
ggaagugaagacuguguug

SEQ ID NO: 73822 - RNA, 19 nt, Homo sapiens
  misc_RNA (1)...(19): siRNA sense strand
gaccauccuuuccaucaag

SEQ ID NO: 73823 - RNA, 19 nt, Homo sapiens
  misc_RNA (1)...(19): siRNA sense strand
ggguggaagugaagacugu

SEQ ID NO: 73824 - RNA, 19 nt, Homo sapiens
  misc_RNA (1)...(19): siRNA sense strand
ggccaaggacuuucaagau

SEQ ID NO: 73825 - RNA, 19 nt, Homo sapiens
  misc_RNA (1)...(19): siRNA sense strand
gggaggagcagaaauucau

SEQ ID NO: 73826 - RNA, 19 nt, Homo sapiens
  misc_RNA (1)...(19): siRNA sense strand
ggaggagcagaaauucauu

SEQ ID NO: 73827 - RNA, 19 nt, Homo sapiens
  misc_RNA (1)...(19): siRNA sense strand
cgagcuggguggaagugaa

SEQ ID NO: 73828 - RNA, 19 nt, Homo sapiens
  misc_RNA (1)...(19): siRNA sense strand
ugaccauccuuuccaucaa

SEQ ID NO: 73829 - RNA, 19 nt, Homo sapiens
  misc_RNA (1)...(19): siRNA sense strand
gaggagcagaaauucauug

SEQ ID NO: 73830 - RNA, 19 nt, Homo sapiens
  misc_RNA (1)...(19): siRNA sense strand
gcacagacuauaggcacaa

SEQ ID NO: 73831 - RNA, 19 nt, Homo sapiens
  misc_RNA (1)...(19): siRNA sense strand
cagacuauaggcacaacua

SEQ ID NO: 73832 - RNA, 19 nt, Homo sapiens
  misc_RNA (1)...(19): siRNA sense strand
ccugaaagcagaucacgau

SEQ ID NO: 73833 - RNA, 19 nt, Homo sapiens
  misc_RNA (1)...(19): siRNA sense strand
guggauggcacagacuaua

SEQ ID NO: 73834 - RNA, 19 nt, Homo sapiens
  misc_RNA (1)...(19): siRNA sense strand
ccugggaggagcagaaauu

SEQ ID NO: 73835 - RNA, 19 nt, Homo sapiens
  misc_RNA (1)...(19): siRNA sense strand
agcaacggcucccaaagga

SEQ ID NO: 73836 - RNA, 19 nt, Homo sapiens
  misc_RNA (1)...(19): siRNA sense strand
cagcaacggcucccaaagg

SEQ ID NO: 73837 - RNA, 19 nt, Homo sapiens
  misc_RNA (1)...(19): siRNA sense strand
ugauggcucuuggaaaugg

SEQ ID NO: 73838 - RNA, 19 nt, Homo sapiens
  misc_RNA (1)...(19): siRNA sense strand
acuauaggcacaacuacaa

SEQ ID NO: 73839 - RNA, 19 nt, Homo sapiens
  misc_RNA (1)...(19): siRNA sense strand
aaaugaccauccuuuccau

SEQ ID NO: 73840 - RNA, 19 nt, Homo sapiens
  misc_RNA (1)...(19): siRNA sense strand
aagugaagacuguguugaa

SEQ ID NO: 73841 - RNA, 19 nt, Homo sapiens
  misc_RNA (1)...(19): siRNA sense strand
gccaaggacuuucaagaua

SEQ ID NO: 73842 - RNA, 19 nt, Homo sapiens
  misc_RNA (1)...(19): siRNA sense strand
gagccaagcuggagaaaca

SEQ ID NO: 73843 - RNA, 19 nt, Homo sapiens
  misc_RNA (1)...(19): siRNA sense strand
gagcagaaauucauuguac

SEQ ID NO: 73844 - RNA, 19 nt, Homo sapiens
  misc_RNA (1)...(19): siRNA sense strand
ccaaggacuuucaagauau

SEQ ID NO: 73845 - RNA, 19 nt, Homo sapiens
  misc_RNA (1)...(19): siRNA sense strand
gggcugaggcggagaagua

SEQ ID NO: 73846 - RNA, 19 nt, Homo sapiens
  misc_RNA (1)...(19): siRNA sense strand
gcccugcucuuccaucuga

SEQ ID NO: 73847 - RNA, 19 nt, Homo sapiens
  misc_RNA (1)...(19): siRNA sense strand
ucacucagccagauaauug

SEQ ID NO: 73848 - RNA, 19 nt, Homo sapiens
  misc_RNA (1)...(19): siRNA sense strand
gaaauucauuguacaacac

SEQ ID NO: 73849 - RNA, 19 nt, Homo sapiens
  misc_RNA (1)...(19): siRNA sense strand
ugacggagguccaggcaau

SEQ ID NO: 73850 - RNA, 19 nt, Homo sapiens
  misc_RNA (1)...(19): siRNA sense strand
gcagaaauucauuguacaa

SEQ ID NO: 73851 - RNA, 19 nt, Homo sapiens
  misc_RNA (1)...(19): siRNA sense strand
caagaucacaucccuagga

SEQ ID NO: 73852 - RNA, 19 nt, Homo sapiens
  misc_RNA (1)...(19): siRNA sense strand
caaggacuuucaagauauc

SEQ ID NO: 73853 - RNA, 19 nt, Homo sapiens
  misc_RNA (1)...(19): siRNA sense strand
agugauggcucuuggaaau

SEQ ID NO: 73854 - RNA, 19 nt, Homo sapiens
  misc_RNA (1)...(19): siRNA sense strand
uacaagaacugggcuguca

SEQ ID NO: 73855 - RNA, 19 nt, Homo sapiens
  misc_RNA (1)...(19): siRNA sense strand
gaagugaagacuguguuga

SEQ ID NO: 73856 - RNA, 19 nt, Homo sapiens
  misc_RNA (1)...(19): siRNA sense strand
cagcgugggugacaagauc

SEQ ID NO: 73857 - RNA, 19 nt, Homo sapiens
  misc_RNA (1)...(19): siRNA sense strand
ggagcagaaauucauugua

SEQ ID NO: 73858 - RNA, 19 nt, Homo sapiens
  misc_RNA (1)...(19): siRNA sense strand
ggaagugaagacuguguug

SEQ ID NO: 73859 - RNA, 19 nt, Homo sapiens
  misc_RNA (1)...(19): siRNA sense strand
gaccauccuuuccaucaag

SEQ ID NO: 73860 - RNA, 19 nt, Homo sapiens
  misc_RNA (1)...(19): siRNA sense strand
ggguggaagugaagacugu

SEQ ID NO: 73861 - RNA, 19 nt, Homo sapiens
  misc_RNA (1)...(19): siRNA sense strand
ggccaaggacuuucaagau

SEQ ID NO: 73862 - RNA, 19 nt, Homo sapiens
  misc_RNA (1)...(19): siRNA sense strand
gggaggagcagaaauucau

SEQ ID NO: 73863 - RNA, 19 nt, Homo sapiens
  misc_RNA (1)...(19): siRNA sense strand
ggaggagcagaaauucauu

SEQ ID NO: 73864 - RNA, 19 nt, Homo sapiens
  misc_RNA (1)...(19): siRNA sense strand
cgagcuggguggaagugaa

SEQ ID NO: 73865 - RNA, 19 nt, Homo sapiens
  misc_RNA (1)...(19): siRNA sense strand
ugaccauccuuuccaucaa

SEQ ID NO: 73866 - RNA, 19 nt, Homo sapiens
  misc_RNA (1)...(19): siRNA sense strand
gaggagcagaaauucauug

SEQ ID NO: 73867 - RNA, 19 nt, Homo sapiens
  misc_RNA (1)...(19): siRNA sense strand
gcacagacuauaggcacaa

SEQ ID NO: 73868 - RNA, 19 nt, Homo sapiens
  misc_RNA (1)...(19): siRNA sense strand
cagacuauaggcacaacua

SEQ ID NO: 73869 - RNA, 19 nt, Homo sapiens
  misc_RNA (1)...(19): siRNA sense strand
ccugaaagcagaucacgau

SEQ ID NO: 73870 - RNA, 19 nt, Homo sapiens
  misc_RNA (1)...(19): siRNA sense strand
guggauggcacagacuaua

SEQ ID NO: 73871 - RNA, 19 nt, Homo sapiens
  misc_RNA (1)...(19): siRNA sense strand
ccugggaggagcagaaauu

SEQ ID NO: 73872 - RNA, 19 nt, Homo sapiens
  misc_RNA (1)...(19): siRNA sense strand
agcaacggcucccaaagga

SEQ ID NO: 73873 - RNA, 19 nt, Homo sapiens
  misc_RNA (1)...(19): siRNA sense strand
cagcaacggcucccaaagg

SEQ ID NO: 73874 - RNA, 19 nt, Homo sapiens
  misc_RNA (1)...(19): siRNA sense strand
ugauggcucuuggaaaugg

SEQ ID NO: 73875 - RNA, 19 nt, Homo sapiens
  misc_RNA (1)...(19): siRNA sense strand
acuauaggcacaacuacaa

SEQ ID NO: 73876 - RNA, 19 nt, Homo sapiens
  misc_RNA (1)...(19): siRNA sense strand
aaaugaccauccuuuccau

SEQ ID NO: 73877 - RNA, 19 nt, Homo sapiens
  misc_RNA (1)...(19): siRNA sense strand
aagugaagacuguguugaa

SEQ ID NO: 73878 - RNA, 19 nt, Homo sapiens
  misc_RNA (1)...(19): siRNA sense strand
gccaaggacuuucaagaua

SEQ ID NO: 73879 - RNA, 19 nt, Homo sapiens
  misc_RNA (1)...(19): siRNA sense strand
gagccaagcuggagaaaca

SEQ ID NO: 73880 - RNA, 19 nt, Homo sapiens
  misc_RNA (1)...(19): siRNA sense strand
gagcagaaauucauuguac

SEQ ID NO: 73881 - RNA, 19 nt, Homo sapiens
  misc_RNA (1)...(19): siRNA sense strand
ccaaggacuuucaagauau

SEQ ID NO: 73882 - RNA, 19 nt, Homo sapiens
  misc_RNA (1)...(19): siRNA sense strand
gggcugaggcggagaagua

SEQ ID NO: 73883 - RNA, 19 nt, Homo sapiens
  misc_RNA (1)...(19): siRNA sense strand
gcccugcucuuccaucuga

SEQ ID NO: 73884 - RNA, 19 nt, Homo sapiens
  misc_RNA (1)...(19): siRNA sense strand
ucacucagccagauaauug

SEQ ID NO: 73885 - RNA, 19 nt, Homo sapiens
  misc_RNA (1)...(19): siRNA sense strand
gaaauucauuguacaacac

SEQ ID NO: 73886 - RNA, 19 nt, Homo sapiens
  misc_RNA (1)...(19): siRNA sense strand
ugacggagguccaggcaau

SEQ ID NO: 73887 - RNA, 19 nt, Homo sapiens
  misc_RNA (1)...(19): siRNA sense strand
gcagaaauucauuguacaa

SEQ ID NO: 73888 - RNA, 19 nt, Homo sapiens
  misc_RNA (1)...(19): siRNA sense strand
caagaucacaucccuagga

SEQ ID NO: 73889 - RNA, 19 nt, Homo sapiens
  misc_RNA (1)...(19): siRNA sense strand
caaggacuuucaagauauc

SEQ ID NO: 73890 - RNA, 19 nt, Homo sapiens
  misc_RNA (1)...(19): siRNA sense strand
agugauggcucuuggaaau

SEQ ID NO: 73891 - RNA, 19 nt, Homo sapiens
  misc_RNA (1)...(19): siRNA sense strand
uacaagaacugggcuguca

SEQ ID NO: 73892 - RNA, 19 nt, Homo sapiens
  misc_RNA (1)...(19): siRNA sense strand
gaagugaagacuguguuga

SEQ ID NO: 73893 - RNA, 19 nt, Homo sapiens
  misc_RNA (1)...(19): siRNA sense strand
cagcgugggugacaagauc

SEQ ID NO: 73894 - RNA, 19 nt, Homo sapiens
  misc_RNA (1)...(19): siRNA sense strand
ggagcagaaauucauugua

SEQ ID NO: 73895 - RNA, 19 nt, Homo sapiens
  misc_RNA (1)...(19): siRNA sense strand
ggaagugaagacuguguug

SEQ ID NO: 73896 - RNA, 19 nt, Homo sapiens
  misc_RNA (1)...(19): siRNA sense strand
gaccauccuuuccaucaag

SEQ ID NO: 73897 - RNA, 19 nt, Homo sapiens
  misc_RNA (1)...(19): siRNA sense strand
ggguggaagugaagacugu

SEQ ID NO: 73898 - RNA, 19 nt, Homo sapiens
  misc_RNA (1)...(19): siRNA sense strand
ggccaaggacuuucaagau

SEQ ID NO: 73899 - RNA, 19 nt, Homo sapiens
  misc_RNA (1)...(19): siRNA sense strand
gggaggagcagaaauucau

SEQ ID NO: 73900 - RNA, 19 nt, Homo sapiens
  misc_RNA (1)...(19): siRNA sense strand
ggaggagcagaaauucauu

SEQ ID NO: 73901 - RNA, 19 nt, Homo sapiens
  misc_RNA (1)...(19): siRNA sense strand
cgagcuggguggaagugaa

SEQ ID NO: 73902 - RNA, 19 nt, Homo sapiens
  misc_RNA (1)...(19): siRNA sense strand
ugaccauccuuuccaucaa

SEQ ID NO: 73903 - RNA, 19 nt, Homo sapiens
  misc_RNA (1)...(19): siRNA sense strand
gaggagcagaaauucauug

SEQ ID NO: 73904 - RNA, 19 nt, Homo sapiens
  misc_RNA (1)...(19): siRNA sense strand
gcacagacuauaggcacaa

SEQ ID NO: 73905 - RNA, 19 nt, Homo sapiens
  misc_RNA (1)...(19): siRNA sense strand
cagacuauaggcacaacua

SEQ ID NO: 73906 - RNA, 19 nt, Homo sapiens
  misc_RNA (1)...(19): siRNA sense strand
ccugaaagcagaucacgau

SEQ ID NO: 73907 - RNA, 19 nt, Homo sapiens
  misc_RNA (1)...(19): siRNA sense strand
guggauggcacagacuaua

SEQ ID NO: 73908 - RNA, 19 nt, Homo sapiens
  misc_RNA (1)...(19): siRNA sense strand
ccugggaggagcagaaauu

SEQ ID NO: 73909 - RNA, 19 nt, Homo sapiens
  misc_RNA (1)...(19): siRNA sense strand
agcaacggcucccaaagga

SEQ ID NO: 73910 - RNA, 19 nt, Homo sapiens
  misc_RNA (1)...(19): siRNA sense strand
cagcaacggcucccaaagg

SEQ ID NO: 73911 - RNA, 19 nt, Homo sapiens
  misc_RNA (1)...(19): siRNA sense strand
ugauggcucuuggaaaugg

SEQ ID NO: 73912 - RNA, 19 nt, Homo sapiens
  misc_RNA (1)...(19): siRNA sense strand
acuauaggcacaacuacaa

SEQ ID NO: 73913 - RNA, 19 nt, Homo sapiens
  misc_RNA (1)...(19): siRNA sense strand
aaaugaccauccuuuccau

SEQ ID NO: 73914 - RNA, 19 nt, Homo sapiens
  misc_RNA (1)...(19): siRNA sense strand
aagugaagacuguguugaa

SEQ ID NO: 73915 - RNA, 19 nt, Homo sapiens
  misc_RNA (1)...(19): siRNA sense strand
gccaaggacuuucaagaua

SEQ ID NO: 73916 - RNA, 19 nt, Homo sapiens
  misc_RNA (1)...(19): siRNA sense strand
gagccaagcuggagaaaca

SEQ ID NO: 73917 - RNA, 19 nt, Homo sapiens
  misc_RNA (1)...(19): siRNA sense strand
gagcagaaauucauuguac

SEQ ID NO: 73918 - RNA, 19 nt, Homo sapiens
  misc_RNA (1)...(19): siRNA sense strand
ccaaggacuuucaagauau

SEQ ID NO: 73919 - RNA, 19 nt, Homo sapiens
  misc_RNA (1)...(19): siRNA sense strand
gggcugaggcggagaagua

SEQ ID NO: 73920 - RNA, 19 nt, Homo sapiens
  misc_RNA (1)...(19): siRNA sense strand
gcccugcucuuccaucuga

SEQ ID NO: 73921 - RNA, 19 nt, Homo sapiens
  misc_RNA (1)...(19): siRNA sense strand
ucacucagccagauaauug

SEQ ID NO: 73922 - RNA, 19 nt, Homo sapiens
  misc_RNA (1)...(19): siRNA sense strand
gaaauucauuguacaacac

SEQ ID NO: 73923 - RNA, 19 nt, Homo sapiens
  misc_RNA (1)...(19): siRNA sense strand
ugacggagguccaggcaau

SEQ ID NO: 73924 - RNA, 19 nt, Homo sapiens
  misc_RNA (1)...(19): siRNA sense strand
gcagaaauucauuguacaa

SEQ ID NO: 73925 - RNA, 19 nt, Homo sapiens
  misc_RNA (1)...(19): siRNA sense strand
caagaucacaucccuagga

SEQ ID NO: 73926 - RNA, 19 nt, Homo sapiens
  misc_RNA (1)...(19): siRNA sense strand
caaggacuuucaagauauc

SEQ ID NO: 73927 - RNA, 19 nt, Homo sapiens
  misc_RNA (1)...(19): siRNA sense strand
agugauggcucuuggaaau

SEQ ID NO: 73928 - RNA, 19 nt, Homo sapiens
  misc_RNA (1)...(19): siRNA sense strand
uacaagaacugggcuguca

SEQ ID NO: 73929 - RNA, 19 nt, Homo sapiens
  misc_RNA (1)...(19): siRNA sense strand
gaagugaagacuguguuga

SEQ ID NO: 73930 - RNA, 19 nt, Homo sapiens
  misc_RNA (1)...(19): siRNA sense strand
cagcgugggugacaagauc

SEQ ID NO: 73931 - RNA, 19 nt, Homo sapiens
  misc_RNA (1)...(19): siRNA sense strand
ggagcagaaauucauugua

SEQ ID NO: 73932 - RNA, 19 nt, Homo sapiens
  misc_RNA (1)...(19): siRNA sense strand
ggaagugaagacuguguug

SEQ ID NO: 73933 - RNA, 19 nt, Homo sapiens
  misc_RNA (1)...(19): siRNA sense strand
gaccauccuuuccaucaag

SEQ ID NO: 73934 - RNA, 19 nt, Homo sapiens
  misc_RNA (1)...(19): siRNA sense strand
ggguggaagugaagacugu

SEQ ID NO: 73935 - RNA, 19 nt, Homo sapiens
  misc_RNA (1)...(19): siRNA sense strand
ggccaaggacuuucaagau

SEQ ID NO: 73936 - RNA, 19 nt, Homo sapiens
  misc_RNA (1)...(19): siRNA sense strand
gggaggagcagaaauucau

SEQ ID NO: 73937 - RNA, 19 nt, Homo sapiens
  misc_RNA (1)...(19): siRNA sense strand
ggaggagcagaaauucauu

SEQ ID NO: 73938 - RNA, 19 nt, Homo sapiens
  misc_RNA (1)...(19): siRNA sense strand
cgagcuggguggaagugaa

SEQ ID NO: 73939 - RNA, 19 nt, Homo sapiens
  misc_RNA (1)...(19): siRNA sense strand
ugaccauccuuuccaucaa

SEQ ID NO: 73940 - RNA, 19 nt, Homo sapiens
  misc_RNA (1)...(19): siRNA sense strand
gaggagcagaaauucauug

SEQ ID NO: 73941 - RNA, 19 nt, Homo sapiens
  misc_RNA (1)...(19): siRNA sense strand
gcacagacuauaggcacaa

SEQ ID NO: 73942 - RNA, 19 nt, Homo sapiens
  misc_RNA (1)...(19): siRNA sense strand
cagacuauaggcacaacua

SEQ ID NO: 73943 - RNA, 19 nt, Homo sapiens
  misc_RNA (1)...(19): siRNA sense strand
ccugaaagcagaucacgau

SEQ ID NO: 73944 - RNA, 19 nt, Homo sapiens
  misc_RNA (1)...(19): siRNA sense strand
guggauggcacagacuaua

SEQ ID NO: 73945 - RNA, 19 nt, Homo sapiens
  misc_RNA (1)...(19): siRNA sense strand
ccugggaggagcagaaauu

SEQ ID NO: 73946 - RNA, 19 nt, Homo sapiens
  misc_RNA (1)...(19): siRNA sense strand
agcaacggcucccaaagga

SEQ ID NO: 73947 - RNA, 19 nt, Homo sapiens
  misc_RNA (1)...(19): siRNA sense strand
cagcaacggcucccaaagg

SEQ ID NO: 73948 - RNA, 19 nt, Homo sapiens
  misc_RNA (1)...(19): siRNA sense strand
ugauggcucuuggaaaugg

SEQ ID NO: 73949 - RNA, 19 nt, Homo sapiens
  misc_RNA (1)...(19): siRNA sense strand
acuauaggcacaacuacaa

SEQ ID NO: 73950 - RNA, 19 nt, Homo sapiens
  misc_RNA (1)...(19): siRNA sense strand
aaaugaccauccuuuccau

SEQ ID NO: 73951 - RNA, 19 nt, Homo sapiens
  misc_RNA (1)...(19): siRNA sense strand
aagugaagacuguguugaa

SEQ ID NO: 73952 - RNA, 19 nt, Homo sapiens
  misc_RNA (1)...(19): siRNA sense strand
gcacagcaauggccaaaga

SEQ ID NO: 73953 - RNA, 19 nt, Homo sapiens
  misc_RNA (1)...(19): siRNA sense strand
ugacuaugcuguugguuua

SEQ ID NO: 73954 - RNA, 19 nt, Homo sapiens
  misc_RNA (1)...(19): siRNA sense strand
gcagugagcauguuucuug

SEQ ID NO: 73955 - RNA, 19 nt, Homo sapiens
  misc_RNA (1)...(19): siRNA sense strand
gaaauaguaagacagauug

SEQ ID NO: 73956 - RNA, 19 nt, Homo sapiens
  misc_RNA (1)...(19): siRNA sense strand
ggaccuaucuugccuucug

SEQ ID NO: 73957 - RNA, 19 nt, Homo sapiens
  misc_RNA (1)...(19): siRNA sense strand
gaacuuggaggaaacaaug

SEQ ID NO: 73958 - RNA, 19 nt, Homo sapiens
  misc_RNA (1)...(19): siRNA sense strand
ugaaagaucuggccaugca

SEQ ID NO: 73959 - RNA, 19 nt, Homo sapiens
  misc_RNA (1)...(19): siRNA sense strand
ggagaagucuguuggaacu

SEQ ID NO: 73960 - RNA, 19 nt, Homo sapiens
  misc_RNA (1)...(19): siRNA sense strand
ggaagaagcaaagaaagaa

SEQ ID NO: 73961 - RNA, 19 nt, Homo sapiens
  misc_RNA (1)...(19): siRNA sense strand
ggagaaauaguaagacaga

SEQ ID NO: 73962 - RNA, 19 nt, Homo sapiens
  misc_RNA (1)...(19): siRNA sense strand
ccaaccacuucccucauua

SEQ ID NO: 73963 - RNA, 19 nt, Homo sapiens
  misc_RNA (1)...(19): siRNA sense strand
caagcugccuggugcaauu

SEQ ID NO: 73964 - RNA, 19 nt, Homo sapiens
  misc_RNA (1)...(19): siRNA sense strand
gaggagaaauaguaagaca

SEQ ID NO: 73965 - RNA, 19 nt, Homo sapiens
  misc_RNA (1)...(19): siRNA sense strand
gcaauuuguuccuugacuu

SEQ ID NO: 73966 - RNA, 19 nt, Homo sapiens
  misc_RNA (1)...(19): siRNA sense strand
cagcuuaguuguuccauca

SEQ ID NO: 73967 - RNA, 19 nt, Homo sapiens
  misc_RNA (1)...(19): siRNA sense strand
gaccucagcuuaguuguuc

SEQ ID NO: 73968 - RNA, 19 nt, Homo sapiens
  misc_RNA (1)...(19): siRNA sense strand
ggagaagauccaaguacua

SEQ ID NO: 73969 - RNA, 19 nt, Homo sapiens
  misc_RNA (1)...(19): siRNA sense strand
caaguagcaucuuuaccaa

SEQ ID NO: 73970 - RNA, 19 nt, Homo sapiens
  misc_RNA (1)...(19): siRNA sense strand
ggaucgcccuggaaauuau

SEQ ID NO: 73971 - RNA, 19 nt, Homo sapiens
  misc_RNA (1)...(19): siRNA sense strand
gccaugaucuguggaaaug

SEQ ID NO: 73972 - RNA, 19 nt, Homo sapiens
  misc_RNA (1)...(19): siRNA sense strand
gaagauccaaguacuagga

SEQ ID NO: 73973 - RNA, 19 nt, Homo sapiens
  misc_RNA (1)...(19): siRNA sense strand
gagugaaccugcuguccuu

SEQ ID NO: 73974 - RNA, 19 nt, Homo sapiens
  misc_RNA (1)...(19): siRNA sense strand
caacuacaguaaagaccuu

SEQ ID NO: 73975 - RNA, 19 nt, Homo sapiens
  misc_RNA (1)...(19): siRNA sense strand
gaagaaacuguaaagaaag

SEQ ID NO: 73976 - RNA, 19 nt, Homo sapiens
  misc_RNA (1)...(19): siRNA sense strand
gaagcuuggugucuuugga

SEQ ID NO: 73977 - RNA, 19 nt, Homo sapiens
  misc_RNA (1)...(19): siRNA sense strand
ccacucuccucaucaauca

SEQ ID NO: 73978 - RNA, 19 nt, Homo sapiens
  misc_RNA (1)...(19): siRNA sense strand
gcuguugguuuaucaagga

SEQ ID NO: 73979 - RNA, 19 nt, Homo sapiens
  misc_RNA (1)...(19): siRNA sense strand
augagaaggucuacuugua

SEQ ID NO: 73980 - RNA, 19 nt, Homo sapiens
  misc_RNA (1)...(19): siRNA sense strand
caggagagguuugggagaa

SEQ ID NO: 73981 - RNA, 19 nt, Homo sapiens
  misc_RNA (1)...(19): siRNA sense strand
gcagaccucagcuuaguug

SEQ ID NO: 73982 - RNA, 19 nt, Homo sapiens
  misc_RNA (1)...(19): siRNA sense strand
ccgauucucuaugucuuua

SEQ ID NO: 73983 - RNA, 19 nt, Homo sapiens
  misc_RNA (1)...(19): siRNA sense strand
guaaagaaagcaagagaag

SEQ ID NO: 73984 - RNA, 19 nt, Homo sapiens
  misc_RNA (1)...(19): siRNA sense strand
gaaggucuacuuguacuau

SEQ ID NO: 73985 - RNA, 19 nt, Homo sapiens
  misc_RNA (1)...(19): siRNA sense strand
gagaaggucuacuuguacu

SEQ ID NO: 73986 - RNA, 19 nt, Homo sapiens
  misc_RNA (1)...(19): siRNA sense strand
gagaagauccaaguacuag

SEQ ID NO: 73987 - RNA, 19 nt, Homo sapiens
  misc_RNA (1)...(19): siRNA sense strand
aaacgaggagaaauaguaa

SEQ ID NO: 73988 - RNA, 19 nt, Homo sapiens
  misc_RNA (1)...(19): siRNA sense strand
ccaagguucuggaggacaa

SEQ ID NO: 73989 - RNA, 19 nt, Homo sapiens
  misc_RNA (1)...(19): siRNA sense strand
uaggaagcuuggugucuuu

SEQ ID NO: 73990 - RNA, 19 nt, Homo sapiens
  misc_RNA (1)...(19): siRNA sense strand
guggauaucugugacuaug

SEQ ID NO: 73991 - RNA, 19 nt, Homo sapiens
  misc_RNA (1)...(19): siRNA sense strand
cuacuuguacuaucaacua

SEQ ID NO: 73992 - RNA, 19 nt, Homo sapiens
  misc_RNA (1)...(19): siRNA sense strand
gcuuggaccuaaaggauca

SEQ ID NO: 73993 - RNA, 19 nt, Homo sapiens
  misc_RNA (1)...(19): siRNA sense strand
ggacccuaauguucucuau

SEQ ID NO: 73994 - RNA, 19 nt, Homo sapiens
  misc_RNA (1)...(19): siRNA sense strand
gagguuguaaacagacuua

SEQ ID NO: 73995 - RNA, 19 nt, Homo sapiens
  misc_RNA (1)...(19): siRNA sense strand
gauaauagccaagguucug

SEQ ID NO: 73996 - RNA, 19 nt, Homo sapiens
  misc_RNA (1)...(19): siRNA sense strand
ggaucagacuguggcauug

SEQ ID NO: 73997 - RNA, 19 nt, Homo sapiens
  misc_RNA (1)...(19): siRNA sense strand
ggaaacaguacaugagaag

SEQ ID NO: 73998 - RNA, 19 nt, Homo sapiens
  misc_RNA (1)...(19): siRNA sense strand
guagaaccgacaauuguga

SEQ ID NO: 73999 - RNA, 19 nt, Homo sapiens
  misc_RNA (1)...(19): siRNA sense strand
ucaaguagcaucuuuacca

SEQ ID NO: 74000 - RNA, 19 nt, Homo sapiens
  misc_RNA (1)...(19): siRNA sense strand
uaacaacgagccaauagca

SEQ ID NO: 74001 - RNA, 19 nt, Homo sapiens
  misc_RNA (1)...(19): siRNA sense strand
aaagaaagcaagagaagca

SEQ ID NO: 74002 - RNA, 19 nt, Homo sapiens
  misc_RNA (1)...(19): siRNA sense strand
gauuggaggaccuaucuug

SEQ ID NO: 74003 - RNA, 19 nt, Homo sapiens
  misc_RNA (1)...(19): siRNA sense strand
guucaggaguauguggaua

SEQ ID NO: 74004 - RNA, 19 nt, Homo sapiens
  misc_RNA (1)...(19): siRNA sense strand
cgaggcgacuguuuauaca

SEQ ID NO: 74005 - RNA, 19 nt, Homo sapiens
  misc_RNA (1)...(19): siRNA sense strand
cagcaauggccaaagauga

SEQ ID NO: 74006 - RNA, 19 nt, Homo sapiens
  misc_RNA (1)...(19): siRNA sense strand
ggugcaauuuguuccuuga

SEQ ID NO: 74007 - RNA, 19 nt, Homo sapiens
  misc_RNA (1)...(19): siRNA sense strand
cuaggaagcuuggugucuu

SEQ ID NO: 74008 - RNA, 19 nt, Homo sapiens
  misc_RNA (1)...(19): siRNA sense strand
gcagggagucuggcaguga

SEQ ID NO: 74009 - RNA, 19 nt, Homo sapiens
  misc_RNA (1)...(19): siRNA sense strand
gcagauauuggcacagcaa

SEQ ID NO: 74010 - RNA, 19 nt, Homo sapiens
  misc_RNA (1)...(19): siRNA sense strand
ggauaucugugacuaugcu

SEQ ID NO: 74011 - RNA, 19 nt, Homo sapiens
  misc_RNA (1)...(19): siRNA sense strand
ugaugagguuguaaacaga

SEQ ID NO: 74012 - RNA, 19 nt, Homo sapiens
  misc_RNA (1)...(19): siRNA sense strand
gcuaacaacgagccaauag

SEQ ID NO: 74013 - RNA, 19 nt, Homo sapiens
  misc_RNA (1)...(19): siRNA sense strand
caacgagccaauagcaaga

SEQ ID NO: 74014 - RNA, 19 nt, Homo sapiens
  misc_RNA (1)...(19): siRNA sense strand
caaagauaauagccaaggu

SEQ ID NO: 74015 - RNA, 19 nt, Homo sapiens
  misc_RNA (1)...(19): siRNA sense strand
caucacggcauucaauuuc

SEQ ID NO: 74016 - RNA, 19 nt, Homo sapiens
  misc_RNA (1)...(19): siRNA sense strand
gaccuaucuugccuucuga

SEQ ID NO: 74017 - RNA, 19 nt, Homo sapiens
  misc_RNA (1)...(19): siRNA sense strand
gaagaagcaaagaaagaag

SEQ ID NO: 74018 - RNA, 19 nt, Homo sapiens
  misc_RNA (1)...(19): siRNA sense strand
cccaaggaaucaaguuuca

SEQ ID NO: 74019 - RNA, 19 nt, Homo sapiens
  misc_RNA (1)...(19): siRNA sense strand
ugcauggaauaaugaagua

SEQ ID NO: 74020 - RNA, 19 nt, Homo sapiens
  misc_RNA (1)...(19): siRNA sense strand
guugguuuaucaaggauga

SEQ ID NO: 74021 - RNA, 19 nt, Homo sapiens
  misc_RNA (1)...(19): siRNA sense strand
uggaaacaguacaugagaa

SEQ ID NO: 74022 - RNA, 19 nt, Homo sapiens
  misc_RNA (1)...(19): siRNA sense strand
gcaggcagugagcauguuu

SEQ ID NO: 74023 - RNA, 19 nt, Homo sapiens
  misc_RNA (1)...(19): siRNA sense strand
gcgaggcgacuguuuauac

SEQ ID NO: 74024 - RNA, 19 nt, Homo sapiens
  misc_RNA (1)...(19): siRNA sense strand
uccaaccacuucccucauu

SEQ ID NO: 74025 - RNA, 19 nt, Homo sapiens
  misc_RNA (1)...(19): siRNA sense strand
ggaaggugugggugaaguu

SEQ ID NO: 74026 - RNA, 19 nt, Homo sapiens
  misc_RNA (1)...(19): siRNA sense strand
caaggaaucaaguuucagu

SEQ ID NO: 74027 - RNA, 19 nt, Homo sapiens
  misc_RNA (1)...(19): siRNA sense strand
gcagugaugccuggaaaca

SEQ ID NO: 74028 - RNA, 19 nt, Homo sapiens
  misc_RNA (1)...(19): siRNA sense strand
ggagagguuugggagaagu

SEQ ID NO: 74029 - RNA, 19 nt, Homo sapiens
  misc_RNA (1)...(19): siRNA sense strand
caugaucuguggaaauguc

SEQ ID NO: 74030 - RNA, 19 nt, Homo sapiens
  misc_RNA (1)...(19): siRNA sense strand
gagggcguguauaauggaa

SEQ ID NO: 74031 - RNA, 19 nt, Homo sapiens
  misc_RNA (1)...(19): siRNA sense strand
gaaacuguaaagaaagcaa

SEQ ID NO: 74032 - RNA, 19 nt, Homo sapiens
  misc_RNA (1)...(19): siRNA sense strand
gugacuaugcuguugguuu

SEQ ID NO: 74033 - RNA, 19 nt, Homo sapiens
  misc_RNA (1)...(19): siRNA sense strand
ggcagacuaugaagaaacu

SEQ ID NO: 74034 - RNA, 19 nt, Homo sapiens
  misc_RNA (1)...(19): siRNA sense strand
ucgcuccgauucucuaugu

SEQ ID NO: 74035 - RNA, 19 nt, Homo sapiens
  misc_RNA (1)...(19): siRNA sense strand
cccuggaaauuauguagaa

SEQ ID NO: 74036 - RNA, 19 nt, Homo sapiens
  misc_RNA (1)...(19): siRNA sense strand
uggaagaagcaaagaaaga

SEQ ID NO: 74037 - RNA, 19 nt, Homo sapiens
  misc_RNA (1)...(19): siRNA sense strand
agaugcagaccucagcuua

SEQ ID NO: 74038 - RNA, 19 nt, Homo sapiens
  misc_RNA (1)...(19): siRNA sense strand
aaagauaauagccaagguu

SEQ ID NO: 74039 - RNA, 19 nt, Homo sapiens
  misc_RNA (1)...(19): siRNA sense strand
gaaaugucugccucuggaa

SEQ ID NO: 74040 - RNA, 19 nt, Homo sapiens
  misc_RNA (1)...(19): siRNA sense strand
ggcgacuguuuauacauga

SEQ ID NO: 74041 - RNA, 19 nt, Homo sapiens
  misc_RNA (1)...(19): siRNA sense strand
gagaaauaguaagacagau

SEQ ID NO: 74042 - RNA, 19 nt, Homo sapiens
  misc_RNA (1)...(19): siRNA sense strand
caauuuguuccuugacuug

SEQ ID NO: 74043 - RNA, 19 nt, Homo sapiens
  misc_RNA (1)...(19): siRNA sense strand
acuaucaacuacaguaaag

SEQ ID NO: 74044 - RNA, 19 nt, Homo sapiens
  misc_RNA (1)...(19): siRNA sense strand
ggaaaacgagggcguguau

SEQ ID NO: 74045 - RNA, 19 nt, Homo sapiens
  misc_RNA (1)...(19): siRNA sense strand
uauguagaaccgacaauug

SEQ ID NO: 74046 - RNA, 19 nt, Homo sapiens
  misc_RNA (1)...(19): siRNA sense strand
gguuguaaacagacuuaaa

SEQ ID NO: 74047 - RNA, 19 nt, Homo sapiens
  misc_RNA (1)...(19): siRNA sense strand
gcacucaggugggaaaaca

SEQ ID NO: 74048 - RNA, 19 nt, Homo sapiens
  misc_RNA (1)...(19): siRNA sense strand
ggagcacucaggugggaaa

SEQ ID NO: 74049 - RNA, 19 nt, Homo sapiens
  misc_RNA (1)...(19): siRNA sense strand
cauuauugccuuugaagau

SEQ ID NO: 74050 - RNA, 19 nt, Homo sapiens
  misc_RNA (1)...(19): siRNA sense strand
gcgacuguuuauacaugaa

SEQ ID NO: 74051 - RNA, 19 nt, Homo sapiens
  misc_RNA (1)...(19): siRNA sense strand
cagauauuccugcuccaaa

SEQ ID NO: 74052 - RNA, 19 nt, Homo sapiens
  misc_RNA (1)...(19): siRNA sense strand
ccaagaagguggccguaaa

SEQ ID NO: 74053 - RNA, 19 nt, Homo sapiens
  misc_RNA (1)...(19): siRNA sense strand
cugcagcccuccuacuauu

SEQ ID NO: 74054 - RNA, 19 nt, Homo sapiens
  misc_RNA (1)...(19): siRNA sense strand
ccagaaccgucgcuacaag

SEQ ID NO: 74055 - RNA, 19 nt, Homo sapiens
  misc_RNA (1)...(19): siRNA sense strand
gcgacgaccagagacaaua

SEQ ID NO: 74056 - RNA, 19 nt, Homo sapiens
  misc_RNA (1)...(19): siRNA sense strand
aggcgauccucaacaagaa

SEQ ID NO: 74057 - RNA, 19 nt, Homo sapiens
  misc_RNA (1)...(19): siRNA sense strand
caagaagguggccguaaag

SEQ ID NO: 74058 - RNA, 19 nt, Homo sapiens
  misc_RNA (1)...(19): siRNA sense strand
gcuggccgcuuccaaagac

SEQ ID NO: 74059 - RNA, 19 nt, Homo sapiens
  misc_RNA (1)...(19): siRNA sense strand
caggcgauccucaacaaga

SEQ ID NO: 74060 - RNA, 19 nt, Homo sapiens
  misc_RNA (1)...(19): siRNA sense strand
ugagcuggccgcuuccaaa

SEQ ID NO: 74061 - RNA, 19 nt, Homo sapiens
  misc_RNA (1)...(19): siRNA sense strand
ccaacaccuugacguccuu

SEQ ID NO: 74062 - RNA, 19 nt, Homo sapiens
  misc_RNA (1)...(19): siRNA sense strand
aaccgucgcuacaagacaa

SEQ ID NO: 74063 - RNA, 19 nt, Homo sapiens
  misc_RNA (1)...(19): siRNA sense strand
uccaggcgauccucaacaa

SEQ ID NO: 74064 - RNA, 19 nt, Homo sapiens
  misc_RNA (1)...(19): siRNA sense strand
gaaccgucgcuacaagaca

SEQ ID NO: 74065 - RNA, 19 nt, Homo sapiens
  misc_RNA (1)...(19): siRNA sense strand
gagcuggccgcuuccaaag

SEQ ID NO: 74066 - RNA, 19 nt, Homo sapiens
  misc_RNA (1)...(19): siRNA sense strand
gauguccgccagcgucuca

SEQ ID NO: 74067 - RNA, 19 nt, Homo sapiens
  misc_RNA (1)...(19): siRNA sense strand
cagaaccgucgcuacaaga

SEQ ID NO: 74068 - RNA, 19 nt, Homo sapiens
  misc_RNA (1)...(19): siRNA sense strand
acuauuacccguacuacug

SEQ ID NO: 74069 - RNA, 19 nt, Homo sapiens
  misc_RNA (1)...(19): siRNA sense strand
cacugcagcccuccuacua

SEQ ID NO: 74070 - RNA, 19 nt, Homo sapiens
  misc_RNA (1)...(19): siRNA sense strand
gcagcccuccuacuauuac

SEQ ID NO: 74071 - RNA, 19 nt, Homo sapiens
  misc_RNA (1)...(19): siRNA sense strand
ggauacagcuggagucagu

SEQ ID NO: 74072 - RNA, 19 nt, Homo sapiens
  misc_RNA (1)...(19): siRNA sense strand
ccuacaagcuuucccagaa

SEQ ID NO: 74073 - RNA, 19 nt, Homo sapiens
  misc_RNA (1)...(19): siRNA sense strand
ggaggcaggcgacgaguuu

SEQ ID NO: 74074 - RNA, 19 nt, Homo sapiens
  misc_RNA (1)...(19): siRNA sense strand
ggagucaguuuagugaugu

SEQ ID NO: 74075 - RNA, 19 nt, Homo sapiens
  misc_RNA (1)...(19): siRNA sense strand
uuagugauguggaagagaa

SEQ ID NO: 74076 - RNA, 19 nt, Homo sapiens
  misc_RNA (1)...(19): siRNA sense strand
gacagcauaucagagcuuu

SEQ ID NO: 74077 - RNA, 19 nt, Homo sapiens
  misc_RNA (1)...(19): siRNA sense strand
ggaacucuaugggaacaau

SEQ ID NO: 74078 - RNA, 19 nt, Homo sapiens
  misc_RNA (1)...(19): siRNA sense strand
ggacugaaucggagaugga

SEQ ID NO: 74079 - RNA, 19 nt, Homo sapiens
  misc_RNA (1)...(19): siRNA sense strand
cagcauaucagagcuuuga

SEQ ID NO: 74080 - RNA, 19 nt, Homo sapiens
  misc_RNA (1)...(19): siRNA sense strand
gcuggagucaguuuaguga

SEQ ID NO: 74081 - RNA, 19 nt, Homo sapiens
  misc_RNA (1)...(19): siRNA sense strand
ucaguuuagugauguggaa

SEQ ID NO: 74082 - RNA, 19 nt, Homo sapiens
  misc_RNA (1)...(19): siRNA sense strand
ggagcuggugguugacuuu

SEQ ID NO: 74083 - RNA, 19 nt, Homo sapiens
  misc_RNA (1)...(19): siRNA sense strand
ggacagcauaucagagcuu

SEQ ID NO: 74084 - RNA, 19 nt, Homo sapiens
  misc_RNA (1)...(19): siRNA sense strand
uggagucaguuuagugaug

SEQ ID NO: 74085 - RNA, 19 nt, Homo sapiens
  misc_RNA (1)...(19): siRNA sense strand
cugcugggcucacucuuca

SEQ ID NO: 74086 - RNA, 19 nt, Homo sapiens
  misc_RNA (1)...(19): siRNA sense strand
accgggagcuggugguuga

SEQ ID NO: 74087 - RNA, 19 nt, Homo sapiens
  misc_RNA (1)...(19): siRNA sense strand
ccagggacagcauaucaga

SEQ ID NO: 74088 - RNA, 19 nt, Homo sapiens
  misc_RNA (1)...(19): siRNA sense strand
acucuucagucggaaauga

SEQ ID NO: 74089 - RNA, 19 nt, Homo sapiens
  misc_RNA (1)...(19): siRNA sense strand
gggagcuggugguugacuu

SEQ ID NO: 74090 - RNA, 19 nt, Homo sapiens
  misc_RNA (1)...(19): siRNA sense strand
cauaucagagcuuugaaca

SEQ ID NO: 74091 - RNA, 19 nt, Homo sapiens
  misc_RNA (1)...(19): siRNA sense strand
gagccgaaagggccaggaa

SEQ ID NO: 74092 - RNA, 19 nt, Homo sapiens
  misc_RNA (1)...(19): siRNA sense strand
uggaagagaacaggacuga

SEQ ID NO: 74093 - RNA, 19 nt, Homo sapiens
  misc_RNA (1)...(19): siRNA sense strand
gaacucuaugggaacaaug

SEQ ID NO: 74094 - RNA, 19 nt, Homo sapiens
  misc_RNA (1)...(19): siRNA sense strand
cauggcagcaguaaagcaa

SEQ ID NO: 74095 - RNA, 19 nt, Homo sapiens
  misc_RNA (1)...(19): siRNA sense strand
ggccacagcagcaguuugg

SEQ ID NO: 74096 - RNA, 19 nt, Homo sapiens
  misc_RNA (1)...(19): siRNA sense strand
ccacagcagcaguuuggau

SEQ ID NO: 74097 - RNA, 19 nt, Homo sapiens
  misc_RNA (1)...(19): siRNA sense strand
cagcuggagucaguuuagu

SEQ ID NO: 74098 - RNA, 19 nt, Homo sapiens
  misc_RNA (1)...(19): siRNA sense strand
gcuggugguugacuuucuc

SEQ ID NO: 74099 - RNA, 19 nt, Homo sapiens
  misc_RNA (1)...(19): siRNA sense strand
guggaacucuaugggaaca

SEQ ID NO: 74100 - RNA, 19 nt, Homo sapiens
  misc_RNA (1)...(19): siRNA sense strand
ugguugacuuucucuccua

SEQ ID NO: 74101 - RNA, 19 nt, Homo sapiens
  misc_RNA (1)...(19): siRNA sense strand
ugacaucccagcuccacau

SEQ ID NO: 74102 - RNA, 19 nt, Homo sapiens
  misc_RNA (1)...(19): siRNA sense strand
ggauacagcuggagucagu

SEQ ID NO: 74103 - RNA, 19 nt, Homo sapiens
  misc_RNA (1)...(19): siRNA sense strand
ccuacaagcuuucccagaa

SEQ ID NO: 74104 - RNA, 19 nt, Homo sapiens
  misc_RNA (1)...(19): siRNA sense strand
ggaggcaggcgacgaguuu

SEQ ID NO: 74105 - RNA, 19 nt, Homo sapiens
  misc_RNA (1)...(19): siRNA sense strand
ggagucaguuuagugaugu

SEQ ID NO: 74106 - RNA, 19 nt, Homo sapiens
  misc_RNA (1)...(19): siRNA sense strand
uuagugauguggaagagaa

SEQ ID NO: 74107 - RNA, 19 nt, Homo sapiens
  misc_RNA (1)...(19): siRNA sense strand
gacagcauaucagagcuuu

SEQ ID NO: 74108 - RNA, 19 nt, Homo sapiens
  misc_RNA (1)...(19): siRNA sense strand
ggaacucuaugggaacaau

SEQ ID NO: 74109 - RNA, 19 nt, Homo sapiens
  misc_RNA (1)...(19): siRNA sense strand
ggacugaaucggagaugga

SEQ ID NO: 74110 - RNA, 19 nt, Homo sapiens
  misc_RNA (1)...(19): siRNA sense strand
cagcauaucagagcuuuga

SEQ ID NO: 74111 - RNA, 19 nt, Homo sapiens
  misc_RNA (1)...(19): siRNA sense strand
gcuggagucaguuuaguga

SEQ ID NO: 74112 - RNA, 19 nt, Homo sapiens
  misc_RNA (1)...(19): siRNA sense strand
ucaguuuagugauguggaa

SEQ ID NO: 74113 - RNA, 19 nt, Homo sapiens
  misc_RNA (1)...(19): siRNA sense strand
ggagcuggugguugacuuu

SEQ ID NO: 74114 - RNA, 19 nt, Homo sapiens
  misc_RNA (1)...(19): siRNA sense strand
ggacagcauaucagagcuu

SEQ ID NO: 74115 - RNA, 19 nt, Homo sapiens
  misc_RNA (1)...(19): siRNA sense strand
uggagucaguuuagugaug

SEQ ID NO: 74116 - RNA, 19 nt, Homo sapiens
  misc_RNA (1)...(19): siRNA sense strand
cugcugggcucacucuuca

SEQ ID NO: 74117 - RNA, 19 nt, Homo sapiens
  misc_RNA (1)...(19): siRNA sense strand
accgggagcuggugguuga

SEQ ID NO: 74118 - RNA, 19 nt, Homo sapiens
  misc_RNA (1)...(19): siRNA sense strand
ccagggacagcauaucaga

SEQ ID NO: 74119 - RNA, 19 nt, Homo sapiens
  misc_RNA (1)...(19): siRNA sense strand
acucuucagucggaaauga

SEQ ID NO: 74120 - RNA, 19 nt, Homo sapiens
  misc_RNA (1)...(19): siRNA sense strand
gggagcuggugguugacuu

SEQ ID NO: 74121 - RNA, 19 nt, Homo sapiens
  misc_RNA (1)...(19): siRNA sense strand
cauaucagagcuuugaaca

SEQ ID NO: 74122 - RNA, 19 nt, Homo sapiens
  misc_RNA (1)...(19): siRNA sense strand
gagccgaaagggccaggaa

SEQ ID NO: 74123 - RNA, 19 nt, Homo sapiens
  misc_RNA (1)...(19): siRNA sense strand
uggaagagaacaggacuga

SEQ ID NO: 74124 - RNA, 19 nt, Homo sapiens
  misc_RNA (1)...(19): siRNA sense strand
gaacucuaugggaacaaug

SEQ ID NO: 74125 - RNA, 19 nt, Homo sapiens
  misc_RNA (1)...(19): siRNA sense strand
cauggcagcaguaaagcaa

SEQ ID NO: 74126 - RNA, 19 nt, Homo sapiens
  misc_RNA (1)...(19): siRNA sense strand
ggccacagcagcaguuugg

SEQ ID NO: 74127 - RNA, 19 nt, Homo sapiens
  misc_RNA (1)...(19): siRNA sense strand
ccacagcagcaguuuggau

SEQ ID NO: 74128 - RNA, 19 nt, Homo sapiens
  misc_RNA (1)...(19): siRNA sense strand
cagcuggagucaguuuagu

SEQ ID NO: 74129 - RNA, 19 nt, Homo sapiens
  misc_RNA (1)...(19): siRNA sense strand
gcuggugguugacuuucuc

SEQ ID NO: 74130 - RNA, 19 nt, Homo sapiens
  misc_RNA (1)...(19): siRNA sense strand
guggaacucuaugggaaca

SEQ ID NO: 74131 - RNA, 19 nt, Homo sapiens
  misc_RNA (1)...(19): siRNA sense strand
ugguugacuuucucuccua

SEQ ID NO: 74132 - RNA, 19 nt, Homo sapiens
  misc_RNA (1)...(19): siRNA sense strand
ugacaucccagcuccacau

SEQ ID NO: 74133 - RNA, 19 nt, Homo sapiens
  misc_RNA (1)...(19): siRNA sense strand
ggacugagcuuaauaauuu

SEQ ID NO: 74134 - RNA, 19 nt, Homo sapiens
  misc_RNA (1)...(19): siRNA sense strand
gauaaacucugaaccauua

SEQ ID NO: 74135 - RNA, 19 nt, Homo sapiens
  misc_RNA (1)...(19): siRNA sense strand
caacuucgauguucuucua

SEQ ID NO: 74136 - RNA, 19 nt, Homo sapiens
  misc_RNA (1)...(19): siRNA sense strand
gagcaggacuggugaugaa

SEQ ID NO: 74137 - RNA, 19 nt, Homo sapiens
  misc_RNA (1)...(19): siRNA sense strand
uaaggaagauaaacucuga

SEQ ID NO: 74138 - RNA, 19 nt, Homo sapiens
  misc_RNA (1)...(19): siRNA sense strand
ggagauagagaaaucaauu

SEQ ID NO: 74139 - RNA, 19 nt, Homo sapiens
  misc_RNA (1)...(19): siRNA sense strand
gaaaggaacgaaugcgauu

SEQ ID NO: 74140 - RNA, 19 nt, Homo sapiens
  misc_RNA (1)...(19): siRNA sense strand
gaagauaaacucugaacca

SEQ ID NO: 74141 - RNA, 19 nt, Homo sapiens
  misc_RNA (1)...(19): siRNA sense strand
ggaggaaggcgcaaccauu

SEQ ID NO: 74142 - RNA, 19 nt, Homo sapiens
  misc_RNA (1)...(19): siRNA sense strand
cuacggagauagagaaauc

SEQ ID NO: 74143 - RNA, 19 nt, Homo sapiens
  misc_RNA (1)...(19): siRNA sense strand
uugcauaccuugucaacuu

SEQ ID NO: 74144 - RNA, 19 nt, Homo sapiens
  misc_RNA (1)...(19): siRNA sense strand
gcgauucucuggaccuguu

SEQ ID NO: 74145 - RNA, 19 nt, Homo sapiens
  misc_RNA (1)...(19): siRNA sense strand
caugucagcguuauuguaa

SEQ ID NO: 74146 - RNA, 19 nt, Homo sapiens
  misc_RNA (1)...(19): siRNA sense strand
ggacuggugaugaaauuau

SEQ ID NO: 74147 - RNA, 19 nt, Homo sapiens
  misc_RNA (1)...(19): siRNA sense strand
gaagaaugcaccugugaag

SEQ ID NO: 74148 - RNA, 19 nt, Homo sapiens
  misc_RNA (1)...(19): siRNA sense strand
caggacuggugaugaaauu

SEQ ID NO: 74149 - RNA, 19 nt, Homo sapiens
  misc_RNA (1)...(19): siRNA sense strand
gaggaaggcgcaaccauuc

SEQ ID NO: 74150 - RNA, 19 nt, Homo sapiens
  misc_RNA (1)...(19): siRNA sense strand
cuucgauguucuucuaaua

SEQ ID NO: 74151 - RNA, 19 nt, Homo sapiens
  misc_RNA (1)...(19): siRNA sense strand
aaccgaaggucgacucuga

SEQ ID NO: 74152 - RNA, 19 nt, Homo sapiens
  misc_RNA (1)...(19): siRNA sense strand
ggaagaaugcaccugugaa

SEQ ID NO: 74153 - RNA, 19 nt, Homo sapiens
  misc_RNA (1)...(19): siRNA sense strand
ugugaagacugcaucaaga

SEQ ID NO: 74154 - RNA, 19 nt, Homo sapiens
  misc_RNA (1)...(19): siRNA sense strand
gggcauggcuaacauugac

SEQ ID NO: 74155 - RNA, 19 nt, Homo sapiens
  misc_RNA (1)...(19): siRNA sense strand
gacuggugaugaaauuauu

SEQ ID NO: 74156 - RNA, 19 nt, Homo sapiens
  misc_RNA (1)...(19): siRNA sense strand
gggacugagcuuaauaauu

SEQ ID NO: 74157 - RNA, 19 nt, Homo sapiens
  misc_RNA (1)...(19): siRNA sense strand
ggaaggcgcaaccauucuu

SEQ ID NO: 74158 - RNA, 19 nt, Homo sapiens
  misc_RNA (1)...(19): siRNA sense strand
ucuaauacuccuccucuaa

SEQ ID NO: 74159 - RNA, 19 nt, Homo sapiens
  misc_RNA (1)...(19): siRNA sense strand
acgaaugacuauugcaaga

SEQ ID NO: 74160 - RNA, 19 nt, Homo sapiens
  misc_RNA (1)...(19): siRNA sense strand
ugucagcguuauuguaaug

SEQ ID NO: 74161 - RNA, 19 nt, Homo sapiens
  misc_RNA (1)...(19): siRNA sense strand
uaauacuccuccucuaaca

SEQ ID NO: 74162 - RNA, 19 nt, Homo sapiens
  misc_RNA (1)...(19): siRNA sense strand
gggcagugcucccaaaaug

SEQ ID NO: 74163 - RNA, 19 nt, Homo sapiens
  misc_RNA (1)...(19): siRNA sense strand
gaaugcaccugugaagacu

SEQ ID NO: 74164 - RNA, 19 nt, Homo sapiens
  misc_RNA (1)...(19): siRNA sense strand
gaaggcgcaaccauucuug

SEQ ID NO: 74165 - RNA, 19 nt, Homo sapiens
  misc_RNA (1)...(19): siRNA sense strand
gaaaacgaaugacuauugc

SEQ ID NO: 74166 - RNA, 19 nt, Homo sapiens
  misc_RNA (1)...(19): siRNA sense strand
aaacgaaugacuauugcaa

SEQ ID NO: 74167 - RNA, 19 nt, Homo sapiens
  misc_RNA (1)...(19): siRNA sense strand
gacaguuuguugcaugcuu

SEQ ID NO: 74168 - RNA, 19 nt, Homo sapiens
  misc_RNA (1)...(19): siRNA sense strand
ggugaugaaauuauucuuc

SEQ ID NO: 74169 - RNA, 19 nt, Homo sapiens
  misc_RNA (1)...(19): siRNA sense strand
cgaaaacgaaugacuauug

SEQ ID NO: 74170 - RNA, 19 nt, Homo sapiens
  misc_RNA (1)...(19): siRNA sense strand
aagauaaacucugaaccau

SEQ ID NO: 74171 - RNA, 19 nt, Homo sapiens
  misc_RNA (1)...(19): siRNA sense strand
gcaggacuggugaugaaau

SEQ ID NO: 74172 - RNA, 19 nt, Homo sapiens
  misc_RNA (1)...(19): siRNA sense strand
augcaagugugaccaauuc

SEQ ID NO: 74173 - RNA, 19 nt, Homo sapiens
  misc_RNA (1)...(19): siRNA sense strand
cgacucugaccauugcuuu

SEQ ID NO: 74174 - RNA, 19 nt, Homo sapiens
  misc_RNA (1)...(19): siRNA sense strand
guaaugcaagugugaccaa

SEQ ID NO: 74175 - RNA, 19 nt, Homo sapiens
  misc_RNA (1)...(19): siRNA sense strand
ccagcugcuuugagugcua

SEQ ID NO: 74176 - RNA, 19 nt, Homo sapiens
  misc_RNA (1)...(19): siRNA sense strand
gcuuuccacucccagcuau

SEQ ID NO: 74177 - RNA, 19 nt, Homo sapiens
  misc_RNA (1)...(19): siRNA sense strand
aucaauuucugcuagguaa

SEQ ID NO: 74178 - RNA, 19 nt, Homo sapiens
  misc_RNA (1)...(19): siRNA sense strand
caagugugaccaauucagu

SEQ ID NO: 74179 - RNA, 19 nt, Homo sapiens
  misc_RNA (1)...(19): siRNA sense strand
ucagugaaaggaacgaaug

SEQ ID NO: 74180 - RNA, 19 nt, Homo sapiens
  misc_RNA (1)...(19): siRNA sense strand
ggcuaacauugaccuggaa

SEQ ID NO: 74181 - RNA, 19 nt, Homo sapiens
  misc_RNA (1)...(19): siRNA sense strand
gagccugccagcugcuuug

SEQ ID NO: 74182 - RNA, 19 nt, Homo sapiens
  misc_RNA (1)...(19): siRNA sense strand
gcagugcucccaaaaugaa

SEQ ID NO: 74183 - RNA, 19 nt, Homo sapiens
  misc_RNA (1)...(19): siRNA sense strand
cagcguuauuguaaugcaa

SEQ ID NO: 74184 - RNA, 19 nt, Homo sapiens
  misc_RNA (1)...(19): siRNA sense strand
agauaaacucugaaccauu

SEQ ID NO: 74185 - RNA, 19 nt, Homo sapiens
  misc_RNA (1)...(19): siRNA sense strand
gugcuacggagauagagaa

SEQ ID NO: 74186 - RNA, 19 nt, Homo sapiens
  misc_RNA (1)...(19): siRNA sense strand
uuugagugcuacggagaua

SEQ ID NO: 74187 - RNA, 19 nt, Homo sapiens
  misc_RNA (1)...(19): siRNA sense strand
ccugccagcugcuuugagu

SEQ ID NO: 74188 - RNA, 19 nt, Homo sapiens
  misc_RNA (1)...(19): siRNA sense strand
ccacgaaaacgaaugacua

SEQ ID NO: 74189 - RNA, 19 nt, Homo sapiens
  misc_RNA (1)...(19): siRNA sense strand
aguacacgguggaagaaug

SEQ ID NO: 74190 - RNA, 19 nt, Homo sapiens
  misc_RNA (1)...(19): siRNA sense strand
acucugaaccauuaaagga

SEQ ID NO: 74191 - RNA, 19 nt, Homo sapiens
  misc_RNA (1)...(19): siRNA sense strand
gacugagcuuaauaauuuc

SEQ ID NO: 74192 - RNA, 19 nt, Homo sapiens
  misc_RNA (1)...(19): siRNA sense strand
ugagugcuacggagauaga

SEQ ID NO: 74193 - RNA, 19 nt, Homo sapiens
  misc_RNA (1)...(19): siRNA sense strand
acaugucagcguuauugua

SEQ ID NO: 74194 - RNA, 19 nt, Homo sapiens
  misc_RNA (1)...(19): siRNA sense strand
cgaguacacgguggaagaa

SEQ ID NO: 74195 - RNA, 19 nt, Homo sapiens
  misc_RNA (1)...(19): siRNA sense strand
uggaagaaugcaccuguga

SEQ ID NO: 74196 - RNA, 19 nt, Homo sapiens
  misc_RNA (1)...(19): siRNA sense strand
aaucaauuucugcuaggua

SEQ ID NO: 74197 - RNA, 19 nt, Homo sapiens
  misc_RNA (1)...(19): siRNA sense strand
uaaugcaagugugaccaau

SEQ ID NO: 74198 - RNA, 19 nt, Homo sapiens
  misc_RNA (1)...(19): siRNA sense strand
ucgaguacacgguggaaga

SEQ ID NO: 74199 - RNA, 19 nt, Homo sapiens
  misc_RNA (1)...(19): siRNA sense strand
guuauuguaaugcaagugu

SEQ ID NO: 74200 - RNA, 19 nt, Homo sapiens
  misc_RNA (1)...(19): siRNA sense strand
aagacugcaucaagagcaa

SEQ ID NO: 74201 - RNA, 19 nt, Homo sapiens
  misc_RNA (1)...(19): siRNA sense strand
gaaagugaaucuaaguuug

SEQ ID NO: 74202 - RNA, 19 nt, Homo sapiens
  misc_RNA (1)...(19): siRNA sense strand
gaaagaagauggacaacca

SEQ ID NO: 74203 - RNA, 19 nt, Homo sapiens
  misc_RNA (1)...(19): siRNA sense strand
ggaaggcccugaagagaaa

SEQ ID NO: 74204 - RNA, 19 nt, Homo sapiens
  misc_RNA (1)...(19): siRNA sense strand
gaugaagccuugcugcaua

SEQ ID NO: 74205 - RNA, 19 nt, Homo sapiens
  misc_RNA (1)...(19): siRNA sense strand
ccacugagcucuacaccaa

SEQ ID NO: 74206 - RNA, 19 nt, Homo sapiens
  misc_RNA (1)...(19): siRNA sense strand
gaagauggacaaccaauug

SEQ ID NO: 74207 - RNA, 19 nt, Homo sapiens
  misc_RNA (1)...(19): siRNA sense strand
caacggagcucuggaagau

SEQ ID NO: 74208 - RNA, 19 nt, Homo sapiens
  misc_RNA (1)...(19): siRNA sense strand
ggaagacucugugcuuuau

SEQ ID NO: 74209 - RNA, 19 nt, Homo sapiens
  misc_RNA (1)...(19): siRNA sense strand
ggaaagugaaucuaaguuu

SEQ ID NO: 74210 - RNA, 19 nt, Homo sapiens
  misc_RNA (1)...(19): siRNA sense strand
ucuggaagaugcaccauua

SEQ ID NO: 74211 - RNA, 19 nt, Homo sapiens
  misc_RNA (1)...(19): siRNA sense strand
acgaugagauucagcuuua

SEQ ID NO: 74212 - RNA, 19 nt, Homo sapiens
  misc_RNA (1)...(19): siRNA sense strand
gaagaaaucaggagagaag

SEQ ID NO: 74213 - RNA, 19 nt, Homo sapiens
  misc_RNA (1)...(19): siRNA sense strand
gcaaaggacaggcacaaga

SEQ ID NO: 74214 - RNA, 19 nt, Homo sapiens
  misc_RNA (1)...(19): siRNA sense strand
gacaacaacucuggaacaa

SEQ ID NO: 74215 - RNA, 19 nt, Homo sapiens
  misc_RNA (1)...(19): siRNA sense strand
ggagaaagaagauggacaa

SEQ ID NO: 74216 - RNA, 19 nt, Homo sapiens
  misc_RNA (1)...(19): siRNA sense strand
gaugagauucagcuuuaua

SEQ ID NO: 74217 - RNA, 19 nt, Homo sapiens
  misc_RNA (1)...(19): siRNA sense strand
gcugaccucugccuucauu

SEQ ID NO: 74218 - RNA, 19 nt, Homo sapiens
  misc_RNA (1)...(19): siRNA sense strand
ggaacaagcuauuaaaagu

SEQ ID NO: 74219 - RNA, 19 nt, Homo sapiens
  misc_RNA (1)...(19): siRNA sense strand
ggauggagcugaggugcuu

SEQ ID NO: 74220 - RNA, 19 nt, Homo sapiens
  misc_RNA (1)...(19): siRNA sense strand
cagcaaacccugaagaaug

SEQ ID NO: 74221 - RNA, 19 nt, Homo sapiens
  misc_RNA (1)...(19): siRNA sense strand
acaggaaggucaaggagaa

SEQ ID NO: 74222 - RNA, 19 nt, Homo sapiens
  misc_RNA (1)...(19): siRNA sense strand
cggagagcauucagacaua

SEQ ID NO: 74223 - RNA, 19 nt, Homo sapiens
  misc_RNA (1)...(19): siRNA sense strand
gaaaugcuugaacggcuua

SEQ ID NO: 74224 - RNA, 19 nt, Homo sapiens
  misc_RNA (1)...(19): siRNA sense strand
ggagagcauucagacauau

SEQ ID NO: 74225 - RNA, 19 nt, Homo sapiens
  misc_RNA (1)...(19): siRNA sense strand
gcggaagacucugugcuuu

SEQ ID NO: 74226 - RNA, 19 nt, Homo sapiens
  misc_RNA (1)...(19): siRNA sense strand
gaaguucagaccuauauca

SEQ ID NO: 74227 - RNA, 19 nt, Homo sapiens
  misc_RNA (1)...(19): siRNA sense strand
caaaggacaggcacaagaa

SEQ ID NO: 74228 - RNA, 19 nt, Homo sapiens
  misc_RNA (1)...(19): siRNA sense strand
gaaugucaacuccugcuaa

SEQ ID NO: 74229 - RNA, 19 nt, Homo sapiens
  misc_RNA (1)...(19): siRNA sense strand
aaagugcccaugaguguua

SEQ ID NO: 74230 - RNA, 19 nt, Homo sapiens
  misc_RNA (1)...(19): siRNA sense strand
uaacaaggaagcugaugaa

SEQ ID NO: 74231 - RNA, 19 nt, Homo sapiens
  misc_RNA (1)...(19): siRNA sense strand
agcaaacccugaagaauga

SEQ ID NO: 74232 - RNA, 19 nt, Homo sapiens
  misc_RNA (1)...(19): siRNA sense strand
gaaagacaaagucagacaa

SEQ ID NO: 74233 - RNA, 19 nt, Homo sapiens
  misc_RNA (1)...(19): siRNA sense strand
ccagauggagggcagauaa

SEQ ID NO: 74234 - RNA, 19 nt, Homo sapiens
  misc_RNA (1)...(19): siRNA sense strand
caaagucagacaagaagaa

SEQ ID NO: 74235 - RNA, 19 nt, Homo sapiens
  misc_RNA (1)...(19): siRNA sense strand
agauucagcuuuauaacga

SEQ ID NO: 74236 - RNA, 19 nt, Homo sapiens
  misc_RNA (1)...(19): siRNA sense strand
gcagaggaaccaucuauac

SEQ ID NO: 74237 - RNA, 19 nt, Homo sapiens
  misc_RNA (1)...(19): siRNA sense strand
cccaauuucugcaagauga

SEQ ID NO: 74238 - RNA, 19 nt, Homo sapiens
  misc_RNA (1)...(19): siRNA sense strand
ggaaagacaaagucagaca

SEQ ID NO: 74239 - RNA, 19 nt, Homo sapiens
  misc_RNA (1)...(19): siRNA sense strand
gguggaaucuaucgagaag

SEQ ID NO: 74240 - RNA, 19 nt, Homo sapiens
  misc_RNA (1)...(19): siRNA sense strand
cggaagacucugugcuuua

SEQ ID NO: 74241 - RNA, 19 nt, Homo sapiens
  misc_RNA (1)...(19): siRNA sense strand
agacaaagucagacaagaa

SEQ ID NO: 74242 - RNA, 19 nt, Homo sapiens
  misc_RNA (1)...(19): siRNA sense strand
gaccaugauuggaaagaca

SEQ ID NO: 74243 - RNA, 19 nt, Homo sapiens
  misc_RNA (1)...(19): siRNA sense strand
ggaccgguaucaucguauc

SEQ ID NO: 74244 - RNA, 19 nt, Homo sapiens
  misc_RNA (1)...(19): siRNA sense strand
aagaagaaaucaggagaga

SEQ ID NO: 74245 - RNA, 19 nt, Homo sapiens
  misc_RNA (1)...(19): siRNA sense strand
ugaagaaaccgcugugauc

SEQ ID NO: 74246 - RNA, 19 nt, Homo sapiens
  misc_RNA (1)...(19): siRNA sense strand
aagacucugugcuuuauga

SEQ ID NO: 74247 - RNA, 19 nt, Homo sapiens
  misc_RNA (1)...(19): siRNA sense strand
uugaacggcuuaacaagga

SEQ ID NO: 74248 - RNA, 19 nt, Homo sapiens
  misc_RNA (1)...(19): siRNA sense strand
aaugucaacuccugcuaaa

SEQ ID NO: 74249 - RNA, 19 nt, Homo sapiens
  misc_RNA (1)...(19): siRNA sense strand
uggaagugguggaaucuau

SEQ ID NO: 74250 - RNA, 19 nt, Homo sapiens
  misc_RNA (1)...(19): siRNA sense strand
ggaagacacaaagcuggua

SEQ ID NO: 74251 - RNA, 19 nt, Homo sapiens
  misc_RNA (1)...(19): siRNA sense strand
gagcuggaccgguaucauc

SEQ ID NO: 74252 - RNA, 19 nt, Homo sapiens
  misc_RNA (1)...(19): siRNA sense strand
gaaaguaaagaaguaaguc

SEQ ID NO: 74253 - RNA, 19 nt, Homo sapiens
  misc_RNA (1)...(19): siRNA sense strand
ggugguacuuaaagaggaa

SEQ ID NO: 74254 - RNA, 19 nt, Homo sapiens
  misc_RNA (1)...(19): siRNA sense strand
ggaagaugcaccauuaaaa

SEQ ID NO: 74255 - RNA, 19 nt, Homo sapiens
  misc_RNA (1)...(19): siRNA sense strand
gcuggaagcccaauuucug

SEQ ID NO: 74256 - RNA, 19 nt, Homo sapiens
  misc_RNA (1)...(19): siRNA sense strand
gaucguggagaccaugauu

SEQ ID NO: 74257 - RNA, 19 nt, Homo sapiens
  misc_RNA (1)...(19): siRNA sense strand
aagaggaaagugaaucuaa

SEQ ID NO: 74258 - RNA, 19 nt, Homo sapiens
  misc_RNA (1)...(19): siRNA sense strand
ucacaggggaugccaauua

SEQ ID NO: 74259 - RNA, 19 nt, Homo sapiens
  misc_RNA (1)...(19): siRNA sense strand
cagagcggguccuggagaa

SEQ ID NO: 74260 - RNA, 19 nt, Homo sapiens
  misc_RNA (1)...(19): siRNA sense strand
gugaggagcgggacgaaga

SEQ ID NO: 74261 - RNA, 19 nt, Homo sapiens
  misc_RNA (1)...(19): siRNA sense strand
ggauauaacagcagcaaaa

SEQ ID NO: 74262 - RNA, 19 nt, Homo sapiens
  misc_RNA (1)...(19): siRNA sense strand
gaggaaagugaaucuaagu

SEQ ID NO: 74263 - RNA, 19 nt, Homo sapiens
  misc_RNA (1)...(19): siRNA sense strand
guggagaccaugauuggaa

SEQ ID NO: 74264 - RNA, 19 nt, Homo sapiens
  misc_RNA (1)...(19): siRNA sense strand
gaagcaaguaugaaaauga

SEQ ID NO: 74265 - RNA, 19 nt, Homo sapiens
  misc_RNA (1)...(19): siRNA sense strand
caauugaccagcagccuau

SEQ ID NO: 74266 - RNA, 19 nt, Homo sapiens
  misc_RNA (1)...(19): siRNA sense strand
caucguaucaucgagauug

SEQ ID NO: 74267 - RNA, 19 nt, Homo sapiens
  misc_RNA (1)...(19): siRNA sense strand
gacaaagucagacaagaag

SEQ ID NO: 74268 - RNA, 19 nt, Homo sapiens
  misc_RNA (1)...(19): siRNA sense strand
uggagaccaugauuggaaa

SEQ ID NO: 74269 - RNA, 19 nt, Homo sapiens
  misc_RNA (1)...(19): siRNA sense strand
agaggaaagugaaucuaag

SEQ ID NO: 74270 - RNA, 19 nt, Homo sapiens
  misc_RNA (1)...(19): siRNA sense strand
gugcagaggaaccaucuau

SEQ ID NO: 74271 - RNA, 19 nt, Homo sapiens
  misc_RNA (1)...(19): siRNA sense strand
ggucaaggagaaagugaga

SEQ ID NO: 74272 - RNA, 19 nt, Homo sapiens
  misc_RNA (1)...(19): siRNA sense strand
ccuccagcauccauuguga

SEQ ID NO: 74273 - RNA, 19 nt, Homo sapiens
  misc_RNA (1)...(19): siRNA sense strand
gacgaugagauucagcuuu

SEQ ID NO: 74274 - RNA, 19 nt, Homo sapiens
  misc_RNA (1)...(19): siRNA sense strand
ggacaggcacaagaagaau

SEQ ID NO: 74275 - RNA, 19 nt, Homo sapiens
  misc_RNA (1)...(19): siRNA sense strand
gaaaaugagugcgaauguc

SEQ ID NO: 74276 - RNA, 19 nt, Homo sapiens
  misc_RNA (1)...(19): siRNA sense strand
gaaucuaaguuugaaucag

SEQ ID NO: 74277 - RNA, 19 nt, Homo sapiens
  misc_RNA (1)...(19): siRNA sense strand
gaagaugcaccauuaaaag

SEQ ID NO: 74278 - RNA, 19 nt, Homo sapiens
  misc_RNA (1)...(19): siRNA sense strand
uggaagaugcaccauuaaa

SEQ ID NO: 74279 - RNA, 19 nt, Homo sapiens
  misc_RNA (1)...(19): siRNA sense strand
ccaugaguguuaugacgau

SEQ ID NO: 74280 - RNA, 19 nt, Homo sapiens
  misc_RNA (1)...(19): siRNA sense strand
uaaagaggaaagugaaucu

SEQ ID NO: 74281 - RNA, 19 nt, Homo sapiens
  misc_RNA (1)...(19): siRNA sense strand
ucagcuggaagcccaauuu

SEQ ID NO: 74282 - RNA, 19 nt, Homo sapiens
  misc_RNA (1)...(19): siRNA sense strand
uugggaaacuauacaggaa

SEQ ID NO: 74283 - RNA, 19 nt, Homo sapiens
  misc_RNA (1)...(19): siRNA sense strand
ggaagugguggaaucuauc

SEQ ID NO: 74284 - RNA, 19 nt, Homo sapiens
  misc_RNA (1)...(19): siRNA sense strand
augaagccuugcugcauaa

SEQ ID NO: 74285 - RNA, 19 nt, Homo sapiens
  misc_RNA (1)...(19): siRNA sense strand
cuauagacaaggagauuga

SEQ ID NO: 74286 - RNA, 19 nt, Homo sapiens
  misc_RNA (1)...(19): siRNA sense strand
gaaggucaaggagaaagug

SEQ ID NO: 74287 - RNA, 19 nt, Homo sapiens
  misc_RNA (1)...(19): siRNA sense strand
gaacaagcuauuaaaagug

SEQ ID NO: 74288 - RNA, 19 nt, Homo sapiens
  misc_RNA (1)...(19): siRNA sense strand
ucagacauaugaagaaacc

SEQ ID NO: 74289 - RNA, 19 nt, Homo sapiens
  misc_RNA (1)...(19): siRNA sense strand
uggaaggcccugaagagaa

SEQ ID NO: 74290 - RNA, 19 nt, Homo sapiens
  misc_RNA (1)...(19): siRNA sense strand
gaccagcagccuauagaca

SEQ ID NO: 74291 - RNA, 19 nt, Homo sapiens
  misc_RNA (1)...(19): siRNA sense strand
gcaggagaaagaagaugga

SEQ ID NO: 74292 - RNA, 19 nt, Homo sapiens
  misc_RNA (1)...(19): siRNA sense strand
ucuccuccaucacagcuaa

SEQ ID NO: 74293 - RNA, 19 nt, Homo sapiens
  misc_RNA (1)...(19): siRNA sense strand
gauucuaugucuccuccau

SEQ ID NO: 74294 - RNA, 19 nt, Homo sapiens
  misc_RNA (1)...(19): siRNA sense strand
uacaggugguacuuaaaga

SEQ ID NO: 74295 - RNA, 19 nt, Homo sapiens
  misc_RNA (1)...(19): siRNA sense strand
gagauucagcuuuauaacg

SEQ ID NO: 74296 - RNA, 19 nt, Homo sapiens
  misc_RNA (1)...(19): siRNA sense strand
caauuucugcaagaugaua

SEQ ID NO: 74297 - RNA, 19 nt, Homo sapiens
  misc_RNA (1)...(19): siRNA sense strand
guuaugacgaugagauuca

SEQ ID NO: 74298 - RNA, 19 nt, Homo sapiens
  misc_RNA (1)...(19): siRNA sense strand
ucugcaagaugauaucagu

SEQ ID NO: 74299 - RNA, 19 nt, Homo sapiens
  misc_RNA (1)...(19): siRNA sense strand
caguggaagugguggaauc

SEQ ID NO: 74300 - RNA, 19 nt, Homo sapiens
  misc_RNA (1)...(19): siRNA sense strand
uuacguggacccuagauuc

SEQ ID NO: 74301 - RNA, 19 nt, Homo sapiens
  misc_RNA (1)...(19): siRNA sense strand
gcaaugaugugugcaagua

SEQ ID NO: 74302 - RNA, 19 nt, Homo sapiens
  misc_RNA (1)...(19): siRNA sense strand
ggacagcuauauuguguuc

SEQ ID NO: 74303 - RNA, 19 nt, Homo sapiens
  misc_RNA (1)...(19): siRNA sense strand
gaggacagcuauauugugu

SEQ ID NO: 74304 - RNA, 19 nt, Homo sapiens
  misc_RNA (1)...(19): siRNA sense strand
gggagaagaucauccugaa

SEQ ID NO: 74305 - RNA, 19 nt, Homo sapiens
  misc_RNA (1)...(19): siRNA sense strand
caucaaagcugcaguucca

SEQ ID NO: 74306 - RNA, 19 nt, Homo sapiens
  misc_RNA (1)...(19): siRNA sense strand
ccaacuacccagacgauua

SEQ ID NO: 74307 - RNA, 19 nt, Homo sapiens
  misc_RNA (1)...(19): siRNA sense strand
gagcagcggugccucaaca

SEQ ID NO: 74308 - RNA, 19 nt, Homo sapiens
  misc_RNA (1)...(19): siRNA sense strand
gcucguaaguccuccauca

SEQ ID NO: 74309 - RNA, 19 nt, Homo sapiens
  misc_RNA (1)...(19): siRNA sense strand
ggagagacccugcaagaca

SEQ ID NO: 74310 - RNA, 19 nt, Homo sapiens
  misc_RNA (1)...(19): siRNA sense strand
gcaucucccugcaguuuga

SEQ ID NO: 74311 - RNA, 19 nt, Homo sapiens
  misc_RNA (1)...(19): siRNA sense strand
aaaggacuauggccacauu

SEQ ID NO: 74312 - RNA, 19 nt, Homo sapiens
  misc_RNA (1)...(19): siRNA sense strand
gggcuuugccgucaacuuu

SEQ ID NO: 74313 - RNA, 19 nt, Homo sapiens
  misc_RNA (1)...(19): siRNA sense strand
gcuaugagaagccugauga

SEQ ID NO: 74314 - RNA, 19 nt, Homo sapiens
  misc_RNA (1)...(19): siRNA sense strand
gcacugacgaggacagcua

SEQ ID NO: 74315 - RNA, 19 nt, Homo sapiens
  misc_RNA (1)...(19): siRNA sense strand
gcuauauuguguucaccua

SEQ ID NO: 74316 - RNA, 19 nt, Homo sapiens
  misc_RNA (1)...(19): siRNA sense strand
ugugggagauggagaggua

SEQ ID NO: 74317 - RNA, 19 nt, Homo sapiens
  misc_RNA (1)...(19): siRNA sense strand
ggacauugcccuggacgaa

SEQ ID NO: 74318 - RNA, 19 nt, Homo sapiens
  misc_RNA (1)...(19): siRNA sense strand
ggcaagaacugugacaagu

SEQ ID NO: 74319 - RNA, 19 nt, Homo sapiens
  misc_RNA (1)...(19): siRNA sense strand
gcauuacgcucggaacaca

SEQ ID NO: 74320 - RNA, 19 nt, Homo sapiens
  misc_RNA (1)...(19): siRNA sense strand
gacgaggacagcuauauug

SEQ ID NO: 74321 - RNA, 19 nt, Homo sapiens
  misc_RNA (1)...(19): siRNA sense strand
gagaagaucauccugaacu

SEQ ID NO: 74322 - RNA, 19 nt, Homo sapiens
  misc_RNA (1)...(19): siRNA sense strand
caguuugacuucuuugaga

SEQ ID NO: 74323 - RNA, 19 nt, Homo sapiens
  misc_RNA (1)...(19): siRNA sense strand
caagcugcauggcaaguuc

SEQ ID NO: 74324 - RNA, 19 nt, Homo sapiens
  misc_RNA (1)...(19): siRNA sense strand
ggacuauggccacauucaa

SEQ ID NO: 74325 - RNA, 19 nt, Homo sapiens
  misc_RNA (1)...(19): siRNA sense strand
ugacggguccauuaacaaa

SEQ ID NO: 74326 - RNA, 19 nt, Homo sapiens
  misc_RNA (1)...(19): siRNA sense strand
agacagagggcaaugaugu

SEQ ID NO: 74327 - RNA, 19 nt, Homo sapiens
  misc_RNA (1)...(19): siRNA sense strand
uggcuacucugcucacaug

SEQ ID NO: 74328 - RNA, 19 nt, Homo sapiens
  misc_RNA (1)...(19): siRNA sense strand
ucacauuccaguccuuuga

SEQ ID NO: 74329 - RNA, 19 nt, Homo sapiens
  misc_RNA (1)...(19): siRNA sense strand
cauggcaaguucugugguu

SEQ ID NO: 74330 - RNA, 19 nt, Homo sapiens
  misc_RNA (1)...(19): siRNA sense strand
ugacgaggacagcuauauu

SEQ ID NO: 74331 - RNA, 19 nt, Homo sapiens
  misc_RNA (1)...(19): siRNA sense strand
ggucaucaccucccaguac

SEQ ID NO: 74332 - RNA, 19 nt, Homo sapiens
  misc_RNA (1)...(19): siRNA sense strand
ccacgugggccucacauuc

SEQ ID NO: 74333 - RNA, 19 nt, Homo sapiens
  misc_RNA (1)...(19): siRNA sense strand
guggagagacccugcaaga

SEQ ID NO: 74334 - RNA, 19 nt, Homo sapiens
  misc_RNA (1)...(19): siRNA sense strand
cccgcaagcuuuacaagug

SEQ ID NO: 74335 - RNA, 19 nt, Homo sapiens
  misc_RNA (1)...(19): siRNA sense strand
agaagaucauccugaacuu

SEQ ID NO: 74336 - RNA, 19 nt, Homo sapiens
  misc_RNA (1)...(19): siRNA sense strand
caacuacccagacgauuac

SEQ ID NO: 74337 - RNA, 19 nt, Homo sapiens
  misc_RNA (1)...(19): siRNA sense strand
gagauggcuucuggaggaa

SEQ ID NO: 74338 - RNA, 19 nt, Homo sapiens
  misc_RNA (1)...(19): siRNA sense strand
cguaaguccuccaucaaag

SEQ ID NO: 74339 - RNA, 19 nt, Homo sapiens
  misc_RNA (1)...(19): siRNA sense strand
cagcugugccuacgacuau

SEQ ID NO: 74340 - RNA, 19 nt, Homo sapiens
  misc_RNA (1)...(19): siRNA sense strand
uauauuguguucaccuauc

SEQ ID NO: 74341 - RNA, 19 nt, Homo sapiens
  misc_RNA (1)...(19): siRNA sense strand
acauugcccuggacgaaga

SEQ ID NO: 74342 - RNA, 19 nt, Homo sapiens
  misc_RNA (1)...(19): siRNA sense strand
ucaacacccugggcagcua

SEQ ID NO: 74343 - RNA, 19 nt, Homo sapiens
  misc_RNA (1)...(19): siRNA sense strand
caaacucccugagccuauc

SEQ ID NO: 74344 - RNA, 19 nt, Homo sapiens
  misc_RNA (1)...(19): siRNA sense strand
caacaugcgcguggaguuc

SEQ ID NO: 74345 - RNA, 19 nt, Homo sapiens
  misc_RNA (1)...(19): siRNA sense strand
cuucaaggcccacuucuuc

SEQ ID NO: 74346 - RNA, 19 nt, Homo sapiens
  misc_RNA (1)...(19): siRNA sense strand
agacagcacaggcaacuuc

SEQ ID NO: 74347 - RNA, 19 nt, Homo sapiens
  misc_RNA (1)...(19): siRNA sense strand
ccgcaucucccugcaguuu

SEQ ID NO: 74348 - RNA, 19 nt, Homo sapiens
  misc_RNA (1)...(19): siRNA sense strand
gacuauggccacauucaau

SEQ ID NO: 74349 - RNA, 19 nt, Homo sapiens
  misc_RNA (1)...(19): siRNA sense strand
gggcuucuuugcagucuac

SEQ ID NO: 74350 - RNA, 19 nt, Homo sapiens
  misc_RNA (1)...(19): siRNA sense strand
cagcagcaauuggguugga

SEQ ID NO: 74351 - RNA, 19 nt, Homo sapiens
  misc_RNA (1)...(19): siRNA sense strand
gcgcuacuguggcuaugag

SEQ ID NO: 74352 - RNA, 19 nt, Homo sapiens
  misc_RNA (1)...(19): siRNA sense strand
ggcucaaguucgucucuga

SEQ ID NO: 74353 - RNA, 19 nt, Homo sapiens
  misc_RNA (1)...(19): siRNA sense strand
ggucauccccuuugucauu

SEQ ID NO: 74354 - RNA, 19 nt, Homo sapiens
  misc_RNA (1)...(19): siRNA sense strand
ugacuucgacagcaucaug

SEQ ID NO: 74355 - RNA, 19 nt, Homo sapiens
  misc_RNA (1)...(19): siRNA sense strand
ccaaacucccugagccuau

SEQ ID NO: 74356 - RNA, 19 nt, Homo sapiens
  misc_RNA (1)...(19): siRNA sense strand
ucugacggguccauuaaca

SEQ ID NO: 74357 - RNA, 19 nt, Homo sapiens
  misc_RNA (1)...(19): siRNA sense strand
gcagcaauuggguuggaaa

SEQ ID NO: 74358 - RNA, 19 nt, Homo sapiens
  misc_RNA (1)...(19): siRNA sense strand
ccuaucgucuccacugaca

SEQ ID NO: 74359 - RNA, 19 nt, Homo sapiens
  misc_RNA (1)...(19): siRNA sense strand
ucucugacggguccauuaa

SEQ ID NO: 74360 - RNA, 19 nt, Homo sapiens
  misc_RNA (1)...(19): siRNA sense strand
gcaguuugacuucuuugag

SEQ ID NO: 74361 - RNA, 19 nt, Homo sapiens
  misc_RNA (1)...(19): siRNA sense strand
ccugcaguuugacuucuuu

SEQ ID NO: 74362 - RNA, 19 nt, Homo sapiens
  misc_RNA (1)...(19): siRNA sense strand
gcggauuccucaccaagcu

SEQ ID NO: 74363 - RNA, 19 nt, Homo sapiens
  misc_RNA (1)...(19): siRNA sense strand
gcaucuuccuggauaccau

SEQ ID NO: 74364 - RNA, 19 nt, Homo sapiens
  misc_RNA (1)...(19): siRNA sense strand
gucaucaccucccaguaca

SEQ ID NO: 74365 - RNA, 19 nt, Homo sapiens
  misc_RNA (1)...(19): siRNA sense strand
ugugacaaguucggcauug

SEQ ID NO: 74366 - RNA, 19 nt, Homo sapiens
  misc_RNA (1)...(19): siRNA sense strand
ucguaaguccuccaucaaa

SEQ ID NO: 74367 - RNA, 19 nt, Homo sapiens
  misc_RNA (1)...(19): siRNA sense strand
caaggcccacuucuucuca

SEQ ID NO: 74368 - RNA, 19 nt, Homo sapiens
  misc_RNA (1)...(19): siRNA sense strand
cgaggacagcuauauugug

SEQ ID NO: 74369 - RNA, 19 nt, Homo sapiens
  misc_RNA (1)...(19): siRNA sense strand
ucaccucccaguacaacaa

SEQ ID NO: 74370 - RNA, 19 nt, Homo sapiens
  misc_RNA (1)...(19): siRNA sense strand
gagaagcccgaggucauca

SEQ ID NO: 74371 - RNA, 19 nt, Homo sapiens
  misc_RNA (1)...(19): siRNA sense strand
uccaguccuuugagauuga

SEQ ID NO: 74372 - RNA, 19 nt, Homo sapiens
  misc_RNA (1)...(19): siRNA sense strand
ccuaugacuucgacagcau

SEQ ID NO: 74373 - RNA, 19 nt, Homo sapiens
  misc_RNA (1)...(19): siRNA sense strand
ccgccacguuuccaucguu

SEQ ID NO: 74374 - RNA, 19 nt, Homo sapiens
  misc_RNA (1)...(19): siRNA sense strand
gggugaaaccucccauugg

SEQ ID NO: 74375 - RNA, 19 nt, Homo sapiens
  misc_RNA (1)...(19): siRNA sense strand
gaguucaaguccgacaaca

SEQ ID NO: 74376 - RNA, 19 nt, Homo sapiens
  misc_RNA (1)...(19): siRNA sense strand
gaggugcgcaguggacuca

SEQ ID NO: 74377 - RNA, 19 nt, Homo sapiens
  misc_RNA (1)...(19): siRNA sense strand
gacagagggcaaugaugug

SEQ ID NO: 74378 - RNA, 19 nt, Homo sapiens
  misc_RNA (1)...(19): siRNA sense strand
gagacagagggcaaugaug

SEQ ID NO: 74379 - RNA, 19 nt, Homo sapiens
  misc_RNA (1)...(19): siRNA sense strand
caagacagcacaggcaacu

SEQ ID NO: 74380 - RNA, 19 nt, Homo sapiens
  misc_RNA (1)...(19): siRNA sense strand
ugagacagagggcaaugau

SEQ ID NO: 74381 - RNA, 19 nt, Homo sapiens
  misc_RNA (1)...(19): siRNA sense strand
gcaaugaugugugcaagua

SEQ ID NO: 74382 - RNA, 19 nt, Homo sapiens
  misc_RNA (1)...(19): siRNA sense strand
ggacagcuauauuguguuc

SEQ ID NO: 74383 - RNA, 19 nt, Homo sapiens
  misc_RNA (1)...(19): siRNA sense strand
gaggacagcuauauugugu

SEQ ID NO: 74384 - RNA, 19 nt, Homo sapiens
  misc_RNA (1)...(19): siRNA sense strand
gggagaagaucauccugaa

SEQ ID NO: 74385 - RNA, 19 nt, Homo sapiens
  misc_RNA (1)...(19): siRNA sense strand
caucaaagcugcaguucca

SEQ ID NO: 74386 - RNA, 19 nt, Homo sapiens
  misc_RNA (1)...(19): siRNA sense strand
ccaacuacccagacgauua

SEQ ID NO: 74387 - RNA, 19 nt, Homo sapiens
  misc_RNA (1)...(19): siRNA sense strand
gagcagcggugccucaaca

SEQ ID NO: 74388 - RNA, 19 nt, Homo sapiens
  misc_RNA (1)...(19): siRNA sense strand
gcucguaaguccuccauca

SEQ ID NO: 74389 - RNA, 19 nt, Homo sapiens
  misc_RNA (1)...(19): siRNA sense strand
ggagagacccugcaagaca

SEQ ID NO: 74390 - RNA, 19 nt, Homo sapiens
  misc_RNA (1)...(19): siRNA sense strand
gcaucucccugcaguuuga

SEQ ID NO: 74391 - RNA, 19 nt, Homo sapiens
  misc_RNA (1)...(19): siRNA sense strand
aaaggacuauggccacauu

SEQ ID NO: 74392 - RNA, 19 nt, Homo sapiens
  misc_RNA (1)...(19): siRNA sense strand
gggcuuugccgucaacuuu

SEQ ID NO: 74393 - RNA, 19 nt, Homo sapiens
  misc_RNA (1)...(19): siRNA sense strand
gcuaugagaagccugauga

SEQ ID NO: 74394 - RNA, 19 nt, Homo sapiens
  misc_RNA (1)...(19): siRNA sense strand
gcacugacgaggacagcua

SEQ ID NO: 74395 - RNA, 19 nt, Homo sapiens
  misc_RNA (1)...(19): siRNA sense strand
gcuauauuguguucaccua

SEQ ID NO: 74396 - RNA, 19 nt, Homo sapiens
  misc_RNA (1)...(19): siRNA sense strand
ugugggagauggagaggua

SEQ ID NO: 74397 - RNA, 19 nt, Homo sapiens
  misc_RNA (1)...(19): siRNA sense strand
ggacauugcccuggacgaa

SEQ ID NO: 74398 - RNA, 19 nt, Homo sapiens
  misc_RNA (1)...(19): siRNA sense strand
ggcaagaacugugacaagu

SEQ ID NO: 74399 - RNA, 19 nt, Homo sapiens
  misc_RNA (1)...(19): siRNA sense strand
gcauuacgcucggaacaca

SEQ ID NO: 74400 - RNA, 19 nt, Homo sapiens
  misc_RNA (1)...(19): siRNA sense strand
gacgaggacagcuauauug

SEQ ID NO: 74401 - RNA, 19 nt, Homo sapiens
  misc_RNA (1)...(19): siRNA sense strand
gagaagaucauccugaacu

SEQ ID NO: 74402 - RNA, 19 nt, Homo sapiens
  misc_RNA (1)...(19): siRNA sense strand
caguuugacuucuuugaga

SEQ ID NO: 74403 - RNA, 19 nt, Homo sapiens
  misc_RNA (1)...(19): siRNA sense strand
caagcugcauggcaaguuc

SEQ ID NO: 74404 - RNA, 19 nt, Homo sapiens
  misc_RNA (1)...(19): siRNA sense strand
ggacuauggccacauucaa

SEQ ID NO: 74405 - RNA, 19 nt, Homo sapiens
  misc_RNA (1)...(19): siRNA sense strand
ugacggguccauuaacaaa

SEQ ID NO: 74406 - RNA, 19 nt, Homo sapiens
  misc_RNA (1)...(19): siRNA sense strand
agacagagggcaaugaugu

SEQ ID NO: 74407 - RNA, 19 nt, Homo sapiens
  misc_RNA (1)...(19): siRNA sense strand
uggcuacucugcucacaug

SEQ ID NO: 74408 - RNA, 19 nt, Homo sapiens
  misc_RNA (1)...(19): siRNA sense strand
ucacauuccaguccuuuga

SEQ ID NO: 74409 - RNA, 19 nt, Homo sapiens
  misc_RNA (1)...(19): siRNA sense strand
cauggcaaguucugugguu

SEQ ID NO: 74410 - RNA, 19 nt, Homo sapiens
  misc_RNA (1)...(19): siRNA sense strand
ugacgaggacagcuauauu

SEQ ID NO: 74411 - RNA, 19 nt, Homo sapiens
  misc_RNA (1)...(19): siRNA sense strand
ggucaucaccucccaguac

SEQ ID NO: 74412 - RNA, 19 nt, Homo sapiens
  misc_RNA (1)...(19): siRNA sense strand
ccacgugggccucacauuc

SEQ ID NO: 74413 - RNA, 19 nt, Homo sapiens
  misc_RNA (1)...(19): siRNA sense strand
guggagagacccugcaaga

SEQ ID NO: 74414 - RNA, 19 nt, Homo sapiens
  misc_RNA (1)...(19): siRNA sense strand
cccgcaagcuuuacaagug

SEQ ID NO: 74415 - RNA, 19 nt, Homo sapiens
  misc_RNA (1)...(19): siRNA sense strand
agaagaucauccugaacuu

SEQ ID NO: 74416 - RNA, 19 nt, Homo sapiens
  misc_RNA (1)...(19): siRNA sense strand
caacuacccagacgauuac

SEQ ID NO: 74417 - RNA, 19 nt, Homo sapiens
  misc_RNA (1)...(19): siRNA sense strand
gagauggcuucuggaggaa

SEQ ID NO: 74418 - RNA, 19 nt, Homo sapiens
  misc_RNA (1)...(19): siRNA sense strand
cguaaguccuccaucaaag

SEQ ID NO: 74419 - RNA, 19 nt, Homo sapiens
  misc_RNA (1)...(19): siRNA sense strand
cagcugugccuacgacuau

SEQ ID NO: 74420 - RNA, 19 nt, Homo sapiens
  misc_RNA (1)...(19): siRNA sense strand
uauauuguguucaccuauc

SEQ ID NO: 74421 - RNA, 19 nt, Homo sapiens
  misc_RNA (1)...(19): siRNA sense strand
acauugcccuggacgaaga

SEQ ID NO: 74422 - RNA, 19 nt, Homo sapiens
  misc_RNA (1)...(19): siRNA sense strand
ucaacacccugggcagcua

SEQ ID NO: 74423 - RNA, 19 nt, Homo sapiens
  misc_RNA (1)...(19): siRNA sense strand
caaacucccugagccuauc

SEQ ID NO: 74424 - RNA, 19 nt, Homo sapiens
  misc_RNA (1)...(19): siRNA sense strand
caacaugcgcguggaguuc

SEQ ID NO: 74425 - RNA, 19 nt, Homo sapiens
  misc_RNA (1)...(19): siRNA sense strand
cuucaaggcccacuucuuc

SEQ ID NO: 74426 - RNA, 19 nt, Homo sapiens
  misc_RNA (1)...(19): siRNA sense strand
agacagcacaggcaacuuc

SEQ ID NO: 74427 - RNA, 19 nt, Homo sapiens
  misc_RNA (1)...(19): siRNA sense strand
ccgcaucucccugcaguuu

SEQ ID NO: 74428 - RNA, 19 nt, Homo sapiens
  misc_RNA (1)...(19): siRNA sense strand
gacuauggccacauucaau

SEQ ID NO: 74429 - RNA, 19 nt, Homo sapiens
  misc_RNA (1)...(19): siRNA sense strand
gggcuucuuugcagucuac

SEQ ID NO: 74430 - RNA, 19 nt, Homo sapiens
  misc_RNA (1)...(19): siRNA sense strand
cagcagcaauuggguugga

SEQ ID NO: 74431 - RNA, 19 nt, Homo sapiens
  misc_RNA (1)...(19): siRNA sense strand
gcgcuacuguggcuaugag

SEQ ID NO: 74432 - RNA, 19 nt, Homo sapiens
  misc_RNA (1)...(19): siRNA sense strand
ggcucaaguucgucucuga

SEQ ID NO: 74433 - RNA, 19 nt, Homo sapiens
  misc_RNA (1)...(19): siRNA sense strand
ggucauccccuuugucauu

SEQ ID NO: 74434 - RNA, 19 nt, Homo sapiens
  misc_RNA (1)...(19): siRNA sense strand
ugacuucgacagcaucaug

SEQ ID NO: 74435 - RNA, 19 nt, Homo sapiens
  misc_RNA (1)...(19): siRNA sense strand
ccaaacucccugagccuau

SEQ ID NO: 74436 - RNA, 19 nt, Homo sapiens
  misc_RNA (1)...(19): siRNA sense strand
ucugacggguccauuaaca

SEQ ID NO: 74437 - RNA, 19 nt, Homo sapiens
  misc_RNA (1)...(19): siRNA sense strand
gcagcaauuggguuggaaa

SEQ ID NO: 74438 - RNA, 19 nt, Homo sapiens
  misc_RNA (1)...(19): siRNA sense strand
ccuaucgucuccacugaca

SEQ ID NO: 74439 - RNA, 19 nt, Homo sapiens
  misc_RNA (1)...(19): siRNA sense strand
ucucugacggguccauuaa

SEQ ID NO: 74440 - RNA, 19 nt, Homo sapiens
  misc_RNA (1)...(19): siRNA sense strand
gcaguuugacuucuuugag

SEQ ID NO: 74441 - RNA, 19 nt, Homo sapiens
  misc_RNA (1)...(19): siRNA sense strand
ccugcaguuugacuucuuu

SEQ ID NO: 74442 - RNA, 19 nt, Homo sapiens
  misc_RNA (1)...(19): siRNA sense strand
gcggauuccucaccaagcu

SEQ ID NO: 74443 - RNA, 19 nt, Homo sapiens
  misc_RNA (1)...(19): siRNA sense strand
gcaucuuccuggauaccau

SEQ ID NO: 74444 - RNA, 19 nt, Homo sapiens
  misc_RNA (1)...(19): siRNA sense strand
gucaucaccucccaguaca

SEQ ID NO: 74445 - RNA, 19 nt, Homo sapiens
  misc_RNA (1)...(19): siRNA sense strand
ugugacaaguucggcauug

SEQ ID NO: 74446 - RNA, 19 nt, Homo sapiens
  misc_RNA (1)...(19): siRNA sense strand
ucguaaguccuccaucaaa

SEQ ID NO: 74447 - RNA, 19 nt, Homo sapiens
  misc_RNA (1)...(19): siRNA sense strand
caaggcccacuucuucuca

SEQ ID NO: 74448 - RNA, 19 nt, Homo sapiens
  misc_RNA (1)...(19): siRNA sense strand
cgaggacagcuauauugug

SEQ ID NO: 74449 - RNA, 19 nt, Homo sapiens
  misc_RNA (1)...(19): siRNA sense strand
ucaccucccaguacaacaa

SEQ ID NO: 74450 - RNA, 19 nt, Homo sapiens
  misc_RNA (1)...(19): siRNA sense strand
gagaagcccgaggucauca

SEQ ID NO: 74451 - RNA, 19 nt, Homo sapiens
  misc_RNA (1)...(19): siRNA sense strand
uccaguccuuugagauuga

SEQ ID NO: 74452 - RNA, 19 nt, Homo sapiens
  misc_RNA (1)...(19): siRNA sense strand
ccuaugacuucgacagcau

SEQ ID NO: 74453 - RNA, 19 nt, Homo sapiens
  misc_RNA (1)...(19): siRNA sense strand
ccgccacguuuccaucguu

SEQ ID NO: 74454 - RNA, 19 nt, Homo sapiens
  misc_RNA (1)...(19): siRNA sense strand
gggugaaaccucccauugg

SEQ ID NO: 74455 - RNA, 19 nt, Homo sapiens
  misc_RNA (1)...(19): siRNA sense strand
gaguucaaguccgacaaca

SEQ ID NO: 74456 - RNA, 19 nt, Homo sapiens
  misc_RNA (1)...(19): siRNA sense strand
gaggugcgcaguggacuca

SEQ ID NO: 74457 - RNA, 19 nt, Homo sapiens
  misc_RNA (1)...(19): siRNA sense strand
gacagagggcaaugaugug

SEQ ID NO: 74458 - RNA, 19 nt, Homo sapiens
  misc_RNA (1)...(19): siRNA sense strand
gagacagagggcaaugaug

SEQ ID NO: 74459 - RNA, 19 nt, Homo sapiens
  misc_RNA (1)...(19): siRNA sense strand
caagacagcacaggcaacu

SEQ ID NO: 74460 - RNA, 19 nt, Homo sapiens
  misc_RNA (1)...(19): siRNA sense strand
ugagacagagggcaaugau

SEQ ID NO: 74461 - RNA, 19 nt, Homo sapiens
  misc_RNA (1)...(19): siRNA sense strand
gcaaugaugugugcaagua

SEQ ID NO: 74462 - RNA, 19 nt, Homo sapiens
  misc_RNA (1)...(19): siRNA sense strand
ggacagcuauauuguguuc

SEQ ID NO: 74463 - RNA, 19 nt, Homo sapiens
  misc_RNA (1)...(19): siRNA sense strand
gaggacagcuauauugugu

SEQ ID NO: 74464 - RNA, 19 nt, Homo sapiens
  misc_RNA (1)...(19): siRNA sense strand
gggagaagaucauccugaa

SEQ ID NO: 74465 - RNA, 19 nt, Homo sapiens
  misc_RNA (1)...(19): siRNA sense strand
caucaaagcugcaguucca

SEQ ID NO: 74466 - RNA, 19 nt, Homo sapiens
  misc_RNA (1)...(19): siRNA sense strand
ccaacuacccagacgauua

SEQ ID NO: 74467 - RNA, 19 nt, Homo sapiens
  misc_RNA (1)...(19): siRNA sense strand
gagcagcggugccucaaca

SEQ ID NO: 74468 - RNA, 19 nt, Homo sapiens
  misc_RNA (1)...(19): siRNA sense strand
gcucguaaguccuccauca

SEQ ID NO: 74469 - RNA, 19 nt, Homo sapiens
  misc_RNA (1)...(19): siRNA sense strand
ggagagacccugcaagaca

SEQ ID NO: 74470 - RNA, 19 nt, Homo sapiens
  misc_RNA (1)...(19): siRNA sense strand
gcaucucccugcaguuuga

SEQ ID NO: 74471 - RNA, 19 nt, Homo sapiens
  misc_RNA (1)...(19): siRNA sense strand
aaaggacuauggccacauu

SEQ ID NO: 74472 - RNA, 19 nt, Homo sapiens
  misc_RNA (1)...(19): siRNA sense strand
gggcuuugccgucaacuuu

SEQ ID NO: 74473 - RNA, 19 nt, Homo sapiens
  misc_RNA (1)...(19): siRNA sense strand
gcuaugagaagccugauga

SEQ ID NO: 74474 - RNA, 19 nt, Homo sapiens
  misc_RNA (1)...(19): siRNA sense strand
gcacugacgaggacagcua

SEQ ID NO: 74475 - RNA, 19 nt, Homo sapiens
  misc_RNA (1)...(19): siRNA sense strand
gcuauauuguguucaccua

SEQ ID NO: 74476 - RNA, 19 nt, Homo sapiens
  misc_RNA (1)...(19): siRNA sense strand
ugugggagauggagaggua

SEQ ID NO: 74477 - RNA, 19 nt, Homo sapiens
  misc_RNA (1)...(19): siRNA sense strand
ggacauugcccuggacgaa

SEQ ID NO: 74478 - RNA, 19 nt, Homo sapiens
  misc_RNA (1)...(19): siRNA sense strand
ggcaagaacugugacaagu

SEQ ID NO: 74479 - RNA, 19 nt, Homo sapiens
  misc_RNA (1)...(19): siRNA sense strand
gcauuacgcucggaacaca

SEQ ID NO: 74480 - RNA, 19 nt, Homo sapiens
  misc_RNA (1)...(19): siRNA sense strand
gacgaggacagcuauauug

SEQ ID NO: 74481 - RNA, 19 nt, Homo sapiens
  misc_RNA (1)...(19): siRNA sense strand
gagaagaucauccugaacu

SEQ ID NO: 74482 - RNA, 19 nt, Homo sapiens
  misc_RNA (1)...(19): siRNA sense strand
caguuugacuucuuugaga

SEQ ID NO: 74483 - RNA, 19 nt, Homo sapiens
  misc_RNA (1)...(19): siRNA sense strand
caagcugcauggcaaguuc

SEQ ID NO: 74484 - RNA, 19 nt, Homo sapiens
  misc_RNA (1)...(19): siRNA sense strand
ggacuauggccacauucaa

SEQ ID NO: 74485 - RNA, 19 nt, Homo sapiens
  misc_RNA (1)...(19): siRNA sense strand
ugacggguccauuaacaaa

SEQ ID NO: 74486 - RNA, 19 nt, Homo sapiens
  misc_RNA (1)...(19): siRNA sense strand
agacagagggcaaugaugu

SEQ ID NO: 74487 - RNA, 19 nt, Homo sapiens
  misc_RNA (1)...(19): siRNA sense strand
uggcuacucugcucacaug

SEQ ID NO: 74488 - RNA, 19 nt, Homo sapiens
  misc_RNA (1)...(19): siRNA sense strand
ucacauuccaguccuuuga

SEQ ID NO: 74489 - RNA, 19 nt, Homo sapiens
  misc_RNA (1)...(19): siRNA sense strand
cauggcaaguucugugguu

SEQ ID NO: 74490 - RNA, 19 nt, Homo sapiens
  misc_RNA (1)...(19): siRNA sense strand
ugacgaggacagcuauauu

SEQ ID NO: 74491 - RNA, 19 nt, Homo sapiens
  misc_RNA (1)...(19): siRNA sense strand
ggucaucaccucccaguac

SEQ ID NO: 74492 - RNA, 19 nt, Homo sapiens
  misc_RNA (1)...(19): siRNA sense strand
ccacgugggccucacauuc

SEQ ID NO: 74493 - RNA, 19 nt, Homo sapiens
  misc_RNA (1)...(19): siRNA sense strand
guggagagacccugcaaga

SEQ ID NO: 74494 - RNA, 19 nt, Homo sapiens
  misc_RNA (1)...(19): siRNA sense strand
cccgcaagcuuuacaagug

SEQ ID NO: 74495 - RNA, 19 nt, Homo sapiens
  misc_RNA (1)...(19): siRNA sense strand
agaagaucauccugaacuu

SEQ ID NO: 74496 - RNA, 19 nt, Homo sapiens
  misc_RNA (1)...(19): siRNA sense strand
caacuacccagacgauuac

SEQ ID NO: 74497 - RNA, 19 nt, Homo sapiens
  misc_RNA (1)...(19): siRNA sense strand
gagauggcuucuggaggaa

SEQ ID NO: 74498 - RNA, 19 nt, Homo sapiens
  misc_RNA (1)...(19): siRNA sense strand
cguaaguccuccaucaaag

SEQ ID NO: 74499 - RNA, 19 nt, Homo sapiens
  misc_RNA (1)...(19): siRNA sense strand
cagcugugccuacgacuau

SEQ ID NO: 74500 - RNA, 19 nt, Homo sapiens
  misc_RNA (1)...(19): siRNA sense strand
uauauuguguucaccuauc

SEQ ID NO: 74501 - RNA, 19 nt, Homo sapiens
  misc_RNA (1)...(19): siRNA sense strand
acauugcccuggacgaaga

SEQ ID NO: 74502 - RNA, 19 nt, Homo sapiens
  misc_RNA (1)...(19): siRNA sense strand
ucaacacccugggcagcua

SEQ ID NO: 74503 - RNA, 19 nt, Homo sapiens
  misc_RNA (1)...(19): siRNA sense strand
caaacucccugagccuauc

SEQ ID NO: 74504 - RNA, 19 nt, Homo sapiens
  misc_RNA (1)...(19): siRNA sense strand
caacaugcgcguggaguuc

SEQ ID NO: 74505 - RNA, 19 nt, Homo sapiens
  misc_RNA (1)...(19): siRNA sense strand
cuucaaggcccacuucuuc

SEQ ID NO: 74506 - RNA, 19 nt, Homo sapiens
  misc_RNA (1)...(19): siRNA sense strand
agacagcacaggcaacuuc

SEQ ID NO: 74507 - RNA, 19 nt, Homo sapiens
  misc_RNA (1)...(19): siRNA sense strand
ccgcaucucccugcaguuu

SEQ ID NO: 74508 - RNA, 19 nt, Homo sapiens
  misc_RNA (1)...(19): siRNA sense strand
gacuauggccacauucaau

SEQ ID NO: 74509 - RNA, 19 nt, Homo sapiens
  misc_RNA (1)...(19): siRNA sense strand
gggcuucuuugcagucuac

SEQ ID NO: 74510 - RNA, 19 nt, Homo sapiens
  misc_RNA (1)...(19): siRNA sense strand
cagcagcaauuggguugga

SEQ ID NO: 74511 - RNA, 19 nt, Homo sapiens
  misc_RNA (1)...(19): siRNA sense strand
gcgcuacuguggcuaugag

SEQ ID NO: 74512 - RNA, 19 nt, Homo sapiens
  misc_RNA (1)...(19): siRNA sense strand
ggcucaaguucgucucuga

SEQ ID NO: 74513 - RNA, 19 nt, Homo sapiens
  misc_RNA (1)...(19): siRNA sense strand
ggucauccccuuugucauu

SEQ ID NO: 74514 - RNA, 19 nt, Homo sapiens
  misc_RNA (1)...(19): siRNA sense strand
ugacuucgacagcaucaug

SEQ ID NO: 74515 - RNA, 19 nt, Homo sapiens
  misc_RNA (1)...(19): siRNA sense strand
ccaaacucccugagccuau

SEQ ID NO: 74516 - RNA, 19 nt, Homo sapiens
  misc_RNA (1)...(19): siRNA sense strand
ucugacggguccauuaaca

SEQ ID NO: 74517 - RNA, 19 nt, Homo sapiens
  misc_RNA (1)...(19): siRNA sense strand
gcagcaauuggguuggaaa

SEQ ID NO: 74518 - RNA, 19 nt, Homo sapiens
  misc_RNA (1)...(19): siRNA sense strand
ccuaucgucuccacugaca

SEQ ID NO: 74519 - RNA, 19 nt, Homo sapiens
  misc_RNA (1)...(19): siRNA sense strand
ucucugacggguccauuaa

SEQ ID NO: 74520 - RNA, 19 nt, Homo sapiens
  misc_RNA (1)...(19): siRNA sense strand
gcaguuugacuucuuugag

SEQ ID NO: 74521 - RNA, 19 nt, Homo sapiens
  misc_RNA (1)...(19): siRNA sense strand
ccugcaguuugacuucuuu

SEQ ID NO: 74522 - RNA, 19 nt, Homo sapiens
  misc_RNA (1)...(19): siRNA sense strand
gcggauuccucaccaagcu

SEQ ID NO: 74523 - RNA, 19 nt, Homo sapiens
  misc_RNA (1)...(19): siRNA sense strand
gcaucuuccuggauaccau

SEQ ID NO: 74524 - RNA, 19 nt, Homo sapiens
  misc_RNA (1)...(19): siRNA sense strand
gucaucaccucccaguaca

SEQ ID NO: 74525 - RNA, 19 nt, Homo sapiens
  misc_RNA (1)...(19): siRNA sense strand
ugugacaaguucggcauug

SEQ ID NO: 74526 - RNA, 19 nt, Homo sapiens
  misc_RNA (1)...(19): siRNA sense strand
ucguaaguccuccaucaaa

SEQ ID NO: 74527 - RNA, 19 nt, Homo sapiens
  misc_RNA (1)...(19): siRNA sense strand
caaggcccacuucuucuca

SEQ ID NO: 74528 - RNA, 19 nt, Homo sapiens
  misc_RNA (1)...(19): siRNA sense strand
cgaggacagcuauauugug

SEQ ID NO: 74529 - RNA, 19 nt, Homo sapiens
  misc_RNA (1)...(19): siRNA sense strand
ucaccucccaguacaacaa

SEQ ID NO: 74530 - RNA, 19 nt, Homo sapiens
  misc_RNA (1)...(19): siRNA sense strand
gagaagcccgaggucauca

SEQ ID NO: 74531 - RNA, 19 nt, Homo sapiens
  misc_RNA (1)...(19): siRNA sense strand
uccaguccuuugagauuga

SEQ ID NO: 74532 - RNA, 19 nt, Homo sapiens
  misc_RNA (1)...(19): siRNA sense strand
ccuaugacuucgacagcau

SEQ ID NO: 74533 - RNA, 19 nt, Homo sapiens
  misc_RNA (1)...(19): siRNA sense strand
ccgccacguuuccaucguu

SEQ ID NO: 74534 - RNA, 19 nt, Homo sapiens
  misc_RNA (1)...(19): siRNA sense strand
gggugaaaccucccauugg

SEQ ID NO: 74535 - RNA, 19 nt, Homo sapiens
  misc_RNA (1)...(19): siRNA sense strand
gaguucaaguccgacaaca

SEQ ID NO: 74536 - RNA, 19 nt, Homo sapiens
  misc_RNA (1)...(19): siRNA sense strand
gaggugcgcaguggacuca

SEQ ID NO: 74537 - RNA, 19 nt, Homo sapiens
  misc_RNA (1)...(19): siRNA sense strand
gacagagggcaaugaugug

SEQ ID NO: 74538 - RNA, 19 nt, Homo sapiens
  misc_RNA (1)...(19): siRNA sense strand
gagacagagggcaaugaug

SEQ ID NO: 74539 - RNA, 19 nt, Homo sapiens
  misc_RNA (1)...(19): siRNA sense strand
caagacagcacaggcaacu

SEQ ID NO: 74540 - RNA, 19 nt, Homo sapiens
  misc_RNA (1)...(19): siRNA sense strand
ugagacagagggcaaugau

SEQ ID NO: 74541 - RNA, 19 nt, Homo sapiens
  misc_RNA (1)...(19): siRNA sense strand
gcaaugaugugugcaagua

SEQ ID NO: 74542 - RNA, 19 nt, Homo sapiens
  misc_RNA (1)...(19): siRNA sense strand
ggacagcuauauuguguuc

SEQ ID NO: 74543 - RNA, 19 nt, Homo sapiens
  misc_RNA (1)...(19): siRNA sense strand
gaggacagcuauauugugu

SEQ ID NO: 74544 - RNA, 19 nt, Homo sapiens
  misc_RNA (1)...(19): siRNA sense strand
gggagaagaucauccugaa

SEQ ID NO: 74545 - RNA, 19 nt, Homo sapiens
  misc_RNA (1)...(19): siRNA sense strand
caucaaagcugcaguucca

SEQ ID NO: 74546 - RNA, 19 nt, Homo sapiens
  misc_RNA (1)...(19): siRNA sense strand
ccaacuacccagacgauua

SEQ ID NO: 74547 - RNA, 19 nt, Homo sapiens
  misc_RNA (1)...(19): siRNA sense strand
gagcagcggugccucaaca

SEQ ID NO: 74548 - RNA, 19 nt, Homo sapiens
  misc_RNA (1)...(19): siRNA sense strand
gcucguaaguccuccauca

SEQ ID NO: 74549 - RNA, 19 nt, Homo sapiens
  misc_RNA (1)...(19): siRNA sense strand
ggagagacccugcaagaca

SEQ ID NO: 74550 - RNA, 19 nt, Homo sapiens
  misc_RNA (1)...(19): siRNA sense strand
gcaucucccugcaguuuga

SEQ ID NO: 74551 - RNA, 19 nt, Homo sapiens
  misc_RNA (1)...(19): siRNA sense strand
aaaggacuauggccacauu

SEQ ID NO: 74552 - RNA, 19 nt, Homo sapiens
  misc_RNA (1)...(19): siRNA sense strand
gggcuuugccgucaacuuu

SEQ ID NO: 74553 - RNA, 19 nt, Homo sapiens
  misc_RNA (1)...(19): siRNA sense strand
gcuaugagaagccugauga

SEQ ID NO: 74554 - RNA, 19 nt, Homo sapiens
  misc_RNA (1)...(19): siRNA sense strand
gcacugacgaggacagcua

SEQ ID NO: 74555 - RNA, 19 nt, Homo sapiens
  misc_RNA (1)...(19): siRNA sense strand
gcuauauuguguucaccua

SEQ ID NO: 74556 - RNA, 19 nt, Homo sapiens
  misc_RNA (1)...(19): siRNA sense strand
ugugggagauggagaggua

SEQ ID NO: 74557 - RNA, 19 nt, Homo sapiens
  misc_RNA (1)...(19): siRNA sense strand
ggacauugcccuggacgaa

SEQ ID NO: 74558 - RNA, 19 nt, Homo sapiens
  misc_RNA (1)...(19): siRNA sense strand
ggcaagaacugugacaagu

SEQ ID NO: 74559 - RNA, 19 nt, Homo sapiens
  misc_RNA (1)...(19): siRNA sense strand
gcauuacgcucggaacaca

SEQ ID NO: 74560 - RNA, 19 nt, Homo sapiens
  misc_RNA (1)...(19): siRNA sense strand
gacgaggacagcuauauug

SEQ ID NO: 74561 - RNA, 19 nt, Homo sapiens
  misc_RNA (1)...(19): siRNA sense strand
gagaagaucauccugaacu

SEQ ID NO: 74562 - RNA, 19 nt, Homo sapiens
  misc_RNA (1)...(19): siRNA sense strand
caguuugacuucuuugaga

SEQ ID NO: 74563 - RNA, 19 nt, Homo sapiens
  misc_RNA (1)...(19): siRNA sense strand
caagcugcauggcaaguuc

SEQ ID NO: 74564 - RNA, 19 nt, Homo sapiens
  misc_RNA (1)...(19): siRNA sense strand
ggacuauggccacauucaa

SEQ ID NO: 74565 - RNA, 19 nt, Homo sapiens
  misc_RNA (1)...(19): siRNA sense strand
ugacggguccauuaacaaa

SEQ ID NO: 74566 - RNA, 19 nt, Homo sapiens
  misc_RNA (1)...(19): siRNA sense strand
agacagagggcaaugaugu

SEQ ID NO: 74567 - RNA, 19 nt, Homo sapiens
  misc_RNA (1)...(19): siRNA sense strand
uggcuacucugcucacaug

SEQ ID NO: 74568 - RNA, 19 nt, Homo sapiens
  misc_RNA (1)...(19): siRNA sense strand
ucacauuccaguccuuuga

SEQ ID NO: 74569 - RNA, 19 nt, Homo sapiens
  misc_RNA (1)...(19): siRNA sense strand
cauggcaaguucugugguu

SEQ ID NO: 74570 - RNA, 19 nt, Homo sapiens
  misc_RNA (1)...(19): siRNA sense strand
ugacgaggacagcuauauu

SEQ ID NO: 74571 - RNA, 19 nt, Homo sapiens
  misc_RNA (1)...(19): siRNA sense strand
ggucaucaccucccaguac

SEQ ID NO: 74572 - RNA, 19 nt, Homo sapiens
  misc_RNA (1)...(19): siRNA sense strand
ccacgugggccucacauuc

SEQ ID NO: 74573 - RNA, 19 nt, Homo sapiens
  misc_RNA (1)...(19): siRNA sense strand
guggagagacccugcaaga

SEQ ID NO: 74574 - RNA, 19 nt, Homo sapiens
  misc_RNA (1)...(19): siRNA sense strand
cccgcaagcuuuacaagug

SEQ ID NO: 74575 - RNA, 19 nt, Homo sapiens
  misc_RNA (1)...(19): siRNA sense strand
agaagaucauccugaacuu

SEQ ID NO: 74576 - RNA, 19 nt, Homo sapiens
  misc_RNA (1)...(19): siRNA sense strand
caacuacccagacgauuac

SEQ ID NO: 74577 - RNA, 19 nt, Homo sapiens
  misc_RNA (1)...(19): siRNA sense strand
gagauggcuucuggaggaa

SEQ ID NO: 74578 - RNA, 19 nt, Homo sapiens
  misc_RNA (1)...(19): siRNA sense strand
cguaaguccuccaucaaag

SEQ ID NO: 74579 - RNA, 19 nt, Homo sapiens
  misc_RNA (1)...(19): siRNA sense strand
cagcugugccuacgacuau

SEQ ID NO: 74580 - RNA, 19 nt, Homo sapiens
  misc_RNA (1)...(19): siRNA sense strand
uauauuguguucaccuauc

SEQ ID NO: 74581 - RNA, 19 nt, Homo sapiens
  misc_RNA (1)...(19): siRNA sense strand
acauugcccuggacgaaga

SEQ ID NO: 74582 - RNA, 19 nt, Homo sapiens
  misc_RNA (1)...(19): siRNA sense strand
ucaacacccugggcagcua

SEQ ID NO: 74583 - RNA, 19 nt, Homo sapiens
  misc_RNA (1)...(19): siRNA sense strand
caaacucccugagccuauc

SEQ ID NO: 74584 - RNA, 19 nt, Homo sapiens
  misc_RNA (1)...(19): siRNA sense strand
caacaugcgcguggaguuc

SEQ ID NO: 74585 - RNA, 19 nt, Homo sapiens
  misc_RNA (1)...(19): siRNA sense strand
cuucaaggcccacuucuuc

SEQ ID NO: 74586 - RNA, 19 nt, Homo sapiens
  misc_RNA (1)...(19): siRNA sense strand
agacagcacaggcaacuuc

SEQ ID NO: 74587 - RNA, 19 nt, Homo sapiens
  misc_RNA (1)...(19): siRNA sense strand
ccgcaucucccugcaguuu

SEQ ID NO: 74588 - RNA, 19 nt, Homo sapiens
  misc_RNA (1)...(19): siRNA sense strand
gacuauggccacauucaau

SEQ ID NO: 74589 - RNA, 19 nt, Homo sapiens
  misc_RNA (1)...(19): siRNA sense strand
gggcuucuuugcagucuac

SEQ ID NO: 74590 - RNA, 19 nt, Homo sapiens
  misc_RNA (1)...(19): siRNA sense strand
cagcagcaauuggguugga

SEQ ID NO: 74591 - RNA, 19 nt, Homo sapiens
  misc_RNA (1)...(19): siRNA sense strand
gcgcuacuguggcuaugag

SEQ ID NO: 74592 - RNA, 19 nt, Homo sapiens
  misc_RNA (1)...(19): siRNA sense strand
ggcucaaguucgucucuga

SEQ ID NO: 74593 - RNA, 19 nt, Homo sapiens
  misc_RNA (1)...(19): siRNA sense strand
ggucauccccuuugucauu

SEQ ID NO: 74594 - RNA, 19 nt, Homo sapiens
  misc_RNA (1)...(19): siRNA sense strand
ugacuucgacagcaucaug

SEQ ID NO: 74595 - RNA, 19 nt, Homo sapiens
  misc_RNA (1)...(19): siRNA sense strand
ccaaacucccugagccuau

SEQ ID NO: 74596 - RNA, 19 nt, Homo sapiens
  misc_RNA (1)...(19): siRNA sense strand
ucugacggguccauuaaca

SEQ ID NO: 74597 - RNA, 19 nt, Homo sapiens
  misc_RNA (1)...(19): siRNA sense strand
gcagcaauuggguuggaaa

SEQ ID NO: 74598 - RNA, 19 nt, Homo sapiens
  misc_RNA (1)...(19): siRNA sense strand
ccuaucgucuccacugaca

SEQ ID NO: 74599 - RNA, 19 nt, Homo sapiens
  misc_RNA (1)...(19): siRNA sense strand
ucucugacggguccauuaa

SEQ ID NO: 74600 - RNA, 19 nt, Homo sapiens
  misc_RNA (1)...(19): siRNA sense strand
gcaguuugacuucuuugag

SEQ ID NO: 74601 - RNA, 19 nt, Homo sapiens
  misc_RNA (1)...(19): siRNA sense strand
ccugcaguuugacuucuuu

SEQ ID NO: 74602 - RNA, 19 nt, Homo sapiens
  misc_RNA (1)...(19): siRNA sense strand
gcggauuccucaccaagcu

SEQ ID NO: 74603 - RNA, 19 nt, Homo sapiens
  misc_RNA (1)...(19): siRNA sense strand
gcaucuuccuggauaccau

SEQ ID NO: 74604 - RNA, 19 nt, Homo sapiens
  misc_RNA (1)...(19): siRNA sense strand
gucaucaccucccaguaca

SEQ ID NO: 74605 - RNA, 19 nt, Homo sapiens
  misc_RNA (1)...(19): siRNA sense strand
ugugacaaguucggcauug

SEQ ID NO: 74606 - RNA, 19 nt, Homo sapiens
  misc_RNA (1)...(19): siRNA sense strand
ucguaaguccuccaucaaa

SEQ ID NO: 74607 - RNA, 19 nt, Homo sapiens
  misc_RNA (1)...(19): siRNA sense strand
caaggcccacuucuucuca

SEQ ID NO: 74608 - RNA, 19 nt, Homo sapiens
  misc_RNA (1)...(19): siRNA sense strand
cgaggacagcuauauugug

SEQ ID NO: 74609 - RNA, 19 nt, Homo sapiens
  misc_RNA (1)...(19): siRNA sense strand
ucaccucccaguacaacaa

SEQ ID NO: 74610 - RNA, 19 nt, Homo sapiens
  misc_RNA (1)...(19): siRNA sense strand
gagaagcccgaggucauca

SEQ ID NO: 74611 - RNA, 19 nt, Homo sapiens
  misc_RNA (1)...(19): siRNA sense strand
uccaguccuuugagauuga

SEQ ID NO: 74612 - RNA, 19 nt, Homo sapiens
  misc_RNA (1)...(19): siRNA sense strand
ccuaugacuucgacagcau

SEQ ID NO: 74613 - RNA, 19 nt, Homo sapiens
  misc_RNA (1)...(19): siRNA sense strand
ccgccacguuuccaucguu

SEQ ID NO: 74614 - RNA, 19 nt, Homo sapiens
  misc_RNA (1)...(19): siRNA sense strand
gggugaaaccucccauugg

SEQ ID NO: 74615 - RNA, 19 nt, Homo sapiens
  misc_RNA (1)...(19): siRNA sense strand
gaguucaaguccgacaaca

SEQ ID NO: 74616 - RNA, 19 nt, Homo sapiens
  misc_RNA (1)...(19): siRNA sense strand
gaggugcgcaguggacuca

SEQ ID NO: 74617 - RNA, 19 nt, Homo sapiens
  misc_RNA (1)...(19): siRNA sense strand
gacagagggcaaugaugug

SEQ ID NO: 74618 - RNA, 19 nt, Homo sapiens
  misc_RNA (1)...(19): siRNA sense strand
gagacagagggcaaugaug

SEQ ID NO: 74619 - RNA, 19 nt, Homo sapiens
  misc_RNA (1)...(19): siRNA sense strand
caagacagcacaggcaacu

SEQ ID NO: 74620 - RNA, 19 nt, Homo sapiens
  misc_RNA (1)...(19): siRNA sense strand
ugagacagagggcaaugau

SEQ ID NO: 74621 - RNA, 19 nt, Homo sapiens
  misc_RNA (1)...(19): siRNA sense strand
ggacagcuauauuguguuc

SEQ ID NO: 74622 - RNA, 19 nt, Homo sapiens
  misc_RNA (1)...(19): siRNA sense strand
gaggacagcuauauugugu

SEQ ID NO: 74623 - RNA, 19 nt, Homo sapiens
  misc_RNA (1)...(19): siRNA sense strand
gggagaagaucauccugaa

SEQ ID NO: 74624 - RNA, 19 nt, Homo sapiens
  misc_RNA (1)...(19): siRNA sense strand
caucaaagcugcaguucca

SEQ ID NO: 74625 - RNA, 19 nt, Homo sapiens
  misc_RNA (1)...(19): siRNA sense strand
ccaacuacccagacgauua

SEQ ID NO: 74626 - RNA, 19 nt, Homo sapiens
  misc_RNA (1)...(19): siRNA sense strand
gagcagcggugccucaaca

SEQ ID NO: 74627 - RNA, 19 nt, Homo sapiens
  misc_RNA (1)...(19): siRNA sense strand
gcucguaaguccuccauca

SEQ ID NO: 74628 - RNA, 19 nt, Homo sapiens
  misc_RNA (1)...(19): siRNA sense strand
ggagagacccugcaagaca

SEQ ID NO: 74629 - RNA, 19 nt, Homo sapiens
  misc_RNA (1)...(19): siRNA sense strand
aaaggacuauggccacauu

SEQ ID NO: 74630 - RNA, 19 nt, Homo sapiens
  misc_RNA (1)...(19): siRNA sense strand
gggcuuugccgucaacuuu

SEQ ID NO: 74631 - RNA, 19 nt, Homo sapiens
  misc_RNA (1)...(19): siRNA sense strand
gcuaugagaagccugauga

SEQ ID NO: 74632 - RNA, 19 nt, Homo sapiens
  misc_RNA (1)...(19): siRNA sense strand
gcacugacgaggacagcua

SEQ ID NO: 74633 - RNA, 19 nt, Homo sapiens
  misc_RNA (1)...(19): siRNA sense strand
gcuauauuguguucaccua

SEQ ID NO: 74634 - RNA, 19 nt, Homo sapiens
  misc_RNA (1)...(19): siRNA sense strand
ugugggagauggagaggua

SEQ ID NO: 74635 - RNA, 19 nt, Homo sapiens
  misc_RNA (1)...(19): siRNA sense strand
ggacauugcccuggacgaa

SEQ ID NO: 74636 - RNA, 19 nt, Homo sapiens
  misc_RNA (1)...(19): siRNA sense strand
ggcaagaacugugacaagu

SEQ ID NO: 74637 - RNA, 19 nt, Homo sapiens
  misc_RNA (1)...(19): siRNA sense strand
gcauuacgcucggaacaca

SEQ ID NO: 74638 - RNA, 19 nt, Homo sapiens
  misc_RNA (1)...(19): siRNA sense strand
gacgaggacagcuauauug

SEQ ID NO: 74639 - RNA, 19 nt, Homo sapiens
  misc_RNA (1)...(19): siRNA sense strand
gagaagaucauccugaacu

SEQ ID NO: 74640 - RNA, 19 nt, Homo sapiens
  misc_RNA (1)...(19): siRNA sense strand
ggacuauggccacauucaa

SEQ ID NO: 74641 - RNA, 19 nt, Homo sapiens
  misc_RNA (1)...(19): siRNA sense strand
ugacggguccauuaacaaa

SEQ ID NO: 74642 - RNA, 19 nt, Homo sapiens
  misc_RNA (1)...(19): siRNA sense strand
uggcuacucugcucacaug

SEQ ID NO: 74643 - RNA, 19 nt, Homo sapiens
  misc_RNA (1)...(19): siRNA sense strand
ucacauuccaguccuuuga

SEQ ID NO: 74644 - RNA, 19 nt, Homo sapiens
  misc_RNA (1)...(19): siRNA sense strand
ugacgaggacagcuauauu

SEQ ID NO: 74645 - RNA, 19 nt, Homo sapiens
  misc_RNA (1)...(19): siRNA sense strand
ccacgugggccucacauuc

SEQ ID NO: 74646 - RNA, 19 nt, Homo sapiens
  misc_RNA (1)...(19): siRNA sense strand
guggagagacccugcaaga

SEQ ID NO: 74647 - RNA, 19 nt, Homo sapiens
  misc_RNA (1)...(19): siRNA sense strand
cccgcaagcuuuacaagug

SEQ ID NO: 74648 - RNA, 19 nt, Homo sapiens
  misc_RNA (1)...(19): siRNA sense strand
agaagaucauccugaacuu

SEQ ID NO: 74649 - RNA, 19 nt, Homo sapiens
  misc_RNA (1)...(19): siRNA sense strand
caacuacccagacgauuac

SEQ ID NO: 74650 - RNA, 19 nt, Homo sapiens
  misc_RNA (1)...(19): siRNA sense strand
gagauggcuucuggaggaa

SEQ ID NO: 74651 - RNA, 19 nt, Homo sapiens
  misc_RNA (1)...(19): siRNA sense strand
cguaaguccuccaucaaag

SEQ ID NO: 74652 - RNA, 19 nt, Homo sapiens
  misc_RNA (1)...(19): siRNA sense strand
cagcugugccuacgacuau

SEQ ID NO: 74653 - RNA, 19 nt, Homo sapiens
  misc_RNA (1)...(19): siRNA sense strand
uauauuguguucaccuauc

SEQ ID NO: 74654 - RNA, 19 nt, Homo sapiens
  misc_RNA (1)...(19): siRNA sense strand
ucaacacccugggcagcua

SEQ ID NO: 74655 - RNA, 19 nt, Homo sapiens
  misc_RNA (1)...(19): siRNA sense strand
caaacucccugagccuauc

SEQ ID NO: 74656 - RNA, 19 nt, Homo sapiens
  misc_RNA (1)...(19): siRNA sense strand
acauugcccuggacgaaga

SEQ ID NO: 74657 - RNA, 19 nt, Homo sapiens
  misc_RNA (1)...(19): siRNA sense strand
agacagcacaggcaacuuc

SEQ ID NO: 74658 - RNA, 19 nt, Homo sapiens
  misc_RNA (1)...(19): siRNA sense strand
gacuauggccacauucaau

SEQ ID NO: 74659 - RNA, 19 nt, Homo sapiens
  misc_RNA (1)...(19): siRNA sense strand
gggcuucuuugcagucuac

SEQ ID NO: 74660 - RNA, 19 nt, Homo sapiens
  misc_RNA (1)...(19): siRNA sense strand
cagcagcaauuggguugga

SEQ ID NO: 74661 - RNA, 19 nt, Homo sapiens
  misc_RNA (1)...(19): siRNA sense strand
gcgcuacuguggcuaugag

SEQ ID NO: 74662 - RNA, 19 nt, Homo sapiens
  misc_RNA (1)...(19): siRNA sense strand
ggcucaaguucgucucuga

SEQ ID NO: 74663 - RNA, 19 nt, Homo sapiens
  misc_RNA (1)...(19): siRNA sense strand
ggucauccccuuugucauu

SEQ ID NO: 74664 - RNA, 19 nt, Homo sapiens
  misc_RNA (1)...(19): siRNA sense strand
ugacuucgacagcaucaug

SEQ ID NO: 74665 - RNA, 19 nt, Homo sapiens
  misc_RNA (1)...(19): siRNA sense strand
ccaaacucccugagccuau

SEQ ID NO: 74666 - RNA, 19 nt, Homo sapiens
  misc_RNA (1)...(19): siRNA sense strand
ucugacggguccauuaaca

SEQ ID NO: 74667 - RNA, 19 nt, Homo sapiens
  misc_RNA (1)...(19): siRNA sense strand
gcagcaauuggguuggaaa

SEQ ID NO: 74668 - RNA, 19 nt, Homo sapiens
  misc_RNA (1)...(19): siRNA sense strand
ccuaucgucuccacugaca

SEQ ID NO: 74669 - RNA, 19 nt, Homo sapiens
  misc_RNA (1)...(19): siRNA sense strand
ucucugacggguccauuaa

SEQ ID NO: 74670 - RNA, 19 nt, Homo sapiens
  misc_RNA (1)...(19): siRNA sense strand
gcaucuuccuggauaccau

SEQ ID NO: 74671 - RNA, 19 nt, Homo sapiens
  misc_RNA (1)...(19): siRNA sense strand
ugugacaaguucggcauug

SEQ ID NO: 74672 - RNA, 19 nt, Homo sapiens
  misc_RNA (1)...(19): siRNA sense strand
ucguaaguccuccaucaaa

SEQ ID NO: 74673 - RNA, 19 nt, Homo sapiens
  misc_RNA (1)...(19): siRNA sense strand
cgaggacagcuauauugug

SEQ ID NO: 74674 - RNA, 19 nt, Homo sapiens
  misc_RNA (1)...(19): siRNA sense strand
uccaguccuuugagauuga

SEQ ID NO: 74675 - RNA, 19 nt, Homo sapiens
  misc_RNA (1)...(19): siRNA sense strand
ccuaugacuucgacagcau

SEQ ID NO: 74676 - RNA, 19 nt, Homo sapiens
  misc_RNA (1)...(19): siRNA sense strand
ccgccacguuuccaucguu

SEQ ID NO: 74677 - RNA, 19 nt, Homo sapiens
  misc_RNA (1)...(19): siRNA sense strand
gggugaaaccucccauugg

SEQ ID NO: 74678 - RNA, 19 nt, Homo sapiens
  misc_RNA (1)...(19): siRNA sense strand
caagacagcacaggcaacu

SEQ ID NO: 74679 - RNA, 19 nt, Homo sapiens
  misc_RNA (1)...(19): siRNA sense strand
ggacagcuauauuguguuc

SEQ ID NO: 74680 - RNA, 19 nt, Homo sapiens
  misc_RNA (1)...(19): siRNA sense strand
gaggacagcuauauugugu

SEQ ID NO: 74681 - RNA, 19 nt, Homo sapiens
  misc_RNA (1)...(19): siRNA sense strand
caucaaagcugcaguucca

SEQ ID NO: 74682 - RNA, 19 nt, Homo sapiens
  misc_RNA (1)...(19): siRNA sense strand
gcucguaaguccuccauca

SEQ ID NO: 74683 - RNA, 19 nt, Homo sapiens
  misc_RNA (1)...(19): siRNA sense strand
gcacugacgaggacagcua

SEQ ID NO: 74684 - RNA, 19 nt, Homo sapiens
  misc_RNA (1)...(19): siRNA sense strand
gcuauauuguguucaccua

SEQ ID NO: 74685 - RNA, 19 nt, Homo sapiens
  misc_RNA (1)...(19): siRNA sense strand
ugugggagauggagaggua

SEQ ID NO: 74686 - RNA, 19 nt, Homo sapiens
  misc_RNA (1)...(19): siRNA sense strand
ggacauugcccuggacgaa

SEQ ID NO: 74687 - RNA, 19 nt, Homo sapiens
  misc_RNA (1)...(19): siRNA sense strand
ggcaagaacugugacaagu

SEQ ID NO: 74688 - RNA, 19 nt, Homo sapiens
  misc_RNA (1)...(19): siRNA sense strand
gacgaggacagcuauauug

SEQ ID NO: 74689 - RNA, 19 nt, Homo sapiens
  misc_RNA (1)...(19): siRNA sense strand
ugacgaggacagcuauauu

SEQ ID NO: 74690 - RNA, 19 nt, Homo sapiens
  misc_RNA (1)...(19): siRNA sense strand
cguaaguccuccaucaaag

SEQ ID NO: 74691 - RNA, 19 nt, Homo sapiens
  misc_RNA (1)...(19): siRNA sense strand
acauugcccuggacgaaga

SEQ ID NO: 74692 - RNA, 19 nt, Homo sapiens
  misc_RNA (1)...(19): siRNA sense strand
uauauuguguucaccuauc

SEQ ID NO: 74693 - RNA, 19 nt, Homo sapiens
  misc_RNA (1)...(19): siRNA sense strand
ggucauccccuuugucauu

SEQ ID NO: 74694 - RNA, 19 nt, Homo sapiens
  misc_RNA (1)...(19): siRNA sense strand
ugugacaaguucggcauug

SEQ ID NO: 74695 - RNA, 19 nt, Homo sapiens
  misc_RNA (1)...(19): siRNA sense strand
ucguaaguccuccaucaaa

SEQ ID NO: 74696 - RNA, 19 nt, Homo sapiens
  misc_RNA (1)...(19): siRNA sense strand
cgaggacagcuauauugug

SEQ ID NO: 74697 - RNA, 19 nt, Homo sapiens
  misc_RNA (1)...(19): siRNA sense strand
ccgccacguuuccaucguu

SEQ ID NO: 74698 - RNA, 19 nt, Homo sapiens
  misc_RNA (1)...(19): siRNA sense strand
gaacacagcuggucacaga

SEQ ID NO: 74699 - RNA, 19 nt, Homo sapiens
  misc_RNA (1)...(19): siRNA sense strand
caagagacauguuaggaua

SEQ ID NO: 74700 - RNA, 19 nt, Homo sapiens
  misc_RNA (1)...(19): siRNA sense strand
gcaagcaggugggaaaguu

SEQ ID NO: 74701 - RNA, 19 nt, Homo sapiens
  misc_RNA (1)...(19): siRNA sense strand
caucugaacuccacuaauc

SEQ ID NO: 74702 - RNA, 19 nt, Homo sapiens
  misc_RNA (1)...(19): siRNA sense strand
cgacagaacucagugcuau

SEQ ID NO: 74703 - RNA, 19 nt, Homo sapiens
  misc_RNA (1)...(19): siRNA sense strand
gaugcaagaugcuuuagga

SEQ ID NO: 74704 - RNA, 19 nt, Homo sapiens
  misc_RNA (1)...(19): siRNA sense strand
gcaagaugcuuuaggaaac

SEQ ID NO: 74705 - RNA, 19 nt, Homo sapiens
  misc_RNA (1)...(19): siRNA sense strand
ggccauugcuaguaacuuu

SEQ ID NO: 74706 - RNA, 19 nt, Homo sapiens
  misc_RNA (1)...(19): siRNA sense strand
ggucaacucuguuaacucu

SEQ ID NO: 74707 - RNA, 19 nt, Homo sapiens
  misc_RNA (1)...(19): siRNA sense strand
ucaacucuguuaacucuaa

SEQ ID NO: 74708 - RNA, 19 nt, Homo sapiens
  misc_RNA (1)...(19): siRNA sense strand
cagcagagcuucagguuuu

SEQ ID NO: 74709 - RNA, 19 nt, Homo sapiens
  misc_RNA (1)...(19): siRNA sense strand
caacagccaacucgaaauu

SEQ ID NO: 74710 - RNA, 19 nt, Homo sapiens
  misc_RNA (1)...(19): siRNA sense strand
cggagauucuucuuuaauu

SEQ ID NO: 74711 - RNA, 19 nt, Homo sapiens
  misc_RNA (1)...(19): siRNA sense strand
gauaaggccauugcuagua

SEQ ID NO: 74712 - RNA, 19 nt, Homo sapiens
  misc_RNA (1)...(19): siRNA sense strand
guaagagacacccuuugua

SEQ ID NO: 74713 - RNA, 19 nt, Homo sapiens
  misc_RNA (1)...(19): siRNA sense strand
acccggagauucuucuuua

SEQ ID NO: 74714 - RNA, 19 nt, Homo sapiens
  misc_RNA (1)...(19): siRNA sense strand
ucuguuaacucuaagauuc

SEQ ID NO: 74715 - RNA, 19 nt, Homo sapiens
  misc_RNA (1)...(19): siRNA sense strand
auaaggccauugcuaguaa

SEQ ID NO: 74716 - RNA, 19 nt, Homo sapiens
  misc_RNA (1)...(19): siRNA sense strand
gaacagaugcaagaugcuu

SEQ ID NO: 74717 - RNA, 19 nt, Homo sapiens
  misc_RNA (1)...(19): siRNA sense strand
aaacagcggaaacgccuua

SEQ ID NO: 74718 - RNA, 19 nt, Homo sapiens
  misc_RNA (1)...(19): siRNA sense strand
ccacuaaucaugccauugu

SEQ ID NO: 74719 - RNA, 19 nt, Homo sapiens
  misc_RNA (1)...(19): siRNA sense strand
ccagguuggugaaucagaa

SEQ ID NO: 74720 - RNA, 19 nt, Homo sapiens
  misc_RNA (1)...(19): siRNA sense strand
ggucacagauaaggccauu

SEQ ID NO: 74721 - RNA, 19 nt, Homo sapiens
  misc_RNA (1)...(19): siRNA sense strand
caagaugcuuuaggaaaca

SEQ ID NO: 74722 - RNA, 19 nt, Homo sapiens
  misc_RNA (1)...(19): siRNA sense strand
aaagaacuaucaggacaug

SEQ ID NO: 74723 - RNA, 19 nt, Homo sapiens
  misc_RNA (1)...(19): siRNA sense strand
gaacuaucaggacaugguu

SEQ ID NO: 74724 - RNA, 19 nt, Homo sapiens
  misc_RNA (1)...(19): siRNA sense strand
gaagaacuaccagaaacga

SEQ ID NO: 74725 - RNA, 19 nt, Homo sapiens
  misc_RNA (1)...(19): siRNA sense strand
uuccaucaccgaauuaaua

SEQ ID NO: 74726 - RNA, 19 nt, Homo sapiens
  misc_RNA (1)...(19): siRNA sense strand
gggacccgcugucuucuag

SEQ ID NO: 74727 - RNA, 19 nt, Homo sapiens
  misc_RNA (1)...(19): siRNA sense strand
uaagagacacccuuuguac

SEQ ID NO: 74728 - RNA, 19 nt, Homo sapiens
  misc_RNA (1)...(19): siRNA sense strand
acacagcuggucacagaua

SEQ ID NO: 74729 - RNA, 19 nt, Homo sapiens
  misc_RNA (1)...(19): siRNA sense strand
ucucgaugcuguaccuuga

SEQ ID NO: 74730 - RNA, 19 nt, Homo sapiens
  misc_RNA (1)...(19): siRNA sense strand
cgccuuaaguccagcugua

SEQ ID NO: 74731 - RNA, 19 nt, Homo sapiens
  misc_RNA (1)...(19): siRNA sense strand
acagaugcaagaugcuuua

SEQ ID NO: 74732 - RNA, 19 nt, Homo sapiens
  misc_RNA (1)...(19): siRNA sense strand
gaucaucugaacuccacua

SEQ ID NO: 74733 - RNA, 19 nt, Homo sapiens
  misc_RNA (1)...(19): siRNA sense strand
caguuuccaucaccgaauu

SEQ ID NO: 74734 - RNA, 19 nt, Homo sapiens
  misc_RNA (1)...(19): siRNA sense strand
cacagcuggucacagauaa

SEQ ID NO: 74735 - RNA, 19 nt, Homo sapiens
  misc_RNA (1)...(19): siRNA sense strand
uggaagaacuaccagaaac

SEQ ID NO: 74736 - RNA, 19 nt, Homo sapiens
  misc_RNA (1)...(19): siRNA sense strand
aaacaaggugucuccaaga

SEQ ID NO: 74737 - RNA, 19 nt, Homo sapiens
  misc_RNA (1)...(19): siRNA sense strand
gaaaacaacccggagauuc

SEQ ID NO: 74738 - RNA, 19 nt, Homo sapiens
  misc_RNA (1)...(19): siRNA sense strand
gcuguaagagacacccuuu

SEQ ID NO: 74739 - RNA, 19 nt, Homo sapiens
  misc_RNA (1)...(19): siRNA sense strand
acagauaaggccauugcua

SEQ ID NO: 74740 - RNA, 19 nt, Homo sapiens
  misc_RNA (1)...(19): siRNA sense strand
caagcaggugggaaaguuu

SEQ ID NO: 74741 - RNA, 19 nt, Homo sapiens
  misc_RNA (1)...(19): siRNA sense strand
gcuguaccuugacgagaau

SEQ ID NO: 74742 - RNA, 19 nt, Homo sapiens
  misc_RNA (1)...(19): siRNA sense strand
aagcaggucuuugcaccaa

SEQ ID NO: 74743 - RNA, 19 nt, Homo sapiens
  misc_RNA (1)...(19): siRNA sense strand
ccaagagacauguuaggau

SEQ ID NO: 74744 - RNA, 19 nt, Homo sapiens
  misc_RNA (1)...(19): siRNA sense strand
gaugcuuuaggaaacaaua

SEQ ID NO: 74745 - RNA, 19 nt, Homo sapiens
  misc_RNA (1)...(19): siRNA sense strand
cagcauguucggccugaaa

SEQ ID NO: 74746 - RNA, 19 nt, Homo sapiens
  misc_RNA (1)...(19): siRNA sense strand
cagcggaaacgccuuaagu

SEQ ID NO: 74747 - RNA, 19 nt, Homo sapiens
  misc_RNA (1)...(19): siRNA sense strand
gcaacagccaacucgaaau

SEQ ID NO: 74748 - RNA, 19 nt, Homo sapiens
  misc_RNA (1)...(19): siRNA sense strand
cgagaacagaugcaagaug

SEQ ID NO: 74749 - RNA, 19 nt, Homo sapiens
  misc_RNA (1)...(19): siRNA sense strand
uguaagagacacccuuugu

SEQ ID NO: 74750 - RNA, 19 nt, Homo sapiens
  misc_RNA (1)...(19): siRNA sense strand
ccucaucccagcccucuga

SEQ ID NO: 74751 - RNA, 19 nt, Homo sapiens
  misc_RNA (1)...(19): siRNA sense strand
ugcaagaugcuuuaggaaa

SEQ ID NO: 74752 - RNA, 19 nt, Homo sapiens
  misc_RNA (1)...(19): siRNA sense strand
gcgcagcuuccaccaugaa

SEQ ID NO: 74753 - RNA, 19 nt, Homo sapiens
  misc_RNA (1)...(19): siRNA sense strand
cccggagauucuucuuuaa

SEQ ID NO: 74754 - RNA, 19 nt, Homo sapiens
  misc_RNA (1)...(19): siRNA sense strand
caauagcaguuuccaucac

SEQ ID NO: 74755 - RNA, 19 nt, Homo sapiens
  misc_RNA (1)...(19): siRNA sense strand
ggacacgccaaccauggau

SEQ ID NO: 74756 - RNA, 19 nt, Homo sapiens
  misc_RNA (1)...(19): siRNA sense strand
ggaagaacuaccagaaacg

SEQ ID NO: 74757 - RNA, 19 nt, Homo sapiens
  misc_RNA (1)...(19): siRNA sense strand
ugacgagaaugaaaagguu

SEQ ID NO: 74758 - RNA, 19 nt, Homo sapiens
  misc_RNA (1)...(19): siRNA sense strand
ugcuguaccuugacgagaa

SEQ ID NO: 74759 - RNA, 19 nt, Homo sapiens
  misc_RNA (1)...(19): siRNA sense strand
gaaacgagugggaaaacaa

SEQ ID NO: 74760 - RNA, 19 nt, Homo sapiens
  misc_RNA (1)...(19): siRNA sense strand
gcaguuuccaucaccgaau

SEQ ID NO: 74761 - RNA, 19 nt, Homo sapiens
  misc_RNA (1)...(19): siRNA sense strand
cuaaucaugccauuguuca

SEQ ID NO: 74762 - RNA, 19 nt, Homo sapiens
  misc_RNA (1)...(19): siRNA sense strand
uaaguccagcuguaagaga

SEQ ID NO: 74763 - RNA, 19 nt, Homo sapiens
  misc_RNA (1)...(19): siRNA sense strand
aaacaacccggagauucuu

SEQ ID NO: 74764 - RNA, 19 nt, Homo sapiens
  misc_RNA (1)...(19): siRNA sense strand
agagacauguuaggauaag

SEQ ID NO: 74765 - RNA, 19 nt, Homo sapiens
  misc_RNA (1)...(19): siRNA sense strand
ccacuuggaggagaaacaa

SEQ ID NO: 74766 - RNA, 19 nt, Homo sapiens
  misc_RNA (1)...(19): siRNA sense strand
uuaggaaacaauagcaguu

SEQ ID NO: 74767 - RNA, 19 nt, Homo sapiens
  misc_RNA (1)...(19): siRNA sense strand
uaaagaacuaucaggacau

SEQ ID NO: 74768 - RNA, 19 nt, Homo sapiens
  misc_RNA (1)...(19): siRNA sense strand
ggaaaacaacccggagauu

SEQ ID NO: 74769 - RNA, 19 nt, Homo sapiens
  misc_RNA (1)...(19): siRNA sense strand
ucacagauaaggccauugc

SEQ ID NO: 74770 - RNA, 19 nt, Homo sapiens
  misc_RNA (1)...(19): siRNA sense strand
acaauagcaguuuccauca

SEQ ID NO: 74771 - RNA, 19 nt, Homo sapiens
  misc_RNA (1)...(19): siRNA sense strand
ccggagauucuucuuuaau

SEQ ID NO: 74772 - RNA, 19 nt, Homo sapiens
  misc_RNA (1)...(19): siRNA sense strand
caacucuguuaacucuaag

SEQ ID NO: 74773 - RNA, 19 nt, Homo sapiens
  misc_RNA (1)...(19): siRNA sense strand
ccugagcgaguucgaguug

SEQ ID NO: 74774 - RNA, 19 nt, Homo sapiens
  misc_RNA (1)...(19): siRNA sense strand
aacaaggugucuccaagag

SEQ ID NO: 74775 - RNA, 19 nt, Homo sapiens
  misc_RNA (1)...(19): siRNA sense strand
agaaacaaggugucuccaa

SEQ ID NO: 74776 - RNA, 19 nt, Homo sapiens
  misc_RNA (1)...(19): siRNA sense strand
ugcaacagccaacucgaaa

SEQ ID NO: 74777 - RNA, 19 nt, Homo sapiens
  misc_RNA (1)...(19): siRNA sense strand
aagagacauguuaggauaa

SEQ ID NO: 74778 - RNA, 19 nt, Homo sapiens
  misc_RNA (1)...(19): siRNA sense strand
ccacggagaaugcccuuuu

SEQ ID NO: 74779 - RNA, 19 nt, Homo sapiens
  misc_RNA (1)...(19): siRNA sense strand
ggaaacacauucagauuga

SEQ ID NO: 74780 - RNA, 19 nt, Homo sapiens
  misc_RNA (1)...(19): siRNA sense strand
gauauuggcuggagugaau

SEQ ID NO: 74781 - RNA, 19 nt, Homo sapiens
  misc_RNA (1)...(19): siRNA sense strand
gagcugcccuuuccauuga

SEQ ID NO: 74782 - RNA, 19 nt, Homo sapiens
  misc_RNA (1)...(19): siRNA sense strand
gaauguagugcuuaaagua

SEQ ID NO: 74783 - RNA, 19 nt, Homo sapiens
  misc_RNA (1)...(19): siRNA sense strand
gaaaaggacuguauaucuu

SEQ ID NO: 74784 - RNA, 19 nt, Homo sapiens
  misc_RNA (1)...(19): siRNA sense strand
gaaaagauguccucacuca

SEQ ID NO: 74785 - RNA, 19 nt, Homo sapiens
  misc_RNA (1)...(19): siRNA sense strand
caaggucucugaacacaug

SEQ ID NO: 74786 - RNA, 19 nt, Homo sapiens
  misc_RNA (1)...(19): siRNA sense strand
gccagacgcuccaauuuga

SEQ ID NO: 74787 - RNA, 19 nt, Homo sapiens
  misc_RNA (1)...(19): siRNA sense strand
caacacgguucgcagcuuu

SEQ ID NO: 74788 - RNA, 19 nt, Homo sapiens
  misc_RNA (1)...(19): siRNA sense strand
ggagaaagcaguggauuga

SEQ ID NO: 74789 - RNA, 19 nt, Homo sapiens
  misc_RNA (1)...(19): siRNA sense strand
ugacaucgcuaaccaaguc

SEQ ID NO: 74790 - RNA, 19 nt, Homo sapiens
  misc_RNA (1)...(19): siRNA sense strand
uaaaguauacccuaacaug

SEQ ID NO: 74791 - RNA, 19 nt, Homo sapiens
  misc_RNA (1)...(19): siRNA sense strand
gauuuaacauuacguccaa

SEQ ID NO: 74792 - RNA, 19 nt, Homo sapiens
  misc_RNA (1)...(19): siRNA sense strand
gagagaaagccuuacaaga

SEQ ID NO: 74793 - RNA, 19 nt, Homo sapiens
  misc_RNA (1)...(19): siRNA sense strand
caaaugggauagccacauc

SEQ ID NO: 74794 - RNA, 19 nt, Homo sapiens
  misc_RNA (1)...(19): siRNA sense strand
cuguauaucuucaaucuga

SEQ ID NO: 74795 - RNA, 19 nt, Homo sapiens
  misc_RNA (1)...(19): siRNA sense strand
gguagacuuugcagauauu

SEQ ID NO: 74796 - RNA, 19 nt, Homo sapiens
  misc_RNA (1)...(19): siRNA sense strand
gaggaaacacauucagauu

SEQ ID NO: 74797 - RNA, 19 nt, Homo sapiens
  misc_RNA (1)...(19): siRNA sense strand
ggauugaaccucggaauug

SEQ ID NO: 74798 - RNA, 19 nt, Homo sapiens
  misc_RNA (1)...(19): siRNA sense strand
gcauggacccucaaauuca

SEQ ID NO: 74799 - RNA, 19 nt, Homo sapiens
  misc_RNA (1)...(19): siRNA sense strand
caaagaaaaugaagaguuc

SEQ ID NO: 74800 - RNA, 19 nt, Homo sapiens
  misc_RNA (1)...(19): siRNA sense strand
ccucauaggauuuaacauu

SEQ ID NO: 74801 - RNA, 19 nt, Homo sapiens
  misc_RNA (1)...(19): siRNA sense strand
ggaauugcgccaggagaua

SEQ ID NO: 74802 - RNA, 19 nt, Homo sapiens
  misc_RNA (1)...(19): siRNA sense strand
caucagagcugcccuuucc

SEQ ID NO: 74803 - RNA, 19 nt, Homo sapiens
  misc_RNA (1)...(19): siRNA sense strand
gaaagaaaaggacuguaua

SEQ ID NO: 74804 - RNA, 19 nt, Homo sapiens
  misc_RNA (1)...(19): siRNA sense strand
aaaccaaagucaacuccuu

SEQ ID NO: 74805 - RNA, 19 nt, Homo sapiens
  misc_RNA (1)...(19): siRNA sense strand
gggaggagagaaagccuua

SEQ ID NO: 74806 - RNA, 19 nt, Homo sapiens
  misc_RNA (1)...(19): siRNA sense strand
caagguagacuuugcagau

SEQ ID NO: 74807 - RNA, 19 nt, Homo sapiens
  misc_RNA (1)...(19): siRNA sense strand
uguccuggcugucuaaaga

SEQ ID NO: 74808 - RNA, 19 nt, Homo sapiens
  misc_RNA (1)...(19): siRNA sense strand
gucuugcgcuugcagauaa

SEQ ID NO: 74809 - RNA, 19 nt, Homo sapiens
  misc_RNA (1)...(19): siRNA sense strand
gacaaggucucugaacaca

SEQ ID NO: 74810 - RNA, 19 nt, Homo sapiens
  misc_RNA (1)...(19): siRNA sense strand
cagaaagugugguaucaag

SEQ ID NO: 74811 - RNA, 19 nt, Homo sapiens
  misc_RNA (1)...(19): siRNA sense strand
gacuguauaucuucaaucu

SEQ ID NO: 74812 - RNA, 19 nt, Homo sapiens
  misc_RNA (1)...(19): siRNA sense strand
aagauguccucacucagua

SEQ ID NO: 74813 - RNA, 19 nt, Homo sapiens
  misc_RNA (1)...(19): siRNA sense strand
ggccaucugucaguggaua

SEQ ID NO: 74814 - RNA, 19 nt, Homo sapiens
  misc_RNA (1)...(19): siRNA sense strand
aagguagacuuugcagaua

SEQ ID NO: 74815 - RNA, 19 nt, Homo sapiens
  misc_RNA (1)...(19): siRNA sense strand
acacuguauuucuguauug

SEQ ID NO: 74816 - RNA, 19 nt, Homo sapiens
  misc_RNA (1)...(19): siRNA sense strand
ggagagaaagccuuacaag

SEQ ID NO: 74817 - RNA, 19 nt, Homo sapiens
  misc_RNA (1)...(19): siRNA sense strand
gccagaaagugugguauca

SEQ ID NO: 74818 - RNA, 19 nt, Homo sapiens
  misc_RNA (1)...(19): siRNA sense strand
gaaacacauucagauugau

SEQ ID NO: 74819 - RNA, 19 nt, Homo sapiens
  misc_RNA (1)...(19): siRNA sense strand
ggagagcuaggaaacauca

SEQ ID NO: 74820 - RNA, 19 nt, Homo sapiens
  misc_RNA (1)...(19): siRNA sense strand
gcaacacgguucgcagcuu

SEQ ID NO: 74821 - RNA, 19 nt, Homo sapiens
  misc_RNA (1)...(19): siRNA sense strand
gcucagaggaaacacauuc

SEQ ID NO: 74822 - RNA, 19 nt, Homo sapiens
  misc_RNA (1)...(19): siRNA sense strand
uaacaugacaguagagucu

SEQ ID NO: 74823 - RNA, 19 nt, Homo sapiens
  misc_RNA (1)...(19): siRNA sense strand
uccagagccuuauaucuug

SEQ ID NO: 74824 - RNA, 19 nt, Homo sapiens
  misc_RNA (1)...(19): siRNA sense strand
ggacgccagcugccaaaga

SEQ ID NO: 74825 - RNA, 19 nt, Homo sapiens
  misc_RNA (1)...(19): siRNA sense strand
aaaguauacccuaacauga

SEQ ID NO: 74826 - RNA, 19 nt, Homo sapiens
  misc_RNA (1)...(19): siRNA sense strand
agagaaagccuuacaagac

SEQ ID NO: 74827 - RNA, 19 nt, Homo sapiens
  misc_RNA (1)...(19): siRNA sense strand
cagcagaaacucuugaaag

SEQ ID NO: 74828 - RNA, 19 nt, Homo sapiens
  misc_RNA (1)...(19): siRNA sense strand
cugcauggacccucaaauu

SEQ ID NO: 74829 - RNA, 19 nt, Homo sapiens
  misc_RNA (1)...(19): siRNA sense strand
guccuuugaugccuauuau

SEQ ID NO: 74830 - RNA, 19 nt, Homo sapiens
  misc_RNA (1)...(19): siRNA sense strand
caaguccuuugaugccuau

SEQ ID NO: 74831 - RNA, 19 nt, Homo sapiens
  misc_RNA (1)...(19): siRNA sense strand
agaaagcaguggauugaac

SEQ ID NO: 74832 - RNA, 19 nt, Homo sapiens
  misc_RNA (1)...(19): siRNA sense strand
caguggauauggccaaauc

SEQ ID NO: 74833 - RNA, 19 nt, Homo sapiens
  misc_RNA (1)...(19): siRNA sense strand
gaaagugugguaucaagcu

SEQ ID NO: 74834 - RNA, 19 nt, Homo sapiens
  misc_RNA (1)...(19): siRNA sense strand
agaauguagugcuuaaagu

SEQ ID NO: 74835 - RNA, 19 nt, Homo sapiens
  misc_RNA (1)...(19): siRNA sense strand
aaagauguccucacucagu

SEQ ID NO: 74836 - RNA, 19 nt, Homo sapiens
  misc_RNA (1)...(19): siRNA sense strand
caucaaaucaugcuaccau

SEQ ID NO: 74837 - RNA, 19 nt, Homo sapiens
  misc_RNA (1)...(19): siRNA sense strand
caaauucagcagaaaccaa

SEQ ID NO: 74838 - RNA, 19 nt, Homo sapiens
  misc_RNA (1)...(19): siRNA sense strand
gcagcagaaacucuugaaa

SEQ ID NO: 74839 - RNA, 19 nt, Homo sapiens
  misc_RNA (1)...(19): siRNA sense strand
cagcagaaaccaaagucaa

SEQ ID NO: 74840 - RNA, 19 nt, Homo sapiens
  misc_RNA (1)...(19): siRNA sense strand
aaauucagcagaaaccaaa

SEQ ID NO: 74841 - RNA, 19 nt, Homo sapiens
  misc_RNA (1)...(19): siRNA sense strand
cacacuguauuucuguauu

SEQ ID NO: 74842 - RNA, 19 nt, Homo sapiens
  misc_RNA (1)...(19): siRNA sense strand
gacgccagcugccaaagag

SEQ ID NO: 74843 - RNA, 19 nt, Homo sapiens
  misc_RNA (1)...(19): siRNA sense strand
aaaggacuguauaucuuca

SEQ ID NO: 74844 - RNA, 19 nt, Homo sapiens
  misc_RNA (1)...(19): siRNA sense strand
gaggagagaaagccuuaca

SEQ ID NO: 74845 - RNA, 19 nt, Homo sapiens
  misc_RNA (1)...(19): siRNA sense strand
gauugaaccucggaauugc

SEQ ID NO: 74846 - RNA, 19 nt, Homo sapiens
  misc_RNA (1)...(19): siRNA sense strand
uuacagggacaccggaauu

SEQ ID NO: 74847 - RNA, 19 nt, Homo sapiens
  misc_RNA (1)...(19): siRNA sense strand
cuuaaaguauacccuaaca

SEQ ID NO: 74848 - RNA, 19 nt, Homo sapiens
  misc_RNA (1)...(19): siRNA sense strand
caugcuaccauccagagua

SEQ ID NO: 74849 - RNA, 19 nt, Homo sapiens
  misc_RNA (1)...(19): siRNA sense strand
cagaggaaacacauucaga

SEQ ID NO: 74850 - RNA, 19 nt, Homo sapiens
  misc_RNA (1)...(19): siRNA sense strand
uggagugaauggauuaucu

SEQ ID NO: 74851 - RNA, 19 nt, Homo sapiens
  misc_RNA (1)...(19): siRNA sense strand
uggcuggagugaauggauu

SEQ ID NO: 74852 - RNA, 19 nt, Homo sapiens
  misc_RNA (1)...(19): siRNA sense strand
gagaaagcaguggauugaa

SEQ ID NO: 74853 - RNA, 19 nt, Homo sapiens
  misc_RNA (1)...(19): siRNA sense strand
ccauugagcggaggaagaa

SEQ ID NO: 74854 - RNA, 19 nt, Homo sapiens
  misc_RNA (1)...(19): siRNA sense strand
ggauauggccaaaucucau

SEQ ID NO: 74855 - RNA, 19 nt, Homo sapiens
  misc_RNA (1)...(19): siRNA sense strand
aaucugacaucgcuaacca

SEQ ID NO: 74856 - RNA, 19 nt, Homo sapiens
  misc_RNA (1)...(19): siRNA sense strand
gccacacuguauuucugua

SEQ ID NO: 74857 - RNA, 19 nt, Homo sapiens
  misc_RNA (1)...(19): siRNA sense strand
cauccagaguauagugaga

SEQ ID NO: 74858 - RNA, 19 nt, Homo sapiens
  misc_RNA (1)...(19): siRNA sense strand
ccuuugaugccuauuauug

SEQ ID NO: 74859 - RNA, 19 nt, Homo sapiens
  misc_RNA (1)...(19): siRNA sense strand
gauauggccaaaucucauc

SEQ ID NO: 74860 - RNA, 19 nt, Homo sapiens
  misc_RNA (1)...(19): siRNA sense strand
aggaaacacauucagauug

SEQ ID NO: 74861 - RNA, 19 nt, Homo sapiens
  misc_RNA (1)...(19): siRNA sense strand
aaagugugguaucaagcuu

SEQ ID NO: 74862 - RNA, 19 nt, Homo sapiens
  misc_RNA (1)...(19): siRNA sense strand
gcuaccauccagaguauag

SEQ ID NO: 74863 - RNA, 19 nt, Homo sapiens
  misc_RNA (1)...(19): siRNA sense strand
gauguccucacucaguauu

SEQ ID NO: 74864 - RNA, 19 nt, Homo sapiens
  misc_RNA (1)...(19): siRNA sense strand
gucuaaagauaucacucaa

SEQ ID NO: 74865 - RNA, 19 nt, Homo sapiens
  misc_RNA (1)...(19): siRNA sense strand
cagaaaagauguccucacu

SEQ ID NO: 74866 - RNA, 19 nt, Homo sapiens
  misc_RNA (1)...(19): siRNA sense strand
aaccaagucugaaaacauu

SEQ ID NO: 74867 - RNA, 19 nt, Homo sapiens
  misc_RNA (1)...(19): siRNA sense strand
uuccagagccuuauaucuu

SEQ ID NO: 74868 - RNA, 19 nt, Homo sapiens
  misc_RNA (1)...(19): siRNA sense strand
gaggaaggccaaagaaaau

SEQ ID NO: 74869 - RNA, 19 nt, Homo sapiens
  misc_RNA (1)...(19): siRNA sense strand
caaaucaugcuaccaucca

SEQ ID NO: 74870 - RNA, 19 nt, Homo sapiens
  misc_RNA (1)...(19): siRNA sense strand
cauggacccucaaauucag

SEQ ID NO: 74871 - RNA, 19 nt, Homo sapiens
  misc_RNA (1)...(19): siRNA sense strand
acaugacaguagagucuug

SEQ ID NO: 74872 - RNA, 19 nt, Homo sapiens
  misc_RNA (1)...(19): siRNA sense strand
agguagacuuugcagauau

SEQ ID NO: 74873 - RNA, 19 nt, Homo sapiens
  misc_RNA (1)...(19): siRNA sense strand
gaauugcgccaggagauac

SEQ ID NO: 74874 - RNA, 19 nt, Homo sapiens
  misc_RNA (1)...(19): siRNA sense strand
gagcugcagccgcaagaca

SEQ ID NO: 74875 - RNA, 19 nt, Homo sapiens
  misc_RNA (1)...(19): siRNA sense strand
ccaaagaaaaugaagaguu

SEQ ID NO: 74876 - RNA, 19 nt, Homo sapiens
  misc_RNA (1)...(19): siRNA sense strand
ucgcuaaccaagucugaaa

SEQ ID NO: 74877 - RNA, 19 nt, Homo sapiens
  misc_RNA (1)...(19): siRNA sense strand
aguauacccuaacaugaca

SEQ ID NO: 74878 - RNA, 19 nt, Homo sapiens
  misc_RNA (1)...(19): siRNA sense strand
ugucugccacacuguauuu

SEQ ID NO: 74879 - RNA, 19 nt, Homo sapiens
  misc_RNA (1)...(19): siRNA sense strand
gagccaugcuaguuugaua

SEQ ID NO: 74880 - RNA, 19 nt, Homo sapiens
  misc_RNA (1)...(19): siRNA sense strand
gggagaagcagccaaacua

SEQ ID NO: 74881 - RNA, 19 nt, Homo sapiens
  misc_RNA (1)...(19): siRNA sense strand
ggaagaagaauaagaacug

SEQ ID NO: 74882 - RNA, 19 nt, Homo sapiens
  misc_RNA (1)...(19): siRNA sense strand
gcacuggucuugaguaucc

SEQ ID NO: 74883 - RNA, 19 nt, Homo sapiens
  misc_RNA (1)...(19): siRNA sense strand
uagcaagagugccgucauu

SEQ ID NO: 74884 - RNA, 19 nt, Homo sapiens
  misc_RNA (1)...(19): siRNA sense strand
cgacacuucugcagauguu

SEQ ID NO: 74885 - RNA, 19 nt, Homo sapiens
  misc_RNA (1)...(19): siRNA sense strand
ccaggaagaagaauaagaa

SEQ ID NO: 74886 - RNA, 19 nt, Homo sapiens
  misc_RNA (1)...(19): siRNA sense strand
ccacagcacuggucuugag

SEQ ID NO: 74887 - RNA, 19 nt, Homo sapiens
  misc_RNA (1)...(19): siRNA sense strand
gaugugggcuggaaugacu

SEQ ID NO: 74888 - RNA, 19 nt, Homo sapiens
  misc_RNA (1)...(19): siRNA sense strand
gggcuggaaugacuggauu

SEQ ID NO: 74889 - RNA, 19 nt, Homo sapiens
  misc_RNA (1)...(19): siRNA sense strand
aagaacaucuggagaacau

SEQ ID NO: 74890 - RNA, 19 nt, Homo sapiens
  misc_RNA (1)...(19): siRNA sense strand
ggagaagcagccaaacuau

SEQ ID NO: 74891 - RNA, 19 nt, Homo sapiens
  misc_RNA (1)...(19): siRNA sense strand
cagcacuggucuugaguau

SEQ ID NO: 74892 - RNA, 19 nt, Homo sapiens
  misc_RNA (1)...(19): siRNA sense strand
gggccaggaagaagaauaa

SEQ ID NO: 74893 - RNA, 19 nt, Homo sapiens
  misc_RNA (1)...(19): siRNA sense strand
gcgcgagccaugcuaguuu

SEQ ID NO: 74894 - RNA, 19 nt, Homo sapiens
  misc_RNA (1)...(19): siRNA sense strand
caaccaaccaugccauugu

SEQ ID NO: 74895 - RNA, 19 nt, Homo sapiens
  misc_RNA (1)...(19): siRNA sense strand
gagaagcagccaaacuaug

SEQ ID NO: 74896 - RNA, 19 nt, Homo sapiens
  misc_RNA (1)...(19): siRNA sense strand
gcugauggucguuuuauua

SEQ ID NO: 74897 - RNA, 19 nt, Homo sapiens
  misc_RNA (1)...(19): siRNA sense strand
gggccagcaugucaggauu

SEQ ID NO: 74898 - RNA, 19 nt, Homo sapiens
  misc_RNA (1)...(19): siRNA sense strand
guaccuggaugaguaugau

SEQ ID NO: 74899 - RNA, 19 nt, Homo sapiens
  misc_RNA (1)...(19): siRNA sense strand
ggccagcaugucaggauua

SEQ ID NO: 74900 - RNA, 19 nt, Homo sapiens
  misc_RNA (1)...(19): siRNA sense strand
cgaagaacaucuggagaac

SEQ ID NO: 74901 - RNA, 19 nt, Homo sapiens
  misc_RNA (1)...(19): siRNA sense strand
ugcuguaccuggaugagua

SEQ ID NO: 74902 - RNA, 19 nt, Homo sapiens
  misc_RNA (1)...(19): siRNA sense strand
gcccuaagcaucacucaca

SEQ ID NO: 74903 - RNA, 19 nt, Homo sapiens
  misc_RNA (1)...(19): siRNA sense strand
ugacacggugggaaacuuu

SEQ ID NO: 74904 - RNA, 19 nt, Homo sapiens
  misc_RNA (1)...(19): siRNA sense strand
augauaaggugguacugaa

SEQ ID NO: 74905 - RNA, 19 nt, Homo sapiens
  misc_RNA (1)...(19): siRNA sense strand
caggauuagccgaucguua

SEQ ID NO: 74906 - RNA, 19 nt, Homo sapiens
  misc_RNA (1)...(19): siRNA sense strand
gaagaacaucuggagaaca

SEQ ID NO: 74907 - RNA, 19 nt, Homo sapiens
  misc_RNA (1)...(19): siRNA sense strand
ccuguugugugcccacuga

SEQ ID NO: 74908 - RNA, 19 nt, Homo sapiens
  misc_RNA (1)...(19): siRNA sense strand
gaucuuuaccggcuucagu

SEQ ID NO: 74909 - RNA, 19 nt, Homo sapiens
  misc_RNA (1)...(19): siRNA sense strand
ugaguaugauaagguggua

SEQ ID NO: 74910 - RNA, 19 nt, Homo sapiens
  misc_RNA (1)...(19): siRNA sense strand
agaagcagccaaacuaugg

SEQ ID NO: 74911 - RNA, 19 nt, Homo sapiens
  misc_RNA (1)...(19): siRNA sense strand
acgaagaacaucuggagaa

SEQ ID NO: 74912 - RNA, 19 nt, Homo sapiens
  misc_RNA (1)...(19): siRNA sense strand
ccuggucaauucugucaau

SEQ ID NO: 74913 - RNA, 19 nt, Homo sapiens
  misc_RNA (1)...(19): siRNA sense strand
gaggagcuuccaccacgaa

SEQ ID NO: 74914 - RNA, 19 nt, Homo sapiens
  misc_RNA (1)...(19): siRNA sense strand
ggucaccuuuggccaugau

SEQ ID NO: 74915 - RNA, 19 nt, Homo sapiens
  misc_RNA (1)...(19): siRNA sense strand
gcuuuucguuuccucuuua

SEQ ID NO: 74916 - RNA, 19 nt, Homo sapiens
  misc_RNA (1)...(19): siRNA sense strand
gaaugcugauggucguuuu

SEQ ID NO: 74917 - RNA, 19 nt, Homo sapiens
  misc_RNA (1)...(19): siRNA sense strand
ggacuucgaggcgacacuu

SEQ ID NO: 74918 - RNA, 19 nt, Homo sapiens
  misc_RNA (1)...(19): siRNA sense strand
caccagggccagcauguca

SEQ ID NO: 74919 - RNA, 19 nt, Homo sapiens
  misc_RNA (1)...(19): siRNA sense strand
gauaaggugguacugaaaa

SEQ ID NO: 74920 - RNA, 19 nt, Homo sapiens
  misc_RNA (1)...(19): siRNA sense strand
ugauaaggugguacugaaa

SEQ ID NO: 74921 - RNA, 19 nt, Homo sapiens
  misc_RNA (1)...(19): siRNA sense strand
gccaggaagaagaauaaga

SEQ ID NO: 74922 - RNA, 19 nt, Homo sapiens
  misc_RNA (1)...(19): siRNA sense strand
gcaccucaucacacgacua

SEQ ID NO: 74923 - RNA, 19 nt, Homo sapiens
  misc_RNA (1)...(19): siRNA sense strand
aaccaaccaugccauugug

SEQ ID NO: 74924 - RNA, 19 nt, Homo sapiens
  misc_RNA (1)...(19): siRNA sense strand
guaaccgaaugcugauggu

SEQ ID NO: 74925 - RNA, 19 nt, Homo sapiens
  misc_RNA (1)...(19): siRNA sense strand
aggcgacacuucugcagau

SEQ ID NO: 74926 - RNA, 19 nt, Homo sapiens
  misc_RNA (1)...(19): siRNA sense strand
gugacacggugggaaacuu

SEQ ID NO: 74927 - RNA, 19 nt, Homo sapiens
  misc_RNA (1)...(19): siRNA sense strand
cgcgagccaugcuaguuug

SEQ ID NO: 74928 - RNA, 19 nt, Homo sapiens
  misc_RNA (1)...(19): siRNA sense strand
uaugauaaggugguacuga

SEQ ID NO: 74929 - RNA, 19 nt, Homo sapiens
  misc_RNA (1)...(19): siRNA sense strand
ucaagggagugggaauugg

SEQ ID NO: 74930 - RNA, 19 nt, Homo sapiens
  misc_RNA (1)...(19): siRNA sense strand
gccagcaugucaggauuag

SEQ ID NO: 74931 - RNA, 19 nt, Homo sapiens
  misc_RNA (1)...(19): siRNA sense strand
gacuacaugcgggaucuuu

SEQ ID NO: 74932 - RNA, 19 nt, Homo sapiens
  misc_RNA (1)...(19): siRNA sense strand
cgaaugcugauggucguuu

SEQ ID NO: 74933 - RNA, 19 nt, Homo sapiens
  misc_RNA (1)...(19): siRNA sense strand
gugggaaacuuuugaugug

SEQ ID NO: 74934 - RNA, 19 nt, Homo sapiens
  misc_RNA (1)...(19): siRNA sense strand
gcagcaucccugagaacga

SEQ ID NO: 74935 - RNA, 19 nt, Homo sapiens
  misc_RNA (1)...(19): siRNA sense strand
gggcuuccaccguauaaac

SEQ ID NO: 74936 - RNA, 19 nt, Homo sapiens
  misc_RNA (1)...(19): siRNA sense strand
aucaggagaugguaguaga

SEQ ID NO: 74937 - RNA, 19 nt, Homo sapiens
  misc_RNA (1)...(19): siRNA sense strand
gcuaccaggccuucuacug

SEQ ID NO: 74938 - RNA, 19 nt, Homo sapiens
  misc_RNA (1)...(19): siRNA sense strand
gcaagagugccgucauucc

SEQ ID NO: 74939 - RNA, 19 nt, Homo sapiens
  misc_RNA (1)...(19): siRNA sense strand
gagccaugcuaguuugaua

SEQ ID NO: 74940 - RNA, 19 nt, Homo sapiens
  misc_RNA (1)...(19): siRNA sense strand
gggagaagcagccaaacua

SEQ ID NO: 74941 - RNA, 19 nt, Homo sapiens
  misc_RNA (1)...(19): siRNA sense strand
ggaagaagaauaagaacug

SEQ ID NO: 74942 - RNA, 19 nt, Homo sapiens
  misc_RNA (1)...(19): siRNA sense strand
gcacuggucuugaguaucc

SEQ ID NO: 74943 - RNA, 19 nt, Homo sapiens
  misc_RNA (1)...(19): siRNA sense strand
uagcaagagugccgucauu

SEQ ID NO: 74944 - RNA, 19 nt, Homo sapiens
  misc_RNA (1)...(19): siRNA sense strand
cgacacuucugcagauguu

SEQ ID NO: 74945 - RNA, 19 nt, Homo sapiens
  misc_RNA (1)...(19): siRNA sense strand
ccaggaagaagaauaagaa

SEQ ID NO: 74946 - RNA, 19 nt, Homo sapiens
  misc_RNA (1)...(19): siRNA sense strand
ccacagcacuggucuugag

SEQ ID NO: 74947 - RNA, 19 nt, Homo sapiens
  misc_RNA (1)...(19): siRNA sense strand
gaugugggcuggaaugacu

SEQ ID NO: 74948 - RNA, 19 nt, Homo sapiens
  misc_RNA (1)...(19): siRNA sense strand
gggcuggaaugacuggauu

SEQ ID NO: 74949 - RNA, 19 nt, Homo sapiens
  misc_RNA (1)...(19): siRNA sense strand
aagaacaucuggagaacau

SEQ ID NO: 74950 - RNA, 19 nt, Homo sapiens
  misc_RNA (1)...(19): siRNA sense strand
ggagaagcagccaaacuau

SEQ ID NO: 74951 - RNA, 19 nt, Homo sapiens
  misc_RNA (1)...(19): siRNA sense strand
cagcacuggucuugaguau

SEQ ID NO: 74952 - RNA, 19 nt, Homo sapiens
  misc_RNA (1)...(19): siRNA sense strand
gggccaggaagaagaauaa

SEQ ID NO: 74953 - RNA, 19 nt, Homo sapiens
  misc_RNA (1)...(19): siRNA sense strand
gcgcgagccaugcuaguuu

SEQ ID NO: 74954 - RNA, 19 nt, Homo sapiens
  misc_RNA (1)...(19): siRNA sense strand
caaccaaccaugccauugu

SEQ ID NO: 74955 - RNA, 19 nt, Homo sapiens
  misc_RNA (1)...(19): siRNA sense strand
gagaagcagccaaacuaug

SEQ ID NO: 74956 - RNA, 19 nt, Homo sapiens
  misc_RNA (1)...(19): siRNA sense strand
gcugauggucguuuuauua

SEQ ID NO: 74957 - RNA, 19 nt, Homo sapiens
  misc_RNA (1)...(19): siRNA sense strand
gggccagcaugucaggauu

SEQ ID NO: 74958 - RNA, 19 nt, Homo sapiens
  misc_RNA (1)...(19): siRNA sense strand
guaccuggaugaguaugau

SEQ ID NO: 74959 - RNA, 19 nt, Homo sapiens
  misc_RNA (1)...(19): siRNA sense strand
ggccagcaugucaggauua

SEQ ID NO: 74960 - RNA, 19 nt, Homo sapiens
  misc_RNA (1)...(19): siRNA sense strand
cgaagaacaucuggagaac

SEQ ID NO: 74961 - RNA, 19 nt, Homo sapiens
  misc_RNA (1)...(19): siRNA sense strand
ugcuguaccuggaugagua

SEQ ID NO: 74962 - RNA, 19 nt, Homo sapiens
  misc_RNA (1)...(19): siRNA sense strand
gcccuaagcaucacucaca

SEQ ID NO: 74963 - RNA, 19 nt, Homo sapiens
  misc_RNA (1)...(19): siRNA sense strand
ugacacggugggaaacuuu

SEQ ID NO: 74964 - RNA, 19 nt, Homo sapiens
  misc_RNA (1)...(19): siRNA sense strand
augauaaggugguacugaa

SEQ ID NO: 74965 - RNA, 19 nt, Homo sapiens
  misc_RNA (1)...(19): siRNA sense strand
caggauuagccgaucguua

SEQ ID NO: 74966 - RNA, 19 nt, Homo sapiens
  misc_RNA (1)...(19): siRNA sense strand
gaagaacaucuggagaaca

SEQ ID NO: 74967 - RNA, 19 nt, Homo sapiens
  misc_RNA (1)...(19): siRNA sense strand
ccuguugugugcccacuga

SEQ ID NO: 74968 - RNA, 19 nt, Homo sapiens
  misc_RNA (1)...(19): siRNA sense strand
gaucuuuaccggcuucagu

SEQ ID NO: 74969 - RNA, 19 nt, Homo sapiens
  misc_RNA (1)...(19): siRNA sense strand
ugaguaugauaagguggua

SEQ ID NO: 74970 - RNA, 19 nt, Homo sapiens
  misc_RNA (1)...(19): siRNA sense strand
agaagcagccaaacuaugg

SEQ ID NO: 74971 - RNA, 19 nt, Homo sapiens
  misc_RNA (1)...(19): siRNA sense strand
acgaagaacaucuggagaa

SEQ ID NO: 74972 - RNA, 19 nt, Homo sapiens
  misc_RNA (1)...(19): siRNA sense strand
ccuggucaauucugucaau

SEQ ID NO: 74973 - RNA, 19 nt, Homo sapiens
  misc_RNA (1)...(19): siRNA sense strand
gaggagcuuccaccacgaa

SEQ ID NO: 74974 - RNA, 19 nt, Homo sapiens
  misc_RNA (1)...(19): siRNA sense strand
ggucaccuuuggccaugau

SEQ ID NO: 74975 - RNA, 19 nt, Homo sapiens
  misc_RNA (1)...(19): siRNA sense strand
gcuuuucguuuccucuuua

SEQ ID NO: 74976 - RNA, 19 nt, Homo sapiens
  misc_RNA (1)...(19): siRNA sense strand
gaaugcugauggucguuuu

SEQ ID NO: 74977 - RNA, 19 nt, Homo sapiens
  misc_RNA (1)...(19): siRNA sense strand
ggacuucgaggcgacacuu

SEQ ID NO: 74978 - RNA, 19 nt, Homo sapiens
  misc_RNA (1)...(19): siRNA sense strand
caccagggccagcauguca

SEQ ID NO: 74979 - RNA, 19 nt, Homo sapiens
  misc_RNA (1)...(19): siRNA sense strand
gauaaggugguacugaaaa

SEQ ID NO: 74980 - RNA, 19 nt, Homo sapiens
  misc_RNA (1)...(19): siRNA sense strand
ugauaaggugguacugaaa

SEQ ID NO: 74981 - RNA, 19 nt, Homo sapiens
  misc_RNA (1)...(19): siRNA sense strand
gccaggaagaagaauaaga

SEQ ID NO: 74982 - RNA, 19 nt, Homo sapiens
  misc_RNA (1)...(19): siRNA sense strand
gcaccucaucacacgacua

SEQ ID NO: 74983 - RNA, 19 nt, Homo sapiens
  misc_RNA (1)...(19): siRNA sense strand
aaccaaccaugccauugug

SEQ ID NO: 74984 - RNA, 19 nt, Homo sapiens
  misc_RNA (1)...(19): siRNA sense strand
guaaccgaaugcugauggu

SEQ ID NO: 74985 - RNA, 19 nt, Homo sapiens
  misc_RNA (1)...(19): siRNA sense strand
aggcgacacuucugcagau

SEQ ID NO: 74986 - RNA, 19 nt, Homo sapiens
  misc_RNA (1)...(19): siRNA sense strand
gugacacggugggaaacuu

SEQ ID NO: 74987 - RNA, 19 nt, Homo sapiens
  misc_RNA (1)...(19): siRNA sense strand
cgcgagccaugcuaguuug

SEQ ID NO: 74988 - RNA, 19 nt, Homo sapiens
  misc_RNA (1)...(19): siRNA sense strand
uaugauaaggugguacuga

SEQ ID NO: 74989 - RNA, 19 nt, Homo sapiens
  misc_RNA (1)...(19): siRNA sense strand
ucaagggagugggaauugg

SEQ ID NO: 74990 - RNA, 19 nt, Homo sapiens
  misc_RNA (1)...(19): siRNA sense strand
gccagcaugucaggauuag

SEQ ID NO: 74991 - RNA, 19 nt, Homo sapiens
  misc_RNA (1)...(19): siRNA sense strand
gacuacaugcgggaucuuu

SEQ ID NO: 74992 - RNA, 19 nt, Homo sapiens
  misc_RNA (1)...(19): siRNA sense strand
cgaaugcugauggucguuu

SEQ ID NO: 74993 - RNA, 19 nt, Homo sapiens
  misc_RNA (1)...(19): siRNA sense strand
gugggaaacuuuugaugug

SEQ ID NO: 74994 - RNA, 19 nt, Homo sapiens
  misc_RNA (1)...(19): siRNA sense strand
gcagcaucccugagaacga

SEQ ID NO: 74995 - RNA, 19 nt, Homo sapiens
  misc_RNA (1)...(19): siRNA sense strand
gggcuuccaccguauaaac

SEQ ID NO: 74996 - RNA, 19 nt, Homo sapiens
  misc_RNA (1)...(19): siRNA sense strand
aucaggagaugguaguaga

SEQ ID NO: 74997 - RNA, 19 nt, Homo sapiens
  misc_RNA (1)...(19): siRNA sense strand
gcuaccaggccuucuacug

SEQ ID NO: 74998 - RNA, 19 nt, Homo sapiens
  misc_RNA (1)...(19): siRNA sense strand
gcaagagugccgucauucc

SEQ ID NO: 74999 - RNA, 19 nt, Homo sapiens
  misc_RNA (1)...(19): siRNA sense strand
gagccaugcuaguuugaua

SEQ ID NO: 75000 - RNA, 19 nt, Homo sapiens
  misc_RNA (1)...(19): siRNA sense strand
gggagaagcagccaaacua

SEQ ID NO: 75001 - RNA, 19 nt, Homo sapiens
  misc_RNA (1)...(19): siRNA sense strand
ggaagaagaauaagaacug

SEQ ID NO: 75002 - RNA, 19 nt, Homo sapiens
  misc_RNA (1)...(19): siRNA sense strand
gcacuggucuugaguaucc

SEQ ID NO: 75003 - RNA, 19 nt, Homo sapiens
  misc_RNA (1)...(19): siRNA sense strand
uagcaagagugccgucauu

SEQ ID NO: 75004 - RNA, 19 nt, Homo sapiens
  misc_RNA (1)...(19): siRNA sense strand
cgacacuucugcagauguu

SEQ ID NO: 75005 - RNA, 19 nt, Homo sapiens
  misc_RNA (1)...(19): siRNA sense strand
ccaggaagaagaauaagaa

SEQ ID NO: 75006 - RNA, 19 nt, Homo sapiens
  misc_RNA (1)...(19): siRNA sense strand
ccacagcacuggucuugag

SEQ ID NO: 75007 - RNA, 19 nt, Homo sapiens
  misc_RNA (1)...(19): siRNA sense strand
gaugugggcuggaaugacu

SEQ ID NO: 75008 - RNA, 19 nt, Homo sapiens
  misc_RNA (1)...(19): siRNA sense strand
gggcuggaaugacuggauu

SEQ ID NO: 75009 - RNA, 19 nt, Homo sapiens
  misc_RNA (1)...(19): siRNA sense strand
aagaacaucuggagaacau

SEQ ID NO: 75010 - RNA, 19 nt, Homo sapiens
  misc_RNA (1)...(19): siRNA sense strand
ggagaagcagccaaacuau

SEQ ID NO: 75011 - RNA, 19 nt, Homo sapiens
  misc_RNA (1)...(19): siRNA sense strand
cagcacuggucuugaguau

SEQ ID NO: 75012 - RNA, 19 nt, Homo sapiens
  misc_RNA (1)...(19): siRNA sense strand
gggccaggaagaagaauaa

SEQ ID NO: 75013 - RNA, 19 nt, Homo sapiens
  misc_RNA (1)...(19): siRNA sense strand
gcgcgagccaugcuaguuu

SEQ ID NO: 75014 - RNA, 19 nt, Homo sapiens
  misc_RNA (1)...(19): siRNA sense strand
caaccaaccaugccauugu

SEQ ID NO: 75015 - RNA, 19 nt, Homo sapiens
  misc_RNA (1)...(19): siRNA sense strand
gagaagcagccaaacuaug

SEQ ID NO: 75016 - RNA, 19 nt, Homo sapiens
  misc_RNA (1)...(19): siRNA sense strand
gcugauggucguuuuauua

SEQ ID NO: 75017 - RNA, 19 nt, Homo sapiens
  misc_RNA (1)...(19): siRNA sense strand
gggccagcaugucaggauu

SEQ ID NO: 75018 - RNA, 19 nt, Homo sapiens
  misc_RNA (1)...(19): siRNA sense strand
guaccuggaugaguaugau

SEQ ID NO: 75019 - RNA, 19 nt, Homo sapiens
  misc_RNA (1)...(19): siRNA sense strand
ggccagcaugucaggauua

SEQ ID NO: 75020 - RNA, 19 nt, Homo sapiens
  misc_RNA (1)...(19): siRNA sense strand
cgaagaacaucuggagaac

SEQ ID NO: 75021 - RNA, 19 nt, Homo sapiens
  misc_RNA (1)...(19): siRNA sense strand
ugcuguaccuggaugagua

SEQ ID NO: 75022 - RNA, 19 nt, Homo sapiens
  misc_RNA (1)...(19): siRNA sense strand
gcccuaagcaucacucaca

SEQ ID NO: 75023 - RNA, 19 nt, Homo sapiens
  misc_RNA (1)...(19): siRNA sense strand
ugacacggugggaaacuuu

SEQ ID NO: 75024 - RNA, 19 nt, Homo sapiens
  misc_RNA (1)...(19): siRNA sense strand
augauaaggugguacugaa

SEQ ID NO: 75025 - RNA, 19 nt, Homo sapiens
  misc_RNA (1)...(19): siRNA sense strand
caggauuagccgaucguua

SEQ ID NO: 75026 - RNA, 19 nt, Homo sapiens
  misc_RNA (1)...(19): siRNA sense strand
gaagaacaucuggagaaca

SEQ ID NO: 75027 - RNA, 19 nt, Homo sapiens
  misc_RNA (1)...(19): siRNA sense strand
ccuguugugugcccacuga

SEQ ID NO: 75028 - RNA, 19 nt, Homo sapiens
  misc_RNA (1)...(19): siRNA sense strand
gaucuuuaccggcuucagu

SEQ ID NO: 75029 - RNA, 19 nt, Homo sapiens
  misc_RNA (1)...(19): siRNA sense strand
ugaguaugauaagguggua

SEQ ID NO: 75030 - RNA, 19 nt, Homo sapiens
  misc_RNA (1)...(19): siRNA sense strand
agaagcagccaaacuaugg

SEQ ID NO: 75031 - RNA, 19 nt, Homo sapiens
  misc_RNA (1)...(19): siRNA sense strand
acgaagaacaucuggagaa

SEQ ID NO: 75032 - RNA, 19 nt, Homo sapiens
  misc_RNA (1)...(19): siRNA sense strand
ccuggucaauucugucaau

SEQ ID NO: 75033 - RNA, 19 nt, Homo sapiens
  misc_RNA (1)...(19): siRNA sense strand
gaggagcuuccaccacgaa

SEQ ID NO: 75034 - RNA, 19 nt, Homo sapiens
  misc_RNA (1)...(19): siRNA sense strand
ggucaccuuuggccaugau

SEQ ID NO: 75035 - RNA, 19 nt, Homo sapiens
  misc_RNA (1)...(19): siRNA sense strand
gcuuuucguuuccucuuua

SEQ ID NO: 75036 - RNA, 19 nt, Homo sapiens
  misc_RNA (1)...(19): siRNA sense strand
gaaugcugauggucguuuu

SEQ ID NO: 75037 - RNA, 19 nt, Homo sapiens
  misc_RNA (1)...(19): siRNA sense strand
ggacuucgaggcgacacuu

SEQ ID NO: 75038 - RNA, 19 nt, Homo sapiens
  misc_RNA (1)...(19): siRNA sense strand
caccagggccagcauguca

SEQ ID NO: 75039 - RNA, 19 nt, Homo sapiens
  misc_RNA (1)...(19): siRNA sense strand
gauaaggugguacugaaaa

SEQ ID NO: 75040 - RNA, 19 nt, Homo sapiens
  misc_RNA (1)...(19): siRNA sense strand
ugauaaggugguacugaaa

SEQ ID NO: 75041 - RNA, 19 nt, Homo sapiens
  misc_RNA (1)...(19): siRNA sense strand
gccaggaagaagaauaaga

SEQ ID NO: 75042 - RNA, 19 nt, Homo sapiens
  misc_RNA (1)...(19): siRNA sense strand
gcaccucaucacacgacua

SEQ ID NO: 75043 - RNA, 19 nt, Homo sapiens
  misc_RNA (1)...(19): siRNA sense strand
aaccaaccaugccauugug

SEQ ID NO: 75044 - RNA, 19 nt, Homo sapiens
  misc_RNA (1)...(19): siRNA sense strand
guaaccgaaugcugauggu

SEQ ID NO: 75045 - RNA, 19 nt, Homo sapiens
  misc_RNA (1)...(19): siRNA sense strand
aggcgacacuucugcagau

SEQ ID NO: 75046 - RNA, 19 nt, Homo sapiens
  misc_RNA (1)...(19): siRNA sense strand
gugacacggugggaaacuu

SEQ ID NO: 75047 - RNA, 19 nt, Homo sapiens
  misc_RNA (1)...(19): siRNA sense strand
cgcgagccaugcuaguuug

SEQ ID NO: 75048 - RNA, 19 nt, Homo sapiens
  misc_RNA (1)...(19): siRNA sense strand
uaugauaaggugguacuga

SEQ ID NO: 75049 - RNA, 19 nt, Homo sapiens
  misc_RNA (1)...(19): siRNA sense strand
ucaagggagugggaauugg

SEQ ID NO: 75050 - RNA, 19 nt, Homo sapiens
  misc_RNA (1)...(19): siRNA sense strand
gccagcaugucaggauuag

SEQ ID NO: 75051 - RNA, 19 nt, Homo sapiens
  misc_RNA (1)...(19): siRNA sense strand
gacuacaugcgggaucuuu

SEQ ID NO: 75052 - RNA, 19 nt, Homo sapiens
  misc_RNA (1)...(19): siRNA sense strand
cgaaugcugauggucguuu

SEQ ID NO: 75053 - RNA, 19 nt, Homo sapiens
  misc_RNA (1)...(19): siRNA sense strand
gugggaaacuuuugaugug

SEQ ID NO: 75054 - RNA, 19 nt, Homo sapiens
  misc_RNA (1)...(19): siRNA sense strand
gcagcaucccugagaacga

SEQ ID NO: 75055 - RNA, 19 nt, Homo sapiens
  misc_RNA (1)...(19): siRNA sense strand
gggcuuccaccguauaaac

SEQ ID NO: 75056 - RNA, 19 nt, Homo sapiens
  misc_RNA (1)...(19): siRNA sense strand
aucaggagaugguaguaga

SEQ ID NO: 75057 - RNA, 19 nt, Homo sapiens
  misc_RNA (1)...(19): siRNA sense strand
gcuaccaggccuucuacug

SEQ ID NO: 75058 - RNA, 19 nt, Homo sapiens
  misc_RNA (1)...(19): siRNA sense strand
gcaagagugccgucauucc

SEQ ID NO: 75059 - RNA, 19 nt, Homo sapiens
  misc_RNA (1)...(19): siRNA sense strand
ccacagggcuuuacuuaua

SEQ ID NO: 75060 - RNA, 19 nt, Homo sapiens
  misc_RNA (1)...(19): siRNA sense strand
gaaaucacuuccagucuua

SEQ ID NO: 75061 - RNA, 19 nt, Homo sapiens
  misc_RNA (1)...(19): siRNA sense strand
gaaaggaacgaauguaaua

SEQ ID NO: 75062 - RNA, 19 nt, Homo sapiens
  misc_RNA (1)...(19): siRNA sense strand
ccaaaggucuugcguugua

SEQ ID NO: 75063 - RNA, 19 nt, Homo sapiens
  misc_RNA (1)...(19): siRNA sense strand
gggccuggcuguuaaauuu

SEQ ID NO: 75064 - RNA, 19 nt, Homo sapiens
  misc_RNA (1)...(19): siRNA sense strand
gacgagagcuugaacagaa

SEQ ID NO: 75065 - RNA, 19 nt, Homo sapiens
  misc_RNA (1)...(19): siRNA sense strand
gaaagaggauggugagagu

SEQ ID NO: 75066 - RNA, 19 nt, Homo sapiens
  misc_RNA (1)...(19): siRNA sense strand
gaacgaauguaauaaagac

SEQ ID NO: 75067 - RNA, 19 nt, Homo sapiens
  misc_RNA (1)...(19): siRNA sense strand
gcacagacggauauuguuu

SEQ ID NO: 75068 - RNA, 19 nt, Homo sapiens
  misc_RNA (1)...(19): siRNA sense strand
cuaaaucaaugcugaaguu

SEQ ID NO: 75069 - RNA, 19 nt, Homo sapiens
  misc_RNA (1)...(19): siRNA sense strand
caucaaagaagaucaauug

SEQ ID NO: 75070 - RNA, 19 nt, Homo sapiens
  misc_RNA (1)...(19): siRNA sense strand
gagauugugugcaucaaga

SEQ ID NO: 75071 - RNA, 19 nt, Homo sapiens
  misc_RNA (1)...(19): siRNA sense strand
ucagagagacagaaauaua

SEQ ID NO: 75072 - RNA, 19 nt, Homo sapiens
  misc_RNA (1)...(19): siRNA sense strand
gagguauaguggaagaaua

SEQ ID NO: 75073 - RNA, 19 nt, Homo sapiens
  misc_RNA (1)...(19): siRNA sense strand
ggauauuguuucacgauga

SEQ ID NO: 75074 - RNA, 19 nt, Homo sapiens
  misc_RNA (1)...(19): siRNA sense strand
gcacagaaaggaacgaaug

SEQ ID NO: 75075 - RNA, 19 nt, Homo sapiens
  misc_RNA (1)...(19): siRNA sense strand
aaauggaacuugcuguauu

SEQ ID NO: 75076 - RNA, 19 nt, Homo sapiens
  misc_RNA (1)...(19): siRNA sense strand
gaaaaugguucccuuuaug

SEQ ID NO: 75077 - RNA, 19 nt, Homo sapiens
  misc_RNA (1)...(19): siRNA sense strand
aaagguagcugugaaagug

SEQ ID NO: 75078 - RNA, 19 nt, Homo sapiens
  misc_RNA (1)...(19): siRNA sense strand
uagaacaggaugaaacuua

SEQ ID NO: 75079 - RNA, 19 nt, Homo sapiens
  misc_RNA (1)...(19): siRNA sense strand
gaaguugacauaccaccua

SEQ ID NO: 75080 - RNA, 19 nt, Homo sapiens
  misc_RNA (1)...(19): siRNA sense strand
gucaguggcuuaugucauu

SEQ ID NO: 75081 - RNA, 19 nt, Homo sapiens
  misc_RNA (1)...(19): siRNA sense strand
guucagagagacagaaaua

SEQ ID NO: 75082 - RNA, 19 nt, Homo sapiens
  misc_RNA (1)...(19): siRNA sense strand
acacagaaaucuuuaguac

SEQ ID NO: 75083 - RNA, 19 nt, Homo sapiens
  misc_RNA (1)...(19): siRNA sense strand
gaaaacacuugccaaaaug

SEQ ID NO: 75084 - RNA, 19 nt, Homo sapiens
  misc_RNA (1)...(19): siRNA sense strand
uggcugacauguauaguuu

SEQ ID NO: 75085 - RNA, 19 nt, Homo sapiens
  misc_RNA (1)...(19): siRNA sense strand
gagaaucccugagagacuu

SEQ ID NO: 75086 - RNA, 19 nt, Homo sapiens
  misc_RNA (1)...(19): siRNA sense strand
acagaaaucuuuaguacuc

SEQ ID NO: 75087 - RNA, 19 nt, Homo sapiens
  misc_RNA (1)...(19): siRNA sense strand
gacuauagcuaagcagauu

SEQ ID NO: 75088 - RNA, 19 nt, Homo sapiens
  misc_RNA (1)...(19): siRNA sense strand
aagaauaccagcuuccuua

SEQ ID NO: 75089 - RNA, 19 nt, Homo sapiens
  misc_RNA (1)...(19): siRNA sense strand
cagaaaggaacgaauguaa

SEQ ID NO: 75090 - RNA, 19 nt, Homo sapiens
  misc_RNA (1)...(19): siRNA sense strand
ugacagcccugcggguuaa

SEQ ID NO: 75091 - RNA, 19 nt, Homo sapiens
  misc_RNA (1)...(19): siRNA sense strand
gggcuuuacuuauaucugu

SEQ ID NO: 75092 - RNA, 19 nt, Homo sapiens
  misc_RNA (1)...(19): siRNA sense strand
gcucuugguccuuaucaua

SEQ ID NO: 75093 - RNA, 19 nt, Homo sapiens
  misc_RNA (1)...(19): siRNA sense strand
aauaccagcuuccuuauca

SEQ ID NO: 75094 - RNA, 19 nt, Homo sapiens
  misc_RNA (1)...(19): siRNA sense strand
agaaaucacuuccagucuu

SEQ ID NO: 75095 - RNA, 19 nt, Homo sapiens
  misc_RNA (1)...(19): siRNA sense strand
gaccugggccuggcuguua

SEQ ID NO: 75096 - RNA, 19 nt, Homo sapiens
  misc_RNA (1)...(19): siRNA sense strand
ucucagagcucaggaagug

SEQ ID NO: 75097 - RNA, 19 nt, Homo sapiens
  misc_RNA (1)...(19): siRNA sense strand
ggaacgaauguaauaaaga

SEQ ID NO: 75098 - RNA, 19 nt, Homo sapiens
  misc_RNA (1)...(19): siRNA sense strand
ccuagacgcuaaaucaaug

SEQ ID NO: 75099 - RNA, 19 nt, Homo sapiens
  misc_RNA (1)...(19): siRNA sense strand
ccaaaggacuauagcuaag

SEQ ID NO: 75100 - RNA, 19 nt, Homo sapiens
  misc_RNA (1)...(19): siRNA sense strand
gauauuguuucacgaugau

SEQ ID NO: 75101 - RNA, 19 nt, Homo sapiens
  misc_RNA (1)...(19): siRNA sense strand
augguucccuuuaugauua

SEQ ID NO: 75102 - RNA, 19 nt, Homo sapiens
  misc_RNA (1)...(19): siRNA sense strand
ggacccaguuguaccuaau

SEQ ID NO: 75103 - RNA, 19 nt, Homo sapiens
  misc_RNA (1)...(19): siRNA sense strand
gaaaccagaccucgauaca

SEQ ID NO: 75104 - RNA, 19 nt, Homo sapiens
  misc_RNA (1)...(19): siRNA sense strand
caccacagggcuuuacuua

SEQ ID NO: 75105 - RNA, 19 nt, Homo sapiens
  misc_RNA (1)...(19): siRNA sense strand
ggacuagaaggcucagauu

SEQ ID NO: 75106 - RNA, 19 nt, Homo sapiens
  misc_RNA (1)...(19): siRNA sense strand
ccaccacccuagacgcuaa

SEQ ID NO: 75107 - RNA, 19 nt, Homo sapiens
  misc_RNA (1)...(19): siRNA sense strand
gagcagugaugagugucua

SEQ ID NO: 75108 - RNA, 19 nt, Homo sapiens
  misc_RNA (1)...(19): siRNA sense strand
cgaauguaauaaagaccua

SEQ ID NO: 75109 - RNA, 19 nt, Homo sapiens
  misc_RNA (1)...(19): siRNA sense strand
caaaugaaguugacauacc

SEQ ID NO: 75110 - RNA, 19 nt, Homo sapiens
  misc_RNA (1)...(19): siRNA sense strand
cagagagacagaaauauau

SEQ ID NO: 75111 - RNA, 19 nt, Homo sapiens
  misc_RNA (1)...(19): siRNA sense strand
ggaugaaacuuacauuccu

SEQ ID NO: 75112 - RNA, 19 nt, Homo sapiens
  misc_RNA (1)...(19): siRNA sense strand
caagaaaccagaccucgau

SEQ ID NO: 75113 - RNA, 19 nt, Homo sapiens
  misc_RNA (1)...(19): siRNA sense strand
caaaggucuugcguuguaa

SEQ ID NO: 75114 - RNA, 19 nt, Homo sapiens
  misc_RNA (1)...(19): siRNA sense strand
cuauaugccuccagaagug

SEQ ID NO: 75115 - RNA, 19 nt, Homo sapiens
  misc_RNA (1)...(19): siRNA sense strand
aauggaacuugcuguauug

SEQ ID NO: 75116 - RNA, 19 nt, Homo sapiens
  misc_RNA (1)...(19): siRNA sense strand
gcgaagugcaggaaaauua

SEQ ID NO: 75117 - RNA, 19 nt, Homo sapiens
  misc_RNA (1)...(19): siRNA sense strand
ccaccaccauuguccagaa

SEQ ID NO: 75118 - RNA, 19 nt, Homo sapiens
  misc_RNA (1)...(19): siRNA sense strand
ggucuugcguuguaaaugc

SEQ ID NO: 75119 - RNA, 19 nt, Homo sapiens
  misc_RNA (1)...(19): siRNA sense strand
agaaaacacuugccaaaau

SEQ ID NO: 75120 - RNA, 19 nt, Homo sapiens
  misc_RNA (1)...(19): siRNA sense strand
ugagggagauugugugcau

SEQ ID NO: 75121 - RNA, 19 nt, Homo sapiens
  misc_RNA (1)...(19): siRNA sense strand
ccaccuaacacucgaguug

SEQ ID NO: 75122 - RNA, 19 nt, Homo sapiens
  misc_RNA (1)...(19): siRNA sense strand
gcaauugcccaucgagauc

SEQ ID NO: 75123 - RNA, 19 nt, Homo sapiens
  misc_RNA (1)...(19): siRNA sense strand
gaugaggcaugaaaacauu

SEQ ID NO: 75124 - RNA, 19 nt, Homo sapiens
  misc_RNA (1)...(19): siRNA sense strand
cacagggcuuuacuuauau

SEQ ID NO: 75125 - RNA, 19 nt, Homo sapiens
  misc_RNA (1)...(19): siRNA sense strand
ggagguugcuaggagaugu

SEQ ID NO: 75126 - RNA, 19 nt, Homo sapiens
  misc_RNA (1)...(19): siRNA sense strand
gaaaacucaugacagaaug

SEQ ID NO: 75127 - RNA, 19 nt, Homo sapiens
  misc_RNA (1)...(19): siRNA sense strand
gacuagaaggcucagauuu

SEQ ID NO: 75128 - RNA, 19 nt, Homo sapiens
  misc_RNA (1)...(19): siRNA sense strand
ccaggacauuaaacucuga

SEQ ID NO: 75129 - RNA, 19 nt, Homo sapiens
  misc_RNA (1)...(19): siRNA sense strand
cagcacagacggauauugu

SEQ ID NO: 75130 - RNA, 19 nt, Homo sapiens
  misc_RNA (1)...(19): siRNA sense strand
aaucacagacuaucaugaa

SEQ ID NO: 75131 - RNA, 19 nt, Homo sapiens
  misc_RNA (1)...(19): siRNA sense strand
cuaagcagauucagauggu

SEQ ID NO: 75132 - RNA, 19 nt, Homo sapiens
  misc_RNA (1)...(19): siRNA sense strand
gauacagcauuggguuaga

SEQ ID NO: 75133 - RNA, 19 nt, Homo sapiens
  misc_RNA (1)...(19): siRNA sense strand
uacacugccuccauugaaa

SEQ ID NO: 75134 - RNA, 19 nt, Homo sapiens
  misc_RNA (1)...(19): siRNA sense strand
cuugguccuuaucauauua

SEQ ID NO: 75135 - RNA, 19 nt, Homo sapiens
  misc_RNA (1)...(19): siRNA sense strand
agaccucgauacagcauug

SEQ ID NO: 75136 - RNA, 19 nt, Homo sapiens
  misc_RNA (1)...(19): siRNA sense strand
ucccauuccucaucaaaga

SEQ ID NO: 75137 - RNA, 19 nt, Homo sapiens
  misc_RNA (1)...(19): siRNA sense strand
ggaaaguggcguggcgaaa

SEQ ID NO: 75138 - RNA, 19 nt, Homo sapiens
  misc_RNA (1)...(19): siRNA sense strand
gaacaggaugaaacuuaca

SEQ ID NO: 75139 - RNA, 19 nt, Homo sapiens
  misc_RNA (1)...(19): siRNA sense strand
uagcuaagcagauucagau

SEQ ID NO: 75140 - RNA, 19 nt, Homo sapiens
  misc_RNA (1)...(19): siRNA sense strand
caggagguauaguggaaga

SEQ ID NO: 75141 - RNA, 19 nt, Homo sapiens
  misc_RNA (1)...(19): siRNA sense strand
aaaugaaguugacauacca

SEQ ID NO: 75142 - RNA, 19 nt, Homo sapiens
  misc_RNA (1)...(19): siRNA sense strand
gagagacagaaauauauca

SEQ ID NO: 75143 - RNA, 19 nt, Homo sapiens
  misc_RNA (1)...(19): siRNA sense strand
uaaaugugggcaccaagaa

SEQ ID NO: 75144 - RNA, 19 nt, Homo sapiens
  misc_RNA (1)...(19): siRNA sense strand
acagacggauauuguuuca

SEQ ID NO: 75145 - RNA, 19 nt, Homo sapiens
  misc_RNA (1)...(19): siRNA sense strand
guggagcagugaugagugu

SEQ ID NO: 75146 - RNA, 19 nt, Homo sapiens
  misc_RNA (1)...(19): siRNA sense strand
ggacgagagcuugaacaga

SEQ ID NO: 75147 - RNA, 19 nt, Homo sapiens
  misc_RNA (1)...(19): siRNA sense strand
caaggcaaaccagcaauug

SEQ ID NO: 75148 - RNA, 19 nt, Homo sapiens
  misc_RNA (1)...(19): siRNA sense strand
auugaaugcugcacagaaa

SEQ ID NO: 75149 - RNA, 19 nt, Homo sapiens
  misc_RNA (1)...(19): siRNA sense strand
gaauaccagcuuccuuauc

SEQ ID NO: 75150 - RNA, 19 nt, Homo sapiens
  misc_RNA (1)...(19): siRNA sense strand
ugaaaaugguucccuuuau

SEQ ID NO: 75151 - RNA, 19 nt, Homo sapiens
  misc_RNA (1)...(19): siRNA sense strand
gaaauauaucagacagugu

SEQ ID NO: 75152 - RNA, 19 nt, Homo sapiens
  misc_RNA (1)...(19): siRNA sense strand
gcgaaaagguagcugugaa

SEQ ID NO: 75153 - RNA, 19 nt, Homo sapiens
  misc_RNA (1)...(19): siRNA sense strand
ggaaaacucaugacagaau

SEQ ID NO: 75154 - RNA, 19 nt, Homo sapiens
  misc_RNA (1)...(19): siRNA sense strand
gcuaggagauguguaucag

SEQ ID NO: 75155 - RNA, 19 nt, Homo sapiens
  misc_RNA (1)...(19): siRNA sense strand
ugacauaccaccuaacacu

SEQ ID NO: 75156 - RNA, 19 nt, Homo sapiens
  misc_RNA (1)...(19): siRNA sense strand
uuucauugcugcagauauc

SEQ ID NO: 75157 - RNA, 19 nt, Homo sapiens
  misc_RNA (1)...(19): siRNA sense strand
ggccuggcuguuaaauuua

SEQ ID NO: 75158 - RNA, 19 nt, Homo sapiens
  misc_RNA (1)...(19): siRNA sense strand
gccuggcuguuaaauuuau

SEQ ID NO: 75159 - RNA, 19 nt, Homo sapiens
  misc_RNA (1)...(19): siRNA sense strand
ccaagagauugucaaauuu

SEQ ID NO: 75160 - RNA, 19 nt, Homo sapiens
  misc_RNA (1)...(19): siRNA sense strand
gccggaagcuuaucacaaa

SEQ ID NO: 75161 - RNA, 19 nt, Homo sapiens
  misc_RNA (1)...(19): siRNA sense strand
ggacaagcuucucaucuuc

SEQ ID NO: 75162 - RNA, 19 nt, Homo sapiens
  misc_RNA (1)...(19): siRNA sense strand
gcaguuggcuaaagagcaa

SEQ ID NO: 75163 - RNA, 19 nt, Homo sapiens
  misc_RNA (1)...(19): siRNA sense strand
accaagagauugucaaauu

SEQ ID NO: 75164 - RNA, 19 nt, Homo sapiens
  misc_RNA (1)...(19): siRNA sense strand
cuaaagagcaagacaaaga

SEQ ID NO: 75165 - RNA, 19 nt, Homo sapiens
  misc_RNA (1)...(19): siRNA sense strand
ggauauccgugauuguuca

SEQ ID NO: 75166 - RNA, 19 nt, Homo sapiens
  misc_RNA (1)...(19): siRNA sense strand
acaguugcgucacagaaua

SEQ ID NO: 75167 - RNA, 19 nt, Homo sapiens
  misc_RNA (1)...(19): siRNA sense strand
gcgcuacgccuguuucuug

SEQ ID NO: 75168 - RNA, 19 nt, Homo sapiens
  misc_RNA (1)...(19): siRNA sense strand
caagagauugucaaauuug

SEQ ID NO: 75169 - RNA, 19 nt, Homo sapiens
  misc_RNA (1)...(19): siRNA sense strand
ggaaguggagaaucacaaa

SEQ ID NO: 75170 - RNA, 19 nt, Homo sapiens
  misc_RNA (1)...(19): siRNA sense strand
ggaagcuuaucacaaaaua

SEQ ID NO: 75171 - RNA, 19 nt, Homo sapiens
  misc_RNA (1)...(19): siRNA sense strand
cggacaagcuucucaucuu

SEQ ID NO: 75172 - RNA, 19 nt, Homo sapiens
  misc_RNA (1)...(19): siRNA sense strand
gcuacgguccucuauauug

SEQ ID NO: 75173 - RNA, 19 nt, Homo sapiens
  misc_RNA (1)...(19): siRNA sense strand
gguccucuauauugugaaa

SEQ ID NO: 75174 - RNA, 19 nt, Homo sapiens
  misc_RNA (1)...(19): siRNA sense strand
uaaagagcaagacaaagaa

SEQ ID NO: 75175 - RNA, 19 nt, Homo sapiens
  misc_RNA (1)...(19): siRNA sense strand
uaaccaagagauugucaaa

SEQ ID NO: 75176 - RNA, 19 nt, Homo sapiens
  misc_RNA (1)...(19): siRNA sense strand
cuacgguccucuauauugu

SEQ ID NO: 75177 - RNA, 19 nt, Homo sapiens
  misc_RNA (1)...(19): siRNA sense strand
uugcuacgguccucuauau

SEQ ID NO: 75178 - RNA, 19 nt, Homo sapiens
  misc_RNA (1)...(19): siRNA sense strand
gcucuuacugaacugaaua

SEQ ID NO: 75179 - RNA, 19 nt, Homo sapiens
  misc_RNA (1)...(19): siRNA sense strand
gcccagacauccaguacca

SEQ ID NO: 75180 - RNA, 19 nt, Homo sapiens
  misc_RNA (1)...(19): siRNA sense strand
gaggugaaggcgcuuauuc

SEQ ID NO: 75181 - RNA, 19 nt, Homo sapiens
  misc_RNA (1)...(19): siRNA sense strand
cuacgccuguuucuugcua

SEQ ID NO: 75182 - RNA, 19 nt, Homo sapiens
  misc_RNA (1)...(19): siRNA sense strand
gccaugcagucucuaguca

SEQ ID NO: 75183 - RNA, 19 nt, Homo sapiens
  misc_RNA (1)...(19): siRNA sense strand
uggagcaguuggcuaaaga

SEQ ID NO: 75184 - RNA, 19 nt, Homo sapiens
  misc_RNA (1)...(19): siRNA sense strand
caggauauccgugauuguu

SEQ ID NO: 75185 - RNA, 19 nt, Homo sapiens
  misc_RNA (1)...(19): siRNA sense strand
ggcuaaagagcaagacaaa

SEQ ID NO: 75186 - RNA, 19 nt, Homo sapiens
  misc_RNA (1)...(19): siRNA sense strand
caagacaaagaaucagaga

SEQ ID NO: 75187 - RNA, 19 nt, Homo sapiens
  misc_RNA (1)...(19): siRNA sense strand
gaaggcgcuuauucaggau

SEQ ID NO: 75188 - RNA, 19 nt, Homo sapiens
  misc_RNA (1)...(19): siRNA sense strand
cuagucacuucuucacgaa

SEQ ID NO: 75189 - RNA, 19 nt, Homo sapiens
  misc_RNA (1)...(19): siRNA sense strand
aagcggcucuuuccauuuu

SEQ ID NO: 75190 - RNA, 19 nt, Homo sapiens
  misc_RNA (1)...(19): siRNA sense strand
agagcaagacaaagaauca

SEQ ID NO: 75191 - RNA, 19 nt, Homo sapiens
  misc_RNA (1)...(19): siRNA sense strand
gaagaauuuaaguccaugu

SEQ ID NO: 75192 - RNA, 19 nt, Homo sapiens
  misc_RNA (1)...(19): siRNA sense strand
ggccggaagcuuaucacaa

SEQ ID NO: 75193 - RNA, 19 nt, Homo sapiens
  misc_RNA (1)...(19): siRNA sense strand
ggaggugaaggcgcuuauu

SEQ ID NO: 75194 - RNA, 19 nt, Homo sapiens
  misc_RNA (1)...(19): siRNA sense strand
ugauuguucaggacccuua

SEQ ID NO: 75195 - RNA, 19 nt, Homo sapiens
  misc_RNA (1)...(19): siRNA sense strand
ugcagucucuagucacuuc

SEQ ID NO: 75196 - RNA, 19 nt, Homo sapiens
  misc_RNA (1)...(19): siRNA sense strand
caugcagucucuagucacu

SEQ ID NO: 75197 - RNA, 19 nt, Homo sapiens
  misc_RNA (1)...(19): siRNA sense strand
guccacguccggaucugua

SEQ ID NO: 75198 - RNA, 19 nt, Homo sapiens
  misc_RNA (1)...(19): siRNA sense strand
ccaagagauugucaaauuu

SEQ ID NO: 75199 - RNA, 19 nt, Homo sapiens
  misc_RNA (1)...(19): siRNA sense strand
gccggaagcuuaucacaaa

SEQ ID NO: 75200 - RNA, 19 nt, Homo sapiens
  misc_RNA (1)...(19): siRNA sense strand
ggacaagcuucucaucuuc

SEQ ID NO: 75201 - RNA, 19 nt, Homo sapiens
  misc_RNA (1)...(19): siRNA sense strand
gcaguuggcuaaagagcaa

SEQ ID NO: 75202 - RNA, 19 nt, Homo sapiens
  misc_RNA (1)...(19): siRNA sense strand
accaagagauugucaaauu

SEQ ID NO: 75203 - RNA, 19 nt, Homo sapiens
  misc_RNA (1)...(19): siRNA sense strand
cuaaagagcaagacaaaga

SEQ ID NO: 75204 - RNA, 19 nt, Homo sapiens
  misc_RNA (1)...(19): siRNA sense strand
ggauauccgugauuguuca

SEQ ID NO: 75205 - RNA, 19 nt, Homo sapiens
  misc_RNA (1)...(19): siRNA sense strand
acaguugcgucacagaaua

SEQ ID NO: 75206 - RNA, 19 nt, Homo sapiens
  misc_RNA (1)...(19): siRNA sense strand
gcgcuacgccuguuucuug

SEQ ID NO: 75207 - RNA, 19 nt, Homo sapiens
  misc_RNA (1)...(19): siRNA sense strand
caagagauugucaaauuug

SEQ ID NO: 75208 - RNA, 19 nt, Homo sapiens
  misc_RNA (1)...(19): siRNA sense strand
ggaaguggagaaucacaaa

SEQ ID NO: 75209 - RNA, 19 nt, Homo sapiens
  misc_RNA (1)...(19): siRNA sense strand
ggaagcuuaucacaaaaua

SEQ ID NO: 75210 - RNA, 19 nt, Homo sapiens
  misc_RNA (1)...(19): siRNA sense strand
cggacaagcuucucaucuu

SEQ ID NO: 75211 - RNA, 19 nt, Homo sapiens
  misc_RNA (1)...(19): siRNA sense strand
gcuacgguccucuauauug

SEQ ID NO: 75212 - RNA, 19 nt, Homo sapiens
  misc_RNA (1)...(19): siRNA sense strand
gguccucuauauugugaaa

SEQ ID NO: 75213 - RNA, 19 nt, Homo sapiens
  misc_RNA (1)...(19): siRNA sense strand
uaaagagcaagacaaagaa

SEQ ID NO: 75214 - RNA, 19 nt, Homo sapiens
  misc_RNA (1)...(19): siRNA sense strand
uaaccaagagauugucaaa

SEQ ID NO: 75215 - RNA, 19 nt, Homo sapiens
  misc_RNA (1)...(19): siRNA sense strand
cuacgguccucuauauugu

SEQ ID NO: 75216 - RNA, 19 nt, Homo sapiens
  misc_RNA (1)...(19): siRNA sense strand
uugcuacgguccucuauau

SEQ ID NO: 75217 - RNA, 19 nt, Homo sapiens
  misc_RNA (1)...(19): siRNA sense strand
gcucuuacugaacugaaua

SEQ ID NO: 75218 - RNA, 19 nt, Homo sapiens
  misc_RNA (1)...(19): siRNA sense strand
gcccagacauccaguacca

SEQ ID NO: 75219 - RNA, 19 nt, Homo sapiens
  misc_RNA (1)...(19): siRNA sense strand
gaggugaaggcgcuuauuc

SEQ ID NO: 75220 - RNA, 19 nt, Homo sapiens
  misc_RNA (1)...(19): siRNA sense strand
cuacgccuguuucuugcua

SEQ ID NO: 75221 - RNA, 19 nt, Homo sapiens
  misc_RNA (1)...(19): siRNA sense strand
gccaugcagucucuaguca

SEQ ID NO: 75222 - RNA, 19 nt, Homo sapiens
  misc_RNA (1)...(19): siRNA sense strand
uggagcaguuggcuaaaga

SEQ ID NO: 75223 - RNA, 19 nt, Homo sapiens
  misc_RNA (1)...(19): siRNA sense strand
caggauauccgugauuguu

SEQ ID NO: 75224 - RNA, 19 nt, Homo sapiens
  misc_RNA (1)...(19): siRNA sense strand
ggcuaaagagcaagacaaa

SEQ ID NO: 75225 - RNA, 19 nt, Homo sapiens
  misc_RNA (1)...(19): siRNA sense strand
caagacaaagaaucagaga

SEQ ID NO: 75226 - RNA, 19 nt, Homo sapiens
  misc_RNA (1)...(19): siRNA sense strand
gaaggcgcuuauucaggau

SEQ ID NO: 75227 - RNA, 19 nt, Homo sapiens
  misc_RNA (1)...(19): siRNA sense strand
cuagucacuucuucacgaa

SEQ ID NO: 75228 - RNA, 19 nt, Homo sapiens
  misc_RNA (1)...(19): siRNA sense strand
aagcggcucuuuccauuuu

SEQ ID NO: 75229 - RNA, 19 nt, Homo sapiens
  misc_RNA (1)...(19): siRNA sense strand
agagcaagacaaagaauca

SEQ ID NO: 75230 - RNA, 19 nt, Homo sapiens
  misc_RNA (1)...(19): siRNA sense strand
gaagaauuuaaguccaugu

SEQ ID NO: 75231 - RNA, 19 nt, Homo sapiens
  misc_RNA (1)...(19): siRNA sense strand
ggccggaagcuuaucacaa

SEQ ID NO: 75232 - RNA, 19 nt, Homo sapiens
  misc_RNA (1)...(19): siRNA sense strand
ggaggugaaggcgcuuauu

SEQ ID NO: 75233 - RNA, 19 nt, Homo sapiens
  misc_RNA (1)...(19): siRNA sense strand
ugauuguucaggacccuua

SEQ ID NO: 75234 - RNA, 19 nt, Homo sapiens
  misc_RNA (1)...(19): siRNA sense strand
ugcagucucuagucacuuc

SEQ ID NO: 75235 - RNA, 19 nt, Homo sapiens
  misc_RNA (1)...(19): siRNA sense strand
caugcagucucuagucacu

SEQ ID NO: 75236 - RNA, 19 nt, Homo sapiens
  misc_RNA (1)...(19): siRNA sense strand
guccacguccggaucugua

SEQ ID NO: 75237 - RNA, 19 nt, Homo sapiens
  misc_RNA (1)...(19): siRNA sense strand
ccaagagauugucaaauuu

SEQ ID NO: 75238 - RNA, 19 nt, Homo sapiens
  misc_RNA (1)...(19): siRNA sense strand
gccggaagcuuaucacaaa

SEQ ID NO: 75239 - RNA, 19 nt, Homo sapiens
  misc_RNA (1)...(19): siRNA sense strand
ggacaagcuucucaucuuc

SEQ ID NO: 75240 - RNA, 19 nt, Homo sapiens
  misc_RNA (1)...(19): siRNA sense strand
gcaguuggcuaaagagcaa

SEQ ID NO: 75241 - RNA, 19 nt, Homo sapiens
  misc_RNA (1)...(19): siRNA sense strand
accaagagauugucaaauu

SEQ ID NO: 75242 - RNA, 19 nt, Homo sapiens
  misc_RNA (1)...(19): siRNA sense strand
cuaaagagcaagacaaaga

SEQ ID NO: 75243 - RNA, 19 nt, Homo sapiens
  misc_RNA (1)...(19): siRNA sense strand
ggauauccgugauuguuca

SEQ ID NO: 75244 - RNA, 19 nt, Homo sapiens
  misc_RNA (1)...(19): siRNA sense strand
acaguugcgucacagaaua

SEQ ID NO: 75245 - RNA, 19 nt, Homo sapiens
  misc_RNA (1)...(19): siRNA sense strand
gcgcuacgccuguuucuug

SEQ ID NO: 75246 - RNA, 19 nt, Homo sapiens
  misc_RNA (1)...(19): siRNA sense strand
caagagauugucaaauuug

SEQ ID NO: 75247 - RNA, 19 nt, Homo sapiens
  misc_RNA (1)...(19): siRNA sense strand
ggaaguggagaaucacaaa

SEQ ID NO: 75248 - RNA, 19 nt, Homo sapiens
  misc_RNA (1)...(19): siRNA sense strand
ggaagcuuaucacaaaaua

SEQ ID NO: 75249 - RNA, 19 nt, Homo sapiens
  misc_RNA (1)...(19): siRNA sense strand
cggacaagcuucucaucuu

SEQ ID NO: 75250 - RNA, 19 nt, Homo sapiens
  misc_RNA (1)...(19): siRNA sense strand
gcuacgguccucuauauug

SEQ ID NO: 75251 - RNA, 19 nt, Homo sapiens
  misc_RNA (1)...(19): siRNA sense strand
gguccucuauauugugaaa

SEQ ID NO: 75252 - RNA, 19 nt, Homo sapiens
  misc_RNA (1)...(19): siRNA sense strand
uaaagagcaagacaaagaa

SEQ ID NO: 75253 - RNA, 19 nt, Homo sapiens
  misc_RNA (1)...(19): siRNA sense strand
uaaccaagagauugucaaa

SEQ ID NO: 75254 - RNA, 19 nt, Homo sapiens
  misc_RNA (1)...(19): siRNA sense strand
cuacgguccucuauauugu

SEQ ID NO: 75255 - RNA, 19 nt, Homo sapiens
  misc_RNA (1)...(19): siRNA sense strand
uugcuacgguccucuauau

SEQ ID NO: 75256 - RNA, 19 nt, Homo sapiens
  misc_RNA (1)...(19): siRNA sense strand
gcucuuacugaacugaaua

SEQ ID NO: 75257 - RNA, 19 nt, Homo sapiens
  misc_RNA (1)...(19): siRNA sense strand
gcccagacauccaguacca

SEQ ID NO: 75258 - RNA, 19 nt, Homo sapiens
  misc_RNA (1)...(19): siRNA sense strand
gaggugaaggcgcuuauuc

SEQ ID NO: 75259 - RNA, 19 nt, Homo sapiens
  misc_RNA (1)...(19): siRNA sense strand
cuacgccuguuucuugcua

SEQ ID NO: 75260 - RNA, 19 nt, Homo sapiens
  misc_RNA (1)...(19): siRNA sense strand
gccaugcagucucuaguca

SEQ ID NO: 75261 - RNA, 19 nt, Homo sapiens
  misc_RNA (1)...(19): siRNA sense strand
uggagcaguuggcuaaaga

SEQ ID NO: 75262 - RNA, 19 nt, Homo sapiens
  misc_RNA (1)...(19): siRNA sense strand
caggauauccgugauuguu

SEQ ID NO: 75263 - RNA, 19 nt, Homo sapiens
  misc_RNA (1)...(19): siRNA sense strand
ggcuaaagagcaagacaaa

SEQ ID NO: 75264 - RNA, 19 nt, Homo sapiens
  misc_RNA (1)...(19): siRNA sense strand
caagacaaagaaucagaga

SEQ ID NO: 75265 - RNA, 19 nt, Homo sapiens
  misc_RNA (1)...(19): siRNA sense strand
gaaggcgcuuauucaggau

SEQ ID NO: 75266 - RNA, 19 nt, Homo sapiens
  misc_RNA (1)...(19): siRNA sense strand
cuagucacuucuucacgaa

SEQ ID NO: 75267 - RNA, 19 nt, Homo sapiens
  misc_RNA (1)...(19): siRNA sense strand
aagcggcucuuuccauuuu

SEQ ID NO: 75268 - RNA, 19 nt, Homo sapiens
  misc_RNA (1)...(19): siRNA sense strand
agagcaagacaaagaauca

SEQ ID NO: 75269 - RNA, 19 nt, Homo sapiens
  misc_RNA (1)...(19): siRNA sense strand
gaagaauuuaaguccaugu

SEQ ID NO: 75270 - RNA, 19 nt, Homo sapiens
  misc_RNA (1)...(19): siRNA sense strand
ggccggaagcuuaucacaa

SEQ ID NO: 75271 - RNA, 19 nt, Homo sapiens
  misc_RNA (1)...(19): siRNA sense strand
ggaggugaaggcgcuuauu

SEQ ID NO: 75272 - RNA, 19 nt, Homo sapiens
  misc_RNA (1)...(19): siRNA sense strand
ugauuguucaggacccuua

SEQ ID NO: 75273 - RNA, 19 nt, Homo sapiens
  misc_RNA (1)...(19): siRNA sense strand
ugcagucucuagucacuuc

SEQ ID NO: 75274 - RNA, 19 nt, Homo sapiens
  misc_RNA (1)...(19): siRNA sense strand
caugcagucucuagucacu

SEQ ID NO: 75275 - RNA, 19 nt, Homo sapiens
  misc_RNA (1)...(19): siRNA sense strand
guccacguccggaucugua

SEQ ID NO: 75276 - RNA, 19 nt, Homo sapiens
  misc_RNA (1)...(19): siRNA sense strand
ccaagagauugucaaauuu

SEQ ID NO: 75277 - RNA, 19 nt, Homo sapiens
  misc_RNA (1)...(19): siRNA sense strand
gccggaagcuuaucacaaa

SEQ ID NO: 75278 - RNA, 19 nt, Homo sapiens
  misc_RNA (1)...(19): siRNA sense strand
ggacaagcuucucaucuuc

SEQ ID NO: 75279 - RNA, 19 nt, Homo sapiens
  misc_RNA (1)...(19): siRNA sense strand
gcaguuggcuaaagagcaa

SEQ ID NO: 75280 - RNA, 19 nt, Homo sapiens
  misc_RNA (1)...(19): siRNA sense strand
accaagagauugucaaauu

SEQ ID NO: 75281 - RNA, 19 nt, Homo sapiens
  misc_RNA (1)...(19): siRNA sense strand
cuaaagagcaagacaaaga

SEQ ID NO: 75282 - RNA, 19 nt, Homo sapiens
  misc_RNA (1)...(19): siRNA sense strand
ggauauccgugauuguuca

SEQ ID NO: 75283 - RNA, 19 nt, Homo sapiens
  misc_RNA (1)...(19): siRNA sense strand
acaguugcgucacagaaua

SEQ ID NO: 75284 - RNA, 19 nt, Homo sapiens
  misc_RNA (1)...(19): siRNA sense strand
gcgcuacgccuguuucuug

SEQ ID NO: 75285 - RNA, 19 nt, Homo sapiens
  misc_RNA (1)...(19): siRNA sense strand
caagagauugucaaauuug

SEQ ID NO: 75286 - RNA, 19 nt, Homo sapiens
  misc_RNA (1)...(19): siRNA sense strand
ggaaguggagaaucacaaa

SEQ ID NO: 75287 - RNA, 19 nt, Homo sapiens
  misc_RNA (1)...(19): siRNA sense strand
ggaagcuuaucacaaaaua

SEQ ID NO: 75288 - RNA, 19 nt, Homo sapiens
  misc_RNA (1)...(19): siRNA sense strand
cggacaagcuucucaucuu

SEQ ID NO: 75289 - RNA, 19 nt, Homo sapiens
  misc_RNA (1)...(19): siRNA sense strand
gcuacgguccucuauauug

SEQ ID NO: 75290 - RNA, 19 nt, Homo sapiens
  misc_RNA (1)...(19): siRNA sense strand
gguccucuauauugugaaa

SEQ ID NO: 75291 - RNA, 19 nt, Homo sapiens
  misc_RNA (1)...(19): siRNA sense strand
uaaagagcaagacaaagaa

SEQ ID NO: 75292 - RNA, 19 nt, Homo sapiens
  misc_RNA (1)...(19): siRNA sense strand
uaaccaagagauugucaaa

SEQ ID NO: 75293 - RNA, 19 nt, Homo sapiens
  misc_RNA (1)...(19): siRNA sense strand
cuacgguccucuauauugu

SEQ ID NO: 75294 - RNA, 19 nt, Homo sapiens
  misc_RNA (1)...(19): siRNA sense strand
uugcuacgguccucuauau

SEQ ID NO: 75295 - RNA, 19 nt, Homo sapiens
  misc_RNA (1)...(19): siRNA sense strand
gcucuuacugaacugaaua

SEQ ID NO: 75296 - RNA, 19 nt, Homo sapiens
  misc_RNA (1)...(19): siRNA sense strand
gcccagacauccaguacca

SEQ ID NO: 75297 - RNA, 19 nt, Homo sapiens
  misc_RNA (1)...(19): siRNA sense strand
gaggugaaggcgcuuauuc

SEQ ID NO: 75298 - RNA, 19 nt, Homo sapiens
  misc_RNA (1)...(19): siRNA sense strand
cuacgccuguuucuugcua

SEQ ID NO: 75299 - RNA, 19 nt, Homo sapiens
  misc_RNA (1)...(19): siRNA sense strand
gccaugcagucucuaguca

SEQ ID NO: 75300 - RNA, 19 nt, Homo sapiens
  misc_RNA (1)...(19): siRNA sense strand
uggagcaguuggcuaaaga

SEQ ID NO: 75301 - RNA, 19 nt, Homo sapiens
  misc_RNA (1)...(19): siRNA sense strand
caggauauccgugauuguu

SEQ ID NO: 75302 - RNA, 19 nt, Homo sapiens
  misc_RNA (1)...(19): siRNA sense strand
ggcuaaagagcaagacaaa

SEQ ID NO: 75303 - RNA, 19 nt, Homo sapiens
  misc_RNA (1)...(19): siRNA sense strand
caagacaaagaaucagaga

SEQ ID NO: 75304 - RNA, 19 nt, Homo sapiens
  misc_RNA (1)...(19): siRNA sense strand
gaaggcgcuuauucaggau

SEQ ID NO: 75305 - RNA, 19 nt, Homo sapiens
  misc_RNA (1)...(19): siRNA sense strand
cuagucacuucuucacgaa

SEQ ID NO: 75306 - RNA, 19 nt, Homo sapiens
  misc_RNA (1)...(19): siRNA sense strand
aagcggcucuuuccauuuu

SEQ ID NO: 75307 - RNA, 19 nt, Homo sapiens
  misc_RNA (1)...(19): siRNA sense strand
agagcaagacaaagaauca

SEQ ID NO: 75308 - RNA, 19 nt, Homo sapiens
  misc_RNA (1)...(19): siRNA sense strand
gaagaauuuaaguccaugu

SEQ ID NO: 75309 - RNA, 19 nt, Homo sapiens
  misc_RNA (1)...(19): siRNA sense strand
ggccggaagcuuaucacaa

SEQ ID NO: 75310 - RNA, 19 nt, Homo sapiens
  misc_RNA (1)...(19): siRNA sense strand
ggaggugaaggcgcuuauu

SEQ ID NO: 75311 - RNA, 19 nt, Homo sapiens
  misc_RNA (1)...(19): siRNA sense strand
ugauuguucaggacccuua

SEQ ID NO: 75312 - RNA, 19 nt, Homo sapiens
  misc_RNA (1)...(19): siRNA sense strand
ugcagucucuagucacuuc

SEQ ID NO: 75313 - RNA, 19 nt, Homo sapiens
  misc_RNA (1)...(19): siRNA sense strand
caugcagucucuagucacu

SEQ ID NO: 75314 - RNA, 19 nt, Homo sapiens
  misc_RNA (1)...(19): siRNA sense strand
guccacguccggaucugua

SEQ ID NO: 75315 - RNA, 19 nt, Homo sapiens
  misc_RNA (1)...(19): siRNA sense strand
ucucaaagcccauuacaga

SEQ ID NO: 75316 - RNA, 19 nt, Homo sapiens
  misc_RNA (1)...(19): siRNA sense strand
gaaucugggucgaguccuu

SEQ ID NO: 75317 - RNA, 19 nt, Homo sapiens
  misc_RNA (1)...(19): siRNA sense strand
gugggaaagucuauggaaa

SEQ ID NO: 75318 - RNA, 19 nt, Homo sapiens
  misc_RNA (1)...(19): siRNA sense strand
ggaaaauccucccaucuca

SEQ ID NO: 75319 - RNA, 19 nt, Homo sapiens
  misc_RNA (1)...(19): siRNA sense strand
gaaaguccagaugaggaua

SEQ ID NO: 75320 - RNA, 19 nt, Homo sapiens
  misc_RNA (1)...(19): siRNA sense strand
ggaaaguccagaugaggau

SEQ ID NO: 75321 - RNA, 19 nt, Homo sapiens
  misc_RNA (1)...(19): siRNA sense strand
gggaaacacgccuccgaaa

SEQ ID NO: 75322 - RNA, 19 nt, Homo sapiens
  misc_RNA (1)...(19): siRNA sense strand
gaaagucuauggaaaaucc

SEQ ID NO: 75323 - RNA, 19 nt, Homo sapiens
  misc_RNA (1)...(19): siRNA sense strand
gcuguccgcugugugagaa

SEQ ID NO: 75324 - RNA, 19 nt, Homo sapiens
  misc_RNA (1)...(19): siRNA sense strand
cuucguggcugcccagugu

SEQ ID NO: 75325 - RNA, 19 nt, Homo sapiens
  misc_RNA (1)...(19): siRNA sense strand
ggaaacacgccuccgaaaa

SEQ ID NO: 75326 - RNA, 19 nt, Homo sapiens
  misc_RNA (1)...(19): siRNA sense strand
gaaacacgccuccgaaaag

SEQ ID NO: 75327 - RNA, 19 nt, Homo sapiens
  misc_RNA (1)...(19): siRNA sense strand
ucaaagcccauuacagagu

SEQ ID NO: 75328 - RNA, 19 nt, Homo sapiens
  misc_RNA (1)...(19): siRNA sense strand
cagagugcauacaggugaa

SEQ ID NO: 75329 - RNA, 19 nt, Homo sapiens
  misc_RNA (1)...(19): siRNA sense strand
ggggacaccuggaaggauu

SEQ ID NO: 75330 - RNA, 19 nt, Homo sapiens
  misc_RNA (1)...(19): siRNA sense strand
gggacaccuggaaggauua

SEQ ID NO: 75331 - RNA, 19 nt, Homo sapiens
  misc_RNA (1)...(19): siRNA sense strand
gggaaagucuauggaaaau

SEQ ID NO: 75332 - RNA, 19 nt, Homo sapiens
  misc_RNA (1)...(19): siRNA sense strand
gugcagcgacagucuggaa

SEQ ID NO: 75333 - RNA, 19 nt, Homo sapiens
  misc_RNA (1)...(19): siRNA sense strand
cagcgacagucuggaaagu

SEQ ID NO: 75334 - RNA, 19 nt, Homo sapiens
  misc_RNA (1)...(19): siRNA sense strand
aaacacgccuccgaaaaga

SEQ ID NO: 75335 - RNA, 19 nt, Homo sapiens
  misc_RNA (1)...(19): siRNA sense strand
gcagcgacagucuggaaag

SEQ ID NO: 75336 - RNA, 19 nt, Homo sapiens
  misc_RNA (1)...(19): siRNA sense strand
caaagcagcugacagaaau

SEQ ID NO: 75337 - RNA, 19 nt, Homo sapiens
  misc_RNA (1)...(19): siRNA sense strand
gcaaacacuuucaccauga

SEQ ID NO: 75338 - RNA, 19 nt, Homo sapiens
  misc_RNA (1)...(19): siRNA sense strand
gaaacaaucaugaaccaaa

SEQ ID NO: 75339 - RNA, 19 nt, Homo sapiens
  misc_RNA (1)...(19): siRNA sense strand
gaagaggugaauauguuua

SEQ ID NO: 75340 - RNA, 19 nt, Homo sapiens
  misc_RNA (1)...(19): siRNA sense strand
uaaacaauaucccugguau

SEQ ID NO: 75341 - RNA, 19 nt, Homo sapiens
  misc_RNA (1)...(19): siRNA sense strand
uugaagaggugaauauguu

SEQ ID NO: 75342 - RNA, 19 nt, Homo sapiens
  misc_RNA (1)...(19): siRNA sense strand
agacaaagcagcugacaga

SEQ ID NO: 75343 - RNA, 19 nt, Homo sapiens
  misc_RNA (1)...(19): siRNA sense strand
gaaagaaacaaucaugaac

SEQ ID NO: 75344 - RNA, 19 nt, Homo sapiens
  misc_RNA (1)...(19): siRNA sense strand
gaauauguuuacacaccaa

SEQ ID NO: 75345 - RNA, 19 nt, Homo sapiens
  misc_RNA (1)...(19): siRNA sense strand
cagcaucgaucauaaacca

SEQ ID NO: 75346 - RNA, 19 nt, Homo sapiens
  misc_RNA (1)...(19): siRNA sense strand
guaaacaauaucccuggua

SEQ ID NO: 75347 - RNA, 19 nt, Homo sapiens
  misc_RNA (1)...(19): siRNA sense strand
gcacacuggucggaaagga

SEQ ID NO: 75348 - RNA, 19 nt, Homo sapiens
  misc_RNA (1)...(19): siRNA sense strand
gaaauuagggguaaacaau

SEQ ID NO: 75349 - RNA, 19 nt, Homo sapiens
  misc_RNA (1)...(19): siRNA sense strand
uuucaguucuccuuaaaga

SEQ ID NO: 75350 - RNA, 19 nt, Homo sapiens
  misc_RNA (1)...(19): siRNA sense strand
cuacucagcaucgaucaua

SEQ ID NO: 75351 - RNA, 19 nt, Homo sapiens
  misc_RNA (1)...(19): siRNA sense strand
acaaagcagcugacagaaa

SEQ ID NO: 75352 - RNA, 19 nt, Homo sapiens
  misc_RNA (1)...(19): siRNA sense strand
gcagcugacagaaaugcua

SEQ ID NO: 75353 - RNA, 19 nt, Homo sapiens
  misc_RNA (1)...(19): siRNA sense strand
gacaggccaugcugagaca

SEQ ID NO: 75354 - RNA, 19 nt, Homo sapiens
  misc_RNA (1)...(19): siRNA sense strand
aagaaacaaucaugaacca

SEQ ID NO: 75355 - RNA, 19 nt, Homo sapiens
  misc_RNA (1)...(19): siRNA sense strand
ugaagaggugaauauguuu

SEQ ID NO: 75356 - RNA, 19 nt, Homo sapiens
  misc_RNA (1)...(19): siRNA sense strand
aggaacugcucacaggaaa

SEQ ID NO: 75357 - RNA, 19 nt, Homo sapiens
  misc_RNA (1)...(19): siRNA sense strand
cagcaaacacuuucaccau

SEQ ID NO: 75358 - RNA, 19 nt, Homo sapiens
  misc_RNA (1)...(19): siRNA sense strand
acacgacagcagaggauaa

SEQ ID NO: 75359 - RNA, 19 nt, Homo sapiens
  misc_RNA (1)...(19): siRNA sense strand
caaacacuuucaccaugac

SEQ ID NO: 75360 - RNA, 19 nt, Homo sapiens
  misc_RNA (1)...(19): siRNA sense strand
acaccaaggaacagugauu

SEQ ID NO: 75361 - RNA, 19 nt, Homo sapiens
  misc_RNA (1)...(19): siRNA sense strand
auaaaccagugcugcagau

SEQ ID NO: 75362 - RNA, 19 nt, Homo sapiens
  misc_RNA (1)...(19): siRNA sense strand
acacaccaaggaacaguga

SEQ ID NO: 75363 - RNA, 19 nt, Homo sapiens
  misc_RNA (1)...(19): siRNA sense strand
uacucagcaucgaucauaa

SEQ ID NO: 75364 - RNA, 19 nt, Homo sapiens
  misc_RNA (1)...(19): siRNA sense strand
cacgacagcagaggauaaa

SEQ ID NO: 75365 - RNA, 19 nt, Homo sapiens
  misc_RNA (1)...(19): siRNA sense strand
ggaaggauacuaauuauac

SEQ ID NO: 75366 - RNA, 19 nt, Homo sapiens
  misc_RNA (1)...(19): siRNA sense strand
gacaucaacucccaauuuc

SEQ ID NO: 75367 - RNA, 19 nt, Homo sapiens
  misc_RNA (1)...(19): siRNA sense strand
ugacaucaacucccaauuu

SEQ ID NO: 75368 - RNA, 19 nt, Homo sapiens
  misc_RNA (1)...(19): siRNA sense strand
ggacagaagcgaaauuagu

SEQ ID NO: 75369 - RNA, 19 nt, Homo sapiens
  misc_RNA (1)...(19): siRNA sense strand
gaaauuagugcggaaaguu

SEQ ID NO: 75370 - RNA, 19 nt, Homo sapiens
  misc_RNA (1)...(19): siRNA sense strand
ggaugagguuggacaagaa

SEQ ID NO: 75371 - RNA, 19 nt, Homo sapiens
  misc_RNA (1)...(19): siRNA sense strand
gcacaccgacggagacaaa

SEQ ID NO: 75372 - RNA, 19 nt, Homo sapiens
  misc_RNA (1)...(19): siRNA sense strand
guugggagcuggaacugaa

SEQ ID NO: 75373 - RNA, 19 nt, Homo sapiens
  misc_RNA (1)...(19): siRNA sense strand
gaauggaaggauacuaauu

SEQ ID NO: 75374 - RNA, 19 nt, Homo sapiens
  misc_RNA (1)...(19): siRNA sense strand
gaaauuaaggaggaaagaa

SEQ ID NO: 75375 - RNA, 19 nt, Homo sapiens
  misc_RNA (1)...(19): siRNA sense strand
gcagaagguugaagaacag

SEQ ID NO: 75376 - RNA, 19 nt, Homo sapiens
  misc_RNA (1)...(19): siRNA sense strand
ggcagaagguugaagaaca

SEQ ID NO: 75377 - RNA, 19 nt, Homo sapiens
  misc_RNA (1)...(19): siRNA sense strand
ggacaacacuuuugcagau

SEQ ID NO: 75378 - RNA, 19 nt, Homo sapiens
  misc_RNA (1)...(19): siRNA sense strand
gaaugaugauggcaagaag

SEQ ID NO: 75379 - RNA, 19 nt, Homo sapiens
  misc_RNA (1)...(19): siRNA sense strand
cagcaucccaccaacauuu

SEQ ID NO: 75380 - RNA, 19 nt, Homo sapiens
  misc_RNA (1)...(19): siRNA sense strand
ggaacugaaugggacagaa

SEQ ID NO: 75381 - RNA, 19 nt, Homo sapiens
  misc_RNA (1)...(19): siRNA sense strand
cacggucacuuucaacauu

SEQ ID NO: 75382 - RNA, 19 nt, Homo sapiens
  misc_RNA (1)...(19): siRNA sense strand
gacagaagcgaaauuagug

SEQ ID NO: 75383 - RNA, 19 nt, Homo sapiens
  misc_RNA (1)...(19): siRNA sense strand
gagucugaauggaaggaua

SEQ ID NO: 75384 - RNA, 19 nt, Homo sapiens
  misc_RNA (1)...(19): siRNA sense strand
agugacaucuucucuauca

SEQ ID NO: 75385 - RNA, 19 nt, Homo sapiens
  misc_RNA (1)...(19): siRNA sense strand
gagcaccaggaguacauua

SEQ ID NO: 75386 - RNA, 19 nt, Homo sapiens
  misc_RNA (1)...(19): siRNA sense strand
gaaugggacagaagcgaaa

SEQ ID NO: 75387 - RNA, 19 nt, Homo sapiens
  misc_RNA (1)...(19): siRNA sense strand
uuucgugguugaaguuaua

SEQ ID NO: 75388 - RNA, 19 nt, Homo sapiens
  misc_RNA (1)...(19): siRNA sense strand
gaacugaaugggacagaag

SEQ ID NO: 75389 - RNA, 19 nt, Homo sapiens
  misc_RNA (1)...(19): siRNA sense strand
ccuaagaugucuggagguu

SEQ ID NO: 75390 - RNA, 19 nt, Homo sapiens
  misc_RNA (1)...(19): siRNA sense strand
uaucagggaaguuagcuuu

SEQ ID NO: 75391 - RNA, 19 nt, Homo sapiens
  misc_RNA (1)...(19): siRNA sense strand
acggucacuuucaacauua

SEQ ID NO: 75392 - RNA, 19 nt, Homo sapiens
  misc_RNA (1)...(19): siRNA sense strand
ucagggaaguuagcuuuca

SEQ ID NO: 75393 - RNA, 19 nt, Homo sapiens
  misc_RNA (1)...(19): siRNA sense strand
cgaaauuagugcggaaagu

SEQ ID NO: 75394 - RNA, 19 nt, Homo sapiens
  misc_RNA (1)...(19): siRNA sense strand
ccaauuucgugguugaagu

SEQ ID NO: 75395 - RNA, 19 nt, Homo sapiens
  misc_RNA (1)...(19): siRNA sense strand
cauaaaacccucccuaaga

SEQ ID NO: 75396 - RNA, 19 nt, Homo sapiens
  misc_RNA (1)...(19): siRNA sense strand
cugaauggaaggauacuaa

SEQ ID NO: 75397 - RNA, 19 nt, Homo sapiens
  misc_RNA (1)...(19): siRNA sense strand
auuauacacucaacacaga

SEQ ID NO: 75398 - RNA, 19 nt, Homo sapiens
  misc_RNA (1)...(19): siRNA sense strand
caacagcaucccaccaaca

SEQ ID NO: 75399 - RNA, 19 nt, Homo sapiens
  misc_RNA (1)...(19): siRNA sense strand
uauaugaccaccuaaugga

SEQ ID NO: 75400 - RNA, 19 nt, Homo sapiens
  misc_RNA (1)...(19): siRNA sense strand
ugggacagaagcgaaauua

SEQ ID NO: 75401 - RNA, 19 nt, Homo sapiens
  misc_RNA (1)...(19): siRNA sense strand
aggaugagguuggacaaga

SEQ ID NO: 75402 - RNA, 19 nt, Homo sapiens
  misc_RNA (1)...(19): siRNA sense strand
caauuucgugguugaaguu

SEQ ID NO: 75403 - RNA, 19 nt, Homo sapiens
  misc_RNA (1)...(19): siRNA sense strand
aaaucacggucacuuucaa

SEQ ID NO: 75404 - RNA, 19 nt, Homo sapiens
  misc_RNA (1)...(19): siRNA sense strand
ccugagugaugaaauuaag

SEQ ID NO: 75405 - RNA, 19 nt, Homo sapiens
  misc_RNA (1)...(19): siRNA sense strand
guguuggacugucauuauc

SEQ ID NO: 75406 - RNA, 19 nt, Homo sapiens
  misc_RNA (1)...(19): siRNA sense strand
aagacgaggcugagaguga

SEQ ID NO: 75407 - RNA, 19 nt, Homo sapiens
  misc_RNA (1)...(19): siRNA sense strand
aaauuagugcggaaaguug

SEQ ID NO: 75408 - RNA, 19 nt, Homo sapiens
  misc_RNA (1)...(19): siRNA sense strand
uaugaccaccuaauggauu

SEQ ID NO: 75409 - RNA, 19 nt, Homo sapiens
  misc_RNA (1)...(19): siRNA sense strand
guugauuuccugagugaug

SEQ ID NO: 75410 - RNA, 19 nt, Homo sapiens
  misc_RNA (1)...(19): siRNA sense strand
caucaacucccaauuucgu

SEQ ID NO: 75411 - RNA, 19 nt, Homo sapiens
  misc_RNA (1)...(19): siRNA sense strand
gagccugaacugacaucaa

SEQ ID NO: 75412 - RNA, 19 nt, Homo sapiens
  misc_RNA (1)...(19): siRNA sense strand
agaaugaugauggcaagaa

SEQ ID NO: 75413 - RNA, 19 nt, Homo sapiens
  misc_RNA (1)...(19): siRNA sense strand
augaccaccuaauggauuu

SEQ ID NO: 75414 - RNA, 19 nt, Homo sapiens
  misc_RNA (1)...(19): siRNA sense strand
cgcaagggcagaagguuga

SEQ ID NO: 75415 - RNA, 19 nt, Homo sapiens
  misc_RNA (1)...(19): siRNA sense strand
auaaaacccucccuaagau

SEQ ID NO: 75416 - RNA, 19 nt, Homo sapiens
  misc_RNA (1)...(19): siRNA sense strand
gugguugaaguuauaaaga

SEQ ID NO: 75417 - RNA, 19 nt, Homo sapiens
  misc_RNA (1)...(19): siRNA sense strand
ugagugaugaaauuaagga

SEQ ID NO: 75418 - RNA, 19 nt, Homo sapiens
  misc_RNA (1)...(19): siRNA sense strand
gcaucccaccaacauuuga

SEQ ID NO: 75419 - RNA, 19 nt, Homo sapiens
  misc_RNA (1)...(19): siRNA sense strand
ccacuggcgagucugaaug

SEQ ID NO: 75420 - RNA, 19 nt, Homo sapiens
  misc_RNA (1)...(19): siRNA sense strand
ggcugagagugacaucuuc

SEQ ID NO: 75421 - RNA, 19 nt, Homo sapiens
  misc_RNA (1)...(19): siRNA sense strand
cgacggagacaaagcuuuu

SEQ ID NO: 75422 - RNA, 19 nt, Homo sapiens
  misc_RNA (1)...(19): siRNA sense strand
caagaagacgaggcugaga

SEQ ID NO: 75423 - RNA, 19 nt, Homo sapiens
  misc_RNA (1)...(19): siRNA sense strand
uguguuggacugucauuau

SEQ ID NO: 75424 - RNA, 19 nt, Homo sapiens
  misc_RNA (1)...(19): siRNA sense strand
gaagaccucaagaguuuug

SEQ ID NO: 75425 - RNA, 19 nt, Homo sapiens
  misc_RNA (1)...(19): siRNA sense strand
cggucacuuucaacauuaa

SEQ ID NO: 75426 - RNA, 19 nt, Homo sapiens
  misc_RNA (1)...(19): siRNA sense strand
gaugaaauuaaggaggaaa

SEQ ID NO: 75427 - RNA, 19 nt, Homo sapiens
  misc_RNA (1)...(19): siRNA sense strand
ugaauggaaggauacuaau

SEQ ID NO: 75428 - RNA, 19 nt, Homo sapiens
  misc_RNA (1)...(19): siRNA sense strand
ugaaauuaaggaggaaaga

SEQ ID NO: 75429 - RNA, 19 nt, Homo sapiens
  misc_RNA (1)...(19): siRNA sense strand
gcaauguccuucagucuuc

SEQ ID NO: 75430 - RNA, 19 nt, Homo sapiens
  misc_RNA (1)...(19): siRNA sense strand
aaagaugccuugccuguug

SEQ ID NO: 75431 - RNA, 19 nt, Homo sapiens
  misc_RNA (1)...(19): siRNA sense strand
gaacuacucagauucacuu

SEQ ID NO: 75432 - RNA, 19 nt, Homo sapiens
  misc_RNA (1)...(19): siRNA sense strand
guacagccauccauugcuu

SEQ ID NO: 75433 - RNA, 19 nt, Homo sapiens
  misc_RNA (1)...(19): siRNA sense strand
aaacaucuguggcugcuau

SEQ ID NO: 75434 - RNA, 19 nt, Homo sapiens
  misc_RNA (1)...(19): siRNA sense strand
agucagaacuacucagauu

SEQ ID NO: 75435 - RNA, 19 nt, Homo sapiens
  misc_RNA (1)...(19): siRNA sense strand
gcacagcaauguccuucag

SEQ ID NO: 75436 - RNA, 19 nt, Homo sapiens
  misc_RNA (1)...(19): siRNA sense strand
gaaagaugccuugccuguu

SEQ ID NO: 75437 - RNA, 19 nt, Homo sapiens
  misc_RNA (1)...(19): siRNA sense strand
gaggcacugugacaucuug

SEQ ID NO: 75438 - RNA, 19 nt, Homo sapiens
  misc_RNA (1)...(19): siRNA sense strand
caacagggagagggagaua

SEQ ID NO: 75439 - RNA, 19 nt, Homo sapiens
  misc_RNA (1)...(19): siRNA sense strand
gagagggagauauucauga

SEQ ID NO: 75440 - RNA, 19 nt, Homo sapiens
  misc_RNA (1)...(19): siRNA sense strand
ggagagggagauauucaug

SEQ ID NO: 75441 - RNA, 19 nt, Homo sapiens
  misc_RNA (1)...(19): siRNA sense strand
cuacucagauucacuugca

SEQ ID NO: 75442 - RNA, 19 nt, Homo sapiens
  misc_RNA (1)...(19): siRNA sense strand
gggaauuccuuucaguuuu

SEQ ID NO: 75443 - RNA, 19 nt, Homo sapiens
  misc_RNA (1)...(19): siRNA sense strand
caagucagaacuacucaga

SEQ ID NO: 75444 - RNA, 19 nt, Homo sapiens
  misc_RNA (1)...(19): siRNA sense strand
ggacugggcuuggggaaga

SEQ ID NO: 75445 - RNA, 19 nt, Homo sapiens
  misc_RNA (1)...(19): siRNA sense strand
gccaaucagaguucacuuu

SEQ ID NO: 75446 - RNA, 19 nt, Homo sapiens
  misc_RNA (1)...(19): siRNA sense strand
gcuuuggucugcccagugu

SEQ ID NO: 75447 - RNA, 19 nt, Homo sapiens
  misc_RNA (1)...(19): siRNA sense strand
gucacaggcuggcaaguca

SEQ ID NO: 75448 - RNA, 19 nt, Homo sapiens
  misc_RNA (1)...(19): siRNA sense strand
ucagaacuacucagauuca

SEQ ID NO: 75449 - RNA, 19 nt, Homo sapiens
  misc_RNA (1)...(19): siRNA sense strand
ccaaucagaguucacuuuc

SEQ ID NO: 75450 - RNA, 19 nt, Homo sapiens
  misc_RNA (1)...(19): siRNA sense strand
acagggagagggagauauu

SEQ ID NO: 75451 - RNA, 19 nt, Homo sapiens
  misc_RNA (1)...(19): siRNA sense strand
gcacugugacaucuugaca

SEQ ID NO: 75452 - RNA, 19 nt, Homo sapiens
  misc_RNA (1)...(19): siRNA sense strand
agagggagauauucaugag

SEQ ID NO: 75453 - RNA, 19 nt, Homo sapiens
  misc_RNA (1)...(19): siRNA sense strand
uugcuugcuuuccuuguuu

SEQ ID NO: 75454 - RNA, 19 nt, Homo sapiens
  misc_RNA (1)...(19): siRNA sense strand
gguguacagccauccauug

SEQ ID NO: 75455 - RNA, 19 nt, Homo sapiens
  misc_RNA (1)...(19): siRNA sense strand
gggagauauucaugagcaa

SEQ ID NO: 75456 - RNA, 19 nt, Homo sapiens
  misc_RNA (1)...(19): siRNA sense strand
gagcaagugugcaaaaugc

SEQ ID NO: 75457 - RNA, 19 nt, Homo sapiens
  misc_RNA (1)...(19): siRNA sense strand
gagauauucaugagcaagu

SEQ ID NO: 75458 - RNA, 19 nt, Homo sapiens
  misc_RNA (1)...(19): siRNA sense strand
uuuaaugccugcuaauggu

SEQ ID NO: 75459 - RNA, 19 nt, Homo sapiens
  misc_RNA (1)...(19): siRNA sense strand
aauaugggcacaugacuca

SEQ ID NO: 75460 - RNA, 19 nt, Homo sapiens
  misc_RNA (1)...(19): siRNA sense strand
gacucaagccagccaauca

SEQ ID NO: 75461 - RNA, 19 nt, Homo sapiens
  misc_RNA (1)...(19): siRNA sense strand
aagaugccuugccuguuga

SEQ ID NO: 75462 - RNA, 19 nt, Homo sapiens
  misc_RNA (1)...(19): siRNA sense strand
caagccagccaaucagagu

SEQ ID NO: 75463 - RNA, 19 nt, Homo sapiens
  misc_RNA (1)...(19): siRNA sense strand
caucuguggcugcuauuuc

SEQ ID NO: 75464 - RNA, 19 nt, Homo sapiens
  misc_RNA (1)...(19): siRNA sense strand
gccugguaguacuugcuua

SEQ ID NO: 75465 - RNA, 19 nt, Homo sapiens
  misc_RNA (1)...(19): siRNA sense strand
ggaaauucuugacuacuua

SEQ ID NO: 75466 - RNA, 19 nt, Homo sapiens
  misc_RNA (1)...(19): siRNA sense strand
ucguugaggugaagaauua

SEQ ID NO: 75467 - RNA, 19 nt, Homo sapiens
  misc_RNA (1)...(19): siRNA sense strand
ccaggaaccuccagcacua

SEQ ID NO: 75468 - RNA, 19 nt, Homo sapiens
  misc_RNA (1)...(19): siRNA sense strand
gacaguggcugacggcauu

SEQ ID NO: 75469 - RNA, 19 nt, Homo sapiens
  misc_RNA (1)...(19): siRNA sense strand
ugacggcauuguauacaua

SEQ ID NO: 75470 - RNA, 19 nt, Homo sapiens
  misc_RNA (1)...(19): siRNA sense strand
gaucgagauucacauuguu

SEQ ID NO: 75471 - RNA, 19 nt, Homo sapiens
  misc_RNA (1)...(19): siRNA sense strand
gguuugugcuggcagauuu

SEQ ID NO: 75472 - RNA, 19 nt, Homo sapiens
  misc_RNA (1)...(19): siRNA sense strand
gcaacaagaccauccacaa

SEQ ID NO: 75473 - RNA, 19 nt, Homo sapiens
  misc_RNA (1)...(19): siRNA sense strand
gaauccaacuucccgaauc

SEQ ID NO: 75474 - RNA, 19 nt, Homo sapiens
  misc_RNA (1)...(19): siRNA sense strand
gugaagaauuacccugaaa

SEQ ID NO: 75475 - RNA, 19 nt, Homo sapiens
  misc_RNA (1)...(19): siRNA sense strand
gaagcuggagaauuccuua

SEQ ID NO: 75476 - RNA, 19 nt, Homo sapiens
  misc_RNA (1)...(19): siRNA sense strand
gcucugaauuccaguuuua

SEQ ID NO: 75477 - RNA, 19 nt, Homo sapiens
  misc_RNA (1)...(19): siRNA sense strand
ggacacagguuuggaagcu

SEQ ID NO: 75478 - RNA, 19 nt, Homo sapiens
  misc_RNA (1)...(19): siRNA sense strand
uuuggaagcuggagaauuc

SEQ ID NO: 75479 - RNA, 19 nt, Homo sapiens
  misc_RNA (1)...(19): siRNA sense strand
ggucaacaauggccacaca

SEQ ID NO: 75480 - RNA, 19 nt, Homo sapiens
  misc_RNA (1)...(19): siRNA sense strand
ggugaagaauuacccugaa

SEQ ID NO: 75481 - RNA, 19 nt, Homo sapiens
  misc_RNA (1)...(19): siRNA sense strand
gacaugugaucgagauuca

SEQ ID NO: 75482 - RNA, 19 nt, Homo sapiens
  misc_RNA (1)...(19): siRNA sense strand
ugacuggccuugacguuca

SEQ ID NO: 75483 - RNA, 19 nt, Homo sapiens
  misc_RNA (1)...(19): siRNA sense strand
cagagacagucgccuauca

SEQ ID NO: 75484 - RNA, 19 nt, Homo sapiens
  misc_RNA (1)...(19): siRNA sense strand
caacuucauuucucaucug

SEQ ID NO: 75485 - RNA, 19 nt, Homo sapiens
  misc_RNA (1)...(19): siRNA sense strand
caaguacccaggacaaaga

SEQ ID NO: 75486 - RNA, 19 nt, Homo sapiens
  misc_RNA (1)...(19): siRNA sense strand
ggagaauuccuuacuggau

SEQ ID NO: 75487 - RNA, 19 nt, Homo sapiens
  misc_RNA (1)...(19): siRNA sense strand
gcaacuucauuucucaucu

SEQ ID NO: 75488 - RNA, 19 nt, Homo sapiens
  misc_RNA (1)...(19): siRNA sense strand
aagaagagcauugaacuga

SEQ ID NO: 75489 - RNA, 19 nt, Homo sapiens
  misc_RNA (1)...(19): siRNA sense strand
uugaggaaauucuugacua

SEQ ID NO: 75490 - RNA, 19 nt, Homo sapiens
  misc_RNA (1)...(19): siRNA sense strand
ucagacaugugaucgagau

SEQ ID NO: 75491 - RNA, 19 nt, Homo sapiens
  misc_RNA (1)...(19): siRNA sense strand
ugacuggaccuacucagaa

SEQ ID NO: 75492 - RNA, 19 nt, Homo sapiens
  misc_RNA (1)...(19): siRNA sense strand
cguaugauauagcccaaga

SEQ ID NO: 75493 - RNA, 19 nt, Homo sapiens
  misc_RNA (1)...(19): siRNA sense strand
ugaucgagauucacauugu

SEQ ID NO: 75494 - RNA, 19 nt, Homo sapiens
  misc_RNA (1)...(19): siRNA sense strand
gacgggaucagacauguga

SEQ ID NO: 75495 - RNA, 19 nt, Homo sapiens
  misc_RNA (1)...(19): siRNA sense strand
aggaaauucuugacuacuu

SEQ ID NO: 75496 - RNA, 19 nt, Homo sapiens
  misc_RNA (1)...(19): siRNA sense strand
agauucacauuguucacua

SEQ ID NO: 75497 - RNA, 19 nt, Homo sapiens
  misc_RNA (1)...(19): siRNA sense strand
ugaggaaauucuugacuac

SEQ ID NO: 75498 - RNA, 19 nt, Homo sapiens
  misc_RNA (1)...(19): siRNA sense strand
gcuggagaauuccuuacug

SEQ ID NO: 75499 - RNA, 19 nt, Homo sapiens
  misc_RNA (1)...(19): siRNA sense strand
gagaacguccacugguuug

SEQ ID NO: 75500 - RNA, 19 nt, Homo sapiens
  misc_RNA (1)...(19): siRNA sense strand
auacauagcccagcagaug

SEQ ID NO: 75501 - RNA, 19 nt, Homo sapiens
  misc_RNA (1)...(19): siRNA sense strand
acaagaccauccacaacga

SEQ ID NO: 75502 - RNA, 19 nt, Homo sapiens
  misc_RNA (1)...(19): siRNA sense strand
caacaagaccauccacaac

SEQ ID NO: 75503 - RNA, 19 nt, Homo sapiens
  misc_RNA (1)...(19): siRNA sense strand
ugagaacguccacugguuu

SEQ ID NO: 75504 - RNA, 19 nt, Homo sapiens
  misc_RNA (1)...(19): siRNA sense strand
gaacguccacugguuugug

SEQ ID NO: 75505 - RNA, 19 nt, Homo sapiens
  misc_RNA (1)...(19): siRNA sense strand
uacaagacguaugauauag

SEQ ID NO: 75506 - RNA, 19 nt, Homo sapiens
  misc_RNA (1)...(19): siRNA sense strand
gaaucaggaauacacucua

SEQ ID NO: 75507 - RNA, 19 nt, Homo sapiens
  misc_RNA (1)...(19): siRNA sense strand
cugagaacguccacugguu

SEQ ID NO: 75508 - RNA, 19 nt, Homo sapiens
  misc_RNA (1)...(19): siRNA sense strand
aaucaggaauacacucuag

SEQ ID NO: 75509 - RNA, 19 nt, Homo sapiens
  misc_RNA (1)...(19): siRNA sense strand
cccagcagaugcacuuuca

SEQ ID NO: 75510 - RNA, 19 nt, Homo sapiens
  misc_RNA (1)...(19): siRNA sense strand
aauccaacuucccgaauca

SEQ ID NO: 75511 - RNA, 19 nt, Homo sapiens
  misc_RNA (1)...(19): siRNA sense strand
acagcaacuucauuucuca

SEQ ID NO: 75512 - RNA, 19 nt, Homo sapiens
  misc_RNA (1)...(19): siRNA sense strand
cuacauaagauugaggaaa

SEQ ID NO: 75513 - RNA, 19 nt, Homo sapiens
  misc_RNA (1)...(19): siRNA sense strand
gacuggaccuacucagaag

SEQ ID NO: 75514 - RNA, 19 nt, Homo sapiens
  misc_RNA (1)...(19): siRNA sense strand
agaccauccacaacgauua

SEQ ID NO: 75515 - RNA, 19 nt, Homo sapiens
  misc_RNA (1)...(19): siRNA sense strand
acagucgccuaucaaccua

SEQ ID NO: 75516 - RNA, 19 nt, Homo sapiens
  misc_RNA (1)...(19): siRNA sense strand
cuacuuaagaagagcauug

SEQ ID NO: 75517 - RNA, 19 nt, Homo sapiens
  misc_RNA (1)...(19): siRNA sense strand
gaauuacccugaaaacacu

SEQ ID NO: 75518 - RNA, 19 nt, Homo sapiens
  misc_RNA (1)...(19): siRNA sense strand
agaauuccuuacuggauca

SEQ ID NO: 75519 - RNA, 19 nt, Homo sapiens
  misc_RNA (1)...(19): siRNA sense strand
ccaggacacagguuuggaa

SEQ ID NO: 75520 - RNA, 19 nt, Homo sapiens
  misc_RNA (1)...(19): siRNA sense strand
gaaccuccagcacuacuac

SEQ ID NO: 75521 - RNA, 19 nt, Homo sapiens
  misc_RNA (1)...(19): siRNA sense strand
ggaaccuccagcacuacua

SEQ ID NO: 75522 - RNA, 19 nt, Homo sapiens
  misc_RNA (1)...(19): siRNA sense strand
caucaaguacccaggacaa

SEQ ID NO: 75523 - RNA, 19 nt, Homo sapiens
  misc_RNA (1)...(19): siRNA sense strand
uaugauauagcccaagaug

SEQ ID NO: 75524 - RNA, 19 nt, Homo sapiens
  misc_RNA (1)...(19): siRNA sense strand
gaaacacagagugguggaa

SEQ ID NO: 75525 - RNA, 19 nt, Homo sapiens
  misc_RNA (1)...(19): siRNA sense strand
uaagaagagcauugaacug

SEQ ID NO: 75526 - RNA, 19 nt, Homo sapiens
  misc_RNA (1)...(19): siRNA sense strand
uacagcaacuucauuucuc

SEQ ID NO: 75527 - RNA, 19 nt, Homo sapiens
  misc_RNA (1)...(19): siRNA sense strand
gcacuacuacaccuaccau

SEQ ID NO: 75528 - RNA, 19 nt, Homo sapiens
  misc_RNA (1)...(19): siRNA sense strand
uggcugacggcauuguaua

SEQ ID NO: 75529 - RNA, 19 nt, Homo sapiens
  misc_RNA (1)...(19): siRNA sense strand
uuacagcaacuucauuucu

SEQ ID NO: 75530 - RNA, 19 nt, Homo sapiens
  misc_RNA (1)...(19): siRNA sense strand
guacccaggacaaagaaca

SEQ ID NO: 75531 - RNA, 19 nt, Homo sapiens
  misc_RNA (1)...(19): siRNA sense strand
gacagucgccuaucaaccu

SEQ ID NO: 75532 - RNA, 19 nt, Homo sapiens
  misc_RNA (1)...(19): siRNA sense strand
uuucucaucuggccaacau

SEQ ID NO: 75533 - RNA, 19 nt, Homo sapiens
  misc_RNA (1)...(19): siRNA sense strand
gcacuggccacagcacuac

SEQ ID NO: 75534 - RNA, 19 nt, Homo sapiens
  misc_RNA (1)...(19): siRNA sense strand
aauacacucuaggcucuga

SEQ ID NO: 75535 - RNA, 19 nt, Homo sapiens
  misc_RNA (1)...(19): siRNA sense strand
ggacccagccccugaaaca

SEQ ID NO: 75536 - RNA, 19 nt, Homo sapiens
  misc_RNA (1)...(19): siRNA sense strand
gauucacauuguucacuac

SEQ ID NO: 75537 - RNA, 19 nt, Homo sapiens
  misc_RNA (1)...(19): siRNA sense strand
uuaagaagagcauugaacu

SEQ ID NO: 75538 - RNA, 19 nt, Homo sapiens
  misc_RNA (1)...(19): siRNA sense strand
aaacacagagugguggaau

SEQ ID NO: 75539 - RNA, 19 nt, Homo sapiens
  misc_RNA (1)...(19): siRNA sense strand
ggacgggaucagacaugug

SEQ ID NO: 75540 - RNA, 19 nt, Homo sapiens
  misc_RNA (1)...(19): siRNA sense strand
ggaucuaccugaaguuaag

SEQ ID NO: 75541 - RNA, 19 nt, Homo sapiens
  misc_RNA (1)...(19): siRNA sense strand
gaggaucuaccugaaguua

SEQ ID NO: 75542 - RNA, 19 nt, Homo sapiens
  misc_RNA (1)...(19): siRNA sense strand
ggaagaaaucgcugaggaa

SEQ ID NO: 75543 - RNA, 19 nt, Homo sapiens
  misc_RNA (1)...(19): siRNA sense strand
uaccugaaguuaagccuaa

SEQ ID NO: 75544 - RNA, 19 nt, Homo sapiens
  misc_RNA (1)...(19): siRNA sense strand
ggugucaucuggacugugu

SEQ ID NO: 75545 - RNA, 19 nt, Homo sapiens
  misc_RNA (1)...(19): siRNA sense strand
gaggaucuaccuacuguug

SEQ ID NO: 75546 - RNA, 19 nt, Homo sapiens
  misc_RNA (1)...(19): siRNA sense strand
aggaggaucugcccaguga

SEQ ID NO: 75547 - RNA, 19 nt, Homo sapiens
  misc_RNA (1)...(19): siRNA sense strand
cgacgcagccuuugaaugg

SEQ ID NO: 75548 - RNA, 19 nt, Homo sapiens
  misc_RNA (1)...(19): siRNA sense strand
gagcgacgcagccuuugaa

SEQ ID NO: 75549 - RNA, 19 nt, Homo sapiens
  misc_RNA (1)...(19): siRNA sense strand
gcgcaacaauggccacagu

SEQ ID NO: 75550 - RNA, 19 nt, Homo sapiens
  misc_RNA (1)...(19): siRNA sense strand
gaaguuaagccuaaaucag

SEQ ID NO: 75551 - RNA, 19 nt, Homo sapiens
  misc_RNA (1)...(19): siRNA sense strand
ugaaugggcgagugauuga

SEQ ID NO: 75552 - RNA, 19 nt, Homo sapiens
  misc_RNA (1)...(19): siRNA sense strand
agaggaggaucuaccugaa

SEQ ID NO: 75553 - RNA, 19 nt, Homo sapiens
  misc_RNA (1)...(19): siRNA sense strand
gcaacaauggccacagugu

SEQ ID NO: 75554 - RNA, 19 nt, Homo sapiens
  misc_RNA (1)...(19): siRNA sense strand
ggaucuaccuacuguugag

SEQ ID NO: 75555 - RNA, 19 nt, Homo sapiens
  misc_RNA (1)...(19): siRNA sense strand
aaguuaagccuaaaucaga

SEQ ID NO: 75556 - RNA, 19 nt, Homo sapiens
  misc_RNA (1)...(19): siRNA sense strand
gagccaguccagcugaauu

SEQ ID NO: 75557 - RNA, 19 nt, Homo sapiens
  misc_RNA (1)...(19): siRNA sense strand
gcaccgccuuugccagagu

SEQ ID NO: 75558 - RNA, 19 nt, Homo sapiens
  misc_RNA (1)...(19): siRNA sense strand
guugcugucucgcuuggaa

SEQ ID NO: 75559 - RNA, 19 nt, Homo sapiens
  misc_RNA (1)...(19): siRNA sense strand
ucaucuggacuguguuuaa

SEQ ID NO: 75560 - RNA, 19 nt, Homo sapiens
  misc_RNA (1)...(19): siRNA sense strand
gcacagaaggggaaccaaa

SEQ ID NO: 75561 - RNA, 19 nt, Homo sapiens
  misc_RNA (1)...(19): siRNA sense strand
cagugaugcugagugcuaa

SEQ ID NO: 75562 - RNA, 19 nt, Homo sapiens
  misc_RNA (1)...(19): siRNA sense strand
acagugaugcugagugcua

SEQ ID NO: 75563 - RNA, 19 nt, Homo sapiens
  misc_RNA (1)...(19): siRNA sense strand
uccuggagauccucaagaa

SEQ ID NO: 75564 - RNA, 19 nt, Homo sapiens
  misc_RNA (1)...(19): siRNA sense strand
caucuggacuguguuuaac

SEQ ID NO: 75565 - RNA, 19 nt, Homo sapiens
  misc_RNA (1)...(19): siRNA sense strand
ugagaaggcagcacagaag

SEQ ID NO: 75566 - RNA, 19 nt, Homo sapiens
  misc_RNA (1)...(19): siRNA sense strand
gaugagaaggcagcacaga

SEQ ID NO: 75567 - RNA, 19 nt, Homo sapiens
  misc_RNA (1)...(19): siRNA sense strand
cagagucauuggcgcuaug

SEQ ID NO: 75568 - RNA, 19 nt, Homo sapiens
  misc_RNA (1)...(19): siRNA sense strand
guguuuaaccagacaguga

SEQ ID NO: 75569 - RNA, 19 nt, Homo sapiens
  misc_RNA (1)...(19): siRNA sense strand
ugacuucagccgcuacuuc

SEQ ID NO: 75570 - RNA, 19 nt, Homo sapiens
  misc_RNA (1)...(19): siRNA sense strand
aggaggaucuaccugaagu

SEQ ID NO: 75571 - RNA, 19 nt, Homo sapiens
  misc_RNA (1)...(19): siRNA sense strand
gaggaucugcccagugaag

SEQ ID NO: 75572 - RNA, 19 nt, Homo sapiens
  misc_RNA (1)...(19): siRNA sense strand
aguuaagccuaaaucagaa

SEQ ID NO: 75573 - RNA, 19 nt, Homo sapiens
  misc_RNA (1)...(19): siRNA sense strand
caagaaccccagaauaaug

SEQ ID NO: 75574 - RNA, 19 nt, Homo sapiens
  misc_RNA (1)...(19): siRNA sense strand
ugaaguuaagccuaaauca

SEQ ID NO: 75575 - RNA, 19 nt, Homo sapiens
  misc_RNA (1)...(19): siRNA sense strand
gaagaaaacagugccuaug

SEQ ID NO: 75576 - RNA, 19 nt, Homo sapiens
  misc_RNA (1)...(19): siRNA sense strand
ccagagucauuggcgcuau

SEQ ID NO: 75577 - RNA, 19 nt, Homo sapiens
  misc_RNA (1)...(19): siRNA sense strand
cugcacuccugcccucuga

SEQ ID NO: 75578 - RNA, 19 nt, Homo sapiens
  misc_RNA (1)...(19): siRNA sense strand
cagcgucgcguuccuugug

SEQ ID NO: 75579 - RNA, 19 nt, Homo sapiens
  misc_RNA (1)...(19): siRNA sense strand
ggaagaaaacagugccuau

SEQ ID NO: 75580 - RNA, 19 nt, Homo sapiens
  misc_RNA (1)...(19): siRNA sense strand
uaugaggggucucugacua

SEQ ID NO: 75581 - RNA, 19 nt, Homo sapiens
  misc_RNA (1)...(19): siRNA sense strand
gaggaggaucuaccugaag

SEQ ID NO: 75582 - RNA, 19 nt, Homo sapiens
  misc_RNA (1)...(19): siRNA sense strand
cucaagaaccccagaauaa

SEQ ID NO: 75583 - RNA, 19 nt, Homo sapiens
  misc_RNA (1)...(19): siRNA sense strand
ggaggaucuaccugaaguu

SEQ ID NO: 75584 - RNA, 19 nt, Homo sapiens
  misc_RNA (1)...(19): siRNA sense strand
caagaaugaugccuacuuu

SEQ ID NO: 75585 - RNA, 19 nt, Homo sapiens
  misc_RNA (1)...(19): siRNA sense strand
gaacugcggcugcuguuug

SEQ ID NO: 75586 - RNA, 19 nt, Homo sapiens
  misc_RNA (1)...(19): siRNA sense strand
ucaccuggauccucauuga

SEQ ID NO: 75587 - RNA, 19 nt, Homo sapiens
  misc_RNA (1)...(19): siRNA sense strand
aggauaaucuccagggaaa

SEQ ID NO: 75588 - RNA, 19 nt, Homo sapiens
  misc_RNA (1)...(19): siRNA sense strand
gaaugaugccuacuuucuu

SEQ ID NO: 75589 - RNA, 19 nt, Homo sapiens
  misc_RNA (1)...(19): siRNA sense strand
aauaucaccucccuucaga

SEQ ID NO: 75590 - RNA, 19 nt, Homo sapiens
  misc_RNA (1)...(19): siRNA sense strand
ugguggagcuacaaggaua

SEQ ID NO: 75591 - RNA, 19 nt, Homo sapiens
  misc_RNA (1)...(19): siRNA sense strand
gagcuccuguucccugaau

SEQ ID NO: 75592 - RNA, 19 nt, Homo sapiens
  misc_RNA (1)...(19): siRNA sense strand
gaacucuacgggaauuuca

SEQ ID NO: 75593 - RNA, 19 nt, Homo sapiens
  misc_RNA (1)...(19): siRNA sense strand
gccagaauccuccaucuca

SEQ ID NO: 75594 - RNA, 19 nt, Homo sapiens
  misc_RNA (1)...(19): siRNA sense strand
aaugaugccuacuuucuuc

SEQ ID NO: 75595 - RNA, 19 nt, Homo sapiens
  misc_RNA (1)...(19): siRNA sense strand
gcucggaacaucagaucaa

SEQ ID NO: 75596 - RNA, 19 nt, Homo sapiens
  misc_RNA (1)...(19): siRNA sense strand
ucacucgcaucuccuacaa

SEQ ID NO: 75597 - RNA, 19 nt, Homo sapiens
  misc_RNA (1)...(19): siRNA sense strand
caggaacucuacgggaauu

SEQ ID NO: 75598 - RNA, 19 nt, Homo sapiens
  misc_RNA (1)...(19): siRNA sense strand
acucgcaucuccuacaaga

SEQ ID NO: 75599 - RNA, 19 nt, Homo sapiens
  misc_RNA (1)...(19): siRNA sense strand
gagccagaauccuccaucu

SEQ ID NO: 75600 - RNA, 19 nt, Homo sapiens
  misc_RNA (1)...(19): siRNA sense strand
ggagcuacaaggauaaucu

SEQ ID NO: 75601 - RNA, 19 nt, Homo sapiens
  misc_RNA (1)...(19): siRNA sense strand
ucaccucccuucagaugca

SEQ ID NO: 75602 - RNA, 19 nt, Homo sapiens
  misc_RNA (1)...(19): siRNA sense strand
ccaacuaccgccugcaugu

SEQ ID NO: 75603 - RNA, 19 nt, Homo sapiens
  misc_RNA (1)...(19): siRNA sense strand
ucgcaucuccuacaagaau

SEQ ID NO: 75604 - RNA, 19 nt, Homo sapiens
  misc_RNA (1)...(19): siRNA sense strand
acaagaaugaugccuacuu

SEQ ID NO: 75605 - RNA, 19 nt, Homo sapiens
  misc_RNA (1)...(19): siRNA sense strand
uaucaccucccuucagaug

SEQ ID NO: 75606 - RNA, 19 nt, Homo sapiens
  misc_RNA (1)...(19): siRNA sense strand
gcagcucauucacuucaac

SEQ ID NO: 75607 - RNA, 19 nt, Homo sapiens
  misc_RNA (1)...(19): siRNA sense strand
cagaauccuccaucucaga

SEQ ID NO: 75608 - RNA, 19 nt, Homo sapiens
  misc_RNA (1)...(19): siRNA sense strand
gauaaucuccagggaaacu

SEQ ID NO: 75609 - RNA, 19 nt, Homo sapiens
  misc_RNA (1)...(19): siRNA sense strand
gaggacugguggagcuaca

SEQ ID NO: 75610 - RNA, 19 nt, Homo sapiens
  misc_RNA (1)...(19): siRNA sense strand
caguaccucuaacccauuc

SEQ ID NO: 75611 - RNA, 19 nt, Homo sapiens
  misc_RNA (1)...(19): siRNA sense strand
cagccucuuugucaacguu

SEQ ID NO: 75612 - RNA, 19 nt, Homo sapiens
  misc_RNA (1)...(19): siRNA sense strand
ggaacucuacgggaauuuc

SEQ ID NO: 75613 - RNA, 19 nt, Homo sapiens
  misc_RNA (1)...(19): siRNA sense strand
gugcagcucauucacuuca

SEQ ID NO: 75614 - RNA, 19 nt, Homo sapiens
  misc_RNA (1)...(19): siRNA sense strand
gaugccuacuuucuucaag

SEQ ID NO: 75615 - RNA, 19 nt, Homo sapiens
  misc_RNA (1)...(19): siRNA sense strand
gccauucucagccucuuug

SEQ ID NO: 75616 - RNA, 19 nt, Homo sapiens
  misc_RNA (1)...(19): siRNA sense strand
gcaucuccuacaagaauga

SEQ ID NO: 75617 - RNA, 19 nt, Homo sapiens
  misc_RNA (1)...(19): siRNA sense strand
gguggagcuacaaggauaa

SEQ ID NO: 75618 - RNA, 19 nt, Homo sapiens
  misc_RNA (1)...(19): siRNA sense strand
ugagacuccugagccagaa

SEQ ID NO: 75619 - RNA, 19 nt, Homo sapiens
  misc_RNA (1)...(19): siRNA sense strand
caauaucaccucccuucag

SEQ ID NO: 75620 - RNA, 19 nt, Homo sapiens
  misc_RNA (1)...(19): siRNA sense strand
ccgagacugucaccuggau

SEQ ID NO: 75621 - RNA, 19 nt, Homo sapiens
  misc_RNA (1)...(19): siRNA sense strand
aggugcagcucauucacuu

SEQ ID NO: 75622 - RNA, 19 nt, Homo sapiens
  misc_RNA (1)...(19): siRNA sense strand
uccagagccucagcgguaa

SEQ ID NO: 75623 - RNA, 19 nt, Homo sapiens
  misc_RNA (1)...(19): siRNA sense strand
ccaguaccucuaacccauu

SEQ ID NO: 75624 - RNA, 19 nt, Homo sapiens
  misc_RNA (1)...(19): siRNA sense strand
gagaauagcugguccaaga

SEQ ID NO: 75625 - RNA, 19 nt, Homo sapiens
  misc_RNA (1)...(19): siRNA sense strand
gagaaaugaucaacaacuu

SEQ ID NO: 75626 - RNA, 19 nt, Homo sapiens
  misc_RNA (1)...(19): siRNA sense strand
ccauagaccugcacaguga

SEQ ID NO: 75627 - RNA, 19 nt, Homo sapiens
  misc_RNA (1)...(19): siRNA sense strand
ccagagaaaugaucaacaa

SEQ ID NO: 75628 - RNA, 19 nt, Homo sapiens
  misc_RNA (1)...(19): siRNA sense strand
gagaugggcuccuucaauc

SEQ ID NO: 75629 - RNA, 19 nt, Homo sapiens
  misc_RNA (1)...(19): siRNA sense strand
ccaccaagauggagacuga

SEQ ID NO: 75630 - RNA, 19 nt, Homo sapiens
  misc_RNA (1)...(19): siRNA sense strand
ggagaggaccgcugaauau

SEQ ID NO: 75631 - RNA, 19 nt, Homo sapiens
  misc_RNA (1)...(19): siRNA sense strand
gaggaccgcugaauauuac

SEQ ID NO: 75632 - RNA, 19 nt, Homo sapiens
  misc_RNA (1)...(19): siRNA sense strand
cauuauaacucagaccuuu

SEQ ID NO: 75633 - RNA, 19 nt, Homo sapiens
  misc_RNA (1)...(19): siRNA sense strand
gaucuucagucaccuucaa

SEQ ID NO: 75634 - RNA, 19 nt, Homo sapiens
  misc_RNA (1)...(19): siRNA sense strand
acagugacauccuccagua

SEQ ID NO: 75635 - RNA, 19 nt, Homo sapiens
  misc_RNA (1)...(19): siRNA sense strand
ucagucaccuucaacaugu

SEQ ID NO: 75636 - RNA, 19 nt, Homo sapiens
  misc_RNA (1)...(19): siRNA sense strand
agaggaccgcugaauauua

SEQ ID NO: 75637 - RNA, 19 nt, Homo sapiens
  misc_RNA (1)...(19): siRNA sense strand
acaagggagucauuuacaa

SEQ ID NO: 75638 - RNA, 19 nt, Homo sapiens
  misc_RNA (1)...(19): siRNA sense strand
uguccuggcuguucucauu

SEQ ID NO: 75639 - RNA, 19 nt, Homo sapiens
  misc_RNA (1)...(19): siRNA sense strand
gauaacaagggagucauuu

SEQ ID NO: 75640 - RNA, 19 nt, Homo sapiens
  misc_RNA (1)...(19): siRNA sense strand
gagaggaccgcugaauauu

SEQ ID NO: 75641 - RNA, 19 nt, Homo sapiens
  misc_RNA (1)...(19): siRNA sense strand
gugacauccuccaguauga

SEQ ID NO: 75642 - RNA, 19 nt, Homo sapiens
  misc_RNA (1)...(19): siRNA sense strand
ccgccgagcugcacauugu

SEQ ID NO: 75643 - RNA, 19 nt, Homo sapiens
  misc_RNA (1)...(19): siRNA sense strand
guacaaaggccaggaagca

SEQ ID NO: 75644 - RNA, 19 nt, Homo sapiens
  misc_RNA (1)...(19): siRNA sense strand
uaacaagggagucauuuac

SEQ ID NO: 75645 - RNA, 19 nt, Homo sapiens
  misc_RNA (1)...(19): siRNA sense strand
cggagaggaccgcugaaua

SEQ ID NO: 75646 - RNA, 19 nt, Homo sapiens
  misc_RNA (1)...(19): siRNA sense strand
gaaccugcccucggacaug

SEQ ID NO: 75647 - RNA, 19 nt, Homo sapiens
  misc_RNA (1)...(19): siRNA sense strand
gaugagaggcugguauaca

SEQ ID NO: 75648 - RNA, 19 nt, Homo sapiens
  misc_RNA (1)...(19): siRNA sense strand
caaucugucugccaacaag

SEQ ID NO: 75649 - RNA, 19 nt, Homo sapiens
  misc_RNA (1)...(19): siRNA sense strand
guccagaaguucgaugaga

SEQ ID NO: 75650 - RNA, 19 nt, Homo sapiens
  misc_RNA (1)...(19): siRNA sense strand
gcacauuguccauuauaac

SEQ ID NO: 75651 - RNA, 19 nt, Homo sapiens
  misc_RNA (1)...(19): siRNA sense strand
auaacaagggagucauuua

SEQ ID NO: 75652 - RNA, 19 nt, Homo sapiens
  misc_RNA (1)...(19): siRNA sense strand
ggcccuggcuggcauucuu

SEQ ID NO: 75653 - RNA, 19 nt, Homo sapiens
  misc_RNA (1)...(19): siRNA sense strand
cauuguccauuauaacuca

SEQ ID NO: 75654 - RNA, 19 nt, Homo sapiens
  misc_RNA (1)...(19): siRNA sense strand
ugagaugggcuccuucaau

SEQ ID NO: 75655 - RNA, 19 nt, Homo sapiens
  misc_RNA (1)...(19): siRNA sense strand
gucccgggauucaacauug

SEQ ID NO: 75656 - RNA, 19 nt, Homo sapiens
  misc_RNA (1)...(19): siRNA sense strand
acaaaggccaggaagcauu

SEQ ID NO: 75657 - RNA, 19 nt, Homo sapiens
  misc_RNA (1)...(19): siRNA sense strand
caaaggccaggaagcauuc

SEQ ID NO: 75658 - RNA, 19 nt, Homo sapiens
  misc_RNA (1)...(19): siRNA sense strand
ucgaugagaggcugguaua

SEQ ID NO: 75659 - RNA, 19 nt, Homo sapiens
  misc_RNA (1)...(19): siRNA sense strand
gaauagcugguccaagaag

SEQ ID NO: 75660 - RNA, 19 nt, Homo sapiens
  misc_RNA (1)...(19): siRNA sense strand
gcugcacauuguccauuau

SEQ ID NO: 75661 - RNA, 19 nt, Homo sapiens
  misc_RNA (1)...(19): siRNA sense strand
caagccagccaccaagaug

SEQ ID NO: 75662 - RNA, 19 nt, Homo sapiens
  misc_RNA (1)...(19): siRNA sense strand
gcacugccagcaacaaguc

SEQ ID NO: 75663 - RNA, 19 nt, Homo sapiens
  misc_RNA (1)...(19): siRNA sense strand
gagcugcacauuguccauu

SEQ ID NO: 75664 - RNA, 19 nt, Homo sapiens
  misc_RNA (1)...(19): siRNA sense strand
caagggagucauuuacaag

SEQ ID NO: 75665 - RNA, 19 nt, Homo sapiens
  misc_RNA (1)...(19): siRNA sense strand
cagaaggaagaguaucaaa

SEQ ID NO: 75666 - RNA, 19 nt, Homo sapiens
  misc_RNA (1)...(19): siRNA sense strand
ucauugagaugggcuccuu

SEQ ID NO: 75667 - RNA, 19 nt, Homo sapiens
  misc_RNA (1)...(19): siRNA sense strand
uuccaaggcuacaaucugu

SEQ ID NO: 75668 - RNA, 19 nt, Homo sapiens
  misc_RNA (1)...(19): siRNA sense strand
gcccuguacugcacacaca

SEQ ID NO: 75669 - RNA, 19 nt, Homo sapiens
  misc_RNA (1)...(19): siRNA sense strand
ugcacauuguccauuauaa

SEQ ID NO: 75670 - RNA, 19 nt, Homo sapiens
  misc_RNA (1)...(19): siRNA sense strand
cgaaaccccgugcaaauuu

SEQ ID NO: 75671 - RNA, 19 nt, Homo sapiens
  misc_RNA (1)...(19): siRNA sense strand
gcugcuggcuuuggagaca

SEQ ID NO: 75672 - RNA, 19 nt, Homo sapiens
  misc_RNA (1)...(19): siRNA sense strand
ccuucaauccguccuauga

SEQ ID NO: 75673 - RNA, 19 nt, Homo sapiens
  misc_RNA (1)...(19): siRNA sense strand
gacugaggcccacgcuuga

SEQ ID NO: 75674 - RNA, 19 nt, Homo sapiens
  misc_RNA (1)...(19): siRNA sense strand
aagcauucgucccgggauu

SEQ ID NO: 75675 - RNA, 19 nt, Homo sapiens
  misc_RNA (1)...(19): siRNA sense strand
auucuuggcaucuguauug

SEQ ID NO: 75676 - RNA, 19 nt, Homo sapiens
  misc_RNA (1)...(19): siRNA sense strand
agcugcacauuguccauua

SEQ ID NO: 75677 - RNA, 19 nt, Homo sapiens
  misc_RNA (1)...(19): siRNA sense strand
ugauaacaagggagucauu

SEQ ID NO: 75678 - RNA, 19 nt, Homo sapiens
  misc_RNA (1)...(19): siRNA sense strand
ccuccagucucgcuacagu

SEQ ID NO: 75679 - RNA, 19 nt, Homo sapiens
  misc_RNA (1)...(19): siRNA sense strand
caacauugaagagcugcuu

SEQ ID NO: 75680 - RNA, 19 nt, Homo sapiens
  misc_RNA (1)...(19): siRNA sense strand
caagaucuucagucaccuu

SEQ ID NO: 75681 - RNA, 19 nt, Homo sapiens
  misc_RNA (1)...(19): siRNA sense strand
caagugcaagucuguacug

SEQ ID NO: 75682 - RNA, 19 nt, Homo sapiens
  misc_RNA (1)...(19): siRNA sense strand
uccggcagguccagaaguu

SEQ ID NO: 75683 - RNA, 19 nt, Homo sapiens
  misc_RNA (1)...(19): siRNA sense strand
agaaaugaucaacaacuuc

SEQ ID NO: 75684 - RNA, 19 nt, Homo sapiens
  misc_RNA (1)...(19): siRNA sense strand
cagucaccuucaacaugua

SEQ ID NO: 75685 - RNA, 19 nt, Homo sapiens
  misc_RNA (1)...(19): siRNA sense strand
cugcacauuguccauuaua

SEQ ID NO: 75686 - RNA, 19 nt, Homo sapiens
  misc_RNA (1)...(19): siRNA sense strand
ggugauaacaagggaguca

SEQ ID NO: 75687 - RNA, 19 nt, Homo sapiens
  misc_RNA (1)...(19): siRNA sense strand
ccauuuggcuuuucagaag

SEQ ID NO: 75688 - RNA, 19 nt, Homo sapiens
  misc_RNA (1)...(19): siRNA sense strand
gcuggugaucuuaaaggaa

SEQ ID NO: 75689 - RNA, 19 nt, Homo sapiens
  misc_RNA (1)...(19): siRNA sense strand
ccucggacaugcacaucca

SEQ ID NO: 75690 - RNA, 19 nt, Homo sapiens
  misc_RNA (1)...(19): siRNA sense strand
uaacucagaccuuuauccu

SEQ ID NO: 75691 - RNA, 19 nt, Homo sapiens
  misc_RNA (1)...(19): siRNA sense strand
ggaaaggcuuggaaagauu

SEQ ID NO: 75692 - RNA, 19 nt, Homo sapiens
  misc_RNA (1)...(19): siRNA sense strand
ggagaucguugacaaguau

SEQ ID NO: 75693 - RNA, 19 nt, Homo sapiens
  misc_RNA (1)...(19): siRNA sense strand
ggaaacaauggaagauaua

SEQ ID NO: 75694 - RNA, 19 nt, Homo sapiens
  misc_RNA (1)...(19): siRNA sense strand
uaagaaugcugaugguuuc

SEQ ID NO: 75695 - RNA, 19 nt, Homo sapiens
  misc_RNA (1)...(19): siRNA sense strand
aaacaaggauggcaagcuu

SEQ ID NO: 75696 - RNA, 19 nt, Homo sapiens
  misc_RNA (1)...(19): siRNA sense strand
gagagcaguuuguugaguu

SEQ ID NO: 75697 - RNA, 19 nt, Homo sapiens
  misc_RNA (1)...(19): siRNA sense strand
gagaugagcggagguuuaa

SEQ ID NO: 75698 - RNA, 19 nt, Homo sapiens
  misc_RNA (1)...(19): siRNA sense strand
ucauugaucuagaagagua

SEQ ID NO: 75699 - RNA, 19 nt, Homo sapiens
  misc_RNA (1)...(19): siRNA sense strand
gcucaaagacuggauuaaa

SEQ ID NO: 75700 - RNA, 19 nt, Homo sapiens
  misc_RNA (1)...(19): siRNA sense strand
cagaauggguaaagacaga

SEQ ID NO: 75701 - RNA, 19 nt, Homo sapiens
  misc_RNA (1)...(19): siRNA sense strand
gaccugcgacaguuucuua

SEQ ID NO: 75702 - RNA, 19 nt, Homo sapiens
  misc_RNA (1)...(19): siRNA sense strand
ggaguaugacuacaugaaa

SEQ ID NO: 75703 - RNA, 19 nt, Homo sapiens
  misc_RNA (1)...(19): siRNA sense strand
gaaggaccguguacaucau

SEQ ID NO: 75704 - RNA, 19 nt, Homo sapiens
  misc_RNA (1)...(19): siRNA sense strand
gcacaaaagcgcuggauuu

SEQ ID NO: 75705 - RNA, 19 nt, Homo sapiens
  misc_RNA (1)...(19): siRNA sense strand
gaaaggcuuggaaagauug

SEQ ID NO: 75706 - RNA, 19 nt, Homo sapiens
  misc_RNA (1)...(19): siRNA sense strand
acaaugaugcucagaguuu

SEQ ID NO: 75707 - RNA, 19 nt, Homo sapiens
  misc_RNA (1)...(19): siRNA sense strand
ugacaagguucacaaugau

SEQ ID NO: 75708 - RNA, 19 nt, Homo sapiens
  misc_RNA (1)...(19): siRNA sense strand
gagcucaaagacuggauua

SEQ ID NO: 75709 - RNA, 19 nt, Homo sapiens
  misc_RNA (1)...(19): siRNA sense strand
uaaaauagauggcgacaag

SEQ ID NO: 75710 - RNA, 19 nt, Homo sapiens
  misc_RNA (1)...(19): siRNA sense strand
gcagccaggccacagauuu

SEQ ID NO: 75711 - RNA, 19 nt, Homo sapiens
  misc_RNA (1)...(19): siRNA sense strand
gcugaugguuucauugauc

SEQ ID NO: 75712 - RNA, 19 nt, Homo sapiens
  misc_RNA (1)...(19): siRNA sense strand
gaaccgugaugggaagaug

SEQ ID NO: 75713 - RNA, 19 nt, Homo sapiens
  misc_RNA (1)...(19): siRNA sense strand
auaaacagaugaugguuag

SEQ ID NO: 75714 - RNA, 19 nt, Homo sapiens
  misc_RNA (1)...(19): siRNA sense strand
gaguaugacuacaugaaag

SEQ ID NO: 75715 - RNA, 19 nt, Homo sapiens
  misc_RNA (1)...(19): siRNA sense strand
ucacaaugaugcucagagu

SEQ ID NO: 75716 - RNA, 19 nt, Homo sapiens
  misc_RNA (1)...(19): siRNA sense strand
gcaccuggucuaugaauca

SEQ ID NO: 75717 - RNA, 19 nt, Homo sapiens
  misc_RNA (1)...(19): siRNA sense strand
ggacaaggaagagaccaaa

SEQ ID NO: 75718 - RNA, 19 nt, Homo sapiens
  misc_RNA (1)...(19): siRNA sense strand
gcacagccuuugccuugag

SEQ ID NO: 75719 - RNA, 19 nt, Homo sapiens
  misc_RNA (1)...(19): siRNA sense strand
gagcggagguuuaaaaugg

SEQ ID NO: 75720 - RNA, 19 nt, Homo sapiens
  misc_RNA (1)...(19): siRNA sense strand
cucaaagacuggauuaaau

SEQ ID NO: 75721 - RNA, 19 nt, Homo sapiens
  misc_RNA (1)...(19): siRNA sense strand
gaucuagaagaguauauug

SEQ ID NO: 75722 - RNA, 19 nt, Homo sapiens
  misc_RNA (1)...(19): siRNA sense strand
gaauacugaugagccagaa

SEQ ID NO: 75723 - RNA, 19 nt, Homo sapiens
  misc_RNA (1)...(19): siRNA sense strand
aggaaacaauggaagauau

SEQ ID NO: 75724 - RNA, 19 nt, Homo sapiens
  misc_RNA (1)...(19): siRNA sense strand
ccaaggaggagaucguuga

SEQ ID NO: 75725 - RNA, 19 nt, Homo sapiens
  misc_RNA (1)...(19): siRNA sense strand
ugaggaguaugacuacaug

SEQ ID NO: 75726 - RNA, 19 nt, Homo sapiens
  misc_RNA (1)...(19): siRNA sense strand
gagccagaauggguaaaga

SEQ ID NO: 75727 - RNA, 19 nt, Homo sapiens
  misc_RNA (1)...(19): siRNA sense strand
gauauaguaguacaggaaa

SEQ ID NO: 75728 - RNA, 19 nt, Homo sapiens
  misc_RNA (1)...(19): siRNA sense strand
ugaccaugaugccuucuug

SEQ ID NO: 75729 - RNA, 19 nt, Homo sapiens
  misc_RNA (1)...(19): siRNA sense strand
guauauuggugacauguac

SEQ ID NO: 75730 - RNA, 19 nt, Homo sapiens
  misc_RNA (1)...(19): siRNA sense strand
aggaggaguucacagcuuu

SEQ ID NO: 75731 - RNA, 19 nt, Homo sapiens
  misc_RNA (1)...(19): siRNA sense strand
agagaugagcggagguuua

SEQ ID NO: 75732 - RNA, 19 nt, Homo sapiens
  misc_RNA (1)...(19): siRNA sense strand
ggaagauggacaaggaaga

SEQ ID NO: 75733 - RNA, 19 nt, Homo sapiens
  misc_RNA (1)...(19): siRNA sense strand
agacagagcgagagcaguu

SEQ ID NO: 75734 - RNA, 19 nt, Homo sapiens
  misc_RNA (1)...(19): siRNA sense strand
gaaacaauggaagauauag

SEQ ID NO: 75735 - RNA, 19 nt, Homo sapiens
  misc_RNA (1)...(19): siRNA sense strand
auaagaaugcugaugguuu

SEQ ID NO: 75736 - RNA, 19 nt, Homo sapiens
  misc_RNA (1)...(19): siRNA sense strand
aggaaaggcuuggaaagau

SEQ ID NO: 75737 - RNA, 19 nt, Homo sapiens
  misc_RNA (1)...(19): siRNA sense strand
aggaggagaucguugacaa

SEQ ID NO: 75738 - RNA, 19 nt, Homo sapiens
  misc_RNA (1)...(19): siRNA sense strand
gaccaaagacuggauccuu

SEQ ID NO: 75739 - RNA, 19 nt, Homo sapiens
  misc_RNA (1)...(19): siRNA sense strand
gaugaugguuagagaugag

SEQ ID NO: 75740 - RNA, 19 nt, Homo sapiens
  misc_RNA (1)...(19): siRNA sense strand
caggaaacaauggaagaua

SEQ ID NO: 75741 - RNA, 19 nt, Homo sapiens
  misc_RNA (1)...(19): siRNA sense strand
cagaagagagcaaggaaag

SEQ ID NO: 75742 - RNA, 19 nt, Homo sapiens
  misc_RNA (1)...(19): siRNA sense strand
gagcgagagcaguuuguug

SEQ ID NO: 75743 - RNA, 19 nt, Homo sapiens
  misc_RNA (1)...(19): siRNA sense strand
agaaggaccguguacauca

SEQ ID NO: 75744 - RNA, 19 nt, Homo sapiens
  misc_RNA (1)...(19): siRNA sense strand
caaaagcgcuggauuuacg

SEQ ID NO: 75745 - RNA, 19 nt, Homo sapiens
  misc_RNA (1)...(19): siRNA sense strand
gauaagaaugcugaugguu

SEQ ID NO: 75746 - RNA, 19 nt, Homo sapiens
  misc_RNA (1)...(19): siRNA sense strand
acaaggaagagaccaaaga

SEQ ID NO: 75747 - RNA, 19 nt, Homo sapiens
  misc_RNA (1)...(19): siRNA sense strand
gaagauggacaaggaagag

SEQ ID NO: 75748 - RNA, 19 nt, Homo sapiens
  misc_RNA (1)...(19): siRNA sense strand
agagcaguuuguugaguuu

SEQ ID NO: 75749 - RNA, 19 nt, Homo sapiens
  misc_RNA (1)...(19): siRNA sense strand
gaaggggcaugaccucaau

SEQ ID NO: 75750 - RNA, 19 nt, Homo sapiens
  misc_RNA (1)...(19): siRNA sense strand
gauccuucccucagacuau

SEQ ID NO: 75751 - RNA, 19 nt, Homo sapiens
  misc_RNA (1)...(19): siRNA sense strand
cugcgacaguuucuuaugu

SEQ ID NO: 75752 - RNA, 19 nt, Homo sapiens
  misc_RNA (1)...(19): siRNA sense strand
aggagaucguugacaagua

SEQ ID NO: 75753 - RNA, 19 nt, Homo sapiens
  misc_RNA (1)...(19): siRNA sense strand
aaagaaggaccguguacau

SEQ ID NO: 75754 - RNA, 19 nt, Homo sapiens
  misc_RNA (1)...(19): siRNA sense strand
ggauuuacgaggauguaga

SEQ ID NO: 75755 - RNA, 19 nt, Homo sapiens
  misc_RNA (1)...(19): siRNA sense strand
gcucagaguuuugauuaug

SEQ ID NO: 75756 - RNA, 19 nt, Homo sapiens
  misc_RNA (1)...(19): siRNA sense strand
cgagagcaguuuguugagu

SEQ ID NO: 75757 - RNA, 19 nt, Homo sapiens
  misc_RNA (1)...(19): siRNA sense strand
gaugagccagaauggguaa

SEQ ID NO: 75758 - RNA, 19 nt, Homo sapiens
  misc_RNA (1)...(19): siRNA sense strand
cagaugaugguuagagaug

SEQ ID NO: 75759 - RNA, 19 nt, Homo sapiens
  misc_RNA (1)...(19): siRNA sense strand
gcgcuggauuuacgaggau

SEQ ID NO: 75760 - RNA, 19 nt, Homo sapiens
  misc_RNA (1)...(19): siRNA sense strand
gaggagaucguugacaagu

SEQ ID NO: 75761 - RNA, 19 nt, Homo sapiens
  misc_RNA (1)...(19): siRNA sense strand
ucagcucagugacaagguu

SEQ ID NO: 75762 - RNA, 19 nt, Homo sapiens
  misc_RNA (1)...(19): siRNA sense strand
caaggauggagaccucauu

SEQ ID NO: 75763 - RNA, 19 nt, Homo sapiens
  misc_RNA (1)...(19): siRNA sense strand
cacaaaagcgcuggauuua

SEQ ID NO: 75764 - RNA, 19 nt, Homo sapiens
  misc_RNA (1)...(19): siRNA sense strand
uuuguugaguuucgggaua

SEQ ID NO: 75765 - RNA, 19 nt, Homo sapiens
  misc_RNA (1)...(19): siRNA sense strand
aaggaaaggcuuggaaaga

SEQ ID NO: 75766 - RNA, 19 nt, Homo sapiens
  misc_RNA (1)...(19): siRNA sense strand
ccagaagagagcaaggaaa

SEQ ID NO: 75767 - RNA, 19 nt, Homo sapiens
  misc_RNA (1)...(19): siRNA sense strand
aaauagauggcgacaagga

SEQ ID NO: 75768 - RNA, 19 nt, Homo sapiens
  misc_RNA (1)...(19): siRNA sense strand
gaugagcggagguuuaaaa

SEQ ID NO: 75769 - RNA, 19 nt, Homo sapiens
  misc_RNA (1)...(19): siRNA sense strand
gaucagcugacaccagaag

SEQ ID NO: 75770 - RNA, 19 nt, Homo sapiens
  misc_RNA (1)...(19): siRNA sense strand
gagcaaacccacagaaaag

SEQ ID NO: 75771 - RNA, 19 nt, Homo sapiens
  misc_RNA (1)...(19): siRNA sense strand
auggcaagcuuaccaagga

SEQ ID NO: 75772 - RNA, 19 nt, Homo sapiens
  misc_RNA (1)...(19): siRNA sense strand
aacagaugaugguuagaga

SEQ ID NO: 75773 - RNA, 19 nt, Homo sapiens
  misc_RNA (1)...(19): siRNA sense strand
aaggaggaguucacagcuu

SEQ ID NO: 75774 - RNA, 19 nt, Homo sapiens
  misc_RNA (1)...(19): siRNA sense strand
augggaagauggacaagga

SEQ ID NO: 75775 - RNA, 19 nt, Homo sapiens
  misc_RNA (1)...(19): siRNA sense strand
gaccuuugaucagcugaca

SEQ ID NO: 75776 - RNA, 19 nt, Homo sapiens
  misc_RNA (1)...(19): siRNA sense strand
agauauaguaguacaggaa

SEQ ID NO: 75777 - RNA, 19 nt, Homo sapiens
  misc_RNA (1)...(19): siRNA sense strand
aagacuggauuaaauuugc

SEQ ID NO: 75778 - RNA, 19 nt, Homo sapiens
  misc_RNA (1)...(19): siRNA sense strand
uuucauugaucuagaagag

SEQ ID NO: 75779 - RNA, 19 nt, Homo sapiens
  misc_RNA (1)...(19): siRNA sense strand
gacaagguucacaaugaug

SEQ ID NO: 75780 - RNA, 19 nt, Homo sapiens
  misc_RNA (1)...(19): siRNA sense strand
aaacagaugaugguuagag

SEQ ID NO: 75781 - RNA, 19 nt, Homo sapiens
  misc_RNA (1)...(19): siRNA sense strand
uaaaauggcagacaaggau

SEQ ID NO: 75782 - RNA, 19 nt, Homo sapiens
  misc_RNA (1)...(19): siRNA sense strand
agaugaugguuagagauga

SEQ ID NO: 75783 - RNA, 19 nt, Homo sapiens
  misc_RNA (1)...(19): siRNA sense strand
ggaggagaucguugacaag

SEQ ID NO: 75784 - RNA, 19 nt, Homo sapiens
  misc_RNA (1)...(19): siRNA sense strand
agauaagaaugcugauggu

SEQ ID NO: 75785 - RNA, 19 nt, Homo sapiens
  misc_RNA (1)...(19): siRNA sense strand
gaaagauauaguaguacag

SEQ ID NO: 75786 - RNA, 19 nt, Homo sapiens
  misc_RNA (1)...(19): siRNA sense strand
caaugaugcucagaguuuu

SEQ ID NO: 75787 - RNA, 19 nt, Homo sapiens
  misc_RNA (1)...(19): siRNA sense strand
aagaguauauuggugacau

SEQ ID NO: 75788 - RNA, 19 nt, Homo sapiens
  misc_RNA (1)...(19): siRNA sense strand
caaggaagagaccaaagac

SEQ ID NO: 75789 - RNA, 19 nt, Homo sapiens
  misc_RNA (1)...(19): siRNA sense strand
cagcugacaccagaagaga

SEQ ID NO: 75790 - RNA, 19 nt, Homo sapiens
  misc_RNA (1)...(19): siRNA sense strand
gaaaagaaggaccguguac

SEQ ID NO: 75791 - RNA, 19 nt, Homo sapiens
  misc_RNA (1)...(19): siRNA sense strand
ccaaagaccucaucaauaa

SEQ ID NO: 75792 - RNA, 19 nt, Homo sapiens
  misc_RNA (1)...(19): siRNA sense strand
gcuagaaucugccgucuuu

SEQ ID NO: 75793 - RNA, 19 nt, Homo sapiens
  misc_RNA (1)...(19): siRNA sense strand
gaagaaaccagauggagua

SEQ ID NO: 75794 - RNA, 19 nt, Homo sapiens
  misc_RNA (1)...(19): siRNA sense strand
gaucaaggcuggagcuuau

SEQ ID NO: 75795 - RNA, 19 nt, Homo sapiens
  misc_RNA (1)...(19): siRNA sense strand
gaucgaagcuaucaacaau

SEQ ID NO: 75796 - RNA, 19 nt, Homo sapiens
  misc_RNA (1)...(19): siRNA sense strand
guaaagauccuuauggaaa

SEQ ID NO: 75797 - RNA, 19 nt, Homo sapiens
  misc_RNA (1)...(19): siRNA sense strand
gaggugaacuguuugaaga

SEQ ID NO: 75798 - RNA, 19 nt, Homo sapiens
  misc_RNA (1)...(19): siRNA sense strand
gaaaccagauggaguaaag

SEQ ID NO: 75799 - RNA, 19 nt, Homo sapiens
  misc_RNA (1)...(19): siRNA sense strand
gaagagggcuuucacuacu

SEQ ID NO: 75800 - RNA, 19 nt, Homo sapiens
  misc_RNA (1)...(19): siRNA sense strand
guaaaggagucaacugaga

SEQ ID NO: 75801 - RNA, 19 nt, Homo sapiens
  misc_RNA (1)...(19): siRNA sense strand
aaaccaauccacacuauua

SEQ ID NO: 75802 - RNA, 19 nt, Homo sapiens
  misc_RNA (1)...(19): siRNA sense strand
caaagucacugaacaacug

SEQ ID NO: 75803 - RNA, 19 nt, Homo sapiens
  misc_RNA (1)...(19): siRNA sense strand
gggagcagcugugaaauug

SEQ ID NO: 75804 - RNA, 19 nt, Homo sapiens
  misc_RNA (1)...(19): siRNA sense strand
caaagacaaugcagucaga

SEQ ID NO: 75805 - RNA, 19 nt, Homo sapiens
  misc_RNA (1)...(19): siRNA sense strand
gccaagaguuuguugaaga

SEQ ID NO: 75806 - RNA, 19 nt, Homo sapiens
  misc_RNA (1)...(19): siRNA sense strand
gcacgaaagcaagagauua

SEQ ID NO: 75807 - RNA, 19 nt, Homo sapiens
  misc_RNA (1)...(19): siRNA sense strand
gccaaagaccucaucaaua

SEQ ID NO: 75808 - RNA, 19 nt, Homo sapiens
  misc_RNA (1)...(19): siRNA sense strand
caagggagcagcugugaaa

SEQ ID NO: 75809 - RNA, 19 nt, Homo sapiens
  misc_RNA (1)...(19): siRNA sense strand
caacuaugcuggcuacaag

SEQ ID NO: 75810 - RNA, 19 nt, Homo sapiens
  misc_RNA (1)...(19): siRNA sense strand
gaaagccaguggauaugug

SEQ ID NO: 75811 - RNA, 19 nt, Homo sapiens
  misc_RNA (1)...(19): siRNA sense strand
ucaccuaaauggcauaguu

SEQ ID NO: 75812 - RNA, 19 nt, Homo sapiens
  misc_RNA (1)...(19): siRNA sense strand
acaagaauaugcugccaaa

SEQ ID NO: 75813 - RNA, 19 nt, Homo sapiens
  misc_RNA (1)...(19): siRNA sense strand
ccaagaguuuguugaagaa

SEQ ID NO: 75814 - RNA, 19 nt, Homo sapiens
  misc_RNA (1)...(19): siRNA sense strand
guagacugcuugaagaaau

SEQ ID NO: 75815 - RNA, 19 nt, Homo sapiens
  misc_RNA (1)...(19): siRNA sense strand
ccauggaucugucaacguu

SEQ ID NO: 75816 - RNA, 19 nt, Homo sapiens
  misc_RNA (1)...(19): siRNA sense strand
gaagcacccuaauauugug

SEQ ID NO: 75817 - RNA, 19 nt, Homo sapiens
  misc_RNA (1)...(19): siRNA sense strand
guuaaucauugucaccuaa

SEQ ID NO: 75818 - RNA, 19 nt, Homo sapiens
  misc_RNA (1)...(19): siRNA sense strand
auacaacaauugaggauga

SEQ ID NO: 75819 - RNA, 19 nt, Homo sapiens
  misc_RNA (1)...(19): siRNA sense strand
ugaacuguuugaagacaua

SEQ ID NO: 75820 - RNA, 19 nt, Homo sapiens
  misc_RNA (1)...(19): siRNA sense strand
ggugccaucuugacaacua

SEQ ID NO: 75821 - RNA, 19 nt, Homo sapiens
  misc_RNA (1)...(19): siRNA sense strand
uaaagauccuuauggaaag

SEQ ID NO: 75822 - RNA, 19 nt, Homo sapiens
  misc_RNA (1)...(19): siRNA sense strand
ggaugaagaccaacacaga

SEQ ID NO: 75823 - RNA, 19 nt, Homo sapiens
  misc_RNA (1)...(19): siRNA sense strand
gaguaaaggagucaacuga

SEQ ID NO: 75824 - RNA, 19 nt, Homo sapiens
  misc_RNA (1)...(19): siRNA sense strand
gaaagcaagagauuaucaa

SEQ ID NO: 75825 - RNA, 19 nt, Homo sapiens
  misc_RNA (1)...(19): siRNA sense strand
ggaugaagaugugaaagca

SEQ ID NO: 75826 - RNA, 19 nt, Homo sapiens
  misc_RNA (1)...(19): siRNA sense strand
gaaagagaagcuagaaucu

SEQ ID NO: 75827 - RNA, 19 nt, Homo sapiens
  misc_RNA (1)...(19): siRNA sense strand
gaacaacugaucgaagcua

SEQ ID NO: 75828 - RNA, 19 nt, Homo sapiens
  misc_RNA (1)...(19): siRNA sense strand
caagagaauacuacaguga

SEQ ID NO: 75829 - RNA, 19 nt, Homo sapiens
  misc_RNA (1)...(19): siRNA sense strand
auauuaggcucacacagua

SEQ ID NO: 75830 - RNA, 19 nt, Homo sapiens
  misc_RNA (1)...(19): siRNA sense strand
gcaagagauuaucaaaguc

SEQ ID NO: 75831 - RNA, 19 nt, Homo sapiens
  misc_RNA (1)...(19): siRNA sense strand
cagaagagggcuuucacua

SEQ ID NO: 75832 - RNA, 19 nt, Homo sapiens
  misc_RNA (1)...(19): siRNA sense strand
cuacuugguguuugauuua

SEQ ID NO: 75833 - RNA, 19 nt, Homo sapiens
  misc_RNA (1)...(19): siRNA sense strand
acuaaagggugccaucuug

SEQ ID NO: 75834 - RNA, 19 nt, Homo sapiens
  misc_RNA (1)...(19): siRNA sense strand
ggugagaagauguaugaaa

SEQ ID NO: 75835 - RNA, 19 nt, Homo sapiens
  misc_RNA (1)...(19): siRNA sense strand
cagcaggcgugguuugguu

SEQ ID NO: 75836 - RNA, 19 nt, Homo sapiens
  misc_RNA (1)...(19): siRNA sense strand
gaucaucagaaacuagaaa

SEQ ID NO: 75837 - RNA, 19 nt, Homo sapiens
  misc_RNA (1)...(19): siRNA sense strand
agcaagagauuaucaaagu

SEQ ID NO: 75838 - RNA, 19 nt, Homo sapiens
  misc_RNA (1)...(19): siRNA sense strand
gugagaagauguaugaaaa

SEQ ID NO: 75839 - RNA, 19 nt, Homo sapiens
  misc_RNA (1)...(19): siRNA sense strand
uacuggaggugaacuguuu

SEQ ID NO: 75840 - RNA, 19 nt, Homo sapiens
  misc_RNA (1)...(19): siRNA sense strand
gaaaauuccuacuggacaa

SEQ ID NO: 75841 - RNA, 19 nt, Homo sapiens
  misc_RNA (1)...(19): siRNA sense strand
gcugaugccagucauugua

SEQ ID NO: 75842 - RNA, 19 nt, Homo sapiens
  misc_RNA (1)...(19): siRNA sense strand
gcgacuucaugauagcaua

SEQ ID NO: 75843 - RNA, 19 nt, Homo sapiens
  misc_RNA (1)...(19): siRNA sense strand
ucuaaacccucauguacau

SEQ ID NO: 75844 - RNA, 19 nt, Homo sapiens
  misc_RNA (1)...(19): siRNA sense strand
caagagauuaucaaaguca

SEQ ID NO: 75845 - RNA, 19 nt, Homo sapiens
  misc_RNA (1)...(19): siRNA sense strand
acugagaguucaaauacaa

SEQ ID NO: 75846 - RNA, 19 nt, Homo sapiens
  misc_RNA (1)...(19): siRNA sense strand
ugaagcacccuaauauugu

SEQ ID NO: 75847 - RNA, 19 nt, Homo sapiens
  misc_RNA (1)...(19): siRNA sense strand
gcaguggaaugccaaagac

SEQ ID NO: 75848 - RNA, 19 nt, Homo sapiens
  misc_RNA (1)...(19): siRNA sense strand
gaauaugcugccaaaauua

SEQ ID NO: 75849 - RNA, 19 nt, Homo sapiens
  misc_RNA (1)...(19): siRNA sense strand
auaaaccaauccacacuau

SEQ ID NO: 75850 - RNA, 19 nt, Homo sapiens
  misc_RNA (1)...(19): siRNA sense strand
agaauaugcugccaaaauu

SEQ ID NO: 75851 - RNA, 19 nt, Homo sapiens
  misc_RNA (1)...(19): siRNA sense strand
guggugagaagauguauga

SEQ ID NO: 75852 - RNA, 19 nt, Homo sapiens
  misc_RNA (1)...(19): siRNA sense strand
uggcacaccuggauaucuu

SEQ ID NO: 75853 - RNA, 19 nt, Homo sapiens
  misc_RNA (1)...(19): siRNA sense strand
cagauucuagaaaguguua

SEQ ID NO: 75854 - RNA, 19 nt, Homo sapiens
  misc_RNA (1)...(19): siRNA sense strand
guauacagcagauucuaga

SEQ ID NO: 75855 - RNA, 19 nt, Homo sapiens
  misc_RNA (1)...(19): siRNA sense strand
ccugaagccugagaauuug

SEQ ID NO: 75856 - RNA, 19 nt, Homo sapiens
  misc_RNA (1)...(19): siRNA sense strand
ccaauccacacuauuauuc

SEQ ID NO: 75857 - RNA, 19 nt, Homo sapiens
  misc_RNA (1)...(19): siRNA sense strand
uagacugcuugaagaaauu

SEQ ID NO: 75858 - RNA, 19 nt, Homo sapiens
  misc_RNA (1)...(19): siRNA sense strand
caaagaccucaucaauaaa

SEQ ID NO: 75859 - RNA, 19 nt, Homo sapiens
  misc_RNA (1)...(19): siRNA sense strand
ggaaagccaguggauaugu

SEQ ID NO: 75860 - RNA, 19 nt, Homo sapiens
  misc_RNA (1)...(19): siRNA sense strand
agaaagagaagcuagaauc

SEQ ID NO: 75861 - RNA, 19 nt, Homo sapiens
  misc_RNA (1)...(19): siRNA sense strand
ggcuggagcuuaugauuuu

SEQ ID NO: 75862 - RNA, 19 nt, Homo sapiens
  misc_RNA (1)...(19): siRNA sense strand
caauugaggaugaagaugu

SEQ ID NO: 75863 - RNA, 19 nt, Homo sapiens
  misc_RNA (1)...(19): siRNA sense strand
gcacugaagcacccaugga

SEQ ID NO: 75864 - RNA, 19 nt, Homo sapiens
  misc_RNA (1)...(19): siRNA sense strand
ggugacuccugaagccaaa

SEQ ID NO: 75865 - RNA, 19 nt, Homo sapiens
  misc_RNA (1)...(19): siRNA sense strand
uugaagcacccuaauauug

SEQ ID NO: 75866 - RNA, 19 nt, Homo sapiens
  misc_RNA (1)...(19): siRNA sense strand
ucgaagcuaucaacaaugg

SEQ ID NO: 75867 - RNA, 19 nt, Homo sapiens
  misc_RNA (1)...(19): siRNA sense strand
caacaauugaggaugaaga

SEQ ID NO: 75868 - RNA, 19 nt, Homo sapiens
  misc_RNA (1)...(19): siRNA sense strand
agacauaguggcaagagaa

SEQ ID NO: 75869 - RNA, 19 nt, Homo sapiens
  misc_RNA (1)...(19): siRNA sense strand
caccgauucuacuuugaaa

SEQ ID NO: 75870 - RNA, 19 nt, Homo sapiens
  misc_RNA (1)...(19): siRNA sense strand
acccaggccuuacugcuuu

SEQ ID NO: 75871 - RNA, 19 nt, Homo sapiens
  misc_RNA (1)...(19): siRNA sense strand
cgaaagcaagagauuauca

SEQ ID NO: 75872 - RNA, 19 nt, Homo sapiens
  misc_RNA (1)...(19): siRNA sense strand
cauguggugucauucucua

SEQ ID NO: 75873 - RNA, 19 nt, Homo sapiens
  misc_RNA (1)...(19): siRNA sense strand
ugaugccagucauuguaua

SEQ ID NO: 75874 - RNA, 19 nt, Homo sapiens
  misc_RNA (1)...(19): siRNA sense strand
gaaacuagaaagagaagcu

SEQ ID NO: 75875 - RNA, 19 nt, Homo sapiens
  misc_RNA (1)...(19): siRNA sense strand
cugaagcuuuggguaauuu

SEQ ID NO: 75876 - RNA, 19 nt, Homo sapiens
  misc_RNA (1)...(19): siRNA sense strand
uaucaaagucacugaacaa

SEQ ID NO: 75877 - RNA, 19 nt, Homo sapiens
  misc_RNA (1)...(19): siRNA sense strand
guggugucauucucuauau

SEQ ID NO: 75878 - RNA, 19 nt, Homo sapiens
  misc_RNA (1)...(19): siRNA sense strand
gugggcauguggugucauu

SEQ ID NO: 75879 - RNA, 19 nt, Homo sapiens
  misc_RNA (1)...(19): siRNA sense strand
cacgaaagcaagagauuau

SEQ ID NO: 75880 - RNA, 19 nt, Homo sapiens
  misc_RNA (1)...(19): siRNA sense strand
ggcaagagaauacuacagu

SEQ ID NO: 75881 - RNA, 19 nt, Homo sapiens
  misc_RNA (1)...(19): siRNA sense strand
agacaaugcagucagaaga

SEQ ID NO: 75882 - RNA, 19 nt, Homo sapiens
  misc_RNA (1)...(19): siRNA sense strand
uauauuaggcucacacagu

SEQ ID NO: 75883 - RNA, 19 nt, Homo sapiens
  misc_RNA (1)...(19): siRNA sense strand
ugaaagcacgaaagcaaga

SEQ ID NO: 75884 - RNA, 19 nt, Homo sapiens
  misc_RNA (1)...(19): siRNA sense strand
ggaggugaacuguuugaag

SEQ ID NO: 75885 - RNA, 19 nt, Homo sapiens
  misc_RNA (1)...(19): siRNA sense strand
gccugcauagcauauauua

SEQ ID NO: 75886 - RNA, 19 nt, Homo sapiens
  misc_RNA (1)...(19): siRNA sense strand
caaaagcaauaaaccaauc

SEQ ID NO: 75887 - RNA, 19 nt, Homo sapiens
  misc_RNA (1)...(19): siRNA sense strand
acguaaagauccuuaugga

SEQ ID NO: 75888 - RNA, 19 nt, Homo sapiens
  misc_RNA (1)...(19): siRNA sense strand
gaccugaagccugagaauu

SEQ ID NO: 75889 - RNA, 19 nt, Homo sapiens
  misc_RNA (1)...(19): siRNA sense strand
uacagcagauucuagaaag

SEQ ID NO: 75890 - RNA, 19 nt, Homo sapiens
  misc_RNA (1)...(19): siRNA sense strand
ggugaacuguuugaagaca

SEQ ID NO: 75891 - RNA, 19 nt, Homo sapiens
  misc_RNA (1)...(19): siRNA sense strand
ccaaagaccucaucaauaa

SEQ ID NO: 75892 - RNA, 19 nt, Homo sapiens
  misc_RNA (1)...(19): siRNA sense strand
gcuagaaucugccgucuuu

SEQ ID NO: 75893 - RNA, 19 nt, Homo sapiens
  misc_RNA (1)...(19): siRNA sense strand
gaagaaaccagauggagua

SEQ ID NO: 75894 - RNA, 19 nt, Homo sapiens
  misc_RNA (1)...(19): siRNA sense strand
gaucaaggcuggagcuuau

SEQ ID NO: 75895 - RNA, 19 nt, Homo sapiens
  misc_RNA (1)...(19): siRNA sense strand
gaucgaagcuaucaacaau

SEQ ID NO: 75896 - RNA, 19 nt, Homo sapiens
  misc_RNA (1)...(19): siRNA sense strand
guaaagauccuuauggaaa

SEQ ID NO: 75897 - RNA, 19 nt, Homo sapiens
  misc_RNA (1)...(19): siRNA sense strand
gaggugaacuguuugaaga

SEQ ID NO: 75898 - RNA, 19 nt, Homo sapiens
  misc_RNA (1)...(19): siRNA sense strand
gaaaccagauggaguaaag

SEQ ID NO: 75899 - RNA, 19 nt, Homo sapiens
  misc_RNA (1)...(19): siRNA sense strand
gaagagggcuuucacuacu

SEQ ID NO: 75900 - RNA, 19 nt, Homo sapiens
  misc_RNA (1)...(19): siRNA sense strand
guaaaggagucaacugaga

SEQ ID NO: 75901 - RNA, 19 nt, Homo sapiens
  misc_RNA (1)...(19): siRNA sense strand
aaaccaauccacacuauua

SEQ ID NO: 75902 - RNA, 19 nt, Homo sapiens
  misc_RNA (1)...(19): siRNA sense strand
caaagucacugaacaacug

SEQ ID NO: 75903 - RNA, 19 nt, Homo sapiens
  misc_RNA (1)...(19): siRNA sense strand
gggagcagcugugaaauug

SEQ ID NO: 75904 - RNA, 19 nt, Homo sapiens
  misc_RNA (1)...(19): siRNA sense strand
caaagacaaugcagucaga

SEQ ID NO: 75905 - RNA, 19 nt, Homo sapiens
  misc_RNA (1)...(19): siRNA sense strand
gccaagaguuuguugaaga

SEQ ID NO: 75906 - RNA, 19 nt, Homo sapiens
  misc_RNA (1)...(19): siRNA sense strand
gcacgaaagcaagagauua

SEQ ID NO: 75907 - RNA, 19 nt, Homo sapiens
  misc_RNA (1)...(19): siRNA sense strand
gccaaagaccucaucaaua

SEQ ID NO: 75908 - RNA, 19 nt, Homo sapiens
  misc_RNA (1)...(19): siRNA sense strand
caagggagcagcugugaaa

SEQ ID NO: 75909 - RNA, 19 nt, Homo sapiens
  misc_RNA (1)...(19): siRNA sense strand
caacuaugcuggcuacaag

SEQ ID NO: 75910 - RNA, 19 nt, Homo sapiens
  misc_RNA (1)...(19): siRNA sense strand
gaaagccaguggauaugug

SEQ ID NO: 75911 - RNA, 19 nt, Homo sapiens
  misc_RNA (1)...(19): siRNA sense strand
ucaccuaaauggcauaguu

SEQ ID NO: 75912 - RNA, 19 nt, Homo sapiens
  misc_RNA (1)...(19): siRNA sense strand
acaagaauaugcugccaaa

SEQ ID NO: 75913 - RNA, 19 nt, Homo sapiens
  misc_RNA (1)...(19): siRNA sense strand
ccaagaguuuguugaagaa

SEQ ID NO: 75914 - RNA, 19 nt, Homo sapiens
  misc_RNA (1)...(19): siRNA sense strand
guagacugcuugaagaaau

SEQ ID NO: 75915 - RNA, 19 nt, Homo sapiens
  misc_RNA (1)...(19): siRNA sense strand
ccauggaucugucaacguu

SEQ ID NO: 75916 - RNA, 19 nt, Homo sapiens
  misc_RNA (1)...(19): siRNA sense strand
gaagcacccuaauauugug

SEQ ID NO: 75917 - RNA, 19 nt, Homo sapiens
  misc_RNA (1)...(19): siRNA sense strand
guuaaucauugucaccuaa

SEQ ID NO: 75918 - RNA, 19 nt, Homo sapiens
  misc_RNA (1)...(19): siRNA sense strand
auacaacaauugaggauga

SEQ ID NO: 75919 - RNA, 19 nt, Homo sapiens
  misc_RNA (1)...(19): siRNA sense strand
ugaacuguuugaagacaua

SEQ ID NO: 75920 - RNA, 19 nt, Homo sapiens
  misc_RNA (1)...(19): siRNA sense strand
ggugccaucuugacaacua

SEQ ID NO: 75921 - RNA, 19 nt, Homo sapiens
  misc_RNA (1)...(19): siRNA sense strand
uaaagauccuuauggaaag

SEQ ID NO: 75922 - RNA, 19 nt, Homo sapiens
  misc_RNA (1)...(19): siRNA sense strand
ggaugaagaccaacacaga

SEQ ID NO: 75923 - RNA, 19 nt, Homo sapiens
  misc_RNA (1)...(19): siRNA sense strand
gaguaaaggagucaacuga

SEQ ID NO: 75924 - RNA, 19 nt, Homo sapiens
  misc_RNA (1)...(19): siRNA sense strand
gaaagcaagagauuaucaa

SEQ ID NO: 75925 - RNA, 19 nt, Homo sapiens
  misc_RNA (1)...(19): siRNA sense strand
ggaugaagaugugaaagca

SEQ ID NO: 75926 - RNA, 19 nt, Homo sapiens
  misc_RNA (1)...(19): siRNA sense strand
gaaagagaagcuagaaucu

SEQ ID NO: 75927 - RNA, 19 nt, Homo sapiens
  misc_RNA (1)...(19): siRNA sense strand
gaacaacugaucgaagcua

SEQ ID NO: 75928 - RNA, 19 nt, Homo sapiens
  misc_RNA (1)...(19): siRNA sense strand
caagagaauacuacaguga

SEQ ID NO: 75929 - RNA, 19 nt, Homo sapiens
  misc_RNA (1)...(19): siRNA sense strand
auauuaggcucacacagua

SEQ ID NO: 75930 - RNA, 19 nt, Homo sapiens
  misc_RNA (1)...(19): siRNA sense strand
gcaagagauuaucaaaguc

SEQ ID NO: 75931 - RNA, 19 nt, Homo sapiens
  misc_RNA (1)...(19): siRNA sense strand
cagaagagggcuuucacua

SEQ ID NO: 75932 - RNA, 19 nt, Homo sapiens
  misc_RNA (1)...(19): siRNA sense strand
cuacuugguguuugauuua

SEQ ID NO: 75933 - RNA, 19 nt, Homo sapiens
  misc_RNA (1)...(19): siRNA sense strand
acuaaagggugccaucuug

SEQ ID NO: 75934 - RNA, 19 nt, Homo sapiens
  misc_RNA (1)...(19): siRNA sense strand
ggugagaagauguaugaaa

SEQ ID NO: 75935 - RNA, 19 nt, Homo sapiens
  misc_RNA (1)...(19): siRNA sense strand
cagcaggcgugguuugguu

SEQ ID NO: 75936 - RNA, 19 nt, Homo sapiens
  misc_RNA (1)...(19): siRNA sense strand
gaucaucagaaacuagaaa

SEQ ID NO: 75937 - RNA, 19 nt, Homo sapiens
  misc_RNA (1)...(19): siRNA sense strand
agcaagagauuaucaaagu

SEQ ID NO: 75938 - RNA, 19 nt, Homo sapiens
  misc_RNA (1)...(19): siRNA sense strand
gugagaagauguaugaaaa

SEQ ID NO: 75939 - RNA, 19 nt, Homo sapiens
  misc_RNA (1)...(19): siRNA sense strand
uacuggaggugaacuguuu

SEQ ID NO: 75940 - RNA, 19 nt, Homo sapiens
  misc_RNA (1)...(19): siRNA sense strand
gaaaauuccuacuggacaa

SEQ ID NO: 75941 - RNA, 19 nt, Homo sapiens
  misc_RNA (1)...(19): siRNA sense strand
gcugaugccagucauugua

SEQ ID NO: 75942 - RNA, 19 nt, Homo sapiens
  misc_RNA (1)...(19): siRNA sense strand
gcgacuucaugauagcaua

SEQ ID NO: 75943 - RNA, 19 nt, Homo sapiens
  misc_RNA (1)...(19): siRNA sense strand
ucuaaacccucauguacau

SEQ ID NO: 75944 - RNA, 19 nt, Homo sapiens
  misc_RNA (1)...(19): siRNA sense strand
caagagauuaucaaaguca

SEQ ID NO: 75945 - RNA, 19 nt, Homo sapiens
  misc_RNA (1)...(19): siRNA sense strand
acugagaguucaaauacaa

SEQ ID NO: 75946 - RNA, 19 nt, Homo sapiens
  misc_RNA (1)...(19): siRNA sense strand
ugaagcacccuaauauugu

SEQ ID NO: 75947 - RNA, 19 nt, Homo sapiens
  misc_RNA (1)...(19): siRNA sense strand
gcaguggaaugccaaagac

SEQ ID NO: 75948 - RNA, 19 nt, Homo sapiens
  misc_RNA (1)...(19): siRNA sense strand
gaauaugcugccaaaauua

SEQ ID NO: 75949 - RNA, 19 nt, Homo sapiens
  misc_RNA (1)...(19): siRNA sense strand
auaaaccaauccacacuau

SEQ ID NO: 75950 - RNA, 19 nt, Homo sapiens
  misc_RNA (1)...(19): siRNA sense strand
agaauaugcugccaaaauu

SEQ ID NO: 75951 - RNA, 19 nt, Homo sapiens
  misc_RNA (1)...(19): siRNA sense strand
guggugagaagauguauga

SEQ ID NO: 75952 - RNA, 19 nt, Homo sapiens
  misc_RNA (1)...(19): siRNA sense strand
uggcacaccuggauaucuu

SEQ ID NO: 75953 - RNA, 19 nt, Homo sapiens
  misc_RNA (1)...(19): siRNA sense strand
cagauucuagaaaguguua

SEQ ID NO: 75954 - RNA, 19 nt, Homo sapiens
  misc_RNA (1)...(19): siRNA sense strand
guauacagcagauucuaga

SEQ ID NO: 75955 - RNA, 19 nt, Homo sapiens
  misc_RNA (1)...(19): siRNA sense strand
ccugaagccugagaauuug

SEQ ID NO: 75956 - RNA, 19 nt, Homo sapiens
  misc_RNA (1)...(19): siRNA sense strand
ccaauccacacuauuauuc

SEQ ID NO: 75957 - RNA, 19 nt, Homo sapiens
  misc_RNA (1)...(19): siRNA sense strand
uagacugcuugaagaaauu

SEQ ID NO: 75958 - RNA, 19 nt, Homo sapiens
  misc_RNA (1)...(19): siRNA sense strand
caaagaccucaucaauaaa

SEQ ID NO: 75959 - RNA, 19 nt, Homo sapiens
  misc_RNA (1)...(19): siRNA sense strand
ggaaagccaguggauaugu

SEQ ID NO: 75960 - RNA, 19 nt, Homo sapiens
  misc_RNA (1)...(19): siRNA sense strand
agaaagagaagcuagaauc

SEQ ID NO: 75961 - RNA, 19 nt, Homo sapiens
  misc_RNA (1)...(19): siRNA sense strand
ggcuggagcuuaugauuuu

SEQ ID NO: 75962 - RNA, 19 nt, Homo sapiens
  misc_RNA (1)...(19): siRNA sense strand
caauugaggaugaagaugu

SEQ ID NO: 75963 - RNA, 19 nt, Homo sapiens
  misc_RNA (1)...(19): siRNA sense strand
gcacugaagcacccaugga

SEQ ID NO: 75964 - RNA, 19 nt, Homo sapiens
  misc_RNA (1)...(19): siRNA sense strand
ggugacuccugaagccaaa

SEQ ID NO: 75965 - RNA, 19 nt, Homo sapiens
  misc_RNA (1)...(19): siRNA sense strand
uugaagcacccuaauauug

SEQ ID NO: 75966 - RNA, 19 nt, Homo sapiens
  misc_RNA (1)...(19): siRNA sense strand
ucgaagcuaucaacaaugg

SEQ ID NO: 75967 - RNA, 19 nt, Homo sapiens
  misc_RNA (1)...(19): siRNA sense strand
caacaauugaggaugaaga

SEQ ID NO: 75968 - RNA, 19 nt, Homo sapiens
  misc_RNA (1)...(19): siRNA sense strand
agacauaguggcaagagaa

SEQ ID NO: 75969 - RNA, 19 nt, Homo sapiens
  misc_RNA (1)...(19): siRNA sense strand
caccgauucuacuuugaaa

SEQ ID NO: 75970 - RNA, 19 nt, Homo sapiens
  misc_RNA (1)...(19): siRNA sense strand
acccaggccuuacugcuuu

SEQ ID NO: 75971 - RNA, 19 nt, Homo sapiens
  misc_RNA (1)...(19): siRNA sense strand
cgaaagcaagagauuauca

SEQ ID NO: 75972 - RNA, 19 nt, Homo sapiens
  misc_RNA (1)...(19): siRNA sense strand
cauguggugucauucucua

SEQ ID NO: 75973 - RNA, 19 nt, Homo sapiens
  misc_RNA (1)...(19): siRNA sense strand
ugaugccagucauuguaua

SEQ ID NO: 75974 - RNA, 19 nt, Homo sapiens
  misc_RNA (1)...(19): siRNA sense strand
gaaacuagaaagagaagcu

SEQ ID NO: 75975 - RNA, 19 nt, Homo sapiens
  misc_RNA (1)...(19): siRNA sense strand
cugaagcuuuggguaauuu

SEQ ID NO: 75976 - RNA, 19 nt, Homo sapiens
  misc_RNA (1)...(19): siRNA sense strand
uaucaaagucacugaacaa

SEQ ID NO: 75977 - RNA, 19 nt, Homo sapiens
  misc_RNA (1)...(19): siRNA sense strand
guggugucauucucuauau

SEQ ID NO: 75978 - RNA, 19 nt, Homo sapiens
  misc_RNA (1)...(19): siRNA sense strand
gugggcauguggugucauu

SEQ ID NO: 75979 - RNA, 19 nt, Homo sapiens
  misc_RNA (1)...(19): siRNA sense strand
cacgaaagcaagagauuau

SEQ ID NO: 75980 - RNA, 19 nt, Homo sapiens
  misc_RNA (1)...(19): siRNA sense strand
ggcaagagaauacuacagu

SEQ ID NO: 75981 - RNA, 19 nt, Homo sapiens
  misc_RNA (1)...(19): siRNA sense strand
agacaaugcagucagaaga

SEQ ID NO: 75982 - RNA, 19 nt, Homo sapiens
  misc_RNA (1)...(19): siRNA sense strand
uauauuaggcucacacagu

SEQ ID NO: 75983 - RNA, 19 nt, Homo sapiens
  misc_RNA (1)...(19): siRNA sense strand
ugaaagcacgaaagcaaga

SEQ ID NO: 75984 - RNA, 19 nt, Homo sapiens
  misc_RNA (1)...(19): siRNA sense strand
ggaggugaacuguuugaag

SEQ ID NO: 75985 - RNA, 19 nt, Homo sapiens
  misc_RNA (1)...(19): siRNA sense strand
gccugcauagcauauauua

SEQ ID NO: 75986 - RNA, 19 nt, Homo sapiens
  misc_RNA (1)...(19): siRNA sense strand
caaaagcaauaaaccaauc

SEQ ID NO: 75987 - RNA, 19 nt, Homo sapiens
  misc_RNA (1)...(19): siRNA sense strand
acguaaagauccuuaugga

SEQ ID NO: 75988 - RNA, 19 nt, Homo sapiens
  misc_RNA (1)...(19): siRNA sense strand
gaccugaagccugagaauu

SEQ ID NO: 75989 - RNA, 19 nt, Homo sapiens
  misc_RNA (1)...(19): siRNA sense strand
uacagcagauucuagaaag

SEQ ID NO: 75990 - RNA, 19 nt, Homo sapiens
  misc_RNA (1)...(19): siRNA sense strand
ggugaacuguuugaagaca

SEQ ID NO: 75991 - RNA, 19 nt, Homo sapiens
  misc_RNA (1)...(19): siRNA sense strand
ccaaagaccucaucaauaa

SEQ ID NO: 75992 - RNA, 19 nt, Homo sapiens
  misc_RNA (1)...(19): siRNA sense strand
gcuagaaucugccgucuuu

SEQ ID NO: 75993 - RNA, 19 nt, Homo sapiens
  misc_RNA (1)...(19): siRNA sense strand
gaagaaaccagauggagua

SEQ ID NO: 75994 - RNA, 19 nt, Homo sapiens
  misc_RNA (1)...(19): siRNA sense strand
gaucaaggcuggagcuuau

SEQ ID NO: 75995 - RNA, 19 nt, Homo sapiens
  misc_RNA (1)...(19): siRNA sense strand
gaucgaagcuaucaacaau

SEQ ID NO: 75996 - RNA, 19 nt, Homo sapiens
  misc_RNA (1)...(19): siRNA sense strand
guaaagauccuuauggaaa

SEQ ID NO: 75997 - RNA, 19 nt, Homo sapiens
  misc_RNA (1)...(19): siRNA sense strand
gaggugaacuguuugaaga

SEQ ID NO: 75998 - RNA, 19 nt, Homo sapiens
  misc_RNA (1)...(19): siRNA sense strand
gaaaccagauggaguaaag

SEQ ID NO: 75999 - RNA, 19 nt, Homo sapiens
  misc_RNA (1)...(19): siRNA sense strand
gaagagggcuuucacuacu

SEQ ID NO: 76000 - RNA, 19 nt, Homo sapiens
  misc_RNA (1)...(19): siRNA sense strand
guaaaggagucaacugaga

SEQ ID NO: 76001 - RNA, 19 nt, Homo sapiens
  misc_RNA (1)...(19): siRNA sense strand
aaaccaauccacacuauua

SEQ ID NO: 76002 - RNA, 19 nt, Homo sapiens
  misc_RNA (1)...(19): siRNA sense strand
caaagucacugaacaacug

SEQ ID NO: 76003 - RNA, 19 nt, Homo sapiens
  misc_RNA (1)...(19): siRNA sense strand
gggagcagcugugaaauug

SEQ ID NO: 76004 - RNA, 19 nt, Homo sapiens
  misc_RNA (1)...(19): siRNA sense strand
caaagacaaugcagucaga

SEQ ID NO: 76005 - RNA, 19 nt, Homo sapiens
  misc_RNA (1)...(19): siRNA sense strand
gccaagaguuuguugaaga

SEQ ID NO: 76006 - RNA, 19 nt, Homo sapiens
  misc_RNA (1)...(19): siRNA sense strand
gcacgaaagcaagagauua

SEQ ID NO: 76007 - RNA, 19 nt, Homo sapiens
  misc_RNA (1)...(19): siRNA sense strand
gccaaagaccucaucaaua

SEQ ID NO: 76008 - RNA, 19 nt, Homo sapiens
  misc_RNA (1)...(19): siRNA sense strand
caagggagcagcugugaaa

SEQ ID NO: 76009 - RNA, 19 nt, Homo sapiens
  misc_RNA (1)...(19): siRNA sense strand
caacuaugcuggcuacaag

SEQ ID NO: 76010 - RNA, 19 nt, Homo sapiens
  misc_RNA (1)...(19): siRNA sense strand
gaaagccaguggauaugug

SEQ ID NO: 76011 - RNA, 19 nt, Homo sapiens
  misc_RNA (1)...(19): siRNA sense strand
ucaccuaaauggcauaguu

SEQ ID NO: 76012 - RNA, 19 nt, Homo sapiens
  misc_RNA (1)...(19): siRNA sense strand
acaagaauaugcugccaaa

SEQ ID NO: 76013 - RNA, 19 nt, Homo sapiens
  misc_RNA (1)...(19): siRNA sense strand
ccaagaguuuguugaagaa

SEQ ID NO: 76014 - RNA, 19 nt, Homo sapiens
  misc_RNA (1)...(19): siRNA sense strand
guagacugcuugaagaaau

SEQ ID NO: 76015 - RNA, 19 nt, Homo sapiens
  misc_RNA (1)...(19): siRNA sense strand
ccauggaucugucaacguu

SEQ ID NO: 76016 - RNA, 19 nt, Homo sapiens
  misc_RNA (1)...(19): siRNA sense strand
gaagcacccuaauauugug

SEQ ID NO: 76017 - RNA, 19 nt, Homo sapiens
  misc_RNA (1)...(19): siRNA sense strand
guuaaucauugucaccuaa

SEQ ID NO: 76018 - RNA, 19 nt, Homo sapiens
  misc_RNA (1)...(19): siRNA sense strand
auacaacaauugaggauga

SEQ ID NO: 76019 - RNA, 19 nt, Homo sapiens
  misc_RNA (1)...(19): siRNA sense strand
ugaacuguuugaagacaua

SEQ ID NO: 76020 - RNA, 19 nt, Homo sapiens
  misc_RNA (1)...(19): siRNA sense strand
ggugccaucuugacaacua

SEQ ID NO: 76021 - RNA, 19 nt, Homo sapiens
  misc_RNA (1)...(19): siRNA sense strand
uaaagauccuuauggaaag

SEQ ID NO: 76022 - RNA, 19 nt, Homo sapiens
  misc_RNA (1)...(19): siRNA sense strand
ggaugaagaccaacacaga

SEQ ID NO: 76023 - RNA, 19 nt, Homo sapiens
  misc_RNA (1)...(19): siRNA sense strand
gaguaaaggagucaacuga

SEQ ID NO: 76024 - RNA, 19 nt, Homo sapiens
  misc_RNA (1)...(19): siRNA sense strand
gaaagcaagagauuaucaa

SEQ ID NO: 76025 - RNA, 19 nt, Homo sapiens
  misc_RNA (1)...(19): siRNA sense strand
ggaugaagaugugaaagca

SEQ ID NO: 76026 - RNA, 19 nt, Homo sapiens
  misc_RNA (1)...(19): siRNA sense strand
gaaagagaagcuagaaucu

SEQ ID NO: 76027 - RNA, 19 nt, Homo sapiens
  misc_RNA (1)...(19): siRNA sense strand
gaacaacugaucgaagcua

SEQ ID NO: 76028 - RNA, 19 nt, Homo sapiens
  misc_RNA (1)...(19): siRNA sense strand
caagagaauacuacaguga

SEQ ID NO: 76029 - RNA, 19 nt, Homo sapiens
  misc_RNA (1)...(19): siRNA sense strand
auauuaggcucacacagua

SEQ ID NO: 76030 - RNA, 19 nt, Homo sapiens
  misc_RNA (1)...(19): siRNA sense strand
gcaagagauuaucaaaguc

SEQ ID NO: 76031 - RNA, 19 nt, Homo sapiens
  misc_RNA (1)...(19): siRNA sense strand
cagaagagggcuuucacua

SEQ ID NO: 76032 - RNA, 19 nt, Homo sapiens
  misc_RNA (1)...(19): siRNA sense strand
cuacuugguguuugauuua

SEQ ID NO: 76033 - RNA, 19 nt, Homo sapiens
  misc_RNA (1)...(19): siRNA sense strand
acuaaagggugccaucuug

SEQ ID NO: 76034 - RNA, 19 nt, Homo sapiens
  misc_RNA (1)...(19): siRNA sense strand
ggugagaagauguaugaaa

SEQ ID NO: 76035 - RNA, 19 nt, Homo sapiens
  misc_RNA (1)...(19): siRNA sense strand
cagcaggcgugguuugguu

SEQ ID NO: 76036 - RNA, 19 nt, Homo sapiens
  misc_RNA (1)...(19): siRNA sense strand
gaucaucagaaacuagaaa

SEQ ID NO: 76037 - RNA, 19 nt, Homo sapiens
  misc_RNA (1)...(19): siRNA sense strand
agcaagagauuaucaaagu

SEQ ID NO: 76038 - RNA, 19 nt, Homo sapiens
  misc_RNA (1)...(19): siRNA sense strand
gugagaagauguaugaaaa

SEQ ID NO: 76039 - RNA, 19 nt, Homo sapiens
  misc_RNA (1)...(19): siRNA sense strand
uacuggaggugaacuguuu

SEQ ID NO: 76040 - RNA, 19 nt, Homo sapiens
  misc_RNA (1)...(19): siRNA sense strand
gaaaauuccuacuggacaa

SEQ ID NO: 76041 - RNA, 19 nt, Homo sapiens
  misc_RNA (1)...(19): siRNA sense strand
gcugaugccagucauugua

SEQ ID NO: 76042 - RNA, 19 nt, Homo sapiens
  misc_RNA (1)...(19): siRNA sense strand
gcgacuucaugauagcaua

SEQ ID NO: 76043 - RNA, 19 nt, Homo sapiens
  misc_RNA (1)...(19): siRNA sense strand
ucuaaacccucauguacau

SEQ ID NO: 76044 - RNA, 19 nt, Homo sapiens
  misc_RNA (1)...(19): siRNA sense strand
caagagauuaucaaaguca

SEQ ID NO: 76045 - RNA, 19 nt, Homo sapiens
  misc_RNA (1)...(19): siRNA sense strand
acugagaguucaaauacaa

SEQ ID NO: 76046 - RNA, 19 nt, Homo sapiens
  misc_RNA (1)...(19): siRNA sense strand
ugaagcacccuaauauugu

SEQ ID NO: 76047 - RNA, 19 nt, Homo sapiens
  misc_RNA (1)...(19): siRNA sense strand
gcaguggaaugccaaagac

SEQ ID NO: 76048 - RNA, 19 nt, Homo sapiens
  misc_RNA (1)...(19): siRNA sense strand
gaauaugcugccaaaauua

SEQ ID NO: 76049 - RNA, 19 nt, Homo sapiens
  misc_RNA (1)...(19): siRNA sense strand
auaaaccaauccacacuau

SEQ ID NO: 76050 - RNA, 19 nt, Homo sapiens
  misc_RNA (1)...(19): siRNA sense strand
agaauaugcugccaaaauu

SEQ ID NO: 76051 - RNA, 19 nt, Homo sapiens
  misc_RNA (1)...(19): siRNA sense strand
guggugagaagauguauga

SEQ ID NO: 76052 - RNA, 19 nt, Homo sapiens
  misc_RNA (1)...(19): siRNA sense strand
uggcacaccuggauaucuu

SEQ ID NO: 76053 - RNA, 19 nt, Homo sapiens
  misc_RNA (1)...(19): siRNA sense strand
cagauucuagaaaguguua

SEQ ID NO: 76054 - RNA, 19 nt, Homo sapiens
  misc_RNA (1)...(19): siRNA sense strand
guauacagcagauucuaga

SEQ ID NO: 76055 - RNA, 19 nt, Homo sapiens
  misc_RNA (1)...(19): siRNA sense strand
ccugaagccugagaauuug

SEQ ID NO: 76056 - RNA, 19 nt, Homo sapiens
  misc_RNA (1)...(19): siRNA sense strand
ccaauccacacuauuauuc

SEQ ID NO: 76057 - RNA, 19 nt, Homo sapiens
  misc_RNA (1)...(19): siRNA sense strand
uagacugcuugaagaaauu

SEQ ID NO: 76058 - RNA, 19 nt, Homo sapiens
  misc_RNA (1)...(19): siRNA sense strand
caaagaccucaucaauaaa

SEQ ID NO: 76059 - RNA, 19 nt, Homo sapiens
  misc_RNA (1)...(19): siRNA sense strand
ggaaagccaguggauaugu

SEQ ID NO: 76060 - RNA, 19 nt, Homo sapiens
  misc_RNA (1)...(19): siRNA sense strand
agaaagagaagcuagaauc

SEQ ID NO: 76061 - RNA, 19 nt, Homo sapiens
  misc_RNA (1)...(19): siRNA sense strand
ggcuggagcuuaugauuuu

SEQ ID NO: 76062 - RNA, 19 nt, Homo sapiens
  misc_RNA (1)...(19): siRNA sense strand
caauugaggaugaagaugu

SEQ ID NO: 76063 - RNA, 19 nt, Homo sapiens
  misc_RNA (1)...(19): siRNA sense strand
gcacugaagcacccaugga

SEQ ID NO: 76064 - RNA, 19 nt, Homo sapiens
  misc_RNA (1)...(19): siRNA sense strand
ggugacuccugaagccaaa

SEQ ID NO: 76065 - RNA, 19 nt, Homo sapiens
  misc_RNA (1)...(19): siRNA sense strand
uugaagcacccuaauauug

SEQ ID NO: 76066 - RNA, 19 nt, Homo sapiens
  misc_RNA (1)...(19): siRNA sense strand
ucgaagcuaucaacaaugg

SEQ ID NO: 76067 - RNA, 19 nt, Homo sapiens
  misc_RNA (1)...(19): siRNA sense strand
caacaauugaggaugaaga

SEQ ID NO: 76068 - RNA, 19 nt, Homo sapiens
  misc_RNA (1)...(19): siRNA sense strand
agacauaguggcaagagaa

SEQ ID NO: 76069 - RNA, 19 nt, Homo sapiens
  misc_RNA (1)...(19): siRNA sense strand
caccgauucuacuuugaaa

SEQ ID NO: 76070 - RNA, 19 nt, Homo sapiens
  misc_RNA (1)...(19): siRNA sense strand
acccaggccuuacugcuuu

SEQ ID NO: 76071 - RNA, 19 nt, Homo sapiens
  misc_RNA (1)...(19): siRNA sense strand
cgaaagcaagagauuauca

SEQ ID NO: 76072 - RNA, 19 nt, Homo sapiens
  misc_RNA (1)...(19): siRNA sense strand
cauguggugucauucucua

SEQ ID NO: 76073 - RNA, 19 nt, Homo sapiens
  misc_RNA (1)...(19): siRNA sense strand
ugaugccagucauuguaua

SEQ ID NO: 76074 - RNA, 19 nt, Homo sapiens
  misc_RNA (1)...(19): siRNA sense strand
gaaacuagaaagagaagcu

SEQ ID NO: 76075 - RNA, 19 nt, Homo sapiens
  misc_RNA (1)...(19): siRNA sense strand
cugaagcuuuggguaauuu

SEQ ID NO: 76076 - RNA, 19 nt, Homo sapiens
  misc_RNA (1)...(19): siRNA sense strand
uaucaaagucacugaacaa

SEQ ID NO: 76077 - RNA, 19 nt, Homo sapiens
  misc_RNA (1)...(19): siRNA sense strand
guggugucauucucuauau

SEQ ID NO: 76078 - RNA, 19 nt, Homo sapiens
  misc_RNA (1)...(19): siRNA sense strand
gugggcauguggugucauu

SEQ ID NO: 76079 - RNA, 19 nt, Homo sapiens
  misc_RNA (1)...(19): siRNA sense strand
cacgaaagcaagagauuau

SEQ ID NO: 76080 - RNA, 19 nt, Homo sapiens
  misc_RNA (1)...(19): siRNA sense strand
ggcaagagaauacuacagu

SEQ ID NO: 76081 - RNA, 19 nt, Homo sapiens
  misc_RNA (1)...(19): siRNA sense strand
agacaaugcagucagaaga

SEQ ID NO: 76082 - RNA, 19 nt, Homo sapiens
  misc_RNA (1)...(19): siRNA sense strand
uauauuaggcucacacagu

SEQ ID NO: 76083 - RNA, 19 nt, Homo sapiens
  misc_RNA (1)...(19): siRNA sense strand
ugaaagcacgaaagcaaga

SEQ ID NO: 76084 - RNA, 19 nt, Homo sapiens
  misc_RNA (1)...(19): siRNA sense strand
ggaggugaacuguuugaag

SEQ ID NO: 76085 - RNA, 19 nt, Homo sapiens
  misc_RNA (1)...(19): siRNA sense strand
gccugcauagcauauauua

SEQ ID NO: 76086 - RNA, 19 nt, Homo sapiens
  misc_RNA (1)...(19): siRNA sense strand
caaaagcaauaaaccaauc

SEQ ID NO: 76087 - RNA, 19 nt, Homo sapiens
  misc_RNA (1)...(19): siRNA sense strand
acguaaagauccuuaugga

SEQ ID NO: 76088 - RNA, 19 nt, Homo sapiens
  misc_RNA (1)...(19): siRNA sense strand
gaccugaagccugagaauu

SEQ ID NO: 76089 - RNA, 19 nt, Homo sapiens
  misc_RNA (1)...(19): siRNA sense strand
uacagcagauucuagaaag

SEQ ID NO: 76090 - RNA, 19 nt, Homo sapiens
  misc_RNA (1)...(19): siRNA sense strand
ggugaacuguuugaagaca

SEQ ID NO: 76091 - RNA, 19 nt, Homo sapiens
  misc_RNA (1)...(19): siRNA sense strand
ccaaagaccucaucaauaa

SEQ ID NO: 76092 - RNA, 19 nt, Homo sapiens
  misc_RNA (1)...(19): siRNA sense strand
gcuagaaucugccgucuuu

SEQ ID NO: 76093 - RNA, 19 nt, Homo sapiens
  misc_RNA (1)...(19): siRNA sense strand
gaagaaaccagauggagua

SEQ ID NO: 76094 - RNA, 19 nt, Homo sapiens
  misc_RNA (1)...(19): siRNA sense strand
gaucaaggcuggagcuuau

SEQ ID NO: 76095 - RNA, 19 nt, Homo sapiens
  misc_RNA (1)...(19): siRNA sense strand
gaucgaagcuaucaacaau

SEQ ID NO: 76096 - RNA, 19 nt, Homo sapiens
  misc_RNA (1)...(19): siRNA sense strand
guaaagauccuuauggaaa

SEQ ID NO: 76097 - RNA, 19 nt, Homo sapiens
  misc_RNA (1)...(19): siRNA sense strand
gaggugaacuguuugaaga

SEQ ID NO: 76098 - RNA, 19 nt, Homo sapiens
  misc_RNA (1)...(19): siRNA sense strand
gaaaccagauggaguaaag

SEQ ID NO: 76099 - RNA, 19 nt, Homo sapiens
  misc_RNA (1)...(19): siRNA sense strand
gaagagggcuuucacuacu

SEQ ID NO: 76100 - RNA, 19 nt, Homo sapiens
  misc_RNA (1)...(19): siRNA sense strand
guaaaggagucaacugaga

SEQ ID NO: 76101 - RNA, 19 nt, Homo sapiens
  misc_RNA (1)...(19): siRNA sense strand
aaaccaauccacacuauua

SEQ ID NO: 76102 - RNA, 19 nt, Homo sapiens
  misc_RNA (1)...(19): siRNA sense strand
caaagucacugaacaacug

SEQ ID NO: 76103 - RNA, 19 nt, Homo sapiens
  misc_RNA (1)...(19): siRNA sense strand
gggagcagcugugaaauug

SEQ ID NO: 76104 - RNA, 19 nt, Homo sapiens
  misc_RNA (1)...(19): siRNA sense strand
caaagacaaugcagucaga

SEQ ID NO: 76105 - RNA, 19 nt, Homo sapiens
  misc_RNA (1)...(19): siRNA sense strand
gccaagaguuuguugaaga

SEQ ID NO: 76106 - RNA, 19 nt, Homo sapiens
  misc_RNA (1)...(19): siRNA sense strand
gcacgaaagcaagagauua

SEQ ID NO: 76107 - RNA, 19 nt, Homo sapiens
  misc_RNA (1)...(19): siRNA sense strand
gccaaagaccucaucaaua

SEQ ID NO: 76108 - RNA, 19 nt, Homo sapiens
  misc_RNA (1)...(19): siRNA sense strand
caagggagcagcugugaaa

SEQ ID NO: 76109 - RNA, 19 nt, Homo sapiens
  misc_RNA (1)...(19): siRNA sense strand
caacuaugcuggcuacaag

SEQ ID NO: 76110 - RNA, 19 nt, Homo sapiens
  misc_RNA (1)...(19): siRNA sense strand
gaaagccaguggauaugug

SEQ ID NO: 76111 - RNA, 19 nt, Homo sapiens
  misc_RNA (1)...(19): siRNA sense strand
ucaccuaaauggcauaguu

SEQ ID NO: 76112 - RNA, 19 nt, Homo sapiens
  misc_RNA (1)...(19): siRNA sense strand
acaagaauaugcugccaaa

SEQ ID NO: 76113 - RNA, 19 nt, Homo sapiens
  misc_RNA (1)...(19): siRNA sense strand
ccaagaguuuguugaagaa

SEQ ID NO: 76114 - RNA, 19 nt, Homo sapiens
  misc_RNA (1)...(19): siRNA sense strand
guagacugcuugaagaaau

SEQ ID NO: 76115 - RNA, 19 nt, Homo sapiens
  misc_RNA (1)...(19): siRNA sense strand
ccauggaucugucaacguu

SEQ ID NO: 76116 - RNA, 19 nt, Homo sapiens
  misc_RNA (1)...(19): siRNA sense strand
gaagcacccuaauauugug

SEQ ID NO: 76117 - RNA, 19 nt, Homo sapiens
  misc_RNA (1)...(19): siRNA sense strand
guuaaucauugucaccuaa

SEQ ID NO: 76118 - RNA, 19 nt, Homo sapiens
  misc_RNA (1)...(19): siRNA sense strand
auacaacaauugaggauga

SEQ ID NO: 76119 - RNA, 19 nt, Homo sapiens
  misc_RNA (1)...(19): siRNA sense strand
ugaacuguuugaagacaua

SEQ ID NO: 76120 - RNA, 19 nt, Homo sapiens
  misc_RNA (1)...(19): siRNA sense strand
ggugccaucuugacaacua

SEQ ID NO: 76121 - RNA, 19 nt, Homo sapiens
  misc_RNA (1)...(19): siRNA sense strand
uaaagauccuuauggaaag

SEQ ID NO: 76122 - RNA, 19 nt, Homo sapiens
  misc_RNA (1)...(19): siRNA sense strand
ggaugaagaccaacacaga

SEQ ID NO: 76123 - RNA, 19 nt, Homo sapiens
  misc_RNA (1)...(19): siRNA sense strand
gaguaaaggagucaacuga

SEQ ID NO: 76124 - RNA, 19 nt, Homo sapiens
  misc_RNA (1)...(19): siRNA sense strand
gaaagcaagagauuaucaa

SEQ ID NO: 76125 - RNA, 19 nt, Homo sapiens
  misc_RNA (1)...(19): siRNA sense strand
ggaugaagaugugaaagca

SEQ ID NO: 76126 - RNA, 19 nt, Homo sapiens
  misc_RNA (1)...(19): siRNA sense strand
gaaagagaagcuagaaucu

SEQ ID NO: 76127 - RNA, 19 nt, Homo sapiens
  misc_RNA (1)...(19): siRNA sense strand
gaacaacugaucgaagcua

SEQ ID NO: 76128 - RNA, 19 nt, Homo sapiens
  misc_RNA (1)...(19): siRNA sense strand
caagagaauacuacaguga

SEQ ID NO: 76129 - RNA, 19 nt, Homo sapiens
  misc_RNA (1)...(19): siRNA sense strand
auauuaggcucacacagua

SEQ ID NO: 76130 - RNA, 19 nt, Homo sapiens
  misc_RNA (1)...(19): siRNA sense strand
gcaagagauuaucaaaguc

SEQ ID NO: 76131 - RNA, 19 nt, Homo sapiens
  misc_RNA (1)...(19): siRNA sense strand
cagaagagggcuuucacua

SEQ ID NO: 76132 - RNA, 19 nt, Homo sapiens
  misc_RNA (1)...(19): siRNA sense strand
cuacuugguguuugauuua

SEQ ID NO: 76133 - RNA, 19 nt, Homo sapiens
  misc_RNA (1)...(19): siRNA sense strand
acuaaagggugccaucuug

SEQ ID NO: 76134 - RNA, 19 nt, Homo sapiens
  misc_RNA (1)...(19): siRNA sense strand
ggugagaagauguaugaaa

SEQ ID NO: 76135 - RNA, 19 nt, Homo sapiens
  misc_RNA (1)...(19): siRNA sense strand
cagcaggcgugguuugguu

SEQ ID NO: 76136 - RNA, 19 nt, Homo sapiens
  misc_RNA (1)...(19): siRNA sense strand
gaucaucagaaacuagaaa

SEQ ID NO: 76137 - RNA, 19 nt, Homo sapiens
  misc_RNA (1)...(19): siRNA sense strand
agcaagagauuaucaaagu

SEQ ID NO: 76138 - RNA, 19 nt, Homo sapiens
  misc_RNA (1)...(19): siRNA sense strand
gugagaagauguaugaaaa

SEQ ID NO: 76139 - RNA, 19 nt, Homo sapiens
  misc_RNA (1)...(19): siRNA sense strand
uacuggaggugaacuguuu

SEQ ID NO: 76140 - RNA, 19 nt, Homo sapiens
  misc_RNA (1)...(19): siRNA sense strand
gaaaauuccuacuggacaa

SEQ ID NO: 76141 - RNA, 19 nt, Homo sapiens
  misc_RNA (1)...(19): siRNA sense strand
gcugaugccagucauugua

SEQ ID NO: 76142 - RNA, 19 nt, Homo sapiens
  misc_RNA (1)...(19): siRNA sense strand
gcgacuucaugauagcaua

SEQ ID NO: 76143 - RNA, 19 nt, Homo sapiens
  misc_RNA (1)...(19): siRNA sense strand
ucuaaacccucauguacau

SEQ ID NO: 76144 - RNA, 19 nt, Homo sapiens
  misc_RNA (1)...(19): siRNA sense strand
caagagauuaucaaaguca

SEQ ID NO: 76145 - RNA, 19 nt, Homo sapiens
  misc_RNA (1)...(19): siRNA sense strand
acugagaguucaaauacaa

SEQ ID NO: 76146 - RNA, 19 nt, Homo sapiens
  misc_RNA (1)...(19): siRNA sense strand
ugaagcacccuaauauugu

SEQ ID NO: 76147 - RNA, 19 nt, Homo sapiens
  misc_RNA (1)...(19): siRNA sense strand
gcaguggaaugccaaagac

SEQ ID NO: 76148 - RNA, 19 nt, Homo sapiens
  misc_RNA (1)...(19): siRNA sense strand
gaauaugcugccaaaauua

SEQ ID NO: 76149 - RNA, 19 nt, Homo sapiens
  misc_RNA (1)...(19): siRNA sense strand
auaaaccaauccacacuau

SEQ ID NO: 76150 - RNA, 19 nt, Homo sapiens
  misc_RNA (1)...(19): siRNA sense strand
agaauaugcugccaaaauu

SEQ ID NO: 76151 - RNA, 19 nt, Homo sapiens
  misc_RNA (1)...(19): siRNA sense strand
guggugagaagauguauga

SEQ ID NO: 76152 - RNA, 19 nt, Homo sapiens
  misc_RNA (1)...(19): siRNA sense strand
uggcacaccuggauaucuu

SEQ ID NO: 76153 - RNA, 19 nt, Homo sapiens
  misc_RNA (1)...(19): siRNA sense strand
cagauucuagaaaguguua

SEQ ID NO: 76154 - RNA, 19 nt, Homo sapiens
  misc_RNA (1)...(19): siRNA sense strand
guauacagcagauucuaga

SEQ ID NO: 76155 - RNA, 19 nt, Homo sapiens
  misc_RNA (1)...(19): siRNA sense strand
ccugaagccugagaauuug

SEQ ID NO: 76156 - RNA, 19 nt, Homo sapiens
  misc_RNA (1)...(19): siRNA sense strand
ccaauccacacuauuauuc

SEQ ID NO: 76157 - RNA, 19 nt, Homo sapiens
  misc_RNA (1)...(19): siRNA sense strand
uagacugcuugaagaaauu

SEQ ID NO: 76158 - RNA, 19 nt, Homo sapiens
  misc_RNA (1)...(19): siRNA sense strand
caaagaccucaucaauaaa

SEQ ID NO: 76159 - RNA, 19 nt, Homo sapiens
  misc_RNA (1)...(19): siRNA sense strand
ggaaagccaguggauaugu

SEQ ID NO: 76160 - RNA, 19 nt, Homo sapiens
  misc_RNA (1)...(19): siRNA sense strand
agaaagagaagcuagaauc

SEQ ID NO: 76161 - RNA, 19 nt, Homo sapiens
  misc_RNA (1)...(19): siRNA sense strand
ggcuggagcuuaugauuuu

SEQ ID NO: 76162 - RNA, 19 nt, Homo sapiens
  misc_RNA (1)...(19): siRNA sense strand
caauugaggaugaagaugu

SEQ ID NO: 76163 - RNA, 19 nt, Homo sapiens
  misc_RNA (1)...(19): siRNA sense strand
gcacugaagcacccaugga

SEQ ID NO: 76164 - RNA, 19 nt, Homo sapiens
  misc_RNA (1)...(19): siRNA sense strand
ggugacuccugaagccaaa

SEQ ID NO: 76165 - RNA, 19 nt, Homo sapiens
  misc_RNA (1)...(19): siRNA sense strand
uugaagcacccuaauauug

SEQ ID NO: 76166 - RNA, 19 nt, Homo sapiens
  misc_RNA (1)...(19): siRNA sense strand
ucgaagcuaucaacaaugg

SEQ ID NO: 76167 - RNA, 19 nt, Homo sapiens
  misc_RNA (1)...(19): siRNA sense strand
caacaauugaggaugaaga

SEQ ID NO: 76168 - RNA, 19 nt, Homo sapiens
  misc_RNA (1)...(19): siRNA sense strand
agacauaguggcaagagaa

SEQ ID NO: 76169 - RNA, 19 nt, Homo sapiens
  misc_RNA (1)...(19): siRNA sense strand
caccgauucuacuuugaaa

SEQ ID NO: 76170 - RNA, 19 nt, Homo sapiens
  misc_RNA (1)...(19): siRNA sense strand
acccaggccuuacugcuuu

SEQ ID NO: 76171 - RNA, 19 nt, Homo sapiens
  misc_RNA (1)...(19): siRNA sense strand
cgaaagcaagagauuauca

SEQ ID NO: 76172 - RNA, 19 nt, Homo sapiens
  misc_RNA (1)...(19): siRNA sense strand
cauguggugucauucucua

SEQ ID NO: 76173 - RNA, 19 nt, Homo sapiens
  misc_RNA (1)...(19): siRNA sense strand
ugaugccagucauuguaua

SEQ ID NO: 76174 - RNA, 19 nt, Homo sapiens
  misc_RNA (1)...(19): siRNA sense strand
gaaacuagaaagagaagcu

SEQ ID NO: 76175 - RNA, 19 nt, Homo sapiens
  misc_RNA (1)...(19): siRNA sense strand
cugaagcuuuggguaauuu

SEQ ID NO: 76176 - RNA, 19 nt, Homo sapiens
  misc_RNA (1)...(19): siRNA sense strand
uaucaaagucacugaacaa

SEQ ID NO: 76177 - RNA, 19 nt, Homo sapiens
  misc_RNA (1)...(19): siRNA sense strand
guggugucauucucuauau

SEQ ID NO: 76178 - RNA, 19 nt, Homo sapiens
  misc_RNA (1)...(19): siRNA sense strand
gugggcauguggugucauu

SEQ ID NO: 76179 - RNA, 19 nt, Homo sapiens
  misc_RNA (1)...(19): siRNA sense strand
cacgaaagcaagagauuau

SEQ ID NO: 76180 - RNA, 19 nt, Homo sapiens
  misc_RNA (1)...(19): siRNA sense strand
ggcaagagaauacuacagu

SEQ ID NO: 76181 - RNA, 19 nt, Homo sapiens
  misc_RNA (1)...(19): siRNA sense strand
agacaaugcagucagaaga

SEQ ID NO: 76182 - RNA, 19 nt, Homo sapiens
  misc_RNA (1)...(19): siRNA sense strand
uauauuaggcucacacagu

SEQ ID NO: 76183 - RNA, 19 nt, Homo sapiens
  misc_RNA (1)...(19): siRNA sense strand
ugaaagcacgaaagcaaga

SEQ ID NO: 76184 - RNA, 19 nt, Homo sapiens
  misc_RNA (1)...(19): siRNA sense strand
ggaggugaacuguuugaag

SEQ ID NO: 76185 - RNA, 19 nt, Homo sapiens
  misc_RNA (1)...(19): siRNA sense strand
gccugcauagcauauauua

SEQ ID NO: 76186 - RNA, 19 nt, Homo sapiens
  misc_RNA (1)...(19): siRNA sense strand
caaaagcaauaaaccaauc

SEQ ID NO: 76187 - RNA, 19 nt, Homo sapiens
  misc_RNA (1)...(19): siRNA sense strand
acguaaagauccuuaugga

SEQ ID NO: 76188 - RNA, 19 nt, Homo sapiens
  misc_RNA (1)...(19): siRNA sense strand
gaccugaagccugagaauu

SEQ ID NO: 76189 - RNA, 19 nt, Homo sapiens
  misc_RNA (1)...(19): siRNA sense strand
uacagcagauucuagaaag

SEQ ID NO: 76190 - RNA, 19 nt, Homo sapiens
  misc_RNA (1)...(19): siRNA sense strand
ggugaacuguuugaagaca

SEQ ID NO: 76191 - RNA, 19 nt, Homo sapiens
  misc_RNA (1)...(19): siRNA sense strand
gagaagagaaagcuguuua

SEQ ID NO: 76192 - RNA, 19 nt, Homo sapiens
  misc_RNA (1)...(19): siRNA sense strand
gaagacucauugaacauau

SEQ ID NO: 76193 - RNA, 19 nt, Homo sapiens
  misc_RNA (1)...(19): siRNA sense strand
ggaagacucauugaacaua

SEQ ID NO: 76194 - RNA, 19 nt, Homo sapiens
  misc_RNA (1)...(19): siRNA sense strand
gaagagaaagcuguuuauc

SEQ ID NO: 76195 - RNA, 19 nt, Homo sapiens
  misc_RNA (1)...(19): siRNA sense strand
gcagaugcccaccacugaa

SEQ ID NO: 76196 - RNA, 19 nt, Homo sapiens
  misc_RNA (1)...(19): siRNA sense strand
agagugacuuugacaagau

SEQ ID NO: 76197 - RNA, 19 nt, Homo sapiens
  misc_RNA (1)...(19): siRNA sense strand
aagagugacuuugacaaga

SEQ ID NO: 76198 - RNA, 19 nt, Homo sapiens
  misc_RNA (1)...(19): siRNA sense strand
gagugacuuugacaagaug

SEQ ID NO: 76199 - RNA, 19 nt, Homo sapiens
  misc_RNA (1)...(19): siRNA sense strand
ccugugauguggaggaaau

SEQ ID NO: 76200 - RNA, 19 nt, Homo sapiens
  misc_RNA (1)...(19): siRNA sense strand
ggagaagagaaagcuguuu

SEQ ID NO: 76201 - RNA, 19 nt, Homo sapiens
  misc_RNA (1)...(19): siRNA sense strand
ucauugaacauaugcaaga

SEQ ID NO: 76202 - RNA, 19 nt, Homo sapiens
  misc_RNA (1)...(19): siRNA sense strand
ccucuucccaggacauuaa

SEQ ID NO: 76203 - RNA, 19 nt, Homo sapiens
  misc_RNA (1)...(19): siRNA sense strand
cagaugcccaccacugaaa

SEQ ID NO: 76204 - RNA, 19 nt, Homo sapiens
  misc_RNA (1)...(19): siRNA sense strand
uuggagacaucccacaaug

SEQ ID NO: 76205 - RNA, 19 nt, Homo sapiens
  misc_RNA (1)...(19): siRNA sense strand
cauugaacauaugcaagaa

SEQ ID NO: 76206 - RNA, 19 nt, Homo sapiens
  misc_RNA (1)...(19): siRNA sense strand
uuggaagacucauugaaca

SEQ ID NO: 76207 - RNA, 19 nt, Homo sapiens
  misc_RNA (1)...(19): siRNA sense strand
agaagagaaagcuguuuau

SEQ ID NO: 76208 - RNA, 19 nt, Homo sapiens
  misc_RNA (1)...(19): siRNA sense strand
ugacuuugacaagauguuu

SEQ ID NO: 76209 - RNA, 19 nt, Homo sapiens
  misc_RNA (1)...(19): siRNA sense strand
aagacucauugaacauaug

SEQ ID NO: 76210 - RNA, 19 nt, Homo sapiens
  misc_RNA (1)...(19): siRNA sense strand
gagaagagaaagcuguuua

SEQ ID NO: 76211 - RNA, 19 nt, Homo sapiens
  misc_RNA (1)...(19): siRNA sense strand
gaagacucauugaacauau

SEQ ID NO: 76212 - RNA, 19 nt, Homo sapiens
  misc_RNA (1)...(19): siRNA sense strand
ggaagacucauugaacaua

SEQ ID NO: 76213 - RNA, 19 nt, Homo sapiens
  misc_RNA (1)...(19): siRNA sense strand
gaagagaaagcuguuuauc

SEQ ID NO: 76214 - RNA, 19 nt, Homo sapiens
  misc_RNA (1)...(19): siRNA sense strand
gcagaugcccaccacugaa

SEQ ID NO: 76215 - RNA, 19 nt, Homo sapiens
  misc_RNA (1)...(19): siRNA sense strand
agagugacuuugacaagau

SEQ ID NO: 76216 - RNA, 19 nt, Homo sapiens
  misc_RNA (1)...(19): siRNA sense strand
aagagugacuuugacaaga

SEQ ID NO: 76217 - RNA, 19 nt, Homo sapiens
  misc_RNA (1)...(19): siRNA sense strand
gagugacuuugacaagaug

SEQ ID NO: 76218 - RNA, 19 nt, Homo sapiens
  misc_RNA (1)...(19): siRNA sense strand
ccugugauguggaggaaau

SEQ ID NO: 76219 - RNA, 19 nt, Homo sapiens
  misc_RNA (1)...(19): siRNA sense strand
ggagaagagaaagcuguuu

SEQ ID NO: 76220 - RNA, 19 nt, Homo sapiens
  misc_RNA (1)...(19): siRNA sense strand
ucauugaacauaugcaaga

SEQ ID NO: 76221 - RNA, 19 nt, Homo sapiens
  misc_RNA (1)...(19): siRNA sense strand
ccucuucccaggacauuaa

SEQ ID NO: 76222 - RNA, 19 nt, Homo sapiens
  misc_RNA (1)...(19): siRNA sense strand
cagaugcccaccacugaaa

SEQ ID NO: 76223 - RNA, 19 nt, Homo sapiens
  misc_RNA (1)...(19): siRNA sense strand
uuggagacaucccacaaug

SEQ ID NO: 76224 - RNA, 19 nt, Homo sapiens
  misc_RNA (1)...(19): siRNA sense strand
cauugaacauaugcaagaa

SEQ ID NO: 76225 - RNA, 19 nt, Homo sapiens
  misc_RNA (1)...(19): siRNA sense strand
uuggaagacucauugaaca

SEQ ID NO: 76226 - RNA, 19 nt, Homo sapiens
  misc_RNA (1)...(19): siRNA sense strand
agaagagaaagcuguuuau

SEQ ID NO: 76227 - RNA, 19 nt, Homo sapiens
  misc_RNA (1)...(19): siRNA sense strand
ugacuuugacaagauguuu

SEQ ID NO: 76228 - RNA, 19 nt, Homo sapiens
  misc_RNA (1)...(19): siRNA sense strand
aagacucauugaacauaug

SEQ ID NO: 76229 - RNA, 19 nt, Homo sapiens
  misc_RNA (1)...(19): siRNA sense strand
gagaagagaaagcuguuua

SEQ ID NO: 76230 - RNA, 19 nt, Homo sapiens
  misc_RNA (1)...(19): siRNA sense strand
gaagacucauugaacauau

SEQ ID NO: 76231 - RNA, 19 nt, Homo sapiens
  misc_RNA (1)...(19): siRNA sense strand
ggaagacucauugaacaua

SEQ ID NO: 76232 - RNA, 19 nt, Homo sapiens
  misc_RNA (1)...(19): siRNA sense strand
gaagagaaagcuguuuauc

SEQ ID NO: 76233 - RNA, 19 nt, Homo sapiens
  misc_RNA (1)...(19): siRNA sense strand
gcagaugcccaccacugaa

SEQ ID NO: 76234 - RNA, 19 nt, Homo sapiens
  misc_RNA (1)...(19): siRNA sense strand
agagugacuuugacaagau

SEQ ID NO: 76235 - RNA, 19 nt, Homo sapiens
  misc_RNA (1)...(19): siRNA sense strand
aagagugacuuugacaaga

SEQ ID NO: 76236 - RNA, 19 nt, Homo sapiens
  misc_RNA (1)...(19): siRNA sense strand
gagugacuuugacaagaug

SEQ ID NO: 76237 - RNA, 19 nt, Homo sapiens
  misc_RNA (1)...(19): siRNA sense strand
ccugugauguggaggaaau

SEQ ID NO: 76238 - RNA, 19 nt, Homo sapiens
  misc_RNA (1)...(19): siRNA sense strand
ggagaagagaaagcuguuu

SEQ ID NO: 76239 - RNA, 19 nt, Homo sapiens
  misc_RNA (1)...(19): siRNA sense strand
ucauugaacauaugcaaga

SEQ ID NO: 76240 - RNA, 19 nt, Homo sapiens
  misc_RNA (1)...(19): siRNA sense strand
ccucuucccaggacauuaa

SEQ ID NO: 76241 - RNA, 19 nt, Homo sapiens
  misc_RNA (1)...(19): siRNA sense strand
cagaugcccaccacugaaa

SEQ ID NO: 76242 - RNA, 19 nt, Homo sapiens
  misc_RNA (1)...(19): siRNA sense strand
uuggagacaucccacaaug

SEQ ID NO: 76243 - RNA, 19 nt, Homo sapiens
  misc_RNA (1)...(19): siRNA sense strand
cauugaacauaugcaagaa

SEQ ID NO: 76244 - RNA, 19 nt, Homo sapiens
  misc_RNA (1)...(19): siRNA sense strand
uuggaagacucauugaaca

SEQ ID NO: 76245 - RNA, 19 nt, Homo sapiens
  misc_RNA (1)...(19): siRNA sense strand
agaagagaaagcuguuuau

SEQ ID NO: 76246 - RNA, 19 nt, Homo sapiens
  misc_RNA (1)...(19): siRNA sense strand
ugacuuugacaagauguuu

SEQ ID NO: 76247 - RNA, 19 nt, Homo sapiens
  misc_RNA (1)...(19): siRNA sense strand
aagacucauugaacauaug

SEQ ID NO: 76248 - RNA, 19 nt, Homo sapiens
  misc_RNA (1)...(19): siRNA sense strand
gagaagagaaagcuguuua

SEQ ID NO: 76249 - RNA, 19 nt, Homo sapiens
  misc_RNA (1)...(19): siRNA sense strand
gaagacucauugaacauau

SEQ ID NO: 76250 - RNA, 19 nt, Homo sapiens
  misc_RNA (1)...(19): siRNA sense strand
ggaagacucauugaacaua

SEQ ID NO: 76251 - RNA, 19 nt, Homo sapiens
  misc_RNA (1)...(19): siRNA sense strand
gaagagaaagcuguuuauc

SEQ ID NO: 76252 - RNA, 19 nt, Homo sapiens
  misc_RNA (1)...(19): siRNA sense strand
gcagaugcccaccacugaa

SEQ ID NO: 76253 - RNA, 19 nt, Homo sapiens
  misc_RNA (1)...(19): siRNA sense strand
agagugacuuugacaagau

SEQ ID NO: 76254 - RNA, 19 nt, Homo sapiens
  misc_RNA (1)...(19): siRNA sense strand
aagagugacuuugacaaga

SEQ ID NO: 76255 - RNA, 19 nt, Homo sapiens
  misc_RNA (1)...(19): siRNA sense strand
gagugacuuugacaagaug

SEQ ID NO: 76256 - RNA, 19 nt, Homo sapiens
  misc_RNA (1)...(19): siRNA sense strand
ccugugauguggaggaaau

SEQ ID NO: 76257 - RNA, 19 nt, Homo sapiens
  misc_RNA (1)...(19): siRNA sense strand
ggagaagagaaagcuguuu

SEQ ID NO: 76258 - RNA, 19 nt, Homo sapiens
  misc_RNA (1)...(19): siRNA sense strand
ucauugaacauaugcaaga

SEQ ID NO: 76259 - RNA, 19 nt, Homo sapiens
  misc_RNA (1)...(19): siRNA sense strand
ccucuucccaggacauuaa

SEQ ID NO: 76260 - RNA, 19 nt, Homo sapiens
  misc_RNA (1)...(19): siRNA sense strand
cagaugcccaccacugaaa

SEQ ID NO: 76261 - RNA, 19 nt, Homo sapiens
  misc_RNA (1)...(19): siRNA sense strand
uuggagacaucccacaaug

SEQ ID NO: 76262 - RNA, 19 nt, Homo sapiens
  misc_RNA (1)...(19): siRNA sense strand
cauugaacauaugcaagaa

SEQ ID NO: 76263 - RNA, 19 nt, Homo sapiens
  misc_RNA (1)...(19): siRNA sense strand
uuggaagacucauugaaca

SEQ ID NO: 76264 - RNA, 19 nt, Homo sapiens
  misc_RNA (1)...(19): siRNA sense strand
agaagagaaagcuguuuau

SEQ ID NO: 76265 - RNA, 19 nt, Homo sapiens
  misc_RNA (1)...(19): siRNA sense strand
ugacuuugacaagauguuu

SEQ ID NO: 76266 - RNA, 19 nt, Homo sapiens
  misc_RNA (1)...(19): siRNA sense strand
aagacucauugaacauaug

SEQ ID NO: 76267 - RNA, 19 nt, Homo sapiens
  misc_RNA (1)...(19): siRNA sense strand
gagaagagaaagcuguuua

SEQ ID NO: 76268 - RNA, 19 nt, Homo sapiens
  misc_RNA (1)...(19): siRNA sense strand
gaagacucauugaacauau

SEQ ID NO: 76269 - RNA, 19 nt, Homo sapiens
  misc_RNA (1)...(19): siRNA sense strand
ggaagacucauugaacaua

SEQ ID NO: 76270 - RNA, 19 nt, Homo sapiens
  misc_RNA (1)...(19): siRNA sense strand
gaagagaaagcuguuuauc

SEQ ID NO: 76271 - RNA, 19 nt, Homo sapiens
  misc_RNA (1)...(19): siRNA sense strand
gcagaugcccaccacugaa

SEQ ID NO: 76272 - RNA, 19 nt, Homo sapiens
  misc_RNA (1)...(19): siRNA sense strand
agagugacuuugacaagau

SEQ ID NO: 76273 - RNA, 19 nt, Homo sapiens
  misc_RNA (1)...(19): siRNA sense strand
aagagugacuuugacaaga

SEQ ID NO: 76274 - RNA, 19 nt, Homo sapiens
  misc_RNA (1)...(19): siRNA sense strand
gagugacuuugacaagaug

SEQ ID NO: 76275 - RNA, 19 nt, Homo sapiens
  misc_RNA (1)...(19): siRNA sense strand
ccugugauguggaggaaau

SEQ ID NO: 76276 - RNA, 19 nt, Homo sapiens
  misc_RNA (1)...(19): siRNA sense strand
ggagaagagaaagcuguuu

SEQ ID NO: 76277 - RNA, 19 nt, Homo sapiens
  misc_RNA (1)...(19): siRNA sense strand
ucauugaacauaugcaaga

SEQ ID NO: 76278 - RNA, 19 nt, Homo sapiens
  misc_RNA (1)...(19): siRNA sense strand
ccucuucccaggacauuaa

SEQ ID NO: 76279 - RNA, 19 nt, Homo sapiens
  misc_RNA (1)...(19): siRNA sense strand
cagaugcccaccacugaaa

SEQ ID NO: 76280 - RNA, 19 nt, Homo sapiens
  misc_RNA (1)...(19): siRNA sense strand
uuggagacaucccacaaug

SEQ ID NO: 76281 - RNA, 19 nt, Homo sapiens
  misc_RNA (1)...(19): siRNA sense strand
cauugaacauaugcaagaa

SEQ ID NO: 76282 - RNA, 19 nt, Homo sapiens
  misc_RNA (1)...(19): siRNA sense strand
uuggaagacucauugaaca

SEQ ID NO: 76283 - RNA, 19 nt, Homo sapiens
  misc_RNA (1)...(19): siRNA sense strand
agaagagaaagcuguuuau

SEQ ID NO: 76284 - RNA, 19 nt, Homo sapiens
  misc_RNA (1)...(19): siRNA sense strand
ugacuuugacaagauguuu

SEQ ID NO: 76285 - RNA, 19 nt, Homo sapiens
  misc_RNA (1)...(19): siRNA sense strand
aagacucauugaacauaug

SEQ ID NO: 76286 - RNA, 19 nt, Homo sapiens
  misc_RNA (1)...(19): siRNA sense strand
gcacuucacuggagagaaa

SEQ ID NO: 76287 - RNA, 19 nt, Homo sapiens
  misc_RNA (1)...(19): siRNA sense strand
aagagaaacugcagaauuu

SEQ ID NO: 76288 - RNA, 19 nt, Homo sapiens
  misc_RNA (1)...(19): siRNA sense strand
gcacugguguugagcaaug

SEQ ID NO: 76289 - RNA, 19 nt, Homo sapiens
  misc_RNA (1)...(19): siRNA sense strand
caagagaaacugcagaauu

SEQ ID NO: 76290 - RNA, 19 nt, Homo sapiens
  misc_RNA (1)...(19): siRNA sense strand
gccuugcacuccugaauuu

SEQ ID NO: 76291 - RNA, 19 nt, Homo sapiens
  misc_RNA (1)...(19): siRNA sense strand
ugacguccauguucuaugu

SEQ ID NO: 76292 - RNA, 19 nt, Homo sapiens
  misc_RNA (1)...(19): siRNA sense strand
gcacaggaaaugcaagaga

SEQ ID NO: 76293 - RNA, 19 nt, Homo sapiens
  misc_RNA (1)...(19): siRNA sense strand
cacaggaaaugcaagagaa

SEQ ID NO: 76294 - RNA, 19 nt, Homo sapiens
  misc_RNA (1)...(19): siRNA sense strand
gcagaauuuugcacaguua

SEQ ID NO: 76295 - RNA, 19 nt, Homo sapiens
  misc_RNA (1)...(19): siRNA sense strand
gcccaagccuacagaacaa

SEQ ID NO: 76296 - RNA, 19 nt, Homo sapiens
  misc_RNA (1)...(19): siRNA sense strand
agagaaagaacuggaauuu

SEQ ID NO: 76297 - RNA, 19 nt, Homo sapiens
  misc_RNA (1)...(19): siRNA sense strand
ugaccagacugcacaggaa

SEQ ID NO: 76298 - RNA, 19 nt, Homo sapiens
  misc_RNA (1)...(19): siRNA sense strand
guuguugagcgaauuguua

SEQ ID NO: 76299 - RNA, 19 nt, Homo sapiens
  misc_RNA (1)...(19): siRNA sense strand
gagagaaagaacuggaauu

SEQ ID NO: 76300 - RNA, 19 nt, Homo sapiens
  misc_RNA (1)...(19): siRNA sense strand
gcuaugacguccauguucu

SEQ ID NO: 76301 - RNA, 19 nt, Homo sapiens
  misc_RNA (1)...(19): siRNA sense strand
ggacaucaucaccuuggaa

SEQ ID NO: 76302 - RNA, 19 nt, Homo sapiens
  misc_RNA (1)...(19): siRNA sense strand
caucaucaccuuggaaaug

SEQ ID NO: 76303 - RNA, 19 nt, Homo sapiens
  misc_RNA (1)...(19): siRNA sense strand
ggaccacaguacucuaguc

SEQ ID NO: 76304 - RNA, 19 nt, Homo sapiens
  misc_RNA (1)...(19): siRNA sense strand
gacaucaucaccuuggaaa

SEQ ID NO: 76305 - RNA, 19 nt, Homo sapiens
  misc_RNA (1)...(19): siRNA sense strand
ucaacuugcugccuaagag

SEQ ID NO: 76306 - RNA, 19 nt, Homo sapiens
  misc_RNA (1)...(19): siRNA sense strand
caucaucaggaaacucuaa

SEQ ID NO: 76307 - RNA, 19 nt, Homo sapiens
  misc_RNA (1)...(19): siRNA sense strand
ggagagaaagaacuggaau

SEQ ID NO: 76308 - RNA, 19 nt, Homo sapiens
  misc_RNA (1)...(19): siRNA sense strand
gaguggugcuagccaaaca

SEQ ID NO: 76309 - RNA, 19 nt, Homo sapiens
  misc_RNA (1)...(19): siRNA sense strand
ggaaaugcaagagaaacug

SEQ ID NO: 76310 - RNA, 19 nt, Homo sapiens
  misc_RNA (1)...(19): siRNA sense strand
gaccagacugcacaggaaa

SEQ ID NO: 76311 - RNA, 19 nt, Homo sapiens
  misc_RNA (1)...(19): siRNA sense strand
gaccacaguacucuaguca

SEQ ID NO: 76312 - RNA, 19 nt, Homo sapiens
  misc_RNA (1)...(19): siRNA sense strand
gucacccucuucaagcuuu

SEQ ID NO: 76313 - RNA, 19 nt, Homo sapiens
  misc_RNA (1)...(19): siRNA sense strand
gcucauccaggccaaagug

SEQ ID NO: 76314 - RNA, 19 nt, Homo sapiens
  misc_RNA (1)...(19): siRNA sense strand
gcaagagaaacugcagaau

SEQ ID NO: 76315 - RNA, 19 nt, Homo sapiens
  misc_RNA (1)...(19): siRNA sense strand
guugagcaaugugcacuuc

SEQ ID NO: 76316 - RNA, 19 nt, Homo sapiens
  misc_RNA (1)...(19): siRNA sense strand
uagcacugguguugagcaa

SEQ ID NO: 76317 - RNA, 19 nt, Homo sapiens
  misc_RNA (1)...(19): siRNA sense strand
gcaguuucagccagaaugu

SEQ ID NO: 76318 - RNA, 19 nt, Homo sapiens
  misc_RNA (1)...(19): siRNA sense strand
gggcuaugacguccauguu

SEQ ID NO: 76319 - RNA, 19 nt, Homo sapiens
  misc_RNA (1)...(19): siRNA sense strand
gaauguggaacuccucaac

SEQ ID NO: 76320 - RNA, 19 nt, Homo sapiens
  misc_RNA (1)...(19): siRNA sense strand
cagcuguuguugagcgaau

SEQ ID NO: 76321 - RNA, 19 nt, Homo sapiens
  misc_RNA (1)...(19): siRNA sense strand
guacucuagucacccucuu

SEQ ID NO: 76322 - RNA, 19 nt, Homo sapiens
  misc_RNA (1)...(19): siRNA sense strand
acaggaaaugcaagagaaa

SEQ ID NO: 76323 - RNA, 19 nt, Homo sapiens
  misc_RNA (1)...(19): siRNA sense strand
gagaaacugcagaauuuug

SEQ ID NO: 76324 - RNA, 19 nt, Homo sapiens
  misc_RNA (1)...(19): siRNA sense strand
guugagcgaauuguuagaa

SEQ ID NO: 76325 - RNA, 19 nt, Homo sapiens
  misc_RNA (1)...(19): siRNA sense strand
gccuagcacugguguugag

SEQ ID NO: 76326 - RNA, 19 nt, Homo sapiens
  misc_RNA (1)...(19): siRNA sense strand
aggccaaagugggcaguuu

SEQ ID NO: 76327 - RNA, 19 nt, Homo sapiens
  misc_RNA (1)...(19): siRNA sense strand
ggccaaagugggcaguuuc

SEQ ID NO: 76328 - RNA, 19 nt, Homo sapiens
  misc_RNA (1)...(19): siRNA sense strand
acuuccagcuggcauauag

SEQ ID NO: 76329 - RNA, 19 nt, Homo sapiens
  misc_RNA (1)...(19): siRNA sense strand
gcaaggagaugucugaaua

SEQ ID NO: 76330 - RNA, 19 nt, Homo sapiens
  misc_RNA (1)...(19): siRNA sense strand
gcacuucacuggagagaaa

SEQ ID NO: 76331 - RNA, 19 nt, Homo sapiens
  misc_RNA (1)...(19): siRNA sense strand
aagagaaacugcagaauuu

SEQ ID NO: 76332 - RNA, 19 nt, Homo sapiens
  misc_RNA (1)...(19): siRNA sense strand
gcacugguguugagcaaug

SEQ ID NO: 76333 - RNA, 19 nt, Homo sapiens
  misc_RNA (1)...(19): siRNA sense strand
caagagaaacugcagaauu

SEQ ID NO: 76334 - RNA, 19 nt, Homo sapiens
  misc_RNA (1)...(19): siRNA sense strand
ggagagugaugccgguaaa

SEQ ID NO: 76335 - RNA, 19 nt, Homo sapiens
  misc_RNA (1)...(19): siRNA sense strand
ucaaggaucgggaagguua

SEQ ID NO: 76336 - RNA, 19 nt, Homo sapiens
  misc_RNA (1)...(19): siRNA sense strand
gccuugcacuccugaauuu

SEQ ID NO: 76337 - RNA, 19 nt, Homo sapiens
  misc_RNA (1)...(19): siRNA sense strand
ugacguccauguucuaugu

SEQ ID NO: 76338 - RNA, 19 nt, Homo sapiens
  misc_RNA (1)...(19): siRNA sense strand
ugaacgcacuuaucaagga

SEQ ID NO: 76339 - RNA, 19 nt, Homo sapiens
  misc_RNA (1)...(19): siRNA sense strand
gaacgcacuuaucaaggau

SEQ ID NO: 76340 - RNA, 19 nt, Homo sapiens
  misc_RNA (1)...(19): siRNA sense strand
gcacaggaaaugcaagaga

SEQ ID NO: 76341 - RNA, 19 nt, Homo sapiens
  misc_RNA (1)...(19): siRNA sense strand
ccaacaagauggaaagaac

SEQ ID NO: 76342 - RNA, 19 nt, Homo sapiens
  misc_RNA (1)...(19): siRNA sense strand
cacaggaaaugcaagagaa

SEQ ID NO: 76343 - RNA, 19 nt, Homo sapiens
  misc_RNA (1)...(19): siRNA sense strand
caucgaggcucuugcucaa

SEQ ID NO: 76344 - RNA, 19 nt, Homo sapiens
  misc_RNA (1)...(19): siRNA sense strand
gcagaauuuugcacaguua

SEQ ID NO: 76345 - RNA, 19 nt, Homo sapiens
  misc_RNA (1)...(19): siRNA sense strand
gcccaagccuacagaacaa

SEQ ID NO: 76346 - RNA, 19 nt, Homo sapiens
  misc_RNA (1)...(19): siRNA sense strand
agagaaagaacuggaauuu

SEQ ID NO: 76347 - RNA, 19 nt, Homo sapiens
  misc_RNA (1)...(19): siRNA sense strand
ugaccagacugcacaggaa

SEQ ID NO: 76348 - RNA, 19 nt, Homo sapiens
  misc_RNA (1)...(19): siRNA sense strand
ugagcgggcuugugauaug

SEQ ID NO: 76349 - RNA, 19 nt, Homo sapiens
  misc_RNA (1)...(19): siRNA sense strand
guuguugagcgaauuguua

SEQ ID NO: 76350 - RNA, 19 nt, Homo sapiens
  misc_RNA (1)...(19): siRNA sense strand
gagagaaagaacuggaauu

SEQ ID NO: 76351 - RNA, 19 nt, Homo sapiens
  misc_RNA (1)...(19): siRNA sense strand
gcaugcauccucaucauca

SEQ ID NO: 76352 - RNA, 19 nt, Homo sapiens
  misc_RNA (1)...(19): siRNA sense strand
ggaaagaaccacgcaggau

SEQ ID NO: 76353 - RNA, 19 nt, Homo sapiens
  misc_RNA (1)...(19): siRNA sense strand
gcuaugacguccauguucu

SEQ ID NO: 76354 - RNA, 19 nt, Homo sapiens
  misc_RNA (1)...(19): siRNA sense strand
ggacaucaucaccuuggaa

SEQ ID NO: 76355 - RNA, 19 nt, Homo sapiens
  misc_RNA (1)...(19): siRNA sense strand
caucaucaccuuggaaaug

SEQ ID NO: 76356 - RNA, 19 nt, Homo sapiens
  misc_RNA (1)...(19): siRNA sense strand
ggaccacaguacucuaguc

SEQ ID NO: 76357 - RNA, 19 nt, Homo sapiens
  misc_RNA (1)...(19): siRNA sense strand
gacaugauaugcggcuaug

SEQ ID NO: 76358 - RNA, 19 nt, Homo sapiens
  misc_RNA (1)...(19): siRNA sense strand
gagugaugccgguaaagaa

SEQ ID NO: 76359 - RNA, 19 nt, Homo sapiens
  misc_RNA (1)...(19): siRNA sense strand
gacaucaucaccuuggaaa

SEQ ID NO: 76360 - RNA, 19 nt, Homo sapiens
  misc_RNA (1)...(19): siRNA sense strand
aaagaaaaguugccgaaga

SEQ ID NO: 76361 - RNA, 19 nt, Homo sapiens
  misc_RNA (1)...(19): siRNA sense strand
ucaacuugcugccuaagag

SEQ ID NO: 76362 - RNA, 19 nt, Homo sapiens
  misc_RNA (1)...(19): siRNA sense strand
caucaucaggaaacucuaa

SEQ ID NO: 76363 - RNA, 19 nt, Homo sapiens
  misc_RNA (1)...(19): siRNA sense strand
gaaaaguugccgaagauga

SEQ ID NO: 76364 - RNA, 19 nt, Homo sapiens
  misc_RNA (1)...(19): siRNA sense strand
ggagagaaagaacuggaau

SEQ ID NO: 76365 - RNA, 19 nt, Homo sapiens
  misc_RNA (1)...(19): siRNA sense strand
aaacgagguuccugguaca

SEQ ID NO: 76366 - RNA, 19 nt, Homo sapiens
  misc_RNA (1)...(19): siRNA sense strand
gaauacugcagcacucugu

SEQ ID NO: 76367 - RNA, 19 nt, Homo sapiens
  misc_RNA (1)...(19): siRNA sense strand
gaguggugcuagccaaaca

SEQ ID NO: 76368 - RNA, 19 nt, Homo sapiens
  misc_RNA (1)...(19): siRNA sense strand
ccaaacgagguuccuggua

SEQ ID NO: 76369 - RNA, 19 nt, Homo sapiens
  misc_RNA (1)...(19): siRNA sense strand
ggugaacgcacuuaucaag

SEQ ID NO: 76370 - RNA, 19 nt, Homo sapiens
  misc_RNA (1)...(19): siRNA sense strand
uggccgacaugcugguuaa

SEQ ID NO: 76371 - RNA, 19 nt, Homo sapiens
  misc_RNA (1)...(19): siRNA sense strand
ggaaaugcaagagaaacug

SEQ ID NO: 76372 - RNA, 19 nt, Homo sapiens
  misc_RNA (1)...(19): siRNA sense strand
uaucaaggaucgggaaggu

SEQ ID NO: 76373 - RNA, 19 nt, Homo sapiens
  misc_RNA (1)...(19): siRNA sense strand
gaccagacugcacaggaaa

SEQ ID NO: 76374 - RNA, 19 nt, Homo sapiens
  misc_RNA (1)...(19): siRNA sense strand
ggugcaaggagaugucuga

SEQ ID NO: 76375 - RNA, 19 nt, Homo sapiens
  misc_RNA (1)...(19): siRNA sense strand
gggaguguguggcaugcau

SEQ ID NO: 76376 - RNA, 19 nt, Homo sapiens
  misc_RNA (1)...(19): siRNA sense strand
gucacccucuucaagcuuu

SEQ ID NO: 76377 - RNA, 19 nt, Homo sapiens
  misc_RNA (1)...(19): siRNA sense strand
gaccacaguacucuaguca

SEQ ID NO: 76378 - RNA, 19 nt, Homo sapiens
  misc_RNA (1)...(19): siRNA sense strand
caggacacccucccacaug

SEQ ID NO: 76379 - RNA, 19 nt, Homo sapiens
  misc_RNA (1)...(19): siRNA sense strand
uagcacugguguugagcaa

SEQ ID NO: 76380 - RNA, 19 nt, Homo sapiens
  misc_RNA (1)...(19): siRNA sense strand
aggacacccucccacauga

SEQ ID NO: 76381 - RNA, 19 nt, Homo sapiens
  misc_RNA (1)...(19): siRNA sense strand
uuucugagcgggcuuguga

SEQ ID NO: 76382 - RNA, 19 nt, Homo sapiens
  misc_RNA (1)...(19): siRNA sense strand
ggcuaugccugccucaaag

SEQ ID NO: 76383 - RNA, 19 nt, Homo sapiens
  misc_RNA (1)...(19): siRNA sense strand
cggcuaugccugccucaaa

SEQ ID NO: 76384 - RNA, 19 nt, Homo sapiens
  misc_RNA (1)...(19): siRNA sense strand
gcaagagaaacugcagaau

SEQ ID NO: 76385 - RNA, 19 nt, Homo sapiens
  misc_RNA (1)...(19): siRNA sense strand
gcucauccaggccaaagug

SEQ ID NO: 76386 - RNA, 19 nt, Homo sapiens
  misc_RNA (1)...(19): siRNA sense strand
guugagcaaugugcacuuc

SEQ ID NO: 76387 - RNA, 19 nt, Homo sapiens
  misc_RNA (1)...(19): siRNA sense strand
gggcuaugacguccauguu

SEQ ID NO: 76388 - RNA, 19 nt, Homo sapiens
  misc_RNA (1)...(19): siRNA sense strand
aaggugaacgcacuuauca

SEQ ID NO: 76389 - RNA, 19 nt, Homo sapiens
  misc_RNA (1)...(19): siRNA sense strand
ucugagcgggcuugugaua

SEQ ID NO: 76390 - RNA, 19 nt, Homo sapiens
  misc_RNA (1)...(19): siRNA sense strand
gcaguuucagccagaaugu

SEQ ID NO: 76391 - RNA, 19 nt, Homo sapiens
  misc_RNA (1)...(19): siRNA sense strand
gaauguggaacuccucaac

SEQ ID NO: 76392 - RNA, 19 nt, Homo sapiens
  misc_RNA (1)...(19): siRNA sense strand
cagcuguuguugagcgaau

SEQ ID NO: 76393 - RNA, 19 nt, Homo sapiens
  misc_RNA (1)...(19): siRNA sense strand
guacucuagucacccucuu

SEQ ID NO: 76394 - RNA, 19 nt, Homo sapiens
  misc_RNA (1)...(19): siRNA sense strand
aagaaaaguugccgaagau

SEQ ID NO: 76395 - RNA, 19 nt, Homo sapiens
  misc_RNA (1)...(19): siRNA sense strand
ccgacaugcugguuaaggu

SEQ ID NO: 76396 - RNA, 19 nt, Homo sapiens
  misc_RNA (1)...(19): siRNA sense strand
cccacgcgcucagacauga

SEQ ID NO: 76397 - RNA, 19 nt, Homo sapiens
  misc_RNA (1)...(19): siRNA sense strand
acaggaaaugcaagagaaa

SEQ ID NO: 76398 - RNA, 19 nt, Homo sapiens
  misc_RNA (1)...(19): siRNA sense strand
gagcgggcuugugauaugc

SEQ ID NO: 76399 - RNA, 19 nt, Homo sapiens
  misc_RNA (1)...(19): siRNA sense strand
guugagcgaauuguuagaa

SEQ ID NO: 76400 - RNA, 19 nt, Homo sapiens
  misc_RNA (1)...(19): siRNA sense strand
gagaaacugcagaauuuug

SEQ ID NO: 76401 - RNA, 19 nt, Homo sapiens
  misc_RNA (1)...(19): siRNA sense strand
gccuagcacugguguugag

SEQ ID NO: 76402 - RNA, 19 nt, Homo sapiens
  misc_RNA (1)...(19): siRNA sense strand
aggccaaagugggcaguuu

SEQ ID NO: 76403 - RNA, 19 nt, Homo sapiens
  misc_RNA (1)...(19): siRNA sense strand
uggcaugcauccucaucau

SEQ ID NO: 76404 - RNA, 19 nt, Homo sapiens
  misc_RNA (1)...(19): siRNA sense strand
guacaucgaggcucuugcu

SEQ ID NO: 76405 - RNA, 19 nt, Homo sapiens
  misc_RNA (1)...(19): siRNA sense strand
ggccaaagugggcaguuuc

SEQ ID NO: 76406 - RNA, 19 nt, Homo sapiens
  misc_RNA (1)...(19): siRNA sense strand
acuuccagcuggcauauag

SEQ ID NO: 76407 - RNA, 19 nt, Homo sapiens
  misc_RNA (1)...(19): siRNA sense strand
gccgccaccucuaccuguu

SEQ ID NO: 76408 - RNA, 19 nt, Homo sapiens
  misc_RNA (1)...(19): siRNA sense strand
guuguugagcgaauuguua

SEQ ID NO: 76409 - RNA, 19 nt, Homo sapiens
  misc_RNA (1)...(19): siRNA sense strand
gcaugcauccucaucauca

SEQ ID NO: 76410 - RNA, 19 nt, Homo sapiens
  misc_RNA (1)...(19): siRNA sense strand
ggacaucaucaccuuggaa

SEQ ID NO: 76411 - RNA, 19 nt, Homo sapiens
  misc_RNA (1)...(19): siRNA sense strand
caucaucaccuuggaaaug

SEQ ID NO: 76412 - RNA, 19 nt, Homo sapiens
  misc_RNA (1)...(19): siRNA sense strand
gacaucaucaccuuggaaa

SEQ ID NO: 76413 - RNA, 19 nt, Homo sapiens
  misc_RNA (1)...(19): siRNA sense strand
caucaucaggaaacucuaa

SEQ ID NO: 76414 - RNA, 19 nt, Homo sapiens
  misc_RNA (1)...(19): siRNA sense strand
ucaacuugcugccuaagag

SEQ ID NO: 76415 - RNA, 19 nt, Homo sapiens
  misc_RNA (1)...(19): siRNA sense strand
gaguggugcuagccaaaca

SEQ ID NO: 76416 - RNA, 19 nt, Homo sapiens
  misc_RNA (1)...(19): siRNA sense strand
gggaguguguggcaugcau

SEQ ID NO: 76417 - RNA, 19 nt, Homo sapiens
  misc_RNA (1)...(19): siRNA sense strand
gcucauccaggccaaagug

SEQ ID NO: 76418 - RNA, 19 nt, Homo sapiens
  misc_RNA (1)...(19): siRNA sense strand
gcaguuucagccagaaugu

SEQ ID NO: 76419 - RNA, 19 nt, Homo sapiens
  misc_RNA (1)...(19): siRNA sense strand
gaauguggaacuccucaac

SEQ ID NO: 76420 - RNA, 19 nt, Homo sapiens
  misc_RNA (1)...(19): siRNA sense strand
cagcuguuguugagcgaau

SEQ ID NO: 76421 - RNA, 19 nt, Homo sapiens
  misc_RNA (1)...(19): siRNA sense strand
guugagcgaauuguuagaa

SEQ ID NO: 76422 - RNA, 19 nt, Homo sapiens
  misc_RNA (1)...(19): siRNA sense strand
uggcaugcauccucaucau

SEQ ID NO: 76423 - RNA, 19 nt, Homo sapiens
  misc_RNA (1)...(19): siRNA sense strand
ggccaaagugggcaguuuc

SEQ ID NO: 76424 - RNA, 19 nt, Homo sapiens
  misc_RNA (1)...(19): siRNA sense strand
aggccaaagugggcaguuu

SEQ ID NO: 76425 - RNA, 19 nt, Homo sapiens
  misc_RNA (1)...(19): siRNA sense strand
guuguugagcgaauuguua

SEQ ID NO: 76426 - RNA, 19 nt, Homo sapiens
  misc_RNA (1)...(19): siRNA sense strand
ggacaucaucaccuuggaa

SEQ ID NO: 76427 - RNA, 19 nt, Homo sapiens
  misc_RNA (1)...(19): siRNA sense strand
caucaucaccuuggaaaug

SEQ ID NO: 76428 - RNA, 19 nt, Homo sapiens
  misc_RNA (1)...(19): siRNA sense strand
gacaucaucaccuuggaaa

SEQ ID NO: 76429 - RNA, 19 nt, Homo sapiens
  misc_RNA (1)...(19): siRNA sense strand
caucaucaggaaacucuaa

SEQ ID NO: 76430 - RNA, 19 nt, Homo sapiens
  misc_RNA (1)...(19): siRNA sense strand
ucaacuugcugccuaagag

SEQ ID NO: 76431 - RNA, 19 nt, Homo sapiens
  misc_RNA (1)...(19): siRNA sense strand
gaguggugcuagccaaaca

SEQ ID NO: 76432 - RNA, 19 nt, Homo sapiens
  misc_RNA (1)...(19): siRNA sense strand
gcucauccaggccaaagug

SEQ ID NO: 76433 - RNA, 19 nt, Homo sapiens
  misc_RNA (1)...(19): siRNA sense strand
gcaguuucagccagaaugu

SEQ ID NO: 76434 - RNA, 19 nt, Homo sapiens
  misc_RNA (1)...(19): siRNA sense strand
gaauguggaacuccucaac

SEQ ID NO: 76435 - RNA, 19 nt, Homo sapiens
  misc_RNA (1)...(19): siRNA sense strand
cagcuguuguugagcgaau

SEQ ID NO: 76436 - RNA, 19 nt, Homo sapiens
  misc_RNA (1)...(19): siRNA sense strand
guugagcgaauuguuagaa

SEQ ID NO: 76437 - RNA, 19 nt, Homo sapiens
  misc_RNA (1)...(19): siRNA sense strand
aggccaaagugggcaguuu

SEQ ID NO: 76438 - RNA, 19 nt, Homo sapiens
  misc_RNA (1)...(19): siRNA sense strand
ggccaaagugggcaguuuc

SEQ ID NO: 76439 - RNA, 19 nt, Homo sapiens
  misc_RNA (1)...(19): siRNA sense strand
gaagagaucuauccaauaa

SEQ ID NO: 76440 - RNA, 19 nt, Homo sapiens
  misc_RNA (1)...(19): siRNA sense strand
guacagcaaucauuugaaa

SEQ ID NO: 76441 - RNA, 19 nt, Homo sapiens
  misc_RNA (1)...(19): siRNA sense strand
ggacaaaugcuucuucaaa

SEQ ID NO: 76442 - RNA, 19 nt, Homo sapiens
  misc_RNA (1)...(19): siRNA sense strand
agaaagagcugaagagauc

SEQ ID NO: 76443 - RNA, 19 nt, Homo sapiens
  misc_RNA (1)...(19): siRNA sense strand
ucacaugcuuccagaaaua

SEQ ID NO: 76444 - RNA, 19 nt, Homo sapiens
  misc_RNA (1)...(19): siRNA sense strand
ggacuauaguguagaugua

SEQ ID NO: 76445 - RNA, 19 nt, Homo sapiens
  misc_RNA (1)...(19): siRNA sense strand
gaagguacagcaaucauuu

SEQ ID NO: 76446 - RNA, 19 nt, Homo sapiens
  misc_RNA (1)...(19): siRNA sense strand
ggaagaugcuguuuacaag

SEQ ID NO: 76447 - RNA, 19 nt, Homo sapiens
  misc_RNA (1)...(19): siRNA sense strand
ggaaguauuucggaaggua

SEQ ID NO: 76448 - RNA, 19 nt, Homo sapiens
  misc_RNA (1)...(19): siRNA sense strand
cagaugugcugcuuuauga

SEQ ID NO: 76449 - RNA, 19 nt, Homo sapiens
  misc_RNA (1)...(19): siRNA sense strand
ucacacaacucaucacaug

SEQ ID NO: 76450 - RNA, 19 nt, Homo sapiens
  misc_RNA (1)...(19): siRNA sense strand
gaagaauuccugagacuau

SEQ ID NO: 76451 - RNA, 19 nt, Homo sapiens
  misc_RNA (1)...(19): siRNA sense strand
gagacuauguaaagaaaga

SEQ ID NO: 76452 - RNA, 19 nt, Homo sapiens
  misc_RNA (1)...(19): siRNA sense strand
gaauggagcugacuuugac

SEQ ID NO: 76453 - RNA, 19 nt, Homo sapiens
  misc_RNA (1)...(19): siRNA sense strand
gaacugugcaugaugagaa

SEQ ID NO: 76454 - RNA, 19 nt, Homo sapiens
  misc_RNA (1)...(19): siRNA sense strand
gggcaaagauuuccucacu

SEQ ID NO: 76455 - RNA, 19 nt, Homo sapiens
  misc_RNA (1)...(19): siRNA sense strand
aaccagaugugcugcuuua

SEQ ID NO: 76456 - RNA, 19 nt, Homo sapiens
  misc_RNA (1)...(19): siRNA sense strand
ccaccuagaggaaguauuu

SEQ ID NO: 76457 - RNA, 19 nt, Homo sapiens
  misc_RNA (1)...(19): siRNA sense strand
gcucucaucauaugcaaua

SEQ ID NO: 76458 - RNA, 19 nt, Homo sapiens
  misc_RNA (1)...(19): siRNA sense strand
ggaauggagcugacuuuga

SEQ ID NO: 76459 - RNA, 19 nt, Homo sapiens
  misc_RNA (1)...(19): siRNA sense strand
cauaugcaauacagaguuu

SEQ ID NO: 76460 - RNA, 19 nt, Homo sapiens
  misc_RNA (1)...(19): siRNA sense strand
acaaugggcucuaucuuca

SEQ ID NO: 76461 - RNA, 19 nt, Homo sapiens
  misc_RNA (1)...(19): siRNA sense strand
gcggaacugugcaugauga

SEQ ID NO: 76462 - RNA, 19 nt, Homo sapiens
  misc_RNA (1)...(19): siRNA sense strand
gagcacaaguccucugaca

SEQ ID NO: 76463 - RNA, 19 nt, Homo sapiens
  misc_RNA (1)...(19): siRNA sense strand
gacaaaugcuucuucaaac

SEQ ID NO: 76464 - RNA, 19 nt, Homo sapiens
  misc_RNA (1)...(19): siRNA sense strand
uaacauagaccaaauaucc

SEQ ID NO: 76465 - RNA, 19 nt, Homo sapiens
  misc_RNA (1)...(19): siRNA sense strand
cagaugcccucaagcuuug

SEQ ID NO: 76466 - RNA, 19 nt, Homo sapiens
  misc_RNA (1)...(19): siRNA sense strand
ugacagcacauucuuggua

SEQ ID NO: 76467 - RNA, 19 nt, Homo sapiens
  misc_RNA (1)...(19): siRNA sense strand
gaacuggaaggaagaggaa

SEQ ID NO: 76468 - RNA, 19 nt, Homo sapiens
  misc_RNA (1)...(19): siRNA sense strand
ggucuggacuauaguguag

SEQ ID NO: 76469 - RNA, 19 nt, Homo sapiens
  misc_RNA (1)...(19): siRNA sense strand
ggaagguacagcaaucauu

SEQ ID NO: 76470 - RNA, 19 nt, Homo sapiens
  misc_RNA (1)...(19): siRNA sense strand
cugaagagaucuauccaau

SEQ ID NO: 76471 - RNA, 19 nt, Homo sapiens
  misc_RNA (1)...(19): siRNA sense strand
gaagaugcuguuuacaaga

SEQ ID NO: 76472 - RNA, 19 nt, Homo sapiens
  misc_RNA (1)...(19): siRNA sense strand
acgccuggcucucaucaua

SEQ ID NO: 76473 - RNA, 19 nt, Homo sapiens
  misc_RNA (1)...(19): siRNA sense strand
ucaaaugcccaccauagaa

SEQ ID NO: 76474 - RNA, 19 nt, Homo sapiens
  misc_RNA (1)...(19): siRNA sense strand
ggagcugacuuugacauca

SEQ ID NO: 76475 - RNA, 19 nt, Homo sapiens
  misc_RNA (1)...(19): siRNA sense strand
guaaagaaagagcugaaga

SEQ ID NO: 76476 - RNA, 19 nt, Homo sapiens
  misc_RNA (1)...(19): siRNA sense strand
agagaucuauccaauaaag

SEQ ID NO: 76477 - RNA, 19 nt, Homo sapiens
  misc_RNA (1)...(19): siRNA sense strand
ugaagagaucuauccaaua

SEQ ID NO: 76478 - RNA, 19 nt, Homo sapiens
  misc_RNA (1)...(19): siRNA sense strand
ggacaaacccaaggucauc

SEQ ID NO: 76479 - RNA, 19 nt, Homo sapiens
  misc_RNA (1)...(19): siRNA sense strand
gagggaaucugcggaacug

SEQ ID NO: 76480 - RNA, 19 nt, Homo sapiens
  misc_RNA (1)...(19): siRNA sense strand
gcacacgccuggcucucau

SEQ ID NO: 76481 - RNA, 19 nt, Homo sapiens
  misc_RNA (1)...(19): siRNA sense strand
gcucaaaugcccaccauag

SEQ ID NO: 76482 - RNA, 19 nt, Homo sapiens
  misc_RNA (1)...(19): siRNA sense strand
ggaugaaggagcuacuuga

SEQ ID NO: 76483 - RNA, 19 nt, Homo sapiens
  misc_RNA (1)...(19): siRNA sense strand
caucacaugcuuccagaaa

SEQ ID NO: 76484 - RNA, 19 nt, Homo sapiens
  misc_RNA (1)...(19): siRNA sense strand
gcuuuguccucaugaagaa

SEQ ID NO: 76485 - RNA, 19 nt, Homo sapiens
  misc_RNA (1)...(19): siRNA sense strand
ccucuuuccuggcaauuga

SEQ ID NO: 76486 - RNA, 19 nt, Homo sapiens
  misc_RNA (1)...(19): siRNA sense strand
auacagaguuugaccaucu

SEQ ID NO: 76487 - RNA, 19 nt, Homo sapiens
  misc_RNA (1)...(19): siRNA sense strand
ggucauggcagacucuaug

SEQ ID NO: 76488 - RNA, 19 nt, Homo sapiens
  misc_RNA (1)...(19): siRNA sense strand
gcgcugagggcauuugcua

SEQ ID NO: 76489 - RNA, 19 nt, Homo sapiens
  misc_RNA (1)...(19): siRNA sense strand
gaggaauggagcugacuuu

SEQ ID NO: 76490 - RNA, 19 nt, Homo sapiens
  misc_RNA (1)...(19): siRNA sense strand
cugagacuauguaaagaaa

SEQ ID NO: 76491 - RNA, 19 nt, Homo sapiens
  misc_RNA (1)...(19): siRNA sense strand
caagagaagcaacguaugg

SEQ ID NO: 76492 - RNA, 19 nt, Homo sapiens
  misc_RNA (1)...(19): siRNA sense strand
acagaugcccucaagcuuu

SEQ ID NO: 76493 - RNA, 19 nt, Homo sapiens
  misc_RNA (1)...(19): siRNA sense strand
caggacaaaugcuucuuca

SEQ ID NO: 76494 - RNA, 19 nt, Homo sapiens
  misc_RNA (1)...(19): siRNA sense strand
gcacaaugggcucuaucuu

SEQ ID NO: 76495 - RNA, 19 nt, Homo sapiens
  misc_RNA (1)...(19): siRNA sense strand
caacguauggcaggacaaa

SEQ ID NO: 76496 - RNA, 19 nt, Homo sapiens
  misc_RNA (1)...(19): siRNA sense strand
caauaaaggagagaaacaa

SEQ ID NO: 76497 - RNA, 19 nt, Homo sapiens
  misc_RNA (1)...(19): siRNA sense strand
uggaaucccugggcaaaga

SEQ ID NO: 76498 - RNA, 19 nt, Homo sapiens
  misc_RNA (1)...(19): siRNA sense strand
ucacugguguuuuggauaa

SEQ ID NO: 76499 - RNA, 19 nt, Homo sapiens
  misc_RNA (1)...(19): siRNA sense strand
guguagauguagaagagaa

SEQ ID NO: 76500 - RNA, 19 nt, Homo sapiens
  misc_RNA (1)...(19): siRNA sense strand
gaauuccugagacuaugua

SEQ ID NO: 76501 - RNA, 19 nt, Homo sapiens
  misc_RNA (1)...(19): siRNA sense strand
caagcuuuguccucaugaa

SEQ ID NO: 76502 - RNA, 19 nt, Homo sapiens
  misc_RNA (1)...(19): siRNA sense strand
gcacauucuugguacucau

SEQ ID NO: 76503 - RNA, 19 nt, Homo sapiens
  misc_RNA (1)...(19): siRNA sense strand
gcaagagaagcaacguaug

SEQ ID NO: 76504 - RNA, 19 nt, Homo sapiens
  misc_RNA (1)...(19): siRNA sense strand
aaagaaagagcugaagaga

SEQ ID NO: 76505 - RNA, 19 nt, Homo sapiens
  misc_RNA (1)...(19): siRNA sense strand
ccagaugugcugcuuuaug

SEQ ID NO: 76506 - RNA, 19 nt, Homo sapiens
  misc_RNA (1)...(19): siRNA sense strand
uaguguagauguagaagag

SEQ ID NO: 76507 - RNA, 19 nt, Homo sapiens
  misc_RNA (1)...(19): siRNA sense strand
gcaggacaaaugcuucuuc

SEQ ID NO: 76508 - RNA, 19 nt, Homo sapiens
  misc_RNA (1)...(19): siRNA sense strand
uaaagaaagagcugaagag

SEQ ID NO: 76509 - RNA, 19 nt, Homo sapiens
  misc_RNA (1)...(19): siRNA sense strand
uugagggucuggacuauag

SEQ ID NO: 76510 - RNA, 19 nt, Homo sapiens
  misc_RNA (1)...(19): siRNA sense strand
cacaaugggcucuaucuuc

SEQ ID NO: 76511 - RNA, 19 nt, Homo sapiens
  misc_RNA (1)...(19): siRNA sense strand
cagaaggcaaccacagaaa

SEQ ID NO: 76512 - RNA, 19 nt, Homo sapiens
  misc_RNA (1)...(19): siRNA sense strand
auagaacgacuguccauga

SEQ ID NO: 76513 - RNA, 19 nt, Homo sapiens
  misc_RNA (1)...(19): siRNA sense strand
cacuuaagguguuggaauc

SEQ ID NO: 76514 - RNA, 19 nt, Homo sapiens
  misc_RNA (1)...(19): siRNA sense strand
ccaauaaaggagagaaaca

SEQ ID NO: 76515 - RNA, 19 nt, Homo sapiens
  misc_RNA (1)...(19): siRNA sense strand
gccuggcucucaucauaug

SEQ ID NO: 76516 - RNA, 19 nt, Homo sapiens
  misc_RNA (1)...(19): siRNA sense strand
ccacuuaagguguuggaau

SEQ ID NO: 76517 - RNA, 19 nt, Homo sapiens
  misc_RNA (1)...(19): siRNA sense strand
gagcugacuuugacaucac

SEQ ID NO: 76518 - RNA, 19 nt, Homo sapiens
  misc_RNA (1)...(19): siRNA sense strand
aacccaaggucaucauugu

SEQ ID NO: 76519 - RNA, 19 nt, Homo sapiens
  misc_RNA (1)...(19): siRNA sense strand
aaaauguacugaacuggaa

SEQ ID NO: 76520 - RNA, 19 nt, Homo sapiens
  misc_RNA (1)...(19): siRNA sense strand
caaaugcccaccauagaac

SEQ ID NO: 76521 - RNA, 19 nt, Homo sapiens
  misc_RNA (1)...(19): siRNA sense strand
ggaacaaaauguacugaac

SEQ ID NO: 76522 - RNA, 19 nt, Homo sapiens
  misc_RNA (1)...(19): siRNA sense strand
aggaagaugcuguuuacaa

SEQ ID NO: 76523 - RNA, 19 nt, Homo sapiens
  misc_RNA (1)...(19): siRNA sense strand
gauguagaagagaaucuga

SEQ ID NO: 76524 - RNA, 19 nt, Homo sapiens
  misc_RNA (1)...(19): siRNA sense strand
gggaugaaggagcuacuug

SEQ ID NO: 76525 - RNA, 19 nt, Homo sapiens
  misc_RNA (1)...(19): siRNA sense strand
ucaugaagaauuccugaga

SEQ ID NO: 76526 - RNA, 19 nt, Homo sapiens
  misc_RNA (1)...(19): siRNA sense strand
ccucuucacagucaucuga

SEQ ID NO: 76527 - RNA, 19 nt, Homo sapiens
  misc_RNA (1)...(19): siRNA sense strand
gaugugcugcuuuaugaca

SEQ ID NO: 76528 - RNA, 19 nt, Homo sapiens
  misc_RNA (1)...(19): siRNA sense strand
agacccacguggagaagga

SEQ ID NO: 76529 - RNA, 19 nt, Homo sapiens
  misc_RNA (1)...(19): siRNA sense strand
ugaagaauuccugagacua

SEQ ID NO: 76530 - RNA, 19 nt, Homo sapiens
  misc_RNA (1)...(19): siRNA sense strand
gcucuaucuucaucacaca

SEQ ID NO: 76531 - RNA, 19 nt, Homo sapiens
  misc_RNA (1)...(19): siRNA sense strand
gaacugugggucagagacu

SEQ ID NO: 76532 - RNA, 19 nt, Homo sapiens
  misc_RNA (1)...(19): siRNA sense strand
aaucugacagccagggaua

SEQ ID NO: 76533 - RNA, 19 nt, Homo sapiens
  misc_RNA (1)...(19): siRNA sense strand
gaugaaggagcuacuugag

SEQ ID NO: 76534 - RNA, 19 nt, Homo sapiens
  misc_RNA (1)...(19): siRNA sense strand
caaacccaaggucaucauu

SEQ ID NO: 76535 - RNA, 19 nt, Homo sapiens
  misc_RNA (1)...(19): siRNA sense strand
aagaauuccugagacuaug

SEQ ID NO: 76536 - RNA, 19 nt, Homo sapiens
  misc_RNA (1)...(19): siRNA sense strand
gcucuucaacgccacacaa

SEQ ID NO: 76537 - RNA, 19 nt, Homo sapiens
  misc_RNA (1)...(19): siRNA sense strand
caauacagaguuugaccau

SEQ ID NO: 76538 - RNA, 19 nt, Homo sapiens
  misc_RNA (1)...(19): siRNA sense strand
agauauuucuaccucuuuc

SEQ ID NO: 76539 - RNA, 19 nt, Homo sapiens
  misc_RNA (1)...(19): siRNA sense strand
gaagagaucuauccaauaa

SEQ ID NO: 76540 - RNA, 19 nt, Homo sapiens
  misc_RNA (1)...(19): siRNA sense strand
guacagcaaucauuugaaa

SEQ ID NO: 76541 - RNA, 19 nt, Homo sapiens
  misc_RNA (1)...(19): siRNA sense strand
ggacaaaugcuucuucaaa

SEQ ID NO: 76542 - RNA, 19 nt, Homo sapiens
  misc_RNA (1)...(19): siRNA sense strand
agaaagagcugaagagauc

SEQ ID NO: 76543 - RNA, 19 nt, Homo sapiens
  misc_RNA (1)...(19): siRNA sense strand
ucacaugcuuccagaaaua

SEQ ID NO: 76544 - RNA, 19 nt, Homo sapiens
  misc_RNA (1)...(19): siRNA sense strand
ggacuauaguguagaugua

SEQ ID NO: 76545 - RNA, 19 nt, Homo sapiens
  misc_RNA (1)...(19): siRNA sense strand
gaagguacagcaaucauuu

SEQ ID NO: 76546 - RNA, 19 nt, Homo sapiens
  misc_RNA (1)...(19): siRNA sense strand
ggaagaugcuguuuacaag

SEQ ID NO: 76547 - RNA, 19 nt, Homo sapiens
  misc_RNA (1)...(19): siRNA sense strand
ggaaguauuucggaaggua

SEQ ID NO: 76548 - RNA, 19 nt, Homo sapiens
  misc_RNA (1)...(19): siRNA sense strand
cagaugugcugcuuuauga

SEQ ID NO: 76549 - RNA, 19 nt, Homo sapiens
  misc_RNA (1)...(19): siRNA sense strand
ucacacaacucaucacaug

SEQ ID NO: 76550 - RNA, 19 nt, Homo sapiens
  misc_RNA (1)...(19): siRNA sense strand
gaagaauuccugagacuau

SEQ ID NO: 76551 - RNA, 19 nt, Homo sapiens
  misc_RNA (1)...(19): siRNA sense strand
gagacuauguaaagaaaga

SEQ ID NO: 76552 - RNA, 19 nt, Homo sapiens
  misc_RNA (1)...(19): siRNA sense strand
gaauggagcugacuuugac

SEQ ID NO: 76553 - RNA, 19 nt, Homo sapiens
  misc_RNA (1)...(19): siRNA sense strand
gaacugugcaugaugagaa

SEQ ID NO: 76554 - RNA, 19 nt, Homo sapiens
  misc_RNA (1)...(19): siRNA sense strand
aaccagaugugcugcuuua

SEQ ID NO: 76555 - RNA, 19 nt, Homo sapiens
  misc_RNA (1)...(19): siRNA sense strand
ccaccuagaggaaguauuu

SEQ ID NO: 76556 - RNA, 19 nt, Homo sapiens
  misc_RNA (1)...(19): siRNA sense strand
gcucucaucauaugcaaua

SEQ ID NO: 76557 - RNA, 19 nt, Homo sapiens
  misc_RNA (1)...(19): siRNA sense strand
ggaauggagcugacuuuga

SEQ ID NO: 76558 - RNA, 19 nt, Homo sapiens
  misc_RNA (1)...(19): siRNA sense strand
cauaugcaauacagaguuu

SEQ ID NO: 76559 - RNA, 19 nt, Homo sapiens
  misc_RNA (1)...(19): siRNA sense strand
acaaugggcucuaucuuca

SEQ ID NO: 76560 - RNA, 19 nt, Homo sapiens
  misc_RNA (1)...(19): siRNA sense strand
gcggaacugugcaugauga

SEQ ID NO: 76561 - RNA, 19 nt, Homo sapiens
  misc_RNA (1)...(19): siRNA sense strand
gagcacaaguccucugaca

SEQ ID NO: 76562 - RNA, 19 nt, Homo sapiens
  misc_RNA (1)...(19): siRNA sense strand
gacaaaugcuucuucaaac

SEQ ID NO: 76563 - RNA, 19 nt, Homo sapiens
  misc_RNA (1)...(19): siRNA sense strand
uaacauagaccaaauaucc

SEQ ID NO: 76564 - RNA, 19 nt, Homo sapiens
  misc_RNA (1)...(19): siRNA sense strand
cagaugcccucaagcuuug

SEQ ID NO: 76565 - RNA, 19 nt, Homo sapiens
  misc_RNA (1)...(19): siRNA sense strand
ugacagcacauucuuggua

SEQ ID NO: 76566 - RNA, 19 nt, Homo sapiens
  misc_RNA (1)...(19): siRNA sense strand
ggucuggacuauaguguag

SEQ ID NO: 76567 - RNA, 19 nt, Homo sapiens
  misc_RNA (1)...(19): siRNA sense strand
ggaagguacagcaaucauu

SEQ ID NO: 76568 - RNA, 19 nt, Homo sapiens
  misc_RNA (1)...(19): siRNA sense strand
cugaagagaucuauccaau

SEQ ID NO: 76569 - RNA, 19 nt, Homo sapiens
  misc_RNA (1)...(19): siRNA sense strand
gaagaugcuguuuacaaga

SEQ ID NO: 76570 - RNA, 19 nt, Homo sapiens
  misc_RNA (1)...(19): siRNA sense strand
acgccuggcucucaucaua

SEQ ID NO: 76571 - RNA, 19 nt, Homo sapiens
  misc_RNA (1)...(19): siRNA sense strand
ucaaaugcccaccauagaa

SEQ ID NO: 76572 - RNA, 19 nt, Homo sapiens
  misc_RNA (1)...(19): siRNA sense strand
ggagcugacuuugacauca

SEQ ID NO: 76573 - RNA, 19 nt, Homo sapiens
  misc_RNA (1)...(19): siRNA sense strand
guaaagaaagagcugaaga

SEQ ID NO: 76574 - RNA, 19 nt, Homo sapiens
  misc_RNA (1)...(19): siRNA sense strand
agagaucuauccaauaaag

SEQ ID NO: 76575 - RNA, 19 nt, Homo sapiens
  misc_RNA (1)...(19): siRNA sense strand
ugaagagaucuauccaaua

SEQ ID NO: 76576 - RNA, 19 nt, Homo sapiens
  misc_RNA (1)...(19): siRNA sense strand
ggacaaacccaaggucauc

SEQ ID NO: 76577 - RNA, 19 nt, Homo sapiens
  misc_RNA (1)...(19): siRNA sense strand
gagggaaucugcggaacug

SEQ ID NO: 76578 - RNA, 19 nt, Homo sapiens
  misc_RNA (1)...(19): siRNA sense strand
gcacacgccuggcucucau

SEQ ID NO: 76579 - RNA, 19 nt, Homo sapiens
  misc_RNA (1)...(19): siRNA sense strand
gcucaaaugcccaccauag

SEQ ID NO: 76580 - RNA, 19 nt, Homo sapiens
  misc_RNA (1)...(19): siRNA sense strand
ggaugaaggagcuacuuga

SEQ ID NO: 76581 - RNA, 19 nt, Homo sapiens
  misc_RNA (1)...(19): siRNA sense strand
caucacaugcuuccagaaa

SEQ ID NO: 76582 - RNA, 19 nt, Homo sapiens
  misc_RNA (1)...(19): siRNA sense strand
auacagaguuugaccaucu

SEQ ID NO: 76583 - RNA, 19 nt, Homo sapiens
  misc_RNA (1)...(19): siRNA sense strand
ccucuuuccuggcaauuga

SEQ ID NO: 76584 - RNA, 19 nt, Homo sapiens
  misc_RNA (1)...(19): siRNA sense strand
gcuuuguccucaugaagaa

SEQ ID NO: 76585 - RNA, 19 nt, Homo sapiens
  misc_RNA (1)...(19): siRNA sense strand
cugagacuauguaaagaaa

SEQ ID NO: 76586 - RNA, 19 nt, Homo sapiens
  misc_RNA (1)...(19): siRNA sense strand
gcgcugagggcauuugcua

SEQ ID NO: 76587 - RNA, 19 nt, Homo sapiens
  misc_RNA (1)...(19): siRNA sense strand
gaggaauggagcugacuuu

SEQ ID NO: 76588 - RNA, 19 nt, Homo sapiens
  misc_RNA (1)...(19): siRNA sense strand
caagagaagcaacguaugg

SEQ ID NO: 76589 - RNA, 19 nt, Homo sapiens
  misc_RNA (1)...(19): siRNA sense strand
acagaugcccucaagcuuu

SEQ ID NO: 76590 - RNA, 19 nt, Homo sapiens
  misc_RNA (1)...(19): siRNA sense strand
caggacaaaugcuucuuca

SEQ ID NO: 76591 - RNA, 19 nt, Homo sapiens
  misc_RNA (1)...(19): siRNA sense strand
gcacaaugggcucuaucuu

SEQ ID NO: 76592 - RNA, 19 nt, Homo sapiens
  misc_RNA (1)...(19): siRNA sense strand
caauaaaggagagaaacaa

SEQ ID NO: 76593 - RNA, 19 nt, Homo sapiens
  misc_RNA (1)...(19): siRNA sense strand
caacguauggcaggacaaa

SEQ ID NO: 76594 - RNA, 19 nt, Homo sapiens
  misc_RNA (1)...(19): siRNA sense strand
gaauuccugagacuaugua

SEQ ID NO: 76595 - RNA, 19 nt, Homo sapiens
  misc_RNA (1)...(19): siRNA sense strand
guguagauguagaagagaa

SEQ ID NO: 76596 - RNA, 19 nt, Homo sapiens
  misc_RNA (1)...(19): siRNA sense strand
caagcuuuguccucaugaa

SEQ ID NO: 76597 - RNA, 19 nt, Homo sapiens
  misc_RNA (1)...(19): siRNA sense strand
gcaagagaagcaacguaug

SEQ ID NO: 76598 - RNA, 19 nt, Homo sapiens
  misc_RNA (1)...(19): siRNA sense strand
gcacauucuugguacucau

SEQ ID NO: 76599 - RNA, 19 nt, Homo sapiens
  misc_RNA (1)...(19): siRNA sense strand
aaagaaagagcugaagaga

SEQ ID NO: 76600 - RNA, 19 nt, Homo sapiens
  misc_RNA (1)...(19): siRNA sense strand
ccagaugugcugcuuuaug

SEQ ID NO: 76601 - RNA, 19 nt, Homo sapiens
  misc_RNA (1)...(19): siRNA sense strand
uaguguagauguagaagag

SEQ ID NO: 76602 - RNA, 19 nt, Homo sapiens
  misc_RNA (1)...(19): siRNA sense strand
uaaagaaagagcugaagag

SEQ ID NO: 76603 - RNA, 19 nt, Homo sapiens
  misc_RNA (1)...(19): siRNA sense strand
gcaggacaaaugcuucuuc

SEQ ID NO: 76604 - RNA, 19 nt, Homo sapiens
  misc_RNA (1)...(19): siRNA sense strand
uugagggucuggacuauag

SEQ ID NO: 76605 - RNA, 19 nt, Homo sapiens
  misc_RNA (1)...(19): siRNA sense strand
cacaaugggcucuaucuuc

SEQ ID NO: 76606 - RNA, 19 nt, Homo sapiens
  misc_RNA (1)...(19): siRNA sense strand
ccaauaaaggagagaaaca

SEQ ID NO: 76607 - RNA, 19 nt, Homo sapiens
  misc_RNA (1)...(19): siRNA sense strand
auagaacgacuguccauga

SEQ ID NO: 76608 - RNA, 19 nt, Homo sapiens
  misc_RNA (1)...(19): siRNA sense strand
gccuggcucucaucauaug

SEQ ID NO: 76609 - RNA, 19 nt, Homo sapiens
  misc_RNA (1)...(19): siRNA sense strand
gagcugacuuugacaucac

SEQ ID NO: 76610 - RNA, 19 nt, Homo sapiens
  misc_RNA (1)...(19): siRNA sense strand
aacccaaggucaucauugu

SEQ ID NO: 76611 - RNA, 19 nt, Homo sapiens
  misc_RNA (1)...(19): siRNA sense strand
gggaugaaggagcuacuug

SEQ ID NO: 76612 - RNA, 19 nt, Homo sapiens
  misc_RNA (1)...(19): siRNA sense strand
caaaugcccaccauagaac

SEQ ID NO: 76613 - RNA, 19 nt, Homo sapiens
  misc_RNA (1)...(19): siRNA sense strand
aggaagaugcuguuuacaa

SEQ ID NO: 76614 - RNA, 19 nt, Homo sapiens
  misc_RNA (1)...(19): siRNA sense strand
gauguagaagagaaucuga

SEQ ID NO: 76615 - RNA, 19 nt, Homo sapiens
  misc_RNA (1)...(19): siRNA sense strand
ucaugaagaauuccugaga

SEQ ID NO: 76616 - RNA, 19 nt, Homo sapiens
  misc_RNA (1)...(19): siRNA sense strand
ccucuucacagucaucuga

SEQ ID NO: 76617 - RNA, 19 nt, Homo sapiens
  misc_RNA (1)...(19): siRNA sense strand
gaugugcugcuuuaugaca

SEQ ID NO: 76618 - RNA, 19 nt, Homo sapiens
  misc_RNA (1)...(19): siRNA sense strand
agacccacguggagaagga

SEQ ID NO: 76619 - RNA, 19 nt, Homo sapiens
  misc_RNA (1)...(19): siRNA sense strand
aaucugacagccagggaua

SEQ ID NO: 76620 - RNA, 19 nt, Homo sapiens
  misc_RNA (1)...(19): siRNA sense strand
gcucuaucuucaucacaca

SEQ ID NO: 76621 - RNA, 19 nt, Homo sapiens
  misc_RNA (1)...(19): siRNA sense strand
gaacugugggucagagacu

SEQ ID NO: 76622 - RNA, 19 nt, Homo sapiens
  misc_RNA (1)...(19): siRNA sense strand
ugaagaauuccugagacua

SEQ ID NO: 76623 - RNA, 19 nt, Homo sapiens
  misc_RNA (1)...(19): siRNA sense strand
gaugaaggagcuacuugag

SEQ ID NO: 76624 - RNA, 19 nt, Homo sapiens
  misc_RNA (1)...(19): siRNA sense strand
caaacccaaggucaucauu

SEQ ID NO: 76625 - RNA, 19 nt, Homo sapiens
  misc_RNA (1)...(19): siRNA sense strand
caauacagaguuugaccau

SEQ ID NO: 76626 - RNA, 19 nt, Homo sapiens
  misc_RNA (1)...(19): siRNA sense strand
gcucuucaacgccacacaa

SEQ ID NO: 76627 - RNA, 19 nt, Homo sapiens
  misc_RNA (1)...(19): siRNA sense strand
aagaauuccugagacuaug

SEQ ID NO: 76628 - RNA, 19 nt, Homo sapiens
  misc_RNA (1)...(19): siRNA sense strand
gagcugaagagaucuaucc

SEQ ID NO: 76629 - RNA, 19 nt, Homo sapiens
  misc_RNA (1)...(19): siRNA sense strand
agauauuucuaccucuuuc

SEQ ID NO: 76630 - RNA, 19 nt, Homo sapiens
  misc_RNA (1)...(19): siRNA sense strand
uagaacgacuguccaugac

SEQ ID NO: 76631 - RNA, 19 nt, Homo sapiens
  misc_RNA (1)...(19): siRNA sense strand
ccugagacuauguaaagaa

SEQ ID NO: 76632 - RNA, 19 nt, Homo sapiens
  misc_RNA (1)...(19): siRNA sense strand
acaagacccacguggagaa

SEQ ID NO: 76633 - RNA, 19 nt, Homo sapiens
  misc_RNA (1)...(19): siRNA sense strand
aaacccaaggucaucauug

SEQ ID NO: 76634 - RNA, 19 nt, Homo sapiens
  misc_RNA (1)...(19): siRNA sense strand
aaaugcuucuucaaaccuu

SEQ ID NO: 76635 - RNA, 19 nt, Homo sapiens
  misc_RNA (1)...(19): siRNA sense strand
aagaugcuguuuacaagac

SEQ ID NO: 76636 - RNA, 19 nt, Homo sapiens
  misc_RNA (1)...(19): siRNA sense strand
aaagagcugaagagaucua

SEQ ID NO: 76637 - RNA, 19 nt, Homo sapiens
  misc_RNA (1)...(19): siRNA sense strand
aaugggcucuaucuucauc

SEQ ID NO: 76638 - RNA, 19 nt, Homo sapiens
  misc_RNA (1)...(19): siRNA sense strand
acaaaugcuucuucaaacc

SEQ ID NO: 76639 - RNA, 19 nt, Homo sapiens
  misc_RNA (1)...(19): siRNA sense strand
gaagagaucuauccaauaa

SEQ ID NO: 76640 - RNA, 19 nt, Homo sapiens
  misc_RNA (1)...(19): siRNA sense strand
guacagcaaucauuugaaa

SEQ ID NO: 76641 - RNA, 19 nt, Homo sapiens
  misc_RNA (1)...(19): siRNA sense strand
agaaagagcugaagagauc

SEQ ID NO: 76642 - RNA, 19 nt, Homo sapiens
  misc_RNA (1)...(19): siRNA sense strand
ucacaugcuuccagaaaua

SEQ ID NO: 76643 - RNA, 19 nt, Homo sapiens
  misc_RNA (1)...(19): siRNA sense strand
ggacuauaguguagaugua

SEQ ID NO: 76644 - RNA, 19 nt, Homo sapiens
  misc_RNA (1)...(19): siRNA sense strand
gaagguacagcaaucauuu

SEQ ID NO: 76645 - RNA, 19 nt, Homo sapiens
  misc_RNA (1)...(19): siRNA sense strand
ggaagaugcuguuuacaag

SEQ ID NO: 76646 - RNA, 19 nt, Homo sapiens
  misc_RNA (1)...(19): siRNA sense strand
ggaaguauuucggaaggua

SEQ ID NO: 76647 - RNA, 19 nt, Homo sapiens
  misc_RNA (1)...(19): siRNA sense strand
cagaugugcugcuuuauga

SEQ ID NO: 76648 - RNA, 19 nt, Homo sapiens
  misc_RNA (1)...(19): siRNA sense strand
ucacacaacucaucacaug

SEQ ID NO: 76649 - RNA, 19 nt, Homo sapiens
  misc_RNA (1)...(19): siRNA sense strand
gaagaauuccugagacuau

SEQ ID NO: 76650 - RNA, 19 nt, Homo sapiens
  misc_RNA (1)...(19): siRNA sense strand
gagacuauguaaagaaaga

SEQ ID NO: 76651 - RNA, 19 nt, Homo sapiens
  misc_RNA (1)...(19): siRNA sense strand
gaauggagcugacuuugac

SEQ ID NO: 76652 - RNA, 19 nt, Homo sapiens
  misc_RNA (1)...(19): siRNA sense strand
gaacugugcaugaugagaa

SEQ ID NO: 76653 - RNA, 19 nt, Homo sapiens
  misc_RNA (1)...(19): siRNA sense strand
aaccagaugugcugcuuua

SEQ ID NO: 76654 - RNA, 19 nt, Homo sapiens
  misc_RNA (1)...(19): siRNA sense strand
ccaccuagaggaaguauuu

SEQ ID NO: 76655 - RNA, 19 nt, Homo sapiens
  misc_RNA (1)...(19): siRNA sense strand
gcucucaucauaugcaaua

SEQ ID NO: 76656 - RNA, 19 nt, Homo sapiens
  misc_RNA (1)...(19): siRNA sense strand
ggaauggagcugacuuuga

SEQ ID NO: 76657 - RNA, 19 nt, Homo sapiens
  misc_RNA (1)...(19): siRNA sense strand
cauaugcaauacagaguuu

SEQ ID NO: 76658 - RNA, 19 nt, Homo sapiens
  misc_RNA (1)...(19): siRNA sense strand
acaaugggcucuaucuuca

SEQ ID NO: 76659 - RNA, 19 nt, Homo sapiens
  misc_RNA (1)...(19): siRNA sense strand
gcggaacugugcaugauga

SEQ ID NO: 76660 - RNA, 19 nt, Homo sapiens
  misc_RNA (1)...(19): siRNA sense strand
gagcacaaguccucugaca

SEQ ID NO: 76661 - RNA, 19 nt, Homo sapiens
  misc_RNA (1)...(19): siRNA sense strand
ugacagcacauucuuggua

SEQ ID NO: 76662 - RNA, 19 nt, Homo sapiens
  misc_RNA (1)...(19): siRNA sense strand
cagaugcccucaagcuuug

SEQ ID NO: 76663 - RNA, 19 nt, Homo sapiens
  misc_RNA (1)...(19): siRNA sense strand
ggucuggacuauaguguag

SEQ ID NO: 76664 - RNA, 19 nt, Homo sapiens
  misc_RNA (1)...(19): siRNA sense strand
ggaagguacagcaaucauu

SEQ ID NO: 76665 - RNA, 19 nt, Homo sapiens
  misc_RNA (1)...(19): siRNA sense strand
cugaagagaucuauccaau

SEQ ID NO: 76666 - RNA, 19 nt, Homo sapiens
  misc_RNA (1)...(19): siRNA sense strand
gaagaugcuguuuacaaga

SEQ ID NO: 76667 - RNA, 19 nt, Homo sapiens
  misc_RNA (1)...(19): siRNA sense strand
acgccuggcucucaucaua

SEQ ID NO: 76668 - RNA, 19 nt, Homo sapiens
  misc_RNA (1)...(19): siRNA sense strand
ucaaaugcccaccauagaa

SEQ ID NO: 76669 - RNA, 19 nt, Homo sapiens
  misc_RNA (1)...(19): siRNA sense strand
ggagcugacuuugacauca

SEQ ID NO: 76670 - RNA, 19 nt, Homo sapiens
  misc_RNA (1)...(19): siRNA sense strand
guaaagaaagagcugaaga

SEQ ID NO: 76671 - RNA, 19 nt, Homo sapiens
  misc_RNA (1)...(19): siRNA sense strand
agagaucuauccaauaaag

SEQ ID NO: 76672 - RNA, 19 nt, Homo sapiens
  misc_RNA (1)...(19): siRNA sense strand
ugaagagaucuauccaaua

SEQ ID NO: 76673 - RNA, 19 nt, Homo sapiens
  misc_RNA (1)...(19): siRNA sense strand
ggacaaacccaaggucauc

SEQ ID NO: 76674 - RNA, 19 nt, Homo sapiens
  misc_RNA (1)...(19): siRNA sense strand
gagggaaucugcggaacug

SEQ ID NO: 76675 - RNA, 19 nt, Homo sapiens
  misc_RNA (1)...(19): siRNA sense strand
gcacacgccuggcucucau

SEQ ID NO: 76676 - RNA, 19 nt, Homo sapiens
  misc_RNA (1)...(19): siRNA sense strand
gcucaaaugcccaccauag

SEQ ID NO: 76677 - RNA, 19 nt, Homo sapiens
  misc_RNA (1)...(19): siRNA sense strand
ggaugaaggagcuacuuga

SEQ ID NO: 76678 - RNA, 19 nt, Homo sapiens
  misc_RNA (1)...(19): siRNA sense strand
caucacaugcuuccagaaa

SEQ ID NO: 76679 - RNA, 19 nt, Homo sapiens
  misc_RNA (1)...(19): siRNA sense strand
gcuuuguccucaugaagaa

SEQ ID NO: 76680 - RNA, 19 nt, Homo sapiens
  misc_RNA (1)...(19): siRNA sense strand
ccucuuuccuggcaauuga

SEQ ID NO: 76681 - RNA, 19 nt, Homo sapiens
  misc_RNA (1)...(19): siRNA sense strand
auacagaguuugaccaucu

SEQ ID NO: 76682 - RNA, 19 nt, Homo sapiens
  misc_RNA (1)...(19): siRNA sense strand
cugagacuauguaaagaaa

SEQ ID NO: 76683 - RNA, 19 nt, Homo sapiens
  misc_RNA (1)...(19): siRNA sense strand
gcgcugagggcauuugcua

SEQ ID NO: 76684 - RNA, 19 nt, Homo sapiens
  misc_RNA (1)...(19): siRNA sense strand
gaggaauggagcugacuuu

SEQ ID NO: 76685 - RNA, 19 nt, Homo sapiens
  misc_RNA (1)...(19): siRNA sense strand
acagaugcccucaagcuuu

SEQ ID NO: 76686 - RNA, 19 nt, Homo sapiens
  misc_RNA (1)...(19): siRNA sense strand
gcacaaugggcucuaucuu

SEQ ID NO: 76687 - RNA, 19 nt, Homo sapiens
  misc_RNA (1)...(19): siRNA sense strand
caauaaaggagagaaacaa

SEQ ID NO: 76688 - RNA, 19 nt, Homo sapiens
  misc_RNA (1)...(19): siRNA sense strand
gaauuccugagacuaugua

SEQ ID NO: 76689 - RNA, 19 nt, Homo sapiens
  misc_RNA (1)...(19): siRNA sense strand
guguagauguagaagagaa

SEQ ID NO: 76690 - RNA, 19 nt, Homo sapiens
  misc_RNA (1)...(19): siRNA sense strand
gcacauucuugguacucau

SEQ ID NO: 76691 - RNA, 19 nt, Homo sapiens
  misc_RNA (1)...(19): siRNA sense strand
caagcuuuguccucaugaa

SEQ ID NO: 76692 - RNA, 19 nt, Homo sapiens
  misc_RNA (1)...(19): siRNA sense strand
uaguguagauguagaagag

SEQ ID NO: 76693 - RNA, 19 nt, Homo sapiens
  misc_RNA (1)...(19): siRNA sense strand
ccagaugugcugcuuuaug

SEQ ID NO: 76694 - RNA, 19 nt, Homo sapiens
  misc_RNA (1)...(19): siRNA sense strand
aaagaaagagcugaagaga

SEQ ID NO: 76695 - RNA, 19 nt, Homo sapiens
  misc_RNA (1)...(19): siRNA sense strand
uaaagaaagagcugaagag

SEQ ID NO: 76696 - RNA, 19 nt, Homo sapiens
  misc_RNA (1)...(19): siRNA sense strand
uugagggucuggacuauag

SEQ ID NO: 76697 - RNA, 19 nt, Homo sapiens
  misc_RNA (1)...(19): siRNA sense strand
cacaaugggcucuaucuuc

SEQ ID NO: 76698 - RNA, 19 nt, Homo sapiens
  misc_RNA (1)...(19): siRNA sense strand
ccaauaaaggagagaaaca

SEQ ID NO: 76699 - RNA, 19 nt, Homo sapiens
  misc_RNA (1)...(19): siRNA sense strand
auagaacgacuguccauga

SEQ ID NO: 76700 - RNA, 19 nt, Homo sapiens
  misc_RNA (1)...(19): siRNA sense strand
gccuggcucucaucauaug

SEQ ID NO: 76701 - RNA, 19 nt, Homo sapiens
  misc_RNA (1)...(19): siRNA sense strand
gagcugacuuugacaucac

SEQ ID NO: 76702 - RNA, 19 nt, Homo sapiens
  misc_RNA (1)...(19): siRNA sense strand
aacccaaggucaucauugu

SEQ ID NO: 76703 - RNA, 19 nt, Homo sapiens
  misc_RNA (1)...(19): siRNA sense strand
gggaugaaggagcuacuug

SEQ ID NO: 76704 - RNA, 19 nt, Homo sapiens
  misc_RNA (1)...(19): siRNA sense strand
caaaugcccaccauagaac

SEQ ID NO: 76705 - RNA, 19 nt, Homo sapiens
  misc_RNA (1)...(19): siRNA sense strand
aggaagaugcuguuuacaa

SEQ ID NO: 76706 - RNA, 19 nt, Homo sapiens
  misc_RNA (1)...(19): siRNA sense strand
gauguagaagagaaucuga

SEQ ID NO: 76707 - RNA, 19 nt, Homo sapiens
  misc_RNA (1)...(19): siRNA sense strand
ucaugaagaauuccugaga

SEQ ID NO: 76708 - RNA, 19 nt, Homo sapiens
  misc_RNA (1)...(19): siRNA sense strand
ccucuucacagucaucuga

SEQ ID NO: 76709 - RNA, 19 nt, Homo sapiens
  misc_RNA (1)...(19): siRNA sense strand
gaugugcugcuuuaugaca

SEQ ID NO: 76710 - RNA, 19 nt, Homo sapiens
  misc_RNA (1)...(19): siRNA sense strand
agacccacguggagaagga

SEQ ID NO: 76711 - RNA, 19 nt, Homo sapiens
  misc_RNA (1)...(19): siRNA sense strand
ugaagaauuccugagacua

SEQ ID NO: 76712 - RNA, 19 nt, Homo sapiens
  misc_RNA (1)...(19): siRNA sense strand
gcucuaucuucaucacaca

SEQ ID NO: 76713 - RNA, 19 nt, Homo sapiens
  misc_RNA (1)...(19): siRNA sense strand
gaacugugggucagagacu

SEQ ID NO: 76714 - RNA, 19 nt, Homo sapiens
  misc_RNA (1)...(19): siRNA sense strand
aaucugacagccagggaua

SEQ ID NO: 76715 - RNA, 19 nt, Homo sapiens
  misc_RNA (1)...(19): siRNA sense strand
gaugaaggagcuacuugag

SEQ ID NO: 76716 - RNA, 19 nt, Homo sapiens
  misc_RNA (1)...(19): siRNA sense strand
caaacccaaggucaucauu

SEQ ID NO: 76717 - RNA, 19 nt, Homo sapiens
  misc_RNA (1)...(19): siRNA sense strand
caauacagaguuugaccau

SEQ ID NO: 76718 - RNA, 19 nt, Homo sapiens
  misc_RNA (1)...(19): siRNA sense strand
gcucuucaacgccacacaa

SEQ ID NO: 76719 - RNA, 19 nt, Homo sapiens
  misc_RNA (1)...(19): siRNA sense strand
aagaauuccugagacuaug

SEQ ID NO: 76720 - RNA, 19 nt, Homo sapiens
  misc_RNA (1)...(19): siRNA sense strand
gagcugaagagaucuaucc

SEQ ID NO: 76721 - RNA, 19 nt, Homo sapiens
  misc_RNA (1)...(19): siRNA sense strand
agauauuucuaccucuuuc

SEQ ID NO: 76722 - RNA, 19 nt, Homo sapiens
  misc_RNA (1)...(19): siRNA sense strand
uagaacgacuguccaugac

SEQ ID NO: 76723 - RNA, 19 nt, Homo sapiens
  misc_RNA (1)...(19): siRNA sense strand
acaagacccacguggagaa

SEQ ID NO: 76724 - RNA, 19 nt, Homo sapiens
  misc_RNA (1)...(19): siRNA sense strand
aaacccaaggucaucauug

SEQ ID NO: 76725 - RNA, 19 nt, Homo sapiens
  misc_RNA (1)...(19): siRNA sense strand
ccugagacuauguaaagaa

SEQ ID NO: 76726 - RNA, 19 nt, Homo sapiens
  misc_RNA (1)...(19): siRNA sense strand
gcugaagagaucuauccaa

SEQ ID NO: 76727 - RNA, 19 nt, Homo sapiens
  misc_RNA (1)...(19): siRNA sense strand
cuacagaugcccucaagcu

SEQ ID NO: 76728 - RNA, 19 nt, Homo sapiens
  misc_RNA (1)...(19): siRNA sense strand
aaugggcucuaucuucauc

SEQ ID NO: 76729 - RNA, 19 nt, Homo sapiens
  misc_RNA (1)...(19): siRNA sense strand
aaagagcugaagagaucua

SEQ ID NO: 76730 - RNA, 19 nt, Homo sapiens
  misc_RNA (1)...(19): siRNA sense strand
aagaugcuguuuacaagac

SEQ ID NO: 76731 - RNA, 19 nt, Homo sapiens
  misc_RNA (1)...(19): siRNA sense strand
ugacagccagggauaugga

SEQ ID NO: 76732 - RNA, 19 nt, Homo sapiens
  misc_RNA (1)...(19): siRNA sense strand
gguacagcaaucauuugaa

SEQ ID NO: 76733 - RNA, 19 nt, Homo sapiens
  misc_RNA (1)...(19): siRNA sense strand
caucacacaacucaucaca

SEQ ID NO: 76734 - RNA, 19 nt, Homo sapiens
  misc_RNA (1)...(19): siRNA sense strand
ggagggaaucugcggaacu

SEQ ID NO: 76735 - RNA, 19 nt, Homo sapiens
  misc_RNA (1)...(19): siRNA sense strand
cagcaaucauuugaaacuc

SEQ ID NO: 76736 - RNA, 19 nt, Homo sapiens
  misc_RNA (1)...(19): siRNA sense strand
gcugccaccuagaggaagu

SEQ ID NO: 76737 - RNA, 19 nt, Homo sapiens
  misc_RNA (1)...(19): siRNA sense strand
ucauaugcaauacagaguu

SEQ ID NO: 76738 - RNA, 19 nt, Homo sapiens
  misc_RNA (1)...(19): siRNA sense strand
cugcggaacugugcaugau

SEQ ID NO: 76739 - RNA, 19 nt, Homo sapiens
  misc_RNA (1)...(19): siRNA sense strand
gcaaucacauuuaugcaua

SEQ ID NO: 76740 - RNA, 19 nt, Homo sapiens
  misc_RNA (1)...(19): siRNA sense strand
gacauuaacuggcuuguuc

SEQ ID NO: 76741 - RNA, 19 nt, Homo sapiens
  misc_RNA (1)...(19): siRNA sense strand
caacauaacugagguggau

SEQ ID NO: 76742 - RNA, 19 nt, Homo sapiens
  misc_RNA (1)...(19): siRNA sense strand
caugguacauucaagauuu

SEQ ID NO: 76743 - RNA, 19 nt, Homo sapiens
  misc_RNA (1)...(19): siRNA sense strand
cgaaggcaaucacauuuau

SEQ ID NO: 76744 - RNA, 19 nt, Homo sapiens
  misc_RNA (1)...(19): siRNA sense strand
gcgaaggcaaucacauuua

SEQ ID NO: 76745 - RNA, 19 nt, Homo sapiens
  misc_RNA (1)...(19): siRNA sense strand
ucacagaacuccucacacu

SEQ ID NO: 76746 - RNA, 19 nt, Homo sapiens
  misc_RNA (1)...(19): siRNA sense strand
ggagcugacuuccucaugu

SEQ ID NO: 76747 - RNA, 19 nt, Homo sapiens
  misc_RNA (1)...(19): siRNA sense strand
caagugcaauuggaaagaa

SEQ ID NO: 76748 - RNA, 19 nt, Homo sapiens
  misc_RNA (1)...(19): siRNA sense strand
ggaaaacccaagauauuua

SEQ ID NO: 76749 - RNA, 19 nt, Homo sapiens
  misc_RNA (1)...(19): siRNA sense strand
aaauauggcuccuccuuag

SEQ ID NO: 76750 - RNA, 19 nt, Homo sapiens
  misc_RNA (1)...(19): siRNA sense strand
gaacggcucaugguacauu

SEQ ID NO: 76751 - RNA, 19 nt, Homo sapiens
  misc_RNA (1)...(19): siRNA sense strand
gagcugacuuccucaugug

SEQ ID NO: 76752 - RNA, 19 nt, Homo sapiens
  misc_RNA (1)...(19): siRNA sense strand
gcaaagacccaagugcaau

SEQ ID NO: 76753 - RNA, 19 nt, Homo sapiens
  misc_RNA (1)...(19): siRNA sense strand
ugugugagauguugggaaa

SEQ ID NO: 76754 - RNA, 19 nt, Homo sapiens
  misc_RNA (1)...(19): siRNA sense strand
caaagacccaagugcaauu

SEQ ID NO: 76755 - RNA, 19 nt, Homo sapiens
  misc_RNA (1)...(19): siRNA sense strand
uuaacuggcuuguucaaag

SEQ ID NO: 76756 - RNA, 19 nt, Homo sapiens
  misc_RNA (1)...(19): siRNA sense strand
cugacuuccucauguguua

SEQ ID NO: 76757 - RNA, 19 nt, Homo sapiens
  misc_RNA (1)...(19): siRNA sense strand
uagauaaucagacagagaa

SEQ ID NO: 76758 - RNA, 19 nt, Homo sapiens
  misc_RNA (1)...(19): siRNA sense strand
gugaacggcucaugguaca

SEQ ID NO: 76759 - RNA, 19 nt, Homo sapiens
  misc_RNA (1)...(19): siRNA sense strand
ccucauguguuacucuguu

SEQ ID NO: 76760 - RNA, 19 nt, Homo sapiens
  misc_RNA (1)...(19): siRNA sense strand
uaacuggcuuguucaaagg

SEQ ID NO: 76761 - RNA, 19 nt, Homo sapiens
  misc_RNA (1)...(19): siRNA sense strand
caagauuugugugagaugu

SEQ ID NO: 76762 - RNA, 19 nt, Homo sapiens
  misc_RNA (1)...(19): siRNA sense strand
uguaguagauaaucagaca

SEQ ID NO: 76763 - RNA, 19 nt, Homo sapiens
  misc_RNA (1)...(19): siRNA sense strand
guucaaaggagacaagugu

SEQ ID NO: 76764 - RNA, 19 nt, Homo sapiens
  misc_RNA (1)...(19): siRNA sense strand
guagauaaucagacagaga

SEQ ID NO: 76765 - RNA, 19 nt, Homo sapiens
  misc_RNA (1)...(19): siRNA sense strand
ggcgaaggcaaucacauuu

SEQ ID NO: 76766 - RNA, 19 nt, Homo sapiens
  misc_RNA (1)...(19): siRNA sense strand
gaaggcaaucacauuuaug

SEQ ID NO: 76767 - RNA, 19 nt, Homo sapiens
  misc_RNA (1)...(19): siRNA sense strand
ggaugcagccuccguuuac

SEQ ID NO: 76768 - RNA, 19 nt, Homo sapiens
  misc_RNA (1)...(19): siRNA sense strand
gcucaugguacauucaaga

SEQ ID NO: 76769 - RNA, 19 nt, Homo sapiens
  misc_RNA (1)...(19): siRNA sense strand
gaaaauauggcuccuccuu

SEQ ID NO: 76770 - RNA, 19 nt, Homo sapiens
  misc_RNA (1)...(19): siRNA sense strand
agucauuccuuuggaugua

SEQ ID NO: 76771 - RNA, 19 nt, Homo sapiens
  misc_RNA (1)...(19): siRNA sense strand
guacauucaagauuugugu

SEQ ID NO: 76772 - RNA, 19 nt, Homo sapiens
  misc_RNA (1)...(19): siRNA sense strand
cuuuggauguaguagauaa

SEQ ID NO: 76773 - RNA, 19 nt, Homo sapiens
  misc_RNA (1)...(19): siRNA sense strand
gucacagccugguuggaaa

SEQ ID NO: 76774 - RNA, 19 nt, Homo sapiens
  misc_RNA (1)...(19): siRNA sense strand
uugccucaaugcuaacuaa

SEQ ID NO: 76775 - RNA, 19 nt, Homo sapiens
  misc_RNA (1)...(19): siRNA sense strand
gaugcagccuccguuuaca

SEQ ID NO: 76776 - RNA, 19 nt, Homo sapiens
  misc_RNA (1)...(19): siRNA sense strand
cuggugaacaggaaaguuu

SEQ ID NO: 76777 - RNA, 19 nt, Homo sapiens
  misc_RNA (1)...(19): siRNA sense strand
auaaucagacagagaaguu

SEQ ID NO: 76778 - RNA, 19 nt, Homo sapiens
  misc_RNA (1)...(19): siRNA sense strand
uggcgaaggcaaucacauu

SEQ ID NO: 76779 - RNA, 19 nt, Homo sapiens
  misc_RNA (1)...(19): siRNA sense strand
gauguaguagauaaucaga

SEQ ID NO: 76780 - RNA, 19 nt, Homo sapiens
  misc_RNA (1)...(19): siRNA sense strand
uggaugcagccuccguuua

SEQ ID NO: 76781 - RNA, 19 nt, Homo sapiens
  misc_RNA (1)...(19): siRNA sense strand
gccagucauuccuuuggau

SEQ ID NO: 76782 - RNA, 19 nt, Homo sapiens
  misc_RNA (1)...(19): siRNA sense strand
aagcugcauuucuuuccaa

SEQ ID NO: 76783 - RNA, 19 nt, Homo sapiens
  misc_RNA (1)...(19): siRNA sense strand
ugucacagccugguuggaa

SEQ ID NO: 76784 - RNA, 19 nt, Homo sapiens
  misc_RNA (1)...(19): siRNA sense strand
agauuugugugagauguug

SEQ ID NO: 76785 - RNA, 19 nt, Homo sapiens
  misc_RNA (1)...(19): siRNA sense strand
uggauguaguagauaauca

SEQ ID NO: 76786 - RNA, 19 nt, Homo sapiens
  misc_RNA (1)...(19): siRNA sense strand
aaaauauggcuccuccuua

SEQ ID NO: 76787 - RNA, 19 nt, Homo sapiens
  misc_RNA (1)...(19): siRNA sense strand
auucaagauuugugugaga

SEQ ID NO: 76788 - RNA, 19 nt, Homo sapiens
  misc_RNA (1)...(19): siRNA sense strand
ggcaaucacauuuaugcau

SEQ ID NO: 76789 - RNA, 19 nt, Homo sapiens
  misc_RNA (1)...(19): siRNA sense strand
gauaaucagacagagaagu

SEQ ID NO: 76790 - RNA, 19 nt, Homo sapiens
  misc_RNA (1)...(19): siRNA sense strand
gggaaaccagcacgaugug

SEQ ID NO: 76791 - RNA, 19 nt, Homo sapiens
  misc_RNA (1)...(19): siRNA sense strand
uaguagauaaucagacaga

SEQ ID NO: 76792 - RNA, 19 nt, Homo sapiens
  misc_RNA (1)...(19): siRNA sense strand
gcaaucacauuuaugcaua

SEQ ID NO: 76793 - RNA, 19 nt, Homo sapiens
  misc_RNA (1)...(19): siRNA sense strand
gacauuaacuggcuuguuc

SEQ ID NO: 76794 - RNA, 19 nt, Homo sapiens
  misc_RNA (1)...(19): siRNA sense strand
caacauaacugagguggau

SEQ ID NO: 76795 - RNA, 19 nt, Homo sapiens
  misc_RNA (1)...(19): siRNA sense strand
caugguacauucaagauuu

SEQ ID NO: 76796 - RNA, 19 nt, Homo sapiens
  misc_RNA (1)...(19): siRNA sense strand
cgaaggcaaucacauuuau

SEQ ID NO: 76797 - RNA, 19 nt, Homo sapiens
  misc_RNA (1)...(19): siRNA sense strand
gcgaaggcaaucacauuua

SEQ ID NO: 76798 - RNA, 19 nt, Homo sapiens
  misc_RNA (1)...(19): siRNA sense strand
ucacagaacuccucacacu

SEQ ID NO: 76799 - RNA, 19 nt, Homo sapiens
  misc_RNA (1)...(19): siRNA sense strand
ggagcugacuuccucaugu

SEQ ID NO: 76800 - RNA, 19 nt, Homo sapiens
  misc_RNA (1)...(19): siRNA sense strand
caagugcaauuggaaagaa

SEQ ID NO: 76801 - RNA, 19 nt, Homo sapiens
  misc_RNA (1)...(19): siRNA sense strand
ggaaaacccaagauauuua

SEQ ID NO: 76802 - RNA, 19 nt, Homo sapiens
  misc_RNA (1)...(19): siRNA sense strand
aaauauggcuccuccuuag

SEQ ID NO: 76803 - RNA, 19 nt, Homo sapiens
  misc_RNA (1)...(19): siRNA sense strand
gaacggcucaugguacauu

SEQ ID NO: 76804 - RNA, 19 nt, Homo sapiens
  misc_RNA (1)...(19): siRNA sense strand
gagcugacuuccucaugug

SEQ ID NO: 76805 - RNA, 19 nt, Homo sapiens
  misc_RNA (1)...(19): siRNA sense strand
gcaaagacccaagugcaau

SEQ ID NO: 76806 - RNA, 19 nt, Homo sapiens
  misc_RNA (1)...(19): siRNA sense strand
ugugugagauguugggaaa

SEQ ID NO: 76807 - RNA, 19 nt, Homo sapiens
  misc_RNA (1)...(19): siRNA sense strand
caaagacccaagugcaauu

SEQ ID NO: 76808 - RNA, 19 nt, Homo sapiens
  misc_RNA (1)...(19): siRNA sense strand
uuaacuggcuuguucaaag

SEQ ID NO: 76809 - RNA, 19 nt, Homo sapiens
  misc_RNA (1)...(19): siRNA sense strand
cugacuuccucauguguua

SEQ ID NO: 76810 - RNA, 19 nt, Homo sapiens
  misc_RNA (1)...(19): siRNA sense strand
uagauaaucagacagagaa

SEQ ID NO: 76811 - RNA, 19 nt, Homo sapiens
  misc_RNA (1)...(19): siRNA sense strand
gugaacggcucaugguaca

SEQ ID NO: 76812 - RNA, 19 nt, Homo sapiens
  misc_RNA (1)...(19): siRNA sense strand
ccucauguguuacucuguu

SEQ ID NO: 76813 - RNA, 19 nt, Homo sapiens
  misc_RNA (1)...(19): siRNA sense strand
uaacuggcuuguucaaagg

SEQ ID NO: 76814 - RNA, 19 nt, Homo sapiens
  misc_RNA (1)...(19): siRNA sense strand
caagauuugugugagaugu

SEQ ID NO: 76815 - RNA, 19 nt, Homo sapiens
  misc_RNA (1)...(19): siRNA sense strand
uguaguagauaaucagaca

SEQ ID NO: 76816 - RNA, 19 nt, Homo sapiens
  misc_RNA (1)...(19): siRNA sense strand
guucaaaggagacaagugu

SEQ ID NO: 76817 - RNA, 19 nt, Homo sapiens
  misc_RNA (1)...(19): siRNA sense strand
guagauaaucagacagaga

SEQ ID NO: 76818 - RNA, 19 nt, Homo sapiens
  misc_RNA (1)...(19): siRNA sense strand
ggcgaaggcaaucacauuu

SEQ ID NO: 76819 - RNA, 19 nt, Homo sapiens
  misc_RNA (1)...(19): siRNA sense strand
gaaggcaaucacauuuaug

SEQ ID NO: 76820 - RNA, 19 nt, Homo sapiens
  misc_RNA (1)...(19): siRNA sense strand
ggaugcagccuccguuuac

SEQ ID NO: 76821 - RNA, 19 nt, Homo sapiens
  misc_RNA (1)...(19): siRNA sense strand
gcucaugguacauucaaga

SEQ ID NO: 76822 - RNA, 19 nt, Homo sapiens
  misc_RNA (1)...(19): siRNA sense strand
gaaaauauggcuccuccuu

SEQ ID NO: 76823 - RNA, 19 nt, Homo sapiens
  misc_RNA (1)...(19): siRNA sense strand
agucauuccuuuggaugua

SEQ ID NO: 76824 - RNA, 19 nt, Homo sapiens
  misc_RNA (1)...(19): siRNA sense strand
guacauucaagauuugugu

SEQ ID NO: 76825 - RNA, 19 nt, Homo sapiens
  misc_RNA (1)...(19): siRNA sense strand
cuuuggauguaguagauaa

SEQ ID NO: 76826 - RNA, 19 nt, Homo sapiens
  misc_RNA (1)...(19): siRNA sense strand
gucacagccugguuggaaa

SEQ ID NO: 76827 - RNA, 19 nt, Homo sapiens
  misc_RNA (1)...(19): siRNA sense strand
uugccucaaugcuaacuaa

SEQ ID NO: 76828 - RNA, 19 nt, Homo sapiens
  misc_RNA (1)...(19): siRNA sense strand
gaugcagccuccguuuaca

SEQ ID NO: 76829 - RNA, 19 nt, Homo sapiens
  misc_RNA (1)...(19): siRNA sense strand
cuggugaacaggaaaguuu

SEQ ID NO: 76830 - RNA, 19 nt, Homo sapiens
  misc_RNA (1)...(19): siRNA sense strand
auaaucagacagagaaguu

SEQ ID NO: 76831 - RNA, 19 nt, Homo sapiens
  misc_RNA (1)...(19): siRNA sense strand
uggcgaaggcaaucacauu

SEQ ID NO: 76832 - RNA, 19 nt, Homo sapiens
  misc_RNA (1)...(19): siRNA sense strand
gauguaguagauaaucaga

SEQ ID NO: 76833 - RNA, 19 nt, Homo sapiens
  misc_RNA (1)...(19): siRNA sense strand
uggaugcagccuccguuua

SEQ ID NO: 76834 - RNA, 19 nt, Homo sapiens
  misc_RNA (1)...(19): siRNA sense strand
gccagucauuccuuuggau

SEQ ID NO: 76835 - RNA, 19 nt, Homo sapiens
  misc_RNA (1)...(19): siRNA sense strand
aagcugcauuucuuuccaa

SEQ ID NO: 76836 - RNA, 19 nt, Homo sapiens
  misc_RNA (1)...(19): siRNA sense strand
ugucacagccugguuggaa

SEQ ID NO: 76837 - RNA, 19 nt, Homo sapiens
  misc_RNA (1)...(19): siRNA sense strand
agauuugugugagauguug

SEQ ID NO: 76838 - RNA, 19 nt, Homo sapiens
  misc_RNA (1)...(19): siRNA sense strand
uggauguaguagauaauca

SEQ ID NO: 76839 - RNA, 19 nt, Homo sapiens
  misc_RNA (1)...(19): siRNA sense strand
aaaauauggcuccuccuua

SEQ ID NO: 76840 - RNA, 19 nt, Homo sapiens
  misc_RNA (1)...(19): siRNA sense strand
auucaagauuugugugaga

SEQ ID NO: 76841 - RNA, 19 nt, Homo sapiens
  misc_RNA (1)...(19): siRNA sense strand
ggcaaucacauuuaugcau

SEQ ID NO: 76842 - RNA, 19 nt, Homo sapiens
  misc_RNA (1)...(19): siRNA sense strand
gauaaucagacagagaagu

SEQ ID NO: 76843 - RNA, 19 nt, Homo sapiens
  misc_RNA (1)...(19): siRNA sense strand
gggaaaccagcacgaugug

SEQ ID NO: 76844 - RNA, 19 nt, Homo sapiens
  misc_RNA (1)...(19): siRNA sense strand
uaguagauaaucagacaga

SEQ ID NO: 76845 - RNA, 19 nt, Homo sapiens
  misc_RNA (1)...(19): siRNA sense strand
ggaagaggcuccugguuug

SEQ ID NO: 76846 - RNA, 19 nt, Homo sapiens
  misc_RNA (1)...(19): siRNA sense strand
gaucagggcuguauugaag

SEQ ID NO: 76847 - RNA, 19 nt, Homo sapiens
  misc_RNA (1)...(19): siRNA sense strand
gggcaaaugcaucauaaua

SEQ ID NO: 76848 - RNA, 19 nt, Homo sapiens
  misc_RNA (1)...(19): siRNA sense strand
gaagaggaccauacaaaug

SEQ ID NO: 76849 - RNA, 19 nt, Homo sapiens
  misc_RNA (1)...(19): siRNA sense strand
gaacucuacuucagucaau

SEQ ID NO: 76850 - RNA, 19 nt, Homo sapiens
  misc_RNA (1)...(19): siRNA sense strand
ggcaaaugcaucauaauaa

SEQ ID NO: 76851 - RNA, 19 nt, Homo sapiens
  misc_RNA (1)...(19): siRNA sense strand
gaugcaagaucugcuuaaa

SEQ ID NO: 76852 - RNA, 19 nt, Homo sapiens
  misc_RNA (1)...(19): siRNA sense strand
uauaaugacugcucuugug

SEQ ID NO: 76853 - RNA, 19 nt, Homo sapiens
  misc_RNA (1)...(19): siRNA sense strand
uaccgucccucuucaguaa

SEQ ID NO: 76854 - RNA, 19 nt, Homo sapiens
  misc_RNA (1)...(19): siRNA sense strand
ccaaggaacucuacuucag

SEQ ID NO: 76855 - RNA, 19 nt, Homo sapiens
  misc_RNA (1)...(19): siRNA sense strand
gaaacggaacagacaaaga

SEQ ID NO: 76856 - RNA, 19 nt, Homo sapiens
  misc_RNA (1)...(19): siRNA sense strand
gacccacacuuccaugaga

SEQ ID NO: 76857 - RNA, 19 nt, Homo sapiens
  misc_RNA (1)...(19): siRNA sense strand
ccgaggcgcucuucaagug

SEQ ID NO: 76858 - RNA, 19 nt, Homo sapiens
  misc_RNA (1)...(19): siRNA sense strand
aagauucaguggaugcuaa

SEQ ID NO: 76859 - RNA, 19 nt, Homo sapiens
  misc_RNA (1)...(19): siRNA sense strand
gaugaucagggcuguauug

SEQ ID NO: 76860 - RNA, 19 nt, Homo sapiens
  misc_RNA (1)...(19): siRNA sense strand
ccagaccgguccucguuug

SEQ ID NO: 76861 - RNA, 19 nt, Homo sapiens
  misc_RNA (1)...(19): siRNA sense strand
aaacggaacagacaaagau

SEQ ID NO: 76862 - RNA, 19 nt, Homo sapiens
  misc_RNA (1)...(19): siRNA sense strand
cuuaagccauggagaagaa

SEQ ID NO: 76863 - RNA, 19 nt, Homo sapiens
  misc_RNA (1)...(19): siRNA sense strand
gggaccgagugccuacaua

SEQ ID NO: 76864 - RNA, 19 nt, Homo sapiens
  misc_RNA (1)...(19): siRNA sense strand
ucaaugacacagaugcuaa

SEQ ID NO: 76865 - RNA, 19 nt, Homo sapiens
  misc_RNA (1)...(19): siRNA sense strand
ugacgugauugucuauaau

SEQ ID NO: 76866 - RNA, 19 nt, Homo sapiens
  misc_RNA (1)...(19): siRNA sense strand
cuacauaucaguacaacau

SEQ ID NO: 76867 - RNA, 19 nt, Homo sapiens
  misc_RNA (1)...(19): siRNA sense strand
ggaccgagugccuacauau

SEQ ID NO: 76868 - RNA, 19 nt, Homo sapiens
  misc_RNA (1)...(19): siRNA sense strand
gguugaggauucagcaaau

SEQ ID NO: 76869 - RNA, 19 nt, Homo sapiens
  misc_RNA (1)...(19): siRNA sense strand
ugaagaggaccauacaaau

SEQ ID NO: 76870 - RNA, 19 nt, Homo sapiens
  misc_RNA (1)...(19): siRNA sense strand
gcccaucaaugacacagau

SEQ ID NO: 76871 - RNA, 19 nt, Homo sapiens
  misc_RNA (1)...(19): siRNA sense strand
acauaucaguacaacauga

SEQ ID NO: 76872 - RNA, 19 nt, Homo sapiens
  misc_RNA (1)...(19): siRNA sense strand
ccacgguuccaggcuauua

SEQ ID NO: 76873 - RNA, 19 nt, Homo sapiens
  misc_RNA (1)...(19): siRNA sense strand
guaccgucccucuucagua

SEQ ID NO: 76874 - RNA, 19 nt, Homo sapiens
  misc_RNA (1)...(19): siRNA sense strand
cagggugaaugacagaguu

SEQ ID NO: 76875 - RNA, 19 nt, Homo sapiens
  misc_RNA (1)...(19): siRNA sense strand
gcuaauccucgauacaaga

SEQ ID NO: 76876 - RNA, 19 nt, Homo sapiens
  misc_RNA (1)...(19): siRNA sense strand
cugggcaaaugcaucauaa

SEQ ID NO: 76877 - RNA, 19 nt, Homo sapiens
  misc_RNA (1)...(19): siRNA sense strand
ugacacagaugcuaauccu

SEQ ID NO: 76878 - RNA, 19 nt, Homo sapiens
  misc_RNA (1)...(19): siRNA sense strand
cugaagaggaccauacaaa

SEQ ID NO: 76879 - RNA, 19 nt, Homo sapiens
  misc_RNA (1)...(19): siRNA sense strand
uugacgugauugucuauaa

SEQ ID NO: 76880 - RNA, 19 nt, Homo sapiens
  misc_RNA (1)...(19): siRNA sense strand
uugauaaagugacagguau

SEQ ID NO: 76881 - RNA, 19 nt, Homo sapiens
  misc_RNA (1)...(19): siRNA sense strand
gcugggcaaaugcaucaua

SEQ ID NO: 76882 - RNA, 19 nt, Homo sapiens
  misc_RNA (1)...(19): siRNA sense strand
gaccgguccucguuuguac

SEQ ID NO: 76883 - RNA, 19 nt, Homo sapiens
  misc_RNA (1)...(19): siRNA sense strand
gaagauucaguggaugcua

SEQ ID NO: 76884 - RNA, 19 nt, Homo sapiens
  misc_RNA (1)...(19): siRNA sense strand
gugauugucuauaaugacu

SEQ ID NO: 76885 - RNA, 19 nt, Homo sapiens
  misc_RNA (1)...(19): siRNA sense strand
cagaugcuaauccucgaua

SEQ ID NO: 76886 - RNA, 19 nt, Homo sapiens
  misc_RNA (1)...(19): siRNA sense strand
ggaacucuacuucagucaa

SEQ ID NO: 76887 - RNA, 19 nt, Homo sapiens
  misc_RNA (1)...(19): siRNA sense strand
caaggaacucuacuucagu

SEQ ID NO: 76888 - RNA, 19 nt, Homo sapiens
  misc_RNA (1)...(19): siRNA sense strand
ccucuuaagccauggagaa

SEQ ID NO: 76889 - RNA, 19 nt, Homo sapiens
  misc_RNA (1)...(19): siRNA sense strand
gaagaggcuccugguuugu

SEQ ID NO: 76890 - RNA, 19 nt, Homo sapiens
  misc_RNA (1)...(19): siRNA sense strand
gacgugauugucuauaaug

SEQ ID NO: 76891 - RNA, 19 nt, Homo sapiens
  misc_RNA (1)...(19): siRNA sense strand
cagaugaucagggcuguau

SEQ ID NO: 76892 - RNA, 19 nt, Homo sapiens
  misc_RNA (1)...(19): siRNA sense strand
guugaggauucagcaaaug

SEQ ID NO: 76893 - RNA, 19 nt, Homo sapiens
  misc_RNA (1)...(19): siRNA sense strand
cauaucaguacaacaugaa

SEQ ID NO: 76894 - RNA, 19 nt, Homo sapiens
  misc_RNA (1)...(19): siRNA sense strand
ucuccaugcucaccaagga

SEQ ID NO: 76895 - RNA, 19 nt, Homo sapiens
  misc_RNA (1)...(19): siRNA sense strand
ggguugaggauucagcaaa

SEQ ID NO: 76896 - RNA, 19 nt, Homo sapiens
  misc_RNA (1)...(19): siRNA sense strand
gagggaccgagcuugauga

SEQ ID NO: 76897 - RNA, 19 nt, Homo sapiens
  misc_RNA (1)...(19): siRNA sense strand
gauaaagugacagguaugg

SEQ ID NO: 76898 - RNA, 19 nt, Homo sapiens
  misc_RNA (1)...(19): siRNA sense strand
accaugcgauccaucaaga

SEQ ID NO: 76899 - RNA, 19 nt, Homo sapiens
  misc_RNA (1)...(19): siRNA sense strand
caccaaggaacucuacuuc

SEQ ID NO: 76900 - RNA, 19 nt, Homo sapiens
  misc_RNA (1)...(19): siRNA sense strand
auacaaaugccgccugcuu

SEQ ID NO: 76901 - RNA, 19 nt, Homo sapiens
  misc_RNA (1)...(19): siRNA sense strand
caaugacacagaugcuaau

SEQ ID NO: 76902 - RNA, 19 nt, Homo sapiens
  misc_RNA (1)...(19): siRNA sense strand
uuugauaaagugacaggua

SEQ ID NO: 76903 - RNA, 19 nt, Homo sapiens
  misc_RNA (1)...(19): siRNA sense strand
cgagggaccgagcuugaug

SEQ ID NO: 76904 - RNA, 19 nt, Homo sapiens
  misc_RNA (1)...(19): siRNA sense strand
uugaaaagcugggcaaaug

SEQ ID NO: 76905 - RNA, 19 nt, Homo sapiens
  misc_RNA (1)...(19): siRNA sense strand
ucaccaaggaacucuacuu

SEQ ID NO: 76906 - RNA, 19 nt, Homo sapiens
  misc_RNA (1)...(19): siRNA sense strand
ucagggcuguauugaagag

SEQ ID NO: 76907 - RNA, 19 nt, Homo sapiens
  misc_RNA (1)...(19): siRNA sense strand
gaccgagugccuacauauc

SEQ ID NO: 76908 - RNA, 19 nt, Homo sapiens
  misc_RNA (1)...(19): siRNA sense strand
ucgaaacggaacagacaaa

SEQ ID NO: 76909 - RNA, 19 nt, Homo sapiens
  misc_RNA (1)...(19): siRNA sense strand
gugccuacauaucaguaca

SEQ ID NO: 76910 - RNA, 19 nt, Homo sapiens
  misc_RNA (1)...(19): siRNA sense strand
gcagaugaucagggcugua

SEQ ID NO: 76911 - RNA, 19 nt, Homo sapiens
  misc_RNA (1)...(19): siRNA sense strand
ggaagaggcuccugguuug

SEQ ID NO: 76912 - RNA, 19 nt, Homo sapiens
  misc_RNA (1)...(19): siRNA sense strand
gaucagggcuguauugaag

SEQ ID NO: 76913 - RNA, 19 nt, Homo sapiens
  misc_RNA (1)...(19): siRNA sense strand
gggcaaaugcaucauaaua

SEQ ID NO: 76914 - RNA, 19 nt, Homo sapiens
  misc_RNA (1)...(19): siRNA sense strand
gaagaggaccauacaaaug

SEQ ID NO: 76915 - RNA, 19 nt, Homo sapiens
  misc_RNA (1)...(19): siRNA sense strand
gaacucuacuucagucaau

SEQ ID NO: 76916 - RNA, 19 nt, Homo sapiens
  misc_RNA (1)...(19): siRNA sense strand
ggcaaaugcaucauaauaa

SEQ ID NO: 76917 - RNA, 19 nt, Homo sapiens
  misc_RNA (1)...(19): siRNA sense strand
gaugcaagaucugcuuaaa

SEQ ID NO: 76918 - RNA, 19 nt, Homo sapiens
  misc_RNA (1)...(19): siRNA sense strand
uauaaugacugcucuugug

SEQ ID NO: 76919 - RNA, 19 nt, Homo sapiens
  misc_RNA (1)...(19): siRNA sense strand
uaccgucccucuucaguaa

SEQ ID NO: 76920 - RNA, 19 nt, Homo sapiens
  misc_RNA (1)...(19): siRNA sense strand
ccaaggaacucuacuucag

SEQ ID NO: 76921 - RNA, 19 nt, Homo sapiens
  misc_RNA (1)...(19): siRNA sense strand
gaaacggaacagacaaaga

SEQ ID NO: 76922 - RNA, 19 nt, Homo sapiens
  misc_RNA (1)...(19): siRNA sense strand
gacccacacuuccaugaga

SEQ ID NO: 76923 - RNA, 19 nt, Homo sapiens
  misc_RNA (1)...(19): siRNA sense strand
ccgaggcgcucuucaagug

SEQ ID NO: 76924 - RNA, 19 nt, Homo sapiens
  misc_RNA (1)...(19): siRNA sense strand
aagauucaguggaugcuaa

SEQ ID NO: 76925 - RNA, 19 nt, Homo sapiens
  misc_RNA (1)...(19): siRNA sense strand
gaugaucagggcuguauug

SEQ ID NO: 76926 - RNA, 19 nt, Homo sapiens
  misc_RNA (1)...(19): siRNA sense strand
ccagaccgguccucguuug

SEQ ID NO: 76927 - RNA, 19 nt, Homo sapiens
  misc_RNA (1)...(19): siRNA sense strand
aaacggaacagacaaagau

SEQ ID NO: 76928 - RNA, 19 nt, Homo sapiens
  misc_RNA (1)...(19): siRNA sense strand
cuuaagccauggagaagaa

SEQ ID NO: 76929 - RNA, 19 nt, Homo sapiens
  misc_RNA (1)...(19): siRNA sense strand
gggaccgagugccuacaua

SEQ ID NO: 76930 - RNA, 19 nt, Homo sapiens
  misc_RNA (1)...(19): siRNA sense strand
ucaaugacacagaugcuaa

SEQ ID NO: 76931 - RNA, 19 nt, Homo sapiens
  misc_RNA (1)...(19): siRNA sense strand
ugacgugauugucuauaau

SEQ ID NO: 76932 - RNA, 19 nt, Homo sapiens
  misc_RNA (1)...(19): siRNA sense strand
cuacauaucaguacaacau

SEQ ID NO: 76933 - RNA, 19 nt, Homo sapiens
  misc_RNA (1)...(19): siRNA sense strand
ggaccgagugccuacauau

SEQ ID NO: 76934 - RNA, 19 nt, Homo sapiens
  misc_RNA (1)...(19): siRNA sense strand
gguugaggauucagcaaau

SEQ ID NO: 76935 - RNA, 19 nt, Homo sapiens
  misc_RNA (1)...(19): siRNA sense strand
ugaagaggaccauacaaau

SEQ ID NO: 76936 - RNA, 19 nt, Homo sapiens
  misc_RNA (1)...(19): siRNA sense strand
gcccaucaaugacacagau

SEQ ID NO: 76937 - RNA, 19 nt, Homo sapiens
  misc_RNA (1)...(19): siRNA sense strand
acauaucaguacaacauga

SEQ ID NO: 76938 - RNA, 19 nt, Homo sapiens
  misc_RNA (1)...(19): siRNA sense strand
ccacgguuccaggcuauua

SEQ ID NO: 76939 - RNA, 19 nt, Homo sapiens
  misc_RNA (1)...(19): siRNA sense strand
guaccgucccucuucagua

SEQ ID NO: 76940 - RNA, 19 nt, Homo sapiens
  misc_RNA (1)...(19): siRNA sense strand
cagggugaaugacagaguu

SEQ ID NO: 76941 - RNA, 19 nt, Homo sapiens
  misc_RNA (1)...(19): siRNA sense strand
gcuaauccucgauacaaga

SEQ ID NO: 76942 - RNA, 19 nt, Homo sapiens
  misc_RNA (1)...(19): siRNA sense strand
cugggcaaaugcaucauaa

SEQ ID NO: 76943 - RNA, 19 nt, Homo sapiens
  misc_RNA (1)...(19): siRNA sense strand
ugacacagaugcuaauccu

SEQ ID NO: 76944 - RNA, 19 nt, Homo sapiens
  misc_RNA (1)...(19): siRNA sense strand
cugaagaggaccauacaaa

SEQ ID NO: 76945 - RNA, 19 nt, Homo sapiens
  misc_RNA (1)...(19): siRNA sense strand
uugacgugauugucuauaa

SEQ ID NO: 76946 - RNA, 19 nt, Homo sapiens
  misc_RNA (1)...(19): siRNA sense strand
uugauaaagugacagguau

SEQ ID NO: 76947 - RNA, 19 nt, Homo sapiens
  misc_RNA (1)...(19): siRNA sense strand
gcugggcaaaugcaucaua

SEQ ID NO: 76948 - RNA, 19 nt, Homo sapiens
  misc_RNA (1)...(19): siRNA sense strand
gaccgguccucguuuguac

SEQ ID NO: 76949 - RNA, 19 nt, Homo sapiens
  misc_RNA (1)...(19): siRNA sense strand
gaagauucaguggaugcua

SEQ ID NO: 76950 - RNA, 19 nt, Homo sapiens
  misc_RNA (1)...(19): siRNA sense strand
gugauugucuauaaugacu

SEQ ID NO: 76951 - RNA, 19 nt, Homo sapiens
  misc_RNA (1)...(19): siRNA sense strand
cagaugcuaauccucgaua

SEQ ID NO: 76952 - RNA, 19 nt, Homo sapiens
  misc_RNA (1)...(19): siRNA sense strand
ggaacucuacuucagucaa

SEQ ID NO: 76953 - RNA, 19 nt, Homo sapiens
  misc_RNA (1)...(19): siRNA sense strand
caaggaacucuacuucagu

SEQ ID NO: 76954 - RNA, 19 nt, Homo sapiens
  misc_RNA (1)...(19): siRNA sense strand
ccucuuaagccauggagaa

SEQ ID NO: 76955 - RNA, 19 nt, Homo sapiens
  misc_RNA (1)...(19): siRNA sense strand
gaagaggcuccugguuugu

SEQ ID NO: 76956 - RNA, 19 nt, Homo sapiens
  misc_RNA (1)...(19): siRNA sense strand
gacgugauugucuauaaug

SEQ ID NO: 76957 - RNA, 19 nt, Homo sapiens
  misc_RNA (1)...(19): siRNA sense strand
cagaugaucagggcuguau

SEQ ID NO: 76958 - RNA, 19 nt, Homo sapiens
  misc_RNA (1)...(19): siRNA sense strand
guugaggauucagcaaaug

SEQ ID NO: 76959 - RNA, 19 nt, Homo sapiens
  misc_RNA (1)...(19): siRNA sense strand
cauaucaguacaacaugaa

SEQ ID NO: 76960 - RNA, 19 nt, Homo sapiens
  misc_RNA (1)...(19): siRNA sense strand
ucuccaugcucaccaagga

SEQ ID NO: 76961 - RNA, 19 nt, Homo sapiens
  misc_RNA (1)...(19): siRNA sense strand
ggguugaggauucagcaaa

SEQ ID NO: 76962 - RNA, 19 nt, Homo sapiens
  misc_RNA (1)...(19): siRNA sense strand
gagggaccgagcuugauga

SEQ ID NO: 76963 - RNA, 19 nt, Homo sapiens
  misc_RNA (1)...(19): siRNA sense strand
gauaaagugacagguaugg

SEQ ID NO: 76964 - RNA, 19 nt, Homo sapiens
  misc_RNA (1)...(19): siRNA sense strand
accaugcgauccaucaaga

SEQ ID NO: 76965 - RNA, 19 nt, Homo sapiens
  misc_RNA (1)...(19): siRNA sense strand
caccaaggaacucuacuuc

SEQ ID NO: 76966 - RNA, 19 nt, Homo sapiens
  misc_RNA (1)...(19): siRNA sense strand
auacaaaugccgccugcuu

SEQ ID NO: 76967 - RNA, 19 nt, Homo sapiens
  misc_RNA (1)...(19): siRNA sense strand
caaugacacagaugcuaau

SEQ ID NO: 76968 - RNA, 19 nt, Homo sapiens
  misc_RNA (1)...(19): siRNA sense strand
uuugauaaagugacaggua

SEQ ID NO: 76969 - RNA, 19 nt, Homo sapiens
  misc_RNA (1)...(19): siRNA sense strand
cgagggaccgagcuugaug

SEQ ID NO: 76970 - RNA, 19 nt, Homo sapiens
  misc_RNA (1)...(19): siRNA sense strand
uugaaaagcugggcaaaug

SEQ ID NO: 76971 - RNA, 19 nt, Homo sapiens
  misc_RNA (1)...(19): siRNA sense strand
ucaccaaggaacucuacuu

SEQ ID NO: 76972 - RNA, 19 nt, Homo sapiens
  misc_RNA (1)...(19): siRNA sense strand
ucagggcuguauugaagag

SEQ ID NO: 76973 - RNA, 19 nt, Homo sapiens
  misc_RNA (1)...(19): siRNA sense strand
gaccgagugccuacauauc

SEQ ID NO: 76974 - RNA, 19 nt, Homo sapiens
  misc_RNA (1)...(19): siRNA sense strand
ucgaaacggaacagacaaa

SEQ ID NO: 76975 - RNA, 19 nt, Homo sapiens
  misc_RNA (1)...(19): siRNA sense strand
gugccuacauaucaguaca

SEQ ID NO: 76976 - RNA, 19 nt, Homo sapiens
  misc_RNA (1)...(19): siRNA sense strand
gcagaugaucagggcugua

SEQ ID NO: 76977 - RNA, 19 nt, Homo sapiens
  misc_RNA (1)...(19): siRNA sense strand
ggaagaggcuccugguuug

SEQ ID NO: 76978 - RNA, 19 nt, Homo sapiens
  misc_RNA (1)...(19): siRNA sense strand
gaucagggcuguauugaag

SEQ ID NO: 76979 - RNA, 19 nt, Homo sapiens
  misc_RNA (1)...(19): siRNA sense strand
gggcaaaugcaucauaaua

SEQ ID NO: 76980 - RNA, 19 nt, Homo sapiens
  misc_RNA (1)...(19): siRNA sense strand
gaagaggaccauacaaaug

SEQ ID NO: 76981 - RNA, 19 nt, Homo sapiens
  misc_RNA (1)...(19): siRNA sense strand
gaacucuacuucagucaau

SEQ ID NO: 76982 - RNA, 19 nt, Homo sapiens
  misc_RNA (1)...(19): siRNA sense strand
ggcaaaugcaucauaauaa

SEQ ID NO: 76983 - RNA, 19 nt, Homo sapiens
  misc_RNA (1)...(19): siRNA sense strand
gaugcaagaucugcuuaaa

SEQ ID NO: 76984 - RNA, 19 nt, Homo sapiens
  misc_RNA (1)...(19): siRNA sense strand
uauaaugacugcucuugug

SEQ ID NO: 76985 - RNA, 19 nt, Homo sapiens
  misc_RNA (1)...(19): siRNA sense strand
uaccgucccucuucaguaa

SEQ ID NO: 76986 - RNA, 19 nt, Homo sapiens
  misc_RNA (1)...(19): siRNA sense strand
ccaaggaacucuacuucag

SEQ ID NO: 76987 - RNA, 19 nt, Homo sapiens
  misc_RNA (1)...(19): siRNA sense strand
gaaacggaacagacaaaga

SEQ ID NO: 76988 - RNA, 19 nt, Homo sapiens
  misc_RNA (1)...(19): siRNA sense strand
gacccacacuuccaugaga

SEQ ID NO: 76989 - RNA, 19 nt, Homo sapiens
  misc_RNA (1)...(19): siRNA sense strand
ccgaggcgcucuucaagug

SEQ ID NO: 76990 - RNA, 19 nt, Homo sapiens
  misc_RNA (1)...(19): siRNA sense strand
aagauucaguggaugcuaa

SEQ ID NO: 76991 - RNA, 19 nt, Homo sapiens
  misc_RNA (1)...(19): siRNA sense strand
gaugaucagggcuguauug

SEQ ID NO: 76992 - RNA, 19 nt, Homo sapiens
  misc_RNA (1)...(19): siRNA sense strand
ccagaccgguccucguuug

SEQ ID NO: 76993 - RNA, 19 nt, Homo sapiens
  misc_RNA (1)...(19): siRNA sense strand
aaacggaacagacaaagau

SEQ ID NO: 76994 - RNA, 19 nt, Homo sapiens
  misc_RNA (1)...(19): siRNA sense strand
cuuaagccauggagaagaa

SEQ ID NO: 76995 - RNA, 19 nt, Homo sapiens
  misc_RNA (1)...(19): siRNA sense strand
gggaccgagugccuacaua

SEQ ID NO: 76996 - RNA, 19 nt, Homo sapiens
  misc_RNA (1)...(19): siRNA sense strand
ucaaugacacagaugcuaa

SEQ ID NO: 76997 - RNA, 19 nt, Homo sapiens
  misc_RNA (1)...(19): siRNA sense strand
ugacgugauugucuauaau

SEQ ID NO: 76998 - RNA, 19 nt, Homo sapiens
  misc_RNA (1)...(19): siRNA sense strand
cuacauaucaguacaacau

SEQ ID NO: 76999 - RNA, 19 nt, Homo sapiens
  misc_RNA (1)...(19): siRNA sense strand
ggaccgagugccuacauau

SEQ ID NO: 77000 - RNA, 19 nt, Homo sapiens
  misc_RNA (1)...(19): siRNA sense strand
gguugaggauucagcaaau

SEQ ID NO: 77001 - RNA, 19 nt, Homo sapiens
  misc_RNA (1)...(19): siRNA sense strand
ugaagaggaccauacaaau

SEQ ID NO: 77002 - RNA, 19 nt, Homo sapiens
  misc_RNA (1)...(19): siRNA sense strand
gcccaucaaugacacagau

SEQ ID NO: 77003 - RNA, 19 nt, Homo sapiens
  misc_RNA (1)...(19): siRNA sense strand
acauaucaguacaacauga

SEQ ID NO: 77004 - RNA, 19 nt, Homo sapiens
  misc_RNA (1)...(19): siRNA sense strand
ccacgguuccaggcuauua

SEQ ID NO: 77005 - RNA, 19 nt, Homo sapiens
  misc_RNA (1)...(19): siRNA sense strand
guaccgucccucuucagua

SEQ ID NO: 77006 - RNA, 19 nt, Homo sapiens
  misc_RNA (1)...(19): siRNA sense strand
cagggugaaugacagaguu

SEQ ID NO: 77007 - RNA, 19 nt, Homo sapiens
  misc_RNA (1)...(19): siRNA sense strand
gcuaauccucgauacaaga

SEQ ID NO: 77008 - RNA, 19 nt, Homo sapiens
  misc_RNA (1)...(19): siRNA sense strand
cugggcaaaugcaucauaa

SEQ ID NO: 77009 - RNA, 19 nt, Homo sapiens
  misc_RNA (1)...(19): siRNA sense strand
ugacacagaugcuaauccu

SEQ ID NO: 77010 - RNA, 19 nt, Homo sapiens
  misc_RNA (1)...(19): siRNA sense strand
cugaagaggaccauacaaa

SEQ ID NO: 77011 - RNA, 19 nt, Homo sapiens
  misc_RNA (1)...(19): siRNA sense strand
uugacgugauugucuauaa

SEQ ID NO: 77012 - RNA, 19 nt, Homo sapiens
  misc_RNA (1)...(19): siRNA sense strand
uugauaaagugacagguau

SEQ ID NO: 77013 - RNA, 19 nt, Homo sapiens
  misc_RNA (1)...(19): siRNA sense strand
gcugggcaaaugcaucaua

SEQ ID NO: 77014 - RNA, 19 nt, Homo sapiens
  misc_RNA (1)...(19): siRNA sense strand
gaccgguccucguuuguac

SEQ ID NO: 77015 - RNA, 19 nt, Homo sapiens
  misc_RNA (1)...(19): siRNA sense strand
gaagauucaguggaugcua

SEQ ID NO: 77016 - RNA, 19 nt, Homo sapiens
  misc_RNA (1)...(19): siRNA sense strand
gugauugucuauaaugacu

SEQ ID NO: 77017 - RNA, 19 nt, Homo sapiens
  misc_RNA (1)...(19): siRNA sense strand
cagaugcuaauccucgaua

SEQ ID NO: 77018 - RNA, 19 nt, Homo sapiens
  misc_RNA (1)...(19): siRNA sense strand
ggaacucuacuucagucaa

SEQ ID NO: 77019 - RNA, 19 nt, Homo sapiens
  misc_RNA (1)...(19): siRNA sense strand
caaggaacucuacuucagu

SEQ ID NO: 77020 - RNA, 19 nt, Homo sapiens
  misc_RNA (1)...(19): siRNA sense strand
ccucuuaagccauggagaa

SEQ ID NO: 77021 - RNA, 19 nt, Homo sapiens
  misc_RNA (1)...(19): siRNA sense strand
gaagaggcuccugguuugu

SEQ ID NO: 77022 - RNA, 19 nt, Homo sapiens
  misc_RNA (1)...(19): siRNA sense strand
gacgugauugucuauaaug

SEQ ID NO: 77023 - RNA, 19 nt, Homo sapiens
  misc_RNA (1)...(19): siRNA sense strand
cagaugaucagggcuguau

SEQ ID NO: 77024 - RNA, 19 nt, Homo sapiens
  misc_RNA (1)...(19): siRNA sense strand
guugaggauucagcaaaug

SEQ ID NO: 77025 - RNA, 19 nt, Homo sapiens
  misc_RNA (1)...(19): siRNA sense strand
cauaucaguacaacaugaa

SEQ ID NO: 77026 - RNA, 19 nt, Homo sapiens
  misc_RNA (1)...(19): siRNA sense strand
ucuccaugcucaccaagga

SEQ ID NO: 77027 - RNA, 19 nt, Homo sapiens
  misc_RNA (1)...(19): siRNA sense strand
ggguugaggauucagcaaa

SEQ ID NO: 77028 - RNA, 19 nt, Homo sapiens
  misc_RNA (1)...(19): siRNA sense strand
gagggaccgagcuugauga

SEQ ID NO: 77029 - RNA, 19 nt, Homo sapiens
  misc_RNA (1)...(19): siRNA sense strand
gauaaagugacagguaugg

SEQ ID NO: 77030 - RNA, 19 nt, Homo sapiens
  misc_RNA (1)...(19): siRNA sense strand
accaugcgauccaucaaga

SEQ ID NO: 77031 - RNA, 19 nt, Homo sapiens
  misc_RNA (1)...(19): siRNA sense strand
caccaaggaacucuacuuc

SEQ ID NO: 77032 - RNA, 19 nt, Homo sapiens
  misc_RNA (1)...(19): siRNA sense strand
auacaaaugccgccugcuu

SEQ ID NO: 77033 - RNA, 19 nt, Homo sapiens
  misc_RNA (1)...(19): siRNA sense strand
caaugacacagaugcuaau

SEQ ID NO: 77034 - RNA, 19 nt, Homo sapiens
  misc_RNA (1)...(19): siRNA sense strand
uuugauaaagugacaggua

SEQ ID NO: 77035 - RNA, 19 nt, Homo sapiens
  misc_RNA (1)...(19): siRNA sense strand
cgagggaccgagcuugaug

SEQ ID NO: 77036 - RNA, 19 nt, Homo sapiens
  misc_RNA (1)...(19): siRNA sense strand
uugaaaagcugggcaaaug

SEQ ID NO: 77037 - RNA, 19 nt, Homo sapiens
  misc_RNA (1)...(19): siRNA sense strand
ucaccaaggaacucuacuu

SEQ ID NO: 77038 - RNA, 19 nt, Homo sapiens
  misc_RNA (1)...(19): siRNA sense strand
ucagggcuguauugaagag

SEQ ID NO: 77039 - RNA, 19 nt, Homo sapiens
  misc_RNA (1)...(19): siRNA sense strand
gaccgagugccuacauauc

SEQ ID NO: 77040 - RNA, 19 nt, Homo sapiens
  misc_RNA (1)...(19): siRNA sense strand
ucgaaacggaacagacaaa

SEQ ID NO: 77041 - RNA, 19 nt, Homo sapiens
  misc_RNA (1)...(19): siRNA sense strand
gugccuacauaucaguaca

SEQ ID NO: 77042 - RNA, 19 nt, Homo sapiens
  misc_RNA (1)...(19): siRNA sense strand
gcagaugaucagggcugua

SEQ ID NO: 77043 - RNA, 19 nt, Homo sapiens
  misc_RNA (1)...(19): siRNA sense strand
ggaagaggcuccugguuug

SEQ ID NO: 77044 - RNA, 19 nt, Homo sapiens
  misc_RNA (1)...(19): siRNA sense strand
gaucagggcuguauugaag

SEQ ID NO: 77045 - RNA, 19 nt, Homo sapiens
  misc_RNA (1)...(19): siRNA sense strand
gggcaaaugcaucauaaua

SEQ ID NO: 77046 - RNA, 19 nt, Homo sapiens
  misc_RNA (1)...(19): siRNA sense strand
gaagaggaccauacaaaug

SEQ ID NO: 77047 - RNA, 19 nt, Homo sapiens
  misc_RNA (1)...(19): siRNA sense strand
ggcaaaugcaucauaauaa

SEQ ID NO: 77048 - RNA, 19 nt, Homo sapiens
  misc_RNA (1)...(19): siRNA sense strand
gaugcaagaucugcuuaaa

SEQ ID NO: 77049 - RNA, 19 nt, Homo sapiens
  misc_RNA (1)...(19): siRNA sense strand
uauaaugacugcucuugug

SEQ ID NO: 77050 - RNA, 19 nt, Homo sapiens
  misc_RNA (1)...(19): siRNA sense strand
uaccgucccucuucaguaa

SEQ ID NO: 77051 - RNA, 19 nt, Homo sapiens
  misc_RNA (1)...(19): siRNA sense strand
gaaacggaacagacaaaga

SEQ ID NO: 77052 - RNA, 19 nt, Homo sapiens
  misc_RNA (1)...(19): siRNA sense strand
ccgaggcgcucuucaagug

SEQ ID NO: 77053 - RNA, 19 nt, Homo sapiens
  misc_RNA (1)...(19): siRNA sense strand
aagauucaguggaugcuaa

SEQ ID NO: 77054 - RNA, 19 nt, Homo sapiens
  misc_RNA (1)...(19): siRNA sense strand
gaugaucagggcuguauug

SEQ ID NO: 77055 - RNA, 19 nt, Homo sapiens
  misc_RNA (1)...(19): siRNA sense strand
ccagaccgguccucguuug

SEQ ID NO: 77056 - RNA, 19 nt, Homo sapiens
  misc_RNA (1)...(19): siRNA sense strand
aaacggaacagacaaagau

SEQ ID NO: 77057 - RNA, 19 nt, Homo sapiens
  misc_RNA (1)...(19): siRNA sense strand
cuuaagccauggagaagaa

SEQ ID NO: 77058 - RNA, 19 nt, Homo sapiens
  misc_RNA (1)...(19): siRNA sense strand
gggaccgagugccuacaua

SEQ ID NO: 77059 - RNA, 19 nt, Homo sapiens
  misc_RNA (1)...(19): siRNA sense strand
ucaaugacacagaugcuaa

SEQ ID NO: 77060 - RNA, 19 nt, Homo sapiens
  misc_RNA (1)...(19): siRNA sense strand
ugacgugauugucuauaau

SEQ ID NO: 77061 - RNA, 19 nt, Homo sapiens
  misc_RNA (1)...(19): siRNA sense strand
cuacauaucaguacaacau

SEQ ID NO: 77062 - RNA, 19 nt, Homo sapiens
  misc_RNA (1)...(19): siRNA sense strand
ggaccgagugccuacauau

SEQ ID NO: 77063 - RNA, 19 nt, Homo sapiens
  misc_RNA (1)...(19): siRNA sense strand
gguugaggauucagcaaau

SEQ ID NO: 77064 - RNA, 19 nt, Homo sapiens
  misc_RNA (1)...(19): siRNA sense strand
ugaagaggaccauacaaau

SEQ ID NO: 77065 - RNA, 19 nt, Homo sapiens
  misc_RNA (1)...(19): siRNA sense strand
gcccaucaaugacacagau

SEQ ID NO: 77066 - RNA, 19 nt, Homo sapiens
  misc_RNA (1)...(19): siRNA sense strand
acauaucaguacaacauga

SEQ ID NO: 77067 - RNA, 19 nt, Homo sapiens
  misc_RNA (1)...(19): siRNA sense strand
ccacgguuccaggcuauua

SEQ ID NO: 77068 - RNA, 19 nt, Homo sapiens
  misc_RNA (1)...(19): siRNA sense strand
guaccgucccucuucagua

SEQ ID NO: 77069 - RNA, 19 nt, Homo sapiens
  misc_RNA (1)...(19): siRNA sense strand
gcuaauccucgauacaaga

SEQ ID NO: 77070 - RNA, 19 nt, Homo sapiens
  misc_RNA (1)...(19): siRNA sense strand
cugggcaaaugcaucauaa

SEQ ID NO: 77071 - RNA, 19 nt, Homo sapiens
  misc_RNA (1)...(19): siRNA sense strand
ugacacagaugcuaauccu

SEQ ID NO: 77072 - RNA, 19 nt, Homo sapiens
  misc_RNA (1)...(19): siRNA sense strand
cugaagaggaccauacaaa

SEQ ID NO: 77073 - RNA, 19 nt, Homo sapiens
  misc_RNA (1)...(19): siRNA sense strand
uugacgugauugucuauaa

SEQ ID NO: 77074 - RNA, 19 nt, Homo sapiens
  misc_RNA (1)...(19): siRNA sense strand
uugauaaagugacagguau

SEQ ID NO: 77075 - RNA, 19 nt, Homo sapiens
  misc_RNA (1)...(19): siRNA sense strand
gaccgguccucguuuguac

SEQ ID NO: 77076 - RNA, 19 nt, Homo sapiens
  misc_RNA (1)...(19): siRNA sense strand
gcugggcaaaugcaucaua

SEQ ID NO: 77077 - RNA, 19 nt, Homo sapiens
  misc_RNA (1)...(19): siRNA sense strand
gugauugucuauaaugacu

SEQ ID NO: 77078 - RNA, 19 nt, Homo sapiens
  misc_RNA (1)...(19): siRNA sense strand
gaagauucaguggaugcua

SEQ ID NO: 77079 - RNA, 19 nt, Homo sapiens
  misc_RNA (1)...(19): siRNA sense strand
cagaugcuaauccucgaua

SEQ ID NO: 77080 - RNA, 19 nt, Homo sapiens
  misc_RNA (1)...(19): siRNA sense strand
ccucuuaagccauggagaa

SEQ ID NO: 77081 - RNA, 19 nt, Homo sapiens
  misc_RNA (1)...(19): siRNA sense strand
gaagaggcuccugguuugu

SEQ ID NO: 77082 - RNA, 19 nt, Homo sapiens
  misc_RNA (1)...(19): siRNA sense strand
gacgugauugucuauaaug

SEQ ID NO: 77083 - RNA, 19 nt, Homo sapiens
  misc_RNA (1)...(19): siRNA sense strand
guugaggauucagcaaaug

SEQ ID NO: 77084 - RNA, 19 nt, Homo sapiens
  misc_RNA (1)...(19): siRNA sense strand
cagaugaucagggcuguau

SEQ ID NO: 77085 - RNA, 19 nt, Homo sapiens
  misc_RNA (1)...(19): siRNA sense strand
cauaucaguacaacaugaa

SEQ ID NO: 77086 - RNA, 19 nt, Homo sapiens
  misc_RNA (1)...(19): siRNA sense strand
gagggaccgagcuugauga

SEQ ID NO: 77087 - RNA, 19 nt, Homo sapiens
  misc_RNA (1)...(19): siRNA sense strand
ggguugaggauucagcaaa

SEQ ID NO: 77088 - RNA, 19 nt, Homo sapiens
  misc_RNA (1)...(19): siRNA sense strand
gauaaagugacagguaugg

SEQ ID NO: 77089 - RNA, 19 nt, Homo sapiens
  misc_RNA (1)...(19): siRNA sense strand
accaugcgauccaucaaga

SEQ ID NO: 77090 - RNA, 19 nt, Homo sapiens
  misc_RNA (1)...(19): siRNA sense strand
auacaaaugccgccugcuu

SEQ ID NO: 77091 - RNA, 19 nt, Homo sapiens
  misc_RNA (1)...(19): siRNA sense strand
caaugacacagaugcuaau

SEQ ID NO: 77092 - RNA, 19 nt, Homo sapiens
  misc_RNA (1)...(19): siRNA sense strand
uugaaaagcugggcaaaug

SEQ ID NO: 77093 - RNA, 19 nt, Homo sapiens
  misc_RNA (1)...(19): siRNA sense strand
cgagggaccgagcuugaug

SEQ ID NO: 77094 - RNA, 19 nt, Homo sapiens
  misc_RNA (1)...(19): siRNA sense strand
uuugauaaagugacaggua

SEQ ID NO: 77095 - RNA, 19 nt, Homo sapiens
  misc_RNA (1)...(19): siRNA sense strand
ucagggcuguauugaagag

SEQ ID NO: 77096 - RNA, 19 nt, Homo sapiens
  misc_RNA (1)...(19): siRNA sense strand
gaccgagugccuacauauc

SEQ ID NO: 77097 - RNA, 19 nt, Homo sapiens
  misc_RNA (1)...(19): siRNA sense strand
ucgaaacggaacagacaaa

SEQ ID NO: 77098 - RNA, 19 nt, Homo sapiens
  misc_RNA (1)...(19): siRNA sense strand
gcagaugaucagggcugua

SEQ ID NO: 77099 - RNA, 19 nt, Homo sapiens
  misc_RNA (1)...(19): siRNA sense strand
gugccuacauaucaguaca

SEQ ID NO: 77100 - RNA, 19 nt, Homo sapiens
  misc_RNA (1)...(19): siRNA sense strand
ggacaaaguuuaccaaaug

SEQ ID NO: 77101 - RNA, 19 nt, Homo sapiens
  misc_RNA (1)...(19): siRNA sense strand
caacgacuaugaagaauuc

SEQ ID NO: 77102 - RNA, 19 nt, Homo sapiens
  misc_RNA (1)...(19): siRNA sense strand
gaucagaauugaggucuuu

SEQ ID NO: 77103 - RNA, 19 nt, Homo sapiens
  misc_RNA (1)...(19): siRNA sense strand
gaagugagcagaucagaau

SEQ ID NO: 77104 - RNA, 19 nt, Homo sapiens
  misc_RNA (1)...(19): siRNA sense strand
gaggaaaucuccaaaugca

SEQ ID NO: 77105 - RNA, 19 nt, Homo sapiens
  misc_RNA (1)...(19): siRNA sense strand
ggaaaucuccaaaugcaaa

SEQ ID NO: 77106 - RNA, 19 nt, Homo sapiens
  misc_RNA (1)...(19): siRNA sense strand
caaacuggaugaugacaug

SEQ ID NO: 77107 - RNA, 19 nt, Homo sapiens
  misc_RNA (1)...(19): siRNA sense strand
agacuggauuugcugauua

SEQ ID NO: 77108 - RNA, 19 nt, Homo sapiens
  misc_RNA (1)...(19): siRNA sense strand
gacaugaaccugcuggaua

SEQ ID NO: 77109 - RNA, 19 nt, Homo sapiens
  misc_RNA (1)...(19): siRNA sense strand
gaagauaaucaacgacuau

SEQ ID NO: 77110 - RNA, 19 nt, Homo sapiens
  misc_RNA (1)...(19): siRNA sense strand
gacaaaguuuaccaaauga

SEQ ID NO: 77111 - RNA, 19 nt, Homo sapiens
  misc_RNA (1)...(19): siRNA sense strand
cagcagaaaucuuuaugau

SEQ ID NO: 77112 - RNA, 19 nt, Homo sapiens
  misc_RNA (1)...(19): siRNA sense strand
gaaaggaggagauggaaag

SEQ ID NO: 77113 - RNA, 19 nt, Homo sapiens
  misc_RNA (1)...(19): siRNA sense strand
gauaaucaacgacuaugaa

SEQ ID NO: 77114 - RNA, 19 nt, Homo sapiens
  misc_RNA (1)...(19): siRNA sense strand
gaucuggccucccucaagu

SEQ ID NO: 77115 - RNA, 19 nt, Homo sapiens
  misc_RNA (1)...(19): siRNA sense strand
gaauugaggucuuuuaagu

SEQ ID NO: 77116 - RNA, 19 nt, Homo sapiens
  misc_RNA (1)...(19): siRNA sense strand
aagaggaaaucuccaaaug

SEQ ID NO: 77117 - RNA, 19 nt, Homo sapiens
  misc_RNA (1)...(19): siRNA sense strand
gcaagaacccaucaaggau

SEQ ID NO: 77118 - RNA, 19 nt, Homo sapiens
  misc_RNA (1)...(19): siRNA sense strand
ggaaagggaacuucagaca

SEQ ID NO: 77119 - RNA, 19 nt, Homo sapiens
  misc_RNA (1)...(19): siRNA sense strand
gcccaaacuucacagcauu

SEQ ID NO: 77120 - RNA, 19 nt, Homo sapiens
  misc_RNA (1)...(19): siRNA sense strand
acaugaaccugcuggauau

SEQ ID NO: 77121 - RNA, 19 nt, Homo sapiens
  misc_RNA (1)...(19): siRNA sense strand
gucaugcucuaucagauuu

SEQ ID NO: 77122 - RNA, 19 nt, Homo sapiens
  misc_RNA (1)...(19): siRNA sense strand
ucauagagauggagaagag

SEQ ID NO: 77123 - RNA, 19 nt, Homo sapiens
  misc_RNA (1)...(19): siRNA sense strand
ucuaucagauuucagaaga

SEQ ID NO: 77124 - RNA, 19 nt, Homo sapiens
  misc_RNA (1)...(19): siRNA sense strand
ugaagauaaucaacgacua

SEQ ID NO: 77125 - RNA, 19 nt, Homo sapiens
  misc_RNA (1)...(19): siRNA sense strand
acaagagccugcugaagau

SEQ ID NO: 77126 - RNA, 19 nt, Homo sapiens
  misc_RNA (1)...(19): siRNA sense strand
aaugcaaacuggaugauga

SEQ ID NO: 77127 - RNA, 19 nt, Homo sapiens
  misc_RNA (1)...(19): siRNA sense strand
uggauuugcugauuaccua

SEQ ID NO: 77128 - RNA, 19 nt, Homo sapiens
  misc_RNA (1)...(19): siRNA sense strand
gugagcagaucagaauuga

SEQ ID NO: 77129 - RNA, 19 nt, Homo sapiens
  misc_RNA (1)...(19): siRNA sense strand
gaauggaacacacuuggau

SEQ ID NO: 77130 - RNA, 19 nt, Homo sapiens
  misc_RNA (1)...(19): siRNA sense strand
gggagaaagugcccaaacu

SEQ ID NO: 77131 - RNA, 19 nt, Homo sapiens
  misc_RNA (1)...(19): siRNA sense strand
aaucaacgacuaugaagaa

SEQ ID NO: 77132 - RNA, 19 nt, Homo sapiens
  misc_RNA (1)...(19): siRNA sense strand
ccaggcagggcucaaauuu

SEQ ID NO: 77133 - RNA, 19 nt, Homo sapiens
  misc_RNA (1)...(19): siRNA sense strand
gcaagaggaaaucuccaaa

SEQ ID NO: 77134 - RNA, 19 nt, Homo sapiens
  misc_RNA (1)...(19): siRNA sense strand
gaaaguuggacauccugaa

SEQ ID NO: 77135 - RNA, 19 nt, Homo sapiens
  misc_RNA (1)...(19): siRNA sense strand
gaucaucaacaaucacaau

SEQ ID NO: 77136 - RNA, 19 nt, Homo sapiens
  misc_RNA (1)...(19): siRNA sense strand
gacuucagcagaaaucuuu

SEQ ID NO: 77137 - RNA, 19 nt, Homo sapiens
  misc_RNA (1)...(19): siRNA sense strand
cagaagaagugagcagauc

SEQ ID NO: 77138 - RNA, 19 nt, Homo sapiens
  misc_RNA (1)...(19): siRNA sense strand
aacaagagccugcugaaga

SEQ ID NO: 77139 - RNA, 19 nt, Homo sapiens
  misc_RNA (1)...(19): siRNA sense strand
cugauuaccuaccuaaaca

SEQ ID NO: 77140 - RNA, 19 nt, Homo sapiens
  misc_RNA (1)...(19): siRNA sense strand
ggucaugcucuaucagauu

SEQ ID NO: 77141 - RNA, 19 nt, Homo sapiens
  misc_RNA (1)...(19): siRNA sense strand
gaagcaagaacccaucaag

SEQ ID NO: 77142 - RNA, 19 nt, Homo sapiens
  misc_RNA (1)...(19): siRNA sense strand
uuaccuaccuaaacacuag

SEQ ID NO: 77143 - RNA, 19 nt, Homo sapiens
  misc_RNA (1)...(19): siRNA sense strand
aggcagggcucaaauuucu

SEQ ID NO: 77144 - RNA, 19 nt, Homo sapiens
  misc_RNA (1)...(19): siRNA sense strand
cgaauuaauagacuggauu

SEQ ID NO: 77145 - RNA, 19 nt, Homo sapiens
  misc_RNA (1)...(19): siRNA sense strand
caagaggaaaucuccaaau

SEQ ID NO: 77146 - RNA, 19 nt, Homo sapiens
  misc_RNA (1)...(19): siRNA sense strand
ccaaaugcaaacuggauga

SEQ ID NO: 77147 - RNA, 19 nt, Homo sapiens
  misc_RNA (1)...(19): siRNA sense strand
ggacuucagcagaaaucuu

SEQ ID NO: 77148 - RNA, 19 nt, Homo sapiens
  misc_RNA (1)...(19): siRNA sense strand
aagagaauguuggaggaaa

SEQ ID NO: 77149 - RNA, 19 nt, Homo sapiens
  misc_RNA (1)...(19): siRNA sense strand
ggaauggaacacacuugga

SEQ ID NO: 77150 - RNA, 19 nt, Homo sapiens
  misc_RNA (1)...(19): siRNA sense strand
uggacaaaguuuaccaaau

SEQ ID NO: 77151 - RNA, 19 nt, Homo sapiens
  misc_RNA (1)...(19): siRNA sense strand
aaaguuggacauccugaaa

SEQ ID NO: 77152 - RNA, 19 nt, Homo sapiens
  misc_RNA (1)...(19): siRNA sense strand
gcucaaauuucugccuaca

SEQ ID NO: 77153 - RNA, 19 nt, Homo sapiens
  misc_RNA (1)...(19): siRNA sense strand
uagacuggauuugcugauu

SEQ ID NO: 77154 - RNA, 19 nt, Homo sapiens
  misc_RNA (1)...(19): siRNA sense strand
ggacuacauuccgcaaagg

SEQ ID NO: 77155 - RNA, 19 nt, Homo sapiens
  misc_RNA (1)...(19): siRNA sense strand
uaucagauuucagaagaag

SEQ ID NO: 77156 - RNA, 19 nt, Homo sapiens
  misc_RNA (1)...(19): siRNA sense strand
uuaauagacuggauuugcu

SEQ ID NO: 77157 - RNA, 19 nt, Homo sapiens
  misc_RNA (1)...(19): siRNA sense strand
gggauacugucugaucauc

SEQ ID NO: 77158 - RNA, 19 nt, Homo sapiens
  misc_RNA (1)...(19): siRNA sense strand
aagagucugugcccaaauc

SEQ ID NO: 77159 - RNA, 19 nt, Homo sapiens
  misc_RNA (1)...(19): siRNA sense strand
caagagccugcugaagaua

SEQ ID NO: 77160 - RNA, 19 nt, Homo sapiens
  misc_RNA (1)...(19): siRNA sense strand
cuagaaaggaggagaugga

SEQ ID NO: 77161 - RNA, 19 nt, Homo sapiens
  misc_RNA (1)...(19): siRNA sense strand
ggagauggaaagggaacuu

SEQ ID NO: 77162 - RNA, 19 nt, Homo sapiens
  misc_RNA (1)...(19): siRNA sense strand
aggaugccuugauguuauu

SEQ ID NO: 77163 - RNA, 19 nt, Homo sapiens
  misc_RNA (1)...(19): siRNA sense strand
ucaacgacuaugaagaauu

SEQ ID NO: 77164 - RNA, 19 nt, Homo sapiens
  misc_RNA (1)...(19): siRNA sense strand
gaauguuggaggaaagcaa

SEQ ID NO: 77165 - RNA, 19 nt, Homo sapiens
  misc_RNA (1)...(19): siRNA sense strand
gagaaggaaaguuggacau

SEQ ID NO: 77166 - RNA, 19 nt, Homo sapiens
  misc_RNA (1)...(19): siRNA sense strand
gaagaagugagcagaucag

SEQ ID NO: 77167 - RNA, 19 nt, Homo sapiens
  misc_RNA (1)...(19): siRNA sense strand
gacuggauuugcugauuac

SEQ ID NO: 77168 - RNA, 19 nt, Homo sapiens
  misc_RNA (1)...(19): siRNA sense strand
agcaagaacccaucaagga

SEQ ID NO: 77169 - RNA, 19 nt, Homo sapiens
  misc_RNA (1)...(19): siRNA sense strand
caacaagagccugcugaag

SEQ ID NO: 77170 - RNA, 19 nt, Homo sapiens
  misc_RNA (1)...(19): siRNA sense strand
ucagcagaaaucuuuauga

SEQ ID NO: 77171 - RNA, 19 nt, Homo sapiens
  misc_RNA (1)...(19): siRNA sense strand
cugcucuuccgaauuaaua

SEQ ID NO: 77172 - RNA, 19 nt, Homo sapiens
  misc_RNA (1)...(19): siRNA sense strand
ggaagcaagaacccaucaa

SEQ ID NO: 77173 - RNA, 19 nt, Homo sapiens
  misc_RNA (1)...(19): siRNA sense strand
ucagauuucagaagaagug

SEQ ID NO: 77174 - RNA, 19 nt, Homo sapiens
  misc_RNA (1)...(19): siRNA sense strand
gcugauuaccuaccuaaac

SEQ ID NO: 77175 - RNA, 19 nt, Homo sapiens
  misc_RNA (1)...(19): siRNA sense strand
cccaaacuucacagcauua

SEQ ID NO: 77176 - RNA, 19 nt, Homo sapiens
  misc_RNA (1)...(19): siRNA sense strand
ucaacaagagccugcugaa

SEQ ID NO: 77177 - RNA, 19 nt, Homo sapiens
  misc_RNA (1)...(19): siRNA sense strand
ccugggagaaggaaaguug

SEQ ID NO: 77178 - RNA, 19 nt, Homo sapiens
  misc_RNA (1)...(19): siRNA sense strand
ugaaccugcuggauauuuu

SEQ ID NO: 77179 - RNA, 19 nt, Homo sapiens
  misc_RNA (1)...(19): siRNA sense strand
gcaaucuguccuuccugaa

SEQ ID NO: 77180 - RNA, 19 nt, Homo sapiens
  misc_RNA (1)...(19): siRNA sense strand
agagaauguuggaggaaag

SEQ ID NO: 77181 - RNA, 19 nt, Homo sapiens
  misc_RNA (1)...(19): siRNA sense strand
gcaaacuggaugaugacau

SEQ ID NO: 77182 - RNA, 19 nt, Homo sapiens
  misc_RNA (1)...(19): siRNA sense strand
aaagcaaucuguccuuccu

SEQ ID NO: 77183 - RNA, 19 nt, Homo sapiens
  misc_RNA (1)...(19): siRNA sense strand
cuaucagauuucagaagaa

SEQ ID NO: 77184 - RNA, 19 nt, Homo sapiens
  misc_RNA (1)...(19): siRNA sense strand
gggucaugcucuaucagau

SEQ ID NO: 77185 - RNA, 19 nt, Homo sapiens
  misc_RNA (1)...(19): siRNA sense strand
aaaagagucugugcccaaa

SEQ ID NO: 77186 - RNA, 19 nt, Homo sapiens
  misc_RNA (1)...(19): siRNA sense strand
caaaagcacgggagaaagu

SEQ ID NO: 77187 - RNA, 19 nt, Homo sapiens
  misc_RNA (1)...(19): siRNA sense strand
gugcccaaaucaacaagag

SEQ ID NO: 77188 - RNA, 19 nt, Homo sapiens
  misc_RNA (1)...(19): siRNA sense strand
uggacuacauuccgcaaag

SEQ ID NO: 77189 - RNA, 19 nt, Homo sapiens
  misc_RNA (1)...(19): siRNA sense strand
uaaucaacgacuaugaaga

SEQ ID NO: 77190 - RNA, 19 nt, Homo sapiens
  misc_RNA (1)...(19): siRNA sense strand
agagccugcugaagauaau

SEQ ID NO: 77191 - RNA, 19 nt, Homo sapiens
  misc_RNA (1)...(19): siRNA sense strand
aagagccugcugaagauaa

SEQ ID NO: 77192 - RNA, 19 nt, Homo sapiens
  misc_RNA (1)...(19): siRNA sense strand
gcucuuccgaauuaauaga

SEQ ID NO: 77193 - RNA, 19 nt, Homo sapiens
  misc_RNA (1)...(19): siRNA sense strand
ccgaauuaauagacuggau

SEQ ID NO: 77194 - RNA, 19 nt, Homo sapiens
  misc_RNA (1)...(19): siRNA sense strand
ggacaaaguuuaccaaaug

SEQ ID NO: 77195 - RNA, 19 nt, Homo sapiens
  misc_RNA (1)...(19): siRNA sense strand
caacgacuaugaagaauuc

SEQ ID NO: 77196 - RNA, 19 nt, Homo sapiens
  misc_RNA (1)...(19): siRNA sense strand
gaucagaauugaggucuuu

SEQ ID NO: 77197 - RNA, 19 nt, Homo sapiens
  misc_RNA (1)...(19): siRNA sense strand
gaagugagcagaucagaau

SEQ ID NO: 77198 - RNA, 19 nt, Homo sapiens
  misc_RNA (1)...(19): siRNA sense strand
gaggaaaucuccaaaugca

SEQ ID NO: 77199 - RNA, 19 nt, Homo sapiens
  misc_RNA (1)...(19): siRNA sense strand
ggaaaucuccaaaugcaaa

SEQ ID NO: 77200 - RNA, 19 nt, Homo sapiens
  misc_RNA (1)...(19): siRNA sense strand
caaacuggaugaugacaug

SEQ ID NO: 77201 - RNA, 19 nt, Homo sapiens
  misc_RNA (1)...(19): siRNA sense strand
agacuggauuugcugauua

SEQ ID NO: 77202 - RNA, 19 nt, Homo sapiens
  misc_RNA (1)...(19): siRNA sense strand
gacaugaaccugcuggaua

SEQ ID NO: 77203 - RNA, 19 nt, Homo sapiens
  misc_RNA (1)...(19): siRNA sense strand
gaagauaaucaacgacuau

SEQ ID NO: 77204 - RNA, 19 nt, Homo sapiens
  misc_RNA (1)...(19): siRNA sense strand
gacaaaguuuaccaaauga

SEQ ID NO: 77205 - RNA, 19 nt, Homo sapiens
  misc_RNA (1)...(19): siRNA sense strand
cagcagaaaucuuuaugau

SEQ ID NO: 77206 - RNA, 19 nt, Homo sapiens
  misc_RNA (1)...(19): siRNA sense strand
gaaaggaggagauggaaag

SEQ ID NO: 77207 - RNA, 19 nt, Homo sapiens
  misc_RNA (1)...(19): siRNA sense strand
gauaaucaacgacuaugaa

SEQ ID NO: 77208 - RNA, 19 nt, Homo sapiens
  misc_RNA (1)...(19): siRNA sense strand
gaucuggccucccucaagu

SEQ ID NO: 77209 - RNA, 19 nt, Homo sapiens
  misc_RNA (1)...(19): siRNA sense strand
gaauugaggucuuuuaagu

SEQ ID NO: 77210 - RNA, 19 nt, Homo sapiens
  misc_RNA (1)...(19): siRNA sense strand
aagaggaaaucuccaaaug

SEQ ID NO: 77211 - RNA, 19 nt, Homo sapiens
  misc_RNA (1)...(19): siRNA sense strand
gcaagaacccaucaaggau

SEQ ID NO: 77212 - RNA, 19 nt, Homo sapiens
  misc_RNA (1)...(19): siRNA sense strand
ggaaagggaacuucagaca

SEQ ID NO: 77213 - RNA, 19 nt, Homo sapiens
  misc_RNA (1)...(19): siRNA sense strand
gcccaaacuucacagcauu

SEQ ID NO: 77214 - RNA, 19 nt, Homo sapiens
  misc_RNA (1)...(19): siRNA sense strand
acaugaaccugcuggauau

SEQ ID NO: 77215 - RNA, 19 nt, Homo sapiens
  misc_RNA (1)...(19): siRNA sense strand
gucaugcucuaucagauuu

SEQ ID NO: 77216 - RNA, 19 nt, Homo sapiens
  misc_RNA (1)...(19): siRNA sense strand
ucauagagauggagaagag

SEQ ID NO: 77217 - RNA, 19 nt, Homo sapiens
  misc_RNA (1)...(19): siRNA sense strand
ucuaucagauuucagaaga

SEQ ID NO: 77218 - RNA, 19 nt, Homo sapiens
  misc_RNA (1)...(19): siRNA sense strand
ugaagauaaucaacgacua

SEQ ID NO: 77219 - RNA, 19 nt, Homo sapiens
  misc_RNA (1)...(19): siRNA sense strand
acaagagccugcugaagau

SEQ ID NO: 77220 - RNA, 19 nt, Homo sapiens
  misc_RNA (1)...(19): siRNA sense strand
aaugcaaacuggaugauga

SEQ ID NO: 77221 - RNA, 19 nt, Homo sapiens
  misc_RNA (1)...(19): siRNA sense strand
uggauuugcugauuaccua

SEQ ID NO: 77222 - RNA, 19 nt, Homo sapiens
  misc_RNA (1)...(19): siRNA sense strand
gugagcagaucagaauuga

SEQ ID NO: 77223 - RNA, 19 nt, Homo sapiens
  misc_RNA (1)...(19): siRNA sense strand
gaauggaacacacuuggau

SEQ ID NO: 77224 - RNA, 19 nt, Homo sapiens
  misc_RNA (1)...(19): siRNA sense strand
gggagaaagugcccaaacu

SEQ ID NO: 77225 - RNA, 19 nt, Homo sapiens
  misc_RNA (1)...(19): siRNA sense strand
aaucaacgacuaugaagaa

SEQ ID NO: 77226 - RNA, 19 nt, Homo sapiens
  misc_RNA (1)...(19): siRNA sense strand
ccaggcagggcucaaauuu

SEQ ID NO: 77227 - RNA, 19 nt, Homo sapiens
  misc_RNA (1)...(19): siRNA sense strand
gcaagaggaaaucuccaaa

SEQ ID NO: 77228 - RNA, 19 nt, Homo sapiens
  misc_RNA (1)...(19): siRNA sense strand
gaaaguuggacauccugaa

SEQ ID NO: 77229 - RNA, 19 nt, Homo sapiens
  misc_RNA (1)...(19): siRNA sense strand
gaucaucaacaaucacaau

SEQ ID NO: 77230 - RNA, 19 nt, Homo sapiens
  misc_RNA (1)...(19): siRNA sense strand
gacuucagcagaaaucuuu

SEQ ID NO: 77231 - RNA, 19 nt, Homo sapiens
  misc_RNA (1)...(19): siRNA sense strand
cagaagaagugagcagauc

SEQ ID NO: 77232 - RNA, 19 nt, Homo sapiens
  misc_RNA (1)...(19): siRNA sense strand
aacaagagccugcugaaga

SEQ ID NO: 77233 - RNA, 19 nt, Homo sapiens
  misc_RNA (1)...(19): siRNA sense strand
cugauuaccuaccuaaaca

SEQ ID NO: 77234 - RNA, 19 nt, Homo sapiens
  misc_RNA (1)...(19): siRNA sense strand
ggucaugcucuaucagauu

SEQ ID NO: 77235 - RNA, 19 nt, Homo sapiens
  misc_RNA (1)...(19): siRNA sense strand
gaagcaagaacccaucaag

SEQ ID NO: 77236 - RNA, 19 nt, Homo sapiens
  misc_RNA (1)...(19): siRNA sense strand
uuaccuaccuaaacacuag

SEQ ID NO: 77237 - RNA, 19 nt, Homo sapiens
  misc_RNA (1)...(19): siRNA sense strand
aggcagggcucaaauuucu

SEQ ID NO: 77238 - RNA, 19 nt, Homo sapiens
  misc_RNA (1)...(19): siRNA sense strand
cgaauuaauagacuggauu

SEQ ID NO: 77239 - RNA, 19 nt, Homo sapiens
  misc_RNA (1)...(19): siRNA sense strand
caagaggaaaucuccaaau

SEQ ID NO: 77240 - RNA, 19 nt, Homo sapiens
  misc_RNA (1)...(19): siRNA sense strand
ccaaaugcaaacuggauga

SEQ ID NO: 77241 - RNA, 19 nt, Homo sapiens
  misc_RNA (1)...(19): siRNA sense strand
ggacuucagcagaaaucuu

SEQ ID NO: 77242 - RNA, 19 nt, Homo sapiens
  misc_RNA (1)...(19): siRNA sense strand
aagagaauguuggaggaaa

SEQ ID NO: 77243 - RNA, 19 nt, Homo sapiens
  misc_RNA (1)...(19): siRNA sense strand
ggaauggaacacacuugga

SEQ ID NO: 77244 - RNA, 19 nt, Homo sapiens
  misc_RNA (1)...(19): siRNA sense strand
uggacaaaguuuaccaaau

SEQ ID NO: 77245 - RNA, 19 nt, Homo sapiens
  misc_RNA (1)...(19): siRNA sense strand
aaaguuggacauccugaaa

SEQ ID NO: 77246 - RNA, 19 nt, Homo sapiens
  misc_RNA (1)...(19): siRNA sense strand
gcucaaauuucugccuaca

SEQ ID NO: 77247 - RNA, 19 nt, Homo sapiens
  misc_RNA (1)...(19): siRNA sense strand
uagacuggauuugcugauu

SEQ ID NO: 77248 - RNA, 19 nt, Homo sapiens
  misc_RNA (1)...(19): siRNA sense strand
ggacuacauuccgcaaagg

SEQ ID NO: 77249 - RNA, 19 nt, Homo sapiens
  misc_RNA (1)...(19): siRNA sense strand
uaucagauuucagaagaag

SEQ ID NO: 77250 - RNA, 19 nt, Homo sapiens
  misc_RNA (1)...(19): siRNA sense strand
uuaauagacuggauuugcu

SEQ ID NO: 77251 - RNA, 19 nt, Homo sapiens
  misc_RNA (1)...(19): siRNA sense strand
gggauacugucugaucauc

SEQ ID NO: 77252 - RNA, 19 nt, Homo sapiens
  misc_RNA (1)...(19): siRNA sense strand
aagagucugugcccaaauc

SEQ ID NO: 77253 - RNA, 19 nt, Homo sapiens
  misc_RNA (1)...(19): siRNA sense strand
caagagccugcugaagaua

SEQ ID NO: 77254 - RNA, 19 nt, Homo sapiens
  misc_RNA (1)...(19): siRNA sense strand
cuagaaaggaggagaugga

SEQ ID NO: 77255 - RNA, 19 nt, Homo sapiens
  misc_RNA (1)...(19): siRNA sense strand
ggagauggaaagggaacuu

SEQ ID NO: 77256 - RNA, 19 nt, Homo sapiens
  misc_RNA (1)...(19): siRNA sense strand
aggaugccuugauguuauu

SEQ ID NO: 77257 - RNA, 19 nt, Homo sapiens
  misc_RNA (1)...(19): siRNA sense strand
ucaacgacuaugaagaauu

SEQ ID NO: 77258 - RNA, 19 nt, Homo sapiens
  misc_RNA (1)...(19): siRNA sense strand
gaauguuggaggaaagcaa

SEQ ID NO: 77259 - RNA, 19 nt, Homo sapiens
  misc_RNA (1)...(19): siRNA sense strand
gagaaggaaaguuggacau

SEQ ID NO: 77260 - RNA, 19 nt, Homo sapiens
  misc_RNA (1)...(19): siRNA sense strand
gaagaagugagcagaucag

SEQ ID NO: 77261 - RNA, 19 nt, Homo sapiens
  misc_RNA (1)...(19): siRNA sense strand
gacuggauuugcugauuac

SEQ ID NO: 77262 - RNA, 19 nt, Homo sapiens
  misc_RNA (1)...(19): siRNA sense strand
agcaagaacccaucaagga

SEQ ID NO: 77263 - RNA, 19 nt, Homo sapiens
  misc_RNA (1)...(19): siRNA sense strand
caacaagagccugcugaag

SEQ ID NO: 77264 - RNA, 19 nt, Homo sapiens
  misc_RNA (1)...(19): siRNA sense strand
ucagcagaaaucuuuauga

SEQ ID NO: 77265 - RNA, 19 nt, Homo sapiens
  misc_RNA (1)...(19): siRNA sense strand
cugcucuuccgaauuaaua

SEQ ID NO: 77266 - RNA, 19 nt, Homo sapiens
  misc_RNA (1)...(19): siRNA sense strand
ggaagcaagaacccaucaa

SEQ ID NO: 77267 - RNA, 19 nt, Homo sapiens
  misc_RNA (1)...(19): siRNA sense strand
ucagauuucagaagaagug

SEQ ID NO: 77268 - RNA, 19 nt, Homo sapiens
  misc_RNA (1)...(19): siRNA sense strand
gcugauuaccuaccuaaac

SEQ ID NO: 77269 - RNA, 19 nt, Homo sapiens
  misc_RNA (1)...(19): siRNA sense strand
cccaaacuucacagcauua

SEQ ID NO: 77270 - RNA, 19 nt, Homo sapiens
  misc_RNA (1)...(19): siRNA sense strand
ucaacaagagccugcugaa

SEQ ID NO: 77271 - RNA, 19 nt, Homo sapiens
  misc_RNA (1)...(19): siRNA sense strand
ccugggagaaggaaaguug

SEQ ID NO: 77272 - RNA, 19 nt, Homo sapiens
  misc_RNA (1)...(19): siRNA sense strand
ugaaccugcuggauauuuu

SEQ ID NO: 77273 - RNA, 19 nt, Homo sapiens
  misc_RNA (1)...(19): siRNA sense strand
gcaaucuguccuuccugaa

SEQ ID NO: 77274 - RNA, 19 nt, Homo sapiens
  misc_RNA (1)...(19): siRNA sense strand
agagaauguuggaggaaag

SEQ ID NO: 77275 - RNA, 19 nt, Homo sapiens
  misc_RNA (1)...(19): siRNA sense strand
gcaaacuggaugaugacau

SEQ ID NO: 77276 - RNA, 19 nt, Homo sapiens
  misc_RNA (1)...(19): siRNA sense strand
aaagcaaucuguccuuccu

SEQ ID NO: 77277 - RNA, 19 nt, Homo sapiens
  misc_RNA (1)...(19): siRNA sense strand
cuaucagauuucagaagaa

SEQ ID NO: 77278 - RNA, 19 nt, Homo sapiens
  misc_RNA (1)...(19): siRNA sense strand
gggucaugcucuaucagau

SEQ ID NO: 77279 - RNA, 19 nt, Homo sapiens
  misc_RNA (1)...(19): siRNA sense strand
aaaagagucugugcccaaa

SEQ ID NO: 77280 - RNA, 19 nt, Homo sapiens
  misc_RNA (1)...(19): siRNA sense strand
caaaagcacgggagaaagu

SEQ ID NO: 77281 - RNA, 19 nt, Homo sapiens
  misc_RNA (1)...(19): siRNA sense strand
gugcccaaaucaacaagag

SEQ ID NO: 77282 - RNA, 19 nt, Homo sapiens
  misc_RNA (1)...(19): siRNA sense strand
uggacuacauuccgcaaag

SEQ ID NO: 77283 - RNA, 19 nt, Homo sapiens
  misc_RNA (1)...(19): siRNA sense strand
uaaucaacgacuaugaaga

SEQ ID NO: 77284 - RNA, 19 nt, Homo sapiens
  misc_RNA (1)...(19): siRNA sense strand
agagccugcugaagauaau

SEQ ID NO: 77285 - RNA, 19 nt, Homo sapiens
  misc_RNA (1)...(19): siRNA sense strand
aagagccugcugaagauaa

SEQ ID NO: 77286 - RNA, 19 nt, Homo sapiens
  misc_RNA (1)...(19): siRNA sense strand
gcucuuccgaauuaauaga

SEQ ID NO: 77287 - RNA, 19 nt, Homo sapiens
  misc_RNA (1)...(19): siRNA sense strand
ccgaauuaauagacuggau

SEQ ID NO: 77288 - RNA, 19 nt, Homo sapiens
  misc_RNA (1)...(19): siRNA sense strand
ggacaaaguuuaccaaaug

SEQ ID NO: 77289 - RNA, 19 nt, Homo sapiens
  misc_RNA (1)...(19): siRNA sense strand
caacgacuaugaagaauuc

SEQ ID NO: 77290 - RNA, 19 nt, Homo sapiens
  misc_RNA (1)...(19): siRNA sense strand
gaucagaauugaggucuuu

SEQ ID NO: 77291 - RNA, 19 nt, Homo sapiens
  misc_RNA (1)...(19): siRNA sense strand
gaagugagcagaucagaau

SEQ ID NO: 77292 - RNA, 19 nt, Homo sapiens
  misc_RNA (1)...(19): siRNA sense strand
gaggaaaucuccaaaugca

SEQ ID NO: 77293 - RNA, 19 nt, Homo sapiens
  misc_RNA (1)...(19): siRNA sense strand
ggaaaucuccaaaugcaaa

SEQ ID NO: 77294 - RNA, 19 nt, Homo sapiens
  misc_RNA (1)...(19): siRNA sense strand
caaacuggaugaugacaug

SEQ ID NO: 77295 - RNA, 19 nt, Homo sapiens
  misc_RNA (1)...(19): siRNA sense strand
agacuggauuugcugauua

SEQ ID NO: 77296 - RNA, 19 nt, Homo sapiens
  misc_RNA (1)...(19): siRNA sense strand
gacaugaaccugcuggaua

SEQ ID NO: 77297 - RNA, 19 nt, Homo sapiens
  misc_RNA (1)...(19): siRNA sense strand
gaagauaaucaacgacuau

SEQ ID NO: 77298 - RNA, 19 nt, Homo sapiens
  misc_RNA (1)...(19): siRNA sense strand
gacaaaguuuaccaaauga

SEQ ID NO: 77299 - RNA, 19 nt, Homo sapiens
  misc_RNA (1)...(19): siRNA sense strand
cagcagaaaucuuuaugau

SEQ ID NO: 77300 - RNA, 19 nt, Homo sapiens
  misc_RNA (1)...(19): siRNA sense strand
gaaaggaggagauggaaag

SEQ ID NO: 77301 - RNA, 19 nt, Homo sapiens
  misc_RNA (1)...(19): siRNA sense strand
gauaaucaacgacuaugaa

SEQ ID NO: 77302 - RNA, 19 nt, Homo sapiens
  misc_RNA (1)...(19): siRNA sense strand
gaucuggccucccucaagu

SEQ ID NO: 77303 - RNA, 19 nt, Homo sapiens
  misc_RNA (1)...(19): siRNA sense strand
gaauugaggucuuuuaagu

SEQ ID NO: 77304 - RNA, 19 nt, Homo sapiens
  misc_RNA (1)...(19): siRNA sense strand
aagaggaaaucuccaaaug

SEQ ID NO: 77305 - RNA, 19 nt, Homo sapiens
  misc_RNA (1)...(19): siRNA sense strand
gcaagaacccaucaaggau

SEQ ID NO: 77306 - RNA, 19 nt, Homo sapiens
  misc_RNA (1)...(19): siRNA sense strand
ggaaagggaacuucagaca

SEQ ID NO: 77307 - RNA, 19 nt, Homo sapiens
  misc_RNA (1)...(19): siRNA sense strand
gcccaaacuucacagcauu

SEQ ID NO: 77308 - RNA, 19 nt, Homo sapiens
  misc_RNA (1)...(19): siRNA sense strand
acaugaaccugcuggauau

SEQ ID NO: 77309 - RNA, 19 nt, Homo sapiens
  misc_RNA (1)...(19): siRNA sense strand
gucaugcucuaucagauuu

SEQ ID NO: 77310 - RNA, 19 nt, Homo sapiens
  misc_RNA (1)...(19): siRNA sense strand
ucauagagauggagaagag

SEQ ID NO: 77311 - RNA, 19 nt, Homo sapiens
  misc_RNA (1)...(19): siRNA sense strand
ucuaucagauuucagaaga

SEQ ID NO: 77312 - RNA, 19 nt, Homo sapiens
  misc_RNA (1)...(19): siRNA sense strand
ugaagauaaucaacgacua

SEQ ID NO: 77313 - RNA, 19 nt, Homo sapiens
  misc_RNA (1)...(19): siRNA sense strand
acaagagccugcugaagau

SEQ ID NO: 77314 - RNA, 19 nt, Homo sapiens
  misc_RNA (1)...(19): siRNA sense strand
aaugcaaacuggaugauga

SEQ ID NO: 77315 - RNA, 19 nt, Homo sapiens
  misc_RNA (1)...(19): siRNA sense strand
uggauuugcugauuaccua

SEQ ID NO: 77316 - RNA, 19 nt, Homo sapiens
  misc_RNA (1)...(19): siRNA sense strand
gugagcagaucagaauuga

SEQ ID NO: 77317 - RNA, 19 nt, Homo sapiens
  misc_RNA (1)...(19): siRNA sense strand
gaauggaacacacuuggau

SEQ ID NO: 77318 - RNA, 19 nt, Homo sapiens
  misc_RNA (1)...(19): siRNA sense strand
gggagaaagugcccaaacu

SEQ ID NO: 77319 - RNA, 19 nt, Homo sapiens
  misc_RNA (1)...(19): siRNA sense strand
aaucaacgacuaugaagaa

SEQ ID NO: 77320 - RNA, 19 nt, Homo sapiens
  misc_RNA (1)...(19): siRNA sense strand
ccaggcagggcucaaauuu

SEQ ID NO: 77321 - RNA, 19 nt, Homo sapiens
  misc_RNA (1)...(19): siRNA sense strand
gcaagaggaaaucuccaaa

SEQ ID NO: 77322 - RNA, 19 nt, Homo sapiens
  misc_RNA (1)...(19): siRNA sense strand
gaaaguuggacauccugaa

SEQ ID NO: 77323 - RNA, 19 nt, Homo sapiens
  misc_RNA (1)...(19): siRNA sense strand
gaucaucaacaaucacaau

SEQ ID NO: 77324 - RNA, 19 nt, Homo sapiens
  misc_RNA (1)...(19): siRNA sense strand
gacuucagcagaaaucuuu

SEQ ID NO: 77325 - RNA, 19 nt, Homo sapiens
  misc_RNA (1)...(19): siRNA sense strand
cagaagaagugagcagauc

SEQ ID NO: 77326 - RNA, 19 nt, Homo sapiens
  misc_RNA (1)...(19): siRNA sense strand
aacaagagccugcugaaga

SEQ ID NO: 77327 - RNA, 19 nt, Homo sapiens
  misc_RNA (1)...(19): siRNA sense strand
cugauuaccuaccuaaaca

SEQ ID NO: 77328 - RNA, 19 nt, Homo sapiens
  misc_RNA (1)...(19): siRNA sense strand
ggucaugcucuaucagauu

SEQ ID NO: 77329 - RNA, 19 nt, Homo sapiens
  misc_RNA (1)...(19): siRNA sense strand
gaagcaagaacccaucaag

SEQ ID NO: 77330 - RNA, 19 nt, Homo sapiens
  misc_RNA (1)...(19): siRNA sense strand
uuaccuaccuaaacacuag

SEQ ID NO: 77331 - RNA, 19 nt, Homo sapiens
  misc_RNA (1)...(19): siRNA sense strand
aggcagggcucaaauuucu

SEQ ID NO: 77332 - RNA, 19 nt, Homo sapiens
  misc_RNA (1)...(19): siRNA sense strand
cgaauuaauagacuggauu

SEQ ID NO: 77333 - RNA, 19 nt, Homo sapiens
  misc_RNA (1)...(19): siRNA sense strand
caagaggaaaucuccaaau

SEQ ID NO: 77334 - RNA, 19 nt, Homo sapiens
  misc_RNA (1)...(19): siRNA sense strand
ccaaaugcaaacuggauga

SEQ ID NO: 77335 - RNA, 19 nt, Homo sapiens
  misc_RNA (1)...(19): siRNA sense strand
ggacuucagcagaaaucuu

SEQ ID NO: 77336 - RNA, 19 nt, Homo sapiens
  misc_RNA (1)...(19): siRNA sense strand
aagagaauguuggaggaaa

SEQ ID NO: 77337 - RNA, 19 nt, Homo sapiens
  misc_RNA (1)...(19): siRNA sense strand
ggaauggaacacacuugga

SEQ ID NO: 77338 - RNA, 19 nt, Homo sapiens
  misc_RNA (1)...(19): siRNA sense strand
uggacaaaguuuaccaaau

SEQ ID NO: 77339 - RNA, 19 nt, Homo sapiens
  misc_RNA (1)...(19): siRNA sense strand
aaaguuggacauccugaaa

SEQ ID NO: 77340 - RNA, 19 nt, Homo sapiens
  misc_RNA (1)...(19): siRNA sense strand
gcucaaauuucugccuaca

SEQ ID NO: 77341 - RNA, 19 nt, Homo sapiens
  misc_RNA (1)...(19): siRNA sense strand
uagacuggauuugcugauu

SEQ ID NO: 77342 - RNA, 19 nt, Homo sapiens
  misc_RNA (1)...(19): siRNA sense strand
ggacuacauuccgcaaagg

SEQ ID NO: 77343 - RNA, 19 nt, Homo sapiens
  misc_RNA (1)...(19): siRNA sense strand
uaucagauuucagaagaag

SEQ ID NO: 77344 - RNA, 19 nt, Homo sapiens
  misc_RNA (1)...(19): siRNA sense strand
uuaauagacuggauuugcu

SEQ ID NO: 77345 - RNA, 19 nt, Homo sapiens
  misc_RNA (1)...(19): siRNA sense strand
gggauacugucugaucauc

SEQ ID NO: 77346 - RNA, 19 nt, Homo sapiens
  misc_RNA (1)...(19): siRNA sense strand
aagagucugugcccaaauc

SEQ ID NO: 77347 - RNA, 19 nt, Homo sapiens
  misc_RNA (1)...(19): siRNA sense strand
caagagccugcugaagaua

SEQ ID NO: 77348 - RNA, 19 nt, Homo sapiens
  misc_RNA (1)...(19): siRNA sense strand
cuagaaaggaggagaugga

SEQ ID NO: 77349 - RNA, 19 nt, Homo sapiens
  misc_RNA (1)...(19): siRNA sense strand
ggagauggaaagggaacuu

SEQ ID NO: 77350 - RNA, 19 nt, Homo sapiens
  misc_RNA (1)...(19): siRNA sense strand
aggaugccuugauguuauu

SEQ ID NO: 77351 - RNA, 19 nt, Homo sapiens
  misc_RNA (1)...(19): siRNA sense strand
ucaacgacuaugaagaauu

SEQ ID NO: 77352 - RNA, 19 nt, Homo sapiens
  misc_RNA (1)...(19): siRNA sense strand
gaauguuggaggaaagcaa

SEQ ID NO: 77353 - RNA, 19 nt, Homo sapiens
  misc_RNA (1)...(19): siRNA sense strand
gagaaggaaaguuggacau

SEQ ID NO: 77354 - RNA, 19 nt, Homo sapiens
  misc_RNA (1)...(19): siRNA sense strand
gaagaagugagcagaucag

SEQ ID NO: 77355 - RNA, 19 nt, Homo sapiens
  misc_RNA (1)...(19): siRNA sense strand
gacuggauuugcugauuac

SEQ ID NO: 77356 - RNA, 19 nt, Homo sapiens
  misc_RNA (1)...(19): siRNA sense strand
agcaagaacccaucaagga

SEQ ID NO: 77357 - RNA, 19 nt, Homo sapiens
  misc_RNA (1)...(19): siRNA sense strand
caacaagagccugcugaag

SEQ ID NO: 77358 - RNA, 19 nt, Homo sapiens
  misc_RNA (1)...(19): siRNA sense strand
ucagcagaaaucuuuauga

SEQ ID NO: 77359 - RNA, 19 nt, Homo sapiens
  misc_RNA (1)...(19): siRNA sense strand
cugcucuuccgaauuaaua

SEQ ID NO: 77360 - RNA, 19 nt, Homo sapiens
  misc_RNA (1)...(19): siRNA sense strand
ggaagcaagaacccaucaa

SEQ ID NO: 77361 - RNA, 19 nt, Homo sapiens
  misc_RNA (1)...(19): siRNA sense strand
ucagauuucagaagaagug

SEQ ID NO: 77362 - RNA, 19 nt, Homo sapiens
  misc_RNA (1)...(19): siRNA sense strand
gcugauuaccuaccuaaac

SEQ ID NO: 77363 - RNA, 19 nt, Homo sapiens
  misc_RNA (1)...(19): siRNA sense strand
cccaaacuucacagcauua

SEQ ID NO: 77364 - RNA, 19 nt, Homo sapiens
  misc_RNA (1)...(19): siRNA sense strand
ucaacaagagccugcugaa

SEQ ID NO: 77365 - RNA, 19 nt, Homo sapiens
  misc_RNA (1)...(19): siRNA sense strand
ccugggagaaggaaaguug

SEQ ID NO: 77366 - RNA, 19 nt, Homo sapiens
  misc_RNA (1)...(19): siRNA sense strand
ugaaccugcuggauauuuu

SEQ ID NO: 77367 - RNA, 19 nt, Homo sapiens
  misc_RNA (1)...(19): siRNA sense strand
gcaaucuguccuuccugaa

SEQ ID NO: 77368 - RNA, 19 nt, Homo sapiens
  misc_RNA (1)...(19): siRNA sense strand
agagaauguuggaggaaag

SEQ ID NO: 77369 - RNA, 19 nt, Homo sapiens
  misc_RNA (1)...(19): siRNA sense strand
gcaaacuggaugaugacau

SEQ ID NO: 77370 - RNA, 19 nt, Homo sapiens
  misc_RNA (1)...(19): siRNA sense strand
aaagcaaucuguccuuccu

SEQ ID NO: 77371 - RNA, 19 nt, Homo sapiens
  misc_RNA (1)...(19): siRNA sense strand
cuaucagauuucagaagaa

SEQ ID NO: 77372 - RNA, 19 nt, Homo sapiens
  misc_RNA (1)...(19): siRNA sense strand
gggucaugcucuaucagau

SEQ ID NO: 77373 - RNA, 19 nt, Homo sapiens
  misc_RNA (1)...(19): siRNA sense strand
aaaagagucugugcccaaa

SEQ ID NO: 77374 - RNA, 19 nt, Homo sapiens
  misc_RNA (1)...(19): siRNA sense strand
caaaagcacgggagaaagu

SEQ ID NO: 77375 - RNA, 19 nt, Homo sapiens
  misc_RNA (1)...(19): siRNA sense strand
gugcccaaaucaacaagag

SEQ ID NO: 77376 - RNA, 19 nt, Homo sapiens
  misc_RNA (1)...(19): siRNA sense strand
uggacuacauuccgcaaag

SEQ ID NO: 77377 - RNA, 19 nt, Homo sapiens
  misc_RNA (1)...(19): siRNA sense strand
uaaucaacgacuaugaaga

SEQ ID NO: 77378 - RNA, 19 nt, Homo sapiens
  misc_RNA (1)...(19): siRNA sense strand
agagccugcugaagauaau

SEQ ID NO: 77379 - RNA, 19 nt, Homo sapiens
  misc_RNA (1)...(19): siRNA sense strand
aagagccugcugaagauaa

SEQ ID NO: 77380 - RNA, 19 nt, Homo sapiens
  misc_RNA (1)...(19): siRNA sense strand
gcucuuccgaauuaauaga

SEQ ID NO: 77381 - RNA, 19 nt, Homo sapiens
  misc_RNA (1)...(19): siRNA sense strand
ccgaauuaauagacuggau

SEQ ID NO: 77382 - RNA, 19 nt, Homo sapiens
  misc_RNA (1)...(19): siRNA sense strand
ggacaaaguuuaccaaaug

SEQ ID NO: 77383 - RNA, 19 nt, Homo sapiens
  misc_RNA (1)...(19): siRNA sense strand
caacgacuaugaagaauuc

SEQ ID NO: 77384 - RNA, 19 nt, Homo sapiens
  misc_RNA (1)...(19): siRNA sense strand
gaucagaauugaggucuuu

SEQ ID NO: 77385 - RNA, 19 nt, Homo sapiens
  misc_RNA (1)...(19): siRNA sense strand
gaagugagcagaucagaau

SEQ ID NO: 77386 - RNA, 19 nt, Homo sapiens
  misc_RNA (1)...(19): siRNA sense strand
gaggaaaucuccaaaugca

SEQ ID NO: 77387 - RNA, 19 nt, Homo sapiens
  misc_RNA (1)...(19): siRNA sense strand
ggaaaucuccaaaugcaaa

SEQ ID NO: 77388 - RNA, 19 nt, Homo sapiens
  misc_RNA (1)...(19): siRNA sense strand
caaacuggaugaugacaug

SEQ ID NO: 77389 - RNA, 19 nt, Homo sapiens
  misc_RNA (1)...(19): siRNA sense strand
agacuggauuugcugauua

SEQ ID NO: 77390 - RNA, 19 nt, Homo sapiens
  misc_RNA (1)...(19): siRNA sense strand
gacaugaaccugcuggaua

SEQ ID NO: 77391 - RNA, 19 nt, Homo sapiens
  misc_RNA (1)...(19): siRNA sense strand
gaagauaaucaacgacuau

SEQ ID NO: 77392 - RNA, 19 nt, Homo sapiens
  misc_RNA (1)...(19): siRNA sense strand
gacaaaguuuaccaaauga

SEQ ID NO: 77393 - RNA, 19 nt, Homo sapiens
  misc_RNA (1)...(19): siRNA sense strand
cagcagaaaucuuuaugau

SEQ ID NO: 77394 - RNA, 19 nt, Homo sapiens
  misc_RNA (1)...(19): siRNA sense strand
gaaaggaggagauggaaag

SEQ ID NO: 77395 - RNA, 19 nt, Homo sapiens
  misc_RNA (1)...(19): siRNA sense strand
gauaaucaacgacuaugaa

SEQ ID NO: 77396 - RNA, 19 nt, Homo sapiens
  misc_RNA (1)...(19): siRNA sense strand
gaucuggccucccucaagu

SEQ ID NO: 77397 - RNA, 19 nt, Homo sapiens
  misc_RNA (1)...(19): siRNA sense strand
gaauugaggucuuuuaagu

SEQ ID NO: 77398 - RNA, 19 nt, Homo sapiens
  misc_RNA (1)...(19): siRNA sense strand
aagaggaaaucuccaaaug

SEQ ID NO: 77399 - RNA, 19 nt, Homo sapiens
  misc_RNA (1)...(19): siRNA sense strand
gcaagaacccaucaaggau

SEQ ID NO: 77400 - RNA, 19 nt, Homo sapiens
  misc_RNA (1)...(19): siRNA sense strand
ggaaagggaacuucagaca

SEQ ID NO: 77401 - RNA, 19 nt, Homo sapiens
  misc_RNA (1)...(19): siRNA sense strand
gcccaaacuucacagcauu

SEQ ID NO: 77402 - RNA, 19 nt, Homo sapiens
  misc_RNA (1)...(19): siRNA sense strand
acaugaaccugcuggauau

SEQ ID NO: 77403 - RNA, 19 nt, Homo sapiens
  misc_RNA (1)...(19): siRNA sense strand
gucaugcucuaucagauuu

SEQ ID NO: 77404 - RNA, 19 nt, Homo sapiens
  misc_RNA (1)...(19): siRNA sense strand
ucauagagauggagaagag

SEQ ID NO: 77405 - RNA, 19 nt, Homo sapiens
  misc_RNA (1)...(19): siRNA sense strand
ucuaucagauuucagaaga

SEQ ID NO: 77406 - RNA, 19 nt, Homo sapiens
  misc_RNA (1)...(19): siRNA sense strand
ugaagauaaucaacgacua

SEQ ID NO: 77407 - RNA, 19 nt, Homo sapiens
  misc_RNA (1)...(19): siRNA sense strand
acaagagccugcugaagau

SEQ ID NO: 77408 - RNA, 19 nt, Homo sapiens
  misc_RNA (1)...(19): siRNA sense strand
aaugcaaacuggaugauga

SEQ ID NO: 77409 - RNA, 19 nt, Homo sapiens
  misc_RNA (1)...(19): siRNA sense strand
uggauuugcugauuaccua

SEQ ID NO: 77410 - RNA, 19 nt, Homo sapiens
  misc_RNA (1)...(19): siRNA sense strand
gugagcagaucagaauuga

SEQ ID NO: 77411 - RNA, 19 nt, Homo sapiens
  misc_RNA (1)...(19): siRNA sense strand
gaauggaacacacuuggau

SEQ ID NO: 77412 - RNA, 19 nt, Homo sapiens
  misc_RNA (1)...(19): siRNA sense strand
gggagaaagugcccaaacu

SEQ ID NO: 77413 - RNA, 19 nt, Homo sapiens
  misc_RNA (1)...(19): siRNA sense strand
aaucaacgacuaugaagaa

SEQ ID NO: 77414 - RNA, 19 nt, Homo sapiens
  misc_RNA (1)...(19): siRNA sense strand
ccaggcagggcucaaauuu

SEQ ID NO: 77415 - RNA, 19 nt, Homo sapiens
  misc_RNA (1)...(19): siRNA sense strand
gcaagaggaaaucuccaaa

SEQ ID NO: 77416 - RNA, 19 nt, Homo sapiens
  misc_RNA (1)...(19): siRNA sense strand
gaaaguuggacauccugaa

SEQ ID NO: 77417 - RNA, 19 nt, Homo sapiens
  misc_RNA (1)...(19): siRNA sense strand
gaucaucaacaaucacaau

SEQ ID NO: 77418 - RNA, 19 nt, Homo sapiens
  misc_RNA (1)...(19): siRNA sense strand
gacuucagcagaaaucuuu

SEQ ID NO: 77419 - RNA, 19 nt, Homo sapiens
  misc_RNA (1)...(19): siRNA sense strand
cagaagaagugagcagauc

SEQ ID NO: 77420 - RNA, 19 nt, Homo sapiens
  misc_RNA (1)...(19): siRNA sense strand
aacaagagccugcugaaga

SEQ ID NO: 77421 - RNA, 19 nt, Homo sapiens
  misc_RNA (1)...(19): siRNA sense strand
cugauuaccuaccuaaaca

SEQ ID NO: 77422 - RNA, 19 nt, Homo sapiens
  misc_RNA (1)...(19): siRNA sense strand
ggucaugcucuaucagauu

SEQ ID NO: 77423 - RNA, 19 nt, Homo sapiens
  misc_RNA (1)...(19): siRNA sense strand
gaagcaagaacccaucaag

SEQ ID NO: 77424 - RNA, 19 nt, Homo sapiens
  misc_RNA (1)...(19): siRNA sense strand
uuaccuaccuaaacacuag

SEQ ID NO: 77425 - RNA, 19 nt, Homo sapiens
  misc_RNA (1)...(19): siRNA sense strand
aggcagggcucaaauuucu

SEQ ID NO: 77426 - RNA, 19 nt, Homo sapiens
  misc_RNA (1)...(19): siRNA sense strand
cgaauuaauagacuggauu

SEQ ID NO: 77427 - RNA, 19 nt, Homo sapiens
  misc_RNA (1)...(19): siRNA sense strand
caagaggaaaucuccaaau

SEQ ID NO: 77428 - RNA, 19 nt, Homo sapiens
  misc_RNA (1)...(19): siRNA sense strand
ccaaaugcaaacuggauga

SEQ ID NO: 77429 - RNA, 19 nt, Homo sapiens
  misc_RNA (1)...(19): siRNA sense strand
ggacuucagcagaaaucuu

SEQ ID NO: 77430 - RNA, 19 nt, Homo sapiens
  misc_RNA (1)...(19): siRNA sense strand
aagagaauguuggaggaaa

SEQ ID NO: 77431 - RNA, 19 nt, Homo sapiens
  misc_RNA (1)...(19): siRNA sense strand
ggaauggaacacacuugga

SEQ ID NO: 77432 - RNA, 19 nt, Homo sapiens
  misc_RNA (1)...(19): siRNA sense strand
uggacaaaguuuaccaaau

SEQ ID NO: 77433 - RNA, 19 nt, Homo sapiens
  misc_RNA (1)...(19): siRNA sense strand
aaaguuggacauccugaaa

SEQ ID NO: 77434 - RNA, 19 nt, Homo sapiens
  misc_RNA (1)...(19): siRNA sense strand
gcucaaauuucugccuaca

SEQ ID NO: 77435 - RNA, 19 nt, Homo sapiens
  misc_RNA (1)...(19): siRNA sense strand
uagacuggauuugcugauu

SEQ ID NO: 77436 - RNA, 19 nt, Homo sapiens
  misc_RNA (1)...(19): siRNA sense strand
ggacuacauuccgcaaagg

SEQ ID NO: 77437 - RNA, 19 nt, Homo sapiens
  misc_RNA (1)...(19): siRNA sense strand
uaucagauuucagaagaag

SEQ ID NO: 77438 - RNA, 19 nt, Homo sapiens
  misc_RNA (1)...(19): siRNA sense strand
uuaauagacuggauuugcu

SEQ ID NO: 77439 - RNA, 19 nt, Homo sapiens
  misc_RNA (1)...(19): siRNA sense strand
gggauacugucugaucauc

SEQ ID NO: 77440 - RNA, 19 nt, Homo sapiens
  misc_RNA (1)...(19): siRNA sense strand
aagagucugugcccaaauc

SEQ ID NO: 77441 - RNA, 19 nt, Homo sapiens
  misc_RNA (1)...(19): siRNA sense strand
caagagccugcugaagaua

SEQ ID NO: 77442 - RNA, 19 nt, Homo sapiens
  misc_RNA (1)...(19): siRNA sense strand
cuagaaaggaggagaugga

SEQ ID NO: 77443 - RNA, 19 nt, Homo sapiens
  misc_RNA (1)...(19): siRNA sense strand
ggagauggaaagggaacuu

SEQ ID NO: 77444 - RNA, 19 nt, Homo sapiens
  misc_RNA (1)...(19): siRNA sense strand
aggaugccuugauguuauu

SEQ ID NO: 77445 - RNA, 19 nt, Homo sapiens
  misc_RNA (1)...(19): siRNA sense strand
ucaacgacuaugaagaauu

SEQ ID NO: 77446 - RNA, 19 nt, Homo sapiens
  misc_RNA (1)...(19): siRNA sense strand
gaauguuggaggaaagcaa

SEQ ID NO: 77447 - RNA, 19 nt, Homo sapiens
  misc_RNA (1)...(19): siRNA sense strand
gagaaggaaaguuggacau

SEQ ID NO: 77448 - RNA, 19 nt, Homo sapiens
  misc_RNA (1)...(19): siRNA sense strand
gaagaagugagcagaucag

SEQ ID NO: 77449 - RNA, 19 nt, Homo sapiens
  misc_RNA (1)...(19): siRNA sense strand
gacuggauuugcugauuac

SEQ ID NO: 77450 - RNA, 19 nt, Homo sapiens
  misc_RNA (1)...(19): siRNA sense strand
agcaagaacccaucaagga

SEQ ID NO: 77451 - RNA, 19 nt, Homo sapiens
  misc_RNA (1)...(19): siRNA sense strand
caacaagagccugcugaag

SEQ ID NO: 77452 - RNA, 19 nt, Homo sapiens
  misc_RNA (1)...(19): siRNA sense strand
ucagcagaaaucuuuauga

SEQ ID NO: 77453 - RNA, 19 nt, Homo sapiens
  misc_RNA (1)...(19): siRNA sense strand
cugcucuuccgaauuaaua

SEQ ID NO: 77454 - RNA, 19 nt, Homo sapiens
  misc_RNA (1)...(19): siRNA sense strand
ggaagcaagaacccaucaa

SEQ ID NO: 77455 - RNA, 19 nt, Homo sapiens
  misc_RNA (1)...(19): siRNA sense strand
ucagauuucagaagaagug

SEQ ID NO: 77456 - RNA, 19 nt, Homo sapiens
  misc_RNA (1)...(19): siRNA sense strand
gcugauuaccuaccuaaac

SEQ ID NO: 77457 - RNA, 19 nt, Homo sapiens
  misc_RNA (1)...(19): siRNA sense strand
cccaaacuucacagcauua

SEQ ID NO: 77458 - RNA, 19 nt, Homo sapiens
  misc_RNA (1)...(19): siRNA sense strand
ucaacaagagccugcugaa

SEQ ID NO: 77459 - RNA, 19 nt, Homo sapiens
  misc_RNA (1)...(19): siRNA sense strand
ccugggagaaggaaaguug

SEQ ID NO: 77460 - RNA, 19 nt, Homo sapiens
  misc_RNA (1)...(19): siRNA sense strand
ugaaccugcuggauauuuu

SEQ ID NO: 77461 - RNA, 19 nt, Homo sapiens
  misc_RNA (1)...(19): siRNA sense strand
gcaaucuguccuuccugaa

SEQ ID NO: 77462 - RNA, 19 nt, Homo sapiens
  misc_RNA (1)...(19): siRNA sense strand
agagaauguuggaggaaag

SEQ ID NO: 77463 - RNA, 19 nt, Homo sapiens
  misc_RNA (1)...(19): siRNA sense strand
gcaaacuggaugaugacau

SEQ ID NO: 77464 - RNA, 19 nt, Homo sapiens
  misc_RNA (1)...(19): siRNA sense strand
aaagcaaucuguccuuccu

SEQ ID NO: 77465 - RNA, 19 nt, Homo sapiens
  misc_RNA (1)...(19): siRNA sense strand
cuaucagauuucagaagaa

SEQ ID NO: 77466 - RNA, 19 nt, Homo sapiens
  misc_RNA (1)...(19): siRNA sense strand
gggucaugcucuaucagau

SEQ ID NO: 77467 - RNA, 19 nt, Homo sapiens
  misc_RNA (1)...(19): siRNA sense strand
aaaagagucugugcccaaa

SEQ ID NO: 77468 - RNA, 19 nt, Homo sapiens
  misc_RNA (1)...(19): siRNA sense strand
caaaagcacgggagaaagu

SEQ ID NO: 77469 - RNA, 19 nt, Homo sapiens
  misc_RNA (1)...(19): siRNA sense strand
gugcccaaaucaacaagag

SEQ ID NO: 77470 - RNA, 19 nt, Homo sapiens
  misc_RNA (1)...(19): siRNA sense strand
uggacuacauuccgcaaag

SEQ ID NO: 77471 - RNA, 19 nt, Homo sapiens
  misc_RNA (1)...(19): siRNA sense strand
uaaucaacgacuaugaaga

SEQ ID NO: 77472 - RNA, 19 nt, Homo sapiens
  misc_RNA (1)...(19): siRNA sense strand
agagccugcugaagauaau

SEQ ID NO: 77473 - RNA, 19 nt, Homo sapiens
  misc_RNA (1)...(19): siRNA sense strand
aagagccugcugaagauaa

SEQ ID NO: 77474 - RNA, 19 nt, Homo sapiens
  misc_RNA (1)...(19): siRNA sense strand
gcucuuccgaauuaauaga

SEQ ID NO: 77475 - RNA, 19 nt, Homo sapiens
  misc_RNA (1)...(19): siRNA sense strand
ccgaauuaauagacuggau

SEQ ID NO: 77476 - RNA, 19 nt, Homo sapiens
  misc_RNA (1)...(19): siRNA sense strand
ggacaaaguuuaccaaaug

SEQ ID NO: 77477 - RNA, 19 nt, Homo sapiens
  misc_RNA (1)...(19): siRNA sense strand
caacgacuaugaagaauuc

SEQ ID NO: 77478 - RNA, 19 nt, Homo sapiens
  misc_RNA (1)...(19): siRNA sense strand
gaucagaauugaggucuuu

SEQ ID NO: 77479 - RNA, 19 nt, Homo sapiens
  misc_RNA (1)...(19): siRNA sense strand
gaagugagcagaucagaau

SEQ ID NO: 77480 - RNA, 19 nt, Homo sapiens
  misc_RNA (1)...(19): siRNA sense strand
gaggaaaucuccaaaugca

SEQ ID NO: 77481 - RNA, 19 nt, Homo sapiens
  misc_RNA (1)...(19): siRNA sense strand
ggaaaucuccaaaugcaaa

SEQ ID NO: 77482 - RNA, 19 nt, Homo sapiens
  misc_RNA (1)...(19): siRNA sense strand
caaacuggaugaugacaug

SEQ ID NO: 77483 - RNA, 19 nt, Homo sapiens
  misc_RNA (1)...(19): siRNA sense strand
agacuggauuugcugauua

SEQ ID NO: 77484 - RNA, 19 nt, Homo sapiens
  misc_RNA (1)...(19): siRNA sense strand
gacaugaaccugcuggaua

SEQ ID NO: 77485 - RNA, 19 nt, Homo sapiens
  misc_RNA (1)...(19): siRNA sense strand
gaagauaaucaacgacuau

SEQ ID NO: 77486 - RNA, 19 nt, Homo sapiens
  misc_RNA (1)...(19): siRNA sense strand
gacaaaguuuaccaaauga

SEQ ID NO: 77487 - RNA, 19 nt, Homo sapiens
  misc_RNA (1)...(19): siRNA sense strand
cagcagaaaucuuuaugau

SEQ ID NO: 77488 - RNA, 19 nt, Homo sapiens
  misc_RNA (1)...(19): siRNA sense strand
gaaaggaggagauggaaag

SEQ ID NO: 77489 - RNA, 19 nt, Homo sapiens
  misc_RNA (1)...(19): siRNA sense strand
gauaaucaacgacuaugaa

SEQ ID NO: 77490 - RNA, 19 nt, Homo sapiens
  misc_RNA (1)...(19): siRNA sense strand
gaucuggccucccucaagu

SEQ ID NO: 77491 - RNA, 19 nt, Homo sapiens
  misc_RNA (1)...(19): siRNA sense strand
gaauugaggucuuuuaagu

SEQ ID NO: 77492 - RNA, 19 nt, Homo sapiens
  misc_RNA (1)...(19): siRNA sense strand
aagaggaaaucuccaaaug

SEQ ID NO: 77493 - RNA, 19 nt, Homo sapiens
  misc_RNA (1)...(19): siRNA sense strand
gcaagaacccaucaaggau

SEQ ID NO: 77494 - RNA, 19 nt, Homo sapiens
  misc_RNA (1)...(19): siRNA sense strand
ggaaagggaacuucagaca

SEQ ID NO: 77495 - RNA, 19 nt, Homo sapiens
  misc_RNA (1)...(19): siRNA sense strand
gcccaaacuucacagcauu

SEQ ID NO: 77496 - RNA, 19 nt, Homo sapiens
  misc_RNA (1)...(19): siRNA sense strand
acaugaaccugcuggauau

SEQ ID NO: 77497 - RNA, 19 nt, Homo sapiens
  misc_RNA (1)...(19): siRNA sense strand
gucaugcucuaucagauuu

SEQ ID NO: 77498 - RNA, 19 nt, Homo sapiens
  misc_RNA (1)...(19): siRNA sense strand
ucauagagauggagaagag

SEQ ID NO: 77499 - RNA, 19 nt, Homo sapiens
  misc_RNA (1)...(19): siRNA sense strand
ucuaucagauuucagaaga

SEQ ID NO: 77500 - RNA, 19 nt, Homo sapiens
  misc_RNA (1)...(19): siRNA sense strand
ugaagauaaucaacgacua

SEQ ID NO: 77501 - RNA, 19 nt, Homo sapiens
  misc_RNA (1)...(19): siRNA sense strand
acaagagccugcugaagau

SEQ ID NO: 77502 - RNA, 19 nt, Homo sapiens
  misc_RNA (1)...(19): siRNA sense strand
aaugcaaacuggaugauga

SEQ ID NO: 77503 - RNA, 19 nt, Homo sapiens
  misc_RNA (1)...(19): siRNA sense strand
uggauuugcugauuaccua

SEQ ID NO: 77504 - RNA, 19 nt, Homo sapiens
  misc_RNA (1)...(19): siRNA sense strand
gugagcagaucagaauuga

SEQ ID NO: 77505 - RNA, 19 nt, Homo sapiens
  misc_RNA (1)...(19): siRNA sense strand
gggagaaagugcccaaacu

SEQ ID NO: 77506 - RNA, 19 nt, Homo sapiens
  misc_RNA (1)...(19): siRNA sense strand
aaucaacgacuaugaagaa

SEQ ID NO: 77507 - RNA, 19 nt, Homo sapiens
  misc_RNA (1)...(19): siRNA sense strand
ccaggcagggcucaaauuu

SEQ ID NO: 77508 - RNA, 19 nt, Homo sapiens
  misc_RNA (1)...(19): siRNA sense strand
gcaagaggaaaucuccaaa

SEQ ID NO: 77509 - RNA, 19 nt, Homo sapiens
  misc_RNA (1)...(19): siRNA sense strand
gaaaguuggacauccugaa

SEQ ID NO: 77510 - RNA, 19 nt, Homo sapiens
  misc_RNA (1)...(19): siRNA sense strand
gaucaucaacaaucacaau

SEQ ID NO: 77511 - RNA, 19 nt, Homo sapiens
  misc_RNA (1)...(19): siRNA sense strand
gacuucagcagaaaucuuu

SEQ ID NO: 77512 - RNA, 19 nt, Homo sapiens
  misc_RNA (1)...(19): siRNA sense strand
cagaagaagugagcagauc

SEQ ID NO: 77513 - RNA, 19 nt, Homo sapiens
  misc_RNA (1)...(19): siRNA sense strand
aacaagagccugcugaaga

SEQ ID NO: 77514 - RNA, 19 nt, Homo sapiens
  misc_RNA (1)...(19): siRNA sense strand
cugauuaccuaccuaaaca

SEQ ID NO: 77515 - RNA, 19 nt, Homo sapiens
  misc_RNA (1)...(19): siRNA sense strand
gaagcaagaacccaucaag

SEQ ID NO: 77516 - RNA, 19 nt, Homo sapiens
  misc_RNA (1)...(19): siRNA sense strand
ggucaugcucuaucagauu

SEQ ID NO: 77517 - RNA, 19 nt, Homo sapiens
  misc_RNA (1)...(19): siRNA sense strand
uuaccuaccuaaacacuag

SEQ ID NO: 77518 - RNA, 19 nt, Homo sapiens
  misc_RNA (1)...(19): siRNA sense strand
aggcagggcucaaauuucu

SEQ ID NO: 77519 - RNA, 19 nt, Homo sapiens
  misc_RNA (1)...(19): siRNA sense strand
cgaauuaauagacuggauu

SEQ ID NO: 77520 - RNA, 19 nt, Homo sapiens
  misc_RNA (1)...(19): siRNA sense strand
caagaggaaaucuccaaau

SEQ ID NO: 77521 - RNA, 19 nt, Homo sapiens
  misc_RNA (1)...(19): siRNA sense strand
ccaaaugcaaacuggauga

SEQ ID NO: 77522 - RNA, 19 nt, Homo sapiens
  misc_RNA (1)...(19): siRNA sense strand
ggacuucagcagaaaucuu

SEQ ID NO: 77523 - RNA, 19 nt, Homo sapiens
  misc_RNA (1)...(19): siRNA sense strand
aagagaauguuggaggaaa

SEQ ID NO: 77524 - RNA, 19 nt, Homo sapiens
  misc_RNA (1)...(19): siRNA sense strand
uggacaaaguuuaccaaau

SEQ ID NO: 77525 - RNA, 19 nt, Homo sapiens
  misc_RNA (1)...(19): siRNA sense strand
aaaguuggacauccugaaa

SEQ ID NO: 77526 - RNA, 19 nt, Homo sapiens
  misc_RNA (1)...(19): siRNA sense strand
gcucaaauuucugccuaca

SEQ ID NO: 77527 - RNA, 19 nt, Homo sapiens
  misc_RNA (1)...(19): siRNA sense strand
uagacuggauuugcugauu

SEQ ID NO: 77528 - RNA, 19 nt, Homo sapiens
  misc_RNA (1)...(19): siRNA sense strand
ggacuacauuccgcaaagg

SEQ ID NO: 77529 - RNA, 19 nt, Homo sapiens
  misc_RNA (1)...(19): siRNA sense strand
uaucagauuucagaagaag

SEQ ID NO: 77530 - RNA, 19 nt, Homo sapiens
  misc_RNA (1)...(19): siRNA sense strand
uuaauagacuggauuugcu

SEQ ID NO: 77531 - RNA, 19 nt, Homo sapiens
  misc_RNA (1)...(19): siRNA sense strand
gggauacugucugaucauc

SEQ ID NO: 77532 - RNA, 19 nt, Homo sapiens
  misc_RNA (1)...(19): siRNA sense strand
aagagucugugcccaaauc

SEQ ID NO: 77533 - RNA, 19 nt, Homo sapiens
  misc_RNA (1)...(19): siRNA sense strand
caagagccugcugaagaua

SEQ ID NO: 77534 - RNA, 19 nt, Homo sapiens
  misc_RNA (1)...(19): siRNA sense strand
cuagaaaggaggagaugga

SEQ ID NO: 77535 - RNA, 19 nt, Homo sapiens
  misc_RNA (1)...(19): siRNA sense strand
ggagauggaaagggaacuu

SEQ ID NO: 77536 - RNA, 19 nt, Homo sapiens
  misc_RNA (1)...(19): siRNA sense strand
ucaacgacuaugaagaauu

SEQ ID NO: 77537 - RNA, 19 nt, Homo sapiens
  misc_RNA (1)...(19): siRNA sense strand
gaauguuggaggaaagcaa

SEQ ID NO: 77538 - RNA, 19 nt, Homo sapiens
  misc_RNA (1)...(19): siRNA sense strand
aggaugccuugauguuauu

SEQ ID NO: 77539 - RNA, 19 nt, Homo sapiens
  misc_RNA (1)...(19): siRNA sense strand
gagaaggaaaguuggacau

SEQ ID NO: 77540 - RNA, 19 nt, Homo sapiens
  misc_RNA (1)...(19): siRNA sense strand
gaagaagugagcagaucag

SEQ ID NO: 77541 - RNA, 19 nt, Homo sapiens
  misc_RNA (1)...(19): siRNA sense strand
gacuggauuugcugauuac

SEQ ID NO: 77542 - RNA, 19 nt, Homo sapiens
  misc_RNA (1)...(19): siRNA sense strand
caacaagagccugcugaag

SEQ ID NO: 77543 - RNA, 19 nt, Homo sapiens
  misc_RNA (1)...(19): siRNA sense strand
agcaagaacccaucaagga

SEQ ID NO: 77544 - RNA, 19 nt, Homo sapiens
  misc_RNA (1)...(19): siRNA sense strand
ucagcagaaaucuuuauga

SEQ ID NO: 77545 - RNA, 19 nt, Homo sapiens
  misc_RNA (1)...(19): siRNA sense strand
ucagauuucagaagaagug

SEQ ID NO: 77546 - RNA, 19 nt, Homo sapiens
  misc_RNA (1)...(19): siRNA sense strand
ggaagcaagaacccaucaa

SEQ ID NO: 77547 - RNA, 19 nt, Homo sapiens
  misc_RNA (1)...(19): siRNA sense strand
cugcucuuccgaauuaaua

SEQ ID NO: 77548 - RNA, 19 nt, Homo sapiens
  misc_RNA (1)...(19): siRNA sense strand
gcugauuaccuaccuaaac

SEQ ID NO: 77549 - RNA, 19 nt, Homo sapiens
  misc_RNA (1)...(19): siRNA sense strand
cccaaacuucacagcauua

SEQ ID NO: 77550 - RNA, 19 nt, Homo sapiens
  misc_RNA (1)...(19): siRNA sense strand
ucaacaagagccugcugaa

SEQ ID NO: 77551 - RNA, 19 nt, Homo sapiens
  misc_RNA (1)...(19): siRNA sense strand
ccugggagaaggaaaguug

SEQ ID NO: 77552 - RNA, 19 nt, Homo sapiens
  misc_RNA (1)...(19): siRNA sense strand
ugaaccugcuggauauuuu

SEQ ID NO: 77553 - RNA, 19 nt, Homo sapiens
  misc_RNA (1)...(19): siRNA sense strand
cuaucagauuucagaagaa

SEQ ID NO: 77554 - RNA, 19 nt, Homo sapiens
  misc_RNA (1)...(19): siRNA sense strand
aaagcaaucuguccuuccu

SEQ ID NO: 77555 - RNA, 19 nt, Homo sapiens
  misc_RNA (1)...(19): siRNA sense strand
agagaauguuggaggaaag

SEQ ID NO: 77556 - RNA, 19 nt, Homo sapiens
  misc_RNA (1)...(19): siRNA sense strand
gcaaucuguccuuccugaa

SEQ ID NO: 77557 - RNA, 19 nt, Homo sapiens
  misc_RNA (1)...(19): siRNA sense strand
gcaaacuggaugaugacau

SEQ ID NO: 77558 - RNA, 19 nt, Homo sapiens
  misc_RNA (1)...(19): siRNA sense strand
gggucaugcucuaucagau

SEQ ID NO: 77559 - RNA, 19 nt, Homo sapiens
  misc_RNA (1)...(19): siRNA sense strand
aaaagagucugugcccaaa

SEQ ID NO: 77560 - RNA, 19 nt, Homo sapiens
  misc_RNA (1)...(19): siRNA sense strand
caaaagcacgggagaaagu

SEQ ID NO: 77561 - RNA, 19 nt, Homo sapiens
  misc_RNA (1)...(19): siRNA sense strand
gugcccaaaucaacaagag

SEQ ID NO: 77562 - RNA, 19 nt, Homo sapiens
  misc_RNA (1)...(19): siRNA sense strand
uggacuacauuccgcaaag

SEQ ID NO: 77563 - RNA, 19 nt, Homo sapiens
  misc_RNA (1)...(19): siRNA sense strand
uaaucaacgacuaugaaga

SEQ ID NO: 77564 - RNA, 19 nt, Homo sapiens
  misc_RNA (1)...(19): siRNA sense strand
agagccugcugaagauaau

SEQ ID NO: 77565 - RNA, 19 nt, Homo sapiens
  misc_RNA (1)...(19): siRNA sense strand
aagagccugcugaagauaa

SEQ ID NO: 77566 - RNA, 19 nt, Homo sapiens
  misc_RNA (1)...(19): siRNA sense strand
gcucuuccgaauuaauaga

SEQ ID NO: 77567 - RNA, 19 nt, Homo sapiens
  misc_RNA (1)...(19): siRNA sense strand
ccgaauuaauagacuggau

SEQ ID NO: 77568 - RNA, 19 nt, Homo sapiens
  misc_RNA (1)...(19): siRNA sense strand
gaaaugaccucccuaaguu

SEQ ID NO: 77569 - RNA, 19 nt, Homo sapiens
  misc_RNA (1)...(19): siRNA sense strand
gaaggcagcugguauauuc

SEQ ID NO: 77570 - RNA, 19 nt, Homo sapiens
  misc_RNA (1)...(19): siRNA sense strand
gacaugaucuuccuucuga

SEQ ID NO: 77571 - RNA, 19 nt, Homo sapiens
  misc_RNA (1)...(19): siRNA sense strand
caaaggguuucucuguuua

SEQ ID NO: 77572 - RNA, 19 nt, Homo sapiens
  misc_RNA (1)...(19): siRNA sense strand
gaucaugucucacuucaca

SEQ ID NO: 77573 - RNA, 19 nt, Homo sapiens
  misc_RNA (1)...(19): siRNA sense strand
uggcagaacuccucuauau

SEQ ID NO: 77574 - RNA, 19 nt, Homo sapiens
  misc_RNA (1)...(19): siRNA sense strand
gcagaacuccucuauauca

SEQ ID NO: 77575 - RNA, 19 nt, Homo sapiens
  misc_RNA (1)...(19): siRNA sense strand
acaaaggguuucucuguuu

SEQ ID NO: 77576 - RNA, 19 nt, Homo sapiens
  misc_RNA (1)...(19): siRNA sense strand
gaacuccucuauaucauac

SEQ ID NO: 77577 - RNA, 19 nt, Homo sapiens
  misc_RNA (1)...(19): siRNA sense strand
caacauugguauuccaguu

SEQ ID NO: 77578 - RNA, 19 nt, Homo sapiens
  misc_RNA (1)...(19): siRNA sense strand
gacaaaggguuucucuguu

SEQ ID NO: 77579 - RNA, 19 nt, Homo sapiens
  misc_RNA (1)...(19): siRNA sense strand
gaaagacucgcuucccaaa

SEQ ID NO: 77580 - RNA, 19 nt, Homo sapiens
  misc_RNA (1)...(19): siRNA sense strand
gcaaaacaguuguaccuaa

SEQ ID NO: 77581 - RNA, 19 nt, Homo sapiens
  misc_RNA (1)...(19): siRNA sense strand
gaacuuaaaggacaugauc

SEQ ID NO: 77582 - RNA, 19 nt, Homo sapiens
  misc_RNA (1)...(19): siRNA sense strand
ccauaaagaugcugagauc

SEQ ID NO: 77583 - RNA, 19 nt, Homo sapiens
  misc_RNA (1)...(19): siRNA sense strand
gaggaaggcagcugguaua

SEQ ID NO: 77584 - RNA, 19 nt, Homo sapiens
  misc_RNA (1)...(19): siRNA sense strand
gaagaacuaguuucccaaa

SEQ ID NO: 77585 - RNA, 19 nt, Homo sapiens
  misc_RNA (1)...(19): siRNA sense strand
acaauaaugugacgaaagu

SEQ ID NO: 77586 - RNA, 19 nt, Homo sapiens
  misc_RNA (1)...(19): siRNA sense strand
gaggcugacuuccuacuug

SEQ ID NO: 77587 - RNA, 19 nt, Homo sapiens
  misc_RNA (1)...(19): siRNA sense strand
ugacgaaaguggaaaugga

SEQ ID NO: 77588 - RNA, 19 nt, Homo sapiens
  misc_RNA (1)...(19): siRNA sense strand
cagaaggcauugacucaga

SEQ ID NO: 77589 - RNA, 19 nt, Homo sapiens
  misc_RNA (1)...(19): siRNA sense strand
ucaaggagaggaagaacua

SEQ ID NO: 77590 - RNA, 19 nt, Homo sapiens
  misc_RNA (1)...(19): siRNA sense strand
cgacaaaggguuucucugu

SEQ ID NO: 77591 - RNA, 19 nt, Homo sapiens
  misc_RNA (1)...(19): siRNA sense strand
cugccaaggugaagagaua

SEQ ID NO: 77592 - RNA, 19 nt, Homo sapiens
  misc_RNA (1)...(19): siRNA sense strand
gcugagauccugagucaug

SEQ ID NO: 77593 - RNA, 19 nt, Homo sapiens
  misc_RNA (1)...(19): siRNA sense strand
uauauucagucucugugua

SEQ ID NO: 77594 - RNA, 19 nt, Homo sapiens
  misc_RNA (1)...(19): siRNA sense strand
ccucaaguuucucugcaua

SEQ ID NO: 77595 - RNA, 19 nt, Homo sapiens
  misc_RNA (1)...(19): siRNA sense strand
gauccugagucauguguuc

SEQ ID NO: 77596 - RNA, 19 nt, Homo sapiens
  misc_RNA (1)...(19): siRNA sense strand
caaggaacccauaaagaug

SEQ ID NO: 77597 - RNA, 19 nt, Homo sapiens
  misc_RNA (1)...(19): siRNA sense strand
caaaacaguuguaccuaaa

SEQ ID NO: 77598 - RNA, 19 nt, Homo sapiens
  misc_RNA (1)...(19): siRNA sense strand
ggagaggaagaacuaguuu

SEQ ID NO: 77599 - RNA, 19 nt, Homo sapiens
  misc_RNA (1)...(19): siRNA sense strand
gacaaggaacccauaaaga

SEQ ID NO: 77600 - RNA, 19 nt, Homo sapiens
  misc_RNA (1)...(19): siRNA sense strand
gaaaccugcucuacgaacu

SEQ ID NO: 77601 - RNA, 19 nt, Homo sapiens
  misc_RNA (1)...(19): siRNA sense strand
gauagugacaccuccugua

SEQ ID NO: 77602 - RNA, 19 nt, Homo sapiens
  misc_RNA (1)...(19): siRNA sense strand
ugaaaugaccucccuaagu

SEQ ID NO: 77603 - RNA, 19 nt, Homo sapiens
  misc_RNA (1)...(19): siRNA sense strand
caaggaagccgagucguau

SEQ ID NO: 77604 - RNA, 19 nt, Homo sapiens
  misc_RNA (1)...(19): siRNA sense strand
guauuccaguucagauaaa

SEQ ID NO: 77605 - RNA, 19 nt, Homo sapiens
  misc_RNA (1)...(19): siRNA sense strand
cagugcauauacacaauaa

SEQ ID NO: 77606 - RNA, 19 nt, Homo sapiens
  misc_RNA (1)...(19): siRNA sense strand
acaaggaacccauaaagau

SEQ ID NO: 77607 - RNA, 19 nt, Homo sapiens
  misc_RNA (1)...(19): siRNA sense strand
gugcauauacacaauaaug

SEQ ID NO: 77608 - RNA, 19 nt, Homo sapiens
  misc_RNA (1)...(19): siRNA sense strand
gcugguauauucagucucu

SEQ ID NO: 77609 - RNA, 19 nt, Homo sapiens
  misc_RNA (1)...(19): siRNA sense strand
gguauuccaguucagauaa

SEQ ID NO: 77610 - RNA, 19 nt, Homo sapiens
  misc_RNA (1)...(19): siRNA sense strand
gagagaaagcuauccagau

SEQ ID NO: 77611 - RNA, 19 nt, Homo sapiens
  misc_RNA (1)...(19): siRNA sense strand
ggaggaaggcagcugguau

SEQ ID NO: 77612 - RNA, 19 nt, Homo sapiens
  misc_RNA (1)...(19): siRNA sense strand
gcaccucaacuguaccaaa

SEQ ID NO: 77613 - RNA, 19 nt, Homo sapiens
  misc_RNA (1)...(19): siRNA sense strand
ggaaggcagcugguauauu

SEQ ID NO: 77614 - RNA, 19 nt, Homo sapiens
  misc_RNA (1)...(19): siRNA sense strand
acaaggaagccgagucgua

SEQ ID NO: 77615 - RNA, 19 nt, Homo sapiens
  misc_RNA (1)...(19): siRNA sense strand
gucaacaaccacagcuuua

SEQ ID NO: 77616 - RNA, 19 nt, Homo sapiens
  misc_RNA (1)...(19): siRNA sense strand
uaaguuuccuggcauuucu

SEQ ID NO: 77617 - RNA, 19 nt, Homo sapiens
  misc_RNA (1)...(19): siRNA sense strand
gaaaguggaaauggagaug

SEQ ID NO: 77618 - RNA, 19 nt, Homo sapiens
  misc_RNA (1)...(19): siRNA sense strand
ugccgaggcugacuuccua

SEQ ID NO: 77619 - RNA, 19 nt, Homo sapiens
  misc_RNA (1)...(19): siRNA sense strand
caacuguaccaaagaggaa

SEQ ID NO: 77620 - RNA, 19 nt, Homo sapiens
  misc_RNA (1)...(19): siRNA sense strand
gaagccgagucguaucaag

SEQ ID NO: 77621 - RNA, 19 nt, Homo sapiens
  misc_RNA (1)...(19): siRNA sense strand
caccucaacuguaccaaag

SEQ ID NO: 77622 - RNA, 19 nt, Homo sapiens
  misc_RNA (1)...(19): siRNA sense strand
ucacagugcauauacacaa

SEQ ID NO: 77623 - RNA, 19 nt, Homo sapiens
  misc_RNA (1)...(19): siRNA sense strand
guggagaaccucaaguuuc

SEQ ID NO: 77624 - RNA, 19 nt, Homo sapiens
  misc_RNA (1)...(19): siRNA sense strand
ggacaugaucuuccuucug

SEQ ID NO: 77625 - RNA, 19 nt, Homo sapiens
  misc_RNA (1)...(19): siRNA sense strand
gacauucuuggaagccuua

SEQ ID NO: 77626 - RNA, 19 nt, Homo sapiens
  misc_RNA (1)...(19): siRNA sense strand
gacagacaaggaacccaua

SEQ ID NO: 77627 - RNA, 19 nt, Homo sapiens
  misc_RNA (1)...(19): siRNA sense strand
cccaggcuauguauccuuu

SEQ ID NO: 77628 - RNA, 19 nt, Homo sapiens
  misc_RNA (1)...(19): siRNA sense strand
ggucaacauugguauucca

SEQ ID NO: 77629 - RNA, 19 nt, Homo sapiens
  misc_RNA (1)...(19): siRNA sense strand
ugacaccuccuguagacaa

SEQ ID NO: 77630 - RNA, 19 nt, Homo sapiens
  misc_RNA (1)...(19): siRNA sense strand
caaggucaacauugguauu

SEQ ID NO: 77631 - RNA, 19 nt, Homo sapiens
  misc_RNA (1)...(19): siRNA sense strand
uguguaaucaucugaagaa

SEQ ID NO: 77632 - RNA, 19 nt, Homo sapiens
  misc_RNA (1)...(19): siRNA sense strand
augcugagauccugaguca

SEQ ID NO: 77633 - RNA, 19 nt, Homo sapiens
  misc_RNA (1)...(19): siRNA sense strand
agaacuccucuauaucaua

SEQ ID NO: 77634 - RNA, 19 nt, Homo sapiens
  misc_RNA (1)...(19): siRNA sense strand
agacaaggaacccauaaag

SEQ ID NO: 77635 - RNA, 19 nt, Homo sapiens
  misc_RNA (1)...(19): siRNA sense strand
caugaucuuccuucugaaa

SEQ ID NO: 77636 - RNA, 19 nt, Homo sapiens
  misc_RNA (1)...(19): siRNA sense strand
cagaacuccucuauaucau

SEQ ID NO: 77637 - RNA, 19 nt, Homo sapiens
  misc_RNA (1)...(19): siRNA sense strand
acucagagaacuuaaagga

SEQ ID NO: 77638 - RNA, 19 nt, Homo sapiens
  misc_RNA (1)...(19): siRNA sense strand
ugucaacaaccacagcuuu

SEQ ID NO: 77639 - RNA, 19 nt, Homo sapiens
  misc_RNA (1)...(19): siRNA sense strand
cgaacugucagaaggcauu

SEQ ID NO: 77640 - RNA, 19 nt, Homo sapiens
  misc_RNA (1)...(19): siRNA sense strand
ugagugaggaagacccuuu

SEQ ID NO: 77641 - RNA, 19 nt, Homo sapiens
  misc_RNA (1)...(19): siRNA sense strand
gagaggaagaacuaguuuc

SEQ ID NO: 77642 - RNA, 19 nt, Homo sapiens
  misc_RNA (1)...(19): siRNA sense strand
cugcagcaccucaacugua

SEQ ID NO: 77643 - RNA, 19 nt, Homo sapiens
  misc_RNA (1)...(19): siRNA sense strand
gcccuagacuggcugaaaa

SEQ ID NO: 77644 - RNA, 19 nt, Homo sapiens
  misc_RNA (1)...(19): siRNA sense strand
cacagugcauauacacaau

SEQ ID NO: 77645 - RNA, 19 nt, Homo sapiens
  misc_RNA (1)...(19): siRNA sense strand
gcauugacucagagaacuu

SEQ ID NO: 77646 - RNA, 19 nt, Homo sapiens
  misc_RNA (1)...(19): siRNA sense strand
cagcugguauauucagucu

SEQ ID NO: 77647 - RNA, 19 nt, Homo sapiens
  misc_RNA (1)...(19): siRNA sense strand
uauaucauacggcagaaga

SEQ ID NO: 77648 - RNA, 19 nt, Homo sapiens
  misc_RNA (1)...(19): siRNA sense strand
cauugacucagagaacuua

SEQ ID NO: 77649 - RNA, 19 nt, Homo sapiens
  misc_RNA (1)...(19): siRNA sense strand
ccucaacuguaccaaagag

SEQ ID NO: 77650 - RNA, 19 nt, Homo sapiens
  misc_RNA (1)...(19): siRNA sense strand
uggagaugguccugcagaa

SEQ ID NO: 77651 - RNA, 19 nt, Homo sapiens
  misc_RNA (1)...(19): siRNA sense strand
cagacaaggaacccauaaa

SEQ ID NO: 77652 - RNA, 19 nt, Homo sapiens
  misc_RNA (1)...(19): siRNA sense strand
cagagaacuuaaaggacau

SEQ ID NO: 77653 - RNA, 19 nt, Homo sapiens
  misc_RNA (1)...(19): siRNA sense strand
gaaggcauugacucagaga

SEQ ID NO: 77654 - RNA, 19 nt, Homo sapiens
  misc_RNA (1)...(19): siRNA sense strand
gaaaucucaaggucaacau

SEQ ID NO: 77655 - RNA, 19 nt, Homo sapiens
  misc_RNA (1)...(19): siRNA sense strand
acagugcauauacacaaua

SEQ ID NO: 77656 - RNA, 19 nt, Homo sapiens
  misc_RNA (1)...(19): siRNA sense strand
gagaaacaagguaaaauag

SEQ ID NO: 77657 - RNA, 19 nt, Homo sapiens
  misc_RNA (1)...(19): siRNA sense strand
aaaugaccucccuaaguuu

SEQ ID NO: 77658 - RNA, 19 nt, Homo sapiens
  misc_RNA (1)...(19): siRNA sense strand
gaacugucagaaggcauug

SEQ ID NO: 77659 - RNA, 19 nt, Homo sapiens
  misc_RNA (1)...(19): siRNA sense strand
ggacugcuucguguucugu

SEQ ID NO: 77660 - RNA, 19 nt, Homo sapiens
  misc_RNA (1)...(19): siRNA sense strand
acauugguauuccaguuca

SEQ ID NO: 77661 - RNA, 19 nt, Homo sapiens
  misc_RNA (1)...(19): siRNA sense strand
acagacaaggaacccauaa

SEQ ID NO: 77662 - RNA, 19 nt, Homo sapiens
  misc_RNA (1)...(19): siRNA sense strand
gagaaacauagagaaauac

SEQ ID NO: 77663 - RNA, 19 nt, Homo sapiens
  misc_RNA (1)...(19): siRNA sense strand
ugacucagagaacuuaaag

SEQ ID NO: 77664 - RNA, 19 nt, Homo sapiens
  misc_RNA (1)...(19): siRNA sense strand
aaguuucucugcauaggau

SEQ ID NO: 77665 - RNA, 19 nt, Homo sapiens
  misc_RNA (1)...(19): siRNA sense strand
guguaaucaucugaagaaa

SEQ ID NO: 77666 - RNA, 19 nt, Homo sapiens
  misc_RNA (1)...(19): siRNA sense strand
ggagaugguccugcagaag

SEQ ID NO: 77667 - RNA, 19 nt, Homo sapiens
  misc_RNA (1)...(19): siRNA sense strand
gcucuacgaacugucagaa

SEQ ID NO: 77668 - RNA, 19 nt, Homo sapiens
  misc_RNA (1)...(19): siRNA sense strand
gaaaugaccucccuaaguu

SEQ ID NO: 77669 - RNA, 19 nt, Homo sapiens
  misc_RNA (1)...(19): siRNA sense strand
gaaggcagcugguauauuc

SEQ ID NO: 77670 - RNA, 19 nt, Homo sapiens
  misc_RNA (1)...(19): siRNA sense strand
gacaugaucuuccuucuga

SEQ ID NO: 77671 - RNA, 19 nt, Homo sapiens
  misc_RNA (1)...(19): siRNA sense strand
caaaggguuucucuguuua

SEQ ID NO: 77672 - RNA, 19 nt, Homo sapiens
  misc_RNA (1)...(19): siRNA sense strand
gaucaugucucacuucaca

SEQ ID NO: 77673 - RNA, 19 nt, Homo sapiens
  misc_RNA (1)...(19): siRNA sense strand
uggcagaacuccucuauau

SEQ ID NO: 77674 - RNA, 19 nt, Homo sapiens
  misc_RNA (1)...(19): siRNA sense strand
gcagaacuccucuauauca

SEQ ID NO: 77675 - RNA, 19 nt, Homo sapiens
  misc_RNA (1)...(19): siRNA sense strand
acaaaggguuucucuguuu

SEQ ID NO: 77676 - RNA, 19 nt, Homo sapiens
  misc_RNA (1)...(19): siRNA sense strand
gaacuccucuauaucauac

SEQ ID NO: 77677 - RNA, 19 nt, Homo sapiens
  misc_RNA (1)...(19): siRNA sense strand
caacauugguauuccaguu

SEQ ID NO: 77678 - RNA, 19 nt, Homo sapiens
  misc_RNA (1)...(19): siRNA sense strand
gacaaaggguuucucuguu

SEQ ID NO: 77679 - RNA, 19 nt, Homo sapiens
  misc_RNA (1)...(19): siRNA sense strand
gaaagacucgcuucccaaa

SEQ ID NO: 77680 - RNA, 19 nt, Homo sapiens
  misc_RNA (1)...(19): siRNA sense strand
gcaaaacaguuguaccuaa

SEQ ID NO: 77681 - RNA, 19 nt, Homo sapiens
  misc_RNA (1)...(19): siRNA sense strand
gaacuuaaaggacaugauc

SEQ ID NO: 77682 - RNA, 19 nt, Homo sapiens
  misc_RNA (1)...(19): siRNA sense strand
ccauaaagaugcugagauc

SEQ ID NO: 77683 - RNA, 19 nt, Homo sapiens
  misc_RNA (1)...(19): siRNA sense strand
gaggaaggcagcugguaua

SEQ ID NO: 77684 - RNA, 19 nt, Homo sapiens
  misc_RNA (1)...(19): siRNA sense strand
gaagaacuaguuucccaaa

SEQ ID NO: 77685 - RNA, 19 nt, Homo sapiens
  misc_RNA (1)...(19): siRNA sense strand
acaauaaugugacgaaagu

SEQ ID NO: 77686 - RNA, 19 nt, Homo sapiens
  misc_RNA (1)...(19): siRNA sense strand
gaggcugacuuccuacuug

SEQ ID NO: 77687 - RNA, 19 nt, Homo sapiens
  misc_RNA (1)...(19): siRNA sense strand
ugacgaaaguggaaaugga

SEQ ID NO: 77688 - RNA, 19 nt, Homo sapiens
  misc_RNA (1)...(19): siRNA sense strand
cagaaggcauugacucaga

SEQ ID NO: 77689 - RNA, 19 nt, Homo sapiens
  misc_RNA (1)...(19): siRNA sense strand
ucaaggagaggaagaacua

SEQ ID NO: 77690 - RNA, 19 nt, Homo sapiens
  misc_RNA (1)...(19): siRNA sense strand
cgacaaaggguuucucugu

SEQ ID NO: 77691 - RNA, 19 nt, Homo sapiens
  misc_RNA (1)...(19): siRNA sense strand
cugccaaggugaagagaua

SEQ ID NO: 77692 - RNA, 19 nt, Homo sapiens
  misc_RNA (1)...(19): siRNA sense strand
gcugagauccugagucaug

SEQ ID NO: 77693 - RNA, 19 nt, Homo sapiens
  misc_RNA (1)...(19): siRNA sense strand
uauauucagucucugugua

SEQ ID NO: 77694 - RNA, 19 nt, Homo sapiens
  misc_RNA (1)...(19): siRNA sense strand
ccucaaguuucucugcaua

SEQ ID NO: 77695 - RNA, 19 nt, Homo sapiens
  misc_RNA (1)...(19): siRNA sense strand
gauccugagucauguguuc

SEQ ID NO: 77696 - RNA, 19 nt, Homo sapiens
  misc_RNA (1)...(19): siRNA sense strand
caaggaacccauaaagaug

SEQ ID NO: 77697 - RNA, 19 nt, Homo sapiens
  misc_RNA (1)...(19): siRNA sense strand
caaaacaguuguaccuaaa

SEQ ID NO: 77698 - RNA, 19 nt, Homo sapiens
  misc_RNA (1)...(19): siRNA sense strand
ggagaggaagaacuaguuu

SEQ ID NO: 77699 - RNA, 19 nt, Homo sapiens
  misc_RNA (1)...(19): siRNA sense strand
gacaaggaacccauaaaga

SEQ ID NO: 77700 - RNA, 19 nt, Homo sapiens
  misc_RNA (1)...(19): siRNA sense strand
gaaaccugcucuacgaacu

SEQ ID NO: 77701 - RNA, 19 nt, Homo sapiens
  misc_RNA (1)...(19): siRNA sense strand
gauagugacaccuccugua

SEQ ID NO: 77702 - RNA, 19 nt, Homo sapiens
  misc_RNA (1)...(19): siRNA sense strand
ugaaaugaccucccuaagu

SEQ ID NO: 77703 - RNA, 19 nt, Homo sapiens
  misc_RNA (1)...(19): siRNA sense strand
caaggaagccgagucguau

SEQ ID NO: 77704 - RNA, 19 nt, Homo sapiens
  misc_RNA (1)...(19): siRNA sense strand
guauuccaguucagauaaa

SEQ ID NO: 77705 - RNA, 19 nt, Homo sapiens
  misc_RNA (1)...(19): siRNA sense strand
cagugcauauacacaauaa

SEQ ID NO: 77706 - RNA, 19 nt, Homo sapiens
  misc_RNA (1)...(19): siRNA sense strand
acaaggaacccauaaagau

SEQ ID NO: 77707 - RNA, 19 nt, Homo sapiens
  misc_RNA (1)...(19): siRNA sense strand
gugcauauacacaauaaug

SEQ ID NO: 77708 - RNA, 19 nt, Homo sapiens
  misc_RNA (1)...(19): siRNA sense strand
gcugguauauucagucucu

SEQ ID NO: 77709 - RNA, 19 nt, Homo sapiens
  misc_RNA (1)...(19): siRNA sense strand
gguauuccaguucagauaa

SEQ ID NO: 77710 - RNA, 19 nt, Homo sapiens
  misc_RNA (1)...(19): siRNA sense strand
gagagaaagcuauccagau

SEQ ID NO: 77711 - RNA, 19 nt, Homo sapiens
  misc_RNA (1)...(19): siRNA sense strand
ggaggaaggcagcugguau

SEQ ID NO: 77712 - RNA, 19 nt, Homo sapiens
  misc_RNA (1)...(19): siRNA sense strand
gcaccucaacuguaccaaa

SEQ ID NO: 77713 - RNA, 19 nt, Homo sapiens
  misc_RNA (1)...(19): siRNA sense strand
ggaaggcagcugguauauu

SEQ ID NO: 77714 - RNA, 19 nt, Homo sapiens
  misc_RNA (1)...(19): siRNA sense strand
acaaggaagccgagucgua

SEQ ID NO: 77715 - RNA, 19 nt, Homo sapiens
  misc_RNA (1)...(19): siRNA sense strand
gucaacaaccacagcuuua

SEQ ID NO: 77716 - RNA, 19 nt, Homo sapiens
  misc_RNA (1)...(19): siRNA sense strand
uaaguuuccuggcauuucu

SEQ ID NO: 77717 - RNA, 19 nt, Homo sapiens
  misc_RNA (1)...(19): siRNA sense strand
gaaaguggaaauggagaug

SEQ ID NO: 77718 - RNA, 19 nt, Homo sapiens
  misc_RNA (1)...(19): siRNA sense strand
ugccgaggcugacuuccua

SEQ ID NO: 77719 - RNA, 19 nt, Homo sapiens
  misc_RNA (1)...(19): siRNA sense strand
caacuguaccaaagaggaa

SEQ ID NO: 77720 - RNA, 19 nt, Homo sapiens
  misc_RNA (1)...(19): siRNA sense strand
gaagccgagucguaucaag

SEQ ID NO: 77721 - RNA, 19 nt, Homo sapiens
  misc_RNA (1)...(19): siRNA sense strand
caccucaacuguaccaaag

SEQ ID NO: 77722 - RNA, 19 nt, Homo sapiens
  misc_RNA (1)...(19): siRNA sense strand
ucacagugcauauacacaa

SEQ ID NO: 77723 - RNA, 19 nt, Homo sapiens
  misc_RNA (1)...(19): siRNA sense strand
guggagaaccucaaguuuc

SEQ ID NO: 77724 - RNA, 19 nt, Homo sapiens
  misc_RNA (1)...(19): siRNA sense strand
ggacaugaucuuccuucug

SEQ ID NO: 77725 - RNA, 19 nt, Homo sapiens
  misc_RNA (1)...(19): siRNA sense strand
gacauucuuggaagccuua

SEQ ID NO: 77726 - RNA, 19 nt, Homo sapiens
  misc_RNA (1)...(19): siRNA sense strand
gacagacaaggaacccaua

SEQ ID NO: 77727 - RNA, 19 nt, Homo sapiens
  misc_RNA (1)...(19): siRNA sense strand
cccaggcuauguauccuuu

SEQ ID NO: 77728 - RNA, 19 nt, Homo sapiens
  misc_RNA (1)...(19): siRNA sense strand
ggucaacauugguauucca

SEQ ID NO: 77729 - RNA, 19 nt, Homo sapiens
  misc_RNA (1)...(19): siRNA sense strand
ugacaccuccuguagacaa

SEQ ID NO: 77730 - RNA, 19 nt, Homo sapiens
  misc_RNA (1)...(19): siRNA sense strand
caaggucaacauugguauu

SEQ ID NO: 77731 - RNA, 19 nt, Homo sapiens
  misc_RNA (1)...(19): siRNA sense strand
uguguaaucaucugaagaa

SEQ ID NO: 77732 - RNA, 19 nt, Homo sapiens
  misc_RNA (1)...(19): siRNA sense strand
augcugagauccugaguca

SEQ ID NO: 77733 - RNA, 19 nt, Homo sapiens
  misc_RNA (1)...(19): siRNA sense strand
agaacuccucuauaucaua

SEQ ID NO: 77734 - RNA, 19 nt, Homo sapiens
  misc_RNA (1)...(19): siRNA sense strand
agacaaggaacccauaaag

SEQ ID NO: 77735 - RNA, 19 nt, Homo sapiens
  misc_RNA (1)...(19): siRNA sense strand
caugaucuuccuucugaaa

SEQ ID NO: 77736 - RNA, 19 nt, Homo sapiens
  misc_RNA (1)...(19): siRNA sense strand
cagaacuccucuauaucau

SEQ ID NO: 77737 - RNA, 19 nt, Homo sapiens
  misc_RNA (1)...(19): siRNA sense strand
acucagagaacuuaaagga

SEQ ID NO: 77738 - RNA, 19 nt, Homo sapiens
  misc_RNA (1)...(19): siRNA sense strand
ugucaacaaccacagcuuu

SEQ ID NO: 77739 - RNA, 19 nt, Homo sapiens
  misc_RNA (1)...(19): siRNA sense strand
cgaacugucagaaggcauu

SEQ ID NO: 77740 - RNA, 19 nt, Homo sapiens
  misc_RNA (1)...(19): siRNA sense strand
ugagugaggaagacccuuu

SEQ ID NO: 77741 - RNA, 19 nt, Homo sapiens
  misc_RNA (1)...(19): siRNA sense strand
gagaggaagaacuaguuuc

SEQ ID NO: 77742 - RNA, 19 nt, Homo sapiens
  misc_RNA (1)...(19): siRNA sense strand
cugcagcaccucaacugua

SEQ ID NO: 77743 - RNA, 19 nt, Homo sapiens
  misc_RNA (1)...(19): siRNA sense strand
gcccuagacuggcugaaaa

SEQ ID NO: 77744 - RNA, 19 nt, Homo sapiens
  misc_RNA (1)...(19): siRNA sense strand
cacagugcauauacacaau

SEQ ID NO: 77745 - RNA, 19 nt, Homo sapiens
  misc_RNA (1)...(19): siRNA sense strand
gcauugacucagagaacuu

SEQ ID NO: 77746 - RNA, 19 nt, Homo sapiens
  misc_RNA (1)...(19): siRNA sense strand
cagcugguauauucagucu

SEQ ID NO: 77747 - RNA, 19 nt, Homo sapiens
  misc_RNA (1)...(19): siRNA sense strand
uauaucauacggcagaaga

SEQ ID NO: 77748 - RNA, 19 nt, Homo sapiens
  misc_RNA (1)...(19): siRNA sense strand
cauugacucagagaacuua

SEQ ID NO: 77749 - RNA, 19 nt, Homo sapiens
  misc_RNA (1)...(19): siRNA sense strand
ccucaacuguaccaaagag

SEQ ID NO: 77750 - RNA, 19 nt, Homo sapiens
  misc_RNA (1)...(19): siRNA sense strand
uggagaugguccugcagaa

SEQ ID NO: 77751 - RNA, 19 nt, Homo sapiens
  misc_RNA (1)...(19): siRNA sense strand
cagacaaggaacccauaaa

SEQ ID NO: 77752 - RNA, 19 nt, Homo sapiens
  misc_RNA (1)...(19): siRNA sense strand
cagagaacuuaaaggacau

SEQ ID NO: 77753 - RNA, 19 nt, Homo sapiens
  misc_RNA (1)...(19): siRNA sense strand
gaaggcauugacucagaga

SEQ ID NO: 77754 - RNA, 19 nt, Homo sapiens
  misc_RNA (1)...(19): siRNA sense strand
gaaaucucaaggucaacau

SEQ ID NO: 77755 - RNA, 19 nt, Homo sapiens
  misc_RNA (1)...(19): siRNA sense strand
acagugcauauacacaaua

SEQ ID NO: 77756 - RNA, 19 nt, Homo sapiens
  misc_RNA (1)...(19): siRNA sense strand
gagaaacaagguaaaauag

SEQ ID NO: 77757 - RNA, 19 nt, Homo sapiens
  misc_RNA (1)...(19): siRNA sense strand
aaaugaccucccuaaguuu

SEQ ID NO: 77758 - RNA, 19 nt, Homo sapiens
  misc_RNA (1)...(19): siRNA sense strand
gaacugucagaaggcauug

SEQ ID NO: 77759 - RNA, 19 nt, Homo sapiens
  misc_RNA (1)...(19): siRNA sense strand
ggacugcuucguguucugu

SEQ ID NO: 77760 - RNA, 19 nt, Homo sapiens
  misc_RNA (1)...(19): siRNA sense strand
acauugguauuccaguuca

SEQ ID NO: 77761 - RNA, 19 nt, Homo sapiens
  misc_RNA (1)...(19): siRNA sense strand
acagacaaggaacccauaa

SEQ ID NO: 77762 - RNA, 19 nt, Homo sapiens
  misc_RNA (1)...(19): siRNA sense strand
gagaaacauagagaaauac

SEQ ID NO: 77763 - RNA, 19 nt, Homo sapiens
  misc_RNA (1)...(19): siRNA sense strand
ugacucagagaacuuaaag

SEQ ID NO: 77764 - RNA, 19 nt, Homo sapiens
  misc_RNA (1)...(19): siRNA sense strand
aaguuucucugcauaggau

SEQ ID NO: 77765 - RNA, 19 nt, Homo sapiens
  misc_RNA (1)...(19): siRNA sense strand
guguaaucaucugaagaaa

SEQ ID NO: 77766 - RNA, 19 nt, Homo sapiens
  misc_RNA (1)...(19): siRNA sense strand
ggagaugguccugcagaag

SEQ ID NO: 77767 - RNA, 19 nt, Homo sapiens
  misc_RNA (1)...(19): siRNA sense strand
gcucuacgaacugucagaa

SEQ ID NO: 77768 - RNA, 19 nt, Homo sapiens
  misc_RNA (1)...(19): siRNA sense strand
gaaaugaccucccuaaguu

SEQ ID NO: 77769 - RNA, 19 nt, Homo sapiens
  misc_RNA (1)...(19): siRNA sense strand
gacaugaucuuccuucuga

SEQ ID NO: 77770 - RNA, 19 nt, Homo sapiens
  misc_RNA (1)...(19): siRNA sense strand
caaaggguuucucuguuua

SEQ ID NO: 77771 - RNA, 19 nt, Homo sapiens
  misc_RNA (1)...(19): siRNA sense strand
uggcagaacuccucuauau

SEQ ID NO: 77772 - RNA, 19 nt, Homo sapiens
  misc_RNA (1)...(19): siRNA sense strand
gcagaacuccucuauauca

SEQ ID NO: 77773 - RNA, 19 nt, Homo sapiens
  misc_RNA (1)...(19): siRNA sense strand
acaaaggguuucucuguuu

SEQ ID NO: 77774 - RNA, 19 nt, Homo sapiens
  misc_RNA (1)...(19): siRNA sense strand
gaacuccucuauaucauac

SEQ ID NO: 77775 - RNA, 19 nt, Homo sapiens
  misc_RNA (1)...(19): siRNA sense strand
caacauugguauuccaguu

SEQ ID NO: 77776 - RNA, 19 nt, Homo sapiens
  misc_RNA (1)...(19): siRNA sense strand
gacaaaggguuucucuguu

SEQ ID NO: 77777 - RNA, 19 nt, Homo sapiens
  misc_RNA (1)...(19): siRNA sense strand
gaaagacucgcuucccaaa

SEQ ID NO: 77778 - RNA, 19 nt, Homo sapiens
  misc_RNA (1)...(19): siRNA sense strand
gcaaaacaguuguaccuaa

SEQ ID NO: 77779 - RNA, 19 nt, Homo sapiens
  misc_RNA (1)...(19): siRNA sense strand
gaacuuaaaggacaugauc

SEQ ID NO: 77780 - RNA, 19 nt, Homo sapiens
  misc_RNA (1)...(19): siRNA sense strand
gaagaacuaguuucccaaa

SEQ ID NO: 77781 - RNA, 19 nt, Homo sapiens
  misc_RNA (1)...(19): siRNA sense strand
cagaaggcauugacucaga

SEQ ID NO: 77782 - RNA, 19 nt, Homo sapiens
  misc_RNA (1)...(19): siRNA sense strand
ucaaggagaggaagaacua

SEQ ID NO: 77783 - RNA, 19 nt, Homo sapiens
  misc_RNA (1)...(19): siRNA sense strand
cgacaaaggguuucucugu

SEQ ID NO: 77784 - RNA, 19 nt, Homo sapiens
  misc_RNA (1)...(19): siRNA sense strand
ccucaaguuucucugcaua

SEQ ID NO: 77785 - RNA, 19 nt, Homo sapiens
  misc_RNA (1)...(19): siRNA sense strand
caaaacaguuguaccuaaa

SEQ ID NO: 77786 - RNA, 19 nt, Homo sapiens
  misc_RNA (1)...(19): siRNA sense strand
ggagaggaagaacuaguuu

SEQ ID NO: 77787 - RNA, 19 nt, Homo sapiens
  misc_RNA (1)...(19): siRNA sense strand
gaaaccugcucuacgaacu

SEQ ID NO: 77788 - RNA, 19 nt, Homo sapiens
  misc_RNA (1)...(19): siRNA sense strand
gauagugacaccuccugua

SEQ ID NO: 77789 - RNA, 19 nt, Homo sapiens
  misc_RNA (1)...(19): siRNA sense strand
ugaaaugaccucccuaagu

SEQ ID NO: 77790 - RNA, 19 nt, Homo sapiens
  misc_RNA (1)...(19): siRNA sense strand
guauuccaguucagauaaa

SEQ ID NO: 77791 - RNA, 19 nt, Homo sapiens
  misc_RNA (1)...(19): siRNA sense strand
caaggaagccgagucguau

SEQ ID NO: 77792 - RNA, 19 nt, Homo sapiens
  misc_RNA (1)...(19): siRNA sense strand
gguauuccaguucagauaa

SEQ ID NO: 77793 - RNA, 19 nt, Homo sapiens
  misc_RNA (1)...(19): siRNA sense strand
gagagaaagcuauccagau

SEQ ID NO: 77794 - RNA, 19 nt, Homo sapiens
  misc_RNA (1)...(19): siRNA sense strand
gcaccucaacuguaccaaa

SEQ ID NO: 77795 - RNA, 19 nt, Homo sapiens
  misc_RNA (1)...(19): siRNA sense strand
acaaggaagccgagucgua

SEQ ID NO: 77796 - RNA, 19 nt, Homo sapiens
  misc_RNA (1)...(19): siRNA sense strand
gucaacaaccacagcuuua

SEQ ID NO: 77797 - RNA, 19 nt, Homo sapiens
  misc_RNA (1)...(19): siRNA sense strand
uaaguuuccuggcauuucu

SEQ ID NO: 77798 - RNA, 19 nt, Homo sapiens
  misc_RNA (1)...(19): siRNA sense strand
caacuguaccaaagaggaa

SEQ ID NO: 77799 - RNA, 19 nt, Homo sapiens
  misc_RNA (1)...(19): siRNA sense strand
gaagccgagucguaucaag

SEQ ID NO: 77800 - RNA, 19 nt, Homo sapiens
  misc_RNA (1)...(19): siRNA sense strand
caccucaacuguaccaaag

SEQ ID NO: 77801 - RNA, 19 nt, Homo sapiens
  misc_RNA (1)...(19): siRNA sense strand
ggacaugaucuuccuucug

SEQ ID NO: 77802 - RNA, 19 nt, Homo sapiens
  misc_RNA (1)...(19): siRNA sense strand
guggagaaccucaaguuuc

SEQ ID NO: 77803 - RNA, 19 nt, Homo sapiens
  misc_RNA (1)...(19): siRNA sense strand
gacauucuuggaagccuua

SEQ ID NO: 77804 - RNA, 19 nt, Homo sapiens
  misc_RNA (1)...(19): siRNA sense strand
gacagacaaggaacccaua

SEQ ID NO: 77805 - RNA, 19 nt, Homo sapiens
  misc_RNA (1)...(19): siRNA sense strand
ggucaacauugguauucca

SEQ ID NO: 77806 - RNA, 19 nt, Homo sapiens
  misc_RNA (1)...(19): siRNA sense strand
ugacaccuccuguagacaa

SEQ ID NO: 77807 - RNA, 19 nt, Homo sapiens
  misc_RNA (1)...(19): siRNA sense strand
caaggucaacauugguauu

SEQ ID NO: 77808 - RNA, 19 nt, Homo sapiens
  misc_RNA (1)...(19): siRNA sense strand
cagaacuccucuauaucau

SEQ ID NO: 77809 - RNA, 19 nt, Homo sapiens
  misc_RNA (1)...(19): siRNA sense strand
caugaucuuccuucugaaa

SEQ ID NO: 77810 - RNA, 19 nt, Homo sapiens
  misc_RNA (1)...(19): siRNA sense strand
acucagagaacuuaaagga

SEQ ID NO: 77811 - RNA, 19 nt, Homo sapiens
  misc_RNA (1)...(19): siRNA sense strand
agaacuccucuauaucaua

SEQ ID NO: 77812 - RNA, 19 nt, Homo sapiens
  misc_RNA (1)...(19): siRNA sense strand
ugucaacaaccacagcuuu

SEQ ID NO: 77813 - RNA, 19 nt, Homo sapiens
  misc_RNA (1)...(19): siRNA sense strand
ugagugaggaagacccuuu

SEQ ID NO: 77814 - RNA, 19 nt, Homo sapiens
  misc_RNA (1)...(19): siRNA sense strand
gagaggaagaacuaguuuc

SEQ ID NO: 77815 - RNA, 19 nt, Homo sapiens
  misc_RNA (1)...(19): siRNA sense strand
cgaacugucagaaggcauu

SEQ ID NO: 77816 - RNA, 19 nt, Homo sapiens
  misc_RNA (1)...(19): siRNA sense strand
cugcagcaccucaacugua

SEQ ID NO: 77817 - RNA, 19 nt, Homo sapiens
  misc_RNA (1)...(19): siRNA sense strand
uauaucauacggcagaaga

SEQ ID NO: 77818 - RNA, 19 nt, Homo sapiens
  misc_RNA (1)...(19): siRNA sense strand
cauugacucagagaacuua

SEQ ID NO: 77819 - RNA, 19 nt, Homo sapiens
  misc_RNA (1)...(19): siRNA sense strand
gcauugacucagagaacuu

SEQ ID NO: 77820 - RNA, 19 nt, Homo sapiens
  misc_RNA (1)...(19): siRNA sense strand
ccucaacuguaccaaagag

SEQ ID NO: 77821 - RNA, 19 nt, Homo sapiens
  misc_RNA (1)...(19): siRNA sense strand
cagagaacuuaaaggacau

SEQ ID NO: 77822 - RNA, 19 nt, Homo sapiens
  misc_RNA (1)...(19): siRNA sense strand
gaaggcauugacucagaga

SEQ ID NO: 77823 - RNA, 19 nt, Homo sapiens
  misc_RNA (1)...(19): siRNA sense strand
gaaaucucaaggucaacau

SEQ ID NO: 77824 - RNA, 19 nt, Homo sapiens
  misc_RNA (1)...(19): siRNA sense strand
gagaaacaagguaaaauag

SEQ ID NO: 77825 - RNA, 19 nt, Homo sapiens
  misc_RNA (1)...(19): siRNA sense strand
aaaugaccucccuaaguuu

SEQ ID NO: 77826 - RNA, 19 nt, Homo sapiens
  misc_RNA (1)...(19): siRNA sense strand
gaacugucagaaggcauug

SEQ ID NO: 77827 - RNA, 19 nt, Homo sapiens
  misc_RNA (1)...(19): siRNA sense strand
acagacaaggaacccauaa

SEQ ID NO: 77828 - RNA, 19 nt, Homo sapiens
  misc_RNA (1)...(19): siRNA sense strand
gagaaacauagagaaauac

SEQ ID NO: 77829 - RNA, 19 nt, Homo sapiens
  misc_RNA (1)...(19): siRNA sense strand
ugacucagagaacuuaaag

SEQ ID NO: 77830 - RNA, 19 nt, Homo sapiens
  misc_RNA (1)...(19): siRNA sense strand
acauugguauuccaguuca

SEQ ID NO: 77831 - RNA, 19 nt, Homo sapiens
  misc_RNA (1)...(19): siRNA sense strand
aaguuucucugcauaggau

SEQ ID NO: 77832 - RNA, 19 nt, Homo sapiens
  misc_RNA (1)...(19): siRNA sense strand
gcucuacgaacugucagaa

SEQ ID NO: 77833 - RNA, 19 nt, Homo sapiens
  misc_RNA (1)...(19): siRNA sense strand
ggcauugacucagagaacu

SEQ ID NO: 77834 - RNA, 19 nt, Homo sapiens
  misc_RNA (1)...(19): siRNA sense strand
uguggagaaccucaaguuu

SEQ ID NO: 77835 - RNA, 19 nt, Homo sapiens
  misc_RNA (1)...(19): siRNA sense strand
caaguuucucugcauagga

SEQ ID NO: 77836 - RNA, 19 nt, Homo sapiens
  misc_RNA (1)...(19): siRNA sense strand
ucaaguuucucugcauagg

SEQ ID NO: 77837 - RNA, 19 nt, Homo sapiens
  misc_RNA (1)...(19): siRNA sense strand
gaaaugaccucccuaaguu

SEQ ID NO: 77838 - RNA, 19 nt, Homo sapiens
  misc_RNA (1)...(19): siRNA sense strand
gaaggcagcugguauauuc

SEQ ID NO: 77839 - RNA, 19 nt, Homo sapiens
  misc_RNA (1)...(19): siRNA sense strand
gacaugaucuuccuucuga

SEQ ID NO: 77840 - RNA, 19 nt, Homo sapiens
  misc_RNA (1)...(19): siRNA sense strand
caaaggguuucucuguuua

SEQ ID NO: 77841 - RNA, 19 nt, Homo sapiens
  misc_RNA (1)...(19): siRNA sense strand
gaucaugucucacuucaca

SEQ ID NO: 77842 - RNA, 19 nt, Homo sapiens
  misc_RNA (1)...(19): siRNA sense strand
uggcagaacuccucuauau

SEQ ID NO: 77843 - RNA, 19 nt, Homo sapiens
  misc_RNA (1)...(19): siRNA sense strand
gcagaacuccucuauauca

SEQ ID NO: 77844 - RNA, 19 nt, Homo sapiens
  misc_RNA (1)...(19): siRNA sense strand
acaaaggguuucucuguuu

SEQ ID NO: 77845 - RNA, 19 nt, Homo sapiens
  misc_RNA (1)...(19): siRNA sense strand
gaacuccucuauaucauac

SEQ ID NO: 77846 - RNA, 19 nt, Homo sapiens
  misc_RNA (1)...(19): siRNA sense strand
caacauugguauuccaguu

SEQ ID NO: 77847 - RNA, 19 nt, Homo sapiens
  misc_RNA (1)...(19): siRNA sense strand
gacaaaggguuucucuguu

SEQ ID NO: 77848 - RNA, 19 nt, Homo sapiens
  misc_RNA (1)...(19): siRNA sense strand
gaaagacucgcuucccaaa

SEQ ID NO: 77849 - RNA, 19 nt, Homo sapiens
  misc_RNA (1)...(19): siRNA sense strand
gcaaaacaguuguaccuaa

SEQ ID NO: 77850 - RNA, 19 nt, Homo sapiens
  misc_RNA (1)...(19): siRNA sense strand
gaacuuaaaggacaugauc

SEQ ID NO: 77851 - RNA, 19 nt, Homo sapiens
  misc_RNA (1)...(19): siRNA sense strand
ccauaaagaugcugagauc

SEQ ID NO: 77852 - RNA, 19 nt, Homo sapiens
  misc_RNA (1)...(19): siRNA sense strand
gaggaaggcagcugguaua

SEQ ID NO: 77853 - RNA, 19 nt, Homo sapiens
  misc_RNA (1)...(19): siRNA sense strand
gaagaacuaguuucccaaa

SEQ ID NO: 77854 - RNA, 19 nt, Homo sapiens
  misc_RNA (1)...(19): siRNA sense strand
acaauaaugugacgaaagu

SEQ ID NO: 77855 - RNA, 19 nt, Homo sapiens
  misc_RNA (1)...(19): siRNA sense strand
gaggcugacuuccuacuug

SEQ ID NO: 77856 - RNA, 19 nt, Homo sapiens
  misc_RNA (1)...(19): siRNA sense strand
ugacgaaaguggaaaugga

SEQ ID NO: 77857 - RNA, 19 nt, Homo sapiens
  misc_RNA (1)...(19): siRNA sense strand
cagaaggcauugacucaga

SEQ ID NO: 77858 - RNA, 19 nt, Homo sapiens
  misc_RNA (1)...(19): siRNA sense strand
ucaaggagaggaagaacua

SEQ ID NO: 77859 - RNA, 19 nt, Homo sapiens
  misc_RNA (1)...(19): siRNA sense strand
cgacaaaggguuucucugu

SEQ ID NO: 77860 - RNA, 19 nt, Homo sapiens
  misc_RNA (1)...(19): siRNA sense strand
cugccaaggugaagagaua

SEQ ID NO: 77861 - RNA, 19 nt, Homo sapiens
  misc_RNA (1)...(19): siRNA sense strand
gcugagauccugagucaug

SEQ ID NO: 77862 - RNA, 19 nt, Homo sapiens
  misc_RNA (1)...(19): siRNA sense strand
uauauucagucucugugua

SEQ ID NO: 77863 - RNA, 19 nt, Homo sapiens
  misc_RNA (1)...(19): siRNA sense strand
ccucaaguuucucugcaua

SEQ ID NO: 77864 - RNA, 19 nt, Homo sapiens
  misc_RNA (1)...(19): siRNA sense strand
gauccugagucauguguuc

SEQ ID NO: 77865 - RNA, 19 nt, Homo sapiens
  misc_RNA (1)...(19): siRNA sense strand
caaggaacccauaaagaug

SEQ ID NO: 77866 - RNA, 19 nt, Homo sapiens
  misc_RNA (1)...(19): siRNA sense strand
caaaacaguuguaccuaaa

SEQ ID NO: 77867 - RNA, 19 nt, Homo sapiens
  misc_RNA (1)...(19): siRNA sense strand
ggagaggaagaacuaguuu

SEQ ID NO: 77868 - RNA, 19 nt, Homo sapiens
  misc_RNA (1)...(19): siRNA sense strand
gacaaggaacccauaaaga

SEQ ID NO: 77869 - RNA, 19 nt, Homo sapiens
  misc_RNA (1)...(19): siRNA sense strand
gaaaccugcucuacgaacu

SEQ ID NO: 77870 - RNA, 19 nt, Homo sapiens
  misc_RNA (1)...(19): siRNA sense strand
gauagugacaccuccugua

SEQ ID NO: 77871 - RNA, 19 nt, Homo sapiens
  misc_RNA (1)...(19): siRNA sense strand
ugaaaugaccucccuaagu

SEQ ID NO: 77872 - RNA, 19 nt, Homo sapiens
  misc_RNA (1)...(19): siRNA sense strand
caaggaagccgagucguau

SEQ ID NO: 77873 - RNA, 19 nt, Homo sapiens
  misc_RNA (1)...(19): siRNA sense strand
guauuccaguucagauaaa

SEQ ID NO: 77874 - RNA, 19 nt, Homo sapiens
  misc_RNA (1)...(19): siRNA sense strand
cagugcauauacacaauaa

SEQ ID NO: 77875 - RNA, 19 nt, Homo sapiens
  misc_RNA (1)...(19): siRNA sense strand
acaaggaacccauaaagau

SEQ ID NO: 77876 - RNA, 19 nt, Homo sapiens
  misc_RNA (1)...(19): siRNA sense strand
gugcauauacacaauaaug

SEQ ID NO: 77877 - RNA, 19 nt, Homo sapiens
  misc_RNA (1)...(19): siRNA sense strand
gcugguauauucagucucu

SEQ ID NO: 77878 - RNA, 19 nt, Homo sapiens
  misc_RNA (1)...(19): siRNA sense strand
gguauuccaguucagauaa

SEQ ID NO: 77879 - RNA, 19 nt, Homo sapiens
  misc_RNA (1)...(19): siRNA sense strand
gagagaaagcuauccagau

SEQ ID NO: 77880 - RNA, 19 nt, Homo sapiens
  misc_RNA (1)...(19): siRNA sense strand
ggaggaaggcagcugguau

SEQ ID NO: 77881 - RNA, 19 nt, Homo sapiens
  misc_RNA (1)...(19): siRNA sense strand
gcaccucaacuguaccaaa

SEQ ID NO: 77882 - RNA, 19 nt, Homo sapiens
  misc_RNA (1)...(19): siRNA sense strand
ggaaggcagcugguauauu

SEQ ID NO: 77883 - RNA, 19 nt, Homo sapiens
  misc_RNA (1)...(19): siRNA sense strand
acaaggaagccgagucgua

SEQ ID NO: 77884 - RNA, 19 nt, Homo sapiens
  misc_RNA (1)...(19): siRNA sense strand
gucaacaaccacagcuuua

SEQ ID NO: 77885 - RNA, 19 nt, Homo sapiens
  misc_RNA (1)...(19): siRNA sense strand
uaaguuuccuggcauuucu

SEQ ID NO: 77886 - RNA, 19 nt, Homo sapiens
  misc_RNA (1)...(19): siRNA sense strand
gaaaguggaaauggagaug

SEQ ID NO: 77887 - RNA, 19 nt, Homo sapiens
  misc_RNA (1)...(19): siRNA sense strand
ugccgaggcugacuuccua

SEQ ID NO: 77888 - RNA, 19 nt, Homo sapiens
  misc_RNA (1)...(19): siRNA sense strand
caacuguaccaaagaggaa

SEQ ID NO: 77889 - RNA, 19 nt, Homo sapiens
  misc_RNA (1)...(19): siRNA sense strand
gaagccgagucguaucaag

SEQ ID NO: 77890 - RNA, 19 nt, Homo sapiens
  misc_RNA (1)...(19): siRNA sense strand
caccucaacuguaccaaag

SEQ ID NO: 77891 - RNA, 19 nt, Homo sapiens
  misc_RNA (1)...(19): siRNA sense strand
ucacagugcauauacacaa

SEQ ID NO: 77892 - RNA, 19 nt, Homo sapiens
  misc_RNA (1)...(19): siRNA sense strand
guggagaaccucaaguuuc

SEQ ID NO: 77893 - RNA, 19 nt, Homo sapiens
  misc_RNA (1)...(19): siRNA sense strand
ggacaugaucuuccuucug

SEQ ID NO: 77894 - RNA, 19 nt, Homo sapiens
  misc_RNA (1)...(19): siRNA sense strand
gacauucuuggaagccuua

SEQ ID NO: 77895 - RNA, 19 nt, Homo sapiens
  misc_RNA (1)...(19): siRNA sense strand
gacagacaaggaacccaua

SEQ ID NO: 77896 - RNA, 19 nt, Homo sapiens
  misc_RNA (1)...(19): siRNA sense strand
cccaggcuauguauccuuu

SEQ ID NO: 77897 - RNA, 19 nt, Homo sapiens
  misc_RNA (1)...(19): siRNA sense strand
ggucaacauugguauucca

SEQ ID NO: 77898 - RNA, 19 nt, Homo sapiens
  misc_RNA (1)...(19): siRNA sense strand
ugacaccuccuguagacaa

SEQ ID NO: 77899 - RNA, 19 nt, Homo sapiens
  misc_RNA (1)...(19): siRNA sense strand
caaggucaacauugguauu

SEQ ID NO: 77900 - RNA, 19 nt, Homo sapiens
  misc_RNA (1)...(19): siRNA sense strand
uguguaaucaucugaagaa

SEQ ID NO: 77901 - RNA, 19 nt, Homo sapiens
  misc_RNA (1)...(19): siRNA sense strand
augcugagauccugaguca

SEQ ID NO: 77902 - RNA, 19 nt, Homo sapiens
  misc_RNA (1)...(19): siRNA sense strand
agaacuccucuauaucaua

SEQ ID NO: 77903 - RNA, 19 nt, Homo sapiens
  misc_RNA (1)...(19): siRNA sense strand
agacaaggaacccauaaag

SEQ ID NO: 77904 - RNA, 19 nt, Homo sapiens
  misc_RNA (1)...(19): siRNA sense strand
caugaucuuccuucugaaa

SEQ ID NO: 77905 - RNA, 19 nt, Homo sapiens
  misc_RNA (1)...(19): siRNA sense strand
cagaacuccucuauaucau

SEQ ID NO: 77906 - RNA, 19 nt, Homo sapiens
  misc_RNA (1)...(19): siRNA sense strand
acucagagaacuuaaagga

SEQ ID NO: 77907 - RNA, 19 nt, Homo sapiens
  misc_RNA (1)...(19): siRNA sense strand
ugucaacaaccacagcuuu

SEQ ID NO: 77908 - RNA, 19 nt, Homo sapiens
  misc_RNA (1)...(19): siRNA sense strand
cgaacugucagaaggcauu

SEQ ID NO: 77909 - RNA, 19 nt, Homo sapiens
  misc_RNA (1)...(19): siRNA sense strand
ugagugaggaagacccuuu

SEQ ID NO: 77910 - RNA, 19 nt, Homo sapiens
  misc_RNA (1)...(19): siRNA sense strand
gagaggaagaacuaguuuc

SEQ ID NO: 77911 - RNA, 19 nt, Homo sapiens
  misc_RNA (1)...(19): siRNA sense strand
cugcagcaccucaacugua

SEQ ID NO: 77912 - RNA, 19 nt, Homo sapiens
  misc_RNA (1)...(19): siRNA sense strand
gcccuagacuggcugaaaa

SEQ ID NO: 77913 - RNA, 19 nt, Homo sapiens
  misc_RNA (1)...(19): siRNA sense strand
cacagugcauauacacaau

SEQ ID NO: 77914 - RNA, 19 nt, Homo sapiens
  misc_RNA (1)...(19): siRNA sense strand
gcauugacucagagaacuu

SEQ ID NO: 77915 - RNA, 19 nt, Homo sapiens
  misc_RNA (1)...(19): siRNA sense strand
cagcugguauauucagucu

SEQ ID NO: 77916 - RNA, 19 nt, Homo sapiens
  misc_RNA (1)...(19): siRNA sense strand
uauaucauacggcagaaga

SEQ ID NO: 77917 - RNA, 19 nt, Homo sapiens
  misc_RNA (1)...(19): siRNA sense strand
cauugacucagagaacuua

SEQ ID NO: 77918 - RNA, 19 nt, Homo sapiens
  misc_RNA (1)...(19): siRNA sense strand
ccucaacuguaccaaagag

SEQ ID NO: 77919 - RNA, 19 nt, Homo sapiens
  misc_RNA (1)...(19): siRNA sense strand
uggagaugguccugcagaa

SEQ ID NO: 77920 - RNA, 19 nt, Homo sapiens
  misc_RNA (1)...(19): siRNA sense strand
cagacaaggaacccauaaa

SEQ ID NO: 77921 - RNA, 19 nt, Homo sapiens
  misc_RNA (1)...(19): siRNA sense strand
cagagaacuuaaaggacau

SEQ ID NO: 77922 - RNA, 19 nt, Homo sapiens
  misc_RNA (1)...(19): siRNA sense strand
gaaggcauugacucagaga

SEQ ID NO: 77923 - RNA, 19 nt, Homo sapiens
  misc_RNA (1)...(19): siRNA sense strand
gaaaucucaaggucaacau

SEQ ID NO: 77924 - RNA, 19 nt, Homo sapiens
  misc_RNA (1)...(19): siRNA sense strand
acagugcauauacacaaua

SEQ ID NO: 77925 - RNA, 19 nt, Homo sapiens
  misc_RNA (1)...(19): siRNA sense strand
gagaaacaagguaaaauag

SEQ ID NO: 77926 - RNA, 19 nt, Homo sapiens
  misc_RNA (1)...(19): siRNA sense strand
aaaugaccucccuaaguuu

SEQ ID NO: 77927 - RNA, 19 nt, Homo sapiens
  misc_RNA (1)...(19): siRNA sense strand
gaacugucagaaggcauug

SEQ ID NO: 77928 - RNA, 19 nt, Homo sapiens
  misc_RNA (1)...(19): siRNA sense strand
ggacugcuucguguucugu

SEQ ID NO: 77929 - RNA, 19 nt, Homo sapiens
  misc_RNA (1)...(19): siRNA sense strand
acauugguauuccaguuca

SEQ ID NO: 77930 - RNA, 19 nt, Homo sapiens
  misc_RNA (1)...(19): siRNA sense strand
acagacaaggaacccauaa

SEQ ID NO: 77931 - RNA, 19 nt, Homo sapiens
  misc_RNA (1)...(19): siRNA sense strand
gagaaacauagagaaauac

SEQ ID NO: 77932 - RNA, 19 nt, Homo sapiens
  misc_RNA (1)...(19): siRNA sense strand
ugacucagagaacuuaaag

SEQ ID NO: 77933 - RNA, 19 nt, Homo sapiens
  misc_RNA (1)...(19): siRNA sense strand
aaguuucucugcauaggau

SEQ ID NO: 77934 - RNA, 19 nt, Homo sapiens
  misc_RNA (1)...(19): siRNA sense strand
guguaaucaucugaagaaa

SEQ ID NO: 77935 - RNA, 19 nt, Homo sapiens
  misc_RNA (1)...(19): siRNA sense strand
ggagaugguccugcagaag

SEQ ID NO: 77936 - RNA, 19 nt, Homo sapiens
  misc_RNA (1)...(19): siRNA sense strand
gcucuacgaacugucagaa

SEQ ID NO: 77937 - RNA, 19 nt, Homo sapiens
  misc_RNA (1)...(19): siRNA sense strand
gcaaagaacuacaagaaug

SEQ ID NO: 77938 - RNA, 19 nt, Homo sapiens
  misc_RNA (1)...(19): siRNA sense strand
caaagaagcugacccugaa

SEQ ID NO: 77939 - RNA, 19 nt, Homo sapiens
  misc_RNA (1)...(19): siRNA sense strand
gcaaagacucagagcauua

SEQ ID NO: 77940 - RNA, 19 nt, Homo sapiens
  misc_RNA (1)...(19): siRNA sense strand
ggauggaaauggacgauga

SEQ ID NO: 77941 - RNA, 19 nt, Homo sapiens
  misc_RNA (1)...(19): siRNA sense strand
acaagaauguguucaagaa

SEQ ID NO: 77942 - RNA, 19 nt, Homo sapiens
  misc_RNA (1)...(19): siRNA sense strand
ggaugcagcugaggaguuu

SEQ ID NO: 77943 - RNA, 19 nt, Homo sapiens
  misc_RNA (1)...(19): siRNA sense strand
gaaacuaggccuaacugaa

SEQ ID NO: 77944 - RNA, 19 nt, Homo sapiens
  misc_RNA (1)...(19): siRNA sense strand
ugacaaggccucacaaaga

SEQ ID NO: 77945 - RNA, 19 nt, Homo sapiens
  misc_RNA (1)...(19): siRNA sense strand
ugaguacgauggcgaguuu

SEQ ID NO: 77946 - RNA, 19 nt, Homo sapiens
  misc_RNA (1)...(19): siRNA sense strand
ggaauugauugaaggugaa

SEQ ID NO: 77947 - RNA, 19 nt, Homo sapiens
  misc_RNA (1)...(19): siRNA sense strand
agaauguguucaagaagua

SEQ ID NO: 77948 - RNA, 19 nt, Homo sapiens
  misc_RNA (1)...(19): siRNA sense strand
aagaggagauugucaacuu

SEQ ID NO: 77949 - RNA, 19 nt, Homo sapiens
  misc_RNA (1)...(19): siRNA sense strand
ggacuucccugaguacgau

SEQ ID NO: 77950 - RNA, 19 nt, Homo sapiens
  misc_RNA (1)...(19): siRNA sense strand
gauagcguauggauggaaa

SEQ ID NO: 77951 - RNA, 19 nt, Homo sapiens
  misc_RNA (1)...(19): siRNA sense strand
gauugacccugaugacuuc

SEQ ID NO: 77952 - RNA, 19 nt, Homo sapiens
  misc_RNA (1)...(19): siRNA sense strand
uaacugaaguggacagcau

SEQ ID NO: 77953 - RNA, 19 nt, Homo sapiens
  misc_RNA (1)...(19): siRNA sense strand
gaucaacccugaggaaacu

SEQ ID NO: 77954 - RNA, 19 nt, Homo sapiens
  misc_RNA (1)...(19): siRNA sense strand
ggaguuagcagcccaaguc

SEQ ID NO: 77955 - RNA, 19 nt, Homo sapiens
  misc_RNA (1)...(19): siRNA sense strand
gagcaaagacucagagcau

SEQ ID NO: 77956 - RNA, 19 nt, Homo sapiens
  misc_RNA (1)...(19): siRNA sense strand
ggacagcauguauguauuc

SEQ ID NO: 77957 - RNA, 19 nt, Homo sapiens
  misc_RNA (1)...(19): siRNA sense strand
acagcaagguggcaaagaa

SEQ ID NO: 77958 - RNA, 19 nt, Homo sapiens
  misc_RNA (1)...(19): siRNA sense strand
gaaugagauugauuucuac

SEQ ID NO: 77959 - RNA, 19 nt, Homo sapiens
  misc_RNA (1)...(19): siRNA sense strand
gacaaggccucacaaagac

SEQ ID NO: 77960 - RNA, 19 nt, Homo sapiens
  misc_RNA (1)...(19): siRNA sense strand
aaauaggagucgucaaugu

SEQ ID NO: 77961 - RNA, 19 nt, Homo sapiens
  misc_RNA (1)...(19): siRNA sense strand
ggagaucaacccugaggaa

SEQ ID NO: 77962 - RNA, 19 nt, Homo sapiens
  misc_RNA (1)...(19): siRNA sense strand
uuacaaagccuucgaggau

SEQ ID NO: 77963 - RNA, 19 nt, Homo sapiens
  misc_RNA (1)...(19): siRNA sense strand
cagcauguauguauucaag

SEQ ID NO: 77964 - RNA, 19 nt, Homo sapiens
  misc_RNA (1)...(19): siRNA sense strand
caaagaacuacaagaaugu

SEQ ID NO: 77965 - RNA, 19 nt, Homo sapiens
  misc_RNA (1)...(19): siRNA sense strand
caaacucauuggcuacuuc

SEQ ID NO: 77966 - RNA, 19 nt, Homo sapiens
  misc_RNA (1)...(19): siRNA sense strand
ggagaagacguuugacauc

SEQ ID NO: 77967 - RNA, 19 nt, Homo sapiens
  misc_RNA (1)...(19): siRNA sense strand
ggauugacccugaugacuu

SEQ ID NO: 77968 - RNA, 19 nt, Homo sapiens
  misc_RNA (1)...(19): siRNA sense strand
gaaguggacagcauguaug

SEQ ID NO: 77969 - RNA, 19 nt, Homo sapiens
  misc_RNA (1)...(19): siRNA sense strand
uugagaauauugaggauga

SEQ ID NO: 77970 - RNA, 19 nt, Homo sapiens
  misc_RNA (1)...(19): siRNA sense strand
uagaggacccuguggaauu

SEQ ID NO: 77971 - RNA, 19 nt, Homo sapiens
  misc_RNA (1)...(19): siRNA sense strand
gcguauggauggaaaugga

SEQ ID NO: 77972 - RNA, 19 nt, Homo sapiens
  misc_RNA (1)...(19): siRNA sense strand
aaagacaauuugagaugga

SEQ ID NO: 77973 - RNA, 19 nt, Homo sapiens
  misc_RNA (1)...(19): siRNA sense strand
aagcugauccugaugguuu

SEQ ID NO: 77974 - RNA, 19 nt, Homo sapiens
  misc_RNA (1)...(19): siRNA sense strand
gggcuggacuucccugagu

SEQ ID NO: 77975 - RNA, 19 nt, Homo sapiens
  misc_RNA (1)...(19): siRNA sense strand
aaacuaggccuaacugaag

SEQ ID NO: 77976 - RNA, 19 nt, Homo sapiens
  misc_RNA (1)...(19): siRNA sense strand
guuagcagcccaaguccua

SEQ ID NO: 77977 - RNA, 19 nt, Homo sapiens
  misc_RNA (1)...(19): siRNA sense strand
acaaauaggagucgucaau

SEQ ID NO: 77978 - RNA, 19 nt, Homo sapiens
  misc_RNA (1)...(19): siRNA sense strand
ucaaggcuguggcccaaga

SEQ ID NO: 77979 - RNA, 19 nt, Homo sapiens
  misc_RNA (1)...(19): siRNA sense strand
cuacgaggccuucauggaa

SEQ ID NO: 77980 - RNA, 19 nt, Homo sapiens
  misc_RNA (1)...(19): siRNA sense strand
ggaguuucaucccuacauc

SEQ ID NO: 77981 - RNA, 19 nt, Homo sapiens
  misc_RNA (1)...(19): siRNA sense strand
gcacuccucuaccaugaac

SEQ ID NO: 77982 - RNA, 19 nt, Homo sapiens
  misc_RNA (1)...(19): siRNA sense strand
gaagcugaaugagauugau

SEQ ID NO: 77983 - RNA, 19 nt, Homo sapiens
  misc_RNA (1)...(19): siRNA sense strand
agaggacccuguggaauug

SEQ ID NO: 77984 - RNA, 19 nt, Homo sapiens
  misc_RNA (1)...(19): siRNA sense strand
gaugacaaggccucacaaa

SEQ ID NO: 77985 - RNA, 19 nt, Homo sapiens
  misc_RNA (1)...(19): siRNA sense strand
ugaucaaugucaaugcaaa

SEQ ID NO: 77986 - RNA, 19 nt, Homo sapiens
  misc_RNA (1)...(19): siRNA sense strand
aagaauguguucaagaagu

SEQ ID NO: 77987 - RNA, 19 nt, Homo sapiens
  misc_RNA (1)...(19): siRNA sense strand
gagaucaacccugaggaaa

SEQ ID NO: 77988 - RNA, 19 nt, Homo sapiens
  misc_RNA (1)...(19): siRNA sense strand
guggacagcauguauguau

SEQ ID NO: 77989 - RNA, 19 nt, Homo sapiens
  misc_RNA (1)...(19): siRNA sense strand
gguagacucugagaaggau

SEQ ID NO: 77990 - RNA, 19 nt, Homo sapiens
  misc_RNA (1)...(19): siRNA sense strand
gcgaagaggagauugucaa

SEQ ID NO: 77991 - RNA, 19 nt, Homo sapiens
  misc_RNA (1)...(19): siRNA sense strand
cgaugacgaugaugaugau

SEQ ID NO: 77992 - RNA, 19 nt, Homo sapiens
  misc_RNA (1)...(19): siRNA sense strand
aaacugaagccggagagua

SEQ ID NO: 77993 - RNA, 19 nt, Homo sapiens
  misc_RNA (1)...(19): siRNA sense strand
cugcaggcguuugagaaua

SEQ ID NO: 77994 - RNA, 19 nt, Homo sapiens
  misc_RNA (1)...(19): siRNA sense strand
ggacgaugacgaugaugau

SEQ ID NO: 77995 - RNA, 19 nt, Homo sapiens
  misc_RNA (1)...(19): siRNA sense strand
auaggagucgucaauguua

SEQ ID NO: 77996 - RNA, 19 nt, Homo sapiens
  misc_RNA (1)...(19): siRNA sense strand
ggaagcugauccugauggu

SEQ ID NO: 77997 - RNA, 19 nt, Homo sapiens
  misc_RNA (1)...(19): siRNA sense strand
agacucagagcauuacaaa

SEQ ID NO: 77998 - RNA, 19 nt, Homo sapiens
  misc_RNA (1)...(19): siRNA sense strand
gaauauugaggaugagauc

SEQ ID NO: 77999 - RNA, 19 nt, Homo sapiens
  misc_RNA (1)...(19): siRNA sense strand
gcaggcguuugagaauauu

SEQ ID NO: 78000 - RNA, 19 nt, Homo sapiens
  misc_RNA (1)...(19): siRNA sense strand
gagcugauccuggaguuag

SEQ ID NO: 78001 - RNA, 19 nt, Homo sapiens
  misc_RNA (1)...(19): siRNA sense strand
gggagaagacguuugacau

SEQ ID NO: 78002 - RNA, 19 nt, Homo sapiens
  misc_RNA (1)...(19): siRNA sense strand
ggcccaagauaacacugaa

SEQ ID NO: 78003 - RNA, 19 nt, Homo sapiens
  misc_RNA (1)...(19): siRNA sense strand
gccaagaaacuaggccuaa

SEQ ID NO: 78004 - RNA, 19 nt, Homo sapiens
  misc_RNA (1)...(19): siRNA sense strand
cuacaagaauguguucaag

SEQ ID NO: 78005 - RNA, 19 nt, Homo sapiens
  misc_RNA (1)...(19): siRNA sense strand
cgaugaugaugaugacuag

SEQ ID NO: 78006 - RNA, 19 nt, Homo sapiens
  misc_RNA (1)...(19): siRNA sense strand
caaugucaaugcaaagaac

SEQ ID NO: 78007 - RNA, 19 nt, Homo sapiens
  misc_RNA (1)...(19): siRNA sense strand
caaauaggagucgucaaug

SEQ ID NO: 78008 - RNA, 19 nt, Homo sapiens
  misc_RNA (1)...(19): siRNA sense strand
ugaaguggacagcauguau

SEQ ID NO: 78009 - RNA, 19 nt, Homo sapiens
  misc_RNA (1)...(19): siRNA sense strand
cagcccaaguccuagaaga

SEQ ID NO: 78010 - RNA, 19 nt, Homo sapiens
  misc_RNA (1)...(19): siRNA sense strand
gaggagcacaggagaucaa

SEQ ID NO: 78011 - RNA, 19 nt, Homo sapiens
  misc_RNA (1)...(19): siRNA sense strand
ugcaggcguuugagaauau

SEQ ID NO: 78012 - RNA, 19 nt, Homo sapiens
  misc_RNA (1)...(19): siRNA sense strand
agaggacgaugacgaugau

SEQ ID NO: 78013 - RNA, 19 nt, Homo sapiens
  misc_RNA (1)...(19): siRNA sense strand
cagaggacgaugacgauga

SEQ ID NO: 78014 - RNA, 19 nt, Homo sapiens
  misc_RNA (1)...(19): siRNA sense strand
agaagacguuugacaucga

SEQ ID NO: 78015 - RNA, 19 nt, Homo sapiens
  misc_RNA (1)...(19): siRNA sense strand
uggcacuccucuaccauga

SEQ ID NO: 78016 - RNA, 19 nt, Homo sapiens
  misc_RNA (1)...(19): siRNA sense strand
ggagcugauccuggaguua

SEQ ID NO: 78017 - RNA, 19 nt, Homo sapiens
  misc_RNA (1)...(19): siRNA sense strand
gagagcugcaggcguuuga

SEQ ID NO: 78018 - RNA, 19 nt, Homo sapiens
  misc_RNA (1)...(19): siRNA sense strand
gcugguagacucugagaag

SEQ ID NO: 78019 - RNA, 19 nt, Homo sapiens
  misc_RNA (1)...(19): siRNA sense strand
gacagcauguauguauuca

SEQ ID NO: 78020 - RNA, 19 nt, Homo sapiens
  misc_RNA (1)...(19): siRNA sense strand
aggaugauauggauggaau

SEQ ID NO: 78021 - RNA, 19 nt, Homo sapiens
  misc_RNA (1)...(19): siRNA sense strand
cucauuggcuacuucaaga

SEQ ID NO: 78022 - RNA, 19 nt, Homo sapiens
  misc_RNA (1)...(19): siRNA sense strand
ggcuggacuucccugagua

SEQ ID NO: 78023 - RNA, 19 nt, Homo sapiens
  misc_RNA (1)...(19): siRNA sense strand
uggaguuucugcuugaugu

SEQ ID NO: 78024 - RNA, 19 nt, Homo sapiens
  misc_RNA (1)...(19): siRNA sense strand
gaggaggaccugccuucug

SEQ ID NO: 78025 - RNA, 19 nt, Homo sapiens
  misc_RNA (1)...(19): siRNA sense strand
ucaaugcaaagaacuacaa

SEQ ID NO: 78026 - RNA, 19 nt, Homo sapiens
  misc_RNA (1)...(19): siRNA sense strand
ggaggaugauauggaugga

SEQ ID NO: 78027 - RNA, 19 nt, Homo sapiens
  misc_RNA (1)...(19): siRNA sense strand
caauagcgaagaggagauu

SEQ ID NO: 78028 - RNA, 19 nt, Homo sapiens
  misc_RNA (1)...(19): siRNA sense strand
uggaagagccugugaccau

SEQ ID NO: 78029 - RNA, 19 nt, Homo sapiens
  misc_RNA (1)...(19): siRNA sense strand
cccugaagcugaaugagau

SEQ ID NO: 78030 - RNA, 19 nt, Homo sapiens
  misc_RNA (1)...(19): siRNA sense strand
gagcugcaggcguuugaga

SEQ ID NO: 78031 - RNA, 19 nt, Homo sapiens
  misc_RNA (1)...(19): siRNA sense strand
gcuagggacacccaaguca

SEQ ID NO: 78032 - RNA, 19 nt, Homo sapiens
  misc_RNA (1)...(19): siRNA sense strand
aauaggagucgucaauguu

SEQ ID NO: 78033 - RNA, 19 nt, Homo sapiens
  misc_RNA (1)...(19): siRNA sense strand
gguuucgaguucuuagaga

SEQ ID NO: 78034 - RNA, 19 nt, Homo sapiens
  misc_RNA (1)...(19): siRNA sense strand
gaccugggaggaugauaug

SEQ ID NO: 78035 - RNA, 19 nt, Homo sapiens
  misc_RNA (1)...(19): siRNA sense strand
agaggagauugucaacuuc

SEQ ID NO: 78036 - RNA, 19 nt, Homo sapiens
  misc_RNA (1)...(19): siRNA sense strand
augcaaagaacuacaagaa

SEQ ID NO: 78037 - RNA, 19 nt, Homo sapiens
  misc_RNA (1)...(19): siRNA sense strand
gaagagaacucacuuguuu

SEQ ID NO: 78038 - RNA, 19 nt, Homo sapiens
  misc_RNA (1)...(19): siRNA sense strand
caacaaaccuuacacagaa

SEQ ID NO: 78039 - RNA, 19 nt, Homo sapiens
  misc_RNA (1)...(19): siRNA sense strand
ggagaagacuuucaagauu

SEQ ID NO: 78040 - RNA, 19 nt, Homo sapiens
  misc_RNA (1)...(19): siRNA sense strand
gaaggaagccuguauauuc

SEQ ID NO: 78041 - RNA, 19 nt, Homo sapiens
  misc_RNA (1)...(19): siRNA sense strand
gagaagacuuucaagauug

SEQ ID NO: 78042 - RNA, 19 nt, Homo sapiens
  misc_RNA (1)...(19): siRNA sense strand
ggaagccuguauauucuua

SEQ ID NO: 78043 - RNA, 19 nt, Homo sapiens
  misc_RNA (1)...(19): siRNA sense strand
gauaaacacugaagaugau

SEQ ID NO: 78044 - RNA, 19 nt, Homo sapiens
  misc_RNA (1)...(19): siRNA sense strand
ugaaugagguugacuucua

SEQ ID NO: 78045 - RNA, 19 nt, Homo sapiens
  misc_RNA (1)...(19): siRNA sense strand
gaacucacuuguuuauugu

SEQ ID NO: 78046 - RNA, 19 nt, Homo sapiens
  misc_RNA (1)...(19): siRNA sense strand
ugaaagaaaucgugcuuga

SEQ ID NO: 78047 - RNA, 19 nt, Homo sapiens
  misc_RNA (1)...(19): siRNA sense strand
gaagaaggaagccuguaua

SEQ ID NO: 78048 - RNA, 19 nt, Homo sapiens
  misc_RNA (1)...(19): siRNA sense strand
gaaugagguugacuucuau

SEQ ID NO: 78049 - RNA, 19 nt, Homo sapiens
  misc_RNA (1)...(19): siRNA sense strand
gaugguggaugccaagaaa

SEQ ID NO: 78050 - RNA, 19 nt, Homo sapiens
  misc_RNA (1)...(19): siRNA sense strand
cagauaaggucacgccaaa

SEQ ID NO: 78051 - RNA, 19 nt, Homo sapiens
  misc_RNA (1)...(19): siRNA sense strand
agaacucacuuguuuauug

SEQ ID NO: 78052 - RNA, 19 nt, Homo sapiens
  misc_RNA (1)...(19): siRNA sense strand
uaagggugaucgcacaaua

SEQ ID NO: 78053 - RNA, 19 nt, Homo sapiens
  misc_RNA (1)...(19): siRNA sense strand
gagccggugucuucagaua

SEQ ID NO: 78054 - RNA, 19 nt, Homo sapiens
  misc_RNA (1)...(19): siRNA sense strand
aagaggagcugguggaguu

SEQ ID NO: 78055 - RNA, 19 nt, Homo sapiens
  misc_RNA (1)...(19): siRNA sense strand
cuacaaggcuuuugaagaa

SEQ ID NO: 78056 - RNA, 19 nt, Homo sapiens
  misc_RNA (1)...(19): siRNA sense strand
ugacgaugaugaugaauag

SEQ ID NO: 78057 - RNA, 19 nt, Homo sapiens
  misc_RNA (1)...(19): siRNA sense strand
ugacuucuaugagccauuu

SEQ ID NO: 78058 - RNA, 19 nt, Homo sapiens
  misc_RNA (1)...(19): siRNA sense strand
ccucuuggaucuaauugaa

SEQ ID NO: 78059 - RNA, 19 nt, Homo sapiens
  misc_RNA (1)...(19): siRNA sense strand
ccaacaaaccuuacacaga

SEQ ID NO: 78060 - RNA, 19 nt, Homo sapiens
  misc_RNA (1)...(19): siRNA sense strand
gggagaagacuuucaagau

SEQ ID NO: 78061 - RNA, 19 nt, Homo sapiens
  misc_RNA (1)...(19): siRNA sense strand
gaucgacccggacgacuuu

SEQ ID NO: 78062 - RNA, 19 nt, Homo sapiens
  misc_RNA (1)...(19): siRNA sense strand
aaacaugggaagaugauuu

SEQ ID NO: 78063 - RNA, 19 nt, Homo sapiens
  misc_RNA (1)...(19): siRNA sense strand
guuugcagcugaugucuug

SEQ ID NO: 78064 - RNA, 19 nt, Homo sapiens
  misc_RNA (1)...(19): siRNA sense strand
ugaagaugaugaugaagau

SEQ ID NO: 78065 - RNA, 19 nt, Homo sapiens
  misc_RNA (1)...(19): siRNA sense strand
cuggaaagauaaacacuga

SEQ ID NO: 78066 - RNA, 19 nt, Homo sapiens
  misc_RNA (1)...(19): siRNA sense strand
gaaagauaaacacugaaga

SEQ ID NO: 78067 - RNA, 19 nt, Homo sapiens
  misc_RNA (1)...(19): siRNA sense strand
ccagguccuugaacauaaa

SEQ ID NO: 78068 - RNA, 19 nt, Homo sapiens
  misc_RNA (1)...(19): siRNA sense strand
ugaugaagaugaugaugau

SEQ ID NO: 78069 - RNA, 19 nt, Homo sapiens
  misc_RNA (1)...(19): siRNA sense strand
agaguuugauggcgaguuu

SEQ ID NO: 78070 - RNA, 19 nt, Homo sapiens
  misc_RNA (1)...(19): siRNA sense strand
gaguuccucuuggaucuaa

SEQ ID NO: 78071 - RNA, 19 nt, Homo sapiens
  misc_RNA (1)...(19): siRNA sense strand
ggauaaugaugacagugau

SEQ ID NO: 78072 - RNA, 19 nt, Homo sapiens
  misc_RNA (1)...(19): siRNA sense strand
gaugauaauucugaugaag

SEQ ID NO: 78073 - RNA, 19 nt, Homo sapiens
  misc_RNA (1)...(19): siRNA sense strand
ggaaagauaaacacugaag

SEQ ID NO: 78074 - RNA, 19 nt, Homo sapiens
  misc_RNA (1)...(19): siRNA sense strand
ugacagugaugacgaugau

SEQ ID NO: 78075 - RNA, 19 nt, Homo sapiens
  misc_RNA (1)...(19): siRNA sense strand
ugaugacgaugaugaugaa

SEQ ID NO: 78076 - RNA, 19 nt, Homo sapiens
  misc_RNA (1)...(19): siRNA sense strand
gaagacuacaucaaacuca

SEQ ID NO: 78077 - RNA, 19 nt, Homo sapiens
  misc_RNA (1)...(19): siRNA sense strand
ucacagaugcugacagugu

SEQ ID NO: 78078 - RNA, 19 nt, Homo sapiens
  misc_RNA (1)...(19): siRNA sense strand
ggacucagaauacuacaag

SEQ ID NO: 78079 - RNA, 19 nt, Homo sapiens
  misc_RNA (1)...(19): siRNA sense strand
ucaagcagguuuuaaagaa

SEQ ID NO: 78080 - RNA, 19 nt, Homo sapiens
  misc_RNA (1)...(19): siRNA sense strand
ugaagaugaugaugaugau

SEQ ID NO: 78081 - RNA, 19 nt, Homo sapiens
  misc_RNA (1)...(19): siRNA sense strand
ccagaagaaauguuugaaa

SEQ ID NO: 78082 - RNA, 19 nt, Homo sapiens
  misc_RNA (1)...(19): siRNA sense strand
gaagaugaaugagguugac

SEQ ID NO: 78083 - RNA, 19 nt, Homo sapiens
  misc_RNA (1)...(19): siRNA sense strand
caaagggguugcaaagaaa

SEQ ID NO: 78084 - RNA, 19 nt, Homo sapiens
  misc_RNA (1)...(19): siRNA sense strand
cugaacacuuccagccuua

SEQ ID NO: 78085 - RNA, 19 nt, Homo sapiens
  misc_RNA (1)...(19): siRNA sense strand
gcccagguccuugaacaua

SEQ ID NO: 78086 - RNA, 19 nt, Homo sapiens
  misc_RNA (1)...(19): siRNA sense strand
cacugaagaugaugaugaa

SEQ ID NO: 78087 - RNA, 19 nt, Homo sapiens
  misc_RNA (1)...(19): siRNA sense strand
gaggaugugcuuucuggaa

SEQ ID NO: 78088 - RNA, 19 nt, Homo sapiens
  misc_RNA (1)...(19): siRNA sense strand
gggaagaugauuugaaugg

SEQ ID NO: 78089 - RNA, 19 nt, Homo sapiens
  misc_RNA (1)...(19): siRNA sense strand
agaaauaugacuugcuuug

SEQ ID NO: 78090 - RNA, 19 nt, Homo sapiens
  misc_RNA (1)...(19): siRNA sense strand
gagaagagugauccagaug

SEQ ID NO: 78091 - RNA, 19 nt, Homo sapiens
  misc_RNA (1)...(19): siRNA sense strand
cccagguccuugaacauaa

SEQ ID NO: 78092 - RNA, 19 nt, Homo sapiens
  misc_RNA (1)...(19): siRNA sense strand
agauaaacacugaagauga

SEQ ID NO: 78093 - RNA, 19 nt, Homo sapiens
  misc_RNA (1)...(19): siRNA sense strand
gggaaggaccgagugguaa

SEQ ID NO: 78094 - RNA, 19 nt, Homo sapiens
  misc_RNA (1)...(19): siRNA sense strand
cagaauacuacaaggcuuu

SEQ ID NO: 78095 - RNA, 19 nt, Homo sapiens
  misc_RNA (1)...(19): siRNA sense strand
acaaagggguugcaaagaa

SEQ ID NO: 78096 - RNA, 19 nt, Homo sapiens
  misc_RNA (1)...(19): siRNA sense strand
ccuugaacauaaagcuaua

SEQ ID NO: 78097 - RNA, 19 nt, Homo sapiens
  misc_RNA (1)...(19): siRNA sense strand
acacugaagaugaugauga

SEQ ID NO: 78098 - RNA, 19 nt, Homo sapiens
  misc_RNA (1)...(19): siRNA sense strand
caucaaacucauuggcuuu

SEQ ID NO: 78099 - RNA, 19 nt, Homo sapiens
  misc_RNA (1)...(19): siRNA sense strand
gaacacuuccagccuuaca

SEQ ID NO: 78100 - RNA, 19 nt, Homo sapiens
  misc_RNA (1)...(19): siRNA sense strand
ggacuggauugaggaugug

SEQ ID NO: 78101 - RNA, 19 nt, Homo sapiens
  misc_RNA (1)...(19): siRNA sense strand
cgacuuuccucugcucguu

SEQ ID NO: 78102 - RNA, 19 nt, Homo sapiens
  misc_RNA (1)...(19): siRNA sense strand
cagaagaggggcuuaauuu

SEQ ID NO: 78103 - RNA, 19 nt, Homo sapiens
  misc_RNA (1)...(19): siRNA sense strand
cuuccagccuuacaucaaa

SEQ ID NO: 78104 - RNA, 19 nt, Homo sapiens
  misc_RNA (1)...(19): siRNA sense strand
aaggaagccuguauauucu

SEQ ID NO: 78105 - RNA, 19 nt, Homo sapiens
  misc_RNA (1)...(19): siRNA sense strand
ugauaauucugaugaagag

SEQ ID NO: 78106 - RNA, 19 nt, Homo sapiens
  misc_RNA (1)...(19): siRNA sense strand
gaacuucaagcagguuuua

SEQ ID NO: 78107 - RNA, 19 nt, Homo sapiens
  misc_RNA (1)...(19): siRNA sense strand
ggauugaggaugugcuuuc

SEQ ID NO: 78108 - RNA, 19 nt, Homo sapiens
  misc_RNA (1)...(19): siRNA sense strand
agagaacucacuuguuuau

SEQ ID NO: 78109 - RNA, 19 nt, Homo sapiens
  misc_RNA (1)...(19): siRNA sense strand
gcgcccagaagaaauguuu

SEQ ID NO: 78110 - RNA, 19 nt, Homo sapiens
  misc_RNA (1)...(19): siRNA sense strand
gaccgagugguaagucuuu

SEQ ID NO: 78111 - RNA, 19 nt, Homo sapiens
  misc_RNA (1)...(19): siRNA sense strand
ugaagaaggaagccuguau

SEQ ID NO: 78112 - RNA, 19 nt, Homo sapiens
  misc_RNA (1)...(19): siRNA sense strand
agagaagagugauccagau

SEQ ID NO: 78113 - RNA, 19 nt, Homo sapiens
  misc_RNA (1)...(19): siRNA sense strand
ccaaagacccacucuacgu

SEQ ID NO: 78114 - RNA, 19 nt, Homo sapiens
  misc_RNA (1)...(19): siRNA sense strand
ugguaagucuuuccgagaa

SEQ ID NO: 78115 - RNA, 19 nt, Homo sapiens
  misc_RNA (1)...(19): siRNA sense strand
ucgaacgcauugaagacua

SEQ ID NO: 78116 - RNA, 19 nt, Homo sapiens
  misc_RNA (1)...(19): siRNA sense strand
ggugaucgcacaauagagu

SEQ ID NO: 78117 - RNA, 19 nt, Homo sapiens
  misc_RNA (1)...(19): siRNA sense strand
gugaugacgaugaugauga

SEQ ID NO: 78118 - RNA, 19 nt, Homo sapiens
  misc_RNA (1)...(19): siRNA sense strand
gauuccagaugaugacgau

SEQ ID NO: 78119 - RNA, 19 nt, Homo sapiens
  misc_RNA (1)...(19): siRNA sense strand
ggagaucaucagcagcaaa

SEQ ID NO: 78120 - RNA, 19 nt, Homo sapiens
  misc_RNA (1)...(19): siRNA sense strand
gcuacgaauuccuggagau

SEQ ID NO: 78121 - RNA, 19 nt, Homo sapiens
  misc_RNA (1)...(19): siRNA sense strand
gaugaaugagguugacuuc

SEQ ID NO: 78122 - RNA, 19 nt, Homo sapiens
  misc_RNA (1)...(19): siRNA sense strand
gaaagaaaucgugcuugag

SEQ ID NO: 78123 - RNA, 19 nt, Homo sapiens
  misc_RNA (1)...(19): siRNA sense strand
ccacauaugaugggaagga

SEQ ID NO: 78124 - RNA, 19 nt, Homo sapiens
  misc_RNA (1)...(19): siRNA sense strand
gcccagaagaaauguuuga

SEQ ID NO: 78125 - RNA, 19 nt, Homo sapiens
  misc_RNA (1)...(19): siRNA sense strand
gaucaucagcagcaaacug

SEQ ID NO: 78126 - RNA, 19 nt, Homo sapiens
  misc_RNA (1)...(19): siRNA sense strand
gaaauaugacuugcuuugc

SEQ ID NO: 78127 - RNA, 19 nt, Homo sapiens
  misc_RNA (1)...(19): siRNA sense strand
aagaugaugaugaugauga

SEQ ID NO: 78128 - RNA, 19 nt, Homo sapiens
  misc_RNA (1)...(19): siRNA sense strand
aagaugaugaugaagauga

SEQ ID NO: 78129 - RNA, 19 nt, Homo sapiens
  misc_RNA (1)...(19): siRNA sense strand
caagcagguuuuaaagaaa

SEQ ID NO: 78130 - RNA, 19 nt, Homo sapiens
  misc_RNA (1)...(19): siRNA sense strand
gaugaugacgaucuuccaa

SEQ ID NO: 78131 - RNA, 19 nt, Homo sapiens
  misc_RNA (1)...(19): siRNA sense strand
gccggugucuucagauaag

SEQ ID NO: 78132 - RNA, 19 nt, Homo sapiens
  misc_RNA (1)...(19): siRNA sense strand
ggaaggaccgagugguaag

SEQ ID NO: 78133 - RNA, 19 nt, Homo sapiens
  misc_RNA (1)...(19): siRNA sense strand
agaaggaagccuguauauu

SEQ ID NO: 78134 - RNA, 19 nt, Homo sapiens
  misc_RNA (1)...(19): siRNA sense strand
ugauccagauggcuacgaa

SEQ ID NO: 78135 - RNA, 19 nt, Homo sapiens
  misc_RNA (1)...(19): siRNA sense strand
caccaaagacccacucuac

SEQ ID NO: 78136 - RNA, 19 nt, Homo sapiens
  misc_RNA (1)...(19): siRNA sense strand
aagagaacucacuuguuua

SEQ ID NO: 78137 - RNA, 19 nt, Homo sapiens
  misc_RNA (1)...(19): siRNA sense strand
gaacauuaacgaggacaua

SEQ ID NO: 78138 - RNA, 19 nt, Homo sapiens
  misc_RNA (1)...(19): siRNA sense strand
ucaaggauauccacugcaa

SEQ ID NO: 78139 - RNA, 19 nt, Homo sapiens
  misc_RNA (1)...(19): siRNA sense strand
gcccagaucgucaaggaua

SEQ ID NO: 78140 - RNA, 19 nt, Homo sapiens
  misc_RNA (1)...(19): siRNA sense strand
cagaagagcacacagaucu

SEQ ID NO: 78141 - RNA, 19 nt, Homo sapiens
  misc_RNA (1)...(19): siRNA sense strand
gcgguggugccaugcauua

SEQ ID NO: 78142 - RNA, 19 nt, Homo sapiens
  misc_RNA (1)...(19): siRNA sense strand
guggugccaugcauuaaga

SEQ ID NO: 78143 - RNA, 19 nt, Homo sapiens
  misc_RNA (1)...(19): siRNA sense strand
ggacauagucaagguggau

SEQ ID NO: 78144 - RNA, 19 nt, Homo sapiens
  misc_RNA (1)...(19): siRNA sense strand
agagcuaccugaucgagau

SEQ ID NO: 78145 - RNA, 19 nt, Homo sapiens
  misc_RNA (1)...(19): siRNA sense strand
ugccaugcauuaagagcua

SEQ ID NO: 78146 - RNA, 19 nt, Homo sapiens
  misc_RNA (1)...(19): siRNA sense strand
gcagaagagcacacagauc

SEQ ID NO: 78147 - RNA, 19 nt, Homo sapiens
  misc_RNA (1)...(19): siRNA sense strand
gcauuaagagcuaccugau

SEQ ID NO: 78148 - RNA, 19 nt, Homo sapiens
  misc_RNA (1)...(19): siRNA sense strand
uaacgaggacauagucaag

SEQ ID NO: 78149 - RNA, 19 nt, Homo sapiens
  misc_RNA (1)...(19): siRNA sense strand
gugggcaccuacagcuuug

SEQ ID NO: 78150 - RNA, 19 nt, Homo sapiens
  misc_RNA (1)...(19): siRNA sense strand
ccuucacugucuccaagua

SEQ ID NO: 78151 - RNA, 19 nt, Homo sapiens
  misc_RNA (1)...(19): siRNA sense strand
caucagccacaucuacuca

SEQ ID NO: 78152 - RNA, 19 nt, Homo sapiens
  misc_RNA (1)...(19): siRNA sense strand
ggcagaagagcacacagau

SEQ ID NO: 78153 - RNA, 19 nt, Homo sapiens
  misc_RNA (1)...(19): siRNA sense strand
caagguggauuuugaagac

SEQ ID NO: 78154 - RNA, 19 nt, Homo sapiens
  misc_RNA (1)...(19): siRNA sense strand
gagcuacaccaccuucacu

SEQ ID NO: 78155 - RNA, 19 nt, Homo sapiens
  misc_RNA (1)...(19): siRNA sense strand
gaacauuaacgaggacaua

SEQ ID NO: 78156 - RNA, 19 nt, Homo sapiens
  misc_RNA (1)...(19): siRNA sense strand
ucaaggauauccacugcaa

SEQ ID NO: 78157 - RNA, 19 nt, Homo sapiens
  misc_RNA (1)...(19): siRNA sense strand
gcccagaucgucaaggaua

SEQ ID NO: 78158 - RNA, 19 nt, Homo sapiens
  misc_RNA (1)...(19): siRNA sense strand
cagaagagcacacagaucu

SEQ ID NO: 78159 - RNA, 19 nt, Homo sapiens
  misc_RNA (1)...(19): siRNA sense strand
gcgguggugccaugcauua

SEQ ID NO: 78160 - RNA, 19 nt, Homo sapiens
  misc_RNA (1)...(19): siRNA sense strand
guggugccaugcauuaaga

SEQ ID NO: 78161 - RNA, 19 nt, Homo sapiens
  misc_RNA (1)...(19): siRNA sense strand
ggacauagucaagguggau

SEQ ID NO: 78162 - RNA, 19 nt, Homo sapiens
  misc_RNA (1)...(19): siRNA sense strand
agagcuaccugaucgagau

SEQ ID NO: 78163 - RNA, 19 nt, Homo sapiens
  misc_RNA (1)...(19): siRNA sense strand
ugccaugcauuaagagcua

SEQ ID NO: 78164 - RNA, 19 nt, Homo sapiens
  misc_RNA (1)...(19): siRNA sense strand
gcagaagagcacacagauc

SEQ ID NO: 78165 - RNA, 19 nt, Homo sapiens
  misc_RNA (1)...(19): siRNA sense strand
gcauuaagagcuaccugau

SEQ ID NO: 78166 - RNA, 19 nt, Homo sapiens
  misc_RNA (1)...(19): siRNA sense strand
uaacgaggacauagucaag

SEQ ID NO: 78167 - RNA, 19 nt, Homo sapiens
  misc_RNA (1)...(19): siRNA sense strand
gugggcaccuacagcuuug

SEQ ID NO: 78168 - RNA, 19 nt, Homo sapiens
  misc_RNA (1)...(19): siRNA sense strand
ccuucacugucuccaagua

SEQ ID NO: 78169 - RNA, 19 nt, Homo sapiens
  misc_RNA (1)...(19): siRNA sense strand
caucagccacaucuacuca

SEQ ID NO: 78170 - RNA, 19 nt, Homo sapiens
  misc_RNA (1)...(19): siRNA sense strand
ggcagaagagcacacagau

SEQ ID NO: 78171 - RNA, 19 nt, Homo sapiens
  misc_RNA (1)...(19): siRNA sense strand
caagguggauuuugaagac

SEQ ID NO: 78172 - RNA, 19 nt, Homo sapiens
  misc_RNA (1)...(19): siRNA sense strand
gagcuacaccaccuucacu

SEQ ID NO: 78173 - RNA, 19 nt, Homo sapiens
  misc_RNA (1)...(19): siRNA sense strand
ggacaggccucuacaacua

SEQ ID NO: 78174 - RNA, 19 nt, Homo sapiens
  misc_RNA (1)...(19): siRNA sense strand
gagcuucgcugaugacuuc

SEQ ID NO: 78175 - RNA, 19 nt, Homo sapiens
  misc_RNA (1)...(19): siRNA sense strand
ggacaaccguggcuucaug

SEQ ID NO: 78176 - RNA, 19 nt, Homo sapiens
  misc_RNA (1)...(19): siRNA sense strand
caaagcggcucccugcuau

SEQ ID NO: 78177 - RNA, 19 nt, Homo sapiens
  misc_RNA (1)...(19): siRNA sense strand
gaaauuccaccacaagaug

SEQ ID NO: 78178 - RNA, 19 nt, Homo sapiens
  misc_RNA (1)...(19): siRNA sense strand
ccaaagagcagcugaagau

SEQ ID NO: 78179 - RNA, 19 nt, Homo sapiens
  misc_RNA (1)...(19): siRNA sense strand
caagaugcgagacgaguua

SEQ ID NO: 78180 - RNA, 19 nt, Homo sapiens
  misc_RNA (1)...(19): siRNA sense strand
gcaagcagcacuacaacug

SEQ ID NO: 78181 - RNA, 19 nt, Homo sapiens
  misc_RNA (1)...(19): siRNA sense strand
gcagcaagcagcacuacaa

SEQ ID NO: 78182 - RNA, 19 nt, Homo sapiens
  misc_RNA (1)...(19): siRNA sense strand
ccaaagcggcucccugcua

SEQ ID NO: 78183 - RNA, 19 nt, Homo sapiens
  misc_RNA (1)...(19): siRNA sense strand
acacugggaugagaaauuc

SEQ ID NO: 78184 - RNA, 19 nt, Homo sapiens
  misc_RNA (1)...(19): siRNA sense strand
cccaugaccugcagaaaca

SEQ ID NO: 78185 - RNA, 19 nt, Homo sapiens
  misc_RNA (1)...(19): siRNA sense strand
gagaaauuccaccacaaga

SEQ ID NO: 78186 - RNA, 19 nt, Homo sapiens
  misc_RNA (1)...(19): siRNA sense strand
ugacugaggccauugacaa

SEQ ID NO: 78187 - RNA, 19 nt, Homo sapiens
  misc_RNA (1)...(19): siRNA sense strand
aagagcagcugaagaucug

SEQ ID NO: 78188 - RNA, 19 nt, Homo sapiens
  misc_RNA (1)...(19): siRNA sense strand
gccuaagggugacaagaug

SEQ ID NO: 78189 - RNA, 19 nt, Homo sapiens
  misc_RNA (1)...(19): siRNA sense strand
ucaacgccauguucuucaa

SEQ ID NO: 78190 - RNA, 19 nt, Homo sapiens
  misc_RNA (1)...(19): siRNA sense strand
ugguggaggugacccauga

SEQ ID NO: 78191 - RNA, 19 nt, Homo sapiens
  misc_RNA (1)...(19): siRNA sense strand
cugaggccauugacaagaa

SEQ ID NO: 78192 - RNA, 19 nt, Homo sapiens
  misc_RNA (1)...(19): siRNA sense strand
ucacgcaugucaggcaaga

SEQ ID NO: 78193 - RNA, 19 nt, Homo sapiens
  misc_RNA (1)...(19): siRNA sense strand
gcaagaaggaccuguaccu

SEQ ID NO: 78194 - RNA, 19 nt, Homo sapiens
  misc_RNA (1)...(19): siRNA sense strand
guaccuggccagcguguuc

SEQ ID NO: 78195 - RNA, 19 nt, Homo sapiens
  misc_RNA (1)...(19): siRNA sense strand
gaugcgagacgaguuauag

SEQ ID NO: 78196 - RNA, 19 nt, Homo sapiens
  misc_RNA (1)...(19): siRNA sense strand
gaaaagcugcuaaccaaag

SEQ ID NO: 78197 - RNA, 19 nt, Homo sapiens
  misc_RNA (1)...(19): siRNA sense strand
ccuuugaguuggacacaga

SEQ ID NO: 78198 - RNA, 19 nt, Homo sapiens
  misc_RNA (1)...(19): siRNA sense strand
cauggugacucgguccuau

SEQ ID NO: 78199 - RNA, 19 nt, Homo sapiens
  misc_RNA (1)...(19): siRNA sense strand
gcacugcggagaaguugag

SEQ ID NO: 78200 - RNA, 19 nt, Homo sapiens
  misc_RNA (1)...(19): siRNA sense strand
ugcgagcacuccaagauca

SEQ ID NO: 78201 - RNA, 19 nt, Homo sapiens
  misc_RNA (1)...(19): siRNA sense strand
ggccuaagggugacaagau

SEQ ID NO: 78202 - RNA, 19 nt, Homo sapiens
  misc_RNA (1)...(19): siRNA sense strand
uugaaaagcugcuaaccaa

SEQ ID NO: 78203 - RNA, 19 nt, Homo sapiens
  misc_RNA (1)...(19): siRNA sense strand
gaucaacuuccgcgacaag

SEQ ID NO: 78204 - RNA, 19 nt, Homo sapiens
  misc_RNA (1)...(19): siRNA sense strand
uaaccaaagagcagcugaa

SEQ ID NO: 78205 - RNA, 19 nt, Homo sapiens
  misc_RNA (1)...(19): siRNA sense strand
ggagaacauccugguguca

SEQ ID NO: 78206 - RNA, 19 nt, Homo sapiens
  misc_RNA (1)...(19): siRNA sense strand
ccaccgccuuugaguugga

SEQ ID NO: 78207 - RNA, 19 nt, Homo sapiens
  misc_RNA (1)...(19): siRNA sense strand
cgccaccgccuuugaguug

SEQ ID NO: 78208 - RNA, 19 nt, Homo sapiens
  misc_RNA (1)...(19): siRNA sense strand
gcacuccaagaucaacuuc

SEQ ID NO: 78209 - RNA, 19 nt, Homo sapiens
  misc_RNA (1)...(19): siRNA sense strand
gcaugucaggcaagaagga

SEQ ID NO: 78210 - RNA, 19 nt, Homo sapiens
  misc_RNA (1)...(19): siRNA sense strand
cagugagcuucgcugauga

SEQ ID NO: 78211 - RNA, 19 nt, Homo sapiens
  misc_RNA (1)...(19): siRNA sense strand
agaaauuccaccacaagau

SEQ ID NO: 78212 - RNA, 19 nt, Homo sapiens
  misc_RNA (1)...(19): siRNA sense strand
ugagaaauuccaccacaag

SEQ ID NO: 78213 - RNA, 19 nt, Homo sapiens
  misc_RNA (1)...(19): siRNA sense strand
aaagagcagcugaagaucu

SEQ ID NO: 78214 - RNA, 19 nt, Homo sapiens
  misc_RNA (1)...(19): siRNA sense strand
gcagcagcaagcagcacua

SEQ ID NO: 78215 - RNA, 19 nt, Homo sapiens
  misc_RNA (1)...(19): siRNA sense strand
ugcccgaggucaccaagga

SEQ ID NO: 78216 - RNA, 19 nt, Homo sapiens
  misc_RNA (1)...(19): siRNA sense strand
gcggcucccugcuauucau

SEQ ID NO: 78217 - RNA, 19 nt, Homo sapiens
  misc_RNA (1)...(19): siRNA sense strand
aaaagcugcuaaccaaaga

SEQ ID NO: 78218 - RNA, 19 nt, Homo sapiens
  misc_RNA (1)...(19): siRNA sense strand
cuacuacgacgacgagaag

SEQ ID NO: 78219 - RNA, 19 nt, Homo sapiens
  misc_RNA (1)...(19): siRNA sense strand
cacacugggaugagaaauu

SEQ ID NO: 78220 - RNA, 19 nt, Homo sapiens
  misc_RNA (1)...(19): siRNA sense strand
guuccacgccaccgccuuu

SEQ ID NO: 78221 - RNA, 19 nt, Homo sapiens
  misc_RNA (1)...(19): siRNA sense strand
gaggaaagcugacaggauu

SEQ ID NO: 78222 - RNA, 19 nt, Homo sapiens
  misc_RNA (1)...(19): siRNA sense strand
caagagugaugauccaaug

SEQ ID NO: 78223 - RNA, 19 nt, Homo sapiens
  misc_RNA (1)...(19): siRNA sense strand
gugaagaucugcaggaaag

SEQ ID NO: 78224 - RNA, 19 nt, Homo sapiens
  misc_RNA (1)...(19): siRNA sense strand
aaacaugugcaacgaguua

SEQ ID NO: 78225 - RNA, 19 nt, Homo sapiens
  misc_RNA (1)...(19): siRNA sense strand
ucaguaguuugcaguguuu

SEQ ID NO: 78226 - RNA, 19 nt, Homo sapiens
  misc_RNA (1)...(19): siRNA sense strand
cauuaaagcugagaugaca

SEQ ID NO: 78227 - RNA, 19 nt, Homo sapiens
  misc_RNA (1)...(19): siRNA sense strand
gaaagguuccacagugaga

SEQ ID NO: 78228 - RNA, 19 nt, Homo sapiens
  misc_RNA (1)...(19): siRNA sense strand
aagcugagaugacacugaa

SEQ ID NO: 78229 - RNA, 19 nt, Homo sapiens
  misc_RNA (1)...(19): siRNA sense strand
agaugacacugaagacaaa

SEQ ID NO: 78230 - RNA, 19 nt, Homo sapiens
  misc_RNA (1)...(19): siRNA sense strand
gagaugacacugaagacaa

SEQ ID NO: 78231 - RNA, 19 nt, Homo sapiens
  misc_RNA (1)...(19): siRNA sense strand
ccugguggaucucaugaaa

SEQ ID NO: 78232 - RNA, 19 nt, Homo sapiens
  misc_RNA (1)...(19): siRNA sense strand
ugacacugaagacaaauuu

SEQ ID NO: 78233 - RNA, 19 nt, Homo sapiens
  misc_RNA (1)...(19): siRNA sense strand
ggagaguggugaauaucag

SEQ ID NO: 78234 - RNA, 19 nt, Homo sapiens
  misc_RNA (1)...(19): siRNA sense strand
guugguccaugacaaaguu

SEQ ID NO: 78235 - RNA, 19 nt, Homo sapiens
  misc_RNA (1)...(19): siRNA sense strand
ucaacguacuggucaacaa

SEQ ID NO: 78236 - RNA, 19 nt, Homo sapiens
  misc_RNA (1)...(19): siRNA sense strand
gaguuacugccgauaauga

SEQ ID NO: 78237 - RNA, 19 nt, Homo sapiens
  misc_RNA (1)...(19): siRNA sense strand
aaacugcagugaagaucug

SEQ ID NO: 78238 - RNA, 19 nt, Homo sapiens
  misc_RNA (1)...(19): siRNA sense strand
aaggagaccugguggaucu

SEQ ID NO: 78239 - RNA, 19 nt, Homo sapiens
  misc_RNA (1)...(19): siRNA sense strand
cuagaaacaugugcaacga

SEQ ID NO: 78240 - RNA, 19 nt, Homo sapiens
  misc_RNA (1)...(19): siRNA sense strand
gcugagaugacacugaaga

SEQ ID NO: 78241 - RNA, 19 nt, Homo sapiens
  misc_RNA (1)...(19): siRNA sense strand
ccaguugguccaugacaaa

SEQ ID NO: 78242 - RNA, 19 nt, Homo sapiens
  misc_RNA (1)...(19): siRNA sense strand
gauccaaugcccuuugaca

SEQ ID NO: 78243 - RNA, 19 nt, Homo sapiens
  misc_RNA (1)...(19): siRNA sense strand
caggaccagugaagacaga

SEQ ID NO: 78244 - RNA, 19 nt, Homo sapiens
  misc_RNA (1)...(19): siRNA sense strand
ggaaggcuggcccaacuca

SEQ ID NO: 78245 - RNA, 19 nt, Homo sapiens
  misc_RNA (1)...(19): siRNA sense strand
cagugaagaucugcaggaa

SEQ ID NO: 78246 - RNA, 19 nt, Homo sapiens
  misc_RNA (1)...(19): siRNA sense strand
gacauuaaagcugagauga

SEQ ID NO: 78247 - RNA, 19 nt, Homo sapiens
  misc_RNA (1)...(19): siRNA sense strand
gaaacaugugcaacgaguu

SEQ ID NO: 78248 - RNA, 19 nt, Homo sapiens
  misc_RNA (1)...(19): siRNA sense strand
gaugauccaaugcccuuug

SEQ ID NO: 78249 - RNA, 19 nt, Homo sapiens
  misc_RNA (1)...(19): siRNA sense strand
caugggagaguggugaaua

SEQ ID NO: 78250 - RNA, 19 nt, Homo sapiens
  misc_RNA (1)...(19): siRNA sense strand
gugaauaucaguaguuugc

SEQ ID NO: 78251 - RNA, 19 nt, Homo sapiens
  misc_RNA (1)...(19): siRNA sense strand
gggagaguggugaauauca

SEQ ID NO: 78252 - RNA, 19 nt, Homo sapiens
  misc_RNA (1)...(19): siRNA sense strand
gccaguugguccaugacaa

SEQ ID NO: 78253 - RNA, 19 nt, Homo sapiens
  misc_RNA (1)...(19): siRNA sense strand
uggugaauaucaguaguuu

SEQ ID NO: 78254 - RNA, 19 nt, Homo sapiens
  misc_RNA (1)...(19): siRNA sense strand
uggcccaacucaccuuaug

SEQ ID NO: 78255 - RNA, 19 nt, Homo sapiens
  misc_RNA (1)...(19): siRNA sense strand
gagaagaggaaagcugaca

SEQ ID NO: 78256 - RNA, 19 nt, Homo sapiens
  misc_RNA (1)...(19): siRNA sense strand
gaagaucugcaggaaaggu

SEQ ID NO: 78257 - RNA, 19 nt, Homo sapiens
  misc_RNA (1)...(19): siRNA sense strand
ccacuagaaacaugugcaa

SEQ ID NO: 78258 - RNA, 19 nt, Homo sapiens
  misc_RNA (1)...(19): siRNA sense strand
ggccgucgccuucaagagu

SEQ ID NO: 78259 - RNA, 19 nt, Homo sapiens
  misc_RNA (1)...(19): siRNA sense strand
caacgaguuacugccgaua

SEQ ID NO: 78260 - RNA, 19 nt, Homo sapiens
  misc_RNA (1)...(19): siRNA sense strand
ggaaagcugacaggauucu

SEQ ID NO: 78261 - RNA, 19 nt, Homo sapiens
  misc_RNA (1)...(19): siRNA sense strand
uaucaguaguuugcagugu

SEQ ID NO: 78262 - RNA, 19 nt, Homo sapiens
  misc_RNA (1)...(19): siRNA sense strand
ugacauuaaagcugagaug

SEQ ID NO: 78263 - RNA, 19 nt, Homo sapiens
  misc_RNA (1)...(19): siRNA sense strand
acgaguuacugccgauaau

SEQ ID NO: 78264 - RNA, 19 nt, Homo sapiens
  misc_RNA (1)...(19): siRNA sense strand
caacguacuggucaacaac

SEQ ID NO: 78265 - RNA, 19 nt, Homo sapiens
  misc_RNA (1)...(19): siRNA sense strand
cugacaggauucuggugaa

SEQ ID NO: 78266 - RNA, 19 nt, Homo sapiens
  misc_RNA (1)...(19): siRNA sense strand
aaggccaguugguccauga

SEQ ID NO: 78267 - RNA, 19 nt, Homo sapiens
  misc_RNA (1)...(19): siRNA sense strand
ggacaaagcuggccugaau

SEQ ID NO: 78268 - RNA, 19 nt, Homo sapiens
  misc_RNA (1)...(19): siRNA sense strand
ggacaugucaauuguauua

SEQ ID NO: 78269 - RNA, 19 nt, Homo sapiens
  misc_RNA (1)...(19): siRNA sense strand
gcugugaacuacauugaua

SEQ ID NO: 78270 - RNA, 19 nt, Homo sapiens
  misc_RNA (1)...(19): siRNA sense strand
gaugauaccuacaccaaga

SEQ ID NO: 78271 - RNA, 19 nt, Homo sapiens
  misc_RNA (1)...(19): siRNA sense strand
gcuguuagccucaaaguuu

SEQ ID NO: 78272 - RNA, 19 nt, Homo sapiens
  misc_RNA (1)...(19): siRNA sense strand
gcacaacagucaauaagag

SEQ ID NO: 78273 - RNA, 19 nt, Homo sapiens
  misc_RNA (1)...(19): siRNA sense strand
gauauucacacauaccuua

SEQ ID NO: 78274 - RNA, 19 nt, Homo sapiens
  misc_RNA (1)...(19): siRNA sense strand
aagcuggccugaaucauua

SEQ ID NO: 78275 - RNA, 19 nt, Homo sapiens
  misc_RNA (1)...(19): siRNA sense strand
cugcaaaguugaaaguuua

SEQ ID NO: 78276 - RNA, 19 nt, Homo sapiens
  misc_RNA (1)...(19): siRNA sense strand
ugacuuagcugcuccaaca

SEQ ID NO: 78277 - RNA, 19 nt, Homo sapiens
  misc_RNA (1)...(19): siRNA sense strand
gaaauggagguuaaaugua

SEQ ID NO: 78278 - RNA, 19 nt, Homo sapiens
  misc_RNA (1)...(19): siRNA sense strand
ggaaauggagguuaaaugu

SEQ ID NO: 78279 - RNA, 19 nt, Homo sapiens
  misc_RNA (1)...(19): siRNA sense strand
gaagccagcugaaucucaa

SEQ ID NO: 78280 - RNA, 19 nt, Homo sapiens
  misc_RNA (1)...(19): siRNA sense strand
gcucggcgcugcuagcauu

SEQ ID NO: 78281 - RNA, 19 nt, Homo sapiens
  misc_RNA (1)...(19): siRNA sense strand
gauauacccuggaaagucu

SEQ ID NO: 78282 - RNA, 19 nt, Homo sapiens
  misc_RNA (1)...(19): siRNA sense strand
uaaaguggguuacaugaag

SEQ ID NO: 78283 - RNA, 19 nt, Homo sapiens
  misc_RNA (1)...(19): siRNA sense strand
acacauaccuuagggaaau

SEQ ID NO: 78284 - RNA, 19 nt, Homo sapiens
  misc_RNA (1)...(19): siRNA sense strand
ggagcugccuuucauuuag

SEQ ID NO: 78285 - RNA, 19 nt, Homo sapiens
  misc_RNA (1)...(19): siRNA sense strand
gagaauggagcaucuaguu

SEQ ID NO: 78286 - RNA, 19 nt, Homo sapiens
  misc_RNA (1)...(19): siRNA sense strand
ggagaagaauauaaacuac

SEQ ID NO: 78287 - RNA, 19 nt, Homo sapiens
  misc_RNA (1)...(19): siRNA sense strand
gauagaugcugacccauac

SEQ ID NO: 78288 - RNA, 19 nt, Homo sapiens
  misc_RNA (1)...(19): siRNA sense strand
ugaaguaggagaagaauau

SEQ ID NO: 78289 - RNA, 19 nt, Homo sapiens
  misc_RNA (1)...(19): siRNA sense strand
ugaacuacauugauagguu

SEQ ID NO: 78290 - RNA, 19 nt, Homo sapiens
  misc_RNA (1)...(19): siRNA sense strand
gaaaagccagugaguguua

SEQ ID NO: 78291 - RNA, 19 nt, Homo sapiens
  misc_RNA (1)...(19): siRNA sense strand
gaagaagccagcugaaucu

SEQ ID NO: 78292 - RNA, 19 nt, Homo sapiens
  misc_RNA (1)...(19): siRNA sense strand
gagaauaucaacccggaaa

SEQ ID NO: 78293 - RNA, 19 nt, Homo sapiens
  misc_RNA (1)...(19): siRNA sense strand
gaagaaacagccagacauc

SEQ ID NO: 78294 - RNA, 19 nt, Homo sapiens
  misc_RNA (1)...(19): siRNA sense strand
ggacugguuaguugaagua

SEQ ID NO: 78295 - RNA, 19 nt, Homo sapiens
  misc_RNA (1)...(19): siRNA sense strand
gaaguaggagaagaauaua

SEQ ID NO: 78296 - RNA, 19 nt, Homo sapiens
  misc_RNA (1)...(19): siRNA sense strand
uuagggaaauggagguuaa

SEQ ID NO: 78297 - RNA, 19 nt, Homo sapiens
  misc_RNA (1)...(19): siRNA sense strand
gcagaguuuguguacauua

SEQ ID NO: 78298 - RNA, 19 nt, Homo sapiens
  misc_RNA (1)...(19): siRNA sense strand
ccagacaucacuaacagua

SEQ ID NO: 78299 - RNA, 19 nt, Homo sapiens
  misc_RNA (1)...(19): siRNA sense strand
uagcagaguuuguguacau

SEQ ID NO: 78300 - RNA, 19 nt, Homo sapiens
  misc_RNA (1)...(19): siRNA sense strand
uuaaugaaguaccagacua

SEQ ID NO: 78301 - RNA, 19 nt, Homo sapiens
  misc_RNA (1)...(19): siRNA sense strand
agacaucacuaacaguaug

SEQ ID NO: 78302 - RNA, 19 nt, Homo sapiens
  misc_RNA (1)...(19): siRNA sense strand
gaagaugcccuggcuuuua

SEQ ID NO: 78303 - RNA, 19 nt, Homo sapiens
  misc_RNA (1)...(19): siRNA sense strand
guugaaaguuuagcaaugu

SEQ ID NO: 78304 - RNA, 19 nt, Homo sapiens
  misc_RNA (1)...(19): siRNA sense strand
augaggauauucacacaua

SEQ ID NO: 78305 - RNA, 19 nt, Homo sapiens
  misc_RNA (1)...(19): siRNA sense strand
gcauuuggcugugaacuac

SEQ ID NO: 78306 - RNA, 19 nt, Homo sapiens
  misc_RNA (1)...(19): siRNA sense strand
caagaggaccaggagaaua

SEQ ID NO: 78307 - RNA, 19 nt, Homo sapiens
  misc_RNA (1)...(19): siRNA sense strand
caacagucaauaagagaaa

SEQ ID NO: 78308 - RNA, 19 nt, Homo sapiens
  misc_RNA (1)...(19): siRNA sense strand
gccagugaguguuaaugaa

SEQ ID NO: 78309 - RNA, 19 nt, Homo sapiens
  misc_RNA (1)...(19): siRNA sense strand
ucaaguauuugccaucagu

SEQ ID NO: 78310 - RNA, 19 nt, Homo sapiens
  misc_RNA (1)...(19): siRNA sense strand
gugaagaugcccuggcuuu

SEQ ID NO: 78311 - RNA, 19 nt, Homo sapiens
  misc_RNA (1)...(19): siRNA sense strand
gaauggagcaucuaguuuu

SEQ ID NO: 78312 - RNA, 19 nt, Homo sapiens
  misc_RNA (1)...(19): siRNA sense strand
gaggaaaacuucagcuugu

SEQ ID NO: 78313 - RNA, 19 nt, Homo sapiens
  misc_RNA (1)...(19): siRNA sense strand
ugauagaugcugacccaua

SEQ ID NO: 78314 - RNA, 19 nt, Homo sapiens
  misc_RNA (1)...(19): siRNA sense strand
aaagcuggccugaaucauu

SEQ ID NO: 78315 - RNA, 19 nt, Homo sapiens
  misc_RNA (1)...(19): siRNA sense strand
guuccugucuuccauguca

SEQ ID NO: 78316 - RNA, 19 nt, Homo sapiens
  misc_RNA (1)...(19): siRNA sense strand
caaaguaucaugguguuuc

SEQ ID NO: 78317 - RNA, 19 nt, Homo sapiens
  misc_RNA (1)...(19): siRNA sense strand
caccagaccuaccucaaag

SEQ ID NO: 78318 - RNA, 19 nt, Homo sapiens
  misc_RNA (1)...(19): siRNA sense strand
ggauauacccuggaaaguc

SEQ ID NO: 78319 - RNA, 19 nt, Homo sapiens
  misc_RNA (1)...(19): siRNA sense strand
gggagaauuaaguuugaua

SEQ ID NO: 78320 - RNA, 19 nt, Homo sapiens
  misc_RNA (1)...(19): siRNA sense strand
gcacugcugcuaugcuguu

SEQ ID NO: 78321 - RNA, 19 nt, Homo sapiens
  misc_RNA (1)...(19): siRNA sense strand
ggaaagcaaacaguaaaca

SEQ ID NO: 78322 - RNA, 19 nt, Homo sapiens
  misc_RNA (1)...(19): siRNA sense strand
agacuaccaugaggauauu

SEQ ID NO: 78323 - RNA, 19 nt, Homo sapiens
  misc_RNA (1)...(19): siRNA sense strand
aaaguggguuacaugaaga

SEQ ID NO: 78324 - RNA, 19 nt, Homo sapiens
  misc_RNA (1)...(19): siRNA sense strand
cuauggacaugucaauugu

SEQ ID NO: 78325 - RNA, 19 nt, Homo sapiens
  misc_RNA (1)...(19): siRNA sense strand
guauuugccaucaguuauu

SEQ ID NO: 78326 - RNA, 19 nt, Homo sapiens
  misc_RNA (1)...(19): siRNA sense strand
gaaagcaaacaguaaacag

SEQ ID NO: 78327 - RNA, 19 nt, Homo sapiens
  misc_RNA (1)...(19): siRNA sense strand
acugcaaaguugaaaguuu

SEQ ID NO: 78328 - RNA, 19 nt, Homo sapiens
  misc_RNA (1)...(19): siRNA sense strand
cccaauacuuucugcauca

SEQ ID NO: 78329 - RNA, 19 nt, Homo sapiens
  misc_RNA (1)...(19): siRNA sense strand
gggaaauggagguuaaaug

SEQ ID NO: 78330 - RNA, 19 nt, Homo sapiens
  misc_RNA (1)...(19): siRNA sense strand
aagaggaccaggagaauau

SEQ ID NO: 78331 - RNA, 19 nt, Homo sapiens
  misc_RNA (1)...(19): siRNA sense strand
ucaccagaccuaccucaaa

SEQ ID NO: 78332 - RNA, 19 nt, Homo sapiens
  misc_RNA (1)...(19): siRNA sense strand
agaagaagccagcugaauc

SEQ ID NO: 78333 - RNA, 19 nt, Homo sapiens
  misc_RNA (1)...(19): siRNA sense strand
ggagaauuaaguuugauag

SEQ ID NO: 78334 - RNA, 19 nt, Homo sapiens
  misc_RNA (1)...(19): siRNA sense strand
ggaucuuccuguaaaugau

SEQ ID NO: 78335 - RNA, 19 nt, Homo sapiens
  misc_RNA (1)...(19): siRNA sense strand
uggguuacaugaagaaaca

SEQ ID NO: 78336 - RNA, 19 nt, Homo sapiens
  misc_RNA (1)...(19): siRNA sense strand
ccauuggucccucuugauu

SEQ ID NO: 78337 - RNA, 19 nt, Homo sapiens
  misc_RNA (1)...(19): siRNA sense strand
ccugaaucauuaauacgaa

SEQ ID NO: 78338 - RNA, 19 nt, Homo sapiens
  misc_RNA (1)...(19): siRNA sense strand
uggagcugccuuucauuua

SEQ ID NO: 78339 - RNA, 19 nt, Homo sapiens
  misc_RNA (1)...(19): siRNA sense strand
cuuagcugcuccaacagua

SEQ ID NO: 78340 - RNA, 19 nt, Homo sapiens
  misc_RNA (1)...(19): siRNA sense strand
cauuggucccucuugauua

SEQ ID NO: 78341 - RNA, 19 nt, Homo sapiens
  misc_RNA (1)...(19): siRNA sense strand
guaaacagccugcguucac

SEQ ID NO: 78342 - RNA, 19 nt, Homo sapiens
  misc_RNA (1)...(19): siRNA sense strand
ucuuaagccuugucucaug

SEQ ID NO: 78343 - RNA, 19 nt, Homo sapiens
  misc_RNA (1)...(19): siRNA sense strand
cagacuaccaugaggauau

SEQ ID NO: 78344 - RNA, 19 nt, Homo sapiens
  misc_RNA (1)...(19): siRNA sense strand
gaaguagcagaguuugugu

SEQ ID NO: 78345 - RNA, 19 nt, Homo sapiens
  misc_RNA (1)...(19): siRNA sense strand
gacuggauauacccuggaa

SEQ ID NO: 78346 - RNA, 19 nt, Homo sapiens
  misc_RNA (1)...(19): siRNA sense strand
ccucaaguauuugccauca

SEQ ID NO: 78347 - RNA, 19 nt, Homo sapiens
  misc_RNA (1)...(19): siRNA sense strand
cagaugauaccuacaccaa

SEQ ID NO: 78348 - RNA, 19 nt, Homo sapiens
  misc_RNA (1)...(19): siRNA sense strand
gaaacagccagacaucacu

SEQ ID NO: 78349 - RNA, 19 nt, Homo sapiens
  misc_RNA (1)...(19): siRNA sense strand
aaaagaagcucagaagaag

SEQ ID NO: 78350 - RNA, 19 nt, Homo sapiens
  misc_RNA (1)...(19): siRNA sense strand
agaauggagcaucuaguuu

SEQ ID NO: 78351 - RNA, 19 nt, Homo sapiens
  misc_RNA (1)...(19): siRNA sense strand
cugguuaguugaaguagga

SEQ ID NO: 78352 - RNA, 19 nt, Homo sapiens
  misc_RNA (1)...(19): siRNA sense strand
ccaugaggauauucacaca

SEQ ID NO: 78353 - RNA, 19 nt, Homo sapiens
  misc_RNA (1)...(19): siRNA sense strand
gaucuuccuguaaaugaug

SEQ ID NO: 78354 - RNA, 19 nt, Homo sapiens
  misc_RNA (1)...(19): siRNA sense strand
caccagagacacuaaaucu

SEQ ID NO: 78355 - RNA, 19 nt, Homo sapiens
  misc_RNA (1)...(19): siRNA sense strand
gcaugcacaacagucaaua

SEQ ID NO: 78356 - RNA, 19 nt, Homo sapiens
  misc_RNA (1)...(19): siRNA sense strand
ucauuuagcacucuacaca

SEQ ID NO: 78357 - RNA, 19 nt, Homo sapiens
  misc_RNA (1)...(19): siRNA sense strand
ccuaaaguggguuacauga

SEQ ID NO: 78358 - RNA, 19 nt, Homo sapiens
  misc_RNA (1)...(19): siRNA sense strand
aagaugcccuggcuuuuaa

SEQ ID NO: 78359 - RNA, 19 nt, Homo sapiens
  misc_RNA (1)...(19): siRNA sense strand
cagccugcguucaccauuc

SEQ ID NO: 78360 - RNA, 19 nt, Homo sapiens
  misc_RNA (1)...(19): siRNA sense strand
cuaaaguggguuacaugaa

SEQ ID NO: 78361 - RNA, 19 nt, Homo sapiens
  misc_RNA (1)...(19): siRNA sense strand
uaauacgaaagacuggaua

SEQ ID NO: 78362 - RNA, 19 nt, Homo sapiens
  misc_RNA (1)...(19): siRNA sense strand
acaaagcuggccugaauca

SEQ ID NO: 78363 - RNA, 19 nt, Homo sapiens
  misc_RNA (1)...(19): siRNA sense strand
uauuugccaucaguuauug

SEQ ID NO: 78364 - RNA, 19 nt, Homo sapiens
  misc_RNA (1)...(19): siRNA sense strand
aucaguuucuuacccaaua

SEQ ID NO: 78365 - RNA, 19 nt, Homo sapiens
  misc_RNA (1)...(19): siRNA sense strand
cagaguuuguguacauuac

SEQ ID NO: 78366 - RNA, 19 nt, Homo sapiens
  misc_RNA (1)...(19): siRNA sense strand
aaacagccagacaucacua

SEQ ID NO: 78367 - RNA, 19 nt, Homo sapiens
  misc_RNA (1)...(19): siRNA sense strand
guacugagcugggcaaaua

SEQ ID NO: 78368 - RNA, 19 nt, Homo sapiens
  misc_RNA (1)...(19): siRNA sense strand
cagcaaaucuuuauacaga

SEQ ID NO: 78369 - RNA, 19 nt, Homo sapiens
  misc_RNA (1)...(19): siRNA sense strand
ggacaaagcccgagcaaag

SEQ ID NO: 78370 - RNA, 19 nt, Homo sapiens
  misc_RNA (1)...(19): siRNA sense strand
ggaaaucuauccuccaaag

SEQ ID NO: 78371 - RNA, 19 nt, Homo sapiens
  misc_RNA (1)...(19): siRNA sense strand
ggacaauaaugcagucugu

SEQ ID NO: 78372 - RNA, 19 nt, Homo sapiens
  misc_RNA (1)...(19): siRNA sense strand
ggaggugugugaagucuau

SEQ ID NO: 78373 - RNA, 19 nt, Homo sapiens
  misc_RNA (1)...(19): siRNA sense strand
cuaaaugacuuacaugaag

SEQ ID NO: 78374 - RNA, 19 nt, Homo sapiens
  misc_RNA (1)...(19): siRNA sense strand
gggcgucgcugaugaagau

SEQ ID NO: 78375 - RNA, 19 nt, Homo sapiens
  misc_RNA (1)...(19): siRNA sense strand
gauguugacugccuugaau

SEQ ID NO: 78376 - RNA, 19 nt, Homo sapiens
  misc_RNA (1)...(19): siRNA sense strand
agaaagccauguugucuga

SEQ ID NO: 78377 - RNA, 19 nt, Homo sapiens
  misc_RNA (1)...(19): siRNA sense strand
ggauccagaugaagaaaug

SEQ ID NO: 78378 - RNA, 19 nt, Homo sapiens
  misc_RNA (1)...(19): siRNA sense strand
cagccaaacuugaggaaau

SEQ ID NO: 78379 - RNA, 19 nt, Homo sapiens
  misc_RNA (1)...(19): siRNA sense strand
gcaaagaaagccauguugu

SEQ ID NO: 78380 - RNA, 19 nt, Homo sapiens
  misc_RNA (1)...(19): siRNA sense strand
uguccuggcugaauguaua

SEQ ID NO: 78381 - RNA, 19 nt, Homo sapiens
  misc_RNA (1)...(19): siRNA sense strand
gugcaagccucggauuauu

SEQ ID NO: 78382 - RNA, 19 nt, Homo sapiens
  misc_RNA (1)...(19): siRNA sense strand
gagcaaagaaagccauguu

SEQ ID NO: 78383 - RNA, 19 nt, Homo sapiens
  misc_RNA (1)...(19): siRNA sense strand
ugaagaugcacacaacaua

SEQ ID NO: 78384 - RNA, 19 nt, Homo sapiens
  misc_RNA (1)...(19): siRNA sense strand
gcagguugcauaucuaaau

SEQ ID NO: 78385 - RNA, 19 nt, Homo sapiens
  misc_RNA (1)...(19): siRNA sense strand
gaggaagucuggaaaauca

SEQ ID NO: 78386 - RNA, 19 nt, Homo sapiens
  misc_RNA (1)...(19): siRNA sense strand
gcaaaagguuucaggguau

SEQ ID NO: 78387 - RNA, 19 nt, Homo sapiens
  misc_RNA (1)...(19): siRNA sense strand
gcucaaaacugaagcacuu

SEQ ID NO: 78388 - RNA, 19 nt, Homo sapiens
  misc_RNA (1)...(19): siRNA sense strand
cuuaagggaucagcacuuu

SEQ ID NO: 78389 - RNA, 19 nt, Homo sapiens
  misc_RNA (1)...(19): siRNA sense strand
caacauacagacccacaga

SEQ ID NO: 78390 - RNA, 19 nt, Homo sapiens
  misc_RNA (1)...(19): siRNA sense strand
uugcagagcuguuggaucu

SEQ ID NO: 78391 - RNA, 19 nt, Homo sapiens
  misc_RNA (1)...(19): siRNA sense strand
gggaucagcacuuucuuga

SEQ ID NO: 78392 - RNA, 19 nt, Homo sapiens
  misc_RNA (1)...(19): siRNA sense strand
aaucuauccuccaaaguug

SEQ ID NO: 78393 - RNA, 19 nt, Homo sapiens
  misc_RNA (1)...(19): siRNA sense strand
caaagaaagccauguuguc

SEQ ID NO: 78394 - RNA, 19 nt, Homo sapiens
  misc_RNA (1)...(19): siRNA sense strand
guauauggcgacacaagaa

SEQ ID NO: 78395 - RNA, 19 nt, Homo sapiens
  misc_RNA (1)...(19): siRNA sense strand
gaagaugcacacaacauac

SEQ ID NO: 78396 - RNA, 19 nt, Homo sapiens
  misc_RNA (1)...(19): siRNA sense strand
gcuucggccuuguaucauu

SEQ ID NO: 78397 - RNA, 19 nt, Homo sapiens
  misc_RNA (1)...(19): siRNA sense strand
acagagacagcuuggauuu

SEQ ID NO: 78398 - RNA, 19 nt, Homo sapiens
  misc_RNA (1)...(19): siRNA sense strand
gcaggauccagaugaagaa

SEQ ID NO: 78399 - RNA, 19 nt, Homo sapiens
  misc_RNA (1)...(19): siRNA sense strand
gacaaagcccgagcaaaga

SEQ ID NO: 78400 - RNA, 19 nt, Homo sapiens
  misc_RNA (1)...(19): siRNA sense strand
ccacagagacagcuuggau

SEQ ID NO: 78401 - RNA, 19 nt, Homo sapiens
  misc_RNA (1)...(19): siRNA sense strand
gaagaugaugaccggguuu

SEQ ID NO: 78402 - RNA, 19 nt, Homo sapiens
  misc_RNA (1)...(19): siRNA sense strand
cagguugcauaucuaaaug

SEQ ID NO: 78403 - RNA, 19 nt, Homo sapiens
  misc_RNA (1)...(19): siRNA sense strand
caccauggaauuaaugauu

SEQ ID NO: 78404 - RNA, 19 nt, Homo sapiens
  misc_RNA (1)...(19): siRNA sense strand
aaaucuauccuccaaaguu

SEQ ID NO: 78405 - RNA, 19 nt, Homo sapiens
  misc_RNA (1)...(19): siRNA sense strand
gcaaauagagaggaagucu

SEQ ID NO: 78406 - RNA, 19 nt, Homo sapiens
  misc_RNA (1)...(19): siRNA sense strand
uaucauuucucgucaucug

SEQ ID NO: 78407 - RNA, 19 nt, Homo sapiens
  misc_RNA (1)...(19): siRNA sense strand
ccaggaagaggaaggcaaa

SEQ ID NO: 78408 - RNA, 19 nt, Homo sapiens
  misc_RNA (1)...(19): siRNA sense strand
gagccagccuugggacaau

SEQ ID NO: 78409 - RNA, 19 nt, Homo sapiens
  misc_RNA (1)...(19): siRNA sense strand
uaauggaggugugugaagu

SEQ ID NO: 78410 - RNA, 19 nt, Homo sapiens
  misc_RNA (1)...(19): siRNA sense strand
caaacuugaggaaaucuau

SEQ ID NO: 78411 - RNA, 19 nt, Homo sapiens
  misc_RNA (1)...(19): siRNA sense strand
ugaugaagaugcacacaac

SEQ ID NO: 78412 - RNA, 19 nt, Homo sapiens
  misc_RNA (1)...(19): siRNA sense strand
cuccaaaguugcaccaguu

SEQ ID NO: 78413 - RNA, 19 nt, Homo sapiens
  misc_RNA (1)...(19): siRNA sense strand
auagagaacugugucaagu

SEQ ID NO: 78414 - RNA, 19 nt, Homo sapiens
  misc_RNA (1)...(19): siRNA sense strand
gcgagcaauucuucuggau

SEQ ID NO: 78415 - RNA, 19 nt, Homo sapiens
  misc_RNA (1)...(19): siRNA sense strand
cuucggccuuguaucauuu

SEQ ID NO: 78416 - RNA, 19 nt, Homo sapiens
  misc_RNA (1)...(19): siRNA sense strand
cgaaggagcgggacaccau

SEQ ID NO: 78417 - RNA, 19 nt, Homo sapiens
  misc_RNA (1)...(19): siRNA sense strand
caaagcccgagcaaagaaa

SEQ ID NO: 78418 - RNA, 19 nt, Homo sapiens
  misc_RNA (1)...(19): siRNA sense strand
gaauuuccuuaugguauac

SEQ ID NO: 78419 - RNA, 19 nt, Homo sapiens
  misc_RNA (1)...(19): siRNA sense strand
agacauacuuaagggauca

SEQ ID NO: 78420 - RNA, 19 nt, Homo sapiens
  misc_RNA (1)...(19): siRNA sense strand
gagaggaagucuggaaaau

SEQ ID NO: 78421 - RNA, 19 nt, Homo sapiens
  misc_RNA (1)...(19): siRNA sense strand
aaagaaagccauguugucu

SEQ ID NO: 78422 - RNA, 19 nt, Homo sapiens
  misc_RNA (1)...(19): siRNA sense strand
acaaagcccgagcaaagaa

SEQ ID NO: 78423 - RNA, 19 nt, Homo sapiens
  misc_RNA (1)...(19): siRNA sense strand
agagacagcuuggauuugc

SEQ ID NO: 78424 - RNA, 19 nt, Homo sapiens
  misc_RNA (1)...(19): siRNA sense strand
ggaagaggaaggcaaacgu

SEQ ID NO: 78425 - RNA, 19 nt, Homo sapiens
  misc_RNA (1)...(19): siRNA sense strand
gguauauggcgacacaaga

SEQ ID NO: 78426 - RNA, 19 nt, Homo sapiens
  misc_RNA (1)...(19): siRNA sense strand
uaagggaucagcacuuucu

SEQ ID NO: 78427 - RNA, 19 nt, Homo sapiens
  misc_RNA (1)...(19): siRNA sense strand
caaggaaaagacauacuua

SEQ ID NO: 78428 - RNA, 19 nt, Homo sapiens
  misc_RNA (1)...(19): siRNA sense strand
gaaaucuauccuccaaagu

SEQ ID NO: 78429 - RNA, 19 nt, Homo sapiens
  misc_RNA (1)...(19): siRNA sense strand
ggauguugacugccuugaa

SEQ ID NO: 78430 - RNA, 19 nt, Homo sapiens
  misc_RNA (1)...(19): siRNA sense strand
ugugacagauggagcuugu

SEQ ID NO: 78431 - RNA, 19 nt, Homo sapiens
  misc_RNA (1)...(19): siRNA sense strand
ugacaaagaagaugaugac

SEQ ID NO: 78432 - RNA, 19 nt, Homo sapiens
  misc_RNA (1)...(19): siRNA sense strand
gcuuggauuugcuggacaa

SEQ ID NO: 78433 - RNA, 19 nt, Homo sapiens
  misc_RNA (1)...(19): siRNA sense strand
ggaucucuguguccuggau

SEQ ID NO: 78434 - RNA, 19 nt, Homo sapiens
  misc_RNA (1)...(19): siRNA sense strand
ugacagauggagcuuguuc

SEQ ID NO: 78435 - RNA, 19 nt, Homo sapiens
  misc_RNA (1)...(19): siRNA sense strand
ugugugaagucuauaaacu

SEQ ID NO: 78436 - RNA, 19 nt, Homo sapiens
  misc_RNA (1)...(19): siRNA sense strand
ggaaaagacauacuuaagg

SEQ ID NO: 78437 - RNA, 19 nt, Homo sapiens
  misc_RNA (1)...(19): siRNA sense strand
gaauugaugcaaaagguuu

SEQ ID NO: 78438 - RNA, 19 nt, Homo sapiens
  misc_RNA (1)...(19): siRNA sense strand
gcaccaguuugcguaugug

SEQ ID NO: 78439 - RNA, 19 nt, Homo sapiens
  misc_RNA (1)...(19): siRNA sense strand
ccacaccugacaaagaaga

SEQ ID NO: 78440 - RNA, 19 nt, Homo sapiens
  misc_RNA (1)...(19): siRNA sense strand
uaucaguggugcgacauag

SEQ ID NO: 78441 - RNA, 19 nt, Homo sapiens
  misc_RNA (1)...(19): siRNA sense strand
ggugugugaagucuauaaa

SEQ ID NO: 78442 - RNA, 19 nt, Homo sapiens
  misc_RNA (1)...(19): siRNA sense strand
agaacugugucaaguggau

SEQ ID NO: 78443 - RNA, 19 nt, Homo sapiens
  misc_RNA (1)...(19): siRNA sense strand
gccuugaauuuccuuaugg

SEQ ID NO: 78444 - RNA, 19 nt, Homo sapiens
  misc_RNA (1)...(19): siRNA sense strand
ugccuugaauuuccuuaug

SEQ ID NO: 78445 - RNA, 19 nt, Homo sapiens
  misc_RNA (1)...(19): siRNA sense strand
cccagcaaaucuuuauaca

SEQ ID NO: 78446 - RNA, 19 nt, Homo sapiens
  misc_RNA (1)...(19): siRNA sense strand
ggagccagccuugggacaa

SEQ ID NO: 78447 - RNA, 19 nt, Homo sapiens
  misc_RNA (1)...(19): siRNA sense strand
ucggcucgcuccaggaaga

SEQ ID NO: 78448 - RNA, 19 nt, Homo sapiens
  misc_RNA (1)...(19): siRNA sense strand
ggugcgacauagagaacug

SEQ ID NO: 78449 - RNA, 19 nt, Homo sapiens
  misc_RNA (1)...(19): siRNA sense strand
uauauggcgacacaagaaa

SEQ ID NO: 78450 - RNA, 19 nt, Homo sapiens
  misc_RNA (1)...(19): siRNA sense strand
auacagacccacagagaca

SEQ ID NO: 78451 - RNA, 19 nt, Homo sapiens
  misc_RNA (1)...(19): siRNA sense strand
acauacagacccacagaga

SEQ ID NO: 78452 - RNA, 19 nt, Homo sapiens
  misc_RNA (1)...(19): siRNA sense strand
uagagaggaagucuggaaa

SEQ ID NO: 78453 - RNA, 19 nt, Homo sapiens
  misc_RNA (1)...(19): siRNA sense strand
gggcaaauagagaggaagu

SEQ ID NO: 78454 - RNA, 19 nt, Homo sapiens
  misc_RNA (1)...(19): siRNA sense strand
ggagcuuguucaggagaug

SEQ ID NO: 78455 - RNA, 19 nt, Homo sapiens
  misc_RNA (1)...(19): siRNA sense strand
cgagcaauucuucuggauu

SEQ ID NO: 78456 - RNA, 19 nt, Homo sapiens
  misc_RNA (1)...(19): siRNA sense strand
cauuugccaugguuauaag

SEQ ID NO: 78457 - RNA, 19 nt, Homo sapiens
  misc_RNA (1)...(19): siRNA sense strand
ucuguguccuggauguuga

SEQ ID NO: 78458 - RNA, 19 nt, Homo sapiens
  misc_RNA (1)...(19): siRNA sense strand
gaagaaauggccaaaaucg

SEQ ID NO: 78459 - RNA, 19 nt, Homo sapiens
  misc_RNA (1)...(19): siRNA sense strand
ccaaacuugaggaaaucua

SEQ ID NO: 78460 - RNA, 19 nt, Homo sapiens
  misc_RNA (1)...(19): siRNA sense strand
guaucaguggugcgacaua

SEQ ID NO: 78461 - RNA, 19 nt, Homo sapiens
  misc_RNA (1)...(19): siRNA sense strand
acggggagcucaaaacuga

SEQ ID NO: 78462 - RNA, 19 nt, Homo sapiens
  misc_RNA (1)...(19): siRNA sense strand
ccccacaccugacaaagaa

SEQ ID NO: 78463 - RNA, 19 nt, Homo sapiens
  misc_RNA (1)...(19): siRNA sense strand
aagaugaugaccggguuua

SEQ ID NO: 78464 - RNA, 19 nt, Homo sapiens
  misc_RNA (1)...(19): siRNA sense strand
uguaucauuucucgucauc

SEQ ID NO: 78465 - RNA, 19 nt, Homo sapiens
  misc_RNA (1)...(19): siRNA sense strand
augaaauucucaccaugga

SEQ ID NO: 78466 - RNA, 19 nt, Homo sapiens
  misc_RNA (1)...(19): siRNA sense strand
ccaguuugcguaugugaca

SEQ ID NO: 78467 - RNA, 19 nt, Homo sapiens
  misc_RNA (1)...(19): siRNA sense strand
guacugagcugggcaaaua

SEQ ID NO: 78468 - RNA, 19 nt, Homo sapiens
  misc_RNA (1)...(19): siRNA sense strand
cagcaaaucuuuauacaga

SEQ ID NO: 78469 - RNA, 19 nt, Homo sapiens
  misc_RNA (1)...(19): siRNA sense strand
ggacaaagcccgagcaaag

SEQ ID NO: 78470 - RNA, 19 nt, Homo sapiens
  misc_RNA (1)...(19): siRNA sense strand
ggaaaucuauccuccaaag

SEQ ID NO: 78471 - RNA, 19 nt, Homo sapiens
  misc_RNA (1)...(19): siRNA sense strand
ggacaauaaugcagucugu

SEQ ID NO: 78472 - RNA, 19 nt, Homo sapiens
  misc_RNA (1)...(19): siRNA sense strand
ggaggugugugaagucuau

SEQ ID NO: 78473 - RNA, 19 nt, Homo sapiens
  misc_RNA (1)...(19): siRNA sense strand
cuaaaugacuuacaugaag

SEQ ID NO: 78474 - RNA, 19 nt, Homo sapiens
  misc_RNA (1)...(19): siRNA sense strand
gggcgucgcugaugaagau

SEQ ID NO: 78475 - RNA, 19 nt, Homo sapiens
  misc_RNA (1)...(19): siRNA sense strand
gauguugacugccuugaau

SEQ ID NO: 78476 - RNA, 19 nt, Homo sapiens
  misc_RNA (1)...(19): siRNA sense strand
agaaagccauguugucuga

SEQ ID NO: 78477 - RNA, 19 nt, Homo sapiens
  misc_RNA (1)...(19): siRNA sense strand
ggauccagaugaagaaaug

SEQ ID NO: 78478 - RNA, 19 nt, Homo sapiens
  misc_RNA (1)...(19): siRNA sense strand
cagccaaacuugaggaaau

SEQ ID NO: 78479 - RNA, 19 nt, Homo sapiens
  misc_RNA (1)...(19): siRNA sense strand
gcaaagaaagccauguugu

SEQ ID NO: 78480 - RNA, 19 nt, Homo sapiens
  misc_RNA (1)...(19): siRNA sense strand
uguccuggcugaauguaua

SEQ ID NO: 78481 - RNA, 19 nt, Homo sapiens
  misc_RNA (1)...(19): siRNA sense strand
gugcaagccucggauuauu

SEQ ID NO: 78482 - RNA, 19 nt, Homo sapiens
  misc_RNA (1)...(19): siRNA sense strand
gagcaaagaaagccauguu

SEQ ID NO: 78483 - RNA, 19 nt, Homo sapiens
  misc_RNA (1)...(19): siRNA sense strand
ugaagaugcacacaacaua

SEQ ID NO: 78484 - RNA, 19 nt, Homo sapiens
  misc_RNA (1)...(19): siRNA sense strand
gcagguugcauaucuaaau

SEQ ID NO: 78485 - RNA, 19 nt, Homo sapiens
  misc_RNA (1)...(19): siRNA sense strand
gaggaagucuggaaaauca

SEQ ID NO: 78486 - RNA, 19 nt, Homo sapiens
  misc_RNA (1)...(19): siRNA sense strand
gcaaaagguuucaggguau

SEQ ID NO: 78487 - RNA, 19 nt, Homo sapiens
  misc_RNA (1)...(19): siRNA sense strand
gcucaaaacugaagcacuu

SEQ ID NO: 78488 - RNA, 19 nt, Homo sapiens
  misc_RNA (1)...(19): siRNA sense strand
cuuaagggaucagcacuuu

SEQ ID NO: 78489 - RNA, 19 nt, Homo sapiens
  misc_RNA (1)...(19): siRNA sense strand
caacauacagacccacaga

SEQ ID NO: 78490 - RNA, 19 nt, Homo sapiens
  misc_RNA (1)...(19): siRNA sense strand
uugcagagcuguuggaucu

SEQ ID NO: 78491 - RNA, 19 nt, Homo sapiens
  misc_RNA (1)...(19): siRNA sense strand
gggaucagcacuuucuuga

SEQ ID NO: 78492 - RNA, 19 nt, Homo sapiens
  misc_RNA (1)...(19): siRNA sense strand
aaucuauccuccaaaguug

SEQ ID NO: 78493 - RNA, 19 nt, Homo sapiens
  misc_RNA (1)...(19): siRNA sense strand
caaagaaagccauguuguc

SEQ ID NO: 78494 - RNA, 19 nt, Homo sapiens
  misc_RNA (1)...(19): siRNA sense strand
guauauggcgacacaagaa

SEQ ID NO: 78495 - RNA, 19 nt, Homo sapiens
  misc_RNA (1)...(19): siRNA sense strand
gaagaugcacacaacauac

SEQ ID NO: 78496 - RNA, 19 nt, Homo sapiens
  misc_RNA (1)...(19): siRNA sense strand
gcuucggccuuguaucauu

SEQ ID NO: 78497 - RNA, 19 nt, Homo sapiens
  misc_RNA (1)...(19): siRNA sense strand
acagagacagcuuggauuu

SEQ ID NO: 78498 - RNA, 19 nt, Homo sapiens
  misc_RNA (1)...(19): siRNA sense strand
gcaggauccagaugaagaa

SEQ ID NO: 78499 - RNA, 19 nt, Homo sapiens
  misc_RNA (1)...(19): siRNA sense strand
gacaaagcccgagcaaaga

SEQ ID NO: 78500 - RNA, 19 nt, Homo sapiens
  misc_RNA (1)...(19): siRNA sense strand
ccacagagacagcuuggau

SEQ ID NO: 78501 - RNA, 19 nt, Homo sapiens
  misc_RNA (1)...(19): siRNA sense strand
gaagaugaugaccggguuu

SEQ ID NO: 78502 - RNA, 19 nt, Homo sapiens
  misc_RNA (1)...(19): siRNA sense strand
cagguugcauaucuaaaug

SEQ ID NO: 78503 - RNA, 19 nt, Homo sapiens
  misc_RNA (1)...(19): siRNA sense strand
caccauggaauuaaugauu

SEQ ID NO: 78504 - RNA, 19 nt, Homo sapiens
  misc_RNA (1)...(19): siRNA sense strand
aaaucuauccuccaaaguu

SEQ ID NO: 78505 - RNA, 19 nt, Homo sapiens
  misc_RNA (1)...(19): siRNA sense strand
gcaaauagagaggaagucu

SEQ ID NO: 78506 - RNA, 19 nt, Homo sapiens
  misc_RNA (1)...(19): siRNA sense strand
uaucauuucucgucaucug

SEQ ID NO: 78507 - RNA, 19 nt, Homo sapiens
  misc_RNA (1)...(19): siRNA sense strand
ccaggaagaggaaggcaaa

SEQ ID NO: 78508 - RNA, 19 nt, Homo sapiens
  misc_RNA (1)...(19): siRNA sense strand
gagccagccuugggacaau

SEQ ID NO: 78509 - RNA, 19 nt, Homo sapiens
  misc_RNA (1)...(19): siRNA sense strand
uaauggaggugugugaagu

SEQ ID NO: 78510 - RNA, 19 nt, Homo sapiens
  misc_RNA (1)...(19): siRNA sense strand
caaacuugaggaaaucuau

SEQ ID NO: 78511 - RNA, 19 nt, Homo sapiens
  misc_RNA (1)...(19): siRNA sense strand
ugaugaagaugcacacaac

SEQ ID NO: 78512 - RNA, 19 nt, Homo sapiens
  misc_RNA (1)...(19): siRNA sense strand
cuccaaaguugcaccaguu

SEQ ID NO: 78513 - RNA, 19 nt, Homo sapiens
  misc_RNA (1)...(19): siRNA sense strand
auagagaacugugucaagu

SEQ ID NO: 78514 - RNA, 19 nt, Homo sapiens
  misc_RNA (1)...(19): siRNA sense strand
gcgagcaauucuucuggau

SEQ ID NO: 78515 - RNA, 19 nt, Homo sapiens
  misc_RNA (1)...(19): siRNA sense strand
cuucggccuuguaucauuu

SEQ ID NO: 78516 - RNA, 19 nt, Homo sapiens
  misc_RNA (1)...(19): siRNA sense strand
agacauacuuaagggauca

SEQ ID NO: 78517 - RNA, 19 nt, Homo sapiens
  misc_RNA (1)...(19): siRNA sense strand
caaagcccgagcaaagaaa

SEQ ID NO: 78518 - RNA, 19 nt, Homo sapiens
  misc_RNA (1)...(19): siRNA sense strand
gaauuuccuuaugguauac

SEQ ID NO: 78519 - RNA, 19 nt, Homo sapiens
  misc_RNA (1)...(19): siRNA sense strand
gagaggaagucuggaaaau

SEQ ID NO: 78520 - RNA, 19 nt, Homo sapiens
  misc_RNA (1)...(19): siRNA sense strand
aaagaaagccauguugucu

SEQ ID NO: 78521 - RNA, 19 nt, Homo sapiens
  misc_RNA (1)...(19): siRNA sense strand
acaaagcccgagcaaagaa

SEQ ID NO: 78522 - RNA, 19 nt, Homo sapiens
  misc_RNA (1)...(19): siRNA sense strand
agagacagcuuggauuugc

SEQ ID NO: 78523 - RNA, 19 nt, Homo sapiens
  misc_RNA (1)...(19): siRNA sense strand
ggaagaggaaggcaaacgu

SEQ ID NO: 78524 - RNA, 19 nt, Homo sapiens
  misc_RNA (1)...(19): siRNA sense strand
gguauauggcgacacaaga

SEQ ID NO: 78525 - RNA, 19 nt, Homo sapiens
  misc_RNA (1)...(19): siRNA sense strand
uaagggaucagcacuuucu

SEQ ID NO: 78526 - RNA, 19 nt, Homo sapiens
  misc_RNA (1)...(19): siRNA sense strand
caaggaaaagacauacuua

SEQ ID NO: 78527 - RNA, 19 nt, Homo sapiens
  misc_RNA (1)...(19): siRNA sense strand
gaaaucuauccuccaaagu

SEQ ID NO: 78528 - RNA, 19 nt, Homo sapiens
  misc_RNA (1)...(19): siRNA sense strand
ggauguugacugccuugaa

SEQ ID NO: 78529 - RNA, 19 nt, Homo sapiens
  misc_RNA (1)...(19): siRNA sense strand
ugacaaagaagaugaugac

SEQ ID NO: 78530 - RNA, 19 nt, Homo sapiens
  misc_RNA (1)...(19): siRNA sense strand
gcuuggauuugcuggacaa

SEQ ID NO: 78531 - RNA, 19 nt, Homo sapiens
  misc_RNA (1)...(19): siRNA sense strand
ggaucucuguguccuggau

SEQ ID NO: 78532 - RNA, 19 nt, Homo sapiens
  misc_RNA (1)...(19): siRNA sense strand
ugacagauggagcuuguuc

SEQ ID NO: 78533 - RNA, 19 nt, Homo sapiens
  misc_RNA (1)...(19): siRNA sense strand
ugugacagauggagcuugu

SEQ ID NO: 78534 - RNA, 19 nt, Homo sapiens
  misc_RNA (1)...(19): siRNA sense strand
ugugugaagucuauaaacu

SEQ ID NO: 78535 - RNA, 19 nt, Homo sapiens
  misc_RNA (1)...(19): siRNA sense strand
ggaaaagacauacuuaagg

SEQ ID NO: 78536 - RNA, 19 nt, Homo sapiens
  misc_RNA (1)...(19): siRNA sense strand
gaauugaugcaaaagguuu

SEQ ID NO: 78537 - RNA, 19 nt, Homo sapiens
  misc_RNA (1)...(19): siRNA sense strand
gcaccaguuugcguaugug

SEQ ID NO: 78538 - RNA, 19 nt, Homo sapiens
  misc_RNA (1)...(19): siRNA sense strand
ccacaccugacaaagaaga

SEQ ID NO: 78539 - RNA, 19 nt, Homo sapiens
  misc_RNA (1)...(19): siRNA sense strand
uaucaguggugcgacauag

SEQ ID NO: 78540 - RNA, 19 nt, Homo sapiens
  misc_RNA (1)...(19): siRNA sense strand
ggugugugaagucuauaaa

SEQ ID NO: 78541 - RNA, 19 nt, Homo sapiens
  misc_RNA (1)...(19): siRNA sense strand
agaacugugucaaguggau

SEQ ID NO: 78542 - RNA, 19 nt, Homo sapiens
  misc_RNA (1)...(19): siRNA sense strand
gccuugaauuuccuuaugg

SEQ ID NO: 78543 - RNA, 19 nt, Homo sapiens
  misc_RNA (1)...(19): siRNA sense strand
ugccuugaauuuccuuaug

SEQ ID NO: 78544 - RNA, 19 nt, Homo sapiens
  misc_RNA (1)...(19): siRNA sense strand
cccagcaaaucuuuauaca

SEQ ID NO: 78545 - RNA, 19 nt, Homo sapiens
  misc_RNA (1)...(19): siRNA sense strand
ggugcgacauagagaacug

SEQ ID NO: 78546 - RNA, 19 nt, Homo sapiens
  misc_RNA (1)...(19): siRNA sense strand
ggagccagccuugggacaa

SEQ ID NO: 78547 - RNA, 19 nt, Homo sapiens
  misc_RNA (1)...(19): siRNA sense strand
ucggcucgcuccaggaaga

SEQ ID NO: 78548 - RNA, 19 nt, Homo sapiens
  misc_RNA (1)...(19): siRNA sense strand
gggcaaauagagaggaagu

SEQ ID NO: 78549 - RNA, 19 nt, Homo sapiens
  misc_RNA (1)...(19): siRNA sense strand
auacagacccacagagaca

SEQ ID NO: 78550 - RNA, 19 nt, Homo sapiens
  misc_RNA (1)...(19): siRNA sense strand
acauacagacccacagaga

SEQ ID NO: 78551 - RNA, 19 nt, Homo sapiens
  misc_RNA (1)...(19): siRNA sense strand
uagagaggaagucuggaaa

SEQ ID NO: 78552 - RNA, 19 nt, Homo sapiens
  misc_RNA (1)...(19): siRNA sense strand
ggagcuuguucaggagaug

SEQ ID NO: 78553 - RNA, 19 nt, Homo sapiens
  misc_RNA (1)...(19): siRNA sense strand
uauauggcgacacaagaaa

SEQ ID NO: 78554 - RNA, 19 nt, Homo sapiens
  misc_RNA (1)...(19): siRNA sense strand
cgagcaauucuucuggauu

SEQ ID NO: 78555 - RNA, 19 nt, Homo sapiens
  misc_RNA (1)...(19): siRNA sense strand
gaagaaauggccaaaaucg

SEQ ID NO: 78556 - RNA, 19 nt, Homo sapiens
  misc_RNA (1)...(19): siRNA sense strand
cauuugccaugguuauaag

SEQ ID NO: 78557 - RNA, 19 nt, Homo sapiens
  misc_RNA (1)...(19): siRNA sense strand
ucuguguccuggauguuga

SEQ ID NO: 78558 - RNA, 19 nt, Homo sapiens
  misc_RNA (1)...(19): siRNA sense strand
ccaaacuugaggaaaucua

SEQ ID NO: 78559 - RNA, 19 nt, Homo sapiens
  misc_RNA (1)...(19): siRNA sense strand
guaucaguggugcgacaua

SEQ ID NO: 78560 - RNA, 19 nt, Homo sapiens
  misc_RNA (1)...(19): siRNA sense strand
acggggagcucaaaacuga

SEQ ID NO: 78561 - RNA, 19 nt, Homo sapiens
  misc_RNA (1)...(19): siRNA sense strand
gcagccaaacuugaggaaa

SEQ ID NO: 78562 - RNA, 19 nt, Homo sapiens
  misc_RNA (1)...(19): siRNA sense strand
uguaucauuucucgucauc

SEQ ID NO: 78563 - RNA, 19 nt, Homo sapiens
  misc_RNA (1)...(19): siRNA sense strand
aagaugaugaccggguuua

SEQ ID NO: 78564 - RNA, 19 nt, Homo sapiens
  misc_RNA (1)...(19): siRNA sense strand
augaaauucucaccaugga

SEQ ID NO: 78565 - RNA, 19 nt, Homo sapiens
  misc_RNA (1)...(19): siRNA sense strand
ccaguuugcguaugugaca

SEQ ID NO: 78566 - RNA, 19 nt, Homo sapiens
  misc_RNA (1)...(19): siRNA sense strand
ccccacaccugacaaagaa

SEQ ID NO: 78567 - RNA, 19 nt, Homo sapiens
  misc_RNA (1)...(19): siRNA sense strand
gaaaacagcugaugacuuu

SEQ ID NO: 78568 - RNA, 19 nt, Homo sapiens
  misc_RNA (1)...(19): siRNA sense strand
gcugaugacuuucuuaaua

SEQ ID NO: 78569 - RNA, 19 nt, Homo sapiens
  misc_RNA (1)...(19): siRNA sense strand
caacuuaauuuccaccuua

SEQ ID NO: 78570 - RNA, 19 nt, Homo sapiens
  misc_RNA (1)...(19): siRNA sense strand
gaaggcacuugaacagaua

SEQ ID NO: 78571 - RNA, 19 nt, Homo sapiens
  misc_RNA (1)...(19): siRNA sense strand
ucaaagaaauccaaacaug

SEQ ID NO: 78572 - RNA, 19 nt, Homo sapiens
  misc_RNA (1)...(19): siRNA sense strand
gaaaggcuaugaagaugau

SEQ ID NO: 78573 - RNA, 19 nt, Homo sapiens
  misc_RNA (1)...(19): siRNA sense strand
ggaauucuguucgguguuu

SEQ ID NO: 78574 - RNA, 19 nt, Homo sapiens
  misc_RNA (1)...(19): siRNA sense strand
gaaaugacacucugcaaau

SEQ ID NO: 78575 - RNA, 19 nt, Homo sapiens
  misc_RNA (1)...(19): siRNA sense strand
gaacagauacuggaauaug

SEQ ID NO: 78576 - RNA, 19 nt, Homo sapiens
  misc_RNA (1)...(19): siRNA sense strand
auacacaccuucccaaauu

SEQ ID NO: 78577 - RNA, 19 nt, Homo sapiens
  misc_RNA (1)...(19): siRNA sense strand
gcuaugaagaugaugauua

SEQ ID NO: 78578 - RNA, 19 nt, Homo sapiens
  misc_RNA (1)...(19): siRNA sense strand
cugcugagcuugcacuuaa

SEQ ID NO: 78579 - RNA, 19 nt, Homo sapiens
  misc_RNA (1)...(19): siRNA sense strand
caaagaaauccaaacauga

SEQ ID NO: 78580 - RNA, 19 nt, Homo sapiens
  misc_RNA (1)...(19): siRNA sense strand
aaaugacacucugcaaaua

SEQ ID NO: 78581 - RNA, 19 nt, Homo sapiens
  misc_RNA (1)...(19): siRNA sense strand
ggauaauaaugcucacuug

SEQ ID NO: 78582 - RNA, 19 nt, Homo sapiens
  misc_RNA (1)...(19): siRNA sense strand
gaggaagaauggacugaug

SEQ ID NO: 78583 - RNA, 19 nt, Homo sapiens
  misc_RNA (1)...(19): siRNA sense strand
gaggaaaggcuaugaagau

SEQ ID NO: 78584 - RNA, 19 nt, Homo sapiens
  misc_RNA (1)...(19): siRNA sense strand
gagaaaagguuauuggaau

SEQ ID NO: 78585 - RNA, 19 nt, Homo sapiens
  misc_RNA (1)...(19): siRNA sense strand
gauuacgucucaaagaaau

SEQ ID NO: 78586 - RNA, 19 nt, Homo sapiens
  misc_RNA (1)...(19): siRNA sense strand
ggguacggcuuguauguau

SEQ ID NO: 78587 - RNA, 19 nt, Homo sapiens
  misc_RNA (1)...(19): siRNA sense strand
gaagaggaaaggcuaugaa

SEQ ID NO: 78588 - RNA, 19 nt, Homo sapiens
  misc_RNA (1)...(19): siRNA sense strand
uugaacagauacuggaaua

SEQ ID NO: 78589 - RNA, 19 nt, Homo sapiens
  misc_RNA (1)...(19): siRNA sense strand
ggaaaggcuaugaagauga

SEQ ID NO: 78590 - RNA, 19 nt, Homo sapiens
  misc_RNA (1)...(19): siRNA sense strand
gagcuugcacuuaacguaa

SEQ ID NO: 78591 - RNA, 19 nt, Homo sapiens
  misc_RNA (1)...(19): siRNA sense strand
gauacuggaauaugaacua

SEQ ID NO: 78592 - RNA, 19 nt, Homo sapiens
  misc_RNA (1)...(19): siRNA sense strand
gacccgcuaucccauauug

SEQ ID NO: 78593 - RNA, 19 nt, Homo sapiens
  misc_RNA (1)...(19): siRNA sense strand
gcaaugccaagaucuguug

SEQ ID NO: 78594 - RNA, 19 nt, Homo sapiens
  misc_RNA (1)...(19): siRNA sense strand
guacggcuuguauguauuu

SEQ ID NO: 78595 - RNA, 19 nt, Homo sapiens
  misc_RNA (1)...(19): siRNA sense strand
gaauucuguucgguguuua

SEQ ID NO: 78596 - RNA, 19 nt, Homo sapiens
  misc_RNA (1)...(19): siRNA sense strand
gcaacuuaauuuccaccuu

SEQ ID NO: 78597 - RNA, 19 nt, Homo sapiens
  misc_RNA (1)...(19): siRNA sense strand
cuuaauaacucaguaaugg

SEQ ID NO: 78598 - RNA, 19 nt, Homo sapiens
  misc_RNA (1)...(19): siRNA sense strand
agaaggcacuugaacagau

SEQ ID NO: 78599 - RNA, 19 nt, Homo sapiens
  misc_RNA (1)...(19): siRNA sense strand
ugaaagagaacagaacuug

SEQ ID NO: 78600 - RNA, 19 nt, Homo sapiens
  misc_RNA (1)...(19): siRNA sense strand
gggcuggaauuacuaugga

SEQ ID NO: 78601 - RNA, 19 nt, Homo sapiens
  misc_RNA (1)...(19): siRNA sense strand
gacggaugcuuaccuuuua

SEQ ID NO: 78602 - RNA, 19 nt, Homo sapiens
  misc_RNA (1)...(19): siRNA sense strand
gaugauuacgucucaaaga

SEQ ID NO: 78603 - RNA, 19 nt, Homo sapiens
  misc_RNA (1)...(19): siRNA sense strand
aacagauacuggaauauga

SEQ ID NO: 78604 - RNA, 19 nt, Homo sapiens
  misc_RNA (1)...(19): siRNA sense strand
ggaauuacuauggaaaguu

SEQ ID NO: 78605 - RNA, 19 nt, Homo sapiens
  misc_RNA (1)...(19): siRNA sense strand
ccacaacaguagucagaag

SEQ ID NO: 78606 - RNA, 19 nt, Homo sapiens
  misc_RNA (1)...(19): siRNA sense strand
cuaugaagaugaugauuac

SEQ ID NO: 78607 - RNA, 19 nt, Homo sapiens
  misc_RNA (1)...(19): siRNA sense strand
gaaaagcaugagaaacuua

SEQ ID NO: 78608 - RNA, 19 nt, Homo sapiens
  misc_RNA (1)...(19): siRNA sense strand
ggagaaggcacuugaacag

SEQ ID NO: 78609 - RNA, 19 nt, Homo sapiens
  misc_RNA (1)...(19): siRNA sense strand
cugcaaauacuaugagaaa

SEQ ID NO: 78610 - RNA, 19 nt, Homo sapiens
  misc_RNA (1)...(19): siRNA sense strand
gaagaagaggaaaggcuau

SEQ ID NO: 78611 - RNA, 19 nt, Homo sapiens
  misc_RNA (1)...(19): siRNA sense strand
caugagaaacuuaguaaag

SEQ ID NO: 78612 - RNA, 19 nt, Homo sapiens
  misc_RNA (1)...(19): siRNA sense strand
gauaauaaugcucacuugu

SEQ ID NO: 78613 - RNA, 19 nt, Homo sapiens
  misc_RNA (1)...(19): siRNA sense strand
gcaaaguagaugaauucaa

SEQ ID NO: 78614 - RNA, 19 nt, Homo sapiens
  misc_RNA (1)...(19): siRNA sense strand
agaaaugacacucugcaaa

SEQ ID NO: 78615 - RNA, 19 nt, Homo sapiens
  misc_RNA (1)...(19): siRNA sense strand
ugucacaguuacuagauau

SEQ ID NO: 78616 - RNA, 19 nt, Homo sapiens
  misc_RNA (1)...(19): siRNA sense strand
cagcugaugacuuucuuaa

SEQ ID NO: 78617 - RNA, 19 nt, Homo sapiens
  misc_RNA (1)...(19): siRNA sense strand
cuucuuauacagcaacuua

SEQ ID NO: 78618 - RNA, 19 nt, Homo sapiens
  misc_RNA (1)...(19): siRNA sense strand
ggaauaugaacuacuucuu

SEQ ID NO: 78619 - RNA, 19 nt, Homo sapiens
  misc_RNA (1)...(19): siRNA sense strand
gacaggagaaggcacuuga

SEQ ID NO: 78620 - RNA, 19 nt, Homo sapiens
  misc_RNA (1)...(19): siRNA sense strand
augauuacgucucaaagaa

SEQ ID NO: 78621 - RNA, 19 nt, Homo sapiens
  misc_RNA (1)...(19): siRNA sense strand
cugaugacuuucuuaauag

SEQ ID NO: 78622 - RNA, 19 nt, Homo sapiens
  misc_RNA (1)...(19): siRNA sense strand
gaaccacccagaucugaag

SEQ ID NO: 78623 - RNA, 19 nt, Homo sapiens
  misc_RNA (1)...(19): siRNA sense strand
cgaaugauccagucuuucu

SEQ ID NO: 78624 - RNA, 19 nt, Homo sapiens
  misc_RNA (1)...(19): siRNA sense strand
cggcuuguauguauuucaa

SEQ ID NO: 78625 - RNA, 19 nt, Homo sapiens
  misc_RNA (1)...(19): siRNA sense strand
ccaaacaugaggaggaaga

SEQ ID NO: 78626 - RNA, 19 nt, Homo sapiens
  misc_RNA (1)...(19): siRNA sense strand
gcuaucccauauuggagaa

SEQ ID NO: 78627 - RNA, 19 nt, Homo sapiens
  misc_RNA (1)...(19): siRNA sense strand
gagaaggcacuugaacaga

SEQ ID NO: 78628 - RNA, 19 nt, Homo sapiens
  misc_RNA (1)...(19): siRNA sense strand
gguacggcuuguauguauu

SEQ ID NO: 78629 - RNA, 19 nt, Homo sapiens
  misc_RNA (1)...(19): siRNA sense strand
gggcuuccucaucgacuua

SEQ ID NO: 78630 - RNA, 19 nt, Homo sapiens
  misc_RNA (1)...(19): siRNA sense strand
guccucaguuuguuggaaa

SEQ ID NO: 78631 - RNA, 19 nt, Homo sapiens
  misc_RNA (1)...(19): siRNA sense strand
acucaguaauggaauauca

SEQ ID NO: 78632 - RNA, 19 nt, Homo sapiens
  misc_RNA (1)...(19): siRNA sense strand
aaagaaauccaaacaugag

SEQ ID NO: 78633 - RNA, 19 nt, Homo sapiens
  misc_RNA (1)...(19): siRNA sense strand
acuggaauaugaacuacuu

SEQ ID NO: 78634 - RNA, 19 nt, Homo sapiens
  misc_RNA (1)...(19): siRNA sense strand
uccgaaugauccagucuuu

SEQ ID NO: 78635 - RNA, 19 nt, Homo sapiens
  misc_RNA (1)...(19): siRNA sense strand
gcaugagaaacuuaguaaa

SEQ ID NO: 78636 - RNA, 19 nt, Homo sapiens
  misc_RNA (1)...(19): siRNA sense strand
uaucuaguccucaguuugu

SEQ ID NO: 78637 - RNA, 19 nt, Homo sapiens
  misc_RNA (1)...(19): siRNA sense strand
aaagacccgcuaucccaua

SEQ ID NO: 78638 - RNA, 19 nt, Homo sapiens
  misc_RNA (1)...(19): siRNA sense strand
ccugcaaaguagaugaauu

SEQ ID NO: 78639 - RNA, 19 nt, Homo sapiens
  misc_RNA (1)...(19): siRNA sense strand
aggaaaggcuaugaagaug

SEQ ID NO: 78640 - RNA, 19 nt, Homo sapiens
  misc_RNA (1)...(19): siRNA sense strand
uuaacguaaucacgaagaa

SEQ ID NO: 78641 - RNA, 19 nt, Homo sapiens
  misc_RNA (1)...(19): siRNA sense strand
agagucugaugcugaaaga

SEQ ID NO: 78642 - RNA, 19 nt, Homo sapiens
  misc_RNA (1)...(19): siRNA sense strand
ugaacuacuucuuauacag

SEQ ID NO: 78643 - RNA, 19 nt, Homo sapiens
  misc_RNA (1)...(19): siRNA sense strand
gagaaacuuaguaaagaag

SEQ ID NO: 78644 - RNA, 19 nt, Homo sapiens
  misc_RNA (1)...(19): siRNA sense strand
gaaugauccagucuuucuu

SEQ ID NO: 78645 - RNA, 19 nt, Homo sapiens
  misc_RNA (1)...(19): siRNA sense strand
cugcaaaguagaugaauuc

SEQ ID NO: 78646 - RNA, 19 nt, Homo sapiens
  misc_RNA (1)...(19): siRNA sense strand
gaaguuggagcgaugucau

SEQ ID NO: 78647 - RNA, 19 nt, Homo sapiens
  misc_RNA (1)...(19): siRNA sense strand
aagcaugagaaacuuagua

SEQ ID NO: 78648 - RNA, 19 nt, Homo sapiens
  misc_RNA (1)...(19): siRNA sense strand
uguaucuaguccucaguuu

SEQ ID NO: 78649 - RNA, 19 nt, Homo sapiens
  misc_RNA (1)...(19): siRNA sense strand
ugauuacgucucaaagaaa

SEQ ID NO: 78650 - RNA, 19 nt, Homo sapiens
  misc_RNA (1)...(19): siRNA sense strand
ccacccagaucugaagaag

SEQ ID NO: 78651 - RNA, 19 nt, Homo sapiens
  misc_RNA (1)...(19): siRNA sense strand
ggacaggagaaggcacuug

SEQ ID NO: 78652 - RNA, 19 nt, Homo sapiens
  misc_RNA (1)...(19): siRNA sense strand
gcuuguauguauuucaaac

SEQ ID NO: 78653 - RNA, 19 nt, Homo sapiens
  misc_RNA (1)...(19): siRNA sense strand
ucucaaagaaauccaaaca

SEQ ID NO: 78654 - RNA, 19 nt, Homo sapiens
  misc_RNA (1)...(19): siRNA sense strand
gcaaauacuaugagaaaag

SEQ ID NO: 78655 - RNA, 19 nt, Homo sapiens
  misc_RNA (1)...(19): siRNA sense strand
agaugaugauuacgucuca

SEQ ID NO: 78656 - RNA, 19 nt, Homo sapiens
  misc_RNA (1)...(19): siRNA sense strand
cuuaauuuccaccuuauug

SEQ ID NO: 78657 - RNA, 19 nt, Homo sapiens
  misc_RNA (1)...(19): siRNA sense strand
uacagcaacuuaauuucca

SEQ ID NO: 78658 - RNA, 19 nt, Homo sapiens
  misc_RNA (1)...(19): siRNA sense strand
gaauucaauguaucuaguc

SEQ ID NO: 78659 - RNA, 19 nt, Homo sapiens
  misc_RNA (1)...(19): siRNA sense strand
guaucuaguccucaguuug

SEQ ID NO: 78660 - RNA, 19 nt, Homo sapiens
  misc_RNA (1)...(19): siRNA sense strand
gucugaugcugaaagagaa

SEQ ID NO: 78661 - RNA, 19 nt, Homo sapiens
  misc_RNA (1)...(19): siRNA sense strand
uacacaccuucccaaauug

SEQ ID NO: 78662 - RNA, 19 nt, Homo sapiens
  misc_RNA (1)...(19): siRNA sense strand
ggaaaacagcugaugacuu

SEQ ID NO: 78663 - RNA, 19 nt, Homo sapiens
  misc_RNA (1)...(19): siRNA sense strand
aagacccgcuaucccauau

SEQ ID NO: 78664 - RNA, 19 nt, Homo sapiens
  misc_RNA (1)...(19): siRNA sense strand
cgacuuaaagacccgcuau

SEQ ID NO: 78665 - RNA, 19 nt, Homo sapiens
  misc_RNA (1)...(19): siRNA sense strand
acagauacuggaauaugaa

SEQ ID NO: 78666 - RNA, 19 nt, Homo sapiens
  misc_RNA (1)...(19): siRNA sense strand
gaugacgaccugguagaau

SEQ ID NO: 78667 - RNA, 19 nt, Homo sapiens
  misc_RNA (1)...(19): siRNA sense strand
uaucaacacugcuauagua

SEQ ID NO: 78668 - RNA, 19 nt, Homo sapiens
  misc_RNA (1)...(19): siRNA sense strand
gaacaaacguccuggugau

SEQ ID NO: 78669 - RNA, 19 nt, Homo sapiens
  misc_RNA (1)...(19): siRNA sense strand
gcacagacuucuuacuuca

SEQ ID NO: 78670 - RNA, 19 nt, Homo sapiens
  misc_RNA (1)...(19): siRNA sense strand
gcacaagacucacccaucu

SEQ ID NO: 78671 - RNA, 19 nt, Homo sapiens
  misc_RNA (1)...(19): siRNA sense strand
uagaugaacugacacauga

SEQ ID NO: 78672 - RNA, 19 nt, Homo sapiens
  misc_RNA (1)...(19): siRNA sense strand
caaaacagcucucaaaaug

SEQ ID NO: 78673 - RNA, 19 nt, Homo sapiens
  misc_RNA (1)...(19): siRNA sense strand
gagcagacaauccucaaua

SEQ ID NO: 78674 - RNA, 19 nt, Homo sapiens
  misc_RNA (1)...(19): siRNA sense strand
ggaaaaggcugacaaaaca

SEQ ID NO: 78675 - RNA, 19 nt, Homo sapiens
  misc_RNA (1)...(19): siRNA sense strand
uaaauccucuucccuaaau

SEQ ID NO: 78676 - RNA, 19 nt, Homo sapiens
  misc_RNA (1)...(19): siRNA sense strand
gggcauagcucagacacaa

SEQ ID NO: 78677 - RNA, 19 nt, Homo sapiens
  misc_RNA (1)...(19): siRNA sense strand
gagaacagcuggaaaauag

SEQ ID NO: 78678 - RNA, 19 nt, Homo sapiens
  misc_RNA (1)...(19): siRNA sense strand
acaagcaacuuagcacaua

SEQ ID NO: 78679 - RNA, 19 nt, Homo sapiens
  misc_RNA (1)...(19): siRNA sense strand
ggacccagauaaagaacuu

SEQ ID NO: 78680 - RNA, 19 nt, Homo sapiens
  misc_RNA (1)...(19): siRNA sense strand
gcuuugaacuaacaauuga

SEQ ID NO: 78681 - RNA, 19 nt, Homo sapiens
  misc_RNA (1)...(19): siRNA sense strand
gcaacaaguucaagaucug

SEQ ID NO: 78682 - RNA, 19 nt, Homo sapiens
  misc_RNA (1)...(19): siRNA sense strand
gaagugaggcuuauuugca

SEQ ID NO: 78683 - RNA, 19 nt, Homo sapiens
  misc_RNA (1)...(19): siRNA sense strand
acacaugaguuucuacaga

SEQ ID NO: 78684 - RNA, 19 nt, Homo sapiens
  misc_RNA (1)...(19): siRNA sense strand
gaauuuguucguccuuaua

SEQ ID NO: 78685 - RNA, 19 nt, Homo sapiens
  misc_RNA (1)...(19): siRNA sense strand
cagacaauccucaauauga

SEQ ID NO: 78686 - RNA, 19 nt, Homo sapiens
  misc_RNA (1)...(19): siRNA sense strand
gaagcaugcagaagaauug

SEQ ID NO: 78687 - RNA, 19 nt, Homo sapiens
  misc_RNA (1)...(19): siRNA sense strand
caacacgacccagacaaua

SEQ ID NO: 78688 - RNA, 19 nt, Homo sapiens
  misc_RNA (1)...(19): siRNA sense strand
caagcaacuuagcacauaa

SEQ ID NO: 78689 - RNA, 19 nt, Homo sapiens
  misc_RNA (1)...(19): siRNA sense strand
ccagagcucuucagacaca

SEQ ID NO: 78690 - RNA, 19 nt, Homo sapiens
  misc_RNA (1)...(19): siRNA sense strand
gcauucaccuggcuugcaa

SEQ ID NO: 78691 - RNA, 19 nt, Homo sapiens
  misc_RNA (1)...(19): siRNA sense strand
uuacaggaguugaucauuc

SEQ ID NO: 78692 - RNA, 19 nt, Homo sapiens
  misc_RNA (1)...(19): siRNA sense strand
gagauaaagcugcgucuuc

SEQ ID NO: 78693 - RNA, 19 nt, Homo sapiens
  misc_RNA (1)...(19): siRNA sense strand
gccaucagcuaaaguguca

SEQ ID NO: 78694 - RNA, 19 nt, Homo sapiens
  misc_RNA (1)...(19): siRNA sense strand
ccaaccuucuuucaaacua

SEQ ID NO: 78695 - RNA, 19 nt, Homo sapiens
  misc_RNA (1)...(19): siRNA sense strand
ccacucagcccacugcauu

SEQ ID NO: 78696 - RNA, 19 nt, Homo sapiens
  misc_RNA (1)...(19): siRNA sense strand
ucaagacacugugaauaug

SEQ ID NO: 78697 - RNA, 19 nt, Homo sapiens
  misc_RNA (1)...(19): siRNA sense strand
caaccaacagccugcauuu

SEQ ID NO: 78698 - RNA, 19 nt, Homo sapiens
  misc_RNA (1)...(19): siRNA sense strand
agaauuggcugcccagaag

SEQ ID NO: 78699 - RNA, 19 nt, Homo sapiens
  misc_RNA (1)...(19): siRNA sense strand
gcgcgaagcaugcagaaga

SEQ ID NO: 78700 - RNA, 19 nt, Homo sapiens
  misc_RNA (1)...(19): siRNA sense strand
cuuaacgucucacaauuga

SEQ ID NO: 78701 - RNA, 19 nt, Homo sapiens
  misc_RNA (1)...(19): siRNA sense strand
ccacugcauuugaauuugu

SEQ ID NO: 78702 - RNA, 19 nt, Homo sapiens
  misc_RNA (1)...(19): siRNA sense strand
gaucauccagccaagauug

SEQ ID NO: 78703 - RNA, 19 nt, Homo sapiens
  misc_RNA (1)...(19): siRNA sense strand
uaaccaguguggagauguu

SEQ ID NO: 78704 - RNA, 19 nt, Homo sapiens
  misc_RNA (1)...(19): siRNA sense strand
gacuuuaggcuuugaacua

SEQ ID NO: 78705 - RNA, 19 nt, Homo sapiens
  misc_RNA (1)...(19): siRNA sense strand
uaguauacaugcaucgauu

SEQ ID NO: 78706 - RNA, 19 nt, Homo sapiens
  misc_RNA (1)...(19): siRNA sense strand
gcacucucauucccaacuu

SEQ ID NO: 78707 - RNA, 19 nt, Homo sapiens
  misc_RNA (1)...(19): siRNA sense strand
gaagagucauccagcaacu

SEQ ID NO: 78708 - RNA, 19 nt, Homo sapiens
  misc_RNA (1)...(19): siRNA sense strand
uuaaugagcaugucaacuu

SEQ ID NO: 78709 - RNA, 19 nt, Homo sapiens
  misc_RNA (1)...(19): siRNA sense strand
ucccagagcucuucagaca

SEQ ID NO: 78710 - RNA, 19 nt, Homo sapiens
  misc_RNA (1)...(19): siRNA sense strand
agacaauccucaauaugau

SEQ ID NO: 78711 - RNA, 19 nt, Homo sapiens
  misc_RNA (1)...(19): siRNA sense strand
guaguaaagugcacucaac

SEQ ID NO: 78712 - RNA, 19 nt, Homo sapiens
  misc_RNA (1)...(19): siRNA sense strand
cccagaagcagaauaguaa

SEQ ID NO: 78713 - RNA, 19 nt, Homo sapiens
  misc_RNA (1)...(19): siRNA sense strand
accuauagcuugucuaguu

SEQ ID NO: 78714 - RNA, 19 nt, Homo sapiens
  misc_RNA (1)...(19): siRNA sense strand
caucuaaucaucaucauca

SEQ ID NO: 78715 - RNA, 19 nt, Homo sapiens
  misc_RNA (1)...(19): siRNA sense strand
gagccgagagcacaaagaa

SEQ ID NO: 78716 - RNA, 19 nt, Homo sapiens
  misc_RNA (1)...(19): siRNA sense strand
gaagcagaauaguaagagu

SEQ ID NO: 78717 - RNA, 19 nt, Homo sapiens
  misc_RNA (1)...(19): siRNA sense strand
ggaagccaaugugaaguca

SEQ ID NO: 78718 - RNA, 19 nt, Homo sapiens
  misc_RNA (1)...(19): siRNA sense strand
acuaaauccucuucccuaa

SEQ ID NO: 78719 - RNA, 19 nt, Homo sapiens
  misc_RNA (1)...(19): siRNA sense strand
augcaucgauucuacauga

SEQ ID NO: 78720 - RNA, 19 nt, Homo sapiens
  misc_RNA (1)...(19): siRNA sense strand
gaggaagaacaacaacaaa

SEQ ID NO: 78721 - RNA, 19 nt, Homo sapiens
  misc_RNA (1)...(19): siRNA sense strand
gauaagcacaauucuguag

SEQ ID NO: 78722 - RNA, 19 nt, Homo sapiens
  misc_RNA (1)...(19): siRNA sense strand
uaaugagcaugucaacuuc

SEQ ID NO: 78723 - RNA, 19 nt, Homo sapiens
  misc_RNA (1)...(19): siRNA sense strand
gcagacaauccucaauaug

SEQ ID NO: 78724 - RNA, 19 nt, Homo sapiens
  misc_RNA (1)...(19): siRNA sense strand
gagagaggaagaacaacaa

SEQ ID NO: 78725 - RNA, 19 nt, Homo sapiens
  misc_RNA (1)...(19): siRNA sense strand
aacaaacggugguauuuca

SEQ ID NO: 78726 - RNA, 19 nt, Homo sapiens
  misc_RNA (1)...(19): siRNA sense strand
gaggacaguguuacaaaga

SEQ ID NO: 78727 - RNA, 19 nt, Homo sapiens
  misc_RNA (1)...(19): siRNA sense strand
agauaaagcugcgucuuca

SEQ ID NO: 78728 - RNA, 19 nt, Homo sapiens
  misc_RNA (1)...(19): siRNA sense strand
ggagagaggaagaacaaca

SEQ ID NO: 78729 - RNA, 19 nt, Homo sapiens
  misc_RNA (1)...(19): siRNA sense strand
gauagccauucuucaguca

SEQ ID NO: 78730 - RNA, 19 nt, Homo sapiens
  misc_RNA (1)...(19): siRNA sense strand
agagucauccagcaacuua

SEQ ID NO: 78731 - RNA, 19 nt, Homo sapiens
  misc_RNA (1)...(19): siRNA sense strand
ccagcagccuuguuucuag

SEQ ID NO: 78732 - RNA, 19 nt, Homo sapiens
  misc_RNA (1)...(19): siRNA sense strand
caacaaacggugguauuuc

SEQ ID NO: 78733 - RNA, 19 nt, Homo sapiens
  misc_RNA (1)...(19): siRNA sense strand
gcccacugcauuugaauuu

SEQ ID NO: 78734 - RNA, 19 nt, Homo sapiens
  misc_RNA (1)...(19): siRNA sense strand
acaagacucacccaucuaa

SEQ ID NO: 78735 - RNA, 19 nt, Homo sapiens
  misc_RNA (1)...(19): siRNA sense strand
cuagaagugaggcuuauuu

SEQ ID NO: 78736 - RNA, 19 nt, Homo sapiens
  misc_RNA (1)...(19): siRNA sense strand
ugaauuuguucguccuuau

SEQ ID NO: 78737 - RNA, 19 nt, Homo sapiens
  misc_RNA (1)...(19): siRNA sense strand
uaucaagacacugugaaua

SEQ ID NO: 78738 - RNA, 19 nt, Homo sapiens
  misc_RNA (1)...(19): siRNA sense strand
cagccaagauugccaagag

SEQ ID NO: 78739 - RNA, 19 nt, Homo sapiens
  misc_RNA (1)...(19): siRNA sense strand
ugaagucacaauaugcaua

SEQ ID NO: 78740 - RNA, 19 nt, Homo sapiens
  misc_RNA (1)...(19): siRNA sense strand
aaacgcauuuggaauugga

SEQ ID NO: 78741 - RNA, 19 nt, Homo sapiens
  misc_RNA (1)...(19): siRNA sense strand
cacaugaguuucuacagau

SEQ ID NO: 78742 - RNA, 19 nt, Homo sapiens
  misc_RNA (1)...(19): siRNA sense strand
uagcacagacuucuuacuu

SEQ ID NO: 78743 - RNA, 19 nt, Homo sapiens
  misc_RNA (1)...(19): siRNA sense strand
caucgauucuacaugauuc

SEQ ID NO: 78744 - RNA, 19 nt, Homo sapiens
  misc_RNA (1)...(19): siRNA sense strand
aaacucgugucccucauuc

SEQ ID NO: 78745 - RNA, 19 nt, Homo sapiens
  misc_RNA (1)...(19): siRNA sense strand
aaacauaguagccagacaa

SEQ ID NO: 78746 - RNA, 19 nt, Homo sapiens
  misc_RNA (1)...(19): siRNA sense strand
gcccauagaggguucagaa

SEQ ID NO: 78747 - RNA, 19 nt, Homo sapiens
  misc_RNA (1)...(19): siRNA sense strand
gcuugcaagugguccaauu

SEQ ID NO: 78748 - RNA, 19 nt, Homo sapiens
  misc_RNA (1)...(19): siRNA sense strand
gcaaccaacagccugcauu

SEQ ID NO: 78749 - RNA, 19 nt, Homo sapiens
  misc_RNA (1)...(19): siRNA sense strand
ggacuuagcacagacuucu

SEQ ID NO: 78750 - RNA, 19 nt, Homo sapiens
  misc_RNA (1)...(19): siRNA sense strand
uagccauucuucagucauu

SEQ ID NO: 78751 - RNA, 19 nt, Homo sapiens
  misc_RNA (1)...(19): siRNA sense strand
ggucaucggacuagugaga

SEQ ID NO: 78752 - RNA, 19 nt, Homo sapiens
  misc_RNA (1)...(19): siRNA sense strand
acugugaccuuggaacuuu

SEQ ID NO: 78753 - RNA, 19 nt, Homo sapiens
  misc_RNA (1)...(19): siRNA sense strand
guauuucacucgagaacag

SEQ ID NO: 78754 - RNA, 19 nt, Homo sapiens
  misc_RNA (1)...(19): siRNA sense strand
cauaguagccagacaagca

SEQ ID NO: 78755 - RNA, 19 nt, Homo sapiens
  misc_RNA (1)...(19): siRNA sense strand
acaacaaacggugguauuu

SEQ ID NO: 78756 - RNA, 19 nt, Homo sapiens
  misc_RNA (1)...(19): siRNA sense strand
cucccaaccuucuuucaaa

SEQ ID NO: 78757 - RNA, 19 nt, Homo sapiens
  misc_RNA (1)...(19): siRNA sense strand
augcgaggcugccaagaaa

SEQ ID NO: 78758 - RNA, 19 nt, Homo sapiens
  misc_RNA (1)...(19): siRNA sense strand
acagacuucuuacuucaug

SEQ ID NO: 78759 - RNA, 19 nt, Homo sapiens
  misc_RNA (1)...(19): siRNA sense strand
gcaucgauucuacaugauu

SEQ ID NO: 78760 - RNA, 19 nt, Homo sapiens
  misc_RNA (1)...(19): siRNA sense strand
ggaagaacaacaacaaacg

SEQ ID NO: 78761 - RNA, 19 nt, Homo sapiens
  misc_RNA (1)...(19): siRNA sense strand
ucacacaagcacucucauu

SEQ ID NO: 78762 - RNA, 19 nt, Homo sapiens
  misc_RNA (1)...(19): siRNA sense strand
ccaaucugcuucaggacau

SEQ ID NO: 78763 - RNA, 19 nt, Homo sapiens
  misc_RNA (1)...(19): siRNA sense strand
cagcugauaagcacaauuc

SEQ ID NO: 78764 - RNA, 19 nt, Homo sapiens
  misc_RNA (1)...(19): siRNA sense strand
gccaagauugccaagagua

SEQ ID NO: 78765 - RNA, 19 nt, Homo sapiens
  misc_RNA (1)...(19): siRNA sense strand
auacaugcaucgauucuac

SEQ ID NO: 78766 - RNA, 19 nt, Homo sapiens
  misc_RNA (1)...(19): siRNA sense strand
caaguggccuuuccuuuuc

SEQ ID NO: 78767 - RNA, 19 nt, Homo sapiens
  misc_RNA (1)...(19): siRNA sense strand
gcacagacauccuauuuca

SEQ ID NO: 78768 - RNA, 19 nt, Homo sapiens
  misc_RNA (1)...(19): siRNA sense strand
gcagggaccuucuauauca

SEQ ID NO: 78769 - RNA, 19 nt, Homo sapiens
  misc_RNA (1)...(19): siRNA sense strand
gaacagcuauauucacaga

SEQ ID NO: 78770 - RNA, 19 nt, Homo sapiens
  misc_RNA (1)...(19): siRNA sense strand
ggacagaacagcuauauuc

SEQ ID NO: 78771 - RNA, 19 nt, Homo sapiens
  misc_RNA (1)...(19): siRNA sense strand
ggugaaauguacccaguua

SEQ ID NO: 78772 - RNA, 19 nt, Homo sapiens
  misc_RNA (1)...(19): siRNA sense strand
gaaauuacggauuccaaua

SEQ ID NO: 78773 - RNA, 19 nt, Homo sapiens
  misc_RNA (1)...(19): siRNA sense strand
ggaauggccucaacaucaa

SEQ ID NO: 78774 - RNA, 19 nt, Homo sapiens
  misc_RNA (1)...(19): siRNA sense strand
ggaagaggcugcaugucaa

SEQ ID NO: 78775 - RNA, 19 nt, Homo sapiens
  misc_RNA (1)...(19): siRNA sense strand
guacaaaccaacagugaua

SEQ ID NO: 78776 - RNA, 19 nt, Homo sapiens
  misc_RNA (1)...(19): siRNA sense strand
uagaugagcuaacacauga

SEQ ID NO: 78777 - RNA, 19 nt, Homo sapiens
  misc_RNA (1)...(19): siRNA sense strand
gaaaauaccuaucgcaaau

SEQ ID NO: 78778 - RNA, 19 nt, Homo sapiens
  misc_RNA (1)...(19): siRNA sense strand
ccauacaucugauaauuug

SEQ ID NO: 78779 - RNA, 19 nt, Homo sapiens
  misc_RNA (1)...(19): siRNA sense strand
uuauauagcugcccaggua

SEQ ID NO: 78780 - RNA, 19 nt, Homo sapiens
  misc_RNA (1)...(19): siRNA sense strand
agacacagcucuucugaug

SEQ ID NO: 78781 - RNA, 19 nt, Homo sapiens
  misc_RNA (1)...(19): siRNA sense strand
acacugcgauuguuuauau

SEQ ID NO: 78782 - RNA, 19 nt, Homo sapiens
  misc_RNA (1)...(19): siRNA sense strand
gaaauguacccaguuagua

SEQ ID NO: 78783 - RNA, 19 nt, Homo sapiens
  misc_RNA (1)...(19): siRNA sense strand
acacaugaguuucuacaaa

SEQ ID NO: 78784 - RNA, 19 nt, Homo sapiens
  misc_RNA (1)...(19): siRNA sense strand
ucucucagcuuacaauaaa

SEQ ID NO: 78785 - RNA, 19 nt, Homo sapiens
  misc_RNA (1)...(19): siRNA sense strand
ucacagaccugacaaaauu

SEQ ID NO: 78786 - RNA, 19 nt, Homo sapiens
  misc_RNA (1)...(19): siRNA sense strand
gccaguaccucuaaauuca

SEQ ID NO: 78787 - RNA, 19 nt, Homo sapiens
  misc_RNA (1)...(19): siRNA sense strand
gcagagaccauaaggagaa

SEQ ID NO: 78788 - RNA, 19 nt, Homo sapiens
  misc_RNA (1)...(19): siRNA sense strand
cauucaagcccacauauua

SEQ ID NO: 78789 - RNA, 19 nt, Homo sapiens
  misc_RNA (1)...(19): siRNA sense strand
acacagcucuucugaugaa

SEQ ID NO: 78790 - RNA, 19 nt, Homo sapiens
  misc_RNA (1)...(19): siRNA sense strand
ucacugaaauuacggauuc

SEQ ID NO: 78791 - RNA, 19 nt, Homo sapiens
  misc_RNA (1)...(19): siRNA sense strand
gcaccauucuuucaccaaa

SEQ ID NO: 78792 - RNA, 19 nt, Homo sapiens
  misc_RNA (1)...(19): siRNA sense strand
gcacaugcuugucuucauc

SEQ ID NO: 78793 - RNA, 19 nt, Homo sapiens
  misc_RNA (1)...(19): siRNA sense strand
ggagaucccuguaucaacu

SEQ ID NO: 78794 - RNA, 19 nt, Homo sapiens
  misc_RNA (1)...(19): siRNA sense strand
caacaggaaugccaaguac

SEQ ID NO: 78795 - RNA, 19 nt, Homo sapiens
  misc_RNA (1)...(19): siRNA sense strand
cagaacagcuauauucaca

SEQ ID NO: 78796 - RNA, 19 nt, Homo sapiens
  misc_RNA (1)...(19): siRNA sense strand
ggaaagcauuggugggaau

SEQ ID NO: 78797 - RNA, 19 nt, Homo sapiens
  misc_RNA (1)...(19): siRNA sense strand
gauguaagggaucauuaua

SEQ ID NO: 78798 - RNA, 19 nt, Homo sapiens
  misc_RNA (1)...(19): siRNA sense strand
caacagugauagcaugugu

SEQ ID NO: 78799 - RNA, 19 nt, Homo sapiens
  misc_RNA (1)...(19): siRNA sense strand
gcaacaggaaugccaagua

SEQ ID NO: 78800 - RNA, 19 nt, Homo sapiens
  misc_RNA (1)...(19): siRNA sense strand
gaacugguuauacuugaaa

SEQ ID NO: 78801 - RNA, 19 nt, Homo sapiens
  misc_RNA (1)...(19): siRNA sense strand
aauaucgucuacugcauua

SEQ ID NO: 78802 - RNA, 19 nt, Homo sapiens
  misc_RNA (1)...(19): siRNA sense strand
cagcagcgguggcaguaaa

SEQ ID NO: 78803 - RNA, 19 nt, Homo sapiens
  misc_RNA (1)...(19): siRNA sense strand
cucaaugucucucagcuua

SEQ ID NO: 78804 - RNA, 19 nt, Homo sapiens
  misc_RNA (1)...(19): siRNA sense strand
ccucuaaauucaggaaaua

SEQ ID NO: 78805 - RNA, 19 nt, Homo sapiens
  misc_RNA (1)...(19): siRNA sense strand
aaaaguagauggacaggua

SEQ ID NO: 78806 - RNA, 19 nt, Homo sapiens
  misc_RNA (1)...(19): siRNA sense strand
gaaaccauaaugcuacaaa

SEQ ID NO: 78807 - RNA, 19 nt, Homo sapiens
  misc_RNA (1)...(19): siRNA sense strand
gaacauguuaucaaaguag

SEQ ID NO: 78808 - RNA, 19 nt, Homo sapiens
  misc_RNA (1)...(19): siRNA sense strand
gccagcagcaguucuguua

SEQ ID NO: 78809 - RNA, 19 nt, Homo sapiens
  misc_RNA (1)...(19): siRNA sense strand
ucacuggugugccuacaaa

SEQ ID NO: 78810 - RNA, 19 nt, Homo sapiens
  misc_RNA (1)...(19): siRNA sense strand
gaaacuggagggcuaauca

SEQ ID NO: 78811 - RNA, 19 nt, Homo sapiens
  misc_RNA (1)...(19): siRNA sense strand
gcuaacacaugaguuucua

SEQ ID NO: 78812 - RNA, 19 nt, Homo sapiens
  misc_RNA (1)...(19): siRNA sense strand
uaaaugugaugcuuaccuu

SEQ ID NO: 78813 - RNA, 19 nt, Homo sapiens
  misc_RNA (1)...(19): siRNA sense strand
ucuguuacuucucccauua

SEQ ID NO: 78814 - RNA, 19 nt, Homo sapiens
  misc_RNA (1)...(19): siRNA sense strand
acacagugccgacggaaua

SEQ ID NO: 78815 - RNA, 19 nt, Homo sapiens
  misc_RNA (1)...(19): siRNA sense strand
ccaauaccacccacugaua

SEQ ID NO: 78816 - RNA, 19 nt, Homo sapiens
  misc_RNA (1)...(19): siRNA sense strand
ugaagaagauucgaaacug

SEQ ID NO: 78817 - RNA, 19 nt, Homo sapiens
  misc_RNA (1)...(19): siRNA sense strand
caauaccacccacugauaa

SEQ ID NO: 78818 - RNA, 19 nt, Homo sapiens
  misc_RNA (1)...(19): siRNA sense strand
cagcagggaccuucuauau

SEQ ID NO: 78819 - RNA, 19 nt, Homo sapiens
  misc_RNA (1)...(19): siRNA sense strand
caucuuugguccagaauuc

SEQ ID NO: 78820 - RNA, 19 nt, Homo sapiens
  misc_RNA (1)...(19): siRNA sense strand
caucaagacucagcaagga

SEQ ID NO: 78821 - RNA, 19 nt, Homo sapiens
  misc_RNA (1)...(19): siRNA sense strand
cacaugaguuucuacaaau

SEQ ID NO: 78822 - RNA, 19 nt, Homo sapiens
  misc_RNA (1)...(19): siRNA sense strand
gagcaaaaguuccaaaagu

SEQ ID NO: 78823 - RNA, 19 nt, Homo sapiens
  misc_RNA (1)...(19): siRNA sense strand
cauauuagcagagaccaua

SEQ ID NO: 78824 - RNA, 19 nt, Homo sapiens
  misc_RNA (1)...(19): siRNA sense strand
gggaacagcuggagaacac

SEQ ID NO: 78825 - RNA, 19 nt, Homo sapiens
  misc_RNA (1)...(19): siRNA sense strand
agaaacaggagacaucuuu

SEQ ID NO: 78826 - RNA, 19 nt, Homo sapiens
  misc_RNA (1)...(19): siRNA sense strand
acagcuauauucacagaaa

SEQ ID NO: 78827 - RNA, 19 nt, Homo sapiens
  misc_RNA (1)...(19): siRNA sense strand
cuaauagguugaagaagau

SEQ ID NO: 78828 - RNA, 19 nt, Homo sapiens
  misc_RNA (1)...(19): siRNA sense strand
gauacuaaaugugaugcuu

SEQ ID NO: 78829 - RNA, 19 nt, Homo sapiens
  misc_RNA (1)...(19): siRNA sense strand
ggaauaccacccacuguuc

SEQ ID NO: 78830 - RNA, 19 nt, Homo sapiens
  misc_RNA (1)...(19): siRNA sense strand
gaaagcauuggugggaaua

SEQ ID NO: 78831 - RNA, 19 nt, Homo sapiens
  misc_RNA (1)...(19): siRNA sense strand
uaagagcaagcaaggauuu

SEQ ID NO: 78832 - RNA, 19 nt, Homo sapiens
  misc_RNA (1)...(19): siRNA sense strand
aaauguacccaguuaguaa

SEQ ID NO: 78833 - RNA, 19 nt, Homo sapiens
  misc_RNA (1)...(19): siRNA sense strand
gaacagcagcacaaacaag

SEQ ID NO: 78834 - RNA, 19 nt, Homo sapiens
  misc_RNA (1)...(19): siRNA sense strand
caacugauggaaagcauug

SEQ ID NO: 78835 - RNA, 19 nt, Homo sapiens
  misc_RNA (1)...(19): siRNA sense strand
gaaugccaaguacuucaua

SEQ ID NO: 78836 - RNA, 19 nt, Homo sapiens
  misc_RNA (1)...(19): siRNA sense strand
gaguggaggcggauaaaga

SEQ ID NO: 78837 - RNA, 19 nt, Homo sapiens
  misc_RNA (1)...(19): siRNA sense strand
ucagaaaccaucuacauca

SEQ ID NO: 78838 - RNA, 19 nt, Homo sapiens
  misc_RNA (1)...(19): siRNA sense strand
ucagagacaccacuucuug

SEQ ID NO: 78839 - RNA, 19 nt, Homo sapiens
  misc_RNA (1)...(19): siRNA sense strand
ucaacagacucaagaacug

SEQ ID NO: 78840 - RNA, 19 nt, Homo sapiens
  misc_RNA (1)...(19): siRNA sense strand
gaacacccacacacagaug

SEQ ID NO: 78841 - RNA, 19 nt, Homo sapiens
  misc_RNA (1)...(19): siRNA sense strand
guucaucuuugguccagaa

SEQ ID NO: 78842 - RNA, 19 nt, Homo sapiens
  misc_RNA (1)...(19): siRNA sense strand
gcuugcaaaugguccaauu

SEQ ID NO: 78843 - RNA, 19 nt, Homo sapiens
  misc_RNA (1)...(19): siRNA sense strand
ucgugaaacuggacaagaa

SEQ ID NO: 78844 - RNA, 19 nt, Homo sapiens
  misc_RNA (1)...(19): siRNA sense strand
gaaacaggagacaucuuug

SEQ ID NO: 78845 - RNA, 19 nt, Homo sapiens
  misc_RNA (1)...(19): siRNA sense strand
ugagcuaacacaugaguuu

SEQ ID NO: 78846 - RNA, 19 nt, Homo sapiens
  misc_RNA (1)...(19): siRNA sense strand
ucuucucgcugguucuuua

SEQ ID NO: 78847 - RNA, 19 nt, Homo sapiens
  misc_RNA (1)...(19): siRNA sense strand
gcacaaacaagggcaguca

SEQ ID NO: 78848 - RNA, 19 nt, Homo sapiens
  misc_RNA (1)...(19): siRNA sense strand
gccauacaucugauaauuu

SEQ ID NO: 78849 - RNA, 19 nt, Homo sapiens
  misc_RNA (1)...(19): siRNA sense strand
gguccagaauuccauuuua

SEQ ID NO: 78850 - RNA, 19 nt, Homo sapiens
  misc_RNA (1)...(19): siRNA sense strand
caaggaagaggcugcaugu

SEQ ID NO: 78851 - RNA, 19 nt, Homo sapiens
  misc_RNA (1)...(19): siRNA sense strand
aaacauucaagcccacaua

SEQ ID NO: 78852 - RNA, 19 nt, Homo sapiens
  misc_RNA (1)...(19): siRNA sense strand
gagaaaagcguaaacuaga

SEQ ID NO: 78853 - RNA, 19 nt, Homo sapiens
  misc_RNA (1)...(19): siRNA sense strand
uaaacaccaugggccaauu

SEQ ID NO: 78854 - RNA, 19 nt, Homo sapiens
  misc_RNA (1)...(19): siRNA sense strand
uggcacagacauccuauuu

SEQ ID NO: 78855 - RNA, 19 nt, Homo sapiens
  misc_RNA (1)...(19): siRNA sense strand
gauaaaagcgccaguaaag

SEQ ID NO: 78856 - RNA, 19 nt, Homo sapiens
  misc_RNA (1)...(19): siRNA sense strand
gcaaggacagaacagcuau

SEQ ID NO: 78857 - RNA, 19 nt, Homo sapiens
  misc_RNA (1)...(19): siRNA sense strand
caagacagccauacaucug

SEQ ID NO: 78858 - RNA, 19 nt, Homo sapiens
  misc_RNA (1)...(19): siRNA sense strand
gcauucauuuggcuugcaa

SEQ ID NO: 78859 - RNA, 19 nt, Homo sapiens
  misc_RNA (1)...(19): siRNA sense strand
cuuacaaccuucugucuuc

SEQ ID NO: 78860 - RNA, 19 nt, Homo sapiens
  misc_RNA (1)...(19): siRNA sense strand
acagacauccuauuucaug

SEQ ID NO: 78861 - RNA, 19 nt, Homo sapiens
  misc_RNA (1)...(19): siRNA sense strand
ccaacagucugcaucuuac

SEQ ID NO: 78862 - RNA, 19 nt, Homo sapiens
  misc_RNA (1)...(19): siRNA sense strand
uagaacagcagcacaaaca

SEQ ID NO: 78863 - RNA, 19 nt, Homo sapiens
  misc_RNA (1)...(19): siRNA sense strand
agccauacaucugauaauu

SEQ ID NO: 78864 - RNA, 19 nt, Homo sapiens
  misc_RNA (1)...(19): siRNA sense strand
gugauggcauuuccucuag

SEQ ID NO: 78865 - RNA, 19 nt, Homo sapiens
  misc_RNA (1)...(19): siRNA sense strand
ucacaaccaccacuccaaa

SEQ ID NO: 78866 - RNA, 19 nt, Homo sapiens
  misc_RNA (1)...(19): siRNA sense strand
gaagaggcugcaugucaau

SEQ ID NO: 78867 - RNA, 19 nt, Homo sapiens
  misc_RNA (1)...(19): siRNA sense strand
gcacagacauccuauuuca

SEQ ID NO: 78868 - RNA, 19 nt, Homo sapiens
  misc_RNA (1)...(19): siRNA sense strand
gcagggaccuucuauauca

SEQ ID NO: 78869 - RNA, 19 nt, Homo sapiens
  misc_RNA (1)...(19): siRNA sense strand
gaacagcuauauucacaga

SEQ ID NO: 78870 - RNA, 19 nt, Homo sapiens
  misc_RNA (1)...(19): siRNA sense strand
ggacagaacagcuauauuc

SEQ ID NO: 78871 - RNA, 19 nt, Homo sapiens
  misc_RNA (1)...(19): siRNA sense strand
ggugaaauguacccaguua

SEQ ID NO: 78872 - RNA, 19 nt, Homo sapiens
  misc_RNA (1)...(19): siRNA sense strand
gaaauuacggauuccaaua

SEQ ID NO: 78873 - RNA, 19 nt, Homo sapiens
  misc_RNA (1)...(19): siRNA sense strand
ggaauggccucaacaucaa

SEQ ID NO: 78874 - RNA, 19 nt, Homo sapiens
  misc_RNA (1)...(19): siRNA sense strand
ggaagaggcugcaugucaa

SEQ ID NO: 78875 - RNA, 19 nt, Homo sapiens
  misc_RNA (1)...(19): siRNA sense strand
guacaaaccaacagugaua

SEQ ID NO: 78876 - RNA, 19 nt, Homo sapiens
  misc_RNA (1)...(19): siRNA sense strand
uagaugagcuaacacauga

SEQ ID NO: 78877 - RNA, 19 nt, Homo sapiens
  misc_RNA (1)...(19): siRNA sense strand
gaaaauaccuaucgcaaau

SEQ ID NO: 78878 - RNA, 19 nt, Homo sapiens
  misc_RNA (1)...(19): siRNA sense strand
ccauacaucugauaauuug

SEQ ID NO: 78879 - RNA, 19 nt, Homo sapiens
  misc_RNA (1)...(19): siRNA sense strand
uuauauagcugcccaggua

SEQ ID NO: 78880 - RNA, 19 nt, Homo sapiens
  misc_RNA (1)...(19): siRNA sense strand
agacacagcucuucugaug

SEQ ID NO: 78881 - RNA, 19 nt, Homo sapiens
  misc_RNA (1)...(19): siRNA sense strand
acacugcgauuguuuauau

SEQ ID NO: 78882 - RNA, 19 nt, Homo sapiens
  misc_RNA (1)...(19): siRNA sense strand
gaaauguacccaguuagua

SEQ ID NO: 78883 - RNA, 19 nt, Homo sapiens
  misc_RNA (1)...(19): siRNA sense strand
acacaugaguuucuacaaa

SEQ ID NO: 78884 - RNA, 19 nt, Homo sapiens
  misc_RNA (1)...(19): siRNA sense strand
ucucucagcuuacaauaaa

SEQ ID NO: 78885 - RNA, 19 nt, Homo sapiens
  misc_RNA (1)...(19): siRNA sense strand
ucacagaccugacaaaauu

SEQ ID NO: 78886 - RNA, 19 nt, Homo sapiens
  misc_RNA (1)...(19): siRNA sense strand
gccaguaccucuaaauuca

SEQ ID NO: 78887 - RNA, 19 nt, Homo sapiens
  misc_RNA (1)...(19): siRNA sense strand
gcagagaccauaaggagaa

SEQ ID NO: 78888 - RNA, 19 nt, Homo sapiens
  misc_RNA (1)...(19): siRNA sense strand
cauucaagcccacauauua

SEQ ID NO: 78889 - RNA, 19 nt, Homo sapiens
  misc_RNA (1)...(19): siRNA sense strand
acacagcucuucugaugaa

SEQ ID NO: 78890 - RNA, 19 nt, Homo sapiens
  misc_RNA (1)...(19): siRNA sense strand
ucacugaaauuacggauuc

SEQ ID NO: 78891 - RNA, 19 nt, Homo sapiens
  misc_RNA (1)...(19): siRNA sense strand
gcaccauucuuucaccaaa

SEQ ID NO: 78892 - RNA, 19 nt, Homo sapiens
  misc_RNA (1)...(19): siRNA sense strand
gcacaugcuugucuucauc

SEQ ID NO: 78893 - RNA, 19 nt, Homo sapiens
  misc_RNA (1)...(19): siRNA sense strand
ggagaucccuguaucaacu

SEQ ID NO: 78894 - RNA, 19 nt, Homo sapiens
  misc_RNA (1)...(19): siRNA sense strand
caacaggaaugccaaguac

SEQ ID NO: 78895 - RNA, 19 nt, Homo sapiens
  misc_RNA (1)...(19): siRNA sense strand
cagaacagcuauauucaca

SEQ ID NO: 78896 - RNA, 19 nt, Homo sapiens
  misc_RNA (1)...(19): siRNA sense strand
ggaaagcauuggugggaau

SEQ ID NO: 78897 - RNA, 19 nt, Homo sapiens
  misc_RNA (1)...(19): siRNA sense strand
gauguaagggaucauuaua

SEQ ID NO: 78898 - RNA, 19 nt, Homo sapiens
  misc_RNA (1)...(19): siRNA sense strand
caacagugauagcaugugu

SEQ ID NO: 78899 - RNA, 19 nt, Homo sapiens
  misc_RNA (1)...(19): siRNA sense strand
gcaacaggaaugccaagua

SEQ ID NO: 78900 - RNA, 19 nt, Homo sapiens
  misc_RNA (1)...(19): siRNA sense strand
gaacugguuauacuugaaa

SEQ ID NO: 78901 - RNA, 19 nt, Homo sapiens
  misc_RNA (1)...(19): siRNA sense strand
aauaucgucuacugcauua

SEQ ID NO: 78902 - RNA, 19 nt, Homo sapiens
  misc_RNA (1)...(19): siRNA sense strand
cagcagcgguggcaguaaa

SEQ ID NO: 78903 - RNA, 19 nt, Homo sapiens
  misc_RNA (1)...(19): siRNA sense strand
cucaaugucucucagcuua

SEQ ID NO: 78904 - RNA, 19 nt, Homo sapiens
  misc_RNA (1)...(19): siRNA sense strand
ccucuaaauucaggaaaua

SEQ ID NO: 78905 - RNA, 19 nt, Homo sapiens
  misc_RNA (1)...(19): siRNA sense strand
aaaaguagauggacaggua

SEQ ID NO: 78906 - RNA, 19 nt, Homo sapiens
  misc_RNA (1)...(19): siRNA sense strand
gaaaccauaaugcuacaaa

SEQ ID NO: 78907 - RNA, 19 nt, Homo sapiens
  misc_RNA (1)...(19): siRNA sense strand
gaacauguuaucaaaguag

SEQ ID NO: 78908 - RNA, 19 nt, Homo sapiens
  misc_RNA (1)...(19): siRNA sense strand
gccagcagcaguucuguua

SEQ ID NO: 78909 - RNA, 19 nt, Homo sapiens
  misc_RNA (1)...(19): siRNA sense strand
ucacuggugugccuacaaa

SEQ ID NO: 78910 - RNA, 19 nt, Homo sapiens
  misc_RNA (1)...(19): siRNA sense strand
gaaacuggagggcuaauca

SEQ ID NO: 78911 - RNA, 19 nt, Homo sapiens
  misc_RNA (1)...(19): siRNA sense strand
gcuaacacaugaguuucua

SEQ ID NO: 78912 - RNA, 19 nt, Homo sapiens
  misc_RNA (1)...(19): siRNA sense strand
uaaaugugaugcuuaccuu

SEQ ID NO: 78913 - RNA, 19 nt, Homo sapiens
  misc_RNA (1)...(19): siRNA sense strand
ucuguuacuucucccauua

SEQ ID NO: 78914 - RNA, 19 nt, Homo sapiens
  misc_RNA (1)...(19): siRNA sense strand
acacagugccgacggaaua

SEQ ID NO: 78915 - RNA, 19 nt, Homo sapiens
  misc_RNA (1)...(19): siRNA sense strand
ccaauaccacccacugaua

SEQ ID NO: 78916 - RNA, 19 nt, Homo sapiens
  misc_RNA (1)...(19): siRNA sense strand
ugaagaagauucgaaacug

SEQ ID NO: 78917 - RNA, 19 nt, Homo sapiens
  misc_RNA (1)...(19): siRNA sense strand
caauaccacccacugauaa

SEQ ID NO: 78918 - RNA, 19 nt, Homo sapiens
  misc_RNA (1)...(19): siRNA sense strand
cagcagggaccuucuauau

SEQ ID NO: 78919 - RNA, 19 nt, Homo sapiens
  misc_RNA (1)...(19): siRNA sense strand
caucuuugguccagaauuc

SEQ ID NO: 78920 - RNA, 19 nt, Homo sapiens
  misc_RNA (1)...(19): siRNA sense strand
caucaagacucagcaagga

SEQ ID NO: 78921 - RNA, 19 nt, Homo sapiens
  misc_RNA (1)...(19): siRNA sense strand
cacaugaguuucuacaaau

SEQ ID NO: 78922 - RNA, 19 nt, Homo sapiens
  misc_RNA (1)...(19): siRNA sense strand
gagcaaaaguuccaaaagu

SEQ ID NO: 78923 - RNA, 19 nt, Homo sapiens
  misc_RNA (1)...(19): siRNA sense strand
cauauuagcagagaccaua

SEQ ID NO: 78924 - RNA, 19 nt, Homo sapiens
  misc_RNA (1)...(19): siRNA sense strand
gggaacagcuggagaacac

SEQ ID NO: 78925 - RNA, 19 nt, Homo sapiens
  misc_RNA (1)...(19): siRNA sense strand
agaaacaggagacaucuuu

SEQ ID NO: 78926 - RNA, 19 nt, Homo sapiens
  misc_RNA (1)...(19): siRNA sense strand
acagcuauauucacagaaa

SEQ ID NO: 78927 - RNA, 19 nt, Homo sapiens
  misc_RNA (1)...(19): siRNA sense strand
cuaauagguugaagaagau

SEQ ID NO: 78928 - RNA, 19 nt, Homo sapiens
  misc_RNA (1)...(19): siRNA sense strand
caaagacacauucgacaug

SEQ ID NO: 78929 - RNA, 19 nt, Homo sapiens
  misc_RNA (1)...(19): siRNA sense strand
caacgguccugaugccaau

SEQ ID NO: 78930 - RNA, 19 nt, Homo sapiens
  misc_RNA (1)...(19): siRNA sense strand
gauacuaaaugugaugcuu

SEQ ID NO: 78931 - RNA, 19 nt, Homo sapiens
  misc_RNA (1)...(19): siRNA sense strand
cccaaggaaugaacaugua

SEQ ID NO: 78932 - RNA, 19 nt, Homo sapiens
  misc_RNA (1)...(19): siRNA sense strand
ggaauaccacccacuguuc

SEQ ID NO: 78933 - RNA, 19 nt, Homo sapiens
  misc_RNA (1)...(19): siRNA sense strand
gaaagcauuggugggaaua

SEQ ID NO: 78934 - RNA, 19 nt, Homo sapiens
  misc_RNA (1)...(19): siRNA sense strand
uaagagcaagcaaggauuu

SEQ ID NO: 78935 - RNA, 19 nt, Homo sapiens
  misc_RNA (1)...(19): siRNA sense strand
aaauguacccaguuaguaa

SEQ ID NO: 78936 - RNA, 19 nt, Homo sapiens
  misc_RNA (1)...(19): siRNA sense strand
gaacagcagcacaaacaag

SEQ ID NO: 78937 - RNA, 19 nt, Homo sapiens
  misc_RNA (1)...(19): siRNA sense strand
caacugauggaaagcauug

SEQ ID NO: 78938 - RNA, 19 nt, Homo sapiens
  misc_RNA (1)...(19): siRNA sense strand
gaaugccaaguacuucaua

SEQ ID NO: 78939 - RNA, 19 nt, Homo sapiens
  misc_RNA (1)...(19): siRNA sense strand
gaguggaggcggauaaaga

SEQ ID NO: 78940 - RNA, 19 nt, Homo sapiens
  misc_RNA (1)...(19): siRNA sense strand
ucagaaaccaucuacauca

SEQ ID NO: 78941 - RNA, 19 nt, Homo sapiens
  misc_RNA (1)...(19): siRNA sense strand
ucagagacaccacuucuug

SEQ ID NO: 78942 - RNA, 19 nt, Homo sapiens
  misc_RNA (1)...(19): siRNA sense strand
ucaacagacucaagaacug

SEQ ID NO: 78943 - RNA, 19 nt, Homo sapiens
  misc_RNA (1)...(19): siRNA sense strand
ggacuacaaagacacauuc

SEQ ID NO: 78944 - RNA, 19 nt, Homo sapiens
  misc_RNA (1)...(19): siRNA sense strand
gcagccagcauauggacua

SEQ ID NO: 78945 - RNA, 19 nt, Homo sapiens
  misc_RNA (1)...(19): siRNA sense strand
gaacacccacacacagaug

SEQ ID NO: 78946 - RNA, 19 nt, Homo sapiens
  misc_RNA (1)...(19): siRNA sense strand
cauauggacuacaaagaca

SEQ ID NO: 78947 - RNA, 19 nt, Homo sapiens
  misc_RNA (1)...(19): siRNA sense strand
guucaucuuugguccagaa

SEQ ID NO: 78948 - RNA, 19 nt, Homo sapiens
  misc_RNA (1)...(19): siRNA sense strand
gcuugcaaaugguccaauu

SEQ ID NO: 78949 - RNA, 19 nt, Homo sapiens
  misc_RNA (1)...(19): siRNA sense strand
guacaagcagccagcauau

SEQ ID NO: 78950 - RNA, 19 nt, Homo sapiens
  misc_RNA (1)...(19): siRNA sense strand
ucgugaaacuggacaagaa

SEQ ID NO: 78951 - RNA, 19 nt, Homo sapiens
  misc_RNA (1)...(19): siRNA sense strand
gaaacaggagacaucuuug

SEQ ID NO: 78952 - RNA, 19 nt, Homo sapiens
  misc_RNA (1)...(19): siRNA sense strand
ugagcuaacacaugaguuu

SEQ ID NO: 78953 - RNA, 19 nt, Homo sapiens
  misc_RNA (1)...(19): siRNA sense strand
gccagcauauggacuacaa

SEQ ID NO: 78954 - RNA, 19 nt, Homo sapiens
  misc_RNA (1)...(19): siRNA sense strand
ucuucucgcugguucuuua

SEQ ID NO: 78955 - RNA, 19 nt, Homo sapiens
  misc_RNA (1)...(19): siRNA sense strand
gcacaaacaagggcaguca

SEQ ID NO: 78956 - RNA, 19 nt, Homo sapiens
  misc_RNA (1)...(19): siRNA sense strand
gccauacaucugauaauuu

SEQ ID NO: 78957 - RNA, 19 nt, Homo sapiens
  misc_RNA (1)...(19): siRNA sense strand
gguccagaauuccauuuua

SEQ ID NO: 78958 - RNA, 19 nt, Homo sapiens
  misc_RNA (1)...(19): siRNA sense strand
caugcuggacucacuguua

SEQ ID NO: 78959 - RNA, 19 nt, Homo sapiens
  misc_RNA (1)...(19): siRNA sense strand
caaggaagaggcugcaugu

SEQ ID NO: 78960 - RNA, 19 nt, Homo sapiens
  misc_RNA (1)...(19): siRNA sense strand
aaacauucaagcccacaua

SEQ ID NO: 78961 - RNA, 19 nt, Homo sapiens
  misc_RNA (1)...(19): siRNA sense strand
gagaaaagcguaaacuaga

SEQ ID NO: 78962 - RNA, 19 nt, Homo sapiens
  misc_RNA (1)...(19): siRNA sense strand
uaaacaccaugggccaauu

SEQ ID NO: 78963 - RNA, 19 nt, Homo sapiens
  misc_RNA (1)...(19): siRNA sense strand
gcauucauuuggcuugcaa

SEQ ID NO: 78964 - RNA, 19 nt, Homo sapiens
  misc_RNA (1)...(19): siRNA sense strand
gauaaaagcgccaguaaag

SEQ ID NO: 78965 - RNA, 19 nt, Homo sapiens
  misc_RNA (1)...(19): siRNA sense strand
gcaaggacagaacagcuau

SEQ ID NO: 78966 - RNA, 19 nt, Homo sapiens
  misc_RNA (1)...(19): siRNA sense strand
caagacagccauacaucug

SEQ ID NO: 78967 - RNA, 19 nt, Homo sapiens
  misc_RNA (1)...(19): siRNA sense strand
gaagagcgaggguuaauga

SEQ ID NO: 78968 - RNA, 19 nt, Homo sapiens
  misc_RNA (1)...(19): siRNA sense strand
ccacggagcacaccaauaa

SEQ ID NO: 78969 - RNA, 19 nt, Homo sapiens
  misc_RNA (1)...(19): siRNA sense strand
gcacaccaauaacaagauu

SEQ ID NO: 78970 - RNA, 19 nt, Homo sapiens
  misc_RNA (1)...(19): siRNA sense strand
gagaaaaucuacaucauga

SEQ ID NO: 78971 - RNA, 19 nt, Homo sapiens
  misc_RNA (1)...(19): siRNA sense strand
cagcagagcccgaguugga

SEQ ID NO: 78972 - RNA, 19 nt, Homo sapiens
  misc_RNA (1)...(19): siRNA sense strand
uuaaugagccagccacuga

SEQ ID NO: 78973 - RNA, 19 nt, Homo sapiens
  misc_RNA (1)...(19): siRNA sense strand
gagcacaccaauaacaaga

SEQ ID NO: 78974 - RNA, 19 nt, Homo sapiens
  misc_RNA (1)...(19): siRNA sense strand
ggaagcgaauucggcagaa

SEQ ID NO: 78975 - RNA, 19 nt, Homo sapiens
  misc_RNA (1)...(19): siRNA sense strand
ggaagaggaagggaaagaa

SEQ ID NO: 78976 - RNA, 19 nt, Homo sapiens
  misc_RNA (1)...(19): siRNA sense strand
gaagaggaagggaaagaag

SEQ ID NO: 78977 - RNA, 19 nt, Homo sapiens
  misc_RNA (1)...(19): siRNA sense strand
ccacagcugccucuggaaa

SEQ ID NO: 78978 - RNA, 19 nt, Homo sapiens
  misc_RNA (1)...(19): siRNA sense strand
cagaacccgucgcggaaga

SEQ ID NO: 78979 - RNA, 19 nt, Homo sapiens
  misc_RNA (1)...(19): siRNA sense strand
gaagcgaauucggcagaag

SEQ ID NO: 78980 - RNA, 19 nt, Homo sapiens
  misc_RNA (1)...(19): siRNA sense strand
ggaagagcgaggguuaaug

SEQ ID NO: 78981 - RNA, 19 nt, Homo sapiens
  misc_RNA (1)...(19): siRNA sense strand
gcgaugucaugcucucagu

SEQ ID NO: 78982 - RNA, 19 nt, Homo sapiens
  misc_RNA (1)...(19): siRNA sense strand
gaaaaucuacaucaugaag

SEQ ID NO: 78983 - RNA, 19 nt, Homo sapiens
  misc_RNA (1)...(19): siRNA sense strand
ggagcacaccaauaacaag

SEQ ID NO: 78984 - RNA, 19 nt, Homo sapiens
  misc_RNA (1)...(19): siRNA sense strand
gagcuggaggcggaccaua

SEQ ID NO: 78985 - RNA, 19 nt, Homo sapiens
  misc_RNA (1)...(19): siRNA sense strand
cgcggaagagcgaggguua

SEQ ID NO: 78986 - RNA, 19 nt, Homo sapiens
  misc_RNA (1)...(19): siRNA sense strand
cagcugcagcgaugucaug

SEQ ID NO: 78987 - RNA, 19 nt, Homo sapiens
  misc_RNA (1)...(19): siRNA sense strand
gcggaagagcgaggguuaa

SEQ ID NO: 78988 - RNA, 19 nt, Homo sapiens
  misc_RNA (1)...(19): siRNA sense strand
aagaggaagggaaagaaga

SEQ ID NO: 78989 - RNA, 19 nt, Homo sapiens
  misc_RNA (1)...(19): siRNA sense strand
ccacggagcacaccaauaa

SEQ ID NO: 78990 - RNA, 19 nt, Homo sapiens
  misc_RNA (1)...(19): siRNA sense strand
gcacaccaauaacaagauu

SEQ ID NO: 78991 - RNA, 19 nt, Homo sapiens
  misc_RNA (1)...(19): siRNA sense strand
gagaaaaucuacaucauga

SEQ ID NO: 78992 - RNA, 19 nt, Homo sapiens
  misc_RNA (1)...(19): siRNA sense strand
cagcagagcccgaguugga

SEQ ID NO: 78993 - RNA, 19 nt, Homo sapiens
  misc_RNA (1)...(19): siRNA sense strand
gagcacaccaauaacaaga

SEQ ID NO: 78994 - RNA, 19 nt, Homo sapiens
  misc_RNA (1)...(19): siRNA sense strand
ggaagaggaagggaaagaa

SEQ ID NO: 78995 - RNA, 19 nt, Homo sapiens
  misc_RNA (1)...(19): siRNA sense strand
gaagaggaagggaaagaag

SEQ ID NO: 78996 - RNA, 19 nt, Homo sapiens
  misc_RNA (1)...(19): siRNA sense strand
ccacagcugccucuggaaa

SEQ ID NO: 78997 - RNA, 19 nt, Homo sapiens
  misc_RNA (1)...(19): siRNA sense strand
gcgaugucaugcucucagu

SEQ ID NO: 78998 - RNA, 19 nt, Homo sapiens
  misc_RNA (1)...(19): siRNA sense strand
gaaaaucuacaucaugaag

SEQ ID NO: 78999 - RNA, 19 nt, Homo sapiens
  misc_RNA (1)...(19): siRNA sense strand
ggagcacaccaauaacaag

SEQ ID NO: 79000 - RNA, 19 nt, Homo sapiens
  misc_RNA (1)...(19): siRNA sense strand
gagcuggaggcggaccaua

SEQ ID NO: 79001 - RNA, 19 nt, Homo sapiens
  misc_RNA (1)...(19): siRNA sense strand
cagcugcagcgaugucaug

SEQ ID NO: 79002 - RNA, 19 nt, Homo sapiens
  misc_RNA (1)...(19): siRNA sense strand
aagaggaagggaaagaaga

SEQ ID NO: 79003 - RNA, 19 nt, Homo sapiens
  misc_RNA (1)...(19): siRNA sense strand
gaacaaagauggcauucuc

SEQ ID NO: 79004 - RNA, 19 nt, Homo sapiens
  misc_RNA (1)...(19): siRNA sense strand
guacaaugcccaaauaauu

SEQ ID NO: 79005 - RNA, 19 nt, Homo sapiens
  misc_RNA (1)...(19): siRNA sense strand
gaaaagggcuccauucaag

SEQ ID NO: 79006 - RNA, 19 nt, Homo sapiens
  misc_RNA (1)...(19): siRNA sense strand
ggaaucuggugauccaauu

SEQ ID NO: 79007 - RNA, 19 nt, Homo sapiens
  misc_RNA (1)...(19): siRNA sense strand
ggcaaagcaucuaaacaaa

SEQ ID NO: 79008 - RNA, 19 nt, Homo sapiens
  misc_RNA (1)...(19): siRNA sense strand
gagaauguguuguccaucu

SEQ ID NO: 79009 - RNA, 19 nt, Homo sapiens
  misc_RNA (1)...(19): siRNA sense strand
cgaaacacguauaccagaa

SEQ ID NO: 79010 - RNA, 19 nt, Homo sapiens
  misc_RNA (1)...(19): siRNA sense strand
ccaauucccugguuuguac

SEQ ID NO: 79011 - RNA, 19 nt, Homo sapiens
  misc_RNA (1)...(19): siRNA sense strand
gguuuguacuucaucauuu

SEQ ID NO: 79012 - RNA, 19 nt, Homo sapiens
  misc_RNA (1)...(19): siRNA sense strand
ccgcagcuauuucuauuug

SEQ ID NO: 79013 - RNA, 19 nt, Homo sapiens
  misc_RNA (1)...(19): siRNA sense strand
ggaggaaauugcucagaag

SEQ ID NO: 79014 - RNA, 19 nt, Homo sapiens
  misc_RNA (1)...(19): siRNA sense strand
ccucuuauguauccugaaa

SEQ ID NO: 79015 - RNA, 19 nt, Homo sapiens
  misc_RNA (1)...(19): siRNA sense strand
ggacuccauucccaacuca

SEQ ID NO: 79016 - RNA, 19 nt, Homo sapiens
  misc_RNA (1)...(19): siRNA sense strand
ggucaacaccaccauauca

SEQ ID NO: 79017 - RNA, 19 nt, Homo sapiens
  misc_RNA (1)...(19): siRNA sense strand
accagaaucucucucaauu

SEQ ID NO: 79018 - RNA, 19 nt, Homo sapiens
  misc_RNA (1)...(19): siRNA sense strand
cuuguacaaugcccaaaua

SEQ ID NO: 79019 - RNA, 19 nt, Homo sapiens
  misc_RNA (1)...(19): siRNA sense strand
uggcaaagcaucuaaacaa

SEQ ID NO: 79020 - RNA, 19 nt, Homo sapiens
  misc_RNA (1)...(19): siRNA sense strand
ucucaauucuugcuggauu

SEQ ID NO: 79021 - RNA, 19 nt, Homo sapiens
  misc_RNA (1)...(19): siRNA sense strand
caaauaauucugucgaucu

SEQ ID NO: 79022 - RNA, 19 nt, Homo sapiens
  misc_RNA (1)...(19): siRNA sense strand
gaaacacguauaccagaau

SEQ ID NO: 79023 - RNA, 19 nt, Homo sapiens
  misc_RNA (1)...(19): siRNA sense strand
caucaacaagcauaucaaa

SEQ ID NO: 79024 - RNA, 19 nt, Homo sapiens
  misc_RNA (1)...(19): siRNA sense strand
gcaggucaacaccaccaua

SEQ ID NO: 79025 - RNA, 19 nt, Homo sapiens
  misc_RNA (1)...(19): siRNA sense strand
gcaccuuuccucuugagaa

SEQ ID NO: 79026 - RNA, 19 nt, Homo sapiens
  misc_RNA (1)...(19): siRNA sense strand
ggauacauuccaguacaua

SEQ ID NO: 79027 - RNA, 19 nt, Homo sapiens
  misc_RNA (1)...(19): siRNA sense strand
guuuguacuucaucauuug

SEQ ID NO: 79028 - RNA, 19 nt, Homo sapiens
  misc_RNA (1)...(19): siRNA sense strand
gcaaacgaaacacguauac

SEQ ID NO: 79029 - RNA, 19 nt, Homo sapiens
  misc_RNA (1)...(19): siRNA sense strand
aggaggaaauugcucagaa

SEQ ID NO: 79030 - RNA, 19 nt, Homo sapiens
  misc_RNA (1)...(19): siRNA sense strand
ccacgagccgcagcuauuu

SEQ ID NO: 79031 - RNA, 19 nt, Homo sapiens
  misc_RNA (1)...(19): siRNA sense strand
gaggaaauugcucagaaga

SEQ ID NO: 79032 - RNA, 19 nt, Homo sapiens
  misc_RNA (1)...(19): siRNA sense strand
aaacacguauaccagaauc

SEQ ID NO: 79033 - RNA, 19 nt, Homo sapiens
  misc_RNA (1)...(19): siRNA sense strand
uguuguccaucuucuuaua

SEQ ID NO: 79034 - RNA, 19 nt, Homo sapiens
  misc_RNA (1)...(19): siRNA sense strand
gcaaagcaucuaaacaaaa

SEQ ID NO: 79035 - RNA, 19 nt, Homo sapiens
  misc_RNA (1)...(19): siRNA sense strand
gcagcuauuucuauuugac

SEQ ID NO: 79036 - RNA, 19 nt, Homo sapiens
  misc_RNA (1)...(19): siRNA sense strand
gagccgcagcuauuucuau

SEQ ID NO: 79037 - RNA, 19 nt, Homo sapiens
  misc_RNA (1)...(19): siRNA sense strand
uguguuguccaucuucuua

SEQ ID NO: 79038 - RNA, 19 nt, Homo sapiens
  misc_RNA (1)...(19): siRNA sense strand
aaacgaaacacguauacca

SEQ ID NO: 79039 - RNA, 19 nt, Homo sapiens
  misc_RNA (1)...(19): siRNA sense strand
auaauucugucgaucugaa

SEQ ID NO: 79040 - RNA, 19 nt, Homo sapiens
  misc_RNA (1)...(19): siRNA sense strand
aaauaauucugucgaucug

SEQ ID NO: 79041 - RNA, 19 nt, Homo sapiens
  misc_RNA (1)...(19): siRNA sense strand
gcaguuucuuguacaaugc

SEQ ID NO: 79042 - RNA, 19 nt, Homo sapiens
  misc_RNA (1)...(19): siRNA sense strand
caaguggcaaagcaucuaa

SEQ ID NO: 79043 - RNA, 19 nt, Homo sapiens
  misc_RNA (1)...(19): siRNA sense strand
aaagggcuccauucaagaa

SEQ ID NO: 79044 - RNA, 19 nt, Homo sapiens
  misc_RNA (1)...(19): siRNA sense strand
uacaaugcccaaauaauuc

SEQ ID NO: 79045 - RNA, 19 nt, Homo sapiens
  misc_RNA (1)...(19): siRNA sense strand
caccuuuccucuugagaau

SEQ ID NO: 79046 - RNA, 19 nt, Homo sapiens
  misc_RNA (1)...(19): siRNA sense strand
cucaauucuugcuggauua

SEQ ID NO: 79047 - RNA, 19 nt, Homo sapiens
  misc_RNA (1)...(19): siRNA sense strand
caaagcaucuaaacaaaac

SEQ ID NO: 79048 - RNA, 19 nt, Homo sapiens
  misc_RNA (1)...(19): siRNA sense strand
caccauaucagucaaugug

SEQ ID NO: 79049 - RNA, 19 nt, Homo sapiens
  misc_RNA (1)...(19): siRNA sense strand
aguuggagcuucucaucaa

SEQ ID NO: 79050 - RNA, 19 nt, Homo sapiens
  misc_RNA (1)...(19): siRNA sense strand
gauccaauucccugguuug

SEQ ID NO: 79051 - RNA, 19 nt, Homo sapiens
  misc_RNA (1)...(19): siRNA sense strand
gugauccaauucccugguu

SEQ ID NO: 79052 - RNA, 19 nt, Homo sapiens
  misc_RNA (1)...(19): siRNA sense strand
acauuccaguacauagaua

SEQ ID NO: 79053 - RNA, 19 nt, Homo sapiens
  misc_RNA (1)...(19): siRNA sense strand
ccacuauuaugguguuggu

SEQ ID NO: 79054 - RNA, 19 nt, Homo sapiens
  misc_RNA (1)...(19): siRNA sense strand
uccaucuucuuauacagua

SEQ ID NO: 79055 - RNA, 19 nt, Homo sapiens
  misc_RNA (1)...(19): siRNA sense strand
ucagaggacggacuccauu

SEQ ID NO: 79056 - RNA, 19 nt, Homo sapiens
  misc_RNA (1)...(19): siRNA sense strand
gcaagcacucaacggaaug

SEQ ID NO: 79057 - RNA, 19 nt, Homo sapiens
  misc_RNA (1)...(19): siRNA sense strand
ggaugggaaucuggugauc

SEQ ID NO: 79058 - RNA, 19 nt, Homo sapiens
  misc_RNA (1)...(19): siRNA sense strand
ucacgguggccacuauuau

SEQ ID NO: 79059 - RNA, 19 nt, Homo sapiens
  misc_RNA (1)...(19): siRNA sense strand
agaauguguuguccaucuu

SEQ ID NO: 79060 - RNA, 19 nt, Homo sapiens
  misc_RNA (1)...(19): siRNA sense strand
agucuggaaugcaaacgaa

SEQ ID NO: 79061 - RNA, 19 nt, Homo sapiens
  misc_RNA (1)...(19): siRNA sense strand
gugugagucuggaaugcaa

SEQ ID NO: 79062 - RNA, 19 nt, Homo sapiens
  misc_RNA (1)...(19): siRNA sense strand
gaauguguuguccaucuuc

SEQ ID NO: 79063 - RNA, 19 nt, Homo sapiens
  misc_RNA (1)...(19): siRNA sense strand
ccaaguggcaaagcaucua

SEQ ID NO: 79064 - RNA, 19 nt, Homo sapiens
  misc_RNA (1)...(19): siRNA sense strand
ccuuuccucuugagaaugu

SEQ ID NO: 79065 - RNA, 19 nt, Homo sapiens
  misc_RNA (1)...(19): siRNA sense strand
agccgcagcuauuucuauu

SEQ ID NO: 79066 - RNA, 19 nt, Homo sapiens
  misc_RNA (1)...(19): siRNA sense strand
gagacacagccaugcaugu

SEQ ID NO: 79067 - RNA, 19 nt, Homo sapiens
  misc_RNA (1)...(19): siRNA sense strand
ugcaguuucuuguacaaug

SEQ ID NO: 79068 - RNA, 19 nt, Homo sapiens
  misc_RNA (1)...(19): siRNA sense strand
gauaucaggaugggaaucu

SEQ ID NO: 79069 - RNA, 19 nt, Homo sapiens
  misc_RNA (1)...(19): siRNA sense strand
agcaagcacucaacggaau

SEQ ID NO: 79070 - RNA, 19 nt, Homo sapiens
  misc_RNA (1)...(19): siRNA sense strand
gauacauuccaguacauag

SEQ ID NO: 79071 - RNA, 19 nt, Homo sapiens
  misc_RNA (1)...(19): siRNA sense strand
caggucaacaccaccauau

SEQ ID NO: 79072 - RNA, 19 nt, Homo sapiens
  misc_RNA (1)...(19): siRNA sense strand
gggaaucuggugauccaau

SEQ ID NO: 79073 - RNA, 19 nt, Homo sapiens
  misc_RNA (1)...(19): siRNA sense strand
gggcuccauucaagaaguc

SEQ ID NO: 79074 - RNA, 19 nt, Homo sapiens
  misc_RNA (1)...(19): siRNA sense strand
uggagcuucucaucaacaa

SEQ ID NO: 79075 - RNA, 19 nt, Homo sapiens
  misc_RNA (1)...(19): siRNA sense strand
ugauccaauucccugguuu

SEQ ID NO: 79076 - RNA, 19 nt, Homo sapiens
  misc_RNA (1)...(19): siRNA sense strand
cuucaucauuugccaacug

SEQ ID NO: 79077 - RNA, 19 nt, Homo sapiens
  misc_RNA (1)...(19): siRNA sense strand
gucaugggccuaccuccaa

SEQ ID NO: 79078 - RNA, 19 nt, Homo sapiens
  misc_RNA (1)...(19): siRNA sense strand
uaccagaaucucucucaau

SEQ ID NO: 79079 - RNA, 19 nt, Homo sapiens
  misc_RNA (1)...(19): siRNA sense strand
cccaaauaauucugucgau

SEQ ID NO: 79080 - RNA, 19 nt, Homo sapiens
  misc_RNA (1)...(19): siRNA sense strand
ccaucuucuuauacaguaa

SEQ ID NO: 79081 - RNA, 19 nt, Homo sapiens
  misc_RNA (1)...(19): siRNA sense strand
cauagauacaagcaccuuu

SEQ ID NO: 79082 - RNA, 19 nt, Homo sapiens
  misc_RNA (1)...(19): siRNA sense strand
auacauuccaguacauaga

SEQ ID NO: 79083 - RNA, 19 nt, Homo sapiens
  misc_RNA (1)...(19): siRNA sense strand
ucacacacguccauguuua

SEQ ID NO: 79084 - RNA, 19 nt, Homo sapiens
  misc_RNA (1)...(19): siRNA sense strand
ccaacuaccugcuggagaa

SEQ ID NO: 79085 - RNA, 19 nt, Homo sapiens
  misc_RNA (1)...(19): siRNA sense strand
acacguccauguuuaucua

SEQ ID NO: 79086 - RNA, 19 nt, Homo sapiens
  misc_RNA (1)...(19): siRNA sense strand
ggaggcagccgcagugaau

SEQ ID NO: 79087 - RNA, 19 nt, Homo sapiens
  misc_RNA (1)...(19): siRNA sense strand
ggagaacgacacaggcauu

SEQ ID NO: 79088 - RNA, 19 nt, Homo sapiens
  misc_RNA (1)...(19): siRNA sense strand
ggccuucucugccuucuuc

SEQ ID NO: 79089 - RNA, 19 nt, Homo sapiens
  misc_RNA (1)...(19): siRNA sense strand
gaaccugaccaaccugauc

SEQ ID NO: 79090 - RNA, 19 nt, Homo sapiens
  misc_RNA (1)...(19): siRNA sense strand
cuucuacacuguggacuuu

SEQ ID NO: 79091 - RNA, 19 nt, Homo sapiens
  misc_RNA (1)...(19): siRNA sense strand
aacaggcgcuucaggaugu

SEQ ID NO: 79092 - RNA, 19 nt, Homo sapiens
  misc_RNA (1)...(19): siRNA sense strand
gaugcugguucuucacaca

SEQ ID NO: 79093 - RNA, 19 nt, Homo sapiens
  misc_RNA (1)...(19): siRNA sense strand
ccucuacccagaucacuuu

SEQ ID NO: 79094 - RNA, 19 nt, Homo sapiens
  misc_RNA (1)...(19): siRNA sense strand
ggaugugcccaaagagaga

SEQ ID NO: 79095 - RNA, 19 nt, Homo sapiens
  misc_RNA (1)...(19): siRNA sense strand
uuucugggcucuucagcuu

SEQ ID NO: 79096 - RNA, 19 nt, Homo sapiens
  misc_RNA (1)...(19): siRNA sense strand
ccauguuuaucuacaagug

SEQ ID NO: 79097 - RNA, 19 nt, Homo sapiens
  misc_RNA (1)...(19): siRNA sense strand
gcgcaagggcacagacuuc

SEQ ID NO: 79098 - RNA, 19 nt, Homo sapiens
  misc_RNA (1)...(19): siRNA sense strand
ccagaucacuuuugagaca

SEQ ID NO: 79099 - RNA, 19 nt, Homo sapiens
  misc_RNA (1)...(19): siRNA sense strand
gagaacgacacaggcauug

SEQ ID NO: 79100 - RNA, 19 nt, Homo sapiens
  misc_RNA (1)...(19): siRNA sense strand
ggccagcacuaccgagucu

SEQ ID NO: 79101 - RNA, 19 nt, Homo sapiens
  misc_RNA (1)...(19): siRNA sense strand
ccacagcuuccucugcuau

SEQ ID NO: 79102 - RNA, 19 nt, Homo sapiens
  misc_RNA (1)...(19): siRNA sense strand
ucccgaugcucuuucaaug

SEQ ID NO: 79103 - RNA, 19 nt, Homo sapiens
  misc_RNA (1)...(19): siRNA sense strand
gaacuuuguggccuucucu

SEQ ID NO: 79104 - RNA, 19 nt, Homo sapiens
  misc_RNA (1)...(19): siRNA sense strand
cagccagagucuuguugga

SEQ ID NO: 79105 - RNA, 19 nt, Homo sapiens
  misc_RNA (1)...(19): siRNA sense strand
ccuggaugcugguucuuca

SEQ ID NO: 79106 - RNA, 19 nt, Homo sapiens
  misc_RNA (1)...(19): siRNA sense strand
gcggcgugaucuuccagaa

SEQ ID NO: 79107 - RNA, 19 nt, Homo sapiens
  misc_RNA (1)...(19): siRNA sense strand
gcugggugacugccaacua

SEQ ID NO: 79108 - RNA, 19 nt, Homo sapiens
  misc_RNA (1)...(19): siRNA sense strand
uucaggaugugcccaaaga

SEQ ID NO: 79109 - RNA, 19 nt, Homo sapiens
  misc_RNA (1)...(19): siRNA sense strand
caggaugugcccaaagaga

SEQ ID NO: 79110 - RNA, 19 nt, Homo sapiens
  misc_RNA (1)...(19): siRNA sense strand
ggaacuuuguggccuucuc

SEQ ID NO: 79111 - RNA, 19 nt, Homo sapiens
  misc_RNA (1)...(19): siRNA sense strand
cuacccagaucacuuuuga

SEQ ID NO: 79112 - RNA, 19 nt, Homo sapiens
  misc_RNA (1)...(19): siRNA sense strand
cgaacaggcgcuucaggau

SEQ ID NO: 79113 - RNA, 19 nt, Homo sapiens
  misc_RNA (1)...(19): siRNA sense strand
cguccauguuuaucuacaa

SEQ ID NO: 79114 - RNA, 19 nt, Homo sapiens
  misc_RNA (1)...(19): siRNA sense strand
cauccucucgggccaagaa

SEQ ID NO: 79115 - RNA, 19 nt, Homo sapiens
  misc_RNA (1)...(19): siRNA sense strand
cagagaaacucccacguua

SEQ ID NO: 79116 - RNA, 19 nt, Homo sapiens
  misc_RNA (1)...(19): siRNA sense strand
gaaggugaaagaaguauuu

SEQ ID NO: 79117 - RNA, 19 nt, Homo sapiens
  misc_RNA (1)...(19): siRNA sense strand
gaagucacguacaggguuu

SEQ ID NO: 79118 - RNA, 19 nt, Homo sapiens
  misc_RNA (1)...(19): siRNA sense strand
ccuacaagcucuauuccua

SEQ ID NO: 79119 - RNA, 19 nt, Homo sapiens
  misc_RNA (1)...(19): siRNA sense strand
guacacgucuuccaguuca

SEQ ID NO: 79120 - RNA, 19 nt, Homo sapiens
  misc_RNA (1)...(19): siRNA sense strand
aaagguauccguuaugaaa

SEQ ID NO: 79121 - RNA, 19 nt, Homo sapiens
  misc_RNA (1)...(19): siRNA sense strand
gcagaaggugaaagaagua

SEQ ID NO: 79122 - RNA, 19 nt, Homo sapiens
  misc_RNA (1)...(19): siRNA sense strand
ggucagcccuugcuugucu

SEQ ID NO: 79123 - RNA, 19 nt, Homo sapiens
  misc_RNA (1)...(19): siRNA sense strand
gaguacacgucuuccaguu

SEQ ID NO: 79124 - RNA, 19 nt, Homo sapiens
  misc_RNA (1)...(19): siRNA sense strand
gcauggaccucaccuacgu

SEQ ID NO: 79125 - RNA, 19 nt, Homo sapiens
  misc_RNA (1)...(19): siRNA sense strand
ccacgaaaccuucaaagca

SEQ ID NO: 79126 - RNA, 19 nt, Homo sapiens
  misc_RNA (1)...(19): siRNA sense strand
ggaccuacaagcucuauuc

SEQ ID NO: 79127 - RNA, 19 nt, Homo sapiens
  misc_RNA (1)...(19): siRNA sense strand
guuaugaaacuuccagaaa

SEQ ID NO: 79128 - RNA, 19 nt, Homo sapiens
  misc_RNA (1)...(19): siRNA sense strand
gcacgguccuuggcaaaca

SEQ ID NO: 79129 - RNA, 19 nt, Homo sapiens
  misc_RNA (1)...(19): siRNA sense strand
aaagagcgcucagggaauc

SEQ ID NO: 79130 - RNA, 19 nt, Homo sapiens
  misc_RNA (1)...(19): siRNA sense strand
gagaaaaggcccagaaguu

SEQ ID NO: 79131 - RNA, 19 nt, Homo sapiens
  misc_RNA (1)...(19): siRNA sense strand
cauguggacuucuaugcuu

SEQ ID NO: 79132 - RNA, 19 nt, Homo sapiens
  misc_RNA (1)...(19): siRNA sense strand
ccagagaaacucccacguu

SEQ ID NO: 79133 - RNA, 19 nt, Homo sapiens
  misc_RNA (1)...(19): siRNA sense strand
gaagaguccagccucauag

SEQ ID NO: 79134 - RNA, 19 nt, Homo sapiens
  misc_RNA (1)...(19): siRNA sense strand
gagaaacucccacguuaac

SEQ ID NO: 79135 - RNA, 19 nt, Homo sapiens
  misc_RNA (1)...(19): siRNA sense strand
gaagcucacucggaaaauu

SEQ ID NO: 79136 - RNA, 19 nt, Homo sapiens
  misc_RNA (1)...(19): siRNA sense strand
cggaggaagugaagcaugu

SEQ ID NO: 79137 - RNA, 19 nt, Homo sapiens
  misc_RNA (1)...(19): siRNA sense strand
agaagaguccagccucaua

SEQ ID NO: 79138 - RNA, 19 nt, Homo sapiens
  misc_RNA (1)...(19): siRNA sense strand
ucuacgggaucauguuuga

SEQ ID NO: 79139 - RNA, 19 nt, Homo sapiens
  misc_RNA (1)...(19): siRNA sense strand
ggugugggccucauagaug

SEQ ID NO: 79140 - RNA, 19 nt, Homo sapiens
  misc_RNA (1)...(19): siRNA sense strand
gcacaggacggaggaagug

SEQ ID NO: 79141 - RNA, 19 nt, Homo sapiens
  misc_RNA (1)...(19): siRNA sense strand
ugacuguguuuccaucaug

SEQ ID NO: 79142 - RNA, 19 nt, Homo sapiens
  misc_RNA (1)...(19): siRNA sense strand
ugacggcacugcggauguu

SEQ ID NO: 79143 - RNA, 19 nt, Homo sapiens
  misc_RNA (1)...(19): siRNA sense strand
gaacagaugaaggcguuuc

SEQ ID NO: 79144 - RNA, 19 nt, Homo sapiens
  misc_RNA (1)...(19): siRNA sense strand
ccucauagaugcggagaag

SEQ ID NO: 79145 - RNA, 19 nt, Homo sapiens
  misc_RNA (1)...(19): siRNA sense strand
ucuaugcuuucuccuacua

SEQ ID NO: 79146 - RNA, 19 nt, Homo sapiens
  misc_RNA (1)...(19): siRNA sense strand
ggacggaggaagugaagca

SEQ ID NO: 79147 - RNA, 19 nt, Homo sapiens
  misc_RNA (1)...(19): siRNA sense strand
ugucagagguccuucaaaa

SEQ ID NO: 79148 - RNA, 19 nt, Homo sapiens
  misc_RNA (1)...(19): siRNA sense strand
ggcggaggauccacucaga

SEQ ID NO: 79149 - RNA, 19 nt, Homo sapiens
  misc_RNA (1)...(19): siRNA sense strand
agagaaacucccacguuaa

SEQ ID NO: 79150 - RNA, 19 nt, Homo sapiens
  misc_RNA (1)...(19): siRNA sense strand
gacuguguuuccaucauga

SEQ ID NO: 79151 - RNA, 19 nt, Homo sapiens
  misc_RNA (1)...(19): siRNA sense strand
agaaguuacugcagaaggu

SEQ ID NO: 79152 - RNA, 19 nt, Homo sapiens
  misc_RNA (1)...(19): siRNA sense strand
agaaaaggcccagaaguua

SEQ ID NO: 79153 - RNA, 19 nt, Homo sapiens
  misc_RNA (1)...(19): siRNA sense strand
gaacuacuggauguugcua

SEQ ID NO: 79154 - RNA, 19 nt, Homo sapiens
  misc_RNA (1)...(19): siRNA sense strand
cggcguggaucaccaucaa

SEQ ID NO: 79155 - RNA, 19 nt, Homo sapiens
  misc_RNA (1)...(19): siRNA sense strand
ggcaaacaaggaugagaaa

SEQ ID NO: 79156 - RNA, 19 nt, Homo sapiens
  misc_RNA (1)...(19): siRNA sense strand
ugcagaaggugaaagaagu

SEQ ID NO: 79157 - RNA, 19 nt, Homo sapiens
  misc_RNA (1)...(19): siRNA sense strand
aagcaucgccuuuccuugu

SEQ ID NO: 79158 - RNA, 19 nt, Homo sapiens
  misc_RNA (1)...(19): siRNA sense strand
cgagaucgcagccaaguac

SEQ ID NO: 79159 - RNA, 19 nt, Homo sapiens
  misc_RNA (1)...(19): siRNA sense strand
ugccuaugcugaugauguu

SEQ ID NO: 79160 - RNA, 19 nt, Homo sapiens
  misc_RNA (1)...(19): siRNA sense strand
acuacuggauguugcuaaa

SEQ ID NO: 79161 - RNA, 19 nt, Homo sapiens
  misc_RNA (1)...(19): siRNA sense strand
cccagaaguuacugcagaa

SEQ ID NO: 79162 - RNA, 19 nt, Homo sapiens
  misc_RNA (1)...(19): siRNA sense strand
uacaagcucuauuccuaca

SEQ ID NO: 79163 - RNA, 19 nt, Homo sapiens
  misc_RNA (1)...(19): siRNA sense strand
gcaucgccuuuccuuguag

SEQ ID NO: 79164 - RNA, 19 nt, Homo sapiens
  misc_RNA (1)...(19): siRNA sense strand
uaugcuuucuccuacuauu

SEQ ID NO: 79165 - RNA, 19 nt, Homo sapiens
  misc_RNA (1)...(19): siRNA sense strand
caucaugaacggaacagau

SEQ ID NO: 79166 - RNA, 19 nt, Homo sapiens
  misc_RNA (1)...(19): siRNA sense strand
cggcacugcggauguuuaa

SEQ ID NO: 79167 - RNA, 19 nt, Homo sapiens
  misc_RNA (1)...(19): siRNA sense strand
agcaucgccuuuccuugua

SEQ ID NO: 79168 - RNA, 19 nt, Homo sapiens
  misc_RNA (1)...(19): siRNA sense strand
ccacucagaucgccuuccu

SEQ ID NO: 79169 - RNA, 19 nt, Homo sapiens
  misc_RNA (1)...(19): siRNA sense strand
uggcaaacaaggaugagaa

SEQ ID NO: 79170 - RNA, 19 nt, Homo sapiens
  misc_RNA (1)...(19): siRNA sense strand
gguauccguuaugaaacuu

SEQ ID NO: 79171 - RNA, 19 nt, Homo sapiens
  misc_RNA (1)...(19): siRNA sense strand
uugcuugucucccaguuuc

SEQ ID NO: 79172 - RNA, 19 nt, Homo sapiens
  misc_RNA (1)...(19): siRNA sense strand
guggaucaccaucaacuuc

SEQ ID NO: 79173 - RNA, 19 nt, Homo sapiens
  misc_RNA (1)...(19): siRNA sense strand
gugugggcguguucaucua

SEQ ID NO: 79174 - RNA, 19 nt, Homo sapiens
  misc_RNA (1)...(19): siRNA sense strand
acgcagaagucacguacag

SEQ ID NO: 79175 - RNA, 19 nt, Homo sapiens
  misc_RNA (1)...(19): siRNA sense strand
gaaaaggcccagaaguuac

SEQ ID NO: 79176 - RNA, 19 nt, Homo sapiens
  misc_RNA (1)...(19): siRNA sense strand
caucgacucccugaacaga

SEQ ID NO: 79177 - RNA, 19 nt, Homo sapiens
  misc_RNA (1)...(19): siRNA sense strand
uacaucgacucccugaaca

SEQ ID NO: 79178 - RNA, 19 nt, Homo sapiens
  misc_RNA (1)...(19): siRNA sense strand
gggaauccgggaacuacug

SEQ ID NO: 79179 - RNA, 19 nt, Homo sapiens
  misc_RNA (1)...(19): siRNA sense strand
ucgacucccugaacagaca

SEQ ID NO: 79180 - RNA, 19 nt, Homo sapiens
  misc_RNA (1)...(19): siRNA sense strand
cuaaggauggaaaggaguu

SEQ ID NO: 79181 - RNA, 19 nt, Homo sapiens
  misc_RNA (1)...(19): siRNA sense strand
gcacccgaguacacgucuu

SEQ ID NO: 79182 - RNA, 19 nt, Homo sapiens
  misc_RNA (1)...(19): siRNA sense strand
cuaugcugaugauguugaa

SEQ ID NO: 79183 - RNA, 19 nt, Homo sapiens
  misc_RNA (1)...(19): siRNA sense strand
cagcacgguccuuggcaaa

SEQ ID NO: 79184 - RNA, 19 nt, Homo sapiens
  misc_RNA (1)...(19): siRNA sense strand
caugaacggaacagaugaa

SEQ ID NO: 79185 - RNA, 19 nt, Homo sapiens
  misc_RNA (1)...(19): siRNA sense strand
gaaauuuccuggagaagaa

SEQ ID NO: 79186 - RNA, 19 nt, Homo sapiens
  misc_RNA (1)...(19): siRNA sense strand
ggaaugaggcugagaagaa

SEQ ID NO: 79187 - RNA, 19 nt, Homo sapiens
  misc_RNA (1)...(19): siRNA sense strand
gauuacagccaacuauuua

SEQ ID NO: 79188 - RNA, 19 nt, Homo sapiens
  misc_RNA (1)...(19): siRNA sense strand
gcagaauucuccuaccaaa

SEQ ID NO: 79189 - RNA, 19 nt, Homo sapiens
  misc_RNA (1)...(19): siRNA sense strand
ggacugaaguaugguauug

SEQ ID NO: 79190 - RNA, 19 nt, Homo sapiens
  misc_RNA (1)...(19): siRNA sense strand
agucaaaccuucaaaugua

SEQ ID NO: 79191 - RNA, 19 nt, Homo sapiens
  misc_RNA (1)...(19): siRNA sense strand
gaaccacagucuacgugua

SEQ ID NO: 79192 - RNA, 19 nt, Homo sapiens
  misc_RNA (1)...(19): siRNA sense strand
gcaaugcuccugcagaauu

SEQ ID NO: 79193 - RNA, 19 nt, Homo sapiens
  misc_RNA (1)...(19): siRNA sense strand
cuacacagccagugcuuua

SEQ ID NO: 79194 - RNA, 19 nt, Homo sapiens
  misc_RNA (1)...(19): siRNA sense strand
ggauuacagccaacuauuu

SEQ ID NO: 79195 - RNA, 19 nt, Homo sapiens
  misc_RNA (1)...(19): siRNA sense strand
gaaugaggcugagaagaag

SEQ ID NO: 79196 - RNA, 19 nt, Homo sapiens
  misc_RNA (1)...(19): siRNA sense strand
cuucaaagcuugccaugau

SEQ ID NO: 79197 - RNA, 19 nt, Homo sapiens
  misc_RNA (1)...(19): siRNA sense strand
ugaaacagcagcuaaugaa

SEQ ID NO: 79198 - RNA, 19 nt, Homo sapiens
  misc_RNA (1)...(19): siRNA sense strand
cauagaaccaccugucuuu

SEQ ID NO: 79199 - RNA, 19 nt, Homo sapiens
  misc_RNA (1)...(19): siRNA sense strand
gaacaccagcgacaucaug

SEQ ID NO: 79200 - RNA, 19 nt, Homo sapiens
  misc_RNA (1)...(19): siRNA sense strand
gccagugcuuuaaaucuuu

SEQ ID NO: 79201 - RNA, 19 nt, Homo sapiens
  misc_RNA (1)...(19): siRNA sense strand
cuacaucuaccacuuguuu

SEQ ID NO: 79202 - RNA, 19 nt, Homo sapiens
  misc_RNA (1)...(19): siRNA sense strand
ccaacuacaucuaccacuu

SEQ ID NO: 79203 - RNA, 19 nt, Homo sapiens
  misc_RNA (1)...(19): siRNA sense strand
ugugaacgguuacaaauuc

SEQ ID NO: 79204 - RNA, 19 nt, Homo sapiens
  misc_RNA (1)...(19): siRNA sense strand
cuaaugaaguccuugaaag

SEQ ID NO: 79205 - RNA, 19 nt, Homo sapiens
  misc_RNA (1)...(19): siRNA sense strand
gauuauagcaucagcuuca

SEQ ID NO: 79206 - RNA, 19 nt, Homo sapiens
  misc_RNA (1)...(19): siRNA sense strand
gugaaaggcucuggaaucu

SEQ ID NO: 79207 - RNA, 19 nt, Homo sapiens
  misc_RNA (1)...(19): siRNA sense strand
guauauggauggauuacag

SEQ ID NO: 79208 - RNA, 19 nt, Homo sapiens
  misc_RNA (1)...(19): siRNA sense strand
gaccagaggccagaaaguu

SEQ ID NO: 79209 - RNA, 19 nt, Homo sapiens
  misc_RNA (1)...(19): siRNA sense strand
gcuaaugaaguccuugaaa

SEQ ID NO: 79210 - RNA, 19 nt, Homo sapiens
  misc_RNA (1)...(19): siRNA sense strand
ccaacuauuuaaugggaaa

SEQ ID NO: 79211 - RNA, 19 nt, Homo sapiens
  misc_RNA (1)...(19): siRNA sense strand
guuuaucagccaaagauua

SEQ ID NO: 79212 - RNA, 19 nt, Homo sapiens
  misc_RNA (1)...(19): siRNA sense strand
caacuacaucuaccacuug

SEQ ID NO: 79213 - RNA, 19 nt, Homo sapiens
  misc_RNA (1)...(19): siRNA sense strand
uggcaaugcuccugcagaa

SEQ ID NO: 79214 - RNA, 19 nt, Homo sapiens
  misc_RNA (1)...(19): siRNA sense strand
gcauaccuguguucagcaa

SEQ ID NO: 79215 - RNA, 19 nt, Homo sapiens
  misc_RNA (1)...(19): siRNA sense strand
uauacacgcucuacacaca

SEQ ID NO: 79216 - RNA, 19 nt, Homo sapiens
  misc_RNA (1)...(19): siRNA sense strand
gcacuccgagcaugccuuu

SEQ ID NO: 79217 - RNA, 19 nt, Homo sapiens
  misc_RNA (1)...(19): siRNA sense strand
ucccagcccuuugacuuua

SEQ ID NO: 79218 - RNA, 19 nt, Homo sapiens
  misc_RNA (1)...(19): siRNA sense strand
ccaaauuugaugagguaua

SEQ ID NO: 79219 - RNA, 19 nt, Homo sapiens
  misc_RNA (1)...(19): siRNA sense strand
gcacccgcauggaguggaa

SEQ ID NO: 79220 - RNA, 19 nt, Homo sapiens
  misc_RNA (1)...(19): siRNA sense strand
caaugcuccugcagaauuc

SEQ ID NO: 79221 - RNA, 19 nt, Homo sapiens
  misc_RNA (1)...(19): siRNA sense strand
gcuugugaguauuguggua

SEQ ID NO: 79222 - RNA, 19 nt, Homo sapiens
  misc_RNA (1)...(19): siRNA sense strand
gauuaaagggccauuugug

SEQ ID NO: 79223 - RNA, 19 nt, Homo sapiens
  misc_RNA (1)...(19): siRNA sense strand
ccuguuacccucgggauua

SEQ ID NO: 79224 - RNA, 19 nt, Homo sapiens
  misc_RNA (1)...(19): siRNA sense strand
uugaaagcauccaaagcua

SEQ ID NO: 79225 - RNA, 19 nt, Homo sapiens
  misc_RNA (1)...(19): siRNA sense strand
ggacccaucucuguguaag

SEQ ID NO: 79226 - RNA, 19 nt, Homo sapiens
  misc_RNA (1)...(19): siRNA sense strand
gaaagcauccaaagcuacu

SEQ ID NO: 79227 - RNA, 19 nt, Homo sapiens
  misc_RNA (1)...(19): siRNA sense strand
gcuuuaaaucuuucaggua

SEQ ID NO: 79228 - RNA, 19 nt, Homo sapiens
  misc_RNA (1)...(19): siRNA sense strand
agaaccaccugucuuugug

SEQ ID NO: 79229 - RNA, 19 nt, Homo sapiens
  misc_RNA (1)...(19): siRNA sense strand
aaacagcagcuaaugaagu

SEQ ID NO: 79230 - RNA, 19 nt, Homo sapiens
  misc_RNA (1)...(19): siRNA sense strand
gaacgguuacaaauucaca

SEQ ID NO: 79231 - RNA, 19 nt, Homo sapiens
  misc_RNA (1)...(19): siRNA sense strand
gaaacagcagcuaaugaag

SEQ ID NO: 79232 - RNA, 19 nt, Homo sapiens
  misc_RNA (1)...(19): siRNA sense strand
cacccucgcuuucuucaca

SEQ ID NO: 79233 - RNA, 19 nt, Homo sapiens
  misc_RNA (1)...(19): siRNA sense strand
ccagaggccagaaaguuau

SEQ ID NO: 79234 - RNA, 19 nt, Homo sapiens
  misc_RNA (1)...(19): siRNA sense strand
ucagucaaaccuucaaaug

SEQ ID NO: 79235 - RNA, 19 nt, Homo sapiens
  misc_RNA (1)...(19): siRNA sense strand
ucagcaaccagaagaaaga

SEQ ID NO: 79236 - RNA, 19 nt, Homo sapiens
  misc_RNA (1)...(19): siRNA sense strand
cagcauagccuggucucuu

SEQ ID NO: 79237 - RNA, 19 nt, Homo sapiens
  misc_RNA (1)...(19): siRNA sense strand
gucaaaccuucaaauguag

SEQ ID NO: 79238 - RNA, 19 nt, Homo sapiens
  misc_RNA (1)...(19): siRNA sense strand
acacagccagugcuuuaaa

SEQ ID NO: 79239 - RNA, 19 nt, Homo sapiens
  misc_RNA (1)...(19): siRNA sense strand
gaacuccaaccaucauugc

SEQ ID NO: 79240 - RNA, 19 nt, Homo sapiens
  misc_RNA (1)...(19): siRNA sense strand
ccagugcuauggccggaau

SEQ ID NO: 79241 - RNA, 19 nt, Homo sapiens
  misc_RNA (1)...(19): siRNA sense strand
ggucuugcuugugaguauu

SEQ ID NO: 79242 - RNA, 19 nt, Homo sapiens
  misc_RNA (1)...(19): siRNA sense strand
gggauuauagcaucagcuu

SEQ ID NO: 79243 - RNA, 19 nt, Homo sapiens
  misc_RNA (1)...(19): siRNA sense strand
cagucuacguguaucaaug

SEQ ID NO: 79244 - RNA, 19 nt, Homo sapiens
  misc_RNA (1)...(19): siRNA sense strand
cacagccagugcuuuaaau

SEQ ID NO: 79245 - RNA, 19 nt, Homo sapiens
  misc_RNA (1)...(19): siRNA sense strand
uugguggucuugcuuguga

SEQ ID NO: 79246 - RNA, 19 nt, Homo sapiens
  misc_RNA (1)...(19): siRNA sense strand
cuccaggacugaaguaugg

SEQ ID NO: 79247 - RNA, 19 nt, Homo sapiens
  misc_RNA (1)...(19): siRNA sense strand
agcauagccuggucucuug

SEQ ID NO: 79248 - RNA, 19 nt, Homo sapiens
  misc_RNA (1)...(19): siRNA sense strand
accagaggccagaaaguua

SEQ ID NO: 79249 - RNA, 19 nt, Homo sapiens
  misc_RNA (1)...(19): siRNA sense strand
gucccuguauggcuacgua

SEQ ID NO: 79250 - RNA, 19 nt, Homo sapiens
  misc_RNA (1)...(19): siRNA sense strand
gcaagaagaagggguauau

SEQ ID NO: 79251 - RNA, 19 nt, Homo sapiens
  misc_RNA (1)...(19): siRNA sense strand
cagucaaaccuucaaaugu

SEQ ID NO: 79252 - RNA, 19 nt, Homo sapiens
  misc_RNA (1)...(19): siRNA sense strand
agccagugcuuuaaaucuu

SEQ ID NO: 79253 - RNA, 19 nt, Homo sapiens
  misc_RNA (1)...(19): siRNA sense strand
acagccaacuauuuaaugg

SEQ ID NO: 79254 - RNA, 19 nt, Homo sapiens
  misc_RNA (1)...(19): siRNA sense strand
aacagcagcuaaugaaguc

SEQ ID NO: 79255 - RNA, 19 nt, Homo sapiens
  misc_RNA (1)...(19): siRNA sense strand
ggaugcgcuugcugagguu

SEQ ID NO: 79256 - RNA, 19 nt, Homo sapiens
  misc_RNA (1)...(19): siRNA sense strand
uagaaccaccugucuuugu

SEQ ID NO: 79257 - RNA, 19 nt, Homo sapiens
  misc_RNA (1)...(19): siRNA sense strand
ccagugcuuuaaaucuuuc

SEQ ID NO: 79258 - RNA, 19 nt, Homo sapiens
  misc_RNA (1)...(19): siRNA sense strand
aagauuaaagggccauuug

SEQ ID NO: 79259 - RNA, 19 nt, Homo sapiens
  misc_RNA (1)...(19): siRNA sense strand
cagaggccagaaaguuaua

SEQ ID NO: 79260 - RNA, 19 nt, Homo sapiens
  misc_RNA (1)...(19): siRNA sense strand
ugucaucacuuuugaagga

SEQ ID NO: 79261 - RNA, 19 nt, Homo sapiens
  misc_RNA (1)...(19): siRNA sense strand
guucagcaaccagaagaaa

SEQ ID NO: 79262 - RNA, 19 nt, Homo sapiens
  misc_RNA (1)...(19): siRNA sense strand
gcucacagaauuggaguca

SEQ ID NO: 79263 - RNA, 19 nt, Homo sapiens
  misc_RNA (1)...(19): siRNA sense strand
ggguuuaucagccaaagau

SEQ ID NO: 79264 - RNA, 19 nt, Homo sapiens
  misc_RNA (1)...(19): siRNA sense strand
ucaaauguagugugaaagg

SEQ ID NO: 79265 - RNA, 19 nt, Homo sapiens
  misc_RNA (1)...(19): siRNA sense strand
aaccagaucccagcugaaa

SEQ ID NO: 79266 - RNA, 19 nt, Homo sapiens
  misc_RNA (1)...(19): siRNA sense strand
guaucacugucauccagau

SEQ ID NO: 79267 - RNA, 19 nt, Homo sapiens
  misc_RNA (1)...(19): siRNA sense strand
ucugauccgucugcccaua

SEQ ID NO: 79268 - RNA, 19 nt, Homo sapiens
  misc_RNA (1)...(19): siRNA sense strand
cgaacuccaaccaucauug

SEQ ID NO: 79269 - RNA, 19 nt, Homo sapiens
  misc_RNA (1)...(19): siRNA sense strand
aagguggcuuccauauuug

SEQ ID NO: 79270 - RNA, 19 nt, Homo sapiens
  misc_RNA (1)...(19): siRNA sense strand
gauggauuacagccaacua

SEQ ID NO: 79271 - RNA, 19 nt, Homo sapiens
  misc_RNA (1)...(19): siRNA sense strand
ugugaaaggcucuggaauc

SEQ ID NO: 79272 - RNA, 19 nt, Homo sapiens
  misc_RNA (1)...(19): siRNA sense strand
ccauagaaccaccugucuu

SEQ ID NO: 79273 - RNA, 19 nt, Homo sapiens
  misc_RNA (1)...(19): siRNA sense strand
acugaaguaugguauugug

SEQ ID NO: 79274 - RNA, 19 nt, Homo sapiens
  misc_RNA (1)...(19): siRNA sense strand
ggaccagaggccagaaagu

SEQ ID NO: 79275 - RNA, 19 nt, Homo sapiens
  misc_RNA (1)...(19): siRNA sense strand
gaagaagggguauauggau

SEQ ID NO: 79276 - RNA, 19 nt, Homo sapiens
  misc_RNA (1)...(19): siRNA sense strand
gucccagcccuuugacuuu

SEQ ID NO: 79277 - RNA, 19 nt, Homo sapiens
  misc_RNA (1)...(19): siRNA sense strand
aaaugaaacagcagcuaau

SEQ ID NO: 79278 - RNA, 19 nt, Homo sapiens
  misc_RNA (1)...(19): siRNA sense strand
ucaaagcuugccaugauca

SEQ ID NO: 79279 - RNA, 19 nt, Homo sapiens
  misc_RNA (1)...(19): siRNA sense strand
accaugcaguggauucuga

SEQ ID NO: 79280 - RNA, 19 nt, Homo sapiens
  misc_RNA (1)...(19): siRNA sense strand
gaaaccuguucuuuugaug

SEQ ID NO: 79281 - RNA, 19 nt, Homo sapiens
  misc_RNA (1)...(19): siRNA sense strand
cagcuaaugaaguccuuga

SEQ ID NO: 79282 - RNA, 19 nt, Homo sapiens
  misc_RNA (1)...(19): siRNA sense strand
guauaugcccgcucuuacu

SEQ ID NO: 79283 - RNA, 19 nt, Homo sapiens
  misc_RNA (1)...(19): siRNA sense strand
gguauaugcccgcucuuac

SEQ ID NO: 79284 - RNA, 19 nt, Homo sapiens
  misc_RNA (1)...(19): siRNA sense strand
ucauccagauccacaagca

SEQ ID NO: 79285 - RNA, 19 nt, Homo sapiens
  misc_RNA (1)...(19): siRNA sense strand
gaacucgaauucauguuua

SEQ ID NO: 79286 - RNA, 19 nt, Homo sapiens
  misc_RNA (1)...(19): siRNA sense strand
acacagacaugauugauua

SEQ ID NO: 79287 - RNA, 19 nt, Homo sapiens
  misc_RNA (1)...(19): siRNA sense strand
gaagucaccuuuccuggua

SEQ ID NO: 79288 - RNA, 19 nt, Homo sapiens
  misc_RNA (1)...(19): siRNA sense strand
uaaaggagaucuucaggaa

SEQ ID NO: 79289 - RNA, 19 nt, Homo sapiens
  misc_RNA (1)...(19): siRNA sense strand
ccagagagguuccuucuau

SEQ ID NO: 79290 - RNA, 19 nt, Homo sapiens
  misc_RNA (1)...(19): siRNA sense strand
caaagaaagugaacaacau

SEQ ID NO: 79291 - RNA, 19 nt, Homo sapiens
  misc_RNA (1)...(19): siRNA sense strand
ccaaggcucugcucuuuga

SEQ ID NO: 79292 - RNA, 19 nt, Homo sapiens
  misc_RNA (1)...(19): siRNA sense strand
ggacugaugggcacacuuu

SEQ ID NO: 79293 - RNA, 19 nt, Homo sapiens
  misc_RNA (1)...(19): siRNA sense strand
gaauucauguuuacaccuu

SEQ ID NO: 79294 - RNA, 19 nt, Homo sapiens
  misc_RNA (1)...(19): siRNA sense strand
ggaacucgaauucauguuu

SEQ ID NO: 79295 - RNA, 19 nt, Homo sapiens
  misc_RNA (1)...(19): siRNA sense strand
gaagcagaguggaucuuug

SEQ ID NO: 79296 - RNA, 19 nt, Homo sapiens
  misc_RNA (1)...(19): siRNA sense strand
gaggguaucuuccugucuu

SEQ ID NO: 79297 - RNA, 19 nt, Homo sapiens
  misc_RNA (1)...(19): siRNA sense strand
gcucugcucuuugagguaa

SEQ ID NO: 79298 - RNA, 19 nt, Homo sapiens
  misc_RNA (1)...(19): siRNA sense strand
ccagggaagugugugauaa

SEQ ID NO: 79299 - RNA, 19 nt, Homo sapiens
  misc_RNA (1)...(19): siRNA sense strand
ugaccgagcuguugacaca

SEQ ID NO: 79300 - RNA, 19 nt, Homo sapiens
  misc_RNA (1)...(19): siRNA sense strand
guaccaaagggcaguguua

SEQ ID NO: 79301 - RNA, 19 nt, Homo sapiens
  misc_RNA (1)...(19): siRNA sense strand
cagacaugauugauuauga

SEQ ID NO: 79302 - RNA, 19 nt, Homo sapiens
  misc_RNA (1)...(19): siRNA sense strand
auugaaagcugcaagacua

SEQ ID NO: 79303 - RNA, 19 nt, Homo sapiens
  misc_RNA (1)...(19): siRNA sense strand
gagguuccuucuaugcuuu

SEQ ID NO: 79304 - RNA, 19 nt, Homo sapiens
  misc_RNA (1)...(19): siRNA sense strand
caggacagcuuccaauucu

SEQ ID NO: 79305 - RNA, 19 nt, Homo sapiens
  misc_RNA (1)...(19): siRNA sense strand
gccagcaccuuguauggaa

SEQ ID NO: 79306 - RNA, 19 nt, Homo sapiens
  misc_RNA (1)...(19): siRNA sense strand
ggaagcagaguggaucuuu

SEQ ID NO: 79307 - RNA, 19 nt, Homo sapiens
  misc_RNA (1)...(19): siRNA sense strand
gcauggaucucagcuacau

SEQ ID NO: 79308 - RNA, 19 nt, Homo sapiens
  misc_RNA (1)...(19): siRNA sense strand
ggacagcuuccaauucuag

SEQ ID NO: 79309 - RNA, 19 nt, Homo sapiens
  misc_RNA (1)...(19): siRNA sense strand
cauauuagcuuggguuacu

SEQ ID NO: 79310 - RNA, 19 nt, Homo sapiens
  misc_RNA (1)...(19): siRNA sense strand
gaaagugaacaacauagag

SEQ ID NO: 79311 - RNA, 19 nt, Homo sapiens
  misc_RNA (1)...(19): siRNA sense strand
uagcuuggguuacugugaa

SEQ ID NO: 79312 - RNA, 19 nt, Homo sapiens
  misc_RNA (1)...(19): siRNA sense strand
ucacuuccuuugagauguu

SEQ ID NO: 79313 - RNA, 19 nt, Homo sapiens
  misc_RNA (1)...(19): siRNA sense strand
agacuugguuugaggguau

SEQ ID NO: 79314 - RNA, 19 nt, Homo sapiens
  misc_RNA (1)...(19): siRNA sense strand
cauaguuacuugggauuug

SEQ ID NO: 79315 - RNA, 19 nt, Homo sapiens
  misc_RNA (1)...(19): siRNA sense strand
caccuuguauggaauuaug

SEQ ID NO: 79316 - RNA, 19 nt, Homo sapiens
  misc_RNA (1)...(19): siRNA sense strand
ucuaugcuuucucuuacua

SEQ ID NO: 79317 - RNA, 19 nt, Homo sapiens
  misc_RNA (1)...(19): siRNA sense strand
agccaggacuuucugcuuu

SEQ ID NO: 79318 - RNA, 19 nt, Homo sapiens
  misc_RNA (1)...(19): siRNA sense strand
gacgaaggcauauuagcuu

SEQ ID NO: 79319 - RNA, 19 nt, Homo sapiens
  misc_RNA (1)...(19): siRNA sense strand
aaggauggcuuuggcuuug

SEQ ID NO: 79320 - RNA, 19 nt, Homo sapiens
  misc_RNA (1)...(19): siRNA sense strand
cagagagguuccuucuaug

SEQ ID NO: 79321 - RNA, 19 nt, Homo sapiens
  misc_RNA (1)...(19): siRNA sense strand
gaggagguccagagagguu

SEQ ID NO: 79322 - RNA, 19 nt, Homo sapiens
  misc_RNA (1)...(19): siRNA sense strand
gcacuggaacucgaauuca

SEQ ID NO: 79323 - RNA, 19 nt, Homo sapiens
  misc_RNA (1)...(19): siRNA sense strand
aaagugaacaacauagaga

SEQ ID NO: 79324 - RNA, 19 nt, Homo sapiens
  misc_RNA (1)...(19): siRNA sense strand
gacacagacaugauugauu

SEQ ID NO: 79325 - RNA, 19 nt, Homo sapiens
  misc_RNA (1)...(19): siRNA sense strand
gggcaguguuagcaucaug

SEQ ID NO: 79326 - RNA, 19 nt, Homo sapiens
  misc_RNA (1)...(19): siRNA sense strand
caccuuuccugguaccaaa

SEQ ID NO: 79327 - RNA, 19 nt, Homo sapiens
  misc_RNA (1)...(19): siRNA sense strand
acaaagaaagugaacaaca

SEQ ID NO: 79328 - RNA, 19 nt, Homo sapiens
  misc_RNA (1)...(19): siRNA sense strand
ugggagcccuggagacaga

SEQ ID NO: 79329 - RNA, 19 nt, Homo sapiens
  misc_RNA (1)...(19): siRNA sense strand
gcccugcuaugccgaagug

SEQ ID NO: 79330 - RNA, 19 nt, Homo sapiens
  misc_RNA (1)...(19): siRNA sense strand
gaaaaugccaggacagcuu

SEQ ID NO: 79331 - RNA, 19 nt, Homo sapiens
  misc_RNA (1)...(19): siRNA sense strand
ggccaccuuucaccuguug

SEQ ID NO: 79332 - RNA, 19 nt, Homo sapiens
  misc_RNA (1)...(19): siRNA sense strand
cuugggauuuggauugaaa

SEQ ID NO: 79333 - RNA, 19 nt, Homo sapiens
  misc_RNA (1)...(19): siRNA sense strand
cuggugguauccuguguuu

SEQ ID NO: 79334 - RNA, 19 nt, Homo sapiens
  misc_RNA (1)...(19): siRNA sense strand
acaggaaccagcagacuug

SEQ ID NO: 79335 - RNA, 19 nt, Homo sapiens
  misc_RNA (1)...(19): siRNA sense strand
uuacuugggauuuggauug

SEQ ID NO: 79336 - RNA, 19 nt, Homo sapiens
  misc_RNA (1)...(19): siRNA sense strand
ugagaaaacucuggaacaa

SEQ ID NO: 79337 - RNA, 19 nt, Homo sapiens
  misc_RNA (1)...(19): siRNA sense strand
ccaggacagcuuccaauuc

SEQ ID NO: 79338 - RNA, 19 nt, Homo sapiens
  misc_RNA (1)...(19): siRNA sense strand
ccaaagggcaguguuagca

SEQ ID NO: 79339 - RNA, 19 nt, Homo sapiens
  misc_RNA (1)...(19): siRNA sense strand
ccuucuaugcuuucucuua

SEQ ID NO: 79340 - RNA, 19 nt, Homo sapiens
  misc_RNA (1)...(19): siRNA sense strand
gaaagcugcaagacuagca

SEQ ID NO: 79341 - RNA, 19 nt, Homo sapiens
  misc_RNA (1)...(19): siRNA sense strand
aaaggcaacagcaggacua

SEQ ID NO: 79342 - RNA, 19 nt, Homo sapiens
  misc_RNA (1)...(19): siRNA sense strand
gccagggaagugugugaua

SEQ ID NO: 79343 - RNA, 19 nt, Homo sapiens
  misc_RNA (1)...(19): siRNA sense strand
agagguuccuucuaugcuu

SEQ ID NO: 79344 - RNA, 19 nt, Homo sapiens
  misc_RNA (1)...(19): siRNA sense strand
gccaggacagcuuccaauu

SEQ ID NO: 79345 - RNA, 19 nt, Homo sapiens
  misc_RNA (1)...(19): siRNA sense strand
agaaagugaacaacauaga

SEQ ID NO: 79346 - RNA, 19 nt, Homo sapiens
  misc_RNA (1)...(19): siRNA sense strand
gcagggagcacuggaacuc

SEQ ID NO: 79347 - RNA, 19 nt, Homo sapiens
  misc_RNA (1)...(19): siRNA sense strand
cgacgaaggcauauuagcu

SEQ ID NO: 79348 - RNA, 19 nt, Homo sapiens
  misc_RNA (1)...(19): siRNA sense strand
ggugguauccuguguuugc

SEQ ID NO: 79349 - RNA, 19 nt, Homo sapiens
  misc_RNA (1)...(19): siRNA sense strand
uuuccggagugccuguuua

SEQ ID NO: 79350 - RNA, 19 nt, Homo sapiens
  misc_RNA (1)...(19): siRNA sense strand
uuacaccuuugugcagaaa

SEQ ID NO: 79351 - RNA, 19 nt, Homo sapiens
  misc_RNA (1)...(19): siRNA sense strand
ggauggcuuuggcuuugca

SEQ ID NO: 79352 - RNA, 19 nt, Homo sapiens
  misc_RNA (1)...(19): siRNA sense strand
ucagcugcauggccacaga

SEQ ID NO: 79353 - RNA, 19 nt, Homo sapiens
  misc_RNA (1)...(19): siRNA sense strand
ggcauauuagcuuggguua

SEQ ID NO: 79354 - RNA, 19 nt, Homo sapiens
  misc_RNA (1)...(19): siRNA sense strand
uuacagcucacaaagaaag

SEQ ID NO: 79355 - RNA, 19 nt, Homo sapiens
  misc_RNA (1)...(19): siRNA sense strand
gagcacuggaacucgaauu

SEQ ID NO: 79356 - RNA, 19 nt, Homo sapiens
  misc_RNA (1)...(19): siRNA sense strand
gcaguccuuuccugugcau

SEQ ID NO: 79357 - RNA, 19 nt, Homo sapiens
  misc_RNA (1)...(19): siRNA sense strand
cuucuaugcuuucucuuac

SEQ ID NO: 79358 - RNA, 19 nt, Homo sapiens
  misc_RNA (1)...(19): siRNA sense strand
cacuggaacucgaauucau

SEQ ID NO: 79359 - RNA, 19 nt, Homo sapiens
  misc_RNA (1)...(19): siRNA sense strand
agagguggccaaagacuca

SEQ ID NO: 79360 - RNA, 19 nt, Homo sapiens
  misc_RNA (1)...(19): siRNA sense strand
aacagcaggacuacgcuua

SEQ ID NO: 79361 - RNA, 19 nt, Homo sapiens
  misc_RNA (1)...(19): siRNA sense strand
gagguaaaggagaucuuca

SEQ ID NO: 79362 - RNA, 19 nt, Homo sapiens
  misc_RNA (1)...(19): siRNA sense strand
gggccaccuuucaccuguu

SEQ ID NO: 79363 - RNA, 19 nt, Homo sapiens
  misc_RNA (1)...(19): siRNA sense strand
gugauaacuuggaaaacuu

SEQ ID NO: 79364 - RNA, 19 nt, Homo sapiens
  misc_RNA (1)...(19): siRNA sense strand
gagacagaagggacugaug

SEQ ID NO: 79365 - RNA, 19 nt, Homo sapiens
  misc_RNA (1)...(19): siRNA sense strand
agaaaacucuggaacaaac

SEQ ID NO: 79366 - RNA, 19 nt, Homo sapiens
  misc_RNA (1)...(19): siRNA sense strand
gccaggacuuucugcuuuu

SEQ ID NO: 79367 - RNA, 19 nt, Homo sapiens
  misc_RNA (1)...(19): siRNA sense strand
ggcuuuggcuuugcagaca

SEQ ID NO: 79368 - RNA, 19 nt, Homo sapiens
  misc_RNA (1)...(19): siRNA sense strand
gagaaaacucuggaacaaa

SEQ ID NO: 79369 - RNA, 19 nt, Homo sapiens
  misc_RNA (1)...(19): siRNA sense strand
caaagggcaguguuagcau

SEQ ID NO: 79370 - RNA, 19 nt, Homo sapiens
  misc_RNA (1)...(19): siRNA sense strand
gaaugacuguccucacaaa

SEQ ID NO: 79371 - RNA, 19 nt, Homo sapiens
  misc_RNA (1)...(19): siRNA sense strand
gggcagagcuucaguugca

SEQ ID NO: 79372 - RNA, 19 nt, Homo sapiens
  misc_RNA (1)...(19): siRNA sense strand
gggaaugacuguccucaca

SEQ ID NO: 79373 - RNA, 19 nt, Homo sapiens
  misc_RNA (1)...(19): siRNA sense strand
gggcaucucuguacugaac

SEQ ID NO: 79374 - RNA, 19 nt, Homo sapiens
  misc_RNA (1)...(19): siRNA sense strand
cuacuuugcugccauccuu

SEQ ID NO: 79375 - RNA, 19 nt, Homo sapiens
  misc_RNA (1)...(19): siRNA sense strand
guucauccaacaagcaaua

SEQ ID NO: 79376 - RNA, 19 nt, Homo sapiens
  misc_RNA (1)...(19): siRNA sense strand
gaaugcaucccuucgagau

SEQ ID NO: 79377 - RNA, 19 nt, Homo sapiens
  misc_RNA (1)...(19): siRNA sense strand
guacugaaccccaacaaaa

SEQ ID NO: 79378 - RNA, 19 nt, Homo sapiens
  misc_RNA (1)...(19): siRNA sense strand
caccucagcuuuggauuca

SEQ ID NO: 79379 - RNA, 19 nt, Homo sapiens
  misc_RNA (1)...(19): siRNA sense strand
ggagaccauuggagacuac

SEQ ID NO: 79380 - RNA, 19 nt, Homo sapiens
  misc_RNA (1)...(19): siRNA sense strand
ggaaugacuguccucacaa

SEQ ID NO: 79381 - RNA, 19 nt, Homo sapiens
  misc_RNA (1)...(19): siRNA sense strand
ggacaccucagcuuuggau

SEQ ID NO: 79382 - RNA, 19 nt, Homo sapiens
  misc_RNA (1)...(19): siRNA sense strand
cgucacaguucauccaaca

SEQ ID NO: 79383 - RNA, 19 nt, Homo sapiens
  misc_RNA (1)...(19): siRNA sense strand
gacuacacguggaccaaug

SEQ ID NO: 79384 - RNA, 19 nt, Homo sapiens
  misc_RNA (1)...(19): siRNA sense strand
ggaaaugccacgguucauc

SEQ ID NO: 79385 - RNA, 19 nt, Homo sapiens
  misc_RNA (1)...(19): siRNA sense strand
ccucagcuuuggauucaug

SEQ ID NO: 79386 - RNA, 19 nt, Homo sapiens
  misc_RNA (1)...(19): siRNA sense strand
ugcaggaccuccagcagaa

SEQ ID NO: 79387 - RNA, 19 nt, Homo sapiens
  misc_RNA (1)...(19): siRNA sense strand
gcccaggauucaccaguuc

SEQ ID NO: 79388 - RNA, 19 nt, Homo sapiens
  misc_RNA (1)...(19): siRNA sense strand
ccaccugcuucucucauuc

SEQ ID NO: 79389 - RNA, 19 nt, Homo sapiens
  misc_RNA (1)...(19): siRNA sense strand
cagcaacucgagcaucauu

SEQ ID NO: 79390 - RNA, 19 nt, Homo sapiens
  misc_RNA (1)...(19): siRNA sense strand
cauggaaacgucacaguuc

SEQ ID NO: 79391 - RNA, 19 nt, Homo sapiens
  misc_RNA (1)...(19): siRNA sense strand
acagagagcacuggaacaa

SEQ ID NO: 79392 - RNA, 19 nt, Homo sapiens
  misc_RNA (1)...(19): siRNA sense strand
acauggcgguggaguacaa

SEQ ID NO: 79393 - RNA, 19 nt, Homo sapiens
  misc_RNA (1)...(19): siRNA sense strand
ggaaacgucacaguucauc

SEQ ID NO: 79394 - RNA, 19 nt, Homo sapiens
  misc_RNA (1)...(19): siRNA sense strand
gcaacucgagcaucauucu

SEQ ID NO: 79395 - RNA, 19 nt, Homo sapiens
  misc_RNA (1)...(19): siRNA sense strand
ccauggaaacgucacaguu

SEQ ID NO: 79396 - RNA, 19 nt, Homo sapiens
  misc_RNA (1)...(19): siRNA sense strand
gcgguggaguacaaugugu

SEQ ID NO: 79397 - RNA, 19 nt, Homo sapiens
  misc_RNA (1)...(19): siRNA sense strand
ugcagcaacucgagcauca

SEQ ID NO: 79398 - RNA, 19 nt, Homo sapiens
  misc_RNA (1)...(19): siRNA sense strand
ccagugaccgguccaucuu

SEQ ID NO: 79399 - RNA, 19 nt, Homo sapiens
  misc_RNA (1)...(19): siRNA sense strand
gauucagauucgagucaug

SEQ ID NO: 79400 - RNA, 19 nt, Homo sapiens
  misc_RNA (1)...(19): siRNA sense strand
ugacacccacgguuacaga

SEQ ID NO: 79401 - RNA, 19 nt, Homo sapiens
  misc_RNA (1)...(19): siRNA sense strand
gcuacauggcgguggagua

SEQ ID NO: 79402 - RNA, 19 nt, Homo sapiens
  misc_RNA (1)...(19): siRNA sense strand
ccacgacugccacucacaa

SEQ ID NO: 79403 - RNA, 19 nt, Homo sapiens
  misc_RNA (1)...(19): siRNA sense strand
cuauggacaccucagcuuu

SEQ ID NO: 79404 - RNA, 19 nt, Homo sapiens
  misc_RNA (1)...(19): siRNA sense strand
acaaccagccacaggacua

SEQ ID NO: 79405 - RNA, 19 nt, Homo sapiens
  misc_RNA (1)...(19): siRNA sense strand
uauggacaccucagcuuug

SEQ ID NO: 79406 - RNA, 19 nt, Homo sapiens
  misc_RNA (1)...(19): siRNA sense strand
gacccacgacugccacuca

SEQ ID NO: 79407 - RNA, 19 nt, Homo sapiens
  misc_RNA (1)...(19): siRNA sense strand
acucgagcaucauucuuuc

SEQ ID NO: 79408 - RNA, 19 nt, Homo sapiens
  misc_RNA (1)...(19): siRNA sense strand
caccacuagucauggaaau

SEQ ID NO: 79409 - RNA, 19 nt, Homo sapiens
  misc_RNA (1)...(19): siRNA sense strand
ucacaguucauccaacaag

SEQ ID NO: 79410 - RNA, 19 nt, Homo sapiens
  misc_RNA (1)...(19): siRNA sense strand
ccaccacuagucauggaaa

SEQ ID NO: 79411 - RNA, 19 nt, Homo sapiens
  misc_RNA (1)...(19): siRNA sense strand
caacucgagcaucauucuu

SEQ ID NO: 79412 - RNA, 19 nt, Homo sapiens
  misc_RNA (1)...(19): siRNA sense strand
ggacuaccaagagccacaa

SEQ ID NO: 79413 - RNA, 19 nt, Homo sapiens
  misc_RNA (1)...(19): siRNA sense strand
cagauucagauucgaguca

SEQ ID NO: 79414 - RNA, 19 nt, Homo sapiens
  misc_RNA (1)...(19): siRNA sense strand
gcauaaagcuguccagaaa

SEQ ID NO: 79415 - RNA, 19 nt, Homo sapiens
  misc_RNA (1)...(19): siRNA sense strand
ggauaaagcugcccaaaga

SEQ ID NO: 79416 - RNA, 19 nt, Homo sapiens
  misc_RNA (1)...(19): siRNA sense strand
gaaaugaaacgaaugcaua

SEQ ID NO: 79417 - RNA, 19 nt, Homo sapiens
  misc_RNA (1)...(19): siRNA sense strand
cgagacaaguuaaacauua

SEQ ID NO: 79418 - RNA, 19 nt, Homo sapiens
  misc_RNA (1)...(19): siRNA sense strand
gcauagaaauucagaagaa

SEQ ID NO: 79419 - RNA, 19 nt, Homo sapiens
  misc_RNA (1)...(19): siRNA sense strand
ggaagaacgugaaauagau

SEQ ID NO: 79420 - RNA, 19 nt, Homo sapiens
  misc_RNA (1)...(19): siRNA sense strand
gaaagcagcgguaaugaaa

SEQ ID NO: 79421 - RNA, 19 nt, Homo sapiens
  misc_RNA (1)...(19): siRNA sense strand
caagagggcugcaaagaug

SEQ ID NO: 79422 - RNA, 19 nt, Homo sapiens
  misc_RNA (1)...(19): siRNA sense strand
gaaagaaggccaagaggaa

SEQ ID NO: 79423 - RNA, 19 nt, Homo sapiens
  misc_RNA (1)...(19): siRNA sense strand
ggacagaauugaaucacuu

SEQ ID NO: 79424 - RNA, 19 nt, Homo sapiens
  misc_RNA (1)...(19): siRNA sense strand
gaagagaggaguugauuau

SEQ ID NO: 79425 - RNA, 19 nt, Homo sapiens
  misc_RNA (1)...(19): siRNA sense strand
gagaggaguugauuauaau

SEQ ID NO: 79426 - RNA, 19 nt, Homo sapiens
  misc_RNA (1)...(19): siRNA sense strand
agagaggaguugauuauaa

SEQ ID NO: 79427 - RNA, 19 nt, Homo sapiens
  misc_RNA (1)...(19): siRNA sense strand
uuaccuaucuggaacauaa

SEQ ID NO: 79428 - RNA, 19 nt, Homo sapiens
  misc_RNA (1)...(19): siRNA sense strand
ggaaagagaaucccgagaa

SEQ ID NO: 79429 - RNA, 19 nt, Homo sapiens
  misc_RNA (1)...(19): siRNA sense strand
gaagaaugcuacagucaag

SEQ ID NO: 79430 - RNA, 19 nt, Homo sapiens
  misc_RNA (1)...(19): siRNA sense strand
aagcagcgguaaugaaaua

SEQ ID NO: 79431 - RNA, 19 nt, Homo sapiens
  misc_RNA (1)...(19): siRNA sense strand
gaaccgccuuuaacagauu

SEQ ID NO: 79432 - RNA, 19 nt, Homo sapiens
  misc_RNA (1)...(19): siRNA sense strand
ggucuaggauugccucauu

SEQ ID NO: 79433 - RNA, 19 nt, Homo sapiens
  misc_RNA (1)...(19): siRNA sense strand
acuuaaaccuggagaaaua

SEQ ID NO: 79434 - RNA, 19 nt, Homo sapiens
  misc_RNA (1)...(19): siRNA sense strand
cgaggaaucuggcauaaca

SEQ ID NO: 79435 - RNA, 19 nt, Homo sapiens
  misc_RNA (1)...(19): siRNA sense strand
ugaaccaucuggaaauaaa

SEQ ID NO: 79436 - RNA, 19 nt, Homo sapiens
  misc_RNA (1)...(19): siRNA sense strand
ggaagugguuaaacaagga

SEQ ID NO: 79437 - RNA, 19 nt, Homo sapiens
  misc_RNA (1)...(19): siRNA sense strand
ccucauugcugcauagaaa

SEQ ID NO: 79438 - RNA, 19 nt, Homo sapiens
  misc_RNA (1)...(19): siRNA sense strand
gaaaaggaacuucaacaua

SEQ ID NO: 79439 - RNA, 19 nt, Homo sapiens
  misc_RNA (1)...(19): siRNA sense strand
gaaucuggcauaacaaauu

SEQ ID NO: 79440 - RNA, 19 nt, Homo sapiens
  misc_RNA (1)...(19): siRNA sense strand
gaggaaagcaagagagaaa

SEQ ID NO: 79441 - RNA, 19 nt, Homo sapiens
  misc_RNA (1)...(19): siRNA sense strand
gcacauuaccuaucuggaa

SEQ ID NO: 79442 - RNA, 19 nt, Homo sapiens
  misc_RNA (1)...(19): siRNA sense strand
gaacgugaaauagaugaua

SEQ ID NO: 79443 - RNA, 19 nt, Homo sapiens
  misc_RNA (1)...(19): siRNA sense strand
ugaagcagauggaaagaga

SEQ ID NO: 79444 - RNA, 19 nt, Homo sapiens
  misc_RNA (1)...(19): siRNA sense strand
gcuggaagaacgugaaaua

SEQ ID NO: 79445 - RNA, 19 nt, Homo sapiens
  misc_RNA (1)...(19): siRNA sense strand
gaaagagaaucccgagaac

SEQ ID NO: 79446 - RNA, 19 nt, Homo sapiens
  misc_RNA (1)...(19): siRNA sense strand
ggaagagaggaguugauua

SEQ ID NO: 79447 - RNA, 19 nt, Homo sapiens
  misc_RNA (1)...(19): siRNA sense strand
gccaagaccaucagaagua

SEQ ID NO: 79448 - RNA, 19 nt, Homo sapiens
  misc_RNA (1)...(19): siRNA sense strand
gauccaagcauuaagaaga

SEQ ID NO: 79449 - RNA, 19 nt, Homo sapiens
  misc_RNA (1)...(19): siRNA sense strand
gaaaagaggcucgagauaa

SEQ ID NO: 79450 - RNA, 19 nt, Homo sapiens
  misc_RNA (1)...(19): siRNA sense strand
gaacuccucuucgagacaa

SEQ ID NO: 79451 - RNA, 19 nt, Homo sapiens
  misc_RNA (1)...(19): siRNA sense strand
gaaauuaagacaacaggau

SEQ ID NO: 79452 - RNA, 19 nt, Homo sapiens
  misc_RNA (1)...(19): siRNA sense strand
ggaggaauaccgaggauga

SEQ ID NO: 79453 - RNA, 19 nt, Homo sapiens
  misc_RNA (1)...(19): siRNA sense strand
ugaaacaguugaaugacuu

SEQ ID NO: 79454 - RNA, 19 nt, Homo sapiens
  misc_RNA (1)...(19): siRNA sense strand
gaauaccgaggaugaaauu

SEQ ID NO: 79455 - RNA, 19 nt, Homo sapiens
  misc_RNA (1)...(19): siRNA sense strand
ccaagaccaucagaaguaa

SEQ ID NO: 79456 - RNA, 19 nt, Homo sapiens
  misc_RNA (1)...(19): siRNA sense strand
caacagaugauccacgaaa

SEQ ID NO: 79457 - RNA, 19 nt, Homo sapiens
  misc_RNA (1)...(19): siRNA sense strand
gaagaacucaagaaacaug

SEQ ID NO: 79458 - RNA, 19 nt, Homo sapiens
  misc_RNA (1)...(19): siRNA sense strand
aaagagaagcaaacuagua

SEQ ID NO: 79459 - RNA, 19 nt, Homo sapiens
  misc_RNA (1)...(19): siRNA sense strand
agaaauagauccaaaucca

SEQ ID NO: 79460 - RNA, 19 nt, Homo sapiens
  misc_RNA (1)...(19): siRNA sense strand
uaugaaccaucuggaaaua

SEQ ID NO: 79461 - RNA, 19 nt, Homo sapiens
  misc_RNA (1)...(19): siRNA sense strand
gaaauugcacgucaaacug

SEQ ID NO: 79462 - RNA, 19 nt, Homo sapiens
  misc_RNA (1)...(19): siRNA sense strand
gaaacaguugaaugacuua

SEQ ID NO: 79463 - RNA, 19 nt, Homo sapiens
  misc_RNA (1)...(19): siRNA sense strand
ucgagcagcuggcauagaa

SEQ ID NO: 79464 - RNA, 19 nt, Homo sapiens
  misc_RNA (1)...(19): siRNA sense strand
gaagaggaaacaacagaug

SEQ ID NO: 79465 - RNA, 19 nt, Homo sapiens
  misc_RNA (1)...(19): siRNA sense strand
auaaagcuguccagaaaga

SEQ ID NO: 79466 - RNA, 19 nt, Homo sapiens
  misc_RNA (1)...(19): siRNA sense strand
aaaggaacuucaacauaga

SEQ ID NO: 79467 - RNA, 19 nt, Homo sapiens
  misc_RNA (1)...(19): siRNA sense strand
aaaagaggcucgagauaaa

SEQ ID NO: 79468 - RNA, 19 nt, Homo sapiens
  misc_RNA (1)...(19): siRNA sense strand
gcucucaagugaagcuuau

SEQ ID NO: 79469 - RNA, 19 nt, Homo sapiens
  misc_RNA (1)...(19): siRNA sense strand
acaugaagauucugcuauu

SEQ ID NO: 79470 - RNA, 19 nt, Homo sapiens
  misc_RNA (1)...(19): siRNA sense strand
ggaagaaugcuacagucaa

SEQ ID NO: 79471 - RNA, 19 nt, Homo sapiens
  misc_RNA (1)...(19): siRNA sense strand
gcuuagaacacuaugaauu

SEQ ID NO: 79472 - RNA, 19 nt, Homo sapiens
  misc_RNA (1)...(19): siRNA sense strand
ucaagaaacaugaagauuc

SEQ ID NO: 79473 - RNA, 19 nt, Homo sapiens
  misc_RNA (1)...(19): siRNA sense strand
gaugauacuuacauugaag

SEQ ID NO: 79474 - RNA, 19 nt, Homo sapiens
  misc_RNA (1)...(19): siRNA sense strand
ccaggaaguuguaaaagua

SEQ ID NO: 79475 - RNA, 19 nt, Homo sapiens
  misc_RNA (1)...(19): siRNA sense strand
gagaaacaauuggaagaag

SEQ ID NO: 79476 - RNA, 19 nt, Homo sapiens
  misc_RNA (1)...(19): siRNA sense strand
gagagaaacaauuggaaga

SEQ ID NO: 79477 - RNA, 19 nt, Homo sapiens
  misc_RNA (1)...(19): siRNA sense strand
ugaagaugcugcugaugug

SEQ ID NO: 79478 - RNA, 19 nt, Homo sapiens
  misc_RNA (1)...(19): siRNA sense strand
ugacuuaugggaccaaauu

SEQ ID NO: 79479 - RNA, 19 nt, Homo sapiens
  misc_RNA (1)...(19): siRNA sense strand
guaaaggaaaugaaacgaa

SEQ ID NO: 79480 - RNA, 19 nt, Homo sapiens
  misc_RNA (1)...(19): siRNA sense strand
ggagaaauagauccaaauc

SEQ ID NO: 79481 - RNA, 19 nt, Homo sapiens
  misc_RNA (1)...(19): siRNA sense strand
cuagugguguuucugaauu

SEQ ID NO: 79482 - RNA, 19 nt, Homo sapiens
  misc_RNA (1)...(19): siRNA sense strand
cagcuauucuucaaacuag

SEQ ID NO: 79483 - RNA, 19 nt, Homo sapiens
  misc_RNA (1)...(19): siRNA sense strand
aaaaggaacuucaacauag

SEQ ID NO: 79484 - RNA, 19 nt, Homo sapiens
  misc_RNA (1)...(19): siRNA sense strand
gaagaacgugaaauagaug

SEQ ID NO: 79485 - RNA, 19 nt, Homo sapiens
  misc_RNA (1)...(19): siRNA sense strand
ggguagaacuccucuucga

SEQ ID NO: 79486 - RNA, 19 nt, Homo sapiens
  misc_RNA (1)...(19): siRNA sense strand
gugcaaagccagaugguau

SEQ ID NO: 79487 - RNA, 19 nt, Homo sapiens
  misc_RNA (1)...(19): siRNA sense strand
ccaaagagacaaugaagag

SEQ ID NO: 79488 - RNA, 19 nt, Homo sapiens
  misc_RNA (1)...(19): siRNA sense strand
ggagauggaagugguuaaa

SEQ ID NO: 79489 - RNA, 19 nt, Homo sapiens
  misc_RNA (1)...(19): siRNA sense strand
caaacacaguucucucuac

SEQ ID NO: 79490 - RNA, 19 nt, Homo sapiens
  misc_RNA (1)...(19): siRNA sense strand
gagaagcaaacuaguacuu

SEQ ID NO: 79491 - RNA, 19 nt, Homo sapiens
  misc_RNA (1)...(19): siRNA sense strand
caucagaaguaaaugaaac

SEQ ID NO: 79492 - RNA, 19 nt, Homo sapiens
  misc_RNA (1)...(19): siRNA sense strand
cagcguugcucuuagaaca

SEQ ID NO: 79493 - RNA, 19 nt, Homo sapiens
  misc_RNA (1)...(19): siRNA sense strand
ggaugaggaugaacuugag

SEQ ID NO: 79494 - RNA, 19 nt, Homo sapiens
  misc_RNA (1)...(19): siRNA sense strand
gcagagcguguaaaggaaa

SEQ ID NO: 79495 - RNA, 19 nt, Homo sapiens
  misc_RNA (1)...(19): siRNA sense strand
gcucuuagaacaccacgaa

SEQ ID NO: 79496 - RNA, 19 nt, Homo sapiens
  misc_RNA (1)...(19): siRNA sense strand
caagagagaaacaauugga

SEQ ID NO: 79497 - RNA, 19 nt, Homo sapiens
  misc_RNA (1)...(19): siRNA sense strand
aaacuuaaaccuggagaaa

SEQ ID NO: 79498 - RNA, 19 nt, Homo sapiens
  misc_RNA (1)...(19): siRNA sense strand
aaagccagaugguaugaau

SEQ ID NO: 79499 - RNA, 19 nt, Homo sapiens
  misc_RNA (1)...(19): siRNA sense strand
gaauggcagacuauaguga

SEQ ID NO: 79500 - RNA, 19 nt, Homo sapiens
  misc_RNA (1)...(19): siRNA sense strand
ggaaacaacagaugaucca

SEQ ID NO: 79501 - RNA, 19 nt, Homo sapiens
  misc_RNA (1)...(19): siRNA sense strand
cagagcacauuaccuaucu

SEQ ID NO: 79502 - RNA, 19 nt, Homo sapiens
  misc_RNA (1)...(19): siRNA sense strand
auuaugaccuucuacauca

SEQ ID NO: 79503 - RNA, 19 nt, Homo sapiens
  misc_RNA (1)...(19): siRNA sense strand
gguaaugaaauaugggaaa

SEQ ID NO: 79504 - RNA, 19 nt, Homo sapiens
  misc_RNA (1)...(19): siRNA sense strand
caucagcuauucuucaaac

SEQ ID NO: 79505 - RNA, 19 nt, Homo sapiens
  misc_RNA (1)...(19): siRNA sense strand
gaaagcaagagagaaacaa

SEQ ID NO: 79506 - RNA, 19 nt, Homo sapiens
  misc_RNA (1)...(19): siRNA sense strand
ggaaagcaagagagaaaca

SEQ ID NO: 79507 - RNA, 19 nt, Homo sapiens
  misc_RNA (1)...(19): siRNA sense strand
gaugauccacgaaaacuua

SEQ ID NO: 79508 - RNA, 19 nt, Homo sapiens
  misc_RNA (1)...(19): siRNA sense strand
gauggaagugguuaaacaa

SEQ ID NO: 79509 - RNA, 19 nt, Homo sapiens
  misc_RNA (1)...(19): siRNA sense strand
acagaaaagugaagaacua

SEQ ID NO: 79510 - RNA, 19 nt, Homo sapiens
  misc_RNA (1)...(19): siRNA sense strand
uagaaccgccuuuaacaga

SEQ ID NO: 79511 - RNA, 19 nt, Homo sapiens
  misc_RNA (1)...(19): siRNA sense strand
ggaauaccgaggaugaaau

SEQ ID NO: 79512 - RNA, 19 nt, Homo sapiens
  misc_RNA (1)...(19): siRNA sense strand
ucauggcccucaccaaugu

SEQ ID NO: 79513 - RNA, 19 nt, Homo sapiens
  misc_RNA (1)...(19): siRNA sense strand
gcaaagccagaugguauga

SEQ ID NO: 79514 - RNA, 19 nt, Homo sapiens
  misc_RNA (1)...(19): siRNA sense strand
gcacagaaccagcuaguua

SEQ ID NO: 79515 - RNA, 19 nt, Homo sapiens
  misc_RNA (1)...(19): siRNA sense strand
caagguggcugaacucaaa

SEQ ID NO: 79516 - RNA, 19 nt, Homo sapiens
  misc_RNA (1)...(19): siRNA sense strand
cagaaacggcuucgaaaua

SEQ ID NO: 79517 - RNA, 19 nt, Homo sapiens
  misc_RNA (1)...(19): siRNA sense strand
gggaauauauauccucugu

SEQ ID NO: 79518 - RNA, 19 nt, Homo sapiens
  misc_RNA (1)...(19): siRNA sense strand
agaaacggcuucgaaauau

SEQ ID NO: 79519 - RNA, 19 nt, Homo sapiens
  misc_RNA (1)...(19): siRNA sense strand
gaaacggcuucgaaauaug

SEQ ID NO: 79520 - RNA, 19 nt, Homo sapiens
  misc_RNA (1)...(19): siRNA sense strand
caagaaggaacaucagaaa

SEQ ID NO: 79521 - RNA, 19 nt, Homo sapiens
  misc_RNA (1)...(19): siRNA sense strand
caaauccaguuccaagguu

SEQ ID NO: 79522 - RNA, 19 nt, Homo sapiens
  misc_RNA (1)...(19): siRNA sense strand
gaugagacccugaggcuau

SEQ ID NO: 79523 - RNA, 19 nt, Homo sapiens
  misc_RNA (1)...(19): siRNA sense strand
gggccgaacuccuggcaaa

SEQ ID NO: 79524 - RNA, 19 nt, Homo sapiens
  misc_RNA (1)...(19): siRNA sense strand
gaaggccagugcagccaaa

SEQ ID NO: 79525 - RNA, 19 nt, Homo sapiens
  misc_RNA (1)...(19): siRNA sense strand
gaagaccugccguuacauu

SEQ ID NO: 79526 - RNA, 19 nt, Homo sapiens
  misc_RNA (1)...(19): siRNA sense strand
gaaaugacuauuaccugaa

SEQ ID NO: 79527 - RNA, 19 nt, Homo sapiens
  misc_RNA (1)...(19): siRNA sense strand
agaaccagcuaguuauuug

SEQ ID NO: 79528 - RNA, 19 nt, Homo sapiens
  misc_RNA (1)...(19): siRNA sense strand
cggaagaccugccguuaca

SEQ ID NO: 79529 - RNA, 19 nt, Homo sapiens
  misc_RNA (1)...(19): siRNA sense strand
ggccauggcuuugcacaga

SEQ ID NO: 79530 - RNA, 19 nt, Homo sapiens
  misc_RNA (1)...(19): siRNA sense strand
ucagaccacuccuagcaaa

SEQ ID NO: 79531 - RNA, 19 nt, Homo sapiens
  misc_RNA (1)...(19): siRNA sense strand
caaagagggcaacuacuug

SEQ ID NO: 79532 - RNA, 19 nt, Homo sapiens
  misc_RNA (1)...(19): siRNA sense strand
ucaaagagggcaacuacuu

SEQ ID NO: 79533 - RNA, 19 nt, Homo sapiens
  misc_RNA (1)...(19): siRNA sense strand
gaucaaagagggcaacuac

SEQ ID NO: 79534 - RNA, 19 nt, Homo sapiens
  misc_RNA (1)...(19): siRNA sense strand
aaaguacucuacagccaaa

SEQ ID NO: 79535 - RNA, 19 nt, Homo sapiens
  misc_RNA (1)...(19): siRNA sense strand
gcagaaacggcuucgaaau

SEQ ID NO: 79536 - RNA, 19 nt, Homo sapiens
  misc_RNA (1)...(19): siRNA sense strand
ggugacauccugcagcuuu

SEQ ID NO: 79537 - RNA, 19 nt, Homo sapiens
  misc_RNA (1)...(19): siRNA sense strand
aaugauaacuuggucaaug

SEQ ID NO: 79538 - RNA, 19 nt, Homo sapiens
  misc_RNA (1)...(19): siRNA sense strand
caccagugaucgacacauu

SEQ ID NO: 79539 - RNA, 19 nt, Homo sapiens
  misc_RNA (1)...(19): siRNA sense strand
ggauuggaguucugggaau

SEQ ID NO: 79540 - RNA, 19 nt, Homo sapiens
  misc_RNA (1)...(19): siRNA sense strand
aaacggcuucgaaauauga

SEQ ID NO: 79541 - RNA, 19 nt, Homo sapiens
  misc_RNA (1)...(19): siRNA sense strand
cagcagaaacggcuucgaa

SEQ ID NO: 79542 - RNA, 19 nt, Homo sapiens
  misc_RNA (1)...(19): siRNA sense strand
gccagacgcccaccaagaa

SEQ ID NO: 79543 - RNA, 19 nt, Homo sapiens
  misc_RNA (1)...(19): siRNA sense strand
acuauuaccugaaccuugu

SEQ ID NO: 79544 - RNA, 19 nt, Homo sapiens
  misc_RNA (1)...(19): siRNA sense strand
gcaaauccaguuccaaggu

SEQ ID NO: 79545 - RNA, 19 nt, Homo sapiens
  misc_RNA (1)...(19): siRNA sense strand
ccaagaaggaacaucagaa

SEQ ID NO: 79546 - RNA, 19 nt, Homo sapiens
  misc_RNA (1)...(19): siRNA sense strand
gaacagacugaaaguacuc

SEQ ID NO: 79547 - RNA, 19 nt, Homo sapiens
  misc_RNA (1)...(19): siRNA sense strand
caucucaggccauggcuuu

SEQ ID NO: 79548 - RNA, 19 nt, Homo sapiens
  misc_RNA (1)...(19): siRNA sense strand
cgagugggcucccuaagcu

SEQ ID NO: 79549 - RNA, 19 nt, Homo sapiens
  misc_RNA (1)...(19): siRNA sense strand
gauuggaguucugggaaug

SEQ ID NO: 79550 - RNA, 19 nt, Homo sapiens
  misc_RNA (1)...(19): siRNA sense strand
ggguuccucugcagacauu

SEQ ID NO: 79551 - RNA, 19 nt, Homo sapiens
  misc_RNA (1)...(19): siRNA sense strand
cgccugaaauccgaaauga

SEQ ID NO: 79552 - RNA, 19 nt, Homo sapiens
  misc_RNA (1)...(19): siRNA sense strand
gaacucaaaggucacacau

SEQ ID NO: 79553 - RNA, 19 nt, Homo sapiens
  misc_RNA (1)...(19): siRNA sense strand
guaaugauaacuuggucaa

SEQ ID NO: 79554 - RNA, 19 nt, Homo sapiens
  misc_RNA (1)...(19): siRNA sense strand
ccaguggugguaaugauaa

SEQ ID NO: 79555 - RNA, 19 nt, Homo sapiens
  misc_RNA (1)...(19): siRNA sense strand
cagaacagacugaaaguac

SEQ ID NO: 79556 - RNA, 19 nt, Homo sapiens
  misc_RNA (1)...(19): siRNA sense strand
gucaauguguggccuagug

SEQ ID NO: 79557 - RNA, 19 nt, Homo sapiens
  misc_RNA (1)...(19): siRNA sense strand
cagaaccagcuaguuauuu

SEQ ID NO: 79558 - RNA, 19 nt, Homo sapiens
  misc_RNA (1)...(19): siRNA sense strand
ccaccaagaaggaacauca

SEQ ID NO: 79559 - RNA, 19 nt, Homo sapiens
  misc_RNA (1)...(19): siRNA sense strand
gaaauccgaaaugacuauu

SEQ ID NO: 79560 - RNA, 19 nt, Homo sapiens
  misc_RNA (1)...(19): siRNA sense strand
ggccaguggugguaaugau

SEQ ID NO: 79561 - RNA, 19 nt, Homo sapiens
  misc_RNA (1)...(19): siRNA sense strand
ccagauggacgacauuugg

SEQ ID NO: 79562 - RNA, 19 nt, Homo sapiens
  misc_RNA (1)...(19): siRNA sense strand
gccaguggugguaaugaua

SEQ ID NO: 79563 - RNA, 19 nt, Homo sapiens
  misc_RNA (1)...(19): siRNA sense strand
guucagaccacuccuagca

SEQ ID NO: 79564 - RNA, 19 nt, Homo sapiens
  misc_RNA (1)...(19): siRNA sense strand
gccauggcuuugcacagaa

SEQ ID NO: 79565 - RNA, 19 nt, Homo sapiens
  misc_RNA (1)...(19): siRNA sense strand
gaucgacacauucgcaucu

SEQ ID NO: 79566 - RNA, 19 nt, Homo sapiens
  misc_RNA (1)...(19): siRNA sense strand
uauauccuguccagugguu

SEQ ID NO: 79567 - RNA, 19 nt, Homo sapiens
  misc_RNA (1)...(19): siRNA sense strand
ugaaauccgaaaugacuau

SEQ ID NO: 79568 - RNA, 19 nt, Homo sapiens
  misc_RNA (1)...(19): siRNA sense strand
ccacauccaccaccaugau

SEQ ID NO: 79569 - RNA, 19 nt, Homo sapiens
  misc_RNA (1)...(19): siRNA sense strand
agauggagguggccagcuu

SEQ ID NO: 79570 - RNA, 19 nt, Homo sapiens
  misc_RNA (1)...(19): siRNA sense strand
aauccgaaaugacuauuac

SEQ ID NO: 79571 - RNA, 19 nt, Homo sapiens
  misc_RNA (1)...(19): siRNA sense strand
aaaaugcgccagaggguua

SEQ ID NO: 79572 - RNA, 19 nt, Homo sapiens
  misc_RNA (1)...(19): siRNA sense strand
uuacaaggagcucaucuca

SEQ ID NO: 79573 - RNA, 19 nt, Homo sapiens
  misc_RNA (1)...(19): siRNA sense strand
ccugaacgguuuugaugua

SEQ ID NO: 79574 - RNA, 19 nt, Homo sapiens
  misc_RNA (1)...(19): siRNA sense strand
ugcaagcucuggugacauc

SEQ ID NO: 79575 - RNA, 19 nt, Homo sapiens
  misc_RNA (1)...(19): siRNA sense strand
gccggaagaccugccguua

SEQ ID NO: 79576 - RNA, 19 nt, Homo sapiens
  misc_RNA (1)...(19): siRNA sense strand
caagauccuucggcucagu

SEQ ID NO: 79577 - RNA, 19 nt, Homo sapiens
  misc_RNA (1)...(19): siRNA sense strand
guccugagucugaccauga

SEQ ID NO: 79578 - RNA, 19 nt, Homo sapiens
  misc_RNA (1)...(19): siRNA sense strand
cacagaaccagcuaguuau

SEQ ID NO: 79579 - RNA, 19 nt, Homo sapiens
  misc_RNA (1)...(19): siRNA sense strand
gggaugugcagcagcagaa

SEQ ID NO: 79580 - RNA, 19 nt, Homo sapiens
  misc_RNA (1)...(19): siRNA sense strand
augauaacuuggucaaugu

SEQ ID NO: 79581 - RNA, 19 nt, Homo sapiens
  misc_RNA (1)...(19): siRNA sense strand
acagaaccagcuaguuauu

SEQ ID NO: 79582 - RNA, 19 nt, Homo sapiens
  misc_RNA (1)...(19): siRNA sense strand
aaaugacuauuaccugaac

SEQ ID NO: 79583 - RNA, 19 nt, Homo sapiens
  misc_RNA (1)...(19): siRNA sense strand
gaaccagcuaguuauuugg

SEQ ID NO: 79584 - RNA, 19 nt, Homo sapiens
  misc_RNA (1)...(19): siRNA sense strand
ccagcuuccuccugagcaa

SEQ ID NO: 79585 - RNA, 19 nt, Homo sapiens
  misc_RNA (1)...(19): siRNA sense strand
accugaaccuuguggauug

SEQ ID NO: 79586 - RNA, 19 nt, Homo sapiens
  misc_RNA (1)...(19): siRNA sense strand
ccugaaauccgaaaugacu

SEQ ID NO: 79587 - RNA, 19 nt, Homo sapiens
  misc_RNA (1)...(19): siRNA sense strand
gguagcagaacaccaugug

SEQ ID NO: 79588 - RNA, 19 nt, Homo sapiens
  misc_RNA (1)...(19): siRNA sense strand
agaacagacugaaaguacu

SEQ ID NO: 79589 - RNA, 19 nt, Homo sapiens
  misc_RNA (1)...(19): siRNA sense strand
ggagcagccuggggaauau

SEQ ID NO: 79590 - RNA, 19 nt, Homo sapiens
  misc_RNA (1)...(19): siRNA sense strand
gauaacuuggucaaugugu

SEQ ID NO: 79591 - RNA, 19 nt, Homo sapiens
  misc_RNA (1)...(19): siRNA sense strand
gacauucacccagcaucaa

SEQ ID NO: 79592 - RNA, 19 nt, Homo sapiens
  misc_RNA (1)...(19): siRNA sense strand
agaaggaacaucagaaagc

SEQ ID NO: 79593 - RNA, 19 nt, Homo sapiens
  misc_RNA (1)...(19): siRNA sense strand
ucuguggccuggaucaaag

SEQ ID NO: 79594 - RNA, 19 nt, Homo sapiens
  misc_RNA (1)...(19): siRNA sense strand
gaacgguuuugauguagag

SEQ ID NO: 79595 - RNA, 19 nt, Homo sapiens
  misc_RNA (1)...(19): siRNA sense strand
ggaucaaagagggcaacua

SEQ ID NO: 79596 - RNA, 19 nt, Homo sapiens
  misc_RNA (1)...(19): siRNA sense strand
uaccugaaccuuguggauu

SEQ ID NO: 79597 - RNA, 19 nt, Homo sapiens
  misc_RNA (1)...(19): siRNA sense strand
gcagcgcaaagccaaggaa

SEQ ID NO: 79598 - RNA, 19 nt, Homo sapiens
  misc_RNA (1)...(19): siRNA sense strand
ggaaauagccgagagguaa

SEQ ID NO: 79599 - RNA, 19 nt, Homo sapiens
  misc_RNA (1)...(19): siRNA sense strand
ccagagagcuauccaaguu

SEQ ID NO: 79600 - RNA, 19 nt, Homo sapiens
  misc_RNA (1)...(19): siRNA sense strand
caugcaagcugaaagaaua

SEQ ID NO: 79601 - RNA, 19 nt, Homo sapiens
  misc_RNA (1)...(19): siRNA sense strand
caagaacccucuaugcaaa

SEQ ID NO: 79602 - RNA, 19 nt, Homo sapiens
  misc_RNA (1)...(19): siRNA sense strand
ggacauguauauugcaaga

SEQ ID NO: 79603 - RNA, 19 nt, Homo sapiens
  misc_RNA (1)...(19): siRNA sense strand
caaaagagccuuaguuuaa

SEQ ID NO: 79604 - RNA, 19 nt, Homo sapiens
  misc_RNA (1)...(19): siRNA sense strand
uaggaaagguuuacaagaa

SEQ ID NO: 79605 - RNA, 19 nt, Homo sapiens
  misc_RNA (1)...(19): siRNA sense strand
caacacaaguaccuaauca

SEQ ID NO: 79606 - RNA, 19 nt, Homo sapiens
  misc_RNA (1)...(19): siRNA sense strand
ggagauggauccuauuuac

SEQ ID NO: 79607 - RNA, 19 nt, Homo sapiens
  misc_RNA (1)...(19): siRNA sense strand
gaaaagccaugaugauauu

SEQ ID NO: 79608 - RNA, 19 nt, Homo sapiens
  misc_RNA (1)...(19): siRNA sense strand
gcuguaauuucaccugaua

SEQ ID NO: 79609 - RNA, 19 nt, Homo sapiens
  misc_RNA (1)...(19): siRNA sense strand
aaugauagccuggaaauua

SEQ ID NO: 79610 - RNA, 19 nt, Homo sapiens
  misc_RNA (1)...(19): siRNA sense strand
ccaaagaaucccucguuua

SEQ ID NO: 79611 - RNA, 19 nt, Homo sapiens
  misc_RNA (1)...(19): siRNA sense strand
gauaucaacccucaaaguu

SEQ ID NO: 79612 - RNA, 19 nt, Homo sapiens
  misc_RNA (1)...(19): siRNA sense strand
ccaauaaccagauuaaaga

SEQ ID NO: 79613 - RNA, 19 nt, Homo sapiens
  misc_RNA (1)...(19): siRNA sense strand
ucacagagccucaguuuua

SEQ ID NO: 79614 - RNA, 19 nt, Homo sapiens
  misc_RNA (1)...(19): siRNA sense strand
uaaagcauauagacucuug

SEQ ID NO: 79615 - RNA, 19 nt, Homo sapiens
  misc_RNA (1)...(19): siRNA sense strand
gccaauaacccaagaagaa

SEQ ID NO: 79616 - RNA, 19 nt, Homo sapiens
  misc_RNA (1)...(19): siRNA sense strand
uaagucugcuuuacaagaa

SEQ ID NO: 79617 - RNA, 19 nt, Homo sapiens
  misc_RNA (1)...(19): siRNA sense strand
ggaacaugauauugcaauu

SEQ ID NO: 79618 - RNA, 19 nt, Homo sapiens
  misc_RNA (1)...(19): siRNA sense strand
ucacgacucuuuacuagug

SEQ ID NO: 79619 - RNA, 19 nt, Homo sapiens
  misc_RNA (1)...(19): siRNA sense strand
gcacaacacaaguaccuaa

SEQ ID NO: 79620 - RNA, 19 nt, Homo sapiens
  misc_RNA (1)...(19): siRNA sense strand
gaaaggcauauaaagcaua

SEQ ID NO: 79621 - RNA, 19 nt, Homo sapiens
  misc_RNA (1)...(19): siRNA sense strand
gcauggagaucuacucuac

SEQ ID NO: 79622 - RNA, 19 nt, Homo sapiens
  misc_RNA (1)...(19): siRNA sense strand
gauccugaccaaacauuua

SEQ ID NO: 79623 - RNA, 19 nt, Homo sapiens
  misc_RNA (1)...(19): siRNA sense strand
gaaguacacucagaagaag

SEQ ID NO: 79624 - RNA, 19 nt, Homo sapiens
  misc_RNA (1)...(19): siRNA sense strand
gaucuacucuacaacacuu

SEQ ID NO: 79625 - RNA, 19 nt, Homo sapiens
  misc_RNA (1)...(19): siRNA sense strand
gaacaaagucugucuucuc

SEQ ID NO: 79626 - RNA, 19 nt, Homo sapiens
  misc_RNA (1)...(19): siRNA sense strand
aaaugaaguuuccaccuaa

SEQ ID NO: 79627 - RNA, 19 nt, Homo sapiens
  misc_RNA (1)...(19): siRNA sense strand
caaagucugucuucucaca

SEQ ID NO: 79628 - RNA, 19 nt, Homo sapiens
  misc_RNA (1)...(19): siRNA sense strand
gcacuaaaccacuaugcuu

SEQ ID NO: 79629 - RNA, 19 nt, Homo sapiens
  misc_RNA (1)...(19): siRNA sense strand
aaauuacgcuuaugccuau

SEQ ID NO: 79630 - RNA, 19 nt, Homo sapiens
  misc_RNA (1)...(19): siRNA sense strand
ggaaaggcauauaaagcau

SEQ ID NO: 79631 - RNA, 19 nt, Homo sapiens
  misc_RNA (1)...(19): siRNA sense strand
caaagaaucccucguuuac

SEQ ID NO: 79632 - RNA, 19 nt, Homo sapiens
  misc_RNA (1)...(19): siRNA sense strand
gaaaugcuaucagagucaa

SEQ ID NO: 79633 - RNA, 19 nt, Homo sapiens
  misc_RNA (1)...(19): siRNA sense strand
gauggauccuauuuacaaa

SEQ ID NO: 79634 - RNA, 19 nt, Homo sapiens
  misc_RNA (1)...(19): siRNA sense strand
ugauucagcuguaauuuca

SEQ ID NO: 79635 - RNA, 19 nt, Homo sapiens
  misc_RNA (1)...(19): siRNA sense strand
acacaaguaccuaaucaua

SEQ ID NO: 79636 - RNA, 19 nt, Homo sapiens
  misc_RNA (1)...(19): siRNA sense strand
ucagcuugcuuuacucuuu

SEQ ID NO: 79637 - RNA, 19 nt, Homo sapiens
  misc_RNA (1)...(19): siRNA sense strand
gcauauagacucuugaaag

SEQ ID NO: 79638 - RNA, 19 nt, Homo sapiens
  misc_RNA (1)...(19): siRNA sense strand
aagaaucccucguuuacuu

SEQ ID NO: 79639 - RNA, 19 nt, Homo sapiens
  misc_RNA (1)...(19): siRNA sense strand
gggcaugaguuugucuuaa

SEQ ID NO: 79640 - RNA, 19 nt, Homo sapiens
  misc_RNA (1)...(19): siRNA sense strand
uuacagaacuuuagcaacu

SEQ ID NO: 79641 - RNA, 19 nt, Homo sapiens
  misc_RNA (1)...(19): siRNA sense strand
gcucaggaaaggcauauaa

SEQ ID NO: 79642 - RNA, 19 nt, Homo sapiens
  misc_RNA (1)...(19): siRNA sense strand
ggaaagguuuacaagaagu

SEQ ID NO: 79643 - RNA, 19 nt, Homo sapiens
  misc_RNA (1)...(19): siRNA sense strand
uaucaacccucaaaguuca

SEQ ID NO: 79644 - RNA, 19 nt, Homo sapiens
  misc_RNA (1)...(19): siRNA sense strand
uauaaugcaugguaugguu

SEQ ID NO: 79645 - RNA, 19 nt, Homo sapiens
  misc_RNA (1)...(19): siRNA sense strand
agaauuggacaaagcauua

SEQ ID NO: 79646 - RNA, 19 nt, Homo sapiens
  misc_RNA (1)...(19): siRNA sense strand
guauugagccccacuauua

SEQ ID NO: 79647 - RNA, 19 nt, Homo sapiens
  misc_RNA (1)...(19): siRNA sense strand
ggcaagcacuaaaccacua

SEQ ID NO: 79648 - RNA, 19 nt, Homo sapiens
  misc_RNA (1)...(19): siRNA sense strand
ccaaaggaucagaauguua

SEQ ID NO: 79649 - RNA, 19 nt, Homo sapiens
  misc_RNA (1)...(19): siRNA sense strand
gcuuuacucuuucauuguu

SEQ ID NO: 79650 - RNA, 19 nt, Homo sapiens
  misc_RNA (1)...(19): siRNA sense strand
gaauuucucuugggcuaug

SEQ ID NO: 79651 - RNA, 19 nt, Homo sapiens
  misc_RNA (1)...(19): siRNA sense strand
ccacuaugcuuaccgagau

SEQ ID NO: 79652 - RNA, 19 nt, Homo sapiens
  misc_RNA (1)...(19): siRNA sense strand
cgaagaaguucacgacucu

SEQ ID NO: 79653 - RNA, 19 nt, Homo sapiens
  misc_RNA (1)...(19): siRNA sense strand
agagguaacuccaauucuu

SEQ ID NO: 79654 - RNA, 19 nt, Homo sapiens
  misc_RNA (1)...(19): siRNA sense strand
cauauagacucuugaaagg

SEQ ID NO: 79655 - RNA, 19 nt, Homo sapiens
  misc_RNA (1)...(19): siRNA sense strand
gcuuaugccuauacucuau

SEQ ID NO: 79656 - RNA, 19 nt, Homo sapiens
  misc_RNA (1)...(19): siRNA sense strand
gcaacugucugcccaacuc

SEQ ID NO: 79657 - RNA, 19 nt, Homo sapiens
  misc_RNA (1)...(19): siRNA sense strand
gagccaauaaccagauuaa

SEQ ID NO: 79658 - RNA, 19 nt, Homo sapiens
  misc_RNA (1)...(19): siRNA sense strand
ccaagaacccucuaugcaa

SEQ ID NO: 79659 - RNA, 19 nt, Homo sapiens
  misc_RNA (1)...(19): siRNA sense strand
caacugcaaagaagcuaua

SEQ ID NO: 79660 - RNA, 19 nt, Homo sapiens
  misc_RNA (1)...(19): siRNA sense strand
gggaaaauauccacaauca

SEQ ID NO: 79661 - RNA, 19 nt, Homo sapiens
  misc_RNA (1)...(19): siRNA sense strand
ggaggaauaacucaaccua

SEQ ID NO: 79662 - RNA, 19 nt, Homo sapiens
  misc_RNA (1)...(19): siRNA sense strand
acaaguaccuaaucauagu

SEQ ID NO: 79663 - RNA, 19 nt, Homo sapiens
  misc_RNA (1)...(19): siRNA sense strand
gcccaacucuugcacaaca

SEQ ID NO: 79664 - RNA, 19 nt, Homo sapiens
  misc_RNA (1)...(19): siRNA sense strand
gagucaauccuagacauua

SEQ ID NO: 79665 - RNA, 19 nt, Homo sapiens
  misc_RNA (1)...(19): siRNA sense strand
guucacgacucuuuacuag

SEQ ID NO: 79666 - RNA, 19 nt, Homo sapiens
  misc_RNA (1)...(19): siRNA sense strand
cagcagcucuuaguccauu

SEQ ID NO: 79667 - RNA, 19 nt, Homo sapiens
  misc_RNA (1)...(19): siRNA sense strand
ggaucagaauguuaccaaa

SEQ ID NO: 79668 - RNA, 19 nt, Homo sapiens
  misc_RNA (1)...(19): siRNA sense strand
gagagcagcaugacagaug

SEQ ID NO: 79669 - RNA, 19 nt, Homo sapiens
  misc_RNA (1)...(19): siRNA sense strand
gcaacgggaacaugauauu

SEQ ID NO: 79670 - RNA, 19 nt, Homo sapiens
  misc_RNA (1)...(19): siRNA sense strand
guacaugcaagcugaaaga

SEQ ID NO: 79671 - RNA, 19 nt, Homo sapiens
  misc_RNA (1)...(19): siRNA sense strand
gggaaagguuauuuagcuu

SEQ ID NO: 79672 - RNA, 19 nt, Homo sapiens
  misc_RNA (1)...(19): siRNA sense strand
gaaaauauccacaaucaca

SEQ ID NO: 79673 - RNA, 19 nt, Homo sapiens
  misc_RNA (1)...(19): siRNA sense strand
gcacaaacacaaaguucug

SEQ ID NO: 79674 - RNA, 19 nt, Homo sapiens
  misc_RNA (1)...(19): siRNA sense strand
gaacagaucaugggaacag

SEQ ID NO: 79675 - RNA, 19 nt, Homo sapiens
  misc_RNA (1)...(19): siRNA sense strand
uacaagaaguuaggucaaa

SEQ ID NO: 79676 - RNA, 19 nt, Homo sapiens
  misc_RNA (1)...(19): siRNA sense strand
gccaaaggaucagaauguu

SEQ ID NO: 79677 - RNA, 19 nt, Homo sapiens
  misc_RNA (1)...(19): siRNA sense strand
ccaaguugauccaaauuac

SEQ ID NO: 79678 - RNA, 19 nt, Homo sapiens
  misc_RNA (1)...(19): siRNA sense strand
gagguuagaaggauugaga

SEQ ID NO: 79679 - RNA, 19 nt, Homo sapiens
  misc_RNA (1)...(19): siRNA sense strand
cauaaaugauagccuggaa

SEQ ID NO: 79680 - RNA, 19 nt, Homo sapiens
  misc_RNA (1)...(19): siRNA sense strand
caaaguacuccuugaauac

SEQ ID NO: 79681 - RNA, 19 nt, Homo sapiens
  misc_RNA (1)...(19): siRNA sense strand
agaaguacacucagaagaa

SEQ ID NO: 79682 - RNA, 19 nt, Homo sapiens
  misc_RNA (1)...(19): siRNA sense strand
gaugaugaggagccaauaa

SEQ ID NO: 79683 - RNA, 19 nt, Homo sapiens
  misc_RNA (1)...(19): siRNA sense strand
agagagcuauccaaguuga

SEQ ID NO: 79684 - RNA, 19 nt, Homo sapiens
  misc_RNA (1)...(19): siRNA sense strand
ggagaucuacucuacaaca

SEQ ID NO: 79685 - RNA, 19 nt, Homo sapiens
  misc_RNA (1)...(19): siRNA sense strand
ggaauaacucaaccuaaca

SEQ ID NO: 79686 - RNA, 19 nt, Homo sapiens
  misc_RNA (1)...(19): siRNA sense strand
acaaaguucugguccacaa

SEQ ID NO: 79687 - RNA, 19 nt, Homo sapiens
  misc_RNA (1)...(19): siRNA sense strand
aacaaagucugucuucuca

SEQ ID NO: 79688 - RNA, 19 nt, Homo sapiens
  misc_RNA (1)...(19): siRNA sense strand
caaaggaucagaauguuac

SEQ ID NO: 79689 - RNA, 19 nt, Homo sapiens
  misc_RNA (1)...(19): siRNA sense strand
ucagagaaggcuuuggaua

SEQ ID NO: 79690 - RNA, 19 nt, Homo sapiens
  misc_RNA (1)...(19): siRNA sense strand
guacuacaccgcaaugcaa

SEQ ID NO: 79691 - RNA, 19 nt, Homo sapiens
  misc_RNA (1)...(19): siRNA sense strand
ucauacaacugcaaagaag

SEQ ID NO: 79692 - RNA, 19 nt, Homo sapiens
  misc_RNA (1)...(19): siRNA sense strand
gaugagccuucuucgugaa

SEQ ID NO: 79693 - RNA, 19 nt, Homo sapiens
  misc_RNA (1)...(19): siRNA sense strand
gcacugccucgaagaaguu

SEQ ID NO: 79694 - RNA, 19 nt, Homo sapiens
  misc_RNA (1)...(19): siRNA sense strand
ucacaucuuuacagaacuu

SEQ ID NO: 79695 - RNA, 19 nt, Homo sapiens
  misc_RNA (1)...(19): siRNA sense strand
ccucuggucucccuuugaa

SEQ ID NO: 79696 - RNA, 19 nt, Homo sapiens
  misc_RNA (1)...(19): siRNA sense strand
gaaagguuuacaagaaguu

SEQ ID NO: 79697 - RNA, 19 nt, Homo sapiens
  misc_RNA (1)...(19): siRNA sense strand
gccaauaaccagauuaaag

SEQ ID NO: 79698 - RNA, 19 nt, Homo sapiens
  misc_RNA (1)...(19): siRNA sense strand
gaacagcgauggcggcuua

SEQ ID NO: 79699 - RNA, 19 nt, Homo sapiens
  misc_RNA (1)...(19): siRNA sense strand
gaauacagauccuuucaaa

SEQ ID NO: 79700 - RNA, 19 nt, Homo sapiens
  misc_RNA (1)...(19): siRNA sense strand
ggacugcacuccuggauuu

SEQ ID NO: 79701 - RNA, 19 nt, Homo sapiens
  misc_RNA (1)...(19): siRNA sense strand
ggaaggagcugugggaguu

SEQ ID NO: 79702 - RNA, 19 nt, Homo sapiens
  misc_RNA (1)...(19): siRNA sense strand
gaaagggaguggaucaaga

SEQ ID NO: 79703 - RNA, 19 nt, Homo sapiens
  misc_RNA (1)...(19): siRNA sense strand
gagaaguaaucgcuguuua

SEQ ID NO: 79704 - RNA, 19 nt, Homo sapiens
  misc_RNA (1)...(19): siRNA sense strand
cagguuggcugaauauuaa

SEQ ID NO: 79705 - RNA, 19 nt, Homo sapiens
  misc_RNA (1)...(19): siRNA sense strand
gcagguuggcugaauauua

SEQ ID NO: 79706 - RNA, 19 nt, Homo sapiens
  misc_RNA (1)...(19): siRNA sense strand
gauaaagucuggaagaucu

SEQ ID NO: 79707 - RNA, 19 nt, Homo sapiens
  misc_RNA (1)...(19): siRNA sense strand
cuacaucgauccugagaaa

SEQ ID NO: 79708 - RNA, 19 nt, Homo sapiens
  misc_RNA (1)...(19): siRNA sense strand
gaagggaugcuuucuguug

SEQ ID NO: 79709 - RNA, 19 nt, Homo sapiens
  misc_RNA (1)...(19): siRNA sense strand
gaggaccagucaauucuaa

SEQ ID NO: 79710 - RNA, 19 nt, Homo sapiens
  misc_RNA (1)...(19): siRNA sense strand
gaacaaagcaaacuacaac

SEQ ID NO: 79711 - RNA, 19 nt, Homo sapiens
  misc_RNA (1)...(19): siRNA sense strand
ggagaccacugaugucaau

SEQ ID NO: 79712 - RNA, 19 nt, Homo sapiens
  misc_RNA (1)...(19): siRNA sense strand
gcaagguagucgauaguga

SEQ ID NO: 79713 - RNA, 19 nt, Homo sapiens
  misc_RNA (1)...(19): siRNA sense strand
cagaaaguguuccauauca

SEQ ID NO: 79714 - RNA, 19 nt, Homo sapiens
  misc_RNA (1)...(19): siRNA sense strand
caucgaggcucaagauaug

SEQ ID NO: 79715 - RNA, 19 nt, Homo sapiens
  misc_RNA (1)...(19): siRNA sense strand
ggugacagauucagggaaa

SEQ ID NO: 79716 - RNA, 19 nt, Homo sapiens
  misc_RNA (1)...(19): siRNA sense strand
ucaagagccuaaaggaauu

SEQ ID NO: 79717 - RNA, 19 nt, Homo sapiens
  misc_RNA (1)...(19): siRNA sense strand
ccacaucacuguccuggau

SEQ ID NO: 79718 - RNA, 19 nt, Homo sapiens
  misc_RNA (1)...(19): siRNA sense strand
gagacagccuuucccaaga

SEQ ID NO: 79719 - RNA, 19 nt, Homo sapiens
  misc_RNA (1)...(19): siRNA sense strand
gguauucuguuuacaagga

SEQ ID NO: 79720 - RNA, 19 nt, Homo sapiens
  misc_RNA (1)...(19): siRNA sense strand
ggaaaccacccaugacgaa

SEQ ID NO: 79721 - RNA, 19 nt, Homo sapiens
  misc_RNA (1)...(19): siRNA sense strand
ucaaaccauuggacuauga

SEQ ID NO: 79722 - RNA, 19 nt, Homo sapiens
  misc_RNA (1)...(19): siRNA sense strand
uggacuggauguuggauua

SEQ ID NO: 79723 - RNA, 19 nt, Homo sapiens
  misc_RNA (1)...(19): siRNA sense strand
gaaaguguuccauaucaau

SEQ ID NO: 79724 - RNA, 19 nt, Homo sapiens
  misc_RNA (1)...(19): siRNA sense strand
uggcagaacucgugauugu

SEQ ID NO: 79725 - RNA, 19 nt, Homo sapiens
  misc_RNA (1)...(19): siRNA sense strand
aguaaucgcuguuuaucaa

SEQ ID NO: 79726 - RNA, 19 nt, Homo sapiens
  misc_RNA (1)...(19): siRNA sense strand
gaugcuuucuguugucaaa

SEQ ID NO: 79727 - RNA, 19 nt, Homo sapiens
  misc_RNA (1)...(19): siRNA sense strand
gggcagagcuuugaaaucc

SEQ ID NO: 79728 - RNA, 19 nt, Homo sapiens
  misc_RNA (1)...(19): siRNA sense strand
gaucaagagccuaaaggaa

SEQ ID NO: 79729 - RNA, 19 nt, Homo sapiens
  misc_RNA (1)...(19): siRNA sense strand
caagccaucucccaacaug

SEQ ID NO: 79730 - RNA, 19 nt, Homo sapiens
  misc_RNA (1)...(19): siRNA sense strand
ccauuggacuaugaaauuu

SEQ ID NO: 79731 - RNA, 19 nt, Homo sapiens
  misc_RNA (1)...(19): siRNA sense strand
ugacgaauaucacagaucu

SEQ ID NO: 79732 - RNA, 19 nt, Homo sapiens
  misc_RNA (1)...(19): siRNA sense strand
aaaccucaguguagucauu

SEQ ID NO: 79733 - RNA, 19 nt, Homo sapiens
  misc_RNA (1)...(19): siRNA sense strand
ccagucaauucuaaacuug

SEQ ID NO: 79734 - RNA, 19 nt, Homo sapiens
  misc_RNA (1)...(19): siRNA sense strand
caucaaaccaucagguauu

SEQ ID NO: 79735 - RNA, 19 nt, Homo sapiens
  misc_RNA (1)...(19): siRNA sense strand
gauagugacaggccagaaa

SEQ ID NO: 79736 - RNA, 19 nt, Homo sapiens
  misc_RNA (1)...(19): siRNA sense strand
cagcagaaaguguuccaua

SEQ ID NO: 79737 - RNA, 19 nt, Homo sapiens
  misc_RNA (1)...(19): siRNA sense strand
caagagauguuggcaaggu

SEQ ID NO: 79738 - RNA, 19 nt, Homo sapiens
  misc_RNA (1)...(19): siRNA sense strand
gcugaagucugugaugaug

SEQ ID NO: 79739 - RNA, 19 nt, Homo sapiens
  misc_RNA (1)...(19): siRNA sense strand
gaaguaaucgcuguuuauc

SEQ ID NO: 79740 - RNA, 19 nt, Homo sapiens
  misc_RNA (1)...(19): siRNA sense strand
ucacagaucucaggguaca

SEQ ID NO: 79741 - RNA, 19 nt, Homo sapiens
  misc_RNA (1)...(19): siRNA sense strand
gcagaaaguguuccauauc

SEQ ID NO: 79742 - RNA, 19 nt, Homo sapiens
  misc_RNA (1)...(19): siRNA sense strand
acagauccuuucaaauuug

SEQ ID NO: 79743 - RNA, 19 nt, Homo sapiens
  misc_RNA (1)...(19): siRNA sense strand
caucagguauucuguuuac

SEQ ID NO: 79744 - RNA, 19 nt, Homo sapiens
  misc_RNA (1)...(19): siRNA sense strand
gaccuuggacagagaagua

SEQ ID NO: 79745 - RNA, 19 nt, Homo sapiens
  misc_RNA (1)...(19): siRNA sense strand
gacaagccaucucccaaca

SEQ ID NO: 79746 - RNA, 19 nt, Homo sapiens
  misc_RNA (1)...(19): siRNA sense strand
aaagagguccauuguggua

SEQ ID NO: 79747 - RNA, 19 nt, Homo sapiens
  misc_RNA (1)...(19): siRNA sense strand
aaaugaagacccacucgua

SEQ ID NO: 79748 - RNA, 19 nt, Homo sapiens
  misc_RNA (1)...(19): siRNA sense strand
gaucaucgaggcucaagau

SEQ ID NO: 79749 - RNA, 19 nt, Homo sapiens
  misc_RNA (1)...(19): siRNA sense strand
gaugacagccuuugaugca

SEQ ID NO: 79750 - RNA, 19 nt, Homo sapiens
  misc_RNA (1)...(19): siRNA sense strand
uaagggaaacgacaagcua

SEQ ID NO: 79751 - RNA, 19 nt, Homo sapiens
  misc_RNA (1)...(19): siRNA sense strand
cggcuuaguugcucugaga

SEQ ID NO: 79752 - RNA, 19 nt, Homo sapiens
  misc_RNA (1)...(19): siRNA sense strand
uagcugaagucugugauga

SEQ ID NO: 79753 - RNA, 19 nt, Homo sapiens
  misc_RNA (1)...(19): siRNA sense strand
caacgagggcccagucuuc

SEQ ID NO: 79754 - RNA, 19 nt, Homo sapiens
  misc_RNA (1)...(19): siRNA sense strand
aaaccacccaugacgaaua

SEQ ID NO: 79755 - RNA, 19 nt, Homo sapiens
  misc_RNA (1)...(19): siRNA sense strand
ugugguaucucccauuuua

SEQ ID NO: 79756 - RNA, 19 nt, Homo sapiens
  misc_RNA (1)...(19): siRNA sense strand
caauacacacgcccuggua

SEQ ID NO: 79757 - RNA, 19 nt, Homo sapiens
  misc_RNA (1)...(19): siRNA sense strand
agauauggcuggacuggau

SEQ ID NO: 79758 - RNA, 19 nt, Homo sapiens
  misc_RNA (1)...(19): siRNA sense strand
ggaagucauugugauugau

SEQ ID NO: 79759 - RNA, 19 nt, Homo sapiens
  misc_RNA (1)...(19): siRNA sense strand
gaaggagcugugggaguua

SEQ ID NO: 79760 - RNA, 19 nt, Homo sapiens
  misc_RNA (1)...(19): siRNA sense strand
ucuccaagaucaacaauac

SEQ ID NO: 79761 - RNA, 19 nt, Homo sapiens
  misc_RNA (1)...(19): siRNA sense strand
gcuuugaaauccacaccaa

SEQ ID NO: 79762 - RNA, 19 nt, Homo sapiens
  misc_RNA (1)...(19): siRNA sense strand
cauugucacuguuguguca

SEQ ID NO: 79763 - RNA, 19 nt, Homo sapiens
  misc_RNA (1)...(19): siRNA sense strand
gcacugggacuuugcugau

SEQ ID NO: 79764 - RNA, 19 nt, Homo sapiens
  misc_RNA (1)...(19): siRNA sense strand
agaaaguguuccauaucaa

SEQ ID NO: 79765 - RNA, 19 nt, Homo sapiens
  misc_RNA (1)...(19): siRNA sense strand
uggaagucauugugauuga

SEQ ID NO: 79766 - RNA, 19 nt, Homo sapiens
  misc_RNA (1)...(19): siRNA sense strand
gaucucaggguacaagugu

SEQ ID NO: 79767 - RNA, 19 nt, Homo sapiens
  misc_RNA (1)...(19): siRNA sense strand
cugguaagccuucuucaaa

SEQ ID NO: 79768 - RNA, 19 nt, Homo sapiens
  misc_RNA (1)...(19): siRNA sense strand
acgaagggaugcuuucugu

SEQ ID NO: 79769 - RNA, 19 nt, Homo sapiens
  misc_RNA (1)...(19): siRNA sense strand
uaaacuugaccuucaguga

SEQ ID NO: 79770 - RNA, 19 nt, Homo sapiens
  misc_RNA (1)...(19): siRNA sense strand
cagaaucaaugagaacaca

SEQ ID NO: 79771 - RNA, 19 nt, Homo sapiens
  misc_RNA (1)...(19): siRNA sense strand
cguguacacugcucucuuc

SEQ ID NO: 79772 - RNA, 19 nt, Homo sapiens
  misc_RNA (1)...(19): siRNA sense strand
cggaagauauggcagaacu

SEQ ID NO: 79773 - RNA, 19 nt, Homo sapiens
  misc_RNA (1)...(19): siRNA sense strand
ucagggaaaccacccauga

SEQ ID NO: 79774 - RNA, 19 nt, Homo sapiens
  misc_RNA (1)...(19): siRNA sense strand
ggacuggauguuggauuaa

SEQ ID NO: 79775 - RNA, 19 nt, Homo sapiens
  misc_RNA (1)...(19): siRNA sense strand
cuacaucggccacgucaug

SEQ ID NO: 79776 - RNA, 19 nt, Homo sapiens
  misc_RNA (1)...(19): siRNA sense strand
ggccagaaagguccaaguu

SEQ ID NO: 79777 - RNA, 19 nt, Homo sapiens
  misc_RNA (1)...(19): siRNA sense strand
auucuaaacuugaccuuca

SEQ ID NO: 79778 - RNA, 19 nt, Homo sapiens
  misc_RNA (1)...(19): siRNA sense strand
gaucuucacccgaauacag

SEQ ID NO: 79779 - RNA, 19 nt, Homo sapiens
  misc_RNA (1)...(19): siRNA sense strand
agaaguaaucgcuguuuau

SEQ ID NO: 79780 - RNA, 19 nt, Homo sapiens
  misc_RNA (1)...(19): siRNA sense strand
ggaucaagagccuaaagga

SEQ ID NO: 79781 - RNA, 19 nt, Homo sapiens
  misc_RNA (1)...(19): siRNA sense strand
aagagauguuggcaaggua

SEQ ID NO: 79782 - RNA, 19 nt, Homo sapiens
  misc_RNA (1)...(19): siRNA sense strand
cugcaggaauuccaaagug

SEQ ID NO: 79783 - RNA, 19 nt, Homo sapiens
  misc_RNA (1)...(19): siRNA sense strand
acgacaagcuacgcuauga

SEQ ID NO: 79784 - RNA, 19 nt, Homo sapiens
  misc_RNA (1)...(19): siRNA sense strand
uggaggacgugaaugacaa

SEQ ID NO: 79785 - RNA, 19 nt, Homo sapiens
  misc_RNA (1)...(19): siRNA sense strand
acugggacuuugcugauaa

SEQ ID NO: 79786 - RNA, 19 nt, Homo sapiens
  misc_RNA (1)...(19): siRNA sense strand
gcaucaaaccaucagguau

SEQ ID NO: 79787 - RNA, 19 nt, Homo sapiens
  misc_RNA (1)...(19): siRNA sense strand
ucacuguccuggaugucaa

SEQ ID NO: 79788 - RNA, 19 nt, Homo sapiens
  misc_RNA (1)...(19): siRNA sense strand
agcagaaaguguuccauau

SEQ ID NO: 79789 - RNA, 19 nt, Homo sapiens
  misc_RNA (1)...(19): siRNA sense strand
caauuugacaguugaagau

SEQ ID NO: 79790 - RNA, 19 nt, Homo sapiens
  misc_RNA (1)...(19): siRNA sense strand
gcccuccugcgguauaaua

SEQ ID NO: 79791 - RNA, 19 nt, Homo sapiens
  misc_RNA (1)...(19): siRNA sense strand
gaagucauugugauugauc

SEQ ID NO: 79792 - RNA, 19 nt, Homo sapiens
  misc_RNA (1)...(19): siRNA sense strand
gaguggaucaagagccuaa

SEQ ID NO: 79793 - RNA, 19 nt, Homo sapiens
  misc_RNA (1)...(19): siRNA sense strand
ggaaagggaguggaucaag

SEQ ID NO: 79794 - RNA, 19 nt, Homo sapiens
  misc_RNA (1)...(19): siRNA sense strand
cagguauucuguuuacaag

SEQ ID NO: 79795 - RNA, 19 nt, Homo sapiens
  misc_RNA (1)...(19): siRNA sense strand
ccucagccucuucagcuua

SEQ ID NO: 79796 - RNA, 19 nt, Homo sapiens
  misc_RNA (1)...(19): siRNA sense strand
aaccacccaugacgaauau

SEQ ID NO: 79797 - RNA, 19 nt, Homo sapiens
  misc_RNA (1)...(19): siRNA sense strand
acaagcuguuccugauaaa

SEQ ID NO: 79798 - RNA, 19 nt, Homo sapiens
  misc_RNA (1)...(19): siRNA sense strand
gagcauugguugcaucuuu

SEQ ID NO: 79799 - RNA, 19 nt, Homo sapiens
  misc_RNA (1)...(19): siRNA sense strand
guggauaucuggagcauug

SEQ ID NO: 79800 - RNA, 19 nt, Homo sapiens
  misc_RNA (1)...(19): siRNA sense strand
ggaagggacuggaagagau

SEQ ID NO: 79801 - RNA, 19 nt, Homo sapiens
  misc_RNA (1)...(19): siRNA sense strand
gaccagcucuuucguaucu

SEQ ID NO: 79802 - RNA, 19 nt, Homo sapiens
  misc_RNA (1)...(19): siRNA sense strand
gaagcucuaucugguguuu

SEQ ID NO: 79803 - RNA, 19 nt, Homo sapiens
  misc_RNA (1)...(19): siRNA sense strand
ucacccagcugccugacua

SEQ ID NO: 79804 - RNA, 19 nt, Homo sapiens
  misc_RNA (1)...(19): siRNA sense strand
gcagagauggugacucgaa

SEQ ID NO: 79805 - RNA, 19 nt, Homo sapiens
  misc_RNA (1)...(19): siRNA sense strand
gaagggacuggaagagauu

SEQ ID NO: 79806 - RNA, 19 nt, Homo sapiens
  misc_RNA (1)...(19): siRNA sense strand
ccaucaagcuggcugacuu

SEQ ID NO: 79807 - RNA, 19 nt, Homo sapiens
  misc_RNA (1)...(19): siRNA sense strand
gaagaucagacuggauuug

SEQ ID NO: 79808 - RNA, 19 nt, Homo sapiens
  misc_RNA (1)...(19): siRNA sense strand
ccagcucuuucguaucuuu

SEQ ID NO: 79809 - RNA, 19 nt, Homo sapiens
  misc_RNA (1)...(19): siRNA sense strand
cagagauggugacucgaaa

SEQ ID NO: 79810 - RNA, 19 nt, Homo sapiens
  misc_RNA (1)...(19): siRNA sense strand
gaucggagagggcaccuau

SEQ ID NO: 79811 - RNA, 19 nt, Homo sapiens
  misc_RNA (1)...(19): siRNA sense strand
gcacugccaucagggagau

SEQ ID NO: 79812 - RNA, 19 nt, Homo sapiens
  misc_RNA (1)...(19): siRNA sense strand
aagaagaucagacuggauu

SEQ ID NO: 79813 - RNA, 19 nt, Homo sapiens
  misc_RNA (1)...(19): siRNA sense strand
cccagaaccugcucaucaa

SEQ ID NO: 79814 - RNA, 19 nt, Homo sapiens
  misc_RNA (1)...(19): siRNA sense strand
cugcagcgauuccgccauu

SEQ ID NO: 79815 - RNA, 19 nt, Homo sapiens
  misc_RNA (1)...(19): siRNA sense strand
ugaguugggugccaucaag

SEQ ID NO: 79816 - RNA, 19 nt, Homo sapiens
  misc_RNA (1)...(19): siRNA sense strand
uuucguaucuuucguaugc

SEQ ID NO: 79817 - RNA, 19 nt, Homo sapiens
  misc_RNA (1)...(19): siRNA sense strand
gagauugaccagcucuuuc

SEQ ID NO: 79818 - RNA, 19 nt, Homo sapiens
  misc_RNA (1)...(19): siRNA sense strand
gcagcgauuccgccauuga

SEQ ID NO: 79819 - RNA, 19 nt, Homo sapiens
  misc_RNA (1)...(19): siRNA sense strand
ccagcugccugacuauaag

SEQ ID NO: 79820 - RNA, 19 nt, Homo sapiens
  misc_RNA (1)...(19): siRNA sense strand
gaagaagaucagacuggau

SEQ ID NO: 79821 - RNA, 19 nt, Homo sapiens
  misc_RNA (1)...(19): siRNA sense strand
agaucucgcugcucaagga

SEQ ID NO: 79822 - RNA, 19 nt, Homo sapiens
  misc_RNA (1)...(19): siRNA sense strand
aguaugugcugcagcgauu

SEQ ID NO: 79823 - RNA, 19 nt, Homo sapiens
  misc_RNA (1)...(19): siRNA sense strand
ggauauguuccagaaggua

SEQ ID NO: 79824 - RNA, 19 nt, Homo sapiens
  misc_RNA (1)...(19): siRNA sense strand
cagacuggauuuggagaug

SEQ ID NO: 79825 - RNA, 19 nt, Homo sapiens
  misc_RNA (1)...(19): siRNA sense strand
ccuggugacucugagauug

SEQ ID NO: 79826 - RNA, 19 nt, Homo sapiens
  misc_RNA (1)...(19): siRNA sense strand
uugaccagcucuuucguau

SEQ ID NO: 79827 - RNA, 19 nt, Homo sapiens
  misc_RNA (1)...(19): siRNA sense strand
ccacucacaucgggucauc

SEQ ID NO: 79828 - RNA, 19 nt, Homo sapiens
  misc_RNA (1)...(19): siRNA sense strand
uccagaagguagagaagau

SEQ ID NO: 79829 - RNA, 19 nt, Homo sapiens
  misc_RNA (1)...(19): siRNA sense strand
ugagauugaccagcucuuu

SEQ ID NO: 79830 - RNA, 19 nt, Homo sapiens
  misc_RNA (1)...(19): siRNA sense strand
gacuggauuuggagaugga

SEQ ID NO: 79831 - RNA, 19 nt, Homo sapiens
  misc_RNA (1)...(19): siRNA sense strand
ggcagcaaguucuauacca

SEQ ID NO: 79832 - RNA, 19 nt, Homo sapiens
  misc_RNA (1)...(19): siRNA sense strand
ggagaucucgcugcucaag

SEQ ID NO: 79833 - RNA, 19 nt, Homo sapiens
  misc_RNA (1)...(19): siRNA sense strand
cagaaccugcucaucaaug

SEQ ID NO: 79834 - RNA, 19 nt, Homo sapiens
  misc_RNA (1)...(19): siRNA sense strand
ucuaucugguguuugaguu

SEQ ID NO: 79835 - RNA, 19 nt, Homo sapiens
  misc_RNA (1)...(19): siRNA sense strand
cccagcugccugacuauaa

SEQ ID NO: 79836 - RNA, 19 nt, Homo sapiens
  misc_RNA (1)...(19): siRNA sense strand
agaucagacuggauuugga

SEQ ID NO: 79837 - RNA, 19 nt, Homo sapiens
  misc_RNA (1)...(19): siRNA sense strand
gauaucuggagcauugguu

SEQ ID NO: 79838 - RNA, 19 nt, Homo sapiens
  misc_RNA (1)...(19): siRNA sense strand
cccaugagguggugacacu

SEQ ID NO: 79839 - RNA, 19 nt, Homo sapiens
  misc_RNA (1)...(19): siRNA sense strand
cagcggaucacagccaaga

SEQ ID NO: 79840 - RNA, 19 nt, Homo sapiens
  misc_RNA (1)...(19): siRNA sense strand
gcaaagaccuacuucugaa

SEQ ID NO: 79841 - RNA, 19 nt, Homo sapiens
  misc_RNA (1)...(19): siRNA sense strand
gaagaagacuggccuagag

SEQ ID NO: 79842 - RNA, 19 nt, Homo sapiens
  misc_RNA (1)...(19): siRNA sense strand
ggucuggacuuucuucauu

SEQ ID NO: 79843 - RNA, 19 nt, Homo sapiens
  misc_RNA (1)...(19): siRNA sense strand
uaacagauaucgaugaacu

SEQ ID NO: 79844 - RNA, 19 nt, Homo sapiens
  misc_RNA (1)...(19): siRNA sense strand
gaccagcagcggacaaaua

SEQ ID NO: 79845 - RNA, 19 nt, Homo sapiens
  misc_RNA (1)...(19): siRNA sense strand
aagaauaucugccuacagu

SEQ ID NO: 79846 - RNA, 19 nt, Homo sapiens
  misc_RNA (1)...(19): siRNA sense strand
gaacagacagagaaaccaa

SEQ ID NO: 79847 - RNA, 19 nt, Homo sapiens
  misc_RNA (1)...(19): siRNA sense strand
guggaucucuggaguguug

SEQ ID NO: 79848 - RNA, 19 nt, Homo sapiens
  misc_RNA (1)...(19): siRNA sense strand
guacagagcacccgaaguc

SEQ ID NO: 79849 - RNA, 19 nt, Homo sapiens
  misc_RNA (1)...(19): siRNA sense strand
cuggaaaggugcaaagaaa

SEQ ID NO: 79850 - RNA, 19 nt, Homo sapiens
  misc_RNA (1)...(19): siRNA sense strand
cugaaguguuugacauuua

SEQ ID NO: 79851 - RNA, 19 nt, Homo sapiens
  misc_RNA (1)...(19): siRNA sense strand
gagaaaccaaacuaacuuu

SEQ ID NO: 79852 - RNA, 19 nt, Homo sapiens
  misc_RNA (1)...(19): siRNA sense strand
ccacugaaaccauaaagga

SEQ ID NO: 79853 - RNA, 19 nt, Homo sapiens
  misc_RNA (1)...(19): siRNA sense strand
ggcaaagaccuacuucuga

SEQ ID NO: 79854 - RNA, 19 nt, Homo sapiens
  misc_RNA (1)...(19): siRNA sense strand
agacagagaaaccaaacua

SEQ ID NO: 79855 - RNA, 19 nt, Homo sapiens
  misc_RNA (1)...(19): siRNA sense strand
gaaguucagauguugauca

SEQ ID NO: 79856 - RNA, 19 nt, Homo sapiens
  misc_RNA (1)...(19): siRNA sense strand
gagaaguuuguaacagaua

SEQ ID NO: 79857 - RNA, 19 nt, Homo sapiens
  misc_RNA (1)...(19): siRNA sense strand
uguaacagauaucgaugaa

SEQ ID NO: 79858 - RNA, 19 nt, Homo sapiens
  misc_RNA (1)...(19): siRNA sense strand
aguguuggcugcauauuug

SEQ ID NO: 79859 - RNA, 19 nt, Homo sapiens
  misc_RNA (1)...(19): siRNA sense strand
gaacaugucgaucaagacu

SEQ ID NO: 79860 - RNA, 19 nt, Homo sapiens
  misc_RNA (1)...(19): siRNA sense strand
gaagacuggccuagagaug

SEQ ID NO: 79861 - RNA, 19 nt, Homo sapiens
  misc_RNA (1)...(19): siRNA sense strand
gacagagaaaccaaacuaa

SEQ ID NO: 79862 - RNA, 19 nt, Homo sapiens
  misc_RNA (1)...(19): siRNA sense strand
agacuggccuagagauguu

SEQ ID NO: 79863 - RNA, 19 nt, Homo sapiens
  misc_RNA (1)...(19): siRNA sense strand
guggucagguuguuugaug

SEQ ID NO: 79864 - RNA, 19 nt, Homo sapiens
  misc_RNA (1)...(19): siRNA sense strand
gaguguuggcugcauauuu

SEQ ID NO: 79865 - RNA, 19 nt, Homo sapiens
  misc_RNA (1)...(19): siRNA sense strand
ccaaccaauugagaaguuu

SEQ ID NO: 79866 - RNA, 19 nt, Homo sapiens
  misc_RNA (1)...(19): siRNA sense strand
ccaauugagaaguuuguaa

SEQ ID NO: 79867 - RNA, 19 nt, Homo sapiens
  misc_RNA (1)...(19): siRNA sense strand
uugagaaguuuguaacaga

SEQ ID NO: 79868 - RNA, 19 nt, Homo sapiens
  misc_RNA (1)...(19): siRNA sense strand
gaacaccucggagcugaau

SEQ ID NO: 79869 - RNA, 19 nt, Homo sapiens
  misc_RNA (1)...(19): siRNA sense strand
ugaggcaccuggagaccuu

SEQ ID NO: 79870 - RNA, 19 nt, Homo sapiens
  misc_RNA (1)...(19): siRNA sense strand
ucugaaguguuugacauuu

SEQ ID NO: 79871 - RNA, 19 nt, Homo sapiens
  misc_RNA (1)...(19): siRNA sense strand
ugagaaguuuguaacagau

SEQ ID NO: 79872 - RNA, 19 nt, Homo sapiens
  misc_RNA (1)...(19): siRNA sense strand
cagagcacccgaagucuug

SEQ ID NO: 79873 - RNA, 19 nt, Homo sapiens
  misc_RNA (1)...(19): siRNA sense strand
ggccuugcccgcaucuaua

SEQ ID NO: 79874 - RNA, 19 nt, Homo sapiens
  misc_RNA (1)...(19): siRNA sense strand
acugaaaccauaaaggaua

SEQ ID NO: 79875 - RNA, 19 nt, Homo sapiens
  misc_RNA (1)...(19): siRNA sense strand
ucgaugaacuaggcaaaga

SEQ ID NO: 79876 - RNA, 19 nt, Homo sapiens
  misc_RNA (1)...(19): siRNA sense strand
cugaaaccauaaaggauau

SEQ ID NO: 79877 - RNA, 19 nt, Homo sapiens
  misc_RNA (1)...(19): siRNA sense strand
gcaugccgcucuccaccau

SEQ ID NO: 79878 - RNA, 19 nt, Homo sapiens
  misc_RNA (1)...(19): siRNA sense strand
ucuccgaggucuggacuuu

SEQ ID NO: 79879 - RNA, 19 nt, Homo sapiens
  misc_RNA (1)...(19): siRNA sense strand
agacuugaccacuuacuug

SEQ ID NO: 79880 - RNA, 19 nt, Homo sapiens
  misc_RNA (1)...(19): siRNA sense strand
cccaaccaauugagaaguu

SEQ ID NO: 79881 - RNA, 19 nt, Homo sapiens
  misc_RNA (1)...(19): siRNA sense strand
aaauaaaacucgcugacuu

SEQ ID NO: 79882 - RNA, 19 nt, Homo sapiens
  misc_RNA (1)...(19): siRNA sense strand
gcaaagaaaaccuggauuc

SEQ ID NO: 79883 - RNA, 19 nt, Homo sapiens
  misc_RNA (1)...(19): siRNA sense strand
agagaaaccaaacuaacuu

SEQ ID NO: 79884 - RNA, 19 nt, Homo sapiens
  misc_RNA (1)...(19): siRNA sense strand
cguggaaguucagauguug

SEQ ID NO: 79885 - RNA, 19 nt, Homo sapiens
  misc_RNA (1)...(19): siRNA sense strand
ucacgaacagacagagaaa

SEQ ID NO: 79886 - RNA, 19 nt, Homo sapiens
  misc_RNA (1)...(19): siRNA sense strand
cagagaaaccaaacuaacu

SEQ ID NO: 79887 - RNA, 19 nt, Homo sapiens
  misc_RNA (1)...(19): siRNA sense strand
uaacccagccaaaagaaua

SEQ ID NO: 79888 - RNA, 19 nt, Homo sapiens
  misc_RNA (1)...(19): siRNA sense strand
aguagugcaucgcgaucua

SEQ ID NO: 79889 - RNA, 19 nt, Homo sapiens
  misc_RNA (1)...(19): siRNA sense strand
accagcagcggacaaauaa

SEQ ID NO: 79890 - RNA, 19 nt, Homo sapiens
  misc_RNA (1)...(19): siRNA sense strand
aaguucagauguugaucaa

SEQ ID NO: 79891 - RNA, 19 nt, Homo sapiens
  misc_RNA (1)...(19): siRNA sense strand
ucguggaaguucagauguu

SEQ ID NO: 79892 - RNA, 19 nt, Homo sapiens
  misc_RNA (1)...(19): siRNA sense strand
ggauaugauguuucagcuu

SEQ ID NO: 79893 - RNA, 19 nt, Homo sapiens
  misc_RNA (1)...(19): siRNA sense strand
gacauuuaacccagccaaa

SEQ ID NO: 79894 - RNA, 19 nt, Homo sapiens
  misc_RNA (1)...(19): siRNA sense strand
caaccaauugagaaguuug

SEQ ID NO: 79895 - RNA, 19 nt, Homo sapiens
  misc_RNA (1)...(19): siRNA sense strand
guagugcaucgcgaucuaa

SEQ ID NO: 79896 - RNA, 19 nt, Homo sapiens
  misc_RNA (1)...(19): siRNA sense strand
cuggaguguuggcugcaua

SEQ ID NO: 79897 - RNA, 19 nt, Homo sapiens
  misc_RNA (1)...(19): siRNA sense strand
agaagaagacuggccuaga

SEQ ID NO: 79898 - RNA, 19 nt, Homo sapiens
  misc_RNA (1)...(19): siRNA sense strand
ugaccacuuacuuggauaa

SEQ ID NO: 79899 - RNA, 19 nt, Homo sapiens
  misc_RNA (1)...(19): siRNA sense strand
gcacagugucacgaacaga

SEQ ID NO: 79900 - RNA, 19 nt, Homo sapiens
  misc_RNA (1)...(19): siRNA sense strand
gaaguuuguaacagauauc

SEQ ID NO: 79901 - RNA, 19 nt, Homo sapiens
  misc_RNA (1)...(19): siRNA sense strand
caauugagaaguuuguaac

SEQ ID NO: 79902 - RNA, 19 nt, Homo sapiens
  misc_RNA (1)...(19): siRNA sense strand
cuugaccacuuacuuggau

SEQ ID NO: 79903 - RNA, 19 nt, Homo sapiens
  misc_RNA (1)...(19): siRNA sense strand
aaaucugcccaaccaauug

SEQ ID NO: 79904 - RNA, 19 nt, Homo sapiens
  misc_RNA (1)...(19): siRNA sense strand
cagcagcggacaaauaaaa

SEQ ID NO: 79905 - RNA, 19 nt, Homo sapiens
  misc_RNA (1)...(19): siRNA sense strand
gaucuaaaaccacagaaca

SEQ ID NO: 79906 - RNA, 19 nt, Homo sapiens
  misc_RNA (1)...(19): siRNA sense strand
ccuggaaaggugcaaagaa

SEQ ID NO: 79907 - RNA, 19 nt, Homo sapiens
  misc_RNA (1)...(19): siRNA sense strand
gaacaugaccucuggcaua

SEQ ID NO: 79908 - RNA, 19 nt, Homo sapiens
  misc_RNA (1)...(19): siRNA sense strand
agaagaaccugaugacaaa

SEQ ID NO: 79909 - RNA, 19 nt, Homo sapiens
  misc_RNA (1)...(19): siRNA sense strand
gaacugggaucucuauguc

SEQ ID NO: 79910 - RNA, 19 nt, Homo sapiens
  misc_RNA (1)...(19): siRNA sense strand
caagaagccaguucaguua

SEQ ID NO: 79911 - RNA, 19 nt, Homo sapiens
  misc_RNA (1)...(19): siRNA sense strand
gaagaaauacguauaccaa

SEQ ID NO: 79912 - RNA, 19 nt, Homo sapiens
  misc_RNA (1)...(19): siRNA sense strand
gauaaagauugggaagaua

SEQ ID NO: 79913 - RNA, 19 nt, Homo sapiens
  misc_RNA (1)...(19): siRNA sense strand
ucgaggaccuguuugaaua

SEQ ID NO: 79914 - RNA, 19 nt, Homo sapiens
  misc_RNA (1)...(19): siRNA sense strand
ggacagaauauucaaugua

SEQ ID NO: 79915 - RNA, 19 nt, Homo sapiens
  misc_RNA (1)...(19): siRNA sense strand
ggaaagaugggaaggauga

SEQ ID NO: 79916 - RNA, 19 nt, Homo sapiens
  misc_RNA (1)...(19): siRNA sense strand
caugaccucuggcauauaa

SEQ ID NO: 79917 - RNA, 19 nt, Homo sapiens
  misc_RNA (1)...(19): siRNA sense strand
gaaggaugauaaagacuau

SEQ ID NO: 79918 - RNA, 19 nt, Homo sapiens
  misc_RNA (1)...(19): siRNA sense strand
gcaauaaccacacuaaugg

SEQ ID NO: 79919 - RNA, 19 nt, Homo sapiens
  misc_RNA (1)...(19): siRNA sense strand
ccacaguacucacaucaga

SEQ ID NO: 79920 - RNA, 19 nt, Homo sapiens
  misc_RNA (1)...(19): siRNA sense strand
ggaaggaugauaaagacua

SEQ ID NO: 79921 - RNA, 19 nt, Homo sapiens
  misc_RNA (1)...(19): siRNA sense strand
gcacagagauuugaaaccu

SEQ ID NO: 79922 - RNA, 19 nt, Homo sapiens
  misc_RNA (1)...(19): siRNA sense strand
uauaccaacugcagccuua

SEQ ID NO: 79923 - RNA, 19 nt, Homo sapiens
  misc_RNA (1)...(19): siRNA sense strand
gggauuuccugcagauaaa

SEQ ID NO: 79924 - RNA, 19 nt, Homo sapiens
  misc_RNA (1)...(19): siRNA sense strand
gagcaaggcauuauaccaa

SEQ ID NO: 79925 - RNA, 19 nt, Homo sapiens
  misc_RNA (1)...(19): siRNA sense strand
gaagaaagugagaguuguu

SEQ ID NO: 79926 - RNA, 19 nt, Homo sapiens
  misc_RNA (1)...(19): siRNA sense strand
gaggaaagaugggaaggau

SEQ ID NO: 79927 - RNA, 19 nt, Homo sapiens
  misc_RNA (1)...(19): siRNA sense strand
gcauuccacuugcuucaga

SEQ ID NO: 79928 - RNA, 19 nt, Homo sapiens
  misc_RNA (1)...(19): siRNA sense strand
uaaagcgaauuaccucaga

SEQ ID NO: 79929 - RNA, 19 nt, Homo sapiens
  misc_RNA (1)...(19): siRNA sense strand
uacgagggcugcaaaguug

SEQ ID NO: 79930 - RNA, 19 nt, Homo sapiens
  misc_RNA (1)...(19): siRNA sense strand
uaucagauccuagauggua

SEQ ID NO: 79931 - RNA, 19 nt, Homo sapiens
  misc_RNA (1)...(19): siRNA sense strand
ggcaauaaccacacuaaug

SEQ ID NO: 79932 - RNA, 19 nt, Homo sapiens
  misc_RNA (1)...(19): siRNA sense strand
guguauauuugcagaacua

SEQ ID NO: 79933 - RNA, 19 nt, Homo sapiens
  misc_RNA (1)...(19): siRNA sense strand
gauuugaaaccugcuaaua

SEQ ID NO: 79934 - RNA, 19 nt, Homo sapiens
  misc_RNA (1)...(19): siRNA sense strand
gcacuuauggucacgucua

SEQ ID NO: 79935 - RNA, 19 nt, Homo sapiens
  misc_RNA (1)...(19): siRNA sense strand
ucaaaucccuuacccaaaa

SEQ ID NO: 79936 - RNA, 19 nt, Homo sapiens
  misc_RNA (1)...(19): siRNA sense strand
gaaauacguauaccaacug

SEQ ID NO: 79937 - RNA, 19 nt, Homo sapiens
  misc_RNA (1)...(19): siRNA sense strand
guagagaaauagcauuacu

SEQ ID NO: 79938 - RNA, 19 nt, Homo sapiens
  misc_RNA (1)...(19): siRNA sense strand
gcaggaccccuauuucuua

SEQ ID NO: 79939 - RNA, 19 nt, Homo sapiens
  misc_RNA (1)...(19): siRNA sense strand
gacccaauaaagcgaauua

SEQ ID NO: 79940 - RNA, 19 nt, Homo sapiens
  misc_RNA (1)...(19): siRNA sense strand
agaaauagcauuacuucga

SEQ ID NO: 79941 - RNA, 19 nt, Homo sapiens
  misc_RNA (1)...(19): siRNA sense strand
uaucaugaccucagacuau

SEQ ID NO: 79942 - RNA, 19 nt, Homo sapiens
  misc_RNA (1)...(19): siRNA sense strand
acaagaagccaguucaguu

SEQ ID NO: 79943 - RNA, 19 nt, Homo sapiens
  misc_RNA (1)...(19): siRNA sense strand
uaaaccagauaguaaagca

SEQ ID NO: 79944 - RNA, 19 nt, Homo sapiens
  misc_RNA (1)...(19): siRNA sense strand
gcagccuuaucaaguauau

SEQ ID NO: 79945 - RNA, 19 nt, Homo sapiens
  misc_RNA (1)...(19): siRNA sense strand
ggaacugggaucucuaugu

SEQ ID NO: 79946 - RNA, 19 nt, Homo sapiens
  misc_RNA (1)...(19): siRNA sense strand
gcaaggcauuauaccaaag

SEQ ID NO: 79947 - RNA, 19 nt, Homo sapiens
  misc_RNA (1)...(19): siRNA sense strand
aaacgucauuucucuucaa

SEQ ID NO: 79948 - RNA, 19 nt, Homo sapiens
  misc_RNA (1)...(19): siRNA sense strand
uaguaaagcauuccacuug

SEQ ID NO: 79949 - RNA, 19 nt, Homo sapiens
  misc_RNA (1)...(19): siRNA sense strand
cuacaaagccaagaggaaa

SEQ ID NO: 79950 - RNA, 19 nt, Homo sapiens
  misc_RNA (1)...(19): siRNA sense strand
ggcuuugcccgauuauuua

SEQ ID NO: 79951 - RNA, 19 nt, Homo sapiens
  misc_RNA (1)...(19): siRNA sense strand
aagaagaaccugaugacaa

SEQ ID NO: 79952 - RNA, 19 nt, Homo sapiens
  misc_RNA (1)...(19): siRNA sense strand
agauaaagauugggaagau

SEQ ID NO: 79953 - RNA, 19 nt, Homo sapiens
  misc_RNA (1)...(19): siRNA sense strand
gaaggaacugggaucucua

SEQ ID NO: 79954 - RNA, 19 nt, Homo sapiens
  misc_RNA (1)...(19): siRNA sense strand
ucagguggacuuaucauga

SEQ ID NO: 79955 - RNA, 19 nt, Homo sapiens
  misc_RNA (1)...(19): siRNA sense strand
cgucagaaccaauauuuca

SEQ ID NO: 79956 - RNA, 19 nt, Homo sapiens
  misc_RNA (1)...(19): siRNA sense strand
gauccuagaugguauucac

SEQ ID NO: 79957 - RNA, 19 nt, Homo sapiens
  misc_RNA (1)...(19): siRNA sense strand
gcaaacaagaagccaguuc

SEQ ID NO: 79958 - RNA, 19 nt, Homo sapiens
  misc_RNA (1)...(19): siRNA sense strand
ugaagaaagugagaguugu

SEQ ID NO: 79959 - RNA, 19 nt, Homo sapiens
  misc_RNA (1)...(19): siRNA sense strand
gaagaagaaccugaugaca

SEQ ID NO: 79960 - RNA, 19 nt, Homo sapiens
  misc_RNA (1)...(19): siRNA sense strand
agaaauacguauaccaacu

SEQ ID NO: 79961 - RNA, 19 nt, Homo sapiens
  misc_RNA (1)...(19): siRNA sense strand
gucggcauguagagaaaua

SEQ ID NO: 79962 - RNA, 19 nt, Homo sapiens
  misc_RNA (1)...(19): siRNA sense strand
caaacaagaagccaguuca

SEQ ID NO: 79963 - RNA, 19 nt, Homo sapiens
  misc_RNA (1)...(19): siRNA sense strand
caaacgucauuucucuuca

SEQ ID NO: 79964 - RNA, 19 nt, Homo sapiens
  misc_RNA (1)...(19): siRNA sense strand
ccaaacgucauuucucuuc

SEQ ID NO: 79965 - RNA, 19 nt, Homo sapiens
  misc_RNA (1)...(19): siRNA sense strand
ugaagccuuuagcagauuu

SEQ ID NO: 79966 - RNA, 19 nt, Homo sapiens
  misc_RNA (1)...(19): siRNA sense strand
ggcauauaaucaaguuuca

SEQ ID NO: 79967 - RNA, 19 nt, Homo sapiens
  misc_RNA (1)...(19): siRNA sense strand
agaaggaacugggaucucu

SEQ ID NO: 79968 - RNA, 19 nt, Homo sapiens
  misc_RNA (1)...(19): siRNA sense strand
ggaagaagaaccugaugac

SEQ ID NO: 79969 - RNA, 19 nt, Homo sapiens
  misc_RNA (1)...(19): siRNA sense strand
acugcagccuuaucaagua

SEQ ID NO: 79970 - RNA, 19 nt, Homo sapiens
  misc_RNA (1)...(19): siRNA sense strand
cuacuaacgucagaaccaa

SEQ ID NO: 79971 - RNA, 19 nt, Homo sapiens
  misc_RNA (1)...(19): siRNA sense strand
agauuuggauccagugguu

SEQ ID NO: 79972 - RNA, 19 nt, Homo sapiens
  misc_RNA (1)...(19): siRNA sense strand
gaacuacuaacgucagaac

SEQ ID NO: 79973 - RNA, 19 nt, Homo sapiens
  misc_RNA (1)...(19): siRNA sense strand
cagaacuacuaacgucaga

SEQ ID NO: 79974 - RNA, 19 nt, Homo sapiens
  misc_RNA (1)...(19): siRNA sense strand
ggcauuauaccaaagcuau

SEQ ID NO: 79975 - RNA, 19 nt, Homo sapiens
  misc_RNA (1)...(19): siRNA sense strand
ugacuaugcugaacaugac

SEQ ID NO: 79976 - RNA, 19 nt, Homo sapiens
  misc_RNA (1)...(19): siRNA sense strand
gaugauaaagacuaugcuu

SEQ ID NO: 79977 - RNA, 19 nt, Homo sapiens
  misc_RNA (1)...(19): siRNA sense strand
aacaugaccucuggcauau

SEQ ID NO: 79978 - RNA, 19 nt, Homo sapiens
  misc_RNA (1)...(19): siRNA sense strand
guaccgagccccugaacua

SEQ ID NO: 79979 - RNA, 19 nt, Homo sapiens
  misc_RNA (1)...(19): siRNA sense strand
uaaccacacuaauggaacu

SEQ ID NO: 79980 - RNA, 19 nt, Homo sapiens
  misc_RNA (1)...(19): siRNA sense strand
agagaaauagcauuacuuc

SEQ ID NO: 79981 - RNA, 19 nt, Homo sapiens
  misc_RNA (1)...(19): siRNA sense strand
caacugcagccuuaucaag

SEQ ID NO: 79982 - RNA, 19 nt, Homo sapiens
  misc_RNA (1)...(19): siRNA sense strand
agguguggcuucuguuuga

SEQ ID NO: 79983 - RNA, 19 nt, Homo sapiens
  misc_RNA (1)...(19): siRNA sense strand
aagaugggaaggaugauaa

SEQ ID NO: 79984 - RNA, 19 nt, Homo sapiens
  misc_RNA (1)...(19): siRNA sense strand
gaacuacuucuuggagcaa

SEQ ID NO: 79985 - RNA, 19 nt, Homo sapiens
  misc_RNA (1)...(19): siRNA sense strand
gagauuugaaaccugcuaa

SEQ ID NO: 79986 - RNA, 19 nt, Homo sapiens
  misc_RNA (1)...(19): siRNA sense strand
uaacgucagaaccaauauu

SEQ ID NO: 79987 - RNA, 19 nt, Homo sapiens
  misc_RNA (1)...(19): siRNA sense strand
caauccacaugcugccuau

SEQ ID NO: 79988 - RNA, 19 nt, Homo sapiens
  misc_RNA (1)...(19): siRNA sense strand
caagaggacaucaaaacua

SEQ ID NO: 79989 - RNA, 19 nt, Homo sapiens
  misc_RNA (1)...(19): siRNA sense strand
uucacuaccugcaugcuaa

SEQ ID NO: 79990 - RNA, 19 nt, Homo sapiens
  misc_RNA (1)...(19): siRNA sense strand
guacucacaucagacacau

SEQ ID NO: 79991 - RNA, 19 nt, Homo sapiens
  misc_RNA (1)...(19): siRNA sense strand
ugaauacgagggcugcaaa

SEQ ID NO: 79992 - RNA, 19 nt, Homo sapiens
  misc_RNA (1)...(19): siRNA sense strand
gcauuacuucgagagcuua

SEQ ID NO: 79993 - RNA, 19 nt, Homo sapiens
  misc_RNA (1)...(19): siRNA sense strand
ccugagcgaggaagaguaa

SEQ ID NO: 79994 - RNA, 19 nt, Homo sapiens
  misc_RNA (1)...(19): siRNA sense strand
cccagcagccuccacagua

SEQ ID NO: 79995 - RNA, 19 nt, Homo sapiens
  misc_RNA (1)...(19): siRNA sense strand
aaagaugggaaggaugaua

SEQ ID NO: 79996 - RNA, 19 nt, Homo sapiens
  misc_RNA (1)...(19): siRNA sense strand
gcagggcaauaaccacacu

SEQ ID NO: 79997 - RNA, 19 nt, Homo sapiens
  misc_RNA (1)...(19): siRNA sense strand
aaagcgaauuaccucagaa

SEQ ID NO: 79998 - RNA, 19 nt, Homo sapiens
  misc_RNA (1)...(19): siRNA sense strand
gaccagcuggacagaauau

SEQ ID NO: 79999 - RNA, 19 nt, Homo sapiens
  misc_RNA (1)...(19): siRNA sense strand
gcauuauaccaaagcuauu

SEQ ID NO: 80000 - RNA, 19 nt, Homo sapiens
  misc_RNA (1)...(19): siRNA sense strand
agcaaggcauuauaccaaa

SEQ ID NO: 80001 - RNA, 19 nt, Homo sapiens
  misc_RNA (1)...(19): siRNA sense strand
ccagcagccuccacaguac

SEQ ID NO: 80002 - RNA, 19 nt, Homo sapiens
  misc_RNA (1)...(19): siRNA sense strand
cagcuggacagaauauuca

SEQ ID NO: 80003 - RNA, 19 nt, Homo sapiens
  misc_RNA (1)...(19): siRNA sense strand
cuauugauauuugggcuau

SEQ ID NO: 80004 - RNA, 19 nt, Homo sapiens
  misc_RNA (1)...(19): siRNA sense strand
gagcagcaugggauacuca

SEQ ID NO: 80005 - RNA, 19 nt, Homo sapiens
  misc_RNA (1)...(19): siRNA sense strand
acuaacgucagaaccaaua

SEQ ID NO: 80006 - RNA, 19 nt, Homo sapiens
  misc_RNA (1)...(19): siRNA sense strand
auacgagggcugcaaaguu

SEQ ID NO: 80007 - RNA, 19 nt, Homo sapiens
  misc_RNA (1)...(19): siRNA sense strand
ggacaccgccugugauuug

SEQ ID NO: 80008 - RNA, 19 nt, Homo sapiens
  misc_RNA (1)...(19): siRNA sense strand
gccaggagacugcuacuua

SEQ ID NO: 80009 - RNA, 19 nt, Homo sapiens
  misc_RNA (1)...(19): siRNA sense strand
uaacaucgaggauaaugaa

SEQ ID NO: 80010 - RNA, 19 nt, Homo sapiens
  misc_RNA (1)...(19): siRNA sense strand
agacuuugcuggaguuuca

SEQ ID NO: 80011 - RNA, 19 nt, Homo sapiens
  misc_RNA (1)...(19): siRNA sense strand
agccacaaaucuucaauaa

SEQ ID NO: 80012 - RNA, 19 nt, Homo sapiens
  misc_RNA (1)...(19): siRNA sense strand
ugaaagaccgaacugguuu

SEQ ID NO: 80013 - RNA, 19 nt, Homo sapiens
  misc_RNA (1)...(19): siRNA sense strand
gaaccugcccuugcacuug

SEQ ID NO: 80014 - RNA, 19 nt, Homo sapiens
  misc_RNA (1)...(19): siRNA sense strand
ccaggagacugcuacuuag

SEQ ID NO: 80015 - RNA, 19 nt, Homo sapiens
  misc_RNA (1)...(19): siRNA sense strand
gagccacaaaucuucaaua

SEQ ID NO: 80016 - RNA, 19 nt, Homo sapiens
  misc_RNA (1)...(19): siRNA sense strand
gaacugguuucgcugucau

SEQ ID NO: 80017 - RNA, 19 nt, Homo sapiens
  misc_RNA (1)...(19): siRNA sense strand
ggaggaaugagguuguuag

SEQ ID NO: 80018 - RNA, 19 nt, Homo sapiens
  misc_RNA (1)...(19): siRNA sense strand
gaccuagagcaacuuacua

SEQ ID NO: 80019 - RNA, 19 nt, Homo sapiens
  misc_RNA (1)...(19): siRNA sense strand
ggaccuagagcaacuuacu

SEQ ID NO: 80020 - RNA, 19 nt, Homo sapiens
  misc_RNA (1)...(19): siRNA sense strand
gaguuucaagcugauguua

SEQ ID NO: 80021 - RNA, 19 nt, Homo sapiens
  misc_RNA (1)...(19): siRNA sense strand
aaacgucaaugcacaaaau

SEQ ID NO: 80022 - RNA, 19 nt, Homo sapiens
  misc_RNA (1)...(19): siRNA sense strand
guuucaagcugauguuaac

SEQ ID NO: 80023 - RNA, 19 nt, Homo sapiens
  misc_RNA (1)...(19): siRNA sense strand
guaaacgucaaugcacaaa

SEQ ID NO: 80024 - RNA, 19 nt, Homo sapiens
  misc_RNA (1)...(19): siRNA sense strand
gaagcacacggccagcaau

SEQ ID NO: 80025 - RNA, 19 nt, Homo sapiens
  misc_RNA (1)...(19): siRNA sense strand
guuaugaaacuuggaaauc

SEQ ID NO: 80026 - RNA, 19 nt, Homo sapiens
  misc_RNA (1)...(19): siRNA sense strand
gggaggaaugagguuguua

SEQ ID NO: 80027 - RNA, 19 nt, Homo sapiens
  misc_RNA (1)...(19): siRNA sense strand
ggaaccugcccuugcacuu

SEQ ID NO: 80028 - RNA, 19 nt, Homo sapiens
  misc_RNA (1)...(19): siRNA sense strand
ggaguuucaagcugauguu

SEQ ID NO: 80029 - RNA, 19 nt, Homo sapiens
  misc_RNA (1)...(19): siRNA sense strand
uaauguaaacgucaaugca

SEQ ID NO: 80030 - RNA, 19 nt, Homo sapiens
  misc_RNA (1)...(19): siRNA sense strand
uugaaagaccgaacugguu

SEQ ID NO: 80031 - RNA, 19 nt, Homo sapiens
  misc_RNA (1)...(19): siRNA sense strand
uacagacuuugcuggaguu

SEQ ID NO: 80032 - RNA, 19 nt, Homo sapiens
  misc_RNA (1)...(19): siRNA sense strand
ccuggacacuuuacagacu

SEQ ID NO: 80033 - RNA, 19 nt, Homo sapiens
  misc_RNA (1)...(19): siRNA sense strand
guuaacaucgaggauaaug

SEQ ID NO: 80034 - RNA, 19 nt, Homo sapiens
  misc_RNA (1)...(19): siRNA sense strand
uggacacuuuacagacuuu

SEQ ID NO: 80035 - RNA, 19 nt, Homo sapiens
  misc_RNA (1)...(19): siRNA sense strand
caggagacugcuacuuaga

SEQ ID NO: 80036 - RNA, 19 nt, Homo sapiens
  misc_RNA (1)...(19): siRNA sense strand
gguuaugaaacuuggaaau

SEQ ID NO: 80037 - RNA, 19 nt, Homo sapiens
  misc_RNA (1)...(19): siRNA sense strand
ggacaccgccugugauuug

SEQ ID NO: 80038 - RNA, 19 nt, Homo sapiens
  misc_RNA (1)...(19): siRNA sense strand
gccaggagacugcuacuua

SEQ ID NO: 80039 - RNA, 19 nt, Homo sapiens
  misc_RNA (1)...(19): siRNA sense strand
uaacaucgaggauaaugaa

SEQ ID NO: 80040 - RNA, 19 nt, Homo sapiens
  misc_RNA (1)...(19): siRNA sense strand
agacuuugcuggaguuuca

SEQ ID NO: 80041 - RNA, 19 nt, Homo sapiens
  misc_RNA (1)...(19): siRNA sense strand
agccacaaaucuucaauaa

SEQ ID NO: 80042 - RNA, 19 nt, Homo sapiens
  misc_RNA (1)...(19): siRNA sense strand
ugaaagaccgaacugguuu

SEQ ID NO: 80043 - RNA, 19 nt, Homo sapiens
  misc_RNA (1)...(19): siRNA sense strand
gaaccugcccuugcacuug

SEQ ID NO: 80044 - RNA, 19 nt, Homo sapiens
  misc_RNA (1)...(19): siRNA sense strand
ccaggagacugcuacuuag

SEQ ID NO: 80045 - RNA, 19 nt, Homo sapiens
  misc_RNA (1)...(19): siRNA sense strand
gagccacaaaucuucaaua

SEQ ID NO: 80046 - RNA, 19 nt, Homo sapiens
  misc_RNA (1)...(19): siRNA sense strand
gaacugguuucgcugucau

SEQ ID NO: 80047 - RNA, 19 nt, Homo sapiens
  misc_RNA (1)...(19): siRNA sense strand
ggaggaaugagguuguuag

SEQ ID NO: 80048 - RNA, 19 nt, Homo sapiens
  misc_RNA (1)...(19): siRNA sense strand
gaccuagagcaacuuacua

SEQ ID NO: 80049 - RNA, 19 nt, Homo sapiens
  misc_RNA (1)...(19): siRNA sense strand
ggaccuagagcaacuuacu

SEQ ID NO: 80050 - RNA, 19 nt, Homo sapiens
  misc_RNA (1)...(19): siRNA sense strand
gaguuucaagcugauguua

SEQ ID NO: 80051 - RNA, 19 nt, Homo sapiens
  misc_RNA (1)...(19): siRNA sense strand
aaacgucaaugcacaaaau

SEQ ID NO: 80052 - RNA, 19 nt, Homo sapiens
  misc_RNA (1)...(19): siRNA sense strand
guuucaagcugauguuaac

SEQ ID NO: 80053 - RNA, 19 nt, Homo sapiens
  misc_RNA (1)...(19): siRNA sense strand
guaaacgucaaugcacaaa

SEQ ID NO: 80054 - RNA, 19 nt, Homo sapiens
  misc_RNA (1)...(19): siRNA sense strand
gaagcacacggccagcaau

SEQ ID NO: 80055 - RNA, 19 nt, Homo sapiens
  misc_RNA (1)...(19): siRNA sense strand
guuaugaaacuuggaaauc

SEQ ID NO: 80056 - RNA, 19 nt, Homo sapiens
  misc_RNA (1)...(19): siRNA sense strand
gggaggaaugagguuguua

SEQ ID NO: 80057 - RNA, 19 nt, Homo sapiens
  misc_RNA (1)...(19): siRNA sense strand
ggaaccugcccuugcacuu

SEQ ID NO: 80058 - RNA, 19 nt, Homo sapiens
  misc_RNA (1)...(19): siRNA sense strand
ggaguuucaagcugauguu

SEQ ID NO: 80059 - RNA, 19 nt, Homo sapiens
  misc_RNA (1)...(19): siRNA sense strand
uaauguaaacgucaaugca

SEQ ID NO: 80060 - RNA, 19 nt, Homo sapiens
  misc_RNA (1)...(19): siRNA sense strand
uugaaagaccgaacugguu

SEQ ID NO: 80061 - RNA, 19 nt, Homo sapiens
  misc_RNA (1)...(19): siRNA sense strand
uacagacuuugcuggaguu

SEQ ID NO: 80062 - RNA, 19 nt, Homo sapiens
  misc_RNA (1)...(19): siRNA sense strand
ccuggacacuuuacagacu

SEQ ID NO: 80063 - RNA, 19 nt, Homo sapiens
  misc_RNA (1)...(19): siRNA sense strand
guuaacaucgaggauaaug

SEQ ID NO: 80064 - RNA, 19 nt, Homo sapiens
  misc_RNA (1)...(19): siRNA sense strand
uggacacuuuacagacuuu

SEQ ID NO: 80065 - RNA, 19 nt, Homo sapiens
  misc_RNA (1)...(19): siRNA sense strand
caggagacugcuacuuaga

SEQ ID NO: 80066 - RNA, 19 nt, Homo sapiens
  misc_RNA (1)...(19): siRNA sense strand
gguuaugaaacuuggaaau

SEQ ID NO: 80067 - RNA, 19 nt, Homo sapiens
  misc_RNA (1)...(19): siRNA sense strand
gcaaugacauaacugcuua

SEQ ID NO: 80068 - RNA, 19 nt, Homo sapiens
  misc_RNA (1)...(19): siRNA sense strand
ugacagauauggagauuug

SEQ ID NO: 80069 - RNA, 19 nt, Homo sapiens
  misc_RNA (1)...(19): siRNA sense strand
gagagacuguagcugauua

SEQ ID NO: 80070 - RNA, 19 nt, Homo sapiens
  misc_RNA (1)...(19): siRNA sense strand
ugacauaacugcuuaccuu

SEQ ID NO: 80071 - RNA, 19 nt, Homo sapiens
  misc_RNA (1)...(19): siRNA sense strand
guuccaauaucaaguguua

SEQ ID NO: 80072 - RNA, 19 nt, Homo sapiens
  misc_RNA (1)...(19): siRNA sense strand
gaaaugcuuccaugaaauu

SEQ ID NO: 80073 - RNA, 19 nt, Homo sapiens
  misc_RNA (1)...(19): siRNA sense strand
gugaaaugcuuccaugaaa

SEQ ID NO: 80074 - RNA, 19 nt, Homo sapiens
  misc_RNA (1)...(19): siRNA sense strand
ggaauucucacucuaacua

SEQ ID NO: 80075 - RNA, 19 nt, Homo sapiens
  misc_RNA (1)...(19): siRNA sense strand
gaagugauguaaacuccuu

SEQ ID NO: 80076 - RNA, 19 nt, Homo sapiens
  misc_RNA (1)...(19): siRNA sense strand
ucaugucacuuuacugaua

SEQ ID NO: 80077 - RNA, 19 nt, Homo sapiens
  misc_RNA (1)...(19): siRNA sense strand
uaacuaugaucucguuguu

SEQ ID NO: 80078 - RNA, 19 nt, Homo sapiens
  misc_RNA (1)...(19): siRNA sense strand
guacugaguuuggugaaga

SEQ ID NO: 80079 - RNA, 19 nt, Homo sapiens
  misc_RNA (1)...(19): siRNA sense strand
cgacaaagaaacagauauu

SEQ ID NO: 80080 - RNA, 19 nt, Homo sapiens
  misc_RNA (1)...(19): siRNA sense strand
gaugacagauauggagauu

SEQ ID NO: 80081 - RNA, 19 nt, Homo sapiens
  misc_RNA (1)...(19): siRNA sense strand
ccugaagacucaucucauu

SEQ ID NO: 80082 - RNA, 19 nt, Homo sapiens
  misc_RNA (1)...(19): siRNA sense strand
caaaagagccuucaaaauc

SEQ ID NO: 80083 - RNA, 19 nt, Homo sapiens
  misc_RNA (1)...(19): siRNA sense strand
gcauugcacugucaaccuu

SEQ ID NO: 80084 - RNA, 19 nt, Homo sapiens
  misc_RNA (1)...(19): siRNA sense strand
ucaaagagaagaacaacuu

SEQ ID NO: 80085 - RNA, 19 nt, Homo sapiens
  misc_RNA (1)...(19): siRNA sense strand
cagauuugauugucaguau

SEQ ID NO: 80086 - RNA, 19 nt, Homo sapiens
  misc_RNA (1)...(19): siRNA sense strand
gacuguagcugauuauuuu

SEQ ID NO: 80087 - RNA, 19 nt, Homo sapiens
  misc_RNA (1)...(19): siRNA sense strand
ucacuuuacugauaacugu

SEQ ID NO: 80088 - RNA, 19 nt, Homo sapiens
  misc_RNA (1)...(19): siRNA sense strand
ggacucaugucacuuuacu

SEQ ID NO: 80089 - RNA, 19 nt, Homo sapiens
  misc_RNA (1)...(19): siRNA sense strand
ugaaaugcuuccaugaaau

SEQ ID NO: 80090 - RNA, 19 nt, Homo sapiens
  misc_RNA (1)...(19): siRNA sense strand
caugucacuuuacugauaa

SEQ ID NO: 80091 - RNA, 19 nt, Homo sapiens
  misc_RNA (1)...(19): siRNA sense strand
gcauguuuguacugaguuu

SEQ ID NO: 80092 - RNA, 19 nt, Homo sapiens
  misc_RNA (1)...(19): siRNA sense strand
caaguguuaucugcaauga

SEQ ID NO: 80093 - RNA, 19 nt, Homo sapiens
  misc_RNA (1)...(19): siRNA sense strand
uaucaaguguuaucugcaa

SEQ ID NO: 80094 - RNA, 19 nt, Homo sapiens
  misc_RNA (1)...(19): siRNA sense strand
ugucaaccuuugcaucuuu

SEQ ID NO: 80095 - RNA, 19 nt, Homo sapiens
  misc_RNA (1)...(19): siRNA sense strand
ccuauguguuauccaaaua

SEQ ID NO: 80096 - RNA, 19 nt, Homo sapiens
  misc_RNA (1)...(19): siRNA sense strand
ucacuuccacccuuucuaa

SEQ ID NO: 80097 - RNA, 19 nt, Homo sapiens
  misc_RNA (1)...(19): siRNA sense strand
gauaauggacagauuugau

SEQ ID NO: 80098 - RNA, 19 nt, Homo sapiens
  misc_RNA (1)...(19): siRNA sense strand
uaugaucuaccaugguuua

SEQ ID NO: 80099 - RNA, 19 nt, Homo sapiens
  misc_RNA (1)...(19): siRNA sense strand
ggacauggugggauaaugg

SEQ ID NO: 80100 - RNA, 19 nt, Homo sapiens
  misc_RNA (1)...(19): siRNA sense strand
aaaagagccuucaaaauca

SEQ ID NO: 80101 - RNA, 19 nt, Homo sapiens
  misc_RNA (1)...(19): siRNA sense strand
gaauaccgaagugauguaa

SEQ ID NO: 80102 - RNA, 19 nt, Homo sapiens
  misc_RNA (1)...(19): siRNA sense strand
ggaauaccgaagugaugua

SEQ ID NO: 80103 - RNA, 19 nt, Homo sapiens
  misc_RNA (1)...(19): siRNA sense strand
ucgcuaccauagauuuaua

SEQ ID NO: 80104 - RNA, 19 nt, Homo sapiens
  misc_RNA (1)...(19): siRNA sense strand
cugaacagcaguuaaauau

SEQ ID NO: 80105 - RNA, 19 nt, Homo sapiens
  misc_RNA (1)...(19): siRNA sense strand
ugaagacucaucucauuga

SEQ ID NO: 80106 - RNA, 19 nt, Homo sapiens
  misc_RNA (1)...(19): siRNA sense strand
cuuaugaucuaccaugguu

SEQ ID NO: 80107 - RNA, 19 nt, Homo sapiens
  misc_RNA (1)...(19): siRNA sense strand
aguauuugauggcaacuuu

SEQ ID NO: 80108 - RNA, 19 nt, Homo sapiens
  misc_RNA (1)...(19): siRNA sense strand
gucaaccuuugcaucuuua

SEQ ID NO: 80109 - RNA, 19 nt, Homo sapiens
  misc_RNA (1)...(19): siRNA sense strand
gagcaccagcgacaaagaa

SEQ ID NO: 80110 - RNA, 19 nt, Homo sapiens
  misc_RNA (1)...(19): siRNA sense strand
uauaucauuugcccucuau

SEQ ID NO: 80111 - RNA, 19 nt, Homo sapiens
  misc_RNA (1)...(19): siRNA sense strand
ggaaagagugagcuuguac

SEQ ID NO: 80112 - RNA, 19 nt, Homo sapiens
  misc_RNA (1)...(19): siRNA sense strand
uaaacuccuucgugacaga

SEQ ID NO: 80113 - RNA, 19 nt, Homo sapiens
  misc_RNA (1)...(19): siRNA sense strand
auucauuggugguuucuuu

SEQ ID NO: 80114 - RNA, 19 nt, Homo sapiens
  misc_RNA (1)...(19): siRNA sense strand
gagugagcuuguacccuuu

SEQ ID NO: 80115 - RNA, 19 nt, Homo sapiens
  misc_RNA (1)...(19): siRNA sense strand
agacuguagcugauuauuu

SEQ ID NO: 80116 - RNA, 19 nt, Homo sapiens
  misc_RNA (1)...(19): siRNA sense strand
guucugggcauccaaguga

SEQ ID NO: 80117 - RNA, 19 nt, Homo sapiens
  misc_RNA (1)...(19): siRNA sense strand
gauauggagauuuggauuc

SEQ ID NO: 80118 - RNA, 19 nt, Homo sapiens
  misc_RNA (1)...(19): siRNA sense strand
gacaaagaaacagauauug

SEQ ID NO: 80119 - RNA, 19 nt, Homo sapiens
  misc_RNA (1)...(19): siRNA sense strand
uuuggaggcuucuuugcua

SEQ ID NO: 80120 - RNA, 19 nt, Homo sapiens
  misc_RNA (1)...(19): siRNA sense strand
uuacucacuuccacccuuu

SEQ ID NO: 80121 - RNA, 19 nt, Homo sapiens
  misc_RNA (1)...(19): siRNA sense strand
cgagagcaccagcgacaaa

SEQ ID NO: 80122 - RNA, 19 nt, Homo sapiens
  misc_RNA (1)...(19): siRNA sense strand
gacauaacugcuuaccuuu

SEQ ID NO: 80123 - RNA, 19 nt, Homo sapiens
  misc_RNA (1)...(19): siRNA sense strand
ccugaacagcaguuaaaua

SEQ ID NO: 80124 - RNA, 19 nt, Homo sapiens
  misc_RNA (1)...(19): siRNA sense strand
gggcccaaaucccagcaaa

SEQ ID NO: 80125 - RNA, 19 nt, Homo sapiens
  misc_RNA (1)...(19): siRNA sense strand
ccaccauccucagauagaa

SEQ ID NO: 80126 - RNA, 19 nt, Homo sapiens
  misc_RNA (1)...(19): siRNA sense strand
ggagagacuguagcugauu

SEQ ID NO: 80127 - RNA, 19 nt, Homo sapiens
  misc_RNA (1)...(19): siRNA sense strand
aguguuaucugcaaugaca

SEQ ID NO: 80128 - RNA, 19 nt, Homo sapiens
  misc_RNA (1)...(19): siRNA sense strand
agaaacagauauugaugac

SEQ ID NO: 80129 - RNA, 19 nt, Homo sapiens
  misc_RNA (1)...(19): siRNA sense strand
caaccugaacagcaguuaa

SEQ ID NO: 80130 - RNA, 19 nt, Homo sapiens
  misc_RNA (1)...(19): siRNA sense strand
gggauaauggacagauuug

SEQ ID NO: 80131 - RNA, 19 nt, Homo sapiens
  misc_RNA (1)...(19): siRNA sense strand
ggaggcuucuuugcuagug

SEQ ID NO: 80132 - RNA, 19 nt, Homo sapiens
  misc_RNA (1)...(19): siRNA sense strand
ucuaaaggcagucuugaga

SEQ ID NO: 80133 - RNA, 19 nt, Homo sapiens
  misc_RNA (1)...(19): siRNA sense strand
ccaguggaauaccgaagug

SEQ ID NO: 80134 - RNA, 19 nt, Homo sapiens
  misc_RNA (1)...(19): siRNA sense strand
gccuauguguuauccaaau

SEQ ID NO: 80135 - RNA, 19 nt, Homo sapiens
  misc_RNA (1)...(19): siRNA sense strand
uaucugcaaugacauaacu

SEQ ID NO: 80136 - RNA, 19 nt, Homo sapiens
  misc_RNA (1)...(19): siRNA sense strand
gguacuuucuauugugugu

SEQ ID NO: 80137 - RNA, 19 nt, Homo sapiens
  misc_RNA (1)...(19): siRNA sense strand
guugguacuuucuauugug

SEQ ID NO: 80138 - RNA, 19 nt, Homo sapiens
  misc_RNA (1)...(19): siRNA sense strand
cauugcugccuauguguua

SEQ ID NO: 80139 - RNA, 19 nt, Homo sapiens
  misc_RNA (1)...(19): siRNA sense strand
caugauaugguuccuuguu

SEQ ID NO: 80140 - RNA, 19 nt, Homo sapiens
  misc_RNA (1)...(19): siRNA sense strand
uugaaggcaugauaugguu

SEQ ID NO: 80141 - RNA, 19 nt, Homo sapiens
  misc_RNA (1)...(19): siRNA sense strand
cagauauugaugacagaua

SEQ ID NO: 80142 - RNA, 19 nt, Homo sapiens
  misc_RNA (1)...(19): siRNA sense strand
gcccaaaucccagcaaagu

SEQ ID NO: 80143 - RNA, 19 nt, Homo sapiens
  misc_RNA (1)...(19): siRNA sense strand
aggaaagagugagcuugua

SEQ ID NO: 80144 - RNA, 19 nt, Homo sapiens
  misc_RNA (1)...(19): siRNA sense strand
gcuucagacuuacucacuu

SEQ ID NO: 80145 - RNA, 19 nt, Homo sapiens
  misc_RNA (1)...(19): siRNA sense strand
gaauucucacucuaacuau

SEQ ID NO: 80146 - RNA, 19 nt, Homo sapiens
  misc_RNA (1)...(19): siRNA sense strand
acuaugaucucguuguuuu

SEQ ID NO: 80147 - RNA, 19 nt, Homo sapiens
  misc_RNA (1)...(19): siRNA sense strand
gugggauaauggacagauu

SEQ ID NO: 80148 - RNA, 19 nt, Homo sapiens
  misc_RNA (1)...(19): siRNA sense strand
guggauacguggaauucuc

SEQ ID NO: 80149 - RNA, 19 nt, Homo sapiens
  misc_RNA (1)...(19): siRNA sense strand
gaaggauucauuggugguu

SEQ ID NO: 80150 - RNA, 19 nt, Homo sapiens
  misc_RNA (1)...(19): siRNA sense strand
guuccuuguuccaauauca

SEQ ID NO: 80151 - RNA, 19 nt, Homo sapiens
  misc_RNA (1)...(19): siRNA sense strand
gcugaugcuucuuguucug

SEQ ID NO: 80152 - RNA, 19 nt, Homo sapiens
  misc_RNA (1)...(19): siRNA sense strand
aaagcucuaucugguuuau

SEQ ID NO: 80153 - RNA, 19 nt, Homo sapiens
  misc_RNA (1)...(19): siRNA sense strand
acucaugucacuuuacuga

SEQ ID NO: 80154 - RNA, 19 nt, Homo sapiens
  misc_RNA (1)...(19): siRNA sense strand
ucuauuguguguaaacuac

SEQ ID NO: 80155 - RNA, 19 nt, Homo sapiens
  misc_RNA (1)...(19): siRNA sense strand
cguggaauucucacucuaa

SEQ ID NO: 80156 - RNA, 19 nt, Homo sapiens
  misc_RNA (1)...(19): siRNA sense strand
gauggcaacuuuuguacau

SEQ ID NO: 80157 - RNA, 19 nt, Homo sapiens
  misc_RNA (1)...(19): siRNA sense strand
ggauaauggacagauuuga

SEQ ID NO: 80158 - RNA, 19 nt, Homo sapiens
  misc_RNA (1)...(19): siRNA sense strand
auucugauauuccggaaau

SEQ ID NO: 80159 - RNA, 19 nt, Homo sapiens
  misc_RNA (1)...(19): siRNA sense strand
cuucagacuuacucacuuc

SEQ ID NO: 80160 - RNA, 19 nt, Homo sapiens
  misc_RNA (1)...(19): siRNA sense strand
gagaacuccauuaauuaag

SEQ ID NO: 80161 - RNA, 19 nt, Homo sapiens
  misc_RNA (1)...(19): siRNA sense strand
aaccugaacagcaguuaaa

SEQ ID NO: 80162 - RNA, 19 nt, Homo sapiens
  misc_RNA (1)...(19): siRNA sense strand
uaauggacagauuugauug

SEQ ID NO: 80163 - RNA, 19 nt, Homo sapiens
  misc_RNA (1)...(19): siRNA sense strand
cuucuuugcuaguggauuc

SEQ ID NO: 80164 - RNA, 19 nt, Homo sapiens
  misc_RNA (1)...(19): siRNA sense strand
caggaaagagugagcuugu

SEQ ID NO: 80165 - RNA, 19 nt, Homo sapiens
  misc_RNA (1)...(19): siRNA sense strand
auaccgaagugauguaaac

SEQ ID NO: 80166 - RNA, 19 nt, Homo sapiens
  misc_RNA (1)...(19): siRNA sense strand
gcuuguacccuuuccagau

SEQ ID NO: 80167 - RNA, 19 nt, Homo sapiens
  misc_RNA (1)...(19): siRNA sense strand
ggacaaagcucuuccucuu

SEQ ID NO: 80168 - RNA, 19 nt, Homo sapiens
  misc_RNA (1)...(19): siRNA sense strand
gcaaauacuucuccagcaa

SEQ ID NO: 80169 - RNA, 19 nt, Homo sapiens
  misc_RNA (1)...(19): siRNA sense strand
ggugguggcuccaguggua

SEQ ID NO: 80170 - RNA, 19 nt, Homo sapiens
  misc_RNA (1)...(19): siRNA sense strand
ggaagcagcagcucucauu

SEQ ID NO: 80171 - RNA, 19 nt, Homo sapiens
  misc_RNA (1)...(19): siRNA sense strand
caaccaaugacaacucuua

SEQ ID NO: 80172 - RNA, 19 nt, Homo sapiens
  misc_RNA (1)...(19): siRNA sense strand
ccagggaccuuggcuaaga

SEQ ID NO: 80173 - RNA, 19 nt, Homo sapiens
  misc_RNA (1)...(19): siRNA sense strand
aaucaccucuguagacaaa

SEQ ID NO: 80174 - RNA, 19 nt, Homo sapiens
  misc_RNA (1)...(19): siRNA sense strand
caaagagaacccugugaaa

SEQ ID NO: 80175 - RNA, 19 nt, Homo sapiens
  misc_RNA (1)...(19): siRNA sense strand
gcucugcucugccaaccaa

SEQ ID NO: 80176 - RNA, 19 nt, Homo sapiens
  misc_RNA (1)...(19): siRNA sense strand
ggaucuggcucuagucuac

SEQ ID NO: 80177 - RNA, 19 nt, Homo sapiens
  misc_RNA (1)...(19): siRNA sense strand
cagcagcagcuuccaagua

SEQ ID NO: 80178 - RNA, 19 nt, Homo sapiens
  misc_RNA (1)...(19): siRNA sense strand
ccaaagagaacccugugaa

SEQ ID NO: 80179 - RNA, 19 nt, Homo sapiens
  misc_RNA (1)...(19): siRNA sense strand
gaccuuggcuaagagcauu

SEQ ID NO: 80180 - RNA, 19 nt, Homo sapiens
  misc_RNA (1)...(19): siRNA sense strand
uacaguggcuccagcaguu

SEQ ID NO: 80181 - RNA, 19 nt, Homo sapiens
  misc_RNA (1)...(19): siRNA sense strand
ccaaucaccucuguagaca

SEQ ID NO: 80182 - RNA, 19 nt, Homo sapiens
  misc_RNA (1)...(19): siRNA sense strand
gcaugucugucuccuccuu

SEQ ID NO: 80183 - RNA, 19 nt, Homo sapiens
  misc_RNA (1)...(19): siRNA sense strand
gagcagcagcagcagcuuu

SEQ ID NO: 80184 - RNA, 19 nt, Homo sapiens
  misc_RNA (1)...(19): siRNA sense strand
cccagcaguucuagcauuu

SEQ ID NO: 80185 - RNA, 19 nt, Homo sapiens
  misc_RNA (1)...(19): siRNA sense strand
ggcaugaccuacaguaagg

SEQ ID NO: 80186 - RNA, 19 nt, Homo sapiens
  misc_RNA (1)...(19): siRNA sense strand
caacucuuaccgcggaaua

SEQ ID NO: 80187 - RNA, 19 nt, Homo sapiens
  misc_RNA (1)...(19): siRNA sense strand
gguauucccaggucagcua

SEQ ID NO: 80188 - RNA, 19 nt, Homo sapiens
  misc_RNA (1)...(19): siRNA sense strand
guggguggcuccucugaca

SEQ ID NO: 80189 - RNA, 19 nt, Homo sapiens
  misc_RNA (1)...(19): siRNA sense strand
ggaagcagcggcucucacu

SEQ ID NO: 80190 - RNA, 19 nt, Homo sapiens
  misc_RNA (1)...(19): siRNA sense strand
gcagcuuccucggccauug

SEQ ID NO: 80191 - RNA, 19 nt, Homo sapiens
  misc_RNA (1)...(19): siRNA sense strand
ugaccuacaguaaggguaa

SEQ ID NO: 80192 - RNA, 19 nt, Homo sapiens
  misc_RNA (1)...(19): siRNA sense strand
gagcauuggcaccuucuca

SEQ ID NO: 80193 - RNA, 19 nt, Homo sapiens
  misc_RNA (1)...(19): siRNA sense strand
cagcagcagcuuucaguuc

SEQ ID NO: 80194 - RNA, 19 nt, Homo sapiens
  misc_RNA (1)...(19): siRNA sense strand
gauauccuagcccaaguga

SEQ ID NO: 80195 - RNA, 19 nt, Homo sapiens
  misc_RNA (1)...(19): siRNA sense strand
aaagagaacccugugaaag

SEQ ID NO: 80196 - RNA, 19 nt, Homo sapiens
  misc_RNA (1)...(19): siRNA sense strand
gcauuggcaccuucucaga

SEQ ID NO: 80197 - RNA, 19 nt, Homo sapiens
  misc_RNA (1)...(19): siRNA sense strand
gaagcagcagcucucauuc

SEQ ID NO: 80198 - RNA, 19 nt, Homo sapiens
  misc_RNA (1)...(19): siRNA sense strand
ucaccucuguagacaaauc

SEQ ID NO: 80199 - RNA, 19 nt, Homo sapiens
  misc_RNA (1)...(19): siRNA sense strand
caaccagcgucccuguagu

SEQ ID NO: 80200 - RNA, 19 nt, Homo sapiens
  misc_RNA (1)...(19): siRNA sense strand
gacaaagcucuuccucuuc

SEQ ID NO: 80201 - RNA, 19 nt, Homo sapiens
  misc_RNA (1)...(19): siRNA sense strand
gaccuacaguaaggguaaa

SEQ ID NO: 80202 - RNA, 19 nt, Homo sapiens
  misc_RNA (1)...(19): siRNA sense strand
uauccuagcccaagugaag

SEQ ID NO: 80203 - RNA, 19 nt, Homo sapiens
  misc_RNA (1)...(19): siRNA sense strand
agcagcagcuuccaaguag

SEQ ID NO: 80204 - RNA, 19 nt, Homo sapiens
  misc_RNA (1)...(19): siRNA sense strand
guuacucgacaguccauaa

SEQ ID NO: 80205 - RNA, 19 nt, Homo sapiens
  misc_RNA (1)...(19): siRNA sense strand
gggauauccuagcccaagu

SEQ ID NO: 80206 - RNA, 19 nt, Homo sapiens
  misc_RNA (1)...(19): siRNA sense strand
gccaaccaaugacaacucu

SEQ ID NO: 80207 - RNA, 19 nt, Homo sapiens
  misc_RNA (1)...(19): siRNA sense strand
uggcuccucugacaguuau

SEQ ID NO: 80208 - RNA, 19 nt, Homo sapiens
  misc_RNA (1)...(19): siRNA sense strand
ccaggcaugaccuacagua

SEQ ID NO: 80209 - RNA, 19 nt, Homo sapiens
  misc_RNA (1)...(19): siRNA sense strand
agcagcagcuuucaguuca

SEQ ID NO: 80210 - RNA, 19 nt, Homo sapiens
  misc_RNA (1)...(19): siRNA sense strand
ccaaccagcgucccuguag

SEQ ID NO: 80211 - RNA, 19 nt, Homo sapiens
  misc_RNA (1)...(19): siRNA sense strand
gccaaagcgucagcuccaa

SEQ ID NO: 80212 - RNA, 19 nt, Homo sapiens
  misc_RNA (1)...(19): siRNA sense strand
ucucugagggcaaauacuu

SEQ ID NO: 80213 - RNA, 19 nt, Homo sapiens
  misc_RNA (1)...(19): siRNA sense strand
aagagaacccugugaaagg

SEQ ID NO: 80214 - RNA, 19 nt, Homo sapiens
  misc_RNA (1)...(19): siRNA sense strand
cuaagagcauuggcaccuu

SEQ ID NO: 80215 - RNA, 19 nt, Homo sapiens
  misc_RNA (1)...(19): siRNA sense strand
gcuagcugacccugaaguu

SEQ ID NO: 80216 - RNA, 19 nt, Homo sapiens
  misc_RNA (1)...(19): siRNA sense strand
gcagcaaguccagcucuuc

SEQ ID NO: 80217 - RNA, 19 nt, Homo sapiens
  misc_RNA (1)...(19): siRNA sense strand
gcagcagcagcuuucaguu

SEQ ID NO: 80218 - RNA, 19 nt, Homo sapiens
  misc_RNA (1)...(19): siRNA sense strand
ggcagcaaguccagcucuu

SEQ ID NO: 80219 - RNA, 19 nt, Homo sapiens
  misc_RNA (1)...(19): siRNA sense strand
guaaggaccccacgcguau

SEQ ID NO: 80220 - RNA, 19 nt, Homo sapiens
  misc_RNA (1)...(19): siRNA sense strand
gacuccagcggcuucagua

SEQ ID NO: 80221 - RNA, 19 nt, Homo sapiens
  misc_RNA (1)...(19): siRNA sense strand
ggauauccuagcccaagug

SEQ ID NO: 80222 - RNA, 19 nt, Homo sapiens
  misc_RNA (1)...(19): siRNA sense strand
ugggcuacuucaccaaaga

SEQ ID NO: 80223 - RNA, 19 nt, Homo sapiens
  misc_RNA (1)...(19): siRNA sense strand
uccagcggauccagcauug

SEQ ID NO: 80224 - RNA, 19 nt, Homo sapiens
  misc_RNA (1)...(19): siRNA sense strand
ucuuaccgcggaauacuaa

SEQ ID NO: 80225 - RNA, 19 nt, Homo sapiens
  misc_RNA (1)...(19): siRNA sense strand
cagcuacuccuccggaucu

SEQ ID NO: 80226 - RNA, 19 nt, Homo sapiens
  misc_RNA (1)...(19): siRNA sense strand
uagcugacccugaaguuuu

SEQ ID NO: 80227 - RNA, 19 nt, Homo sapiens
  misc_RNA (1)...(19): siRNA sense strand
caggcaugaccuacaguaa

SEQ ID NO: 80228 - RNA, 19 nt, Homo sapiens
  misc_RNA (1)...(19): siRNA sense strand
gaagaaaggugaugucaag

SEQ ID NO: 80229 - RNA, 19 nt, Homo sapiens
  misc_RNA (1)...(19): siRNA sense strand
gaaagugucucuguucuug

SEQ ID NO: 80230 - RNA, 19 nt, Homo sapiens
  misc_RNA (1)...(19): siRNA sense strand
gcaagauggugaugaaauu

SEQ ID NO: 80231 - RNA, 19 nt, Homo sapiens
  misc_RNA (1)...(19): siRNA sense strand
gaacauuccucucaagcuu

SEQ ID NO: 80232 - RNA, 19 nt, Homo sapiens
  misc_RNA (1)...(19): siRNA sense strand
gaagaggagaucagacuua

SEQ ID NO: 80233 - RNA, 19 nt, Homo sapiens
  misc_RNA (1)...(19): siRNA sense strand
ucucagagcuauuuacaaa

SEQ ID NO: 80234 - RNA, 19 nt, Homo sapiens
  misc_RNA (1)...(19): siRNA sense strand
gauagcagaugugauguuu

SEQ ID NO: 80235 - RNA, 19 nt, Homo sapiens
  misc_RNA (1)...(19): siRNA sense strand
gaaauucugggccaacuuu

SEQ ID NO: 80236 - RNA, 19 nt, Homo sapiens
  misc_RNA (1)...(19): siRNA sense strand
gaaaacaccugaagagcuu

SEQ ID NO: 80237 - RNA, 19 nt, Homo sapiens
  misc_RNA (1)...(19): siRNA sense strand
gaguuuggcugguugauuc

SEQ ID NO: 80238 - RNA, 19 nt, Homo sapiens
  misc_RNA (1)...(19): siRNA sense strand
gaucagacuuagcaagaug

SEQ ID NO: 80239 - RNA, 19 nt, Homo sapiens
  misc_RNA (1)...(19): siRNA sense strand
cagaagccacugagaaaua

SEQ ID NO: 80240 - RNA, 19 nt, Homo sapiens
  misc_RNA (1)...(19): siRNA sense strand
gagaaauacuuaggaggaa

SEQ ID NO: 80241 - RNA, 19 nt, Homo sapiens
  misc_RNA (1)...(19): siRNA sense strand
ccaccuacauguaugaguu

SEQ ID NO: 80242 - RNA, 19 nt, Homo sapiens
  misc_RNA (1)...(19): siRNA sense strand
gcccuuggcugagcaaauu

SEQ ID NO: 80243 - RNA, 19 nt, Homo sapiens
  misc_RNA (1)...(19): siRNA sense strand
gagaucagacuuagcaaga

SEQ ID NO: 80244 - RNA, 19 nt, Homo sapiens
  misc_RNA (1)...(19): siRNA sense strand
auucuuaucucuggacuua

SEQ ID NO: 80245 - RNA, 19 nt, Homo sapiens
  misc_RNA (1)...(19): siRNA sense strand
gcugaaggacaaagaagua

SEQ ID NO: 80246 - RNA, 19 nt, Homo sapiens
  misc_RNA (1)...(19): siRNA sense strand
gcacccaccuacauguaug

SEQ ID NO: 80247 - RNA, 19 nt, Homo sapiens
  misc_RNA (1)...(19): siRNA sense strand
ugaagaaugccaccucgua

SEQ ID NO: 80248 - RNA, 19 nt, Homo sapiens
  misc_RNA (1)...(19): siRNA sense strand
uagcagaugugauguuugg

SEQ ID NO: 80249 - RNA, 19 nt, Homo sapiens
  misc_RNA (1)...(19): siRNA sense strand
gaccaucuuuggagaguca

SEQ ID NO: 80250 - RNA, 19 nt, Homo sapiens
  misc_RNA (1)...(19): siRNA sense strand
cccagaagcugaaggacaa

SEQ ID NO: 80251 - RNA, 19 nt, Homo sapiens
  misc_RNA (1)...(19): siRNA sense strand
gaauuaacaagcaggaguu

SEQ ID NO: 80252 - RNA, 19 nt, Homo sapiens
  misc_RNA (1)...(19): siRNA sense strand
ccaugucacuccuguggaa

SEQ ID NO: 80253 - RNA, 19 nt, Homo sapiens
  misc_RNA (1)...(19): siRNA sense strand
gagcacccaccuacaugua

SEQ ID NO: 80254 - RNA, 19 nt, Homo sapiens
  misc_RNA (1)...(19): siRNA sense strand
gaggagaucagacuuagca

SEQ ID NO: 80255 - RNA, 19 nt, Homo sapiens
  misc_RNA (1)...(19): siRNA sense strand
caagcuuucugaagacugu

SEQ ID NO: 80256 - RNA, 19 nt, Homo sapiens
  misc_RNA (1)...(19): siRNA sense strand
uuagcaagauggugaugaa

SEQ ID NO: 80257 - RNA, 19 nt, Homo sapiens
  misc_RNA (1)...(19): siRNA sense strand
gcugguugauuccaauguu

SEQ ID NO: 80258 - RNA, 19 nt, Homo sapiens
  misc_RNA (1)...(19): siRNA sense strand
ccaagaaggcaguggagaa

SEQ ID NO: 80259 - RNA, 19 nt, Homo sapiens
  misc_RNA (1)...(19): siRNA sense strand
gaagcugaaggacaaagaa

SEQ ID NO: 80260 - RNA, 19 nt, Homo sapiens
  misc_RNA (1)...(19): siRNA sense strand
uuacacuccugcugacuug

SEQ ID NO: 80261 - RNA, 19 nt, Homo sapiens
  misc_RNA (1)...(19): siRNA sense strand
gaaauacuuaggaggaaca

SEQ ID NO: 80262 - RNA, 19 nt, Homo sapiens
  misc_RNA (1)...(19): siRNA sense strand
caccaccucugcugucaug

SEQ ID NO: 80263 - RNA, 19 nt, Homo sapiens
  misc_RNA (1)...(19): siRNA sense strand
uuacaaaccgaaaggagaa

SEQ ID NO: 80264 - RNA, 19 nt, Homo sapiens
  misc_RNA (1)...(19): siRNA sense strand
ggacaccgugcauggcaaa

SEQ ID NO: 80265 - RNA, 19 nt, Homo sapiens
  misc_RNA (1)...(19): siRNA sense strand
ccaagcuucucaucagaca

SEQ ID NO: 80266 - RNA, 19 nt, Homo sapiens
  misc_RNA (1)...(19): siRNA sense strand
gacugucuuuaccucaaua

SEQ ID NO: 80267 - RNA, 19 nt, Homo sapiens
  misc_RNA (1)...(19): siRNA sense strand
gcguggcccucacuucugu

SEQ ID NO: 80268 - RNA, 19 nt, Homo sapiens
  misc_RNA (1)...(19): siRNA sense strand
ggaguuuggcugguugauu

SEQ ID NO: 80269 - RNA, 19 nt, Homo sapiens
  misc_RNA (1)...(19): siRNA sense strand
gagcucuucuccgucuuug

SEQ ID NO: 80270 - RNA, 19 nt, Homo sapiens
  misc_RNA (1)...(19): siRNA sense strand
ggcccuugcugcccaugaa

SEQ ID NO: 80271 - RNA, 19 nt, Homo sapiens
  misc_RNA (1)...(19): siRNA sense strand
guccaagcuucucaucaga

SEQ ID NO: 80272 - RNA, 19 nt, Homo sapiens
  misc_RNA (1)...(19): siRNA sense strand
cuugauagcagaugugaug

SEQ ID NO: 80273 - RNA, 19 nt, Homo sapiens
  misc_RNA (1)...(19): siRNA sense strand
uaucacugcugggugcaaa

SEQ ID NO: 80274 - RNA, 19 nt, Homo sapiens
  misc_RNA (1)...(19): siRNA sense strand
aagugucucuguucuuguu

SEQ ID NO: 80275 - RNA, 19 nt, Homo sapiens
  misc_RNA (1)...(19): siRNA sense strand
ggccagaguacaaccagaa

SEQ ID NO: 80276 - RNA, 19 nt, Homo sapiens
  misc_RNA (1)...(19): siRNA sense strand
aagaggagaucagacuuag

SEQ ID NO: 80277 - RNA, 19 nt, Homo sapiens
  misc_RNA (1)...(19): siRNA sense strand
cguccaagcuucucaucag

SEQ ID NO: 80278 - RNA, 19 nt, Homo sapiens
  misc_RNA (1)...(19): siRNA sense strand
uugaugagcuauccacucu

SEQ ID NO: 80279 - RNA, 19 nt, Homo sapiens
  misc_RNA (1)...(19): siRNA sense strand
caccucugcugucaugguu

SEQ ID NO: 80280 - RNA, 19 nt, Homo sapiens
  misc_RNA (1)...(19): siRNA sense strand
caccgugcauggcaaagug

SEQ ID NO: 80281 - RNA, 19 nt, Homo sapiens
  misc_RNA (1)...(19): siRNA sense strand
gaaguccuauccccuuguu

SEQ ID NO: 80282 - RNA, 19 nt, Homo sapiens
  misc_RNA (1)...(19): siRNA sense strand
ucagagcuauuuacaaacc

SEQ ID NO: 80283 - RNA, 19 nt, Homo sapiens
  misc_RNA (1)...(19): siRNA sense strand
caagaaggcaguggagaag

SEQ ID NO: 80284 - RNA, 19 nt, Homo sapiens
  misc_RNA (1)...(19): siRNA sense strand
cagaguacaaccagaagga

SEQ ID NO: 80285 - RNA, 19 nt, Homo sapiens
  misc_RNA (1)...(19): siRNA sense strand
agaagccacugagaaauac

SEQ ID NO: 80286 - RNA, 19 nt, Homo sapiens
  misc_RNA (1)...(19): siRNA sense strand
uccagaagccacugagaaa

SEQ ID NO: 80287 - RNA, 19 nt, Homo sapiens
  misc_RNA (1)...(19): siRNA sense strand
ucuuaucucuggacuuaca

SEQ ID NO: 80288 - RNA, 19 nt, Homo sapiens
  misc_RNA (1)...(19): siRNA sense strand
ccucugcugucaugguuca

SEQ ID NO: 80289 - RNA, 19 nt, Homo sapiens
  misc_RNA (1)...(19): siRNA sense strand
ccagacagaacacauagag

SEQ ID NO: 80290 - RNA, 19 nt, Homo sapiens
  misc_RNA (1)...(19): siRNA sense strand
gaaggacaaagaaguagcu

SEQ ID NO: 80291 - RNA, 19 nt, Homo sapiens
  misc_RNA (1)...(19): siRNA sense strand
gaguuucaguaccguccaa

SEQ ID NO: 80292 - RNA, 19 nt, Homo sapiens
  misc_RNA (1)...(19): siRNA sense strand
acauguaugaguuucagua

SEQ ID NO: 80293 - RNA, 19 nt, Homo sapiens
  misc_RNA (1)...(19): siRNA sense strand
ggagcacccaccuacaugu

SEQ ID NO: 80294 - RNA, 19 nt, Homo sapiens
  misc_RNA (1)...(19): siRNA sense strand
ggacuugauagcagaugug

SEQ ID NO: 80295 - RNA, 19 nt, Homo sapiens
  misc_RNA (1)...(19): siRNA sense strand
ccucguacccuccuaugug

SEQ ID NO: 80296 - RNA, 19 nt, Homo sapiens
  misc_RNA (1)...(19): siRNA sense strand
ccuacauggucggaauuaa

SEQ ID NO: 80297 - RNA, 19 nt, Homo sapiens
  misc_RNA (1)...(19): siRNA sense strand
caauaucgccugggcaucu

SEQ ID NO: 80298 - RNA, 19 nt, Homo sapiens
  misc_RNA (1)...(19): siRNA sense strand
cagaagaggagaucagacu

SEQ ID NO: 80299 - RNA, 19 nt, Homo sapiens
  misc_RNA (1)...(19): siRNA sense strand
gcccggaaccacagagaug

SEQ ID NO: 80300 - RNA, 19 nt, Homo sapiens
  misc_RNA (1)...(19): siRNA sense strand
ugaagaaaggugaugucaa

SEQ ID NO: 80301 - RNA, 19 nt, Homo sapiens
  misc_RNA (1)...(19): siRNA sense strand
caagauggugaugaaauuc

SEQ ID NO: 80302 - RNA, 19 nt, Homo sapiens
  misc_RNA (1)...(19): siRNA sense strand
gaaacccaagacggugaua

SEQ ID NO: 80303 - RNA, 19 nt, Homo sapiens
  misc_RNA (1)...(19): siRNA sense strand
ggugucccaucugugauug

SEQ ID NO: 80304 - RNA, 19 nt, Homo sapiens
  misc_RNA (1)...(19): siRNA sense strand
cagcuuagaaggauuugca

SEQ ID NO: 80305 - RNA, 19 nt, Homo sapiens
  misc_RNA (1)...(19): siRNA sense strand
ggcccucacuucuguucug

SEQ ID NO: 80306 - RNA, 19 nt, Homo sapiens
  misc_RNA (1)...(19): siRNA sense strand
caaccagaaggaaggguau

SEQ ID NO: 80307 - RNA, 19 nt, Homo sapiens
  misc_RNA (1)...(19): siRNA sense strand
guucacugccugcgacaga

SEQ ID NO: 80308 - RNA, 19 nt, Homo sapiens
  misc_RNA (1)...(19): siRNA sense strand
gggaacccaggcucuguga

SEQ ID NO: 80309 - RNA, 19 nt, Homo sapiens
  misc_RNA (1)...(19): siRNA sense strand
ccacugagaaauacuuagg

SEQ ID NO: 80310 - RNA, 19 nt, Homo sapiens
  misc_RNA (1)...(19): siRNA sense strand
cucucaagcuuucugaaga

SEQ ID NO: 80311 - RNA, 19 nt, Homo sapiens
  misc_RNA (1)...(19): siRNA sense strand
uuaacaagcaggaguuugg

SEQ ID NO: 80312 - RNA, 19 nt, Homo sapiens
  misc_RNA (1)...(19): siRNA sense strand
agagucagcgggaggagaa

SEQ ID NO: 80313 - RNA, 19 nt, Homo sapiens
  misc_RNA (1)...(19): siRNA sense strand
ggugcggcaucaaccuaug

SEQ ID NO: 80314 - RNA, 19 nt, Homo sapiens
  misc_RNA (1)...(19): siRNA sense strand
acauuccucucaagcuuuc

SEQ ID NO: 80315 - RNA, 19 nt, Homo sapiens
  misc_RNA (1)...(19): siRNA sense strand
aaaccgaaaggagaacauu

SEQ ID NO: 80316 - RNA, 19 nt, Homo sapiens
  misc_RNA (1)...(19): siRNA sense strand
gugaagaaaggugauguca

SEQ ID NO: 80317 - RNA, 19 nt, Homo sapiens
  misc_RNA (1)...(19): siRNA sense strand
cuacauguaugaguuucag

SEQ ID NO: 80318 - RNA, 19 nt, Homo sapiens
  misc_RNA (1)...(19): siRNA sense strand
ccagaagccacugagaaau

SEQ ID NO: 80319 - RNA, 19 nt, Homo sapiens
  misc_RNA (1)...(19): siRNA sense strand
gaccagaagacagccaugu

SEQ ID NO: 80320 - RNA, 19 nt, Homo sapiens
  misc_RNA (1)...(19): siRNA sense strand
cugguugauuccaauguug

SEQ ID NO: 80321 - RNA, 19 nt, Homo sapiens
  misc_RNA (1)...(19): siRNA sense strand
ucaagcaacuuaucuacuu

SEQ ID NO: 80322 - RNA, 19 nt, Homo sapiens
  misc_RNA (1)...(19): siRNA sense strand
uggagaaccucgccaaauu

SEQ ID NO: 80323 - RNA, 19 nt, Homo sapiens
  misc_RNA (1)...(19): siRNA sense strand
acaccaaccuggagaaguu

SEQ ID NO: 80324 - RNA, 19 nt, Homo sapiens
  misc_RNA (1)...(19): siRNA sense strand
gcugaaacacguccauuug

SEQ ID NO: 80325 - RNA, 19 nt, Homo sapiens
  misc_RNA (1)...(19): siRNA sense strand
ggagaaccucgccaaauuc

SEQ ID NO: 80326 - RNA, 19 nt, Homo sapiens
  misc_RNA (1)...(19): siRNA sense strand
ugccgaaccucgugucauu

SEQ ID NO: 80327 - RNA, 19 nt, Homo sapiens
  misc_RNA (1)...(19): siRNA sense strand
acuuguaccugucccauaa

SEQ ID NO: 80328 - RNA, 19 nt, Homo sapiens
  misc_RNA (1)...(19): siRNA sense strand
ccaccaagagguccaagaa

SEQ ID NO: 80329 - RNA, 19 nt, Homo sapiens
  misc_RNA (1)...(19): siRNA sense strand
ggucaaccucuucaucuug

SEQ ID NO: 80330 - RNA, 19 nt, Homo sapiens
  misc_RNA (1)...(19): siRNA sense strand
ugaccgagcugaccuaccu

SEQ ID NO: 80331 - RNA, 19 nt, Homo sapiens
  misc_RNA (1)...(19): siRNA sense strand
ccaagcugcucaaccuaca

SEQ ID NO: 80332 - RNA, 19 nt, Homo sapiens
  misc_RNA (1)...(19): siRNA sense strand
ucuugcagcucaacaacaa

SEQ ID NO: 80333 - RNA, 19 nt, Homo sapiens
  misc_RNA (1)...(19): siRNA sense strand
agaccaagcugcucaaccu

SEQ ID NO: 80334 - RNA, 19 nt, Homo sapiens
  misc_RNA (1)...(19): siRNA sense strand
ggagaacaaccgcuugaac

SEQ ID NO: 80335 - RNA, 19 nt, Homo sapiens
  misc_RNA (1)...(19): siRNA sense strand
accaagagguccaagaaag

SEQ ID NO: 80336 - RNA, 19 nt, Homo sapiens
  misc_RNA (1)...(19): siRNA sense strand
gcucaacaacaacaagauc

SEQ ID NO: 80337 - RNA, 19 nt, Homo sapiens
  misc_RNA (1)...(19): siRNA sense strand
cccucgcccuuaccaauaa

SEQ ID NO: 80338 - RNA, 19 nt, Homo sapiens
  misc_RNA (1)...(19): siRNA sense strand
acaaugccuuccaguccuu

SEQ ID NO: 80339 - RNA, 19 nt, Homo sapiens
  misc_RNA (1)...(19): siRNA sense strand
gcacgucaucugcgacaag

SEQ ID NO: 80340 - RNA, 19 nt, Homo sapiens
  misc_RNA (1)...(19): siRNA sense strand
gacccucgcccuuaccaau

SEQ ID NO: 80341 - RNA, 19 nt, Homo sapiens
  misc_RNA (1)...(19): siRNA sense strand
ugccucaccugccaaguuc

SEQ ID NO: 80342 - RNA, 19 nt, Homo sapiens
  misc_RNA (1)...(19): siRNA sense strand
gaccaagcugcucaaccua

SEQ ID NO: 80343 - RNA, 19 nt, Homo sapiens
  misc_RNA (1)...(19): siRNA sense strand
caccaagagguccaagaaa

SEQ ID NO: 80344 - RNA, 19 nt, Homo sapiens
  misc_RNA (1)...(19): siRNA sense strand
gugccucaccugccaaguu

SEQ ID NO: 80345 - RNA, 19 nt, Homo sapiens
  misc_RNA (1)...(19): siRNA sense strand
cuggagacccucgcccuua

SEQ ID NO: 80346 - RNA, 19 nt, Homo sapiens
  misc_RNA (1)...(19): siRNA sense strand
cagcucaacaacaacaaga

SEQ ID NO: 80347 - RNA, 19 nt, Homo sapiens
  misc_RNA (1)...(19): siRNA sense strand
guggagaaccucgccaaau

SEQ ID NO: 80348 - RNA, 19 nt, Homo sapiens
  misc_RNA (1)...(19): siRNA sense strand
ugaaaagcaucccggacaa

SEQ ID NO: 80349 - RNA, 19 nt, Homo sapiens
  misc_RNA (1)...(19): siRNA sense strand
agcaacuuaucuacuugua

SEQ ID NO: 80350 - RNA, 19 nt, Homo sapiens
  misc_RNA (1)...(19): siRNA sense strand
cccaaggugucagagaaga

SEQ ID NO: 80351 - RNA, 19 nt, Homo sapiens
  misc_RNA (1)...(19): siRNA sense strand
gcacacacauuaguauuaa

SEQ ID NO: 80352 - RNA, 19 nt, Homo sapiens
  misc_RNA (1)...(19): siRNA sense strand
uaacgaggaugauauugua

SEQ ID NO: 80353 - RNA, 19 nt, Homo sapiens
  misc_RNA (1)...(19): siRNA sense strand
cuacuaaucugucaaacaa

SEQ ID NO: 80354 - RNA, 19 nt, Homo sapiens
  misc_RNA (1)...(19): siRNA sense strand
uaaaguaguugugaccaua

SEQ ID NO: 80355 - RNA, 19 nt, Homo sapiens
  misc_RNA (1)...(19): siRNA sense strand
gaagauaacgaggaugaua

SEQ ID NO: 80356 - RNA, 19 nt, Homo sapiens
  misc_RNA (1)...(19): siRNA sense strand
gagacuggauucuuuaaau

SEQ ID NO: 80357 - RNA, 19 nt, Homo sapiens
  misc_RNA (1)...(19): siRNA sense strand
gaccugaaguuucuaguug

SEQ ID NO: 80358 - RNA, 19 nt, Homo sapiens
  misc_RNA (1)...(19): siRNA sense strand
gaagaacuuuaucagcaaa

SEQ ID NO: 80359 - RNA, 19 nt, Homo sapiens
  misc_RNA (1)...(19): siRNA sense strand
ggacaggauuaucgagauu

SEQ ID NO: 80360 - RNA, 19 nt, Homo sapiens
  misc_RNA (1)...(19): siRNA sense strand
ugucauaucucuacuaauc

SEQ ID NO: 80361 - RNA, 19 nt, Homo sapiens
  misc_RNA (1)...(19): siRNA sense strand
ggacaacuaaucaugguuu

SEQ ID NO: 80362 - RNA, 19 nt, Homo sapiens
  misc_RNA (1)...(19): siRNA sense strand
gcacauaaaguccuucuca

SEQ ID NO: 80363 - RNA, 19 nt, Homo sapiens
  misc_RNA (1)...(19): siRNA sense strand
gugggaaaguggccaauuu

SEQ ID NO: 80364 - RNA, 19 nt, Homo sapiens
  misc_RNA (1)...(19): siRNA sense strand
uaaaguccuucucaagauu

SEQ ID NO: 80365 - RNA, 19 nt, Homo sapiens
  misc_RNA (1)...(19): siRNA sense strand
gacaacuaaucaugguuua

SEQ ID NO: 80366 - RNA, 19 nt, Homo sapiens
  misc_RNA (1)...(19): siRNA sense strand
gauggaaaguacauuuaug

SEQ ID NO: 80367 - RNA, 19 nt, Homo sapiens
  misc_RNA (1)...(19): siRNA sense strand
gaaguaugaugcacaggau

SEQ ID NO: 80368 - RNA, 19 nt, Homo sapiens
  misc_RNA (1)...(19): siRNA sense strand
gcaaugggacaacuaauca

SEQ ID NO: 80369 - RNA, 19 nt, Homo sapiens
  misc_RNA (1)...(19): siRNA sense strand
uaauaacucugggcaggua

SEQ ID NO: 80370 - RNA, 19 nt, Homo sapiens
  misc_RNA (1)...(19): siRNA sense strand
aagcagaguuggagccuuu

SEQ ID NO: 80371 - RNA, 19 nt, Homo sapiens
  misc_RNA (1)...(19): siRNA sense strand
gcacaggauuuagaagaau

SEQ ID NO: 80372 - RNA, 19 nt, Homo sapiens
  misc_RNA (1)...(19): siRNA sense strand
uggaauaccuauacacaga

SEQ ID NO: 80373 - RNA, 19 nt, Homo sapiens
  misc_RNA (1)...(19): siRNA sense strand
ccaacaaacuaucaagcaa

SEQ ID NO: 80374 - RNA, 19 nt, Homo sapiens
  misc_RNA (1)...(19): siRNA sense strand
cggcugcggugaaguauga

SEQ ID NO: 80375 - RNA, 19 nt, Homo sapiens
  misc_RNA (1)...(19): siRNA sense strand
gcauaaaccaucugacugu

SEQ ID NO: 80376 - RNA, 19 nt, Homo sapiens
  misc_RNA (1)...(19): siRNA sense strand
caaacaaacaagucauuga

SEQ ID NO: 80377 - RNA, 19 nt, Homo sapiens
  misc_RNA (1)...(19): siRNA sense strand
ugaagaacuuuaucagcaa

SEQ ID NO: 80378 - RNA, 19 nt, Homo sapiens
  misc_RNA (1)...(19): siRNA sense strand
guucgucauuggaagauaa

SEQ ID NO: 80379 - RNA, 19 nt, Homo sapiens
  misc_RNA (1)...(19): siRNA sense strand
cauaaaguccuucucaaga

SEQ ID NO: 80380 - RNA, 19 nt, Homo sapiens
  misc_RNA (1)...(19): siRNA sense strand
gcuacucugucaucuuuga

SEQ ID NO: 80381 - RNA, 19 nt, Homo sapiens
  misc_RNA (1)...(19): siRNA sense strand
aggcuacucugucaucuuu

SEQ ID NO: 80382 - RNA, 19 nt, Homo sapiens
  misc_RNA (1)...(19): siRNA sense strand
gauguuagaugugggaaag

SEQ ID NO: 80383 - RNA, 19 nt, Homo sapiens
  misc_RNA (1)...(19): siRNA sense strand
cgacguguuugccugcuuu

SEQ ID NO: 80384 - RNA, 19 nt, Homo sapiens
  misc_RNA (1)...(19): siRNA sense strand
guugggcacuggcaauaaa

SEQ ID NO: 80385 - RNA, 19 nt, Homo sapiens
  misc_RNA (1)...(19): siRNA sense strand
gaaguugccugugggucuu

SEQ ID NO: 80386 - RNA, 19 nt, Homo sapiens
  misc_RNA (1)...(19): siRNA sense strand
acacuacaguaaaugauga

SEQ ID NO: 80387 - RNA, 19 nt, Homo sapiens
  misc_RNA (1)...(19): siRNA sense strand
cauaaaccaucugacugua

SEQ ID NO: 80388 - RNA, 19 nt, Homo sapiens
  misc_RNA (1)...(19): siRNA sense strand
caaacaagucauugaaguu

SEQ ID NO: 80389 - RNA, 19 nt, Homo sapiens
  misc_RNA (1)...(19): siRNA sense strand
acaaacaagucauugaagu

SEQ ID NO: 80390 - RNA, 19 nt, Homo sapiens
  misc_RNA (1)...(19): siRNA sense strand
ccugucauaucucuacuaa

SEQ ID NO: 80391 - RNA, 19 nt, Homo sapiens
  misc_RNA (1)...(19): siRNA sense strand
agacuggauucuuuaaaug

SEQ ID NO: 80392 - RNA, 19 nt, Homo sapiens
  misc_RNA (1)...(19): siRNA sense strand
cgaggaugauauuguagaa

SEQ ID NO: 80393 - RNA, 19 nt, Homo sapiens
  misc_RNA (1)...(19): siRNA sense strand
gaaccucggagacuggauu

SEQ ID NO: 80394 - RNA, 19 nt, Homo sapiens
  misc_RNA (1)...(19): siRNA sense strand
uaaaccaucugacuguagu

SEQ ID NO: 80395 - RNA, 19 nt, Homo sapiens
  misc_RNA (1)...(19): siRNA sense strand
gaauaccuauacacagaca

SEQ ID NO: 80396 - RNA, 19 nt, Homo sapiens
  misc_RNA (1)...(19): siRNA sense strand
ggaugauauuguagaaaug

SEQ ID NO: 80397 - RNA, 19 nt, Homo sapiens
  misc_RNA (1)...(19): siRNA sense strand
uggcuacgcacacacauua

SEQ ID NO: 80398 - RNA, 19 nt, Homo sapiens
  misc_RNA (1)...(19): siRNA sense strand
gucacuggcugccuacaaa

SEQ ID NO: 80399 - RNA, 19 nt, Homo sapiens
  misc_RNA (1)...(19): siRNA sense strand
cagcaaagcaagcagaguu

SEQ ID NO: 80400 - RNA, 19 nt, Homo sapiens
  misc_RNA (1)...(19): siRNA sense strand
accaugaucuccugaagaa

SEQ ID NO: 80401 - RNA, 19 nt, Homo sapiens
  misc_RNA (1)...(19): siRNA sense strand
gaagagggaauuugacaac

SEQ ID NO: 80402 - RNA, 19 nt, Homo sapiens
  misc_RNA (1)...(19): siRNA sense strand
ggaccaugaucuccugaag

SEQ ID NO: 80403 - RNA, 19 nt, Homo sapiens
  misc_RNA (1)...(19): siRNA sense strand
aaacaagucauugaaguug

SEQ ID NO: 80404 - RNA, 19 nt, Homo sapiens
  misc_RNA (1)...(19): siRNA sense strand
uggcagugcuggcaaugaa

SEQ ID NO: 80405 - RNA, 19 nt, Homo sapiens
  misc_RNA (1)...(19): siRNA sense strand
auaaaguccuucucaagau

SEQ ID NO: 80406 - RNA, 19 nt, Homo sapiens
  misc_RNA (1)...(19): siRNA sense strand
cugcagaccugaaguuucu

SEQ ID NO: 80407 - RNA, 19 nt, Homo sapiens
  misc_RNA (1)...(19): siRNA sense strand
ggagacuggauucuuuaaa

SEQ ID NO: 80408 - RNA, 19 nt, Homo sapiens
  misc_RNA (1)...(19): siRNA sense strand
cacaggauuuagaagaauu

SEQ ID NO: 80409 - RNA, 19 nt, Homo sapiens
  misc_RNA (1)...(19): siRNA sense strand
acagacagcaucagccuuu

SEQ ID NO: 80410 - RNA, 19 nt, Homo sapiens
  misc_RNA (1)...(19): siRNA sense strand
gaauucugcuucagguuuu

SEQ ID NO: 80411 - RNA, 19 nt, Homo sapiens
  misc_RNA (1)...(19): siRNA sense strand
ccaucugacuguaguaaca

SEQ ID NO: 80412 - RNA, 19 nt, Homo sapiens
  misc_RNA (1)...(19): siRNA sense strand
cacauaaaguccuucucaa

SEQ ID NO: 80413 - RNA, 19 nt, Homo sapiens
  misc_RNA (1)...(19): siRNA sense strand
uuagugcccugucauaucu

SEQ ID NO: 80414 - RNA, 19 nt, Homo sapiens
  misc_RNA (1)...(19): siRNA sense strand
cgcacacacauuaguauua

SEQ ID NO: 80415 - RNA, 19 nt, Homo sapiens
  misc_RNA (1)...(19): siRNA sense strand
agaauucugcuucagguuu

SEQ ID NO: 80416 - RNA, 19 nt, Homo sapiens
  misc_RNA (1)...(19): siRNA sense strand
guaugaugcacaggauuua

SEQ ID NO: 80417 - RNA, 19 nt, Homo sapiens
  misc_RNA (1)...(19): siRNA sense strand
cuacgcacacacauuagua

SEQ ID NO: 80418 - RNA, 19 nt, Homo sapiens
  misc_RNA (1)...(19): siRNA sense strand
gaucuccugaagaacuuua

SEQ ID NO: 80419 - RNA, 19 nt, Homo sapiens
  misc_RNA (1)...(19): siRNA sense strand
ucgucaggcuugugucuuu

SEQ ID NO: 80420 - RNA, 19 nt, Homo sapiens
  misc_RNA (1)...(19): siRNA sense strand
gcaaugaaguuuuauacac

SEQ ID NO: 80421 - RNA, 19 nt, Homo sapiens
  misc_RNA (1)...(19): siRNA sense strand
ccacauauuguccuugcaa

SEQ ID NO: 80422 - RNA, 19 nt, Homo sapiens
  misc_RNA (1)...(19): siRNA sense strand
gcagaguuggagccuuuaa

SEQ ID NO: 80423 - RNA, 19 nt, Homo sapiens
  misc_RNA (1)...(19): siRNA sense strand
guugauggaaaguacauuu

SEQ ID NO: 80424 - RNA, 19 nt, Homo sapiens
  misc_RNA (1)...(19): siRNA sense strand
ucauaucucuacuaaucug

SEQ ID NO: 80425 - RNA, 19 nt, Homo sapiens
  misc_RNA (1)...(19): siRNA sense strand
caacagaaggagaagucuu

SEQ ID NO: 80426 - RNA, 19 nt, Homo sapiens
  misc_RNA (1)...(19): siRNA sense strand
agacuuggcuacauuuuau

SEQ ID NO: 80427 - RNA, 19 nt, Homo sapiens
  misc_RNA (1)...(19): siRNA sense strand
aagauucgaugugagcauu

SEQ ID NO: 80428 - RNA, 19 nt, Homo sapiens
  misc_RNA (1)...(19): siRNA sense strand
cuuugaagauguuagaugu

SEQ ID NO: 80429 - RNA, 19 nt, Homo sapiens
  misc_RNA (1)...(19): siRNA sense strand
aacagaaggagaagucuuu

SEQ ID NO: 80430 - RNA, 19 nt, Homo sapiens
  misc_RNA (1)...(19): siRNA sense strand
cucggagacuggauucuuu

SEQ ID NO: 80431 - RNA, 19 nt, Homo sapiens
  misc_RNA (1)...(19): siRNA sense strand
ugcacaggauuuagaagaa

SEQ ID NO: 80432 - RNA, 19 nt, Homo sapiens
  misc_RNA (1)...(19): siRNA sense strand
gcuagacuuggcuacauuu

SEQ ID NO: 80433 - RNA, 19 nt, Homo sapiens
  misc_RNA (1)...(19): siRNA sense strand
ggacacugcagaccugaag

SEQ ID NO: 80434 - RNA, 19 nt, Homo sapiens
  misc_RNA (1)...(19): siRNA sense strand
cagaugaaggccaagugua

SEQ ID NO: 80435 - RNA, 19 nt, Homo sapiens
  misc_RNA (1)...(19): siRNA sense strand
gguuuagugcccugucaua

SEQ ID NO: 80436 - RNA, 19 nt, Homo sapiens
  misc_RNA (1)...(19): siRNA sense strand
uggaagauaacgaggauga

SEQ ID NO: 80437 - RNA, 19 nt, Homo sapiens
  misc_RNA (1)...(19): siRNA sense strand
gaccaugaucuccugaaga

SEQ ID NO: 80438 - RNA, 19 nt, Homo sapiens
  misc_RNA (1)...(19): siRNA sense strand
uguaguaacacaaacauca

SEQ ID NO: 80439 - RNA, 19 nt, Homo sapiens
  misc_RNA (1)...(19): siRNA sense strand
ggcaaugggacaacuaauc

SEQ ID NO: 80440 - RNA, 19 nt, Homo sapiens
  misc_RNA (1)...(19): siRNA sense strand
gaaaaggacaggauuaucg

SEQ ID NO: 80441 - RNA, 19 nt, Homo sapiens
  misc_RNA (1)...(19): siRNA sense strand
gaugaaggccaaguguaug

SEQ ID NO: 80442 - RNA, 19 nt, Homo sapiens
  misc_RNA (1)...(19): siRNA sense strand
agaugaaggccaaguguau

SEQ ID NO: 80443 - RNA, 19 nt, Homo sapiens
  misc_RNA (1)...(19): siRNA sense strand
gccugugggucuuaccauu

SEQ ID NO: 80444 - RNA, 19 nt, Homo sapiens
  misc_RNA (1)...(19): siRNA sense strand
ucaaacaaacaagucauug

SEQ ID NO: 80445 - RNA, 19 nt, Homo sapiens
  misc_RNA (1)...(19): siRNA sense strand
gcacugacgacguguuugc

SEQ ID NO: 80446 - RNA, 19 nt, Homo sapiens
  misc_RNA (1)...(19): siRNA sense strand
cauagcaugugggcagaug

SEQ ID NO: 80447 - RNA, 19 nt, Homo sapiens
  misc_RNA (1)...(19): siRNA sense strand
caaagcaagcagaguugga

SEQ ID NO: 80448 - RNA, 19 nt, Homo sapiens
  misc_RNA (1)...(19): siRNA sense strand
agauaacgaggaugauauu

SEQ ID NO: 80449 - RNA, 19 nt, Homo sapiens
  misc_RNA (1)...(19): siRNA sense strand
cagaguggcagcuuugcaa

SEQ ID NO: 80450 - RNA, 19 nt, Homo sapiens
  misc_RNA (1)...(19): siRNA sense strand
acaaacugcuguggcuguu

SEQ ID NO: 80451 - RNA, 19 nt, Homo sapiens
  misc_RNA (1)...(19): siRNA sense strand
cagaagauguggaauauua

SEQ ID NO: 80452 - RNA, 19 nt, Homo sapiens
  misc_RNA (1)...(19): siRNA sense strand
caucaagccucaucuaaua

SEQ ID NO: 80453 - RNA, 19 nt, Homo sapiens
  misc_RNA (1)...(19): siRNA sense strand
gauaagaacucaugaaugg

SEQ ID NO: 80454 - RNA, 19 nt, Homo sapiens
  misc_RNA (1)...(19): siRNA sense strand
caggagagauucaguauuu

SEQ ID NO: 80455 - RNA, 19 nt, Homo sapiens
  misc_RNA (1)...(19): siRNA sense strand
gaaauuaggcgguuuauca

SEQ ID NO: 80456 - RNA, 19 nt, Homo sapiens
  misc_RNA (1)...(19): siRNA sense strand
gaagagagcugaaacucau

SEQ ID NO: 80457 - RNA, 19 nt, Homo sapiens
  misc_RNA (1)...(19): siRNA sense strand
gaaagaaugaggccuguua

SEQ ID NO: 80458 - RNA, 19 nt, Homo sapiens
  misc_RNA (1)...(19): siRNA sense strand
gaaacaagcucuagaucau

SEQ ID NO: 80459 - RNA, 19 nt, Homo sapiens
  misc_RNA (1)...(19): siRNA sense strand
ggaaauggauauagaugaa

SEQ ID NO: 80460 - RNA, 19 nt, Homo sapiens
  misc_RNA (1)...(19): siRNA sense strand
caaaggaaauaguugcaua

SEQ ID NO: 80461 - RNA, 19 nt, Homo sapiens
  misc_RNA (1)...(19): siRNA sense strand
uaaauuggcuugcucauuc

SEQ ID NO: 80462 - RNA, 19 nt, Homo sapiens
  misc_RNA (1)...(19): siRNA sense strand
cagaagacauucagcauuu

SEQ ID NO: 80463 - RNA, 19 nt, Homo sapiens
  misc_RNA (1)...(19): siRNA sense strand
guaccgcucuccacucuua

SEQ ID NO: 80464 - RNA, 19 nt, Homo sapiens
  misc_RNA (1)...(19): siRNA sense strand
caaagaagaugauuccaau

SEQ ID NO: 80465 - RNA, 19 nt, Homo sapiens
  misc_RNA (1)...(19): siRNA sense strand
gcacaccgauuaaagaaug

SEQ ID NO: 80466 - RNA, 19 nt, Homo sapiens
  misc_RNA (1)...(19): siRNA sense strand
gagcauaccuggaguaguc

SEQ ID NO: 80467 - RNA, 19 nt, Homo sapiens
  misc_RNA (1)...(19): siRNA sense strand
gaacuccucuacagaauuc

SEQ ID NO: 80468 - RNA, 19 nt, Homo sapiens
  misc_RNA (1)...(19): siRNA sense strand
ucacucagaucaucgguua

SEQ ID NO: 80469 - RNA, 19 nt, Homo sapiens
  misc_RNA (1)...(19): siRNA sense strand
gaaagaaagcaguauacua

SEQ ID NO: 80470 - RNA, 19 nt, Homo sapiens
  misc_RNA (1)...(19): siRNA sense strand
gaagaaagaaagcaguaua

SEQ ID NO: 80471 - RNA, 19 nt, Homo sapiens
  misc_RNA (1)...(19): siRNA sense strand
gaagauggagcucucauuu

SEQ ID NO: 80472 - RNA, 19 nt, Homo sapiens
  misc_RNA (1)...(19): siRNA sense strand
ugaaugcugugguuuauuu

SEQ ID NO: 80473 - RNA, 19 nt, Homo sapiens
  misc_RNA (1)...(19): siRNA sense strand
gcauaaagaugaagauugg

SEQ ID NO: 80474 - RNA, 19 nt, Homo sapiens
  misc_RNA (1)...(19): siRNA sense strand
gaagaugauuccaauuugu

SEQ ID NO: 80475 - RNA, 19 nt, Homo sapiens
  misc_RNA (1)...(19): siRNA sense strand
cagacuaccucaucaaauu

SEQ ID NO: 80476 - RNA, 19 nt, Homo sapiens
  misc_RNA (1)...(19): siRNA sense strand
uaaggaaccugaaggagaa

SEQ ID NO: 80477 - RNA, 19 nt, Homo sapiens
  misc_RNA (1)...(19): siRNA sense strand
ucagggagauucuuacaaa

SEQ ID NO: 80478 - RNA, 19 nt, Homo sapiens
  misc_RNA (1)...(19): siRNA sense strand
ccaagcaacuguuaauguu

SEQ ID NO: 80479 - RNA, 19 nt, Homo sapiens
  misc_RNA (1)...(19): siRNA sense strand
gggagaauauuaaaggauu

SEQ ID NO: 80480 - RNA, 19 nt, Homo sapiens
  misc_RNA (1)...(19): siRNA sense strand
gaagggaggcgcaguagaa

SEQ ID NO: 80481 - RNA, 19 nt, Homo sapiens
  misc_RNA (1)...(19): siRNA sense strand
gaagaguuaucagccauuu

SEQ ID NO: 80482 - RNA, 19 nt, Homo sapiens
  misc_RNA (1)...(19): siRNA sense strand
gaucugcaauccucaagaa

SEQ ID NO: 80483 - RNA, 19 nt, Homo sapiens
  misc_RNA (1)...(19): siRNA sense strand
gaucacaggucaaauuugg

SEQ ID NO: 80484 - RNA, 19 nt, Homo sapiens
  misc_RNA (1)...(19): siRNA sense strand
caugagggcuuagaauuaa

SEQ ID NO: 80485 - RNA, 19 nt, Homo sapiens
  misc_RNA (1)...(19): siRNA sense strand
ggaggaugaugaugaagaa

SEQ ID NO: 80486 - RNA, 19 nt, Homo sapiens
  misc_RNA (1)...(19): siRNA sense strand
gaauggaaaugagugcuuu

SEQ ID NO: 80487 - RNA, 19 nt, Homo sapiens
  misc_RNA (1)...(19): siRNA sense strand
gcagaaacaugauaagaac

SEQ ID NO: 80488 - RNA, 19 nt, Homo sapiens
  misc_RNA (1)...(19): siRNA sense strand
uaaggaggaugaagaaaug

SEQ ID NO: 80489 - RNA, 19 nt, Homo sapiens
  misc_RNA (1)...(19): siRNA sense strand
gaaaugagugcuuuacaga

SEQ ID NO: 80490 - RNA, 19 nt, Homo sapiens
  misc_RNA (1)...(19): siRNA sense strand
gaacaacuagaacauacua

SEQ ID NO: 80491 - RNA, 19 nt, Homo sapiens
  misc_RNA (1)...(19): siRNA sense strand
cacaagagcuggaggucua

SEQ ID NO: 80492 - RNA, 19 nt, Homo sapiens
  misc_RNA (1)...(19): siRNA sense strand
gauagacacuuaacucagu

SEQ ID NO: 80493 - RNA, 19 nt, Homo sapiens
  misc_RNA (1)...(19): siRNA sense strand
gcuauuaauucgccuaaga

SEQ ID NO: 80494 - RNA, 19 nt, Homo sapiens
  misc_RNA (1)...(19): siRNA sense strand
ggaaagauuagaugcaauu

SEQ ID NO: 80495 - RNA, 19 nt, Homo sapiens
  misc_RNA (1)...(19): siRNA sense strand
caaagaaccaggagagauu

SEQ ID NO: 80496 - RNA, 19 nt, Homo sapiens
  misc_RNA (1)...(19): siRNA sense strand
gagaacaacuagaacauac

SEQ ID NO: 80497 - RNA, 19 nt, Homo sapiens
  misc_RNA (1)...(19): siRNA sense strand
cagauuaguuucaauggaa

SEQ ID NO: 80498 - RNA, 19 nt, Homo sapiens
  misc_RNA (1)...(19): siRNA sense strand
aaagggaaauucagacuug

SEQ ID NO: 80499 - RNA, 19 nt, Homo sapiens
  misc_RNA (1)...(19): siRNA sense strand
ggagagauucaguauuuaa

SEQ ID NO: 80500 - RNA, 19 nt, Homo sapiens
  misc_RNA (1)...(19): siRNA sense strand
caagagcuaagaagaauaa

SEQ ID NO: 80501 - RNA, 19 nt, Homo sapiens
  misc_RNA (1)...(19): siRNA sense strand
acaaauccauuccuucuga

SEQ ID NO: 80502 - RNA, 19 nt, Homo sapiens
  misc_RNA (1)...(19): siRNA sense strand
ggacacaacugggaagaca

SEQ ID NO: 80503 - RNA, 19 nt, Homo sapiens
  misc_RNA (1)...(19): siRNA sense strand
ggaaaugagugcuuuacag

SEQ ID NO: 80504 - RNA, 19 nt, Homo sapiens
  misc_RNA (1)...(19): siRNA sense strand
cauacucgcugaugaaaug

SEQ ID NO: 80505 - RNA, 19 nt, Homo sapiens
  misc_RNA (1)...(19): siRNA sense strand
gggaagacaguacuacaua

SEQ ID NO: 80506 - RNA, 19 nt, Homo sapiens
  misc_RNA (1)...(19): siRNA sense strand
uauggaagcugggaaauga

SEQ ID NO: 80507 - RNA, 19 nt, Homo sapiens
  misc_RNA (1)...(19): siRNA sense strand
gcagaaauuaggcgguuua

SEQ ID NO: 80508 - RNA, 19 nt, Homo sapiens
  misc_RNA (1)...(19): siRNA sense strand
gaaaagcaguugugaugaa

SEQ ID NO: 80509 - RNA, 19 nt, Homo sapiens
  misc_RNA (1)...(19): siRNA sense strand
guucuacuccuuucaauaa

SEQ ID NO: 80510 - RNA, 19 nt, Homo sapiens
  misc_RNA (1)...(19): siRNA sense strand
ugauggagcuaaagaaaug

SEQ ID NO: 80511 - RNA, 19 nt, Homo sapiens
  misc_RNA (1)...(19): siRNA sense strand
gaagcacaccgauuaaaga

SEQ ID NO: 80512 - RNA, 19 nt, Homo sapiens
  misc_RNA (1)...(19): siRNA sense strand
ucaaaugaaugcugugguu

SEQ ID NO: 80513 - RNA, 19 nt, Homo sapiens
  misc_RNA (1)...(19): siRNA sense strand
caaauagugggacguauaa

SEQ ID NO: 80514 - RNA, 19 nt, Homo sapiens
  misc_RNA (1)...(19): siRNA sense strand
gagagaauaugguuaugca

SEQ ID NO: 80515 - RNA, 19 nt, Homo sapiens
  misc_RNA (1)...(19): siRNA sense strand
gaucaaagaagacgauuag

SEQ ID NO: 80516 - RNA, 19 nt, Homo sapiens
  misc_RNA (1)...(19): siRNA sense strand
ggaaacaagcucuagauca

SEQ ID NO: 80517 - RNA, 19 nt, Homo sapiens
  misc_RNA (1)...(19): siRNA sense strand
gaugaagauuggcaaaugu

SEQ ID NO: 80518 - RNA, 19 nt, Homo sapiens
  misc_RNA (1)...(19): siRNA sense strand
gaauauacgcaccauaaau

SEQ ID NO: 80519 - RNA, 19 nt, Homo sapiens
  misc_RNA (1)...(19): siRNA sense strand
gcaaagaagaugauuccaa

SEQ ID NO: 80520 - RNA, 19 nt, Homo sapiens
  misc_RNA (1)...(19): siRNA sense strand
uuacaaagcccucagcaaa

SEQ ID NO: 80521 - RNA, 19 nt, Homo sapiens
  misc_RNA (1)...(19): siRNA sense strand
cugguuauccugauuauua

SEQ ID NO: 80522 - RNA, 19 nt, Homo sapiens
  misc_RNA (1)...(19): siRNA sense strand
caaagaagacgauuagaag

SEQ ID NO: 80523 - RNA, 19 nt, Homo sapiens
  misc_RNA (1)...(19): siRNA sense strand
ugaugaagcacaccgauua

SEQ ID NO: 80524 - RNA, 19 nt, Homo sapiens
  misc_RNA (1)...(19): siRNA sense strand
gacuugggcuucucaaaug

SEQ ID NO: 80525 - RNA, 19 nt, Homo sapiens
  misc_RNA (1)...(19): siRNA sense strand
gagaucacaggucaaauuu

SEQ ID NO: 80526 - RNA, 19 nt, Homo sapiens
  misc_RNA (1)...(19): siRNA sense strand
guauacaaauccugaacaa

SEQ ID NO: 80527 - RNA, 19 nt, Homo sapiens
  misc_RNA (1)...(19): siRNA sense strand
gagaauugguacauaaugg

SEQ ID NO: 80528 - RNA, 19 nt, Homo sapiens
  misc_RNA (1)...(19): siRNA sense strand
ugaguuaguugauaaguca

SEQ ID NO: 80529 - RNA, 19 nt, Homo sapiens
  misc_RNA (1)...(19): siRNA sense strand
aaccauugcuaccucauua

SEQ ID NO: 80530 - RNA, 19 nt, Homo sapiens
  misc_RNA (1)...(19): siRNA sense strand
ggaagucuguggagaggau

SEQ ID NO: 80531 - RNA, 19 nt, Homo sapiens
  misc_RNA (1)...(19): siRNA sense strand
agaaagagaacaacuagaa

SEQ ID NO: 80532 - RNA, 19 nt, Homo sapiens
  misc_RNA (1)...(19): siRNA sense strand
aaacaguaguggagaauca

SEQ ID NO: 80533 - RNA, 19 nt, Homo sapiens
  misc_RNA (1)...(19): siRNA sense strand
gaagaagaagaaagacaaa

SEQ ID NO: 80534 - RNA, 19 nt, Homo sapiens
  misc_RNA (1)...(19): siRNA sense strand
ggcaaucgaguucuuauuu

SEQ ID NO: 80535 - RNA, 19 nt, Homo sapiens
  misc_RNA (1)...(19): siRNA sense strand
cgaucucauuucugaauua

SEQ ID NO: 80536 - RNA, 19 nt, Homo sapiens
  misc_RNA (1)...(19): siRNA sense strand
aagcaugcauugaugagua

SEQ ID NO: 80537 - RNA, 19 nt, Homo sapiens
  misc_RNA (1)...(19): siRNA sense strand
agcaagaacuuacagauga

SEQ ID NO: 80538 - RNA, 19 nt, Homo sapiens
  misc_RNA (1)...(19): siRNA sense strand
gcaagaacuuacagaugau

SEQ ID NO: 80539 - RNA, 19 nt, Homo sapiens
  misc_RNA (1)...(19): siRNA sense strand
gaucaucgguuacauucag

SEQ ID NO: 80540 - RNA, 19 nt, Homo sapiens
  misc_RNA (1)...(19): siRNA sense strand
guaaagaccaucgugauug

SEQ ID NO: 80541 - RNA, 19 nt, Homo sapiens
  misc_RNA (1)...(19): siRNA sense strand
acacaaaggcagcucauuu

SEQ ID NO: 80542 - RNA, 19 nt, Homo sapiens
  misc_RNA (1)...(19): siRNA sense strand
gaagacgauuagaagaaga

SEQ ID NO: 80543 - RNA, 19 nt, Homo sapiens
  misc_RNA (1)...(19): siRNA sense strand
guuggaaccugaaagaaau

SEQ ID NO: 80544 - RNA, 19 nt, Homo sapiens
  misc_RNA (1)...(19): siRNA sense strand
aaugagugcuuuacagaaa

SEQ ID NO: 80545 - RNA, 19 nt, Homo sapiens
  misc_RNA (1)...(19): siRNA sense strand
aagcagccauccuauauug

SEQ ID NO: 80546 - RNA, 19 nt, Homo sapiens
  misc_RNA (1)...(19): siRNA sense strand
gauguuagauauacuugca

SEQ ID NO: 80547 - RNA, 19 nt, Homo sapiens
  misc_RNA (1)...(19): siRNA sense strand
ggaaggaaguuuaaaagau

SEQ ID NO: 80548 - RNA, 19 nt, Homo sapiens
  misc_RNA (1)...(19): siRNA sense strand
agagaagucugaugaagau

SEQ ID NO: 80549 - RNA, 19 nt, Homo sapiens
  misc_RNA (1)...(19): siRNA sense strand
gcaaugaagucuauaaaag

SEQ ID NO: 80550 - RNA, 19 nt, Homo sapiens
  misc_RNA (1)...(19): siRNA sense strand
gggaggcgcaguagaagua

SEQ ID NO: 80551 - RNA, 19 nt, Homo sapiens
  misc_RNA (1)...(19): siRNA sense strand
gaaacaaccugcauauuua

SEQ ID NO: 80552 - RNA, 19 nt, Homo sapiens
  misc_RNA (1)...(19): siRNA sense strand
gaaagggucuggagaagaa

SEQ ID NO: 80553 - RNA, 19 nt, Homo sapiens
  misc_RNA (1)...(19): siRNA sense strand
caagauggcucauaagaaa

SEQ ID NO: 80554 - RNA, 19 nt, Homo sapiens
  misc_RNA (1)...(19): siRNA sense strand
caagaaccaucgcgauuua

SEQ ID NO: 80555 - RNA, 19 nt, Homo sapiens
  misc_RNA (1)...(19): siRNA sense strand
gaaauacgauacgggaaua

SEQ ID NO: 80556 - RNA, 19 nt, Homo sapiens
  misc_RNA (1)...(19): siRNA sense strand
ggaaauggauauagaugaa

SEQ ID NO: 80557 - RNA, 19 nt, Homo sapiens
  misc_RNA (1)...(19): siRNA sense strand
ggaagaauauccugauguu

SEQ ID NO: 80558 - RNA, 19 nt, Homo sapiens
  misc_RNA (1)...(19): siRNA sense strand
gaaaaggucucaagaagaa

SEQ ID NO: 80559 - RNA, 19 nt, Homo sapiens
  misc_RNA (1)...(19): siRNA sense strand
gaagguucaucaaggcuua

SEQ ID NO: 80560 - RNA, 19 nt, Homo sapiens
  misc_RNA (1)...(19): siRNA sense strand
gaaagaugauggcuuggaa

SEQ ID NO: 80561 - RNA, 19 nt, Homo sapiens
  misc_RNA (1)...(19): siRNA sense strand
gcccaaaccucguguuaaa

SEQ ID NO: 80562 - RNA, 19 nt, Homo sapiens
  misc_RNA (1)...(19): siRNA sense strand
ccaucgcgauuuaauauua

SEQ ID NO: 80563 - RNA, 19 nt, Homo sapiens
  misc_RNA (1)...(19): siRNA sense strand
ggagcuggcuucagaguug

SEQ ID NO: 80564 - RNA, 19 nt, Homo sapiens
  misc_RNA (1)...(19): siRNA sense strand
gcagagaccacgauuugua

SEQ ID NO: 80565 - RNA, 19 nt, Homo sapiens
  misc_RNA (1)...(19): siRNA sense strand
gaaaugggccuaggaaaga

SEQ ID NO: 80566 - RNA, 19 nt, Homo sapiens
  misc_RNA (1)...(19): siRNA sense strand
gaacauggcuauggaaacu

SEQ ID NO: 80567 - RNA, 19 nt, Homo sapiens
  misc_RNA (1)...(19): siRNA sense strand
ggacacagucgucaucuuu

SEQ ID NO: 80568 - RNA, 19 nt, Homo sapiens
  misc_RNA (1)...(19): siRNA sense strand
agaaaucccuuccugcuaa

SEQ ID NO: 80569 - RNA, 19 nt, Homo sapiens
  misc_RNA (1)...(19): siRNA sense strand
ugaaaugacuggagaagga

SEQ ID NO: 80570 - RNA, 19 nt, Homo sapiens
  misc_RNA (1)...(19): siRNA sense strand
caaaugagcccgaauaucu

SEQ ID NO: 80571 - RNA, 19 nt, Homo sapiens
  misc_RNA (1)...(19): siRNA sense strand
agaaacaaccugcauauuu

SEQ ID NO: 80572 - RNA, 19 nt, Homo sapiens
  misc_RNA (1)...(19): siRNA sense strand
uauacaagauggcucauaa

SEQ ID NO: 80573 - RNA, 19 nt, Homo sapiens
  misc_RNA (1)...(19): siRNA sense strand
gaacaaggagaaacaaaug

SEQ ID NO: 80574 - RNA, 19 nt, Homo sapiens
  misc_RNA (1)...(19): siRNA sense strand
cauaugagauccucuugaa

SEQ ID NO: 80575 - RNA, 19 nt, Homo sapiens
  misc_RNA (1)...(19): siRNA sense strand
caucaaggcuuauaagaag

SEQ ID NO: 80576 - RNA, 19 nt, Homo sapiens
  misc_RNA (1)...(19): siRNA sense strand
caaaugaguucuaggaaag

SEQ ID NO: 80577 - RNA, 19 nt, Homo sapiens
  misc_RNA (1)...(19): siRNA sense strand
gaaagaggagcauggaauu

SEQ ID NO: 80578 - RNA, 19 nt, Homo sapiens
  misc_RNA (1)...(19): siRNA sense strand
gaagagcagcugaaagaaa

SEQ ID NO: 80579 - RNA, 19 nt, Homo sapiens
  misc_RNA (1)...(19): siRNA sense strand
gcaaguagcgggucugaga

SEQ ID NO: 80580 - RNA, 19 nt, Homo sapiens
  misc_RNA (1)...(19): siRNA sense strand
gaagaugugggaagaauau

SEQ ID NO: 80581 - RNA, 19 nt, Homo sapiens
  misc_RNA (1)...(19): siRNA sense strand
gugcuuaucuucucucaga

SEQ ID NO: 80582 - RNA, 19 nt, Homo sapiens
  misc_RNA (1)...(19): siRNA sense strand
gaaccaucgcgauuuaaua

SEQ ID NO: 80583 - RNA, 19 nt, Homo sapiens
  misc_RNA (1)...(19): siRNA sense strand
gagcaucuacuacuguaua

SEQ ID NO: 80584 - RNA, 19 nt, Homo sapiens
  misc_RNA (1)...(19): siRNA sense strand
ccaacaacauguccagaaa

SEQ ID NO: 80585 - RNA, 19 nt, Homo sapiens
  misc_RNA (1)...(19): siRNA sense strand
gaagaagcagguaaauauu

SEQ ID NO: 80586 - RNA, 19 nt, Homo sapiens
  misc_RNA (1)...(19): siRNA sense strand
ucaaagagcucugguccuu

SEQ ID NO: 80587 - RNA, 19 nt, Homo sapiens
  misc_RNA (1)...(19): siRNA sense strand
uaacguagugguuuacaua

SEQ ID NO: 80588 - RNA, 19 nt, Homo sapiens
  misc_RNA (1)...(19): siRNA sense strand
uauaugcgauugaagcuaa

SEQ ID NO: 80589 - RNA, 19 nt, Homo sapiens
  misc_RNA (1)...(19): siRNA sense strand
agaaggagcuagaagaaau

SEQ ID NO: 80590 - RNA, 19 nt, Homo sapiens
  misc_RNA (1)...(19): siRNA sense strand
cagaugaacuucuaucaca

SEQ ID NO: 80591 - RNA, 19 nt, Homo sapiens
  misc_RNA (1)...(19): siRNA sense strand
gcagagagaguuugaaauc

SEQ ID NO: 80592 - RNA, 19 nt, Homo sapiens
  misc_RNA (1)...(19): siRNA sense strand
gagaaggaguugaugaaca

SEQ ID NO: 80593 - RNA, 19 nt, Homo sapiens
  misc_RNA (1)...(19): siRNA sense strand
cgaaaucaaacaaugguua

SEQ ID NO: 80594 - RNA, 19 nt, Homo sapiens
  misc_RNA (1)...(19): siRNA sense strand
guacaaggaccaccauuau

SEQ ID NO: 80595 - RNA, 19 nt, Homo sapiens
  misc_RNA (1)...(19): siRNA sense strand
gagagagaaugaaguguca

SEQ ID NO: 80596 - RNA, 19 nt, Homo sapiens
  misc_RNA (1)...(19): siRNA sense strand
agaagaagcagguaaauau

SEQ ID NO: 80597 - RNA, 19 nt, Homo sapiens
  misc_RNA (1)...(19): siRNA sense strand
gaaaucccuuccugcuaaa

SEQ ID NO: 80598 - RNA, 19 nt, Homo sapiens
  misc_RNA (1)...(19): siRNA sense strand
gaugagaaauaaggacaaa

SEQ ID NO: 80599 - RNA, 19 nt, Homo sapiens
  misc_RNA (1)...(19): siRNA sense strand
gaagacaaguaaaucuaca

SEQ ID NO: 80600 - RNA, 19 nt, Homo sapiens
  misc_RNA (1)...(19): siRNA sense strand
gaaagaccauccagaccau

SEQ ID NO: 80601 - RNA, 19 nt, Homo sapiens
  misc_RNA (1)...(19): siRNA sense strand
ccagaaagaggccuuauga

SEQ ID NO: 80602 - RNA, 19 nt, Homo sapiens
  misc_RNA (1)...(19): siRNA sense strand
caggagacauucagcauau

SEQ ID NO: 80603 - RNA, 19 nt, Homo sapiens
  misc_RNA (1)...(19): siRNA sense strand
gcagagauccgaagguuca

SEQ ID NO: 80604 - RNA, 19 nt, Homo sapiens
  misc_RNA (1)...(19): siRNA sense strand
gaacagcagcucugaaucu

SEQ ID NO: 80605 - RNA, 19 nt, Homo sapiens
  misc_RNA (1)...(19): siRNA sense strand
gaaauccaguaccucauca

SEQ ID NO: 80606 - RNA, 19 nt, Homo sapiens
  misc_RNA (1)...(19): siRNA sense strand
acaaaugaguucuaggaaa

SEQ ID NO: 80607 - RNA, 19 nt, Homo sapiens
  misc_RNA (1)...(19): siRNA sense strand
aaacagacccagagcuuaa

SEQ ID NO: 80608 - RNA, 19 nt, Homo sapiens
  misc_RNA (1)...(19): siRNA sense strand
augcugagcugguagauaa

SEQ ID NO: 80609 - RNA, 19 nt, Homo sapiens
  misc_RNA (1)...(19): siRNA sense strand
gaugucagcccuucagaaa

SEQ ID NO: 80610 - RNA, 19 nt, Homo sapiens
  misc_RNA (1)...(19): siRNA sense strand
gaaugaugacucuuuauug

SEQ ID NO: 80611 - RNA, 19 nt, Homo sapiens
  misc_RNA (1)...(19): siRNA sense strand
gcacuuauaacaacauaug

SEQ ID NO: 80612 - RNA, 19 nt, Homo sapiens
  misc_RNA (1)...(19): siRNA sense strand
ggagagugaagaauccuua

SEQ ID NO: 80613 - RNA, 19 nt, Homo sapiens
  misc_RNA (1)...(19): siRNA sense strand
uaaagaaacaaccugcaua

SEQ ID NO: 80614 - RNA, 19 nt, Homo sapiens
  misc_RNA (1)...(19): siRNA sense strand
caagagauaacuacaauca

SEQ ID NO: 80615 - RNA, 19 nt, Homo sapiens
  misc_RNA (1)...(19): siRNA sense strand
gaagaaagacgacgugacu

SEQ ID NO: 80616 - RNA, 19 nt, Homo sapiens
  misc_RNA (1)...(19): siRNA sense strand
gcagaaggagcuagaagaa

SEQ ID NO: 80617 - RNA, 19 nt, Homo sapiens
  misc_RNA (1)...(19): siRNA sense strand
gauuucaaguccaaccaua

SEQ ID NO: 80618 - RNA, 19 nt, Homo sapiens
  misc_RNA (1)...(19): siRNA sense strand
uaaacuggcuagcucauuc

SEQ ID NO: 80619 - RNA, 19 nt, Homo sapiens
  misc_RNA (1)...(19): siRNA sense strand
gcccgaauaucuauguaaa

SEQ ID NO: 80620 - RNA, 19 nt, Homo sapiens
  misc_RNA (1)...(19): siRNA sense strand
gggaggaggccaaauuaaa

SEQ ID NO: 80621 - RNA, 19 nt, Homo sapiens
  misc_RNA (1)...(19): siRNA sense strand
ugucagcaaugcaggaaua

SEQ ID NO: 80622 - RNA, 19 nt, Homo sapiens
  misc_RNA (1)...(19): siRNA sense strand
gcacaagcccgagcgcaua

SEQ ID NO: 80623 - RNA, 19 nt, Homo sapiens
  misc_RNA (1)...(19): siRNA sense strand
gaccugaugagcagaaaua

SEQ ID NO: 80624 - RNA, 19 nt, Homo sapiens
  misc_RNA (1)...(19): siRNA sense strand
ugaagaagaugugggaaga

SEQ ID NO: 80625 - RNA, 19 nt, Homo sapiens
  misc_RNA (1)...(19): siRNA sense strand
gguacaaggaccaccauua

SEQ ID NO: 80626 - RNA, 19 nt, Homo sapiens
  misc_RNA (1)...(19): siRNA sense strand
ugaaauccauuauccaaca

SEQ ID NO: 80627 - RNA, 19 nt, Homo sapiens
  misc_RNA (1)...(19): siRNA sense strand
ggaagacucugaugaugac

SEQ ID NO: 80628 - RNA, 19 nt, Homo sapiens
  misc_RNA (1)...(19): siRNA sense strand
caaaugacagugacucuga

SEQ ID NO: 80629 - RNA, 19 nt, Homo sapiens
  misc_RNA (1)...(19): siRNA sense strand
aaccauaggcuccugauua

SEQ ID NO: 80630 - RNA, 19 nt, Homo sapiens
  misc_RNA (1)...(19): siRNA sense strand
ccgaauaucuauguaaaug

SEQ ID NO: 80631 - RNA, 19 nt, Homo sapiens
  misc_RNA (1)...(19): siRNA sense strand
gcccaucgguugaagaaug

SEQ ID NO: 80632 - RNA, 19 nt, Homo sapiens
  misc_RNA (1)...(19): siRNA sense strand
gaugccaaaucuucgagua

SEQ ID NO: 80633 - RNA, 19 nt, Homo sapiens
  misc_RNA (1)...(19): siRNA sense strand
gcauucagauaauccauca

SEQ ID NO: 80634 - RNA, 19 nt, Homo sapiens
  misc_RNA (1)...(19): siRNA sense strand
ugucaaagcugcacauuuu

SEQ ID NO: 80635 - RNA, 19 nt, Homo sapiens
  misc_RNA (1)...(19): siRNA sense strand
ggucugaggacuucuguuu

SEQ ID NO: 80636 - RNA, 19 nt, Homo sapiens
  misc_RNA (1)...(19): siRNA sense strand
gaacagcaagauaauagug

SEQ ID NO: 80637 - RNA, 19 nt, Homo sapiens
  misc_RNA (1)...(19): siRNA sense strand
ggacacagagauuauuaug

SEQ ID NO: 80638 - RNA, 19 nt, Homo sapiens
  misc_RNA (1)...(19): siRNA sense strand
aagagacacuucaguaaug

SEQ ID NO: 80639 - RNA, 19 nt, Homo sapiens
  misc_RNA (1)...(19): siRNA sense strand
gaacggauagcugauguga

SEQ ID NO: 80640 - RNA, 19 nt, Homo sapiens
  misc_RNA (1)...(19): siRNA sense strand
uauccuggcugaauaccua

SEQ ID NO: 80641 - RNA, 19 nt, Homo sapiens
  misc_RNA (1)...(19): siRNA sense strand
ggaaucgagugcuuaucuu

SEQ ID NO: 80642 - RNA, 19 nt, Homo sapiens
  misc_RNA (1)...(19): siRNA sense strand
gaguguagcugggaagaug

SEQ ID NO: 80643 - RNA, 19 nt, Homo sapiens
  misc_RNA (1)...(19): siRNA sense strand
gaaaaggucuuagauucaa

SEQ ID NO: 80644 - RNA, 19 nt, Homo sapiens
  misc_RNA (1)...(19): siRNA sense strand
gcauagaauuggucagaag

SEQ ID NO: 80645 - RNA, 19 nt, Homo sapiens
  misc_RNA (1)...(19): siRNA sense strand
acacagagauuauuaugac

SEQ ID NO: 80646 - RNA, 19 nt, Homo sapiens
  misc_RNA (1)...(19): siRNA sense strand
ggagcuagaagaaauuuau

SEQ ID NO: 80647 - RNA, 19 nt, Homo sapiens
  misc_RNA (1)...(19): siRNA sense strand
ccacugcuaucugauuaaa

SEQ ID NO: 80648 - RNA, 19 nt, Homo sapiens
  misc_RNA (1)...(19): siRNA sense strand
gagauuauuaugacaggua

SEQ ID NO: 80649 - RNA, 19 nt, Homo sapiens
  misc_RNA (1)...(19): siRNA sense strand
gaaguuuggucucccucuu

SEQ ID NO: 80650 - RNA, 19 nt, Homo sapiens
  misc_RNA (1)...(19): siRNA sense strand
caacaagugcaacagauga

SEQ ID NO: 80651 - RNA, 19 nt, Homo sapiens
  misc_RNA (1)...(19): siRNA sense strand
gaacugcucugcugugaua

SEQ ID NO: 80652 - RNA, 19 nt, Homo sapiens
  misc_RNA (1)...(19): siRNA sense strand
gaacaaggacccuaaauuu

SEQ ID NO: 80653 - RNA, 19 nt, Homo sapiens
  misc_RNA (1)...(19): siRNA sense strand
gcaagaagcucaagaaggu

SEQ ID NO: 80654 - RNA, 19 nt, Homo sapiens
  misc_RNA (1)...(19): siRNA sense strand
gcaagaagguucaggaguu

SEQ ID NO: 80655 - RNA, 19 nt, Homo sapiens
  misc_RNA (1)...(19): siRNA sense strand
gaaaguagcuccccugaaa

SEQ ID NO: 80656 - RNA, 19 nt, Homo sapiens
  misc_RNA (1)...(19): siRNA sense strand
gaaagaagaagaagagaaa

SEQ ID NO: 80657 - RNA, 19 nt, Homo sapiens
  misc_RNA (1)...(19): siRNA sense strand
ccaaggaccugaaugauga

SEQ ID NO: 80658 - RNA, 19 nt, Homo sapiens
  misc_RNA (1)...(19): siRNA sense strand
ggaaggugaugaagacuuu

SEQ ID NO: 80659 - RNA, 19 nt, Homo sapiens
  misc_RNA (1)...(19): siRNA sense strand
gaagaggauuugucagaaa

SEQ ID NO: 80660 - RNA, 19 nt, Homo sapiens
  misc_RNA (1)...(19): siRNA sense strand
gaauugguguuaugucuuu

SEQ ID NO: 80661 - RNA, 19 nt, Homo sapiens
  misc_RNA (1)...(19): siRNA sense strand
guaaacaggucaacuacaa

SEQ ID NO: 80662 - RNA, 19 nt, Homo sapiens
  misc_RNA (1)...(19): siRNA sense strand
caaaggugcugcugaugua

SEQ ID NO: 80663 - RNA, 19 nt, Homo sapiens
  misc_RNA (1)...(19): siRNA sense strand
gaaagaggcaucugugaaa

SEQ ID NO: 80664 - RNA, 19 nt, Homo sapiens
  misc_RNA (1)...(19): siRNA sense strand
gagugaggaugaugacuua

SEQ ID NO: 80665 - RNA, 19 nt, Homo sapiens
  misc_RNA (1)...(19): siRNA sense strand
gcaauuaugcgauauggua

SEQ ID NO: 80666 - RNA, 19 nt, Homo sapiens
  misc_RNA (1)...(19): siRNA sense strand
gaugauauccucaaauuug

SEQ ID NO: 80667 - RNA, 19 nt, Homo sapiens
  misc_RNA (1)...(19): siRNA sense strand
agaaagaguucaaggcaua

SEQ ID NO: 80668 - RNA, 19 nt, Homo sapiens
  misc_RNA (1)...(19): siRNA sense strand
gaaaugaaccguggcaauu

SEQ ID NO: 80669 - RNA, 19 nt, Homo sapiens
  misc_RNA (1)...(19): siRNA sense strand
gcaagaagaagaagaagaa

SEQ ID NO: 80670 - RNA, 19 nt, Homo sapiens
  misc_RNA (1)...(19): siRNA sense strand
ggcaagacauccagaauga

SEQ ID NO: 80671 - RNA, 19 nt, Homo sapiens
  misc_RNA (1)...(19): siRNA sense strand
uagcagagcucaccggauu

SEQ ID NO: 80672 - RNA, 19 nt, Homo sapiens
  misc_RNA (1)...(19): siRNA sense strand
caagaagacuuaugagauc

SEQ ID NO: 80673 - RNA, 19 nt, Homo sapiens
  misc_RNA (1)...(19): siRNA sense strand
guaaugaucuaccgguuug

SEQ ID NO: 80674 - RNA, 19 nt, Homo sapiens
  misc_RNA (1)...(19): siRNA sense strand
gggcaugaaugaauauuug

SEQ ID NO: 80675 - RNA, 19 nt, Homo sapiens
  misc_RNA (1)...(19): siRNA sense strand
gaaagaacaaggacccuaa

SEQ ID NO: 80676 - RNA, 19 nt, Homo sapiens
  misc_RNA (1)...(19): siRNA sense strand
caaaggagccuaaaucauc

SEQ ID NO: 80677 - RNA, 19 nt, Homo sapiens
  misc_RNA (1)...(19): siRNA sense strand
ggaccugaaugaugagaaa

SEQ ID NO: 80678 - RNA, 19 nt, Homo sapiens
  misc_RNA (1)...(19): siRNA sense strand
agaagaagcuuggaccuaa

SEQ ID NO: 80679 - RNA, 19 nt, Homo sapiens
  misc_RNA (1)...(19): siRNA sense strand
ggaaaucauuaaacaggaa

SEQ ID NO: 80680 - RNA, 19 nt, Homo sapiens
  misc_RNA (1)...(19): siRNA sense strand
gcucaaagccgauguguuc

SEQ ID NO: 80681 - RNA, 19 nt, Homo sapiens
  misc_RNA (1)...(19): siRNA sense strand
ggacuuugguggugaugaa

SEQ ID NO: 80682 - RNA, 19 nt, Homo sapiens
  misc_RNA (1)...(19): siRNA sense strand
uggaagaacugcugaguga

SEQ ID NO: 80683 - RNA, 19 nt, Homo sapiens
  misc_RNA (1)...(19): siRNA sense strand
gaacaugcccuccaagaca

SEQ ID NO: 80684 - RNA, 19 nt, Homo sapiens
  misc_RNA (1)...(19): siRNA sense strand
ggacuuaccuuacgaucag

SEQ ID NO: 80685 - RNA, 19 nt, Homo sapiens
  misc_RNA (1)...(19): siRNA sense strand
ugacugcuguggaugguua

SEQ ID NO: 80686 - RNA, 19 nt, Homo sapiens
  misc_RNA (1)...(19): siRNA sense strand
gcuaugccauccucaauga

SEQ ID NO: 80687 - RNA, 19 nt, Homo sapiens
  misc_RNA (1)...(19): siRNA sense strand
ggaagaaugauauggauga

SEQ ID NO: 80688 - RNA, 19 nt, Homo sapiens
  misc_RNA (1)...(19): siRNA sense strand
gagcggcaguucuuuguga

SEQ ID NO: 80689 - RNA, 19 nt, Homo sapiens
  misc_RNA (1)...(19): siRNA sense strand
gaagaaagaagaagaagag

SEQ ID NO: 80690 - RNA, 19 nt, Homo sapiens
  misc_RNA (1)...(19): siRNA sense strand
caagaagguucaggaguuu

SEQ ID NO: 80691 - RNA, 19 nt, Homo sapiens
  misc_RNA (1)...(19): siRNA sense strand
gcuagaggauuucuuggaa

SEQ ID NO: 80692 - RNA, 19 nt, Homo sapiens
  misc_RNA (1)...(19): siRNA sense strand
caaggagggucauuccaaa

SEQ ID NO: 80693 - RNA, 19 nt, Homo sapiens
  misc_RNA (1)...(19): siRNA sense strand
cuccaaagcucaagaagaa

SEQ ID NO: 80694 - RNA, 19 nt, Homo sapiens
  misc_RNA (1)...(19): siRNA sense strand
guaagggccugcggaauga

SEQ ID NO: 80695 - RNA, 19 nt, Homo sapiens
  misc_RNA (1)...(19): siRNA sense strand
gaaaauagccucaaagaag

SEQ ID NO: 80696 - RNA, 19 nt, Homo sapiens
  misc_RNA (1)...(19): siRNA sense strand
gaaccguggcaauuucuua

SEQ ID NO: 80697 - RNA, 19 nt, Homo sapiens
  misc_RNA (1)...(19): siRNA sense strand
ggacagccgugccaucauc

SEQ ID NO: 80698 - RNA, 19 nt, Homo sapiens
  misc_RNA (1)...(19): siRNA sense strand
caacaaagagggagaagau

SEQ ID NO: 80699 - RNA, 19 nt, Homo sapiens
  misc_RNA (1)...(19): siRNA sense strand
ucacgcagguggcaaagaa

SEQ ID NO: 80700 - RNA, 19 nt, Homo sapiens
  misc_RNA (1)...(19): siRNA sense strand
gaacagaggaaccuaugga

SEQ ID NO: 80701 - RNA, 19 nt, Homo sapiens
  misc_RNA (1)...(19): siRNA sense strand
guagaacgggaaaucauua

SEQ ID NO: 80702 - RNA, 19 nt, Homo sapiens
  misc_RNA (1)...(19): siRNA sense strand
aacaggagcuugaugauau

SEQ ID NO: 80703 - RNA, 19 nt, Homo sapiens
  misc_RNA (1)...(19): siRNA sense strand
ggaggaggaugaugaugau

SEQ ID NO: 80704 - RNA, 19 nt, Homo sapiens
  misc_RNA (1)...(19): siRNA sense strand
ugaaacagcuggaagaacu

SEQ ID NO: 80705 - RNA, 19 nt, Homo sapiens
  misc_RNA (1)...(19): siRNA sense strand
gcacaaaguucugaaacag

SEQ ID NO: 80706 - RNA, 19 nt, Homo sapiens
  misc_RNA (1)...(19): siRNA sense strand
gguguuaugucuuugauuc

SEQ ID NO: 80707 - RNA, 19 nt, Homo sapiens
  misc_RNA (1)...(19): siRNA sense strand
ggagaagauagcaguguua

SEQ ID NO: 80708 - RNA, 19 nt, Homo sapiens
  misc_RNA (1)...(19): siRNA sense strand
gcugacauccuaugaauug

SEQ ID NO: 80709 - RNA, 19 nt, Homo sapiens
  misc_RNA (1)...(19): siRNA sense strand
ggaggaguuugcugacauu

SEQ ID NO: 80710 - RNA, 19 nt, Homo sapiens
  misc_RNA (1)...(19): siRNA sense strand
caugaaagcugaugugacu

SEQ ID NO: 80711 - RNA, 19 nt, Homo sapiens
  misc_RNA (1)...(19): siRNA sense strand
gcugcuagccggcauuaua

SEQ ID NO: 80712 - RNA, 19 nt, Homo sapiens
  misc_RNA (1)...(19): siRNA sense strand
ggaggugacugcuguggau

SEQ ID NO: 80713 - RNA, 19 nt, Homo sapiens
  misc_RNA (1)...(19): siRNA sense strand
agaacaagcucuggugauu

SEQ ID NO: 80714 - RNA, 19 nt, Homo sapiens
  misc_RNA (1)...(19): siRNA sense strand
caaagaagaagagagcaua

SEQ ID NO: 80715 - RNA, 19 nt, Homo sapiens
  misc_RNA (1)...(19): siRNA sense strand
aauggaagcuccuaagaug

SEQ ID NO: 80716 - RNA, 19 nt, Homo sapiens
  misc_RNA (1)...(19): siRNA sense strand
ugauggaucuuaagaagug

SEQ ID NO: 80717 - RNA, 19 nt, Homo sapiens
  misc_RNA (1)...(19): siRNA sense strand
gguauugaaugguuacuca

SEQ ID NO: 80718 - RNA, 19 nt, Homo sapiens
  misc_RNA (1)...(19): siRNA sense strand
gaaacuaucagcggaagaa

SEQ ID NO: 80719 - RNA, 19 nt, Homo sapiens
  misc_RNA (1)...(19): siRNA sense strand
aagcagagcuauuggaauc

SEQ ID NO: 80720 - RNA, 19 nt, Homo sapiens
  misc_RNA (1)...(19): siRNA sense strand
gaaacaagccagccaaugc

SEQ ID NO: 80721 - RNA, 19 nt, Homo sapiens
  misc_RNA (1)...(19): siRNA sense strand
gcugagaccuuugcugaug

SEQ ID NO: 80722 - RNA, 19 nt, Homo sapiens
  misc_RNA (1)...(19): siRNA sense strand
gcaaaucagagaaagaguu

SEQ ID NO: 80723 - RNA, 19 nt, Homo sapiens
  misc_RNA (1)...(19): siRNA sense strand
ccgagagguuccacaauuu

SEQ ID NO: 80724 - RNA, 19 nt, Homo sapiens
  misc_RNA (1)...(19): siRNA sense strand
ggaugagacugaagacaca

SEQ ID NO: 80725 - RNA, 19 nt, Homo sapiens
  misc_RNA (1)...(19): siRNA sense strand
cagcauguccuuacuagaa

SEQ ID NO: 80726 - RNA, 19 nt, Homo sapiens
  misc_RNA (1)...(19): siRNA sense strand
aagaagaucuagcccgaaa

SEQ ID NO: 80727 - RNA, 19 nt, Homo sapiens
  misc_RNA (1)...(19): siRNA sense strand
ggugauggaucuuaagaag

SEQ ID NO: 80728 - RNA, 19 nt, Homo sapiens
  misc_RNA (1)...(19): siRNA sense strand
gccauugccuccucuguug

SEQ ID NO: 80729 - RNA, 19 nt, Homo sapiens
  misc_RNA (1)...(19): siRNA sense strand
gggagaagauagcaguguu

SEQ ID NO: 80730 - RNA, 19 nt, Homo sapiens
  misc_RNA (1)...(19): siRNA sense strand
gcagugaggaggaggauau

SEQ ID NO: 80731 - RNA, 19 nt, Homo sapiens
  misc_RNA (1)...(19): siRNA sense strand
gaagaacaaucagucuaag

SEQ ID NO: 80732 - RNA, 19 nt, Homo sapiens
  misc_RNA (1)...(19): siRNA sense strand
ugaagaacaaucagucuaa

SEQ ID NO: 80733 - RNA, 19 nt, Homo sapiens
  misc_RNA (1)...(19): siRNA sense strand
aagaaggccucccgcauga

SEQ ID NO: 80734 - RNA, 19 nt, Homo sapiens
  misc_RNA (1)...(19): siRNA sense strand
gaagaagcuuggaccuaag

SEQ ID NO: 80735 - RNA, 19 nt, Homo sapiens
  misc_RNA (1)...(19): siRNA sense strand
ccaaacaggagcuugauga

SEQ ID NO: 80736 - RNA, 19 nt, Homo sapiens
  misc_RNA (1)...(19): siRNA sense strand
gagcaucugggaaauuauu

SEQ ID NO: 80737 - RNA, 19 nt, Homo sapiens
  misc_RNA (1)...(19): siRNA sense strand
cagaagaaauacuacaagu

SEQ ID NO: 80738 - RNA, 19 nt, Homo sapiens
  misc_RNA (1)...(19): siRNA sense strand
ucaagaacaugcccuccaa

SEQ ID NO: 80739 - RNA, 19 nt, Homo sapiens
  misc_RNA (1)...(19): siRNA sense strand
ccaaggaggaccagauaaa

SEQ ID NO: 80740 - RNA, 19 nt, Homo sapiens
  misc_RNA (1)...(19): siRNA sense strand
gcaaggcggugagaucauc

SEQ ID NO: 80741 - RNA, 19 nt, Homo sapiens
  misc_RNA (1)...(19): siRNA sense strand
ggaggaugaugaugaugau

SEQ ID NO: 80742 - RNA, 19 nt, Homo sapiens
  misc_RNA (1)...(19): siRNA sense strand
gaagaacugcugagugaca

SEQ ID NO: 80743 - RNA, 19 nt, Homo sapiens
  misc_RNA (1)...(19): siRNA sense strand
uugcugagguggaguguuu

SEQ ID NO: 80744 - RNA, 19 nt, Homo sapiens
  misc_RNA (1)...(19): siRNA sense strand
aacaagcucuggugauuga

SEQ ID NO: 80745 - RNA, 19 nt, Homo sapiens
  misc_RNA (1)...(19): siRNA sense strand
gaacaagcucuggugauug

SEQ ID NO: 80746 - RNA, 19 nt, Homo sapiens
  misc_RNA (1)...(19): siRNA sense strand
ccaagaagacuuaugagau

SEQ ID NO: 80747 - RNA, 19 nt, Homo sapiens
  misc_RNA (1)...(19): siRNA sense strand
gaauugaucaccauugaca

SEQ ID NO: 80748 - RNA, 19 nt, Homo sapiens
  misc_RNA (1)...(19): siRNA sense strand
gaacgcuucuaucgcuaug

SEQ ID NO: 80749 - RNA, 19 nt, Homo sapiens
  misc_RNA (1)...(19): siRNA sense strand
gaagaucuagcccgaaauc

SEQ ID NO: 80750 - RNA, 19 nt, Homo sapiens
  misc_RNA (1)...(19): siRNA sense strand
gcaauggaagcuccuaaga

SEQ ID NO: 80751 - RNA, 19 nt, Homo sapiens
  misc_RNA (1)...(19): siRNA sense strand
gaacagcccuaugaauaaa

SEQ ID NO: 80752 - RNA, 19 nt, Homo sapiens
  misc_RNA (1)...(19): siRNA sense strand
gaacggauccuuuccauuc

SEQ ID NO: 80753 - RNA, 19 nt, Homo sapiens
  misc_RNA (1)...(19): siRNA sense strand
gugaacagcccuaugaaua

SEQ ID NO: 80754 - RNA, 19 nt, Homo sapiens
  misc_RNA (1)...(19): siRNA sense strand
ccaaggauguuauggagaa

SEQ ID NO: 80755 - RNA, 19 nt, Homo sapiens
  misc_RNA (1)...(19): siRNA sense strand
aagcagagcuggagaaagu

SEQ ID NO: 80756 - RNA, 19 nt, Homo sapiens
  misc_RNA (1)...(19): siRNA sense strand
ggagaugaacggauccuuu

SEQ ID NO: 80757 - RNA, 19 nt, Homo sapiens
  misc_RNA (1)...(19): siRNA sense strand
ugaacagcccuaugaauaa

SEQ ID NO: 80758 - RNA, 19 nt, Homo sapiens
  misc_RNA (1)...(19): siRNA sense strand
ugaaagaggcgguggaaga

SEQ ID NO: 80759 - RNA, 19 nt, Homo sapiens
  misc_RNA (1)...(19): siRNA sense strand
auaccgaggugaugaaaug

SEQ ID NO: 80760 - RNA, 19 nt, Homo sapiens
  misc_RNA (1)...(19): siRNA sense strand
gagaugaacggauccuuuc

SEQ ID NO: 80761 - RNA, 19 nt, Homo sapiens
  misc_RNA (1)...(19): siRNA sense strand
gggcacaucagcagaagaa

SEQ ID NO: 80762 - RNA, 19 nt, Homo sapiens
  misc_RNA (1)...(19): siRNA sense strand
aaagagaggauuccaagga

SEQ ID NO: 80763 - RNA, 19 nt, Homo sapiens
  misc_RNA (1)...(19): siRNA sense strand
ggucaucuccgacacacuu

SEQ ID NO: 80764 - RNA, 19 nt, Homo sapiens
  misc_RNA (1)...(19): siRNA sense strand
gaaagaggcgguggaagag

SEQ ID NO: 80765 - RNA, 19 nt, Homo sapiens
  misc_RNA (1)...(19): siRNA sense strand
ccaaggagagggcacauca

SEQ ID NO: 80766 - RNA, 19 nt, Homo sapiens
  misc_RNA (1)...(19): siRNA sense strand
gaagaaggccccacuguag

SEQ ID NO: 80767 - RNA, 19 nt, Homo sapiens
  misc_RNA (1)...(19): siRNA sense strand
ggaagaaggccccacugua

SEQ ID NO: 80768 - RNA, 19 nt, Homo sapiens
  misc_RNA (1)...(19): siRNA sense strand
acaaggagauccggaaagg

SEQ ID NO: 80769 - RNA, 19 nt, Homo sapiens
  misc_RNA (1)...(19): siRNA sense strand
gagagccugucggccauug

SEQ ID NO: 80770 - RNA, 19 nt, Homo sapiens
  misc_RNA (1)...(19): siRNA sense strand
gcacaucagcagaagaaac

SEQ ID NO: 80771 - RNA, 19 nt, Homo sapiens
  misc_RNA (1)...(19): siRNA sense strand
uggaccagcuggccaagga

SEQ ID NO: 80772 - RNA, 19 nt, Homo sapiens
  misc_RNA (1)...(19): siRNA sense strand
caaggauguuauggagaaa

SEQ ID NO: 80773 - RNA, 19 nt, Homo sapiens
  misc_RNA (1)...(19): siRNA sense strand
cacaucagcagaagaaaca

SEQ ID NO: 80774 - RNA, 19 nt, Homo sapiens
  misc_RNA (1)...(19): siRNA sense strand
gagccugucggccauugaa

SEQ ID NO: 80775 - RNA, 19 nt, Homo sapiens
  misc_RNA (1)...(19): siRNA sense strand
acacagcgguuuugaagau

SEQ ID NO: 80776 - RNA, 19 nt, Homo sapiens
  misc_RNA (1)...(19): siRNA sense strand
cggauccuuuccauucuga

SEQ ID NO: 80777 - RNA, 19 nt, Homo sapiens
  misc_RNA (1)...(19): siRNA sense strand
gcugaaagaggcgguggaa

SEQ ID NO: 80778 - RNA, 19 nt, Homo sapiens
  misc_RNA (1)...(19): siRNA sense strand
ggauaccgaggugaugaaa

SEQ ID NO: 80779 - RNA, 19 nt, Homo sapiens
  misc_RNA (1)...(19): siRNA sense strand
cuacaaggagauccggaaa

SEQ ID NO: 80780 - RNA, 19 nt, Homo sapiens
  misc_RNA (1)...(19): siRNA sense strand
gauccuuuccauucugaga

SEQ ID NO: 80781 - RNA, 19 nt, Homo sapiens
  misc_RNA (1)...(19): siRNA sense strand
ugaagcagagcuggagaaa

SEQ ID NO: 80782 - RNA, 19 nt, Homo sapiens
  misc_RNA (1)...(19): siRNA sense strand
ccaggaauguuuugagaca

SEQ ID NO: 80783 - RNA, 19 nt, Homo sapiens
  misc_RNA (1)...(19): siRNA sense strand
gagggcacaucagcagaag

SEQ ID NO: 80784 - RNA, 19 nt, Homo sapiens
  misc_RNA (1)...(19): siRNA sense strand
gggauaccgaggugaugaa

SEQ ID NO: 80785 - RNA, 19 nt, Homo sapiens
  misc_RNA (1)...(19): siRNA sense strand
ugagacaucagaauuuacu

SEQ ID NO: 80786 - RNA, 19 nt, Homo sapiens
  misc_RNA (1)...(19): siRNA sense strand
gaugaacggauccuuucca

SEQ ID NO: 80787 - RNA, 19 nt, Homo sapiens
  misc_RNA (1)...(19): siRNA sense strand
gguggcaggcaaagagaga

SEQ ID NO: 80788 - RNA, 19 nt, Homo sapiens
  misc_RNA (1)...(19): siRNA sense strand
gaauuaaguuugccagaua

SEQ ID NO: 80789 - RNA, 19 nt, Homo sapiens
  misc_RNA (1)...(19): siRNA sense strand
cagaugagguccuguaaua

SEQ ID NO: 80790 - RNA, 19 nt, Homo sapiens
  misc_RNA (1)...(19): siRNA sense strand
gaagaaauguugcuugaag

SEQ ID NO: 80791 - RNA, 19 nt, Homo sapiens
  misc_RNA (1)...(19): siRNA sense strand
gagcaaacauccggaagua

SEQ ID NO: 80792 - RNA, 19 nt, Homo sapiens
  misc_RNA (1)...(19): siRNA sense strand
gugaguggauguaugauua

SEQ ID NO: 80793 - RNA, 19 nt, Homo sapiens
  misc_RNA (1)...(19): siRNA sense strand
ggaaguaucccaccaagaa

SEQ ID NO: 80794 - RNA, 19 nt, Homo sapiens
  misc_RNA (1)...(19): siRNA sense strand
gaauacagcaguuacaauu

SEQ ID NO: 80795 - RNA, 19 nt, Homo sapiens
  misc_RNA (1)...(19): siRNA sense strand
gcgauuagauacugaagaa

SEQ ID NO: 80796 - RNA, 19 nt, Homo sapiens
  misc_RNA (1)...(19): siRNA sense strand
gaucauugcuugaaucuac

SEQ ID NO: 80797 - RNA, 19 nt, Homo sapiens
  misc_RNA (1)...(19): siRNA sense strand
cgaacaagcucagaaagaa

SEQ ID NO: 80798 - RNA, 19 nt, Homo sapiens
  misc_RNA (1)...(19): siRNA sense strand
uaaaggaagugcugagaau

SEQ ID NO: 80799 - RNA, 19 nt, Homo sapiens
  misc_RNA (1)...(19): siRNA sense strand
gaaauguugcuugaaguua

SEQ ID NO: 80800 - RNA, 19 nt, Homo sapiens
  misc_RNA (1)...(19): siRNA sense strand
ccacaucagugucaucaga

SEQ ID NO: 80801 - RNA, 19 nt, Homo sapiens
  misc_RNA (1)...(19): siRNA sense strand
gaugagguccuguaauaaa

SEQ ID NO: 80802 - RNA, 19 nt, Homo sapiens
  misc_RNA (1)...(19): siRNA sense strand
gaacaagcucagaaagaaa

SEQ ID NO: 80803 - RNA, 19 nt, Homo sapiens
  misc_RNA (1)...(19): siRNA sense strand
acugaggaauccagaauua

SEQ ID NO: 80804 - RNA, 19 nt, Homo sapiens
  misc_RNA (1)...(19): siRNA sense strand
aagaagaaauguugcuuga

SEQ ID NO: 80805 - RNA, 19 nt, Homo sapiens
  misc_RNA (1)...(19): siRNA sense strand
gcucauugauuucgaauac

SEQ ID NO: 80806 - RNA, 19 nt, Homo sapiens
  misc_RNA (1)...(19): siRNA sense strand
ggaaaaguaucuaaaggaa

SEQ ID NO: 80807 - RNA, 19 nt, Homo sapiens
  misc_RNA (1)...(19): siRNA sense strand
aaacugaugcucauugauu

SEQ ID NO: 80808 - RNA, 19 nt, Homo sapiens
  misc_RNA (1)...(19): siRNA sense strand
gcaaacauccggaaguauc

SEQ ID NO: 80809 - RNA, 19 nt, Homo sapiens
  misc_RNA (1)...(19): siRNA sense strand
gaagugcugagaauuaaau

SEQ ID NO: 80810 - RNA, 19 nt, Homo sapiens
  misc_RNA (1)...(19): siRNA sense strand
gaguggauguaugauuaua

SEQ ID NO: 80811 - RNA, 19 nt, Homo sapiens
  misc_RNA (1)...(19): siRNA sense strand
acaaauugcucaguuacaa

SEQ ID NO: 80812 - RNA, 19 nt, Homo sapiens
  misc_RNA (1)...(19): siRNA sense strand
agaaacaacagcuccauuu

SEQ ID NO: 80813 - RNA, 19 nt, Homo sapiens
  misc_RNA (1)...(19): siRNA sense strand
caacagcuccauuuuauuu

SEQ ID NO: 80814 - RNA, 19 nt, Homo sapiens
  misc_RNA (1)...(19): siRNA sense strand
agaaacugaugcucauuga

SEQ ID NO: 80815 - RNA, 19 nt, Homo sapiens
  misc_RNA (1)...(19): siRNA sense strand
gcuugaaguuaauagguuu

SEQ ID NO: 80816 - RNA, 19 nt, Homo sapiens
  misc_RNA (1)...(19): siRNA sense strand
gaaguaucccaccaagaaa

SEQ ID NO: 80817 - RNA, 19 nt, Homo sapiens
  misc_RNA (1)...(19): siRNA sense strand
aaggaagugcugagaauua

SEQ ID NO: 80818 - RNA, 19 nt, Homo sapiens
  misc_RNA (1)...(19): siRNA sense strand
ccaguuacuugccugcauu

SEQ ID NO: 80819 - RNA, 19 nt, Homo sapiens
  misc_RNA (1)...(19): siRNA sense strand
ugaggaauccagaauuaaa

SEQ ID NO: 80820 - RNA, 19 nt, Homo sapiens
  misc_RNA (1)...(19): siRNA sense strand
ggauguaugauuauagcua

SEQ ID NO: 80821 - RNA, 19 nt, Homo sapiens
  misc_RNA (1)...(19): siRNA sense strand
guuacaaucugcccuugga

SEQ ID NO: 80822 - RNA, 19 nt, Homo sapiens
  misc_RNA (1)...(19): siRNA sense strand
gaggacgaguuccacauca

SEQ ID NO: 80823 - RNA, 19 nt, Homo sapiens
  misc_RNA (1)...(19): siRNA sense strand
aggaagugcugagaauuaa

SEQ ID NO: 80824 - RNA, 19 nt, Homo sapiens
  misc_RNA (1)...(19): siRNA sense strand
uuacuugccugcauuccaa

SEQ ID NO: 80825 - RNA, 19 nt, Homo sapiens
  misc_RNA (1)...(19): siRNA sense strand
ccagcgaccucgaguccaa

SEQ ID NO: 80826 - RNA, 19 nt, Homo sapiens
  misc_RNA (1)...(19): siRNA sense strand
ccaguuguauuuugucaua

SEQ ID NO: 80827 - RNA, 19 nt, Homo sapiens
  misc_RNA (1)...(19): siRNA sense strand
cugcagaaaucgccgagaa

SEQ ID NO: 80828 - RNA, 19 nt, Homo sapiens
  misc_RNA (1)...(19): siRNA sense strand
uccacaaauugcucaguua

SEQ ID NO: 80829 - RNA, 19 nt, Homo sapiens
  misc_RNA (1)...(19): siRNA sense strand
gguuugcccuugcaucuca

SEQ ID NO: 80830 - RNA, 19 nt, Homo sapiens
  misc_RNA (1)...(19): siRNA sense strand
aaacaacagcuccauuuua

SEQ ID NO: 80831 - RNA, 19 nt, Homo sapiens
  misc_RNA (1)...(19): siRNA sense strand
uaaagagggauccgaacaa

SEQ ID NO: 80832 - RNA, 19 nt, Homo sapiens
  misc_RNA (1)...(19): siRNA sense strand
caagguuugaugccuauuu

SEQ ID NO: 80833 - RNA, 19 nt, Homo sapiens
  misc_RNA (1)...(19): siRNA sense strand
cauuggaaaucacuucugu

SEQ ID NO: 80834 - RNA, 19 nt, Homo sapiens
  misc_RNA (1)...(19): siRNA sense strand
gaugcucauugauuucgaa

SEQ ID NO: 80835 - RNA, 19 nt, Homo sapiens
  misc_RNA (1)...(19): siRNA sense strand
gaaacaacagcuccauuuu

SEQ ID NO: 80836 - RNA, 19 nt, Homo sapiens
  misc_RNA (1)...(19): siRNA sense strand
ugagaucauugcuugaauc

SEQ ID NO: 80837 - RNA, 19 nt, Homo sapiens
  misc_RNA (1)...(19): siRNA sense strand
agaauuaaguuugccagau

SEQ ID NO: 80838 - RNA, 19 nt, Homo sapiens
  misc_RNA (1)...(19): siRNA sense strand
gggccuaucuguggugcaa

SEQ ID NO: 80839 - RNA, 19 nt, Homo sapiens
  misc_RNA (1)...(19): siRNA sense strand
auacagcaguuacaauuac

SEQ ID NO: 80840 - RNA, 19 nt, Homo sapiens
  misc_RNA (1)...(19): siRNA sense strand
ggaagugcugagaauuaaa

SEQ ID NO: 80841 - RNA, 19 nt, Homo sapiens
  misc_RNA (1)...(19): siRNA sense strand
agaagguaauaucuuguug

SEQ ID NO: 80842 - RNA, 19 nt, Homo sapiens
  misc_RNA (1)...(19): siRNA sense strand
gcuugaaucuacuccaucu

SEQ ID NO: 80843 - RNA, 19 nt, Homo sapiens
  misc_RNA (1)...(19): siRNA sense strand
uaaguuugccagauauuuc

SEQ ID NO: 80844 - RNA, 19 nt, Homo sapiens
  misc_RNA (1)...(19): siRNA sense strand
cagaaacugaugcucauug

SEQ ID NO: 80845 - RNA, 19 nt, Homo sapiens
  misc_RNA (1)...(19): siRNA sense strand
aaagagggauccgaacaag

SEQ ID NO: 80846 - RNA, 19 nt, Homo sapiens
  misc_RNA (1)...(19): siRNA sense strand
gauccgaacaagcucagaa

SEQ ID NO: 80847 - RNA, 19 nt, Homo sapiens
  misc_RNA (1)...(19): siRNA sense strand
aacugaugcucauugauuu

SEQ ID NO: 80848 - RNA, 19 nt, Homo sapiens
  misc_RNA (1)...(19): siRNA sense strand
gcuggaaggccgagagaau

SEQ ID NO: 80849 - RNA, 19 nt, Homo sapiens
  misc_RNA (1)...(19): siRNA sense strand
ccgaacaagcucagaaaga

SEQ ID NO: 80850 - RNA, 19 nt, Homo sapiens
  misc_RNA (1)...(19): siRNA sense strand
aaaacucuauggcaucuuu

SEQ ID NO: 80851 - RNA, 19 nt, Homo sapiens
  misc_RNA (1)...(19): siRNA sense strand
gcagaugagguccuguaau

SEQ ID NO: 80852 - RNA, 19 nt, Homo sapiens
  misc_RNA (1)...(19): siRNA sense strand
uaaauuuacugaggaaucc

SEQ ID NO: 80853 - RNA, 19 nt, Homo sapiens
  misc_RNA (1)...(19): siRNA sense strand
ggagcgauuuugcagauga

SEQ ID NO: 80854 - RNA, 19 nt, Homo sapiens
  misc_RNA (1)...(19): siRNA sense strand
gugaugagccucggaaagu

SEQ ID NO: 80855 - RNA, 19 nt, Homo sapiens
  misc_RNA (1)...(19): siRNA sense strand
aacaacagcuccauuuuau

SEQ ID NO: 80856 - RNA, 19 nt, Homo sapiens
  misc_RNA (1)...(19): siRNA sense strand
gggauucgacauuggaaau

SEQ ID NO: 80857 - RNA, 19 nt, Homo sapiens
  misc_RNA (1)...(19): siRNA sense strand
cuggagagcguuauguuug

SEQ ID NO: 80858 - RNA, 19 nt, Homo sapiens
  misc_RNA (1)...(19): siRNA sense strand
agaaauguugcuugaaguu

SEQ ID NO: 80859 - RNA, 19 nt, Homo sapiens
  misc_RNA (1)...(19): siRNA sense strand
ggacgaguuccacaucagu

SEQ ID NO: 80860 - RNA, 19 nt, Homo sapiens
  misc_RNA (1)...(19): siRNA sense strand
cuaaaggaagugcugagaa

SEQ ID NO: 80861 - RNA, 19 nt, Homo sapiens
  misc_RNA (1)...(19): siRNA sense strand
gcggcuguauggagcgauu

SEQ ID NO: 80862 - RNA, 19 nt, Homo sapiens
  misc_RNA (1)...(19): siRNA sense strand
guacaagccaagauuucau

SEQ ID NO: 80863 - RNA, 19 nt, Homo sapiens
  misc_RNA (1)...(19): siRNA sense strand
cgaauacagcaguuacaau

SEQ ID NO: 80864 - RNA, 19 nt, Homo sapiens
  misc_RNA (1)...(19): siRNA sense strand
gauuucgaauacagcaguu

SEQ ID NO: 80865 - RNA, 19 nt, Homo sapiens
  misc_RNA (1)...(19): siRNA sense strand
gcagaaaucgccgagaaaa

SEQ ID NO: 80866 - RNA, 19 nt, Homo sapiens
  misc_RNA (1)...(19): siRNA sense strand
aagaaauguugcuugaagu

SEQ ID NO: 80867 - RNA, 19 nt, Homo sapiens
  misc_RNA (1)...(19): siRNA sense strand
gaaacugaugcucauugau

SEQ ID NO: 80868 - RNA, 19 nt, Homo sapiens
  misc_RNA (1)...(19): siRNA sense strand
ucuacuccaucuccaguug

SEQ ID NO: 80869 - RNA, 19 nt, Homo sapiens
  misc_RNA (1)...(19): siRNA sense strand
uggaaaaccugagaucauu

SEQ ID NO: 80870 - RNA, 19 nt, Homo sapiens
  misc_RNA (1)...(19): siRNA sense strand
cuccacaaauugcucaguu

SEQ ID NO: 80871 - RNA, 19 nt, Homo sapiens
  misc_RNA (1)...(19): siRNA sense strand
aagguuugaugccuauuuc

SEQ ID NO: 80872 - RNA, 19 nt, Homo sapiens
  misc_RNA (1)...(19): siRNA sense strand
aacagaaacugaugcucau

SEQ ID NO: 80873 - RNA, 19 nt, Homo sapiens
  misc_RNA (1)...(19): siRNA sense strand
uaauagguuugcccuugca

SEQ ID NO: 80874 - RNA, 19 nt, Homo sapiens
  misc_RNA (1)...(19): siRNA sense strand
cgacauuggaaaucacuuc

SEQ ID NO: 80875 - RNA, 19 nt, Homo sapiens
  misc_RNA (1)...(19): siRNA sense strand
gagguccuguaauaaagag

SEQ ID NO: 80876 - RNA, 19 nt, Homo sapiens
  misc_RNA (1)...(19): siRNA sense strand
uggcuacauuucaugguau

SEQ ID NO: 80877 - RNA, 19 nt, Homo sapiens
  misc_RNA (1)...(19): siRNA sense strand
ugaugagccucggaaagug

SEQ ID NO: 80878 - RNA, 19 nt, Homo sapiens
  misc_RNA (1)...(19): siRNA sense strand
gggcugaggccaugguucu

SEQ ID NO: 80879 - RNA, 19 nt, Homo sapiens
  misc_RNA (1)...(19): siRNA sense strand
uacuccaucuccaguugua

SEQ ID NO: 80880 - RNA, 19 nt, Homo sapiens
  misc_RNA (1)...(19): siRNA sense strand
aaaggaagugcugagaauu

SEQ ID NO: 80881 - RNA, 19 nt, Homo sapiens
  misc_RNA (1)...(19): siRNA sense strand
guggauguaugauuauagc

SEQ ID NO: 80882 - RNA, 19 nt, Homo sapiens
  misc_RNA (1)...(19): siRNA sense strand
ucauugauuucgaauacag

SEQ ID NO: 80883 - RNA, 19 nt, Homo sapiens
  misc_RNA (1)...(19): siRNA sense strand
ccacaaauugcucaguuac

SEQ ID NO: 80884 - RNA, 19 nt, Homo sapiens
  misc_RNA (1)...(19): siRNA sense strand
gaggaauccagaauuaaaa

SEQ ID NO: 80885 - RNA, 19 nt, Homo sapiens
  misc_RNA (1)...(19): siRNA sense strand
auggcuacauuucauggua

SEQ ID NO: 80886 - RNA, 19 nt, Homo sapiens
  misc_RNA (1)...(19): siRNA sense strand
ucugugaguggauguauga

SEQ ID NO: 80887 - RNA, 19 nt, Homo sapiens
  misc_RNA (1)...(19): siRNA sense strand
cauuguacaagccaagauu

SEQ ID NO: 80888 - RNA, 19 nt, Homo sapiens
  misc_RNA (1)...(19): siRNA sense strand
caacacgcauuucaugauc

SEQ ID NO: 80889 - RNA, 19 nt, Homo sapiens
  misc_RNA (1)...(19): siRNA sense strand
ggagacaacacgcauuuca

SEQ ID NO: 80890 - RNA, 19 nt, Homo sapiens
  misc_RNA (1)...(19): siRNA sense strand
gacaguuucucaucuaucu

SEQ ID NO: 80891 - RNA, 19 nt, Homo sapiens
  misc_RNA (1)...(19): siRNA sense strand
ucaucuaucugggcacaua

SEQ ID NO: 80892 - RNA, 19 nt, Homo sapiens
  misc_RNA (1)...(19): siRNA sense strand
gcauccagcucgcccuuuc

SEQ ID NO: 80893 - RNA, 19 nt, Homo sapiens
  misc_RNA (1)...(19): siRNA sense strand
ugaaggccaccauguauga

SEQ ID NO: 80894 - RNA, 19 nt, Homo sapiens
  misc_RNA (1)...(19): siRNA sense strand
ugcaggagcucaucagcaa

SEQ ID NO: 80895 - RNA, 19 nt, Homo sapiens
  misc_RNA (1)...(19): siRNA sense strand
ggugcuggaugacaaggaa

SEQ ID NO: 80896 - RNA, 19 nt, Homo sapiens
  misc_RNA (1)...(19): siRNA sense strand
gacaacacgcauuucauga

SEQ ID NO: 80897 - RNA, 19 nt, Homo sapiens
  misc_RNA (1)...(19): siRNA sense strand
cgggacaguuucucaucua

SEQ ID NO: 80898 - RNA, 19 nt, Homo sapiens
  misc_RNA (1)...(19): siRNA sense strand
gggacaguuucucaucuau

SEQ ID NO: 80899 - RNA, 19 nt, Homo sapiens
  misc_RNA (1)...(19): siRNA sense strand
ccaggugacgggacaguuu

SEQ ID NO: 80900 - RNA, 19 nt, Homo sapiens
  misc_RNA (1)...(19): siRNA sense strand
uuuaugggaucacagacua

SEQ ID NO: 80901 - RNA, 19 nt, Homo sapiens
  misc_RNA (1)...(19): siRNA sense strand
agacaacacgcauuucaug

SEQ ID NO: 80902 - RNA, 19 nt, Homo sapiens
  misc_RNA (1)...(19): siRNA sense strand
gaauagcgagagucaccuu

SEQ ID NO: 80903 - RNA, 19 nt, Homo sapiens
  misc_RNA (1)...(19): siRNA sense strand
acacgcauuucaugaucuu

SEQ ID NO: 80904 - RNA, 19 nt, Homo sapiens
  misc_RNA (1)...(19): siRNA sense strand
gacuucaucggcugccuua

SEQ ID NO: 80905 - RNA, 19 nt, Homo sapiens
  misc_RNA (1)...(19): siRNA sense strand
cgugaaggccaccauguau

SEQ ID NO: 80906 - RNA, 19 nt, Homo sapiens
  misc_RNA (1)...(19): siRNA sense strand
ugacauuuaugggaucaca

SEQ ID NO: 80907 - RNA, 19 nt, Homo sapiens
  misc_RNA (1)...(19): siRNA sense strand
cuaccggacuggucacucu

SEQ ID NO: 80908 - RNA, 19 nt, Homo sapiens
  misc_RNA (1)...(19): siRNA sense strand
ggacaguuucucaucuauc

SEQ ID NO: 80909 - RNA, 19 nt, Homo sapiens
  misc_RNA (1)...(19): siRNA sense strand
caggagcucaucagcaaga

SEQ ID NO: 80910 - RNA, 19 nt, Homo sapiens
  misc_RNA (1)...(19): siRNA sense strand
ggucgggaauagcgagagu

SEQ ID NO: 80911 - RNA, 19 nt, Homo sapiens
  misc_RNA (1)...(19): siRNA sense strand
gagacaacacgcauuucau

SEQ ID NO: 80912 - RNA, 19 nt, Homo sapiens
  misc_RNA (1)...(19): siRNA sense strand
uuucagaccuugggagaca

SEQ ID NO: 80913 - RNA, 19 nt, Homo sapiens
  misc_RNA (1)...(19): siRNA sense strand
ugggagacaacacgcauuu

SEQ ID NO: 80914 - RNA, 19 nt, Homo sapiens
  misc_RNA (1)...(19): siRNA sense strand
gcagguucacguguggaua

SEQ ID NO: 80915 - RNA, 19 nt, Homo sapiens
  misc_RNA (1)...(19): siRNA sense strand
gguggacacagaagaguuc

SEQ ID NO: 80916 - RNA, 19 nt, Homo sapiens
  misc_RNA (1)...(19): siRNA sense strand
uagcgagagucaccuucga

SEQ ID NO: 80917 - RNA, 19 nt, Homo sapiens
  misc_RNA (1)...(19): siRNA sense strand
caccauguaugagauguac

SEQ ID NO: 80918 - RNA, 19 nt, Homo sapiens
  misc_RNA (1)...(19): siRNA sense strand
gugaaggccaccauguaug

SEQ ID NO: 80919 - RNA, 19 nt, Homo sapiens
  misc_RNA (1)...(19): siRNA sense strand
acaacacgcauuucaugau

SEQ ID NO: 80920 - RNA, 19 nt, Homo sapiens
  misc_RNA (1)...(19): siRNA sense strand
caacacgcauuucaugauc

SEQ ID NO: 80921 - RNA, 19 nt, Homo sapiens
  misc_RNA (1)...(19): siRNA sense strand
ggagacaacacgcauuuca

SEQ ID NO: 80922 - RNA, 19 nt, Homo sapiens
  misc_RNA (1)...(19): siRNA sense strand
gacaguuucucaucuaucu

SEQ ID NO: 80923 - RNA, 19 nt, Homo sapiens
  misc_RNA (1)...(19): siRNA sense strand
ucaucuaucugggcacaua

SEQ ID NO: 80924 - RNA, 19 nt, Homo sapiens
  misc_RNA (1)...(19): siRNA sense strand
gcauccagcucgcccuuuc

SEQ ID NO: 80925 - RNA, 19 nt, Homo sapiens
  misc_RNA (1)...(19): siRNA sense strand
ugaaggccaccauguauga

SEQ ID NO: 80926 - RNA, 19 nt, Homo sapiens
  misc_RNA (1)...(19): siRNA sense strand
ugcaggagcucaucagcaa

SEQ ID NO: 80927 - RNA, 19 nt, Homo sapiens
  misc_RNA (1)...(19): siRNA sense strand
ggugcuggaugacaaggaa

SEQ ID NO: 80928 - RNA, 19 nt, Homo sapiens
  misc_RNA (1)...(19): siRNA sense strand
gacaacacgcauuucauga

SEQ ID NO: 80929 - RNA, 19 nt, Homo sapiens
  misc_RNA (1)...(19): siRNA sense strand
cgggacaguuucucaucua

SEQ ID NO: 80930 - RNA, 19 nt, Homo sapiens
  misc_RNA (1)...(19): siRNA sense strand
gggacaguuucucaucuau

SEQ ID NO: 80931 - RNA, 19 nt, Homo sapiens
  misc_RNA (1)...(19): siRNA sense strand
ccaggugacgggacaguuu

SEQ ID NO: 80932 - RNA, 19 nt, Homo sapiens
  misc_RNA (1)...(19): siRNA sense strand
uuuaugggaucacagacua

SEQ ID NO: 80933 - RNA, 19 nt, Homo sapiens
  misc_RNA (1)...(19): siRNA sense strand
agacaacacgcauuucaug

SEQ ID NO: 80934 - RNA, 19 nt, Homo sapiens
  misc_RNA (1)...(19): siRNA sense strand
gaauagcgagagucaccuu

SEQ ID NO: 80935 - RNA, 19 nt, Homo sapiens
  misc_RNA (1)...(19): siRNA sense strand
acacgcauuucaugaucuu

SEQ ID NO: 80936 - RNA, 19 nt, Homo sapiens
  misc_RNA (1)...(19): siRNA sense strand
gacuucaucggcugccuua

SEQ ID NO: 80937 - RNA, 19 nt, Homo sapiens
  misc_RNA (1)...(19): siRNA sense strand
cgugaaggccaccauguau

SEQ ID NO: 80938 - RNA, 19 nt, Homo sapiens
  misc_RNA (1)...(19): siRNA sense strand
ugacauuuaugggaucaca

SEQ ID NO: 80939 - RNA, 19 nt, Homo sapiens
  misc_RNA (1)...(19): siRNA sense strand
cuaccggacuggucacucu

SEQ ID NO: 80940 - RNA, 19 nt, Homo sapiens
  misc_RNA (1)...(19): siRNA sense strand
ggacaguuucucaucuauc

SEQ ID NO: 80941 - RNA, 19 nt, Homo sapiens
  misc_RNA (1)...(19): siRNA sense strand
caggagcucaucagcaaga

SEQ ID NO: 80942 - RNA, 19 nt, Homo sapiens
  misc_RNA (1)...(19): siRNA sense strand
ggucgggaauagcgagagu

SEQ ID NO: 80943 - RNA, 19 nt, Homo sapiens
  misc_RNA (1)...(19): siRNA sense strand
gagacaacacgcauuucau

SEQ ID NO: 80944 - RNA, 19 nt, Homo sapiens
  misc_RNA (1)...(19): siRNA sense strand
uuucagaccuugggagaca

SEQ ID NO: 80945 - RNA, 19 nt, Homo sapiens
  misc_RNA (1)...(19): siRNA sense strand
ugggagacaacacgcauuu

SEQ ID NO: 80946 - RNA, 19 nt, Homo sapiens
  misc_RNA (1)...(19): siRNA sense strand
gcagguucacguguggaua

SEQ ID NO: 80947 - RNA, 19 nt, Homo sapiens
  misc_RNA (1)...(19): siRNA sense strand
gguggacacagaagaguuc

SEQ ID NO: 80948 - RNA, 19 nt, Homo sapiens
  misc_RNA (1)...(19): siRNA sense strand
uagcgagagucaccuucga

SEQ ID NO: 80949 - RNA, 19 nt, Homo sapiens
  misc_RNA (1)...(19): siRNA sense strand
caccauguaugagauguac

SEQ ID NO: 80950 - RNA, 19 nt, Homo sapiens
  misc_RNA (1)...(19): siRNA sense strand
gugaaggccaccauguaug

SEQ ID NO: 80951 - RNA, 19 nt, Homo sapiens
  misc_RNA (1)...(19): siRNA sense strand
acaacacgcauuucaugau

SEQ ID NO: 80952 - RNA, 19 nt, Homo sapiens
  misc_RNA (1)...(19): siRNA sense strand
uaaagaagcuuguguaucu

SEQ ID NO: 80953 - RNA, 19 nt, Homo sapiens
  misc_RNA (1)...(19): siRNA sense strand
ggaaggaagucauggaauu

SEQ ID NO: 80954 - RNA, 19 nt, Homo sapiens
  misc_RNA (1)...(19): siRNA sense strand
gagcuaaucugccacauug

SEQ ID NO: 80955 - RNA, 19 nt, Homo sapiens
  misc_RNA (1)...(19): siRNA sense strand
gaaaggaggcugugaagaa

SEQ ID NO: 80956 - RNA, 19 nt, Homo sapiens
  misc_RNA (1)...(19): siRNA sense strand
gaaguagucuugucugaga

SEQ ID NO: 80957 - RNA, 19 nt, Homo sapiens
  misc_RNA (1)...(19): siRNA sense strand
gcagaugaguuacuagaaa

SEQ ID NO: 80958 - RNA, 19 nt, Homo sapiens
  misc_RNA (1)...(19): siRNA sense strand
uggcagaacugaaagaaua

SEQ ID NO: 80959 - RNA, 19 nt, Homo sapiens
  misc_RNA (1)...(19): siRNA sense strand
gcuaaaggcuuggagauuu

SEQ ID NO: 80960 - RNA, 19 nt, Homo sapiens
  misc_RNA (1)...(19): siRNA sense strand
gcacauugcuugaucuaau

SEQ ID NO: 80961 - RNA, 19 nt, Homo sapiens
  misc_RNA (1)...(19): siRNA sense strand
gaucagggauuucuggauu

SEQ ID NO: 80962 - RNA, 19 nt, Homo sapiens
  misc_RNA (1)...(19): siRNA sense strand
caacuuaauuguccagaaa

SEQ ID NO: 80963 - RNA, 19 nt, Homo sapiens
  misc_RNA (1)...(19): siRNA sense strand
gaaaaggccugaaaucuug

SEQ ID NO: 80964 - RNA, 19 nt, Homo sapiens
  misc_RNA (1)...(19): siRNA sense strand
aagcugaacucaacaauga

SEQ ID NO: 80965 - RNA, 19 nt, Homo sapiens
  misc_RNA (1)...(19): siRNA sense strand
guacaaugaucccaucuau

SEQ ID NO: 80966 - RNA, 19 nt, Homo sapiens
  misc_RNA (1)...(19): siRNA sense strand
cuacagagguggauguuga

SEQ ID NO: 80967 - RNA, 19 nt, Homo sapiens
  misc_RNA (1)...(19): siRNA sense strand
caacacaggauucugauaa

SEQ ID NO: 80968 - RNA, 19 nt, Homo sapiens
  misc_RNA (1)...(19): siRNA sense strand
gggagaauaugcugaaaga

SEQ ID NO: 80969 - RNA, 19 nt, Homo sapiens
  misc_RNA (1)...(19): siRNA sense strand
gcaaauaccccaacaagua

SEQ ID NO: 80970 - RNA, 19 nt, Homo sapiens
  misc_RNA (1)...(19): siRNA sense strand
ugacagcccugaaugaaug

SEQ ID NO: 80971 - RNA, 19 nt, Homo sapiens
  misc_RNA (1)...(19): siRNA sense strand
caacaaguaugaaaguauc

SEQ ID NO: 80972 - RNA, 19 nt, Homo sapiens
  misc_RNA (1)...(19): siRNA sense strand
gcacaucuauauggaaaug

SEQ ID NO: 80973 - RNA, 19 nt, Homo sapiens
  misc_RNA (1)...(19): siRNA sense strand
ggagauuuccggaacauuu

SEQ ID NO: 80974 - RNA, 19 nt, Homo sapiens
  misc_RNA (1)...(19): siRNA sense strand
ugacaaugcagaugaguua

SEQ ID NO: 80975 - RNA, 19 nt, Homo sapiens
  misc_RNA (1)...(19): siRNA sense strand
gaaagugauugcugcuaug

SEQ ID NO: 80976 - RNA, 19 nt, Homo sapiens
  misc_RNA (1)...(19): siRNA sense strand
gggcacaucuauauggaaa

SEQ ID NO: 80977 - RNA, 19 nt, Homo sapiens
  misc_RNA (1)...(19): siRNA sense strand
cguaaacacuugccaauuc

SEQ ID NO: 80978 - RNA, 19 nt, Homo sapiens
  misc_RNA (1)...(19): siRNA sense strand
ugaauuaugugguccaaga

SEQ ID NO: 80979 - RNA, 19 nt, Homo sapiens
  misc_RNA (1)...(19): siRNA sense strand
gugaagauccuaauccuuu

SEQ ID NO: 80980 - RNA, 19 nt, Homo sapiens
  misc_RNA (1)...(19): siRNA sense strand
gagaauaugcugaaagaau

SEQ ID NO: 80981 - RNA, 19 nt, Homo sapiens
  misc_RNA (1)...(19): siRNA sense strand
gaacugaaagaauaugcua

SEQ ID NO: 80982 - RNA, 19 nt, Homo sapiens
  misc_RNA (1)...(19): siRNA sense strand
uggacugccugucuaauua

SEQ ID NO: 80983 - RNA, 19 nt, Homo sapiens
  misc_RNA (1)...(19): siRNA sense strand
acaauaugcugcugaagaa

SEQ ID NO: 80984 - RNA, 19 nt, Homo sapiens
  misc_RNA (1)...(19): siRNA sense strand
gguggaagaucagggauuu

SEQ ID NO: 80985 - RNA, 19 nt, Homo sapiens
  misc_RNA (1)...(19): siRNA sense strand
guaaacacuugccaauuca

SEQ ID NO: 80986 - RNA, 19 nt, Homo sapiens
  misc_RNA (1)...(19): siRNA sense strand
gcagagcgcuguguaagca

SEQ ID NO: 80987 - RNA, 19 nt, Homo sapiens
  misc_RNA (1)...(19): siRNA sense strand
gaaguuggacaucaugauu

SEQ ID NO: 80988 - RNA, 19 nt, Homo sapiens
  misc_RNA (1)...(19): siRNA sense strand
gaacaucaacuuaauuguc

SEQ ID NO: 80989 - RNA, 19 nt, Homo sapiens
  misc_RNA (1)...(19): siRNA sense strand
gauguuaguucucucuuuc

SEQ ID NO: 80990 - RNA, 19 nt, Homo sapiens
  misc_RNA (1)...(19): siRNA sense strand
gagauuuccggaacauuua

SEQ ID NO: 80991 - RNA, 19 nt, Homo sapiens
  misc_RNA (1)...(19): siRNA sense strand
gagcagcuaugauuuggau

SEQ ID NO: 80992 - RNA, 19 nt, Homo sapiens
  misc_RNA (1)...(19): siRNA sense strand
caagaaaccaucagaaaca

SEQ ID NO: 80993 - RNA, 19 nt, Homo sapiens
  misc_RNA (1)...(19): siRNA sense strand
ggauguuaguucucucuuu

SEQ ID NO: 80994 - RNA, 19 nt, Homo sapiens
  misc_RNA (1)...(19): siRNA sense strand
guggauauguggcuccuaa

SEQ ID NO: 80995 - RNA, 19 nt, Homo sapiens
  misc_RNA (1)...(19): siRNA sense strand
agagguggauguugacuuu

SEQ ID NO: 80996 - RNA, 19 nt, Homo sapiens
  misc_RNA (1)...(19): siRNA sense strand
gauucugacuacuacaaua

SEQ ID NO: 80997 - RNA, 19 nt, Homo sapiens
  misc_RNA (1)...(19): siRNA sense strand
gcaacuuacuugaucugaa

SEQ ID NO: 80998 - RNA, 19 nt, Homo sapiens
  misc_RNA (1)...(19): siRNA sense strand
aaaggaggcugugaagaaa

SEQ ID NO: 80999 - RNA, 19 nt, Homo sapiens
  misc_RNA (1)...(19): siRNA sense strand
ugaagucucucaauacauc

SEQ ID NO: 81000 - RNA, 19 nt, Homo sapiens
  misc_RNA (1)...(19): siRNA sense strand
caauaucgaugucuucuac

SEQ ID NO: 81001 - RNA, 19 nt, Homo sapiens
  misc_RNA (1)...(19): siRNA sense strand
gaagauggaaccucugaau

SEQ ID NO: 81002 - RNA, 19 nt, Homo sapiens
  misc_RNA (1)...(19): siRNA sense strand
ggaaggauguuaguucucu

SEQ ID NO: 81003 - RNA, 19 nt, Homo sapiens
  misc_RNA (1)...(19): siRNA sense strand
ccaaguauuucacaaccaa

SEQ ID NO: 81004 - RNA, 19 nt, Homo sapiens
  misc_RNA (1)...(19): siRNA sense strand
ugaaugaccuguuugaacu

SEQ ID NO: 81005 - RNA, 19 nt, Homo sapiens
  misc_RNA (1)...(19): siRNA sense strand
uguuacagcuaaagaagua

SEQ ID NO: 81006 - RNA, 19 nt, Homo sapiens
  misc_RNA (1)...(19): siRNA sense strand
caaugcagaugaguuacua

SEQ ID NO: 81007 - RNA, 19 nt, Homo sapiens
  misc_RNA (1)...(19): siRNA sense strand
gauguugacuuuguucgaa

SEQ ID NO: 81008 - RNA, 19 nt, Homo sapiens
  misc_RNA (1)...(19): siRNA sense strand
ccaaacagcaacuuacuug

SEQ ID NO: 81009 - RNA, 19 nt, Homo sapiens
  misc_RNA (1)...(19): siRNA sense strand
gaaggauauucccaaugaa

SEQ ID NO: 81010 - RNA, 19 nt, Homo sapiens
  misc_RNA (1)...(19): siRNA sense strand
ugaggaacaucaacuuaau

SEQ ID NO: 81011 - RNA, 19 nt, Homo sapiens
  misc_RNA (1)...(19): siRNA sense strand
gaacuuagacucgcuggau

SEQ ID NO: 81012 - RNA, 19 nt, Homo sapiens
  misc_RNA (1)...(19): siRNA sense strand
agaccaaagugaauuaugu

SEQ ID NO: 81013 - RNA, 19 nt, Homo sapiens
  misc_RNA (1)...(19): siRNA sense strand
gaacuaaagaagcuugugu

SEQ ID NO: 81014 - RNA, 19 nt, Homo sapiens
  misc_RNA (1)...(19): siRNA sense strand
gugaagcuguuucucaaga

SEQ ID NO: 81015 - RNA, 19 nt, Homo sapiens
  misc_RNA (1)...(19): siRNA sense strand
acaaugaucccaucuaugu

SEQ ID NO: 81016 - RNA, 19 nt, Homo sapiens
  misc_RNA (1)...(19): siRNA sense strand
caacuuacuugaucugaac

SEQ ID NO: 81017 - RNA, 19 nt, Homo sapiens
  misc_RNA (1)...(19): siRNA sense strand
agauggaaccucugaauaa

SEQ ID NO: 81018 - RNA, 19 nt, Homo sapiens
  misc_RNA (1)...(19): siRNA sense strand
guagcggcauuaucugaaa

SEQ ID NO: 81019 - RNA, 19 nt, Homo sapiens
  misc_RNA (1)...(19): siRNA sense strand
guguagagcuccugaaguc

SEQ ID NO: 81020 - RNA, 19 nt, Homo sapiens
  misc_RNA (1)...(19): siRNA sense strand
gccaagggcacaucuauau

SEQ ID NO: 81021 - RNA, 19 nt, Homo sapiens
  misc_RNA (1)...(19): siRNA sense strand
agaagccacugaucucuga

SEQ ID NO: 81022 - RNA, 19 nt, Homo sapiens
  misc_RNA (1)...(19): siRNA sense strand
cagcaggucuugaguuugg

SEQ ID NO: 81023 - RNA, 19 nt, Homo sapiens
  misc_RNA (1)...(19): siRNA sense strand
caacauugcucagguucug

SEQ ID NO: 81024 - RNA, 19 nt, Homo sapiens
  misc_RNA (1)...(19): siRNA sense strand
ugauaucaaugcccaaaug

SEQ ID NO: 81025 - RNA, 19 nt, Homo sapiens
  misc_RNA (1)...(19): siRNA sense strand
agaaagugauugcugcuau

SEQ ID NO: 81026 - RNA, 19 nt, Homo sapiens
  misc_RNA (1)...(19): siRNA sense strand
ugaacuguaugcagacuga

SEQ ID NO: 81027 - RNA, 19 nt, Homo sapiens
  misc_RNA (1)...(19): siRNA sense strand
gcacuaccacugcaacgaa

SEQ ID NO: 81028 - RNA, 19 nt, Homo sapiens
  misc_RNA (1)...(19): siRNA sense strand
aaugaucccaucuauguua

SEQ ID NO: 81029 - RNA, 19 nt, Homo sapiens
  misc_RNA (1)...(19): siRNA sense strand
ucccaucuauguuaaacua

SEQ ID NO: 81030 - RNA, 19 nt, Homo sapiens
  misc_RNA (1)...(19): siRNA sense strand
gaacuucaccaauaaagcu

SEQ ID NO: 81031 - RNA, 19 nt, Homo sapiens
  misc_RNA (1)...(19): siRNA sense strand
guguaucucuacuugauga

SEQ ID NO: 81032 - RNA, 19 nt, Homo sapiens
  misc_RNA (1)...(19): siRNA sense strand
cuccugaagucucucaaua

SEQ ID NO: 81033 - RNA, 19 nt, Homo sapiens
  misc_RNA (1)...(19): siRNA sense strand
gcaauccaguuuaacaaaa

SEQ ID NO: 81034 - RNA, 19 nt, Homo sapiens
  misc_RNA (1)...(19): siRNA sense strand
ggaacagccucagguuauc

SEQ ID NO: 81035 - RNA, 19 nt, Homo sapiens
  misc_RNA (1)...(19): siRNA sense strand
gaauucaucguaaacacuu

SEQ ID NO: 81036 - RNA, 19 nt, Homo sapiens
  misc_RNA (1)...(19): siRNA sense strand
gaaggaagucauggaauuc

SEQ ID NO: 81037 - RNA, 19 nt, Homo sapiens
  misc_RNA (1)...(19): siRNA sense strand
ggacaucuuccgcaaauac

SEQ ID NO: 81038 - RNA, 19 nt, Homo sapiens
  misc_RNA (1)...(19): siRNA sense strand
ucucauagcagauucaaau

SEQ ID NO: 81039 - RNA, 19 nt, Homo sapiens
  misc_RNA (1)...(19): siRNA sense strand
cuaaaggcuuggagauuuc

SEQ ID NO: 81040 - RNA, 19 nt, Homo sapiens
  misc_RNA (1)...(19): siRNA sense strand
gucauggaauucaucguaa

SEQ ID NO: 81041 - RNA, 19 nt, Homo sapiens
  misc_RNA (1)...(19): siRNA sense strand
gaucuaauccagaccaaag

SEQ ID NO: 81042 - RNA, 19 nt, Homo sapiens
  misc_RNA (1)...(19): siRNA sense strand
ccacagaacauuaauaagc

SEQ ID NO: 81043 - RNA, 19 nt, Homo sapiens
  misc_RNA (1)...(19): siRNA sense strand
gcuuguguaucucuacuug

SEQ ID NO: 81044 - RNA, 19 nt, Homo sapiens
  misc_RNA (1)...(19): siRNA sense strand
gauggaaccucugaauaac

SEQ ID NO: 81045 - RNA, 19 nt, Homo sapiens
  misc_RNA (1)...(19): siRNA sense strand
auacaccacugaugccaaa

SEQ ID NO: 81046 - RNA, 19 nt, Homo sapiens
  misc_RNA (1)...(19): siRNA sense strand
gaauaugcugaaagaauug

SEQ ID NO: 81047 - RNA, 19 nt, Homo sapiens
  misc_RNA (1)...(19): siRNA sense strand
gcagcuaugauuuggauug

SEQ ID NO: 81048 - RNA, 19 nt, Homo sapiens
  misc_RNA (1)...(19): siRNA sense strand
ggccugaaaucuugaagca

SEQ ID NO: 81049 - RNA, 19 nt, Homo sapiens
  misc_RNA (1)...(19): siRNA sense strand
uuacaacccuaaagaugau

SEQ ID NO: 81050 - RNA, 19 nt, Homo sapiens
  misc_RNA (1)...(19): siRNA sense strand
gaagauccuaauccuuuga

SEQ ID NO: 81051 - RNA, 19 nt, Homo sapiens
  misc_RNA (1)...(19): siRNA sense strand
uaaacagcuuugugaagga

SEQ ID NO: 81052 - RNA, 19 nt, Homo sapiens
  misc_RNA (1)...(19): siRNA sense strand
ggacaucaucuucaacuuu

SEQ ID NO: 81053 - RNA, 19 nt, Homo sapiens
  misc_RNA (1)...(19): siRNA sense strand
gacaucaucuucaacuuug

SEQ ID NO: 81054 - RNA, 19 nt, Homo sapiens
  misc_RNA (1)...(19): siRNA sense strand
gcucuuagacaaauacuuu

SEQ ID NO: 81055 - RNA, 19 nt, Homo sapiens
  misc_RNA (1)...(19): siRNA sense strand
ccucaaaguugucuauaag

SEQ ID NO: 81056 - RNA, 19 nt, Homo sapiens
  misc_RNA (1)...(19): siRNA sense strand
ucaaaguugucuauaagag

SEQ ID NO: 81057 - RNA, 19 nt, Homo sapiens
  misc_RNA (1)...(19): siRNA sense strand
aaugguaccuggccacuuc

SEQ ID NO: 81058 - RNA, 19 nt, Homo sapiens
  misc_RNA (1)...(19): siRNA sense strand
caaaguugucuauaagaga

SEQ ID NO: 81059 - RNA, 19 nt, Homo sapiens
  misc_RNA (1)...(19): siRNA sense strand
gacaaggaacggaagaaga

SEQ ID NO: 81060 - RNA, 19 nt, Homo sapiens
  misc_RNA (1)...(19): siRNA sense strand
ggaccucaaaguugucuau

SEQ ID NO: 81061 - RNA, 19 nt, Homo sapiens
  misc_RNA (1)...(19): siRNA sense strand
gcucgaaagcccaagaugu

SEQ ID NO: 81062 - RNA, 19 nt, Homo sapiens
  misc_RNA (1)...(19): siRNA sense strand
guggagcucuuagacaaau

SEQ ID NO: 81063 - RNA, 19 nt, Homo sapiens
  misc_RNA (1)...(19): siRNA sense strand
acaaggaacggaagaagau

SEQ ID NO: 81064 - RNA, 19 nt, Homo sapiens
  misc_RNA (1)...(19): siRNA sense strand
gagcuggacaucaucuuca

SEQ ID NO: 81065 - RNA, 19 nt, Homo sapiens
  misc_RNA (1)...(19): siRNA sense strand
gaaaacugcggcugcaaaa

SEQ ID NO: 81066 - RNA, 19 nt, Homo sapiens
  misc_RNA (1)...(19): siRNA sense strand
ggacaaggaacggaagaag

SEQ ID NO: 81067 - RNA, 19 nt, Homo sapiens
  misc_RNA (1)...(19): siRNA sense strand
gauaugccagccucuacuu

SEQ ID NO: 81068 - RNA, 19 nt, Homo sapiens
  misc_RNA (1)...(19): siRNA sense strand
acguggagcucuuagacaa

SEQ ID NO: 81069 - RNA, 19 nt, Homo sapiens
  misc_RNA (1)...(19): siRNA sense strand
caucgagggccaagacaau

SEQ ID NO: 81070 - RNA, 19 nt, Homo sapiens
  misc_RNA (1)...(19): siRNA sense strand
ggaaaacugcggcugcaaa

SEQ ID NO: 81071 - RNA, 19 nt, Homo sapiens
  misc_RNA (1)...(19): siRNA sense strand
gagauaugccagccucuac

SEQ ID NO: 81072 - RNA, 19 nt, Homo sapiens
  misc_RNA (1)...(19): siRNA sense strand
gaccucaaaguugucuaua

SEQ ID NO: 81073 - RNA, 19 nt, Homo sapiens
  misc_RNA (1)...(19): siRNA sense strand
accucaaaguugucuauaa

SEQ ID NO: 81074 - RNA, 19 nt, Homo sapiens
  misc_RNA (1)...(19): siRNA sense strand
gaugcgguucaugcuauua

SEQ ID NO: 81075 - RNA, 19 nt, Homo sapiens
  misc_RNA (1)...(19): siRNA sense strand
ugugcgagcuggacaucau

SEQ ID NO: 81076 - RNA, 19 nt, Homo sapiens
  misc_RNA (1)...(19): siRNA sense strand
gagcugauccaccgauacg

SEQ ID NO: 81077 - RNA, 19 nt, Homo sapiens
  misc_RNA (1)...(19): siRNA sense strand
gauacguggagcucuuaga

SEQ ID NO: 81078 - RNA, 19 nt, Homo sapiens
  misc_RNA (1)...(19): siRNA sense strand
ggacaucaucuucaacuuu

SEQ ID NO: 81079 - RNA, 19 nt, Homo sapiens
  misc_RNA (1)...(19): siRNA sense strand
gacaucaucuucaacuuug

SEQ ID NO: 81080 - RNA, 19 nt, Homo sapiens
  misc_RNA (1)...(19): siRNA sense strand
gcucuuagacaaauacuuu

SEQ ID NO: 81081 - RNA, 19 nt, Homo sapiens
  misc_RNA (1)...(19): siRNA sense strand
ccucaaaguugucuauaag

SEQ ID NO: 81082 - RNA, 19 nt, Homo sapiens
  misc_RNA (1)...(19): siRNA sense strand
ucaaaguugucuauaagag

SEQ ID NO: 81083 - RNA, 19 nt, Homo sapiens
  misc_RNA (1)...(19): siRNA sense strand
aaugguaccuggccacuuc

SEQ ID NO: 81084 - RNA, 19 nt, Homo sapiens
  misc_RNA (1)...(19): siRNA sense strand
caaaguugucuauaagaga

SEQ ID NO: 81085 - RNA, 19 nt, Homo sapiens
  misc_RNA (1)...(19): siRNA sense strand
gacaaggaacggaagaaga

SEQ ID NO: 81086 - RNA, 19 nt, Homo sapiens
  misc_RNA (1)...(19): siRNA sense strand
ggaccucaaaguugucuau

SEQ ID NO: 81087 - RNA, 19 nt, Homo sapiens
  misc_RNA (1)...(19): siRNA sense strand
gcucgaaagcccaagaugu

SEQ ID NO: 81088 - RNA, 19 nt, Homo sapiens
  misc_RNA (1)...(19): siRNA sense strand
guggagcucuuagacaaau

SEQ ID NO: 81089 - RNA, 19 nt, Homo sapiens
  misc_RNA (1)...(19): siRNA sense strand
acaaggaacggaagaagau

SEQ ID NO: 81090 - RNA, 19 nt, Homo sapiens
  misc_RNA (1)...(19): siRNA sense strand
gagcuggacaucaucuuca

SEQ ID NO: 81091 - RNA, 19 nt, Homo sapiens
  misc_RNA (1)...(19): siRNA sense strand
gaaaacugcggcugcaaaa

SEQ ID NO: 81092 - RNA, 19 nt, Homo sapiens
  misc_RNA (1)...(19): siRNA sense strand
ggacaaggaacggaagaag

SEQ ID NO: 81093 - RNA, 19 nt, Homo sapiens
  misc_RNA (1)...(19): siRNA sense strand
gauaugccagccucuacuu

SEQ ID NO: 81094 - RNA, 19 nt, Homo sapiens
  misc_RNA (1)...(19): siRNA sense strand
acguggagcucuuagacaa

SEQ ID NO: 81095 - RNA, 19 nt, Homo sapiens
  misc_RNA (1)...(19): siRNA sense strand
caucgagggccaagacaau

SEQ ID NO: 81096 - RNA, 19 nt, Homo sapiens
  misc_RNA (1)...(19): siRNA sense strand
ggaaaacugcggcugcaaa

SEQ ID NO: 81097 - RNA, 19 nt, Homo sapiens
  misc_RNA (1)...(19): siRNA sense strand
gagauaugccagccucuac

SEQ ID NO: 81098 - RNA, 19 nt, Homo sapiens
  misc_RNA (1)...(19): siRNA sense strand
gaccucaaaguugucuaua

SEQ ID NO: 81099 - RNA, 19 nt, Homo sapiens
  misc_RNA (1)...(19): siRNA sense strand
accucaaaguugucuauaa

SEQ ID NO: 81100 - RNA, 19 nt, Homo sapiens
  misc_RNA (1)...(19): siRNA sense strand
gaugcgguucaugcuauua

SEQ ID NO: 81101 - RNA, 19 nt, Homo sapiens
  misc_RNA (1)...(19): siRNA sense strand
ugugcgagcuggacaucau

SEQ ID NO: 81102 - RNA, 19 nt, Homo sapiens
  misc_RNA (1)...(19): siRNA sense strand
gagcugauccaccgauacg

SEQ ID NO: 81103 - RNA, 19 nt, Homo sapiens
  misc_RNA (1)...(19): siRNA sense strand
gauacguggagcucuuaga

SEQ ID NO: 81104 - RNA, 19 nt, Homo sapiens
  misc_RNA (1)...(19): siRNA sense strand
gcacgaguaucuuuguuua

SEQ ID NO: 81105 - RNA, 19 nt, Homo sapiens
  misc_RNA (1)...(19): siRNA sense strand
gaacaacaauggcuaugaa

SEQ ID NO: 81106 - RNA, 19 nt, Homo sapiens
  misc_RNA (1)...(19): siRNA sense strand
caagguauuucacaacuua

SEQ ID NO: 81107 - RNA, 19 nt, Homo sapiens
  misc_RNA (1)...(19): siRNA sense strand
guacauaccuggcuggauu

SEQ ID NO: 81108 - RNA, 19 nt, Homo sapiens
  misc_RNA (1)...(19): siRNA sense strand
caaagaagcuccaaacaag

SEQ ID NO: 81109 - RNA, 19 nt, Homo sapiens
  misc_RNA (1)...(19): siRNA sense strand
gaacagcucacaaguauau

SEQ ID NO: 81110 - RNA, 19 nt, Homo sapiens
  misc_RNA (1)...(19): siRNA sense strand
gaagaaauauccaacugau

SEQ ID NO: 81111 - RNA, 19 nt, Homo sapiens
  misc_RNA (1)...(19): siRNA sense strand
aaaguuagcugaauaugga

SEQ ID NO: 81112 - RNA, 19 nt, Homo sapiens
  misc_RNA (1)...(19): siRNA sense strand
ucagaaauauccaacauug

SEQ ID NO: 81113 - RNA, 19 nt, Homo sapiens
  misc_RNA (1)...(19): siRNA sense strand
gaauauggaccacaaggua

SEQ ID NO: 81114 - RNA, 19 nt, Homo sapiens
  misc_RNA (1)...(19): siRNA sense strand
gacaaaggcugacuaugug

SEQ ID NO: 81115 - RNA, 19 nt, Homo sapiens
  misc_RNA (1)...(19): siRNA sense strand
ugacagugcugcccaugua

SEQ ID NO: 81116 - RNA, 19 nt, Homo sapiens
  misc_RNA (1)...(19): siRNA sense strand
gaccugaaauuaauaagga

SEQ ID NO: 81117 - RNA, 19 nt, Homo sapiens
  misc_RNA (1)...(19): siRNA sense strand
gaaacacucauucaacaaa

SEQ ID NO: 81118 - RNA, 19 nt, Homo sapiens
  misc_RNA (1)...(19): siRNA sense strand
gaacaaggacaccagcaaa

SEQ ID NO: 81119 - RNA, 19 nt, Homo sapiens
  misc_RNA (1)...(19): siRNA sense strand
gggcuucgaucggcauuua

SEQ ID NO: 81120 - RNA, 19 nt, Homo sapiens
  misc_RNA (1)...(19): siRNA sense strand
ccaccaagaccugaaauua

SEQ ID NO: 81121 - RNA, 19 nt, Homo sapiens
  misc_RNA (1)...(19): siRNA sense strand
uggaacagcucacaaguau

SEQ ID NO: 81122 - RNA, 19 nt, Homo sapiens
  misc_RNA (1)...(19): siRNA sense strand
aaagugaacucauacagau

SEQ ID NO: 81123 - RNA, 19 nt, Homo sapiens
  misc_RNA (1)...(19): siRNA sense strand
gaacugcagcugucaauag

SEQ ID NO: 81124 - RNA, 19 nt, Homo sapiens
  misc_RNA (1)...(19): siRNA sense strand
caaaggaagccaacucuga

SEQ ID NO: 81125 - RNA, 19 nt, Homo sapiens
  misc_RNA (1)...(19): siRNA sense strand
guaaggcauuuguccauga

SEQ ID NO: 81126 - RNA, 19 nt, Homo sapiens
  misc_RNA (1)...(19): siRNA sense strand
ccauccagcuugagaguaa

SEQ ID NO: 81127 - RNA, 19 nt, Homo sapiens
  misc_RNA (1)...(19): siRNA sense strand
gacaggagguuuacagaca

SEQ ID NO: 81128 - RNA, 19 nt, Homo sapiens
  misc_RNA (1)...(19): siRNA sense strand
gaaauacagucugcaagca

SEQ ID NO: 81129 - RNA, 19 nt, Homo sapiens
  misc_RNA (1)...(19): siRNA sense strand
gaaauggagcugucucuca

SEQ ID NO: 81130 - RNA, 19 nt, Homo sapiens
  misc_RNA (1)...(19): siRNA sense strand
gaagacaaaggcugacuau

SEQ ID NO: 81131 - RNA, 19 nt, Homo sapiens
  misc_RNA (1)...(19): siRNA sense strand
ggaugacggugucuacuca

SEQ ID NO: 81132 - RNA, 19 nt, Homo sapiens
  misc_RNA (1)...(19): siRNA sense strand
gacauaugcuucagaucaa

SEQ ID NO: 81133 - RNA, 19 nt, Homo sapiens
  misc_RNA (1)...(19): siRNA sense strand
ggaagaaauauccaacuga

SEQ ID NO: 81134 - RNA, 19 nt, Homo sapiens
  misc_RNA (1)...(19): siRNA sense strand
ggaagaauacaagcaguaa

SEQ ID NO: 81135 - RNA, 19 nt, Homo sapiens
  misc_RNA (1)...(19): siRNA sense strand
agacaaaggcugacuaugu

SEQ ID NO: 81136 - RNA, 19 nt, Homo sapiens
  misc_RNA (1)...(19): siRNA sense strand
cuacugcucucaucccaaa

SEQ ID NO: 81137 - RNA, 19 nt, Homo sapiens
  misc_RNA (1)...(19): siRNA sense strand
gcucacaaguauaucauuc

SEQ ID NO: 81138 - RNA, 19 nt, Homo sapiens
  misc_RNA (1)...(19): siRNA sense strand
gcucauuuguggcuucuga

SEQ ID NO: 81139 - RNA, 19 nt, Homo sapiens
  misc_RNA (1)...(19): siRNA sense strand
aaggacacuuuguuucuua

SEQ ID NO: 81140 - RNA, 19 nt, Homo sapiens
  misc_RNA (1)...(19): siRNA sense strand
gaacucauacagauaaaca

SEQ ID NO: 81141 - RNA, 19 nt, Homo sapiens
  misc_RNA (1)...(19): siRNA sense strand
uguacaaagugaacucaua

SEQ ID NO: 81142 - RNA, 19 nt, Homo sapiens
  misc_RNA (1)...(19): siRNA sense strand
gaccaaaacuugagaccua

SEQ ID NO: 81143 - RNA, 19 nt, Homo sapiens
  misc_RNA (1)...(19): siRNA sense strand
gcacagaucuuuucauugc

SEQ ID NO: 81144 - RNA, 19 nt, Homo sapiens
  misc_RNA (1)...(19): siRNA sense strand
caccaagaccugaaauuaa

SEQ ID NO: 81145 - RNA, 19 nt, Homo sapiens
  misc_RNA (1)...(19): siRNA sense strand
uaaggucgaucugaaauca

SEQ ID NO: 81146 - RNA, 19 nt, Homo sapiens
  misc_RNA (1)...(19): siRNA sense strand
gaauacuacugcucucauc

SEQ ID NO: 81147 - RNA, 19 nt, Homo sapiens
  misc_RNA (1)...(19): siRNA sense strand
gaaaauggcacagaucuuu

SEQ ID NO: 81148 - RNA, 19 nt, Homo sapiens
  misc_RNA (1)...(19): siRNA sense strand
ccaccucacuccugauuuc

SEQ ID NO: 81149 - RNA, 19 nt, Homo sapiens
  misc_RNA (1)...(19): siRNA sense strand
gaaaaccacuccuaugaca

SEQ ID NO: 81150 - RNA, 19 nt, Homo sapiens
  misc_RNA (1)...(19): siRNA sense strand
gcagauuggacaaagaauu

SEQ ID NO: 81151 - RNA, 19 nt, Homo sapiens
  misc_RNA (1)...(19): siRNA sense strand
caaagugaacucauacaga

SEQ ID NO: 81152 - RNA, 19 nt, Homo sapiens
  misc_RNA (1)...(19): siRNA sense strand
caaauguaguaaagaagug

SEQ ID NO: 81153 - RNA, 19 nt, Homo sapiens
  misc_RNA (1)...(19): siRNA sense strand
ucagagacaaguucaauga

SEQ ID NO: 81154 - RNA, 19 nt, Homo sapiens
  misc_RNA (1)...(19): siRNA sense strand
cagaacagccaguggauga

SEQ ID NO: 81155 - RNA, 19 nt, Homo sapiens
  misc_RNA (1)...(19): siRNA sense strand
gaugaaacgucugcuccuu

SEQ ID NO: 81156 - RNA, 19 nt, Homo sapiens
  misc_RNA (1)...(19): siRNA sense strand
ucccauaccugaucucuuc

SEQ ID NO: 81157 - RNA, 19 nt, Homo sapiens
  misc_RNA (1)...(19): siRNA sense strand
caagcaagcucacaaaccu

SEQ ID NO: 81158 - RNA, 19 nt, Homo sapiens
  misc_RNA (1)...(19): siRNA sense strand
caacaaagaagcuccaaac

SEQ ID NO: 81159 - RNA, 19 nt, Homo sapiens
  misc_RNA (1)...(19): siRNA sense strand
caacauugcacgaguaucu

SEQ ID NO: 81160 - RNA, 19 nt, Homo sapiens
  misc_RNA (1)...(19): siRNA sense strand
ggauugagaaugaugaaau

SEQ ID NO: 81161 - RNA, 19 nt, Homo sapiens
  misc_RNA (1)...(19): siRNA sense strand
ggaagcauggcgacuggua

SEQ ID NO: 81162 - RNA, 19 nt, Homo sapiens
  misc_RNA (1)...(19): siRNA sense strand
guaagauguucagcaggua

SEQ ID NO: 81163 - RNA, 19 nt, Homo sapiens
  misc_RNA (1)...(19): siRNA sense strand
ugaaacgucugcuccuugu

SEQ ID NO: 81164 - RNA, 19 nt, Homo sapiens
  misc_RNA (1)...(19): siRNA sense strand
caaguguguuucagcagaa

SEQ ID NO: 81165 - RNA, 19 nt, Homo sapiens
  misc_RNA (1)...(19): siRNA sense strand
accaagaccugaaauuaau

SEQ ID NO: 81166 - RNA, 19 nt, Homo sapiens
  misc_RNA (1)...(19): siRNA sense strand
ccuuggaacuacuggauaa

SEQ ID NO: 81167 - RNA, 19 nt, Homo sapiens
  misc_RNA (1)...(19): siRNA sense strand
caaaaugacaggagguuua

SEQ ID NO: 81168 - RNA, 19 nt, Homo sapiens
  misc_RNA (1)...(19): siRNA sense strand
acaaagaagcuccaaacaa

SEQ ID NO: 81169 - RNA, 19 nt, Homo sapiens
  misc_RNA (1)...(19): siRNA sense strand
ggaagacaaaggcugacua

SEQ ID NO: 81170 - RNA, 19 nt, Homo sapiens
  misc_RNA (1)...(19): siRNA sense strand
ggauuaacccuccagaaca

SEQ ID NO: 81171 - RNA, 19 nt, Homo sapiens
  misc_RNA (1)...(19): siRNA sense strand
agacauaugcuucagauca

SEQ ID NO: 81172 - RNA, 19 nt, Homo sapiens
  misc_RNA (1)...(19): siRNA sense strand
caggagguuuacagacaua

SEQ ID NO: 81173 - RNA, 19 nt, Homo sapiens
  misc_RNA (1)...(19): siRNA sense strand
ggguugggauggugacauu

SEQ ID NO: 81174 - RNA, 19 nt, Homo sapiens
  misc_RNA (1)...(19): siRNA sense strand
cgaagcacaugggaaguga

SEQ ID NO: 81175 - RNA, 19 nt, Homo sapiens
  misc_RNA (1)...(19): siRNA sense strand
gaauacaagcaguaagaug

SEQ ID NO: 81176 - RNA, 19 nt, Homo sapiens
  misc_RNA (1)...(19): siRNA sense strand
caauuacagugacuuccaa

SEQ ID NO: 81177 - RNA, 19 nt, Homo sapiens
  misc_RNA (1)...(19): siRNA sense strand
gcaagguggcuuuguagug

SEQ ID NO: 81178 - RNA, 19 nt, Homo sapiens
  misc_RNA (1)...(19): siRNA sense strand
ccugaaacauggaagacaa

SEQ ID NO: 81179 - RNA, 19 nt, Homo sapiens
  misc_RNA (1)...(19): siRNA sense strand
gauaaggucgaucugaaau

SEQ ID NO: 81180 - RNA, 19 nt, Homo sapiens
  misc_RNA (1)...(19): siRNA sense strand
gauuaacccuccagaacag

SEQ ID NO: 81181 - RNA, 19 nt, Homo sapiens
  misc_RNA (1)...(19): siRNA sense strand
gaggagcuguccaaaauga

SEQ ID NO: 81182 - RNA, 19 nt, Homo sapiens
  misc_RNA (1)...(19): siRNA sense strand
cagauuggacaaagaauug

SEQ ID NO: 81183 - RNA, 19 nt, Homo sapiens
  misc_RNA (1)...(19): siRNA sense strand
gaagugauccgugauucug

SEQ ID NO: 81184 - RNA, 19 nt, Homo sapiens
  misc_RNA (1)...(19): siRNA sense strand
gaacaaaaccacaacaaag

SEQ ID NO: 81185 - RNA, 19 nt, Homo sapiens
  misc_RNA (1)...(19): siRNA sense strand
cauguugauucuauaguug

SEQ ID NO: 81186 - RNA, 19 nt, Homo sapiens
  misc_RNA (1)...(19): siRNA sense strand
gggcaacuguggagagaag

SEQ ID NO: 81187 - RNA, 19 nt, Homo sapiens
  misc_RNA (1)...(19): siRNA sense strand
ccucacuccugauuucauu

SEQ ID NO: 81188 - RNA, 19 nt, Homo sapiens
  misc_RNA (1)...(19): siRNA sense strand
gaugaaauacaauggaauc

SEQ ID NO: 81189 - RNA, 19 nt, Homo sapiens
  misc_RNA (1)...(19): siRNA sense strand
caaggacaccagcaaauuc

SEQ ID NO: 81190 - RNA, 19 nt, Homo sapiens
  misc_RNA (1)...(19): siRNA sense strand
uagaggagcuguccaaaau

SEQ ID NO: 81191 - RNA, 19 nt, Homo sapiens
  misc_RNA (1)...(19): siRNA sense strand
ggaagacaacacuauaagu

SEQ ID NO: 81192 - RNA, 19 nt, Homo sapiens
  misc_RNA (1)...(19): siRNA sense strand
gaagcauggcgacugguaa

SEQ ID NO: 81193 - RNA, 19 nt, Homo sapiens
  misc_RNA (1)...(19): siRNA sense strand
caaaucccaccuucucauu

SEQ ID NO: 81194 - RNA, 19 nt, Homo sapiens
  misc_RNA (1)...(19): siRNA sense strand
gggaguauuugacgaguac

SEQ ID NO: 81195 - RNA, 19 nt, Homo sapiens
  misc_RNA (1)...(19): siRNA sense strand
gagagaagggugaaaggau

SEQ ID NO: 81196 - RNA, 19 nt, Homo sapiens
  misc_RNA (1)...(19): siRNA sense strand
ucacaaguauaucauucga

SEQ ID NO: 81197 - RNA, 19 nt, Homo sapiens
  misc_RNA (1)...(19): siRNA sense strand
ccaaaucaccgaccugaag

SEQ ID NO: 81198 - RNA, 19 nt, Homo sapiens
  misc_RNA (1)...(19): siRNA sense strand
auaccuggcuggauugaga

SEQ ID NO: 81199 - RNA, 19 nt, Homo sapiens
  misc_RNA (1)...(19): siRNA sense strand
gacacuuuguuucuuauca

SEQ ID NO: 81200 - RNA, 19 nt, Homo sapiens
  misc_RNA (1)...(19): siRNA sense strand
ccaaugugccagaagauga

SEQ ID NO: 81201 - RNA, 19 nt, Homo sapiens
  misc_RNA (1)...(19): siRNA sense strand
caaagaauuguguguuuag

SEQ ID NO: 81202 - RNA, 19 nt, Homo sapiens
  misc_RNA (1)...(19): siRNA sense strand
uuacaggacucuaugaaaa

SEQ ID NO: 81203 - RNA, 19 nt, Homo sapiens
  misc_RNA (1)...(19): siRNA sense strand
cgaguaucuuuguuuauuc

SEQ ID NO: 81204 - RNA, 19 nt, Homo sapiens
  misc_RNA (1)...(19): siRNA sense strand
uaagaaaggucgaagauau

SEQ ID NO: 81205 - RNA, 19 nt, Homo sapiens
  misc_RNA (1)...(19): siRNA sense strand
gaccauggauaauaagaaa

SEQ ID NO: 81206 - RNA, 19 nt, Homo sapiens
  misc_RNA (1)...(19): siRNA sense strand
ggaaagacuaugagaguuu

SEQ ID NO: 81207 - RNA, 19 nt, Homo sapiens
  misc_RNA (1)...(19): siRNA sense strand
gaaagacuaugagaguuug

SEQ ID NO: 81208 - RNA, 19 nt, Homo sapiens
  misc_RNA (1)...(19): siRNA sense strand
gaggucaaaugcuaucuga

SEQ ID NO: 81209 - RNA, 19 nt, Homo sapiens
  misc_RNA (1)...(19): siRNA sense strand
gagcuggccucccucaguu

SEQ ID NO: 81210 - RNA, 19 nt, Homo sapiens
  misc_RNA (1)...(19): siRNA sense strand
uacggaagauccaguuuaa

SEQ ID NO: 81211 - RNA, 19 nt, Homo sapiens
  misc_RNA (1)...(19): siRNA sense strand
caaugacccuuaccuggaa

SEQ ID NO: 81212 - RNA, 19 nt, Homo sapiens
  misc_RNA (1)...(19): siRNA sense strand
gauaugaggcggugaagug

SEQ ID NO: 81213 - RNA, 19 nt, Homo sapiens
  misc_RNA (1)...(19): siRNA sense strand
uggagaccauggauaauaa

SEQ ID NO: 81214 - RNA, 19 nt, Homo sapiens
  misc_RNA (1)...(19): siRNA sense strand
gaagauaugaggcggugaa

SEQ ID NO: 81215 - RNA, 19 nt, Homo sapiens
  misc_RNA (1)...(19): siRNA sense strand
ggcagcagguuccgggaua

SEQ ID NO: 81216 - RNA, 19 nt, Homo sapiens
  misc_RNA (1)...(19): siRNA sense strand
ggucaaaugcuaucugaau

SEQ ID NO: 81217 - RNA, 19 nt, Homo sapiens
  misc_RNA (1)...(19): siRNA sense strand
ugaaguggauggugguguu

SEQ ID NO: 81218 - RNA, 19 nt, Homo sapiens
  misc_RNA (1)...(19): siRNA sense strand
ggaggaggaugagauucuu

SEQ ID NO: 81219 - RNA, 19 nt, Homo sapiens
  misc_RNA (1)...(19): siRNA sense strand
acuaugagaguuuggauua

SEQ ID NO: 81220 - RNA, 19 nt, Homo sapiens
  misc_RNA (1)...(19): siRNA sense strand
gcguaaaggugccaggaau

SEQ ID NO: 81221 - RNA, 19 nt, Homo sapiens
  misc_RNA (1)...(19): siRNA sense strand
ggaggaggaggaugagauu

SEQ ID NO: 81222 - RNA, 19 nt, Homo sapiens
  misc_RNA (1)...(19): siRNA sense strand
gaccauccuuggagaaaca

SEQ ID NO: 81223 - RNA, 19 nt, Homo sapiens
  misc_RNA (1)...(19): siRNA sense strand
gaugagauucuuccaagga

SEQ ID NO: 81224 - RNA, 19 nt, Homo sapiens
  misc_RNA (1)...(19): siRNA sense strand
gucaaaugcuaucugaaug

SEQ ID NO: 81225 - RNA, 19 nt, Homo sapiens
  misc_RNA (1)...(19): siRNA sense strand
uaugagaguuuggauuaug

SEQ ID NO: 81226 - RNA, 19 nt, Homo sapiens
  misc_RNA (1)...(19): siRNA sense strand
uuacggaagauccaguuua

SEQ ID NO: 81227 - RNA, 19 nt, Homo sapiens
  misc_RNA (1)...(19): siRNA sense strand
uaaccucaccuuugucuuc

SEQ ID NO: 81228 - RNA, 19 nt, Homo sapiens
  misc_RNA (1)...(19): siRNA sense strand
uacccgaggucaaaugcua

SEQ ID NO: 81229 - RNA, 19 nt, Homo sapiens
  misc_RNA (1)...(19): siRNA sense strand
guucugggauucaguuugg

SEQ ID NO: 81230 - RNA, 19 nt, Homo sapiens
  misc_RNA (1)...(19): siRNA sense strand
ggauuaugaucgcuguauc

SEQ ID NO: 81231 - RNA, 19 nt, Homo sapiens
  misc_RNA (1)...(19): siRNA sense strand
accaagggcucacguggaa

SEQ ID NO: 81232 - RNA, 19 nt, Homo sapiens
  misc_RNA (1)...(19): siRNA sense strand
gauaauaagaaaggucgaa

SEQ ID NO: 81233 - RNA, 19 nt, Homo sapiens
  misc_RNA (1)...(19): siRNA sense strand
ggaggagugcagccagaaa

SEQ ID NO: 81234 - RNA, 19 nt, Homo sapiens
  misc_RNA (1)...(19): siRNA sense strand
gaaguggauggugguguuu

SEQ ID NO: 81235 - RNA, 19 nt, Homo sapiens
  misc_RNA (1)...(19): siRNA sense strand
ccaaggaaagacuaugaga

SEQ ID NO: 81236 - RNA, 19 nt, Homo sapiens
  misc_RNA (1)...(19): siRNA sense strand
agaaaggucgaagauauga

SEQ ID NO: 81237 - RNA, 19 nt, Homo sapiens
  misc_RNA (1)...(19): siRNA sense strand
uccuugaacuccuggguuu

SEQ ID NO: 81238 - RNA, 19 nt, Homo sapiens
  misc_RNA (1)...(19): siRNA sense strand
gaggaugagauucuuccaa

SEQ ID NO: 81239 - RNA, 19 nt, Homo sapiens
  misc_RNA (1)...(19): siRNA sense strand
cacaggaggaggaggauga

SEQ ID NO: 81240 - RNA, 19 nt, Homo sapiens
  misc_RNA (1)...(19): siRNA sense strand
uggaguugcugcagcuuuc

SEQ ID NO: 81241 - RNA, 19 nt, Homo sapiens
  misc_RNA (1)...(19): siRNA sense strand
aaggaaagacuaugagagu

SEQ ID NO: 81242 - RNA, 19 nt, Homo sapiens
  misc_RNA (1)...(19): siRNA sense strand
aauaagaaaggucgaagau

SEQ ID NO: 81243 - RNA, 19 nt, Homo sapiens
  misc_RNA (1)...(19): siRNA sense strand
uaauaagaaaggucgaaga

SEQ ID NO: 81244 - RNA, 19 nt, Homo sapiens
  misc_RNA (1)...(19): siRNA sense strand
uuggagaccauggauaaua

SEQ ID NO: 81245 - RNA, 19 nt, Homo sapiens
  misc_RNA (1)...(19): siRNA sense strand
gaaggaaggccccaugauc

SEQ ID NO: 81246 - RNA, 19 nt, Homo sapiens
  misc_RNA (1)...(19): siRNA sense strand
augagaguuuggauuauga

SEQ ID NO: 81247 - RNA, 19 nt, Homo sapiens
  misc_RNA (1)...(19): siRNA sense strand
gagaccauggauaauaaga

SEQ ID NO: 81248 - RNA, 19 nt, Homo sapiens
  misc_RNA (1)...(19): siRNA sense strand
cuucuuccguucugggauu

SEQ ID NO: 81249 - RNA, 19 nt, Homo sapiens
  misc_RNA (1)...(19): siRNA sense strand
ggugguguuugccauugga

SEQ ID NO: 81250 - RNA, 19 nt, Homo sapiens
  misc_RNA (1)...(19): siRNA sense strand
aagaaaggucgaagauaug

SEQ ID NO: 81251 - RNA, 19 nt, Homo sapiens
  misc_RNA (1)...(19): siRNA sense strand
auaagaaaggucgaagaua

SEQ ID NO: 81252 - RNA, 19 nt, Homo sapiens
  misc_RNA (1)...(19): siRNA sense strand
ccuggugggucucuuugug

SEQ ID NO: 81253 - RNA, 19 nt, Homo sapiens
  misc_RNA (1)...(19): siRNA sense strand
aggagcggcugcuggaguu

SEQ ID NO: 81254 - RNA, 19 nt, Homo sapiens
  misc_RNA (1)...(19): siRNA sense strand
gcuguaucaaugacccuua

SEQ ID NO: 81255 - RNA, 19 nt, Homo sapiens
  misc_RNA (1)...(19): siRNA sense strand
ggacccugcucugcaaggu

SEQ ID NO: 81256 - RNA, 19 nt, Homo sapiens
  misc_RNA (1)...(19): siRNA sense strand
ggauacccgaggucaaaug

SEQ ID NO: 81257 - RNA, 19 nt, Homo sapiens
  misc_RNA (1)...(19): siRNA sense strand
aggaaagacuaugagaguu

SEQ ID NO: 81258 - RNA, 19 nt, Homo sapiens
  misc_RNA (1)...(19): siRNA sense strand
gaggagugcagccagaaag

SEQ ID NO: 81259 - RNA, 19 nt, Homo sapiens
  misc_RNA (1)...(19): siRNA sense strand
cuggauugcugaacuuugg

SEQ ID NO: 81260 - RNA, 19 nt, Homo sapiens
  misc_RNA (1)...(19): siRNA sense strand
caccuucacccucaacuuc

SEQ ID NO: 81261 - RNA, 19 nt, Homo sapiens
  misc_RNA (1)...(19): siRNA sense strand
uuggagugcuguucagugu

SEQ ID NO: 81262 - RNA, 19 nt, Homo sapiens
  misc_RNA (1)...(19): siRNA sense strand
cuaugagaguuuggauuau

SEQ ID NO: 81263 - RNA, 19 nt, Homo sapiens
  misc_RNA (1)...(19): siRNA sense strand
ggagcugaccauccuugga

SEQ ID NO: 81264 - RNA, 19 nt, Homo sapiens
  misc_RNA (1)...(19): siRNA sense strand
caagggcucacguggaaag

SEQ ID NO: 81265 - RNA, 19 nt, Homo sapiens
  misc_RNA (1)...(19): siRNA sense strand
ucaaaugcuaucugaaugg

SEQ ID NO: 81266 - RNA, 19 nt, Homo sapiens
  misc_RNA (1)...(19): siRNA sense strand
aagccuccuuguucucauu

SEQ ID NO: 81267 - RNA, 19 nt, Homo sapiens
  misc_RNA (1)...(19): siRNA sense strand
guaccuuguucagucuaga

SEQ ID NO: 81268 - RNA, 19 nt, Homo sapiens
  misc_RNA (1)...(19): siRNA sense strand
gacccuuaccuggaaguuu

SEQ ID NO: 81269 - RNA, 19 nt, Homo sapiens
  misc_RNA (1)...(19): siRNA sense strand
gggauucaguuuggaagcu

SEQ ID NO: 81270 - RNA, 19 nt, Homo sapiens
  misc_RNA (1)...(19): siRNA sense strand
guaaaggugccaggaaucg

SEQ ID NO: 81271 - RNA, 19 nt, Homo sapiens
  misc_RNA (1)...(19): siRNA sense strand
gcagcagguuccgggauac

SEQ ID NO: 81272 - RNA, 19 nt, Homo sapiens
  misc_RNA (1)...(19): siRNA sense strand
uaagaaaggucgaagauau

SEQ ID NO: 81273 - RNA, 19 nt, Homo sapiens
  misc_RNA (1)...(19): siRNA sense strand
gaccauggauaauaagaaa

SEQ ID NO: 81274 - RNA, 19 nt, Homo sapiens
  misc_RNA (1)...(19): siRNA sense strand
ggaaagacuaugagaguuu

SEQ ID NO: 81275 - RNA, 19 nt, Homo sapiens
  misc_RNA (1)...(19): siRNA sense strand
gaaagacuaugagaguuug

SEQ ID NO: 81276 - RNA, 19 nt, Homo sapiens
  misc_RNA (1)...(19): siRNA sense strand
gaggucaaaugcuaucuga

SEQ ID NO: 81277 - RNA, 19 nt, Homo sapiens
  misc_RNA (1)...(19): siRNA sense strand
gagcuggccucccucaguu

SEQ ID NO: 81278 - RNA, 19 nt, Homo sapiens
  misc_RNA (1)...(19): siRNA sense strand
uacggaagauccaguuuaa

SEQ ID NO: 81279 - RNA, 19 nt, Homo sapiens
  misc_RNA (1)...(19): siRNA sense strand
caaugacccuuaccuggaa

SEQ ID NO: 81280 - RNA, 19 nt, Homo sapiens
  misc_RNA (1)...(19): siRNA sense strand
gauaugaggcggugaagug

SEQ ID NO: 81281 - RNA, 19 nt, Homo sapiens
  misc_RNA (1)...(19): siRNA sense strand
uggagaccauggauaauaa

SEQ ID NO: 81282 - RNA, 19 nt, Homo sapiens
  misc_RNA (1)...(19): siRNA sense strand
gaagauaugaggcggugaa

SEQ ID NO: 81283 - RNA, 19 nt, Homo sapiens
  misc_RNA (1)...(19): siRNA sense strand
ggcagcagguuccgggaua

SEQ ID NO: 81284 - RNA, 19 nt, Homo sapiens
  misc_RNA (1)...(19): siRNA sense strand
ggucaaaugcuaucugaau

SEQ ID NO: 81285 - RNA, 19 nt, Homo sapiens
  misc_RNA (1)...(19): siRNA sense strand
ugaaguggauggugguguu

SEQ ID NO: 81286 - RNA, 19 nt, Homo sapiens
  misc_RNA (1)...(19): siRNA sense strand
ggaggaggaugagauucuu

SEQ ID NO: 81287 - RNA, 19 nt, Homo sapiens
  misc_RNA (1)...(19): siRNA sense strand
acuaugagaguuuggauua

SEQ ID NO: 81288 - RNA, 19 nt, Homo sapiens
  misc_RNA (1)...(19): siRNA sense strand
gcguaaaggugccaggaau

SEQ ID NO: 81289 - RNA, 19 nt, Homo sapiens
  misc_RNA (1)...(19): siRNA sense strand
ggaggaggaggaugagauu

SEQ ID NO: 81290 - RNA, 19 nt, Homo sapiens
  misc_RNA (1)...(19): siRNA sense strand
gaccauccuuggagaaaca

SEQ ID NO: 81291 - RNA, 19 nt, Homo sapiens
  misc_RNA (1)...(19): siRNA sense strand
gaugagauucuuccaagga

SEQ ID NO: 81292 - RNA, 19 nt, Homo sapiens
  misc_RNA (1)...(19): siRNA sense strand
gucaaaugcuaucugaaug

SEQ ID NO: 81293 - RNA, 19 nt, Homo sapiens
  misc_RNA (1)...(19): siRNA sense strand
uaugagaguuuggauuaug

SEQ ID NO: 81294 - RNA, 19 nt, Homo sapiens
  misc_RNA (1)...(19): siRNA sense strand
uuacggaagauccaguuua

SEQ ID NO: 81295 - RNA, 19 nt, Homo sapiens
  misc_RNA (1)...(19): siRNA sense strand
uaaccucaccuuugucuuc

SEQ ID NO: 81296 - RNA, 19 nt, Homo sapiens
  misc_RNA (1)...(19): siRNA sense strand
uacccgaggucaaaugcua

SEQ ID NO: 81297 - RNA, 19 nt, Homo sapiens
  misc_RNA (1)...(19): siRNA sense strand
guucugggauucaguuugg

SEQ ID NO: 81298 - RNA, 19 nt, Homo sapiens
  misc_RNA (1)...(19): siRNA sense strand
ggauuaugaucgcuguauc

SEQ ID NO: 81299 - RNA, 19 nt, Homo sapiens
  misc_RNA (1)...(19): siRNA sense strand
accaagggcucacguggaa

SEQ ID NO: 81300 - RNA, 19 nt, Homo sapiens
  misc_RNA (1)...(19): siRNA sense strand
gauaauaagaaaggucgaa

SEQ ID NO: 81301 - RNA, 19 nt, Homo sapiens
  misc_RNA (1)...(19): siRNA sense strand
ggaggagugcagccagaaa

SEQ ID NO: 81302 - RNA, 19 nt, Homo sapiens
  misc_RNA (1)...(19): siRNA sense strand
gaaguggauggugguguuu

SEQ ID NO: 81303 - RNA, 19 nt, Homo sapiens
  misc_RNA (1)...(19): siRNA sense strand
ccaaggaaagacuaugaga

SEQ ID NO: 81304 - RNA, 19 nt, Homo sapiens
  misc_RNA (1)...(19): siRNA sense strand
agaaaggucgaagauauga

SEQ ID NO: 81305 - RNA, 19 nt, Homo sapiens
  misc_RNA (1)...(19): siRNA sense strand
uccuugaacuccuggguuu

SEQ ID NO: 81306 - RNA, 19 nt, Homo sapiens
  misc_RNA (1)...(19): siRNA sense strand
gaggaugagauucuuccaa

SEQ ID NO: 81307 - RNA, 19 nt, Homo sapiens
  misc_RNA (1)...(19): siRNA sense strand
cacaggaggaggaggauga

SEQ ID NO: 81308 - RNA, 19 nt, Homo sapiens
  misc_RNA (1)...(19): siRNA sense strand
uggaguugcugcagcuuuc

SEQ ID NO: 81309 - RNA, 19 nt, Homo sapiens
  misc_RNA (1)...(19): siRNA sense strand
aaggaaagacuaugagagu

SEQ ID NO: 81310 - RNA, 19 nt, Homo sapiens
  misc_RNA (1)...(19): siRNA sense strand
aauaagaaaggucgaagau

SEQ ID NO: 81311 - RNA, 19 nt, Homo sapiens
  misc_RNA (1)...(19): siRNA sense strand
uaauaagaaaggucgaaga

SEQ ID NO: 81312 - RNA, 19 nt, Homo sapiens
  misc_RNA (1)...(19): siRNA sense strand
uuggagaccauggauaaua

SEQ ID NO: 81313 - RNA, 19 nt, Homo sapiens
  misc_RNA (1)...(19): siRNA sense strand
gaaggaaggccccaugauc

SEQ ID NO: 81314 - RNA, 19 nt, Homo sapiens
  misc_RNA (1)...(19): siRNA sense strand
augagaguuuggauuauga

SEQ ID NO: 81315 - RNA, 19 nt, Homo sapiens
  misc_RNA (1)...(19): siRNA sense strand
gagaccauggauaauaaga

SEQ ID NO: 81316 - RNA, 19 nt, Homo sapiens
  misc_RNA (1)...(19): siRNA sense strand
cuucuuccguucugggauu

SEQ ID NO: 81317 - RNA, 19 nt, Homo sapiens
  misc_RNA (1)...(19): siRNA sense strand
ggugguguuugccauugga

SEQ ID NO: 81318 - RNA, 19 nt, Homo sapiens
  misc_RNA (1)...(19): siRNA sense strand
aagaaaggucgaagauaug

SEQ ID NO: 81319 - RNA, 19 nt, Homo sapiens
  misc_RNA (1)...(19): siRNA sense strand
auaagaaaggucgaagaua

SEQ ID NO: 81320 - RNA, 19 nt, Homo sapiens
  misc_RNA (1)...(19): siRNA sense strand
ccuggugggucucuuugug

SEQ ID NO: 81321 - RNA, 19 nt, Homo sapiens
  misc_RNA (1)...(19): siRNA sense strand
aggagcggcugcuggaguu

SEQ ID NO: 81322 - RNA, 19 nt, Homo sapiens
  misc_RNA (1)...(19): siRNA sense strand
gcuguaucaaugacccuua

SEQ ID NO: 81323 - RNA, 19 nt, Homo sapiens
  misc_RNA (1)...(19): siRNA sense strand
ggacccugcucugcaaggu

SEQ ID NO: 81324 - RNA, 19 nt, Homo sapiens
  misc_RNA (1)...(19): siRNA sense strand
ggauacccgaggucaaaug

SEQ ID NO: 81325 - RNA, 19 nt, Homo sapiens
  misc_RNA (1)...(19): siRNA sense strand
aggaaagacuaugagaguu

SEQ ID NO: 81326 - RNA, 19 nt, Homo sapiens
  misc_RNA (1)...(19): siRNA sense strand
gaggagugcagccagaaag

SEQ ID NO: 81327 - RNA, 19 nt, Homo sapiens
  misc_RNA (1)...(19): siRNA sense strand
cuggauugcugaacuuugg

SEQ ID NO: 81328 - RNA, 19 nt, Homo sapiens
  misc_RNA (1)...(19): siRNA sense strand
caccuucacccucaacuuc

SEQ ID NO: 81329 - RNA, 19 nt, Homo sapiens
  misc_RNA (1)...(19): siRNA sense strand
uuggagugcuguucagugu

SEQ ID NO: 81330 - RNA, 19 nt, Homo sapiens
  misc_RNA (1)...(19): siRNA sense strand
cuaugagaguuuggauuau

SEQ ID NO: 81331 - RNA, 19 nt, Homo sapiens
  misc_RNA (1)...(19): siRNA sense strand
ggagcugaccauccuugga

SEQ ID NO: 81332 - RNA, 19 nt, Homo sapiens
  misc_RNA (1)...(19): siRNA sense strand
caagggcucacguggaaag

SEQ ID NO: 81333 - RNA, 19 nt, Homo sapiens
  misc_RNA (1)...(19): siRNA sense strand
ucaaaugcuaucugaaugg

SEQ ID NO: 81334 - RNA, 19 nt, Homo sapiens
  misc_RNA (1)...(19): siRNA sense strand
aagccuccuuguucucauu

SEQ ID NO: 81335 - RNA, 19 nt, Homo sapiens
  misc_RNA (1)...(19): siRNA sense strand
guaccuuguucagucuaga

SEQ ID NO: 81336 - RNA, 19 nt, Homo sapiens
  misc_RNA (1)...(19): siRNA sense strand
gacccuuaccuggaaguuu

SEQ ID NO: 81337 - RNA, 19 nt, Homo sapiens
  misc_RNA (1)...(19): siRNA sense strand
gggauucaguuuggaagcu

SEQ ID NO: 81338 - RNA, 19 nt, Homo sapiens
  misc_RNA (1)...(19): siRNA sense strand
guaaaggugccaggaaucg

SEQ ID NO: 81339 - RNA, 19 nt, Homo sapiens
  misc_RNA (1)...(19): siRNA sense strand
gcagcagguuccgggauac

SEQ ID NO: 81340 - RNA, 19 nt, Homo sapiens
  misc_RNA (1)...(19): siRNA sense strand
uaagaaaggucgaagauau

SEQ ID NO: 81341 - RNA, 19 nt, Homo sapiens
  misc_RNA (1)...(19): siRNA sense strand
gaccauggauaauaagaaa

SEQ ID NO: 81342 - RNA, 19 nt, Homo sapiens
  misc_RNA (1)...(19): siRNA sense strand
ggaaagacuaugagaguuu

SEQ ID NO: 81343 - RNA, 19 nt, Homo sapiens
  misc_RNA (1)...(19): siRNA sense strand
gaaagacuaugagaguuug

SEQ ID NO: 81344 - RNA, 19 nt, Homo sapiens
  misc_RNA (1)...(19): siRNA sense strand
gaggucaaaugcuaucuga

SEQ ID NO: 81345 - RNA, 19 nt, Homo sapiens
  misc_RNA (1)...(19): siRNA sense strand
gagcuggccucccucaguu

SEQ ID NO: 81346 - RNA, 19 nt, Homo sapiens
  misc_RNA (1)...(19): siRNA sense strand
uacggaagauccaguuuaa

SEQ ID NO: 81347 - RNA, 19 nt, Homo sapiens
  misc_RNA (1)...(19): siRNA sense strand
caaugacccuuaccuggaa

SEQ ID NO: 81348 - RNA, 19 nt, Homo sapiens
  misc_RNA (1)...(19): siRNA sense strand
gauaugaggcggugaagug

SEQ ID NO: 81349 - RNA, 19 nt, Homo sapiens
  misc_RNA (1)...(19): siRNA sense strand
uggagaccauggauaauaa

SEQ ID NO: 81350 - RNA, 19 nt, Homo sapiens
  misc_RNA (1)...(19): siRNA sense strand
gaagauaugaggcggugaa

SEQ ID NO: 81351 - RNA, 19 nt, Homo sapiens
  misc_RNA (1)...(19): siRNA sense strand
ggcagcagguuccgggaua

SEQ ID NO: 81352 - RNA, 19 nt, Homo sapiens
  misc_RNA (1)...(19): siRNA sense strand
ggucaaaugcuaucugaau

SEQ ID NO: 81353 - RNA, 19 nt, Homo sapiens
  misc_RNA (1)...(19): siRNA sense strand
ugaaguggauggugguguu

SEQ ID NO: 81354 - RNA, 19 nt, Homo sapiens
  misc_RNA (1)...(19): siRNA sense strand
ggaggaggaugagauucuu

SEQ ID NO: 81355 - RNA, 19 nt, Homo sapiens
  misc_RNA (1)...(19): siRNA sense strand
acuaugagaguuuggauua

SEQ ID NO: 81356 - RNA, 19 nt, Homo sapiens
  misc_RNA (1)...(19): siRNA sense strand
gcguaaaggugccaggaau

SEQ ID NO: 81357 - RNA, 19 nt, Homo sapiens
  misc_RNA (1)...(19): siRNA sense strand
ggaggaggaggaugagauu

SEQ ID NO: 81358 - RNA, 19 nt, Homo sapiens
  misc_RNA (1)...(19): siRNA sense strand
gaccauccuuggagaaaca

SEQ ID NO: 81359 - RNA, 19 nt, Homo sapiens
  misc_RNA (1)...(19): siRNA sense strand
gaugagauucuuccaagga

SEQ ID NO: 81360 - RNA, 19 nt, Homo sapiens
  misc_RNA (1)...(19): siRNA sense strand
gucaaaugcuaucugaaug

SEQ ID NO: 81361 - RNA, 19 nt, Homo sapiens
  misc_RNA (1)...(19): siRNA sense strand
uaugagaguuuggauuaug

SEQ ID NO: 81362 - RNA, 19 nt, Homo sapiens
  misc_RNA (1)...(19): siRNA sense strand
uuacggaagauccaguuua

SEQ ID NO: 81363 - RNA, 19 nt, Homo sapiens
  misc_RNA (1)...(19): siRNA sense strand
uaaccucaccuuugucuuc

SEQ ID NO: 81364 - RNA, 19 nt, Homo sapiens
  misc_RNA (1)...(19): siRNA sense strand
uacccgaggucaaaugcua

SEQ ID NO: 81365 - RNA, 19 nt, Homo sapiens
  misc_RNA (1)...(19): siRNA sense strand
guucugggauucaguuugg

SEQ ID NO: 81366 - RNA, 19 nt, Homo sapiens
  misc_RNA (1)...(19): siRNA sense strand
ggauuaugaucgcuguauc

SEQ ID NO: 81367 - RNA, 19 nt, Homo sapiens
  misc_RNA (1)...(19): siRNA sense strand
accaagggcucacguggaa

SEQ ID NO: 81368 - RNA, 19 nt, Homo sapiens
  misc_RNA (1)...(19): siRNA sense strand
gauaauaagaaaggucgaa

SEQ ID NO: 81369 - RNA, 19 nt, Homo sapiens
  misc_RNA (1)...(19): siRNA sense strand
ggaggagugcagccagaaa

SEQ ID NO: 81370 - RNA, 19 nt, Homo sapiens
  misc_RNA (1)...(19): siRNA sense strand
gaaguggauggugguguuu

SEQ ID NO: 81371 - RNA, 19 nt, Homo sapiens
  misc_RNA (1)...(19): siRNA sense strand
ccaaggaaagacuaugaga

SEQ ID NO: 81372 - RNA, 19 nt, Homo sapiens
  misc_RNA (1)...(19): siRNA sense strand
agaaaggucgaagauauga

SEQ ID NO: 81373 - RNA, 19 nt, Homo sapiens
  misc_RNA (1)...(19): siRNA sense strand
uccuugaacuccuggguuu

SEQ ID NO: 81374 - RNA, 19 nt, Homo sapiens
  misc_RNA (1)...(19): siRNA sense strand
gaggaugagauucuuccaa

SEQ ID NO: 81375 - RNA, 19 nt, Homo sapiens
  misc_RNA (1)...(19): siRNA sense strand
cacaggaggaggaggauga

SEQ ID NO: 81376 - RNA, 19 nt, Homo sapiens
  misc_RNA (1)...(19): siRNA sense strand
uggaguugcugcagcuuuc

SEQ ID NO: 81377 - RNA, 19 nt, Homo sapiens
  misc_RNA (1)...(19): siRNA sense strand
aaggaaagacuaugagagu

SEQ ID NO: 81378 - RNA, 19 nt, Homo sapiens
  misc_RNA (1)...(19): siRNA sense strand
aauaagaaaggucgaagau

SEQ ID NO: 81379 - RNA, 19 nt, Homo sapiens
  misc_RNA (1)...(19): siRNA sense strand
uaauaagaaaggucgaaga

SEQ ID NO: 81380 - RNA, 19 nt, Homo sapiens
  misc_RNA (1)...(19): siRNA sense strand
uuggagaccauggauaaua

SEQ ID NO: 81381 - RNA, 19 nt, Homo sapiens
  misc_RNA (1)...(19): siRNA sense strand
gaaggaaggccccaugauc

SEQ ID NO: 81382 - RNA, 19 nt, Homo sapiens
  misc_RNA (1)...(19): siRNA sense strand
augagaguuuggauuauga

SEQ ID NO: 81383 - RNA, 19 nt, Homo sapiens
  misc_RNA (1)...(19): siRNA sense strand
gagaccauggauaauaaga

SEQ ID NO: 81384 - RNA, 19 nt, Homo sapiens
  misc_RNA (1)...(19): siRNA sense strand
cuucuuccguucugggauu

SEQ ID NO: 81385 - RNA, 19 nt, Homo sapiens
  misc_RNA (1)...(19): siRNA sense strand
ggugguguuugccauugga

SEQ ID NO: 81386 - RNA, 19 nt, Homo sapiens
  misc_RNA (1)...(19): siRNA sense strand
aagaaaggucgaagauaug

SEQ ID NO: 81387 - RNA, 19 nt, Homo sapiens
  misc_RNA (1)...(19): siRNA sense strand
auaagaaaggucgaagaua

SEQ ID NO: 81388 - RNA, 19 nt, Homo sapiens
  misc_RNA (1)...(19): siRNA sense strand
ccuggugggucucuuugug

SEQ ID NO: 81389 - RNA, 19 nt, Homo sapiens
  misc_RNA (1)...(19): siRNA sense strand
aggagcggcugcuggaguu

SEQ ID NO: 81390 - RNA, 19 nt, Homo sapiens
  misc_RNA (1)...(19): siRNA sense strand
gcuguaucaaugacccuua

SEQ ID NO: 81391 - RNA, 19 nt, Homo sapiens
  misc_RNA (1)...(19): siRNA sense strand
ggacccugcucugcaaggu

SEQ ID NO: 81392 - RNA, 19 nt, Homo sapiens
  misc_RNA (1)...(19): siRNA sense strand
ggauacccgaggucaaaug

SEQ ID NO: 81393 - RNA, 19 nt, Homo sapiens
  misc_RNA (1)...(19): siRNA sense strand
aggaaagacuaugagaguu

SEQ ID NO: 81394 - RNA, 19 nt, Homo sapiens
  misc_RNA (1)...(19): siRNA sense strand
gaggagugcagccagaaag

SEQ ID NO: 81395 - RNA, 19 nt, Homo sapiens
  misc_RNA (1)...(19): siRNA sense strand
cuggauugcugaacuuugg

SEQ ID NO: 81396 - RNA, 19 nt, Homo sapiens
  misc_RNA (1)...(19): siRNA sense strand
caccuucacccucaacuuc

SEQ ID NO: 81397 - RNA, 19 nt, Homo sapiens
  misc_RNA (1)...(19): siRNA sense strand
uuggagugcuguucagugu

SEQ ID NO: 81398 - RNA, 19 nt, Homo sapiens
  misc_RNA (1)...(19): siRNA sense strand
cuaugagaguuuggauuau

SEQ ID NO: 81399 - RNA, 19 nt, Homo sapiens
  misc_RNA (1)...(19): siRNA sense strand
ggagcugaccauccuugga

SEQ ID NO: 81400 - RNA, 19 nt, Homo sapiens
  misc_RNA (1)...(19): siRNA sense strand
caagggcucacguggaaag

SEQ ID NO: 81401 - RNA, 19 nt, Homo sapiens
  misc_RNA (1)...(19): siRNA sense strand
ucaaaugcuaucugaaugg

SEQ ID NO: 81402 - RNA, 19 nt, Homo sapiens
  misc_RNA (1)...(19): siRNA sense strand
aagccuccuuguucucauu

SEQ ID NO: 81403 - RNA, 19 nt, Homo sapiens
  misc_RNA (1)...(19): siRNA sense strand
guaccuuguucagucuaga

SEQ ID NO: 81404 - RNA, 19 nt, Homo sapiens
  misc_RNA (1)...(19): siRNA sense strand
gacccuuaccuggaaguuu

SEQ ID NO: 81405 - RNA, 19 nt, Homo sapiens
  misc_RNA (1)...(19): siRNA sense strand
gggauucaguuuggaagcu

SEQ ID NO: 81406 - RNA, 19 nt, Homo sapiens
  misc_RNA (1)...(19): siRNA sense strand
guaaaggugccaggaaucg

SEQ ID NO: 81407 - RNA, 19 nt, Homo sapiens
  misc_RNA (1)...(19): siRNA sense strand
gcagcagguuccgggauac

SEQ ID NO: 81408 - RNA, 19 nt, Homo sapiens
  misc_RNA (1)...(19): siRNA sense strand
uaagaaaggucgaagauau

SEQ ID NO: 81409 - RNA, 19 nt, Homo sapiens
  misc_RNA (1)...(19): siRNA sense strand
gaccauggauaauaagaaa

SEQ ID NO: 81410 - RNA, 19 nt, Homo sapiens
  misc_RNA (1)...(19): siRNA sense strand
ggaaagacuaugagaguuu

SEQ ID NO: 81411 - RNA, 19 nt, Homo sapiens
  misc_RNA (1)...(19): siRNA sense strand
gaaagacuaugagaguuug

SEQ ID NO: 81412 - RNA, 19 nt, Homo sapiens
  misc_RNA (1)...(19): siRNA sense strand
gaggucaaaugcuaucuga

SEQ ID NO: 81413 - RNA, 19 nt, Homo sapiens
  misc_RNA (1)...(19): siRNA sense strand
gagcuggccucccucaguu

SEQ ID NO: 81414 - RNA, 19 nt, Homo sapiens
  misc_RNA (1)...(19): siRNA sense strand
uacggaagauccaguuuaa

SEQ ID NO: 81415 - RNA, 19 nt, Homo sapiens
  misc_RNA (1)...(19): siRNA sense strand
caaugacccuuaccuggaa

SEQ ID NO: 81416 - RNA, 19 nt, Homo sapiens
  misc_RNA (1)...(19): siRNA sense strand
gauaugaggcggugaagug

SEQ ID NO: 81417 - RNA, 19 nt, Homo sapiens
  misc_RNA (1)...(19): siRNA sense strand
uggagaccauggauaauaa

SEQ ID NO: 81418 - RNA, 19 nt, Homo sapiens
  misc_RNA (1)...(19): siRNA sense strand
gaagauaugaggcggugaa

SEQ ID NO: 81419 - RNA, 19 nt, Homo sapiens
  misc_RNA (1)...(19): siRNA sense strand
ggcagcagguuccgggaua

SEQ ID NO: 81420 - RNA, 19 nt, Homo sapiens
  misc_RNA (1)...(19): siRNA sense strand
ggucaaaugcuaucugaau

SEQ ID NO: 81421 - RNA, 19 nt, Homo sapiens
  misc_RNA (1)...(19): siRNA sense strand
ugaaguggauggugguguu

SEQ ID NO: 81422 - RNA, 19 nt, Homo sapiens
  misc_RNA (1)...(19): siRNA sense strand
ggaggaggaugagauucuu

SEQ ID NO: 81423 - RNA, 19 nt, Homo sapiens
  misc_RNA (1)...(19): siRNA sense strand
acuaugagaguuuggauua

SEQ ID NO: 81424 - RNA, 19 nt, Homo sapiens
  misc_RNA (1)...(19): siRNA sense strand
gcguaaaggugccaggaau

SEQ ID NO: 81425 - RNA, 19 nt, Homo sapiens
  misc_RNA (1)...(19): siRNA sense strand
ggaggaggaggaugagauu

SEQ ID NO: 81426 - RNA, 19 nt, Homo sapiens
  misc_RNA (1)...(19): siRNA sense strand
gaccauccuuggagaaaca

SEQ ID NO: 81427 - RNA, 19 nt, Homo sapiens
  misc_RNA (1)...(19): siRNA sense strand
gaugagauucuuccaagga

SEQ ID NO: 81428 - RNA, 19 nt, Homo sapiens
  misc_RNA (1)...(19): siRNA sense strand
gucaaaugcuaucugaaug

SEQ ID NO: 81429 - RNA, 19 nt, Homo sapiens
  misc_RNA (1)...(19): siRNA sense strand
uaugagaguuuggauuaug

SEQ ID NO: 81430 - RNA, 19 nt, Homo sapiens
  misc_RNA (1)...(19): siRNA sense strand
uuacggaagauccaguuua

SEQ ID NO: 81431 - RNA, 19 nt, Homo sapiens
  misc_RNA (1)...(19): siRNA sense strand
uaaccucaccuuugucuuc

SEQ ID NO: 81432 - RNA, 19 nt, Homo sapiens
  misc_RNA (1)...(19): siRNA sense strand
uacccgaggucaaaugcua

SEQ ID NO: 81433 - RNA, 19 nt, Homo sapiens
  misc_RNA (1)...(19): siRNA sense strand
guucugggauucaguuugg

SEQ ID NO: 81434 - RNA, 19 nt, Homo sapiens
  misc_RNA (1)...(19): siRNA sense strand
ggauuaugaucgcuguauc

SEQ ID NO: 81435 - RNA, 19 nt, Homo sapiens
  misc_RNA (1)...(19): siRNA sense strand
accaagggcucacguggaa

SEQ ID NO: 81436 - RNA, 19 nt, Homo sapiens
  misc_RNA (1)...(19): siRNA sense strand
gauaauaagaaaggucgaa

SEQ ID NO: 81437 - RNA, 19 nt, Homo sapiens
  misc_RNA (1)...(19): siRNA sense strand
ggaggagugcagccagaaa

SEQ ID NO: 81438 - RNA, 19 nt, Homo sapiens
  misc_RNA (1)...(19): siRNA sense strand
gaaguggauggugguguuu

SEQ ID NO: 81439 - RNA, 19 nt, Homo sapiens
  misc_RNA (1)...(19): siRNA sense strand
ccaaggaaagacuaugaga

SEQ ID NO: 81440 - RNA, 19 nt, Homo sapiens
  misc_RNA (1)...(19): siRNA sense strand
agaaaggucgaagauauga

SEQ ID NO: 81441 - RNA, 19 nt, Homo sapiens
  misc_RNA (1)...(19): siRNA sense strand
uccuugaacuccuggguuu

SEQ ID NO: 81442 - RNA, 19 nt, Homo sapiens
  misc_RNA (1)...(19): siRNA sense strand
gaggaugagauucuuccaa

SEQ ID NO: 81443 - RNA, 19 nt, Homo sapiens
  misc_RNA (1)...(19): siRNA sense strand
cacaggaggaggaggauga

SEQ ID NO: 81444 - RNA, 19 nt, Homo sapiens
  misc_RNA (1)...(19): siRNA sense strand
uggaguugcugcagcuuuc

SEQ ID NO: 81445 - RNA, 19 nt, Homo sapiens
  misc_RNA (1)...(19): siRNA sense strand
aaggaaagacuaugagagu

SEQ ID NO: 81446 - RNA, 19 nt, Homo sapiens
  misc_RNA (1)...(19): siRNA sense strand
aauaagaaaggucgaagau

SEQ ID NO: 81447 - RNA, 19 nt, Homo sapiens
  misc_RNA (1)...(19): siRNA sense strand
uaauaagaaaggucgaaga

SEQ ID NO: 81448 - RNA, 19 nt, Homo sapiens
  misc_RNA (1)...(19): siRNA sense strand
uuggagaccauggauaaua

SEQ ID NO: 81449 - RNA, 19 nt, Homo sapiens
  misc_RNA (1)...(19): siRNA sense strand
gaaggaaggccccaugauc

SEQ ID NO: 81450 - RNA, 19 nt, Homo sapiens
  misc_RNA (1)...(19): siRNA sense strand
augagaguuuggauuauga

SEQ ID NO: 81451 - RNA, 19 nt, Homo sapiens
  misc_RNA (1)...(19): siRNA sense strand
gagaccauggauaauaaga

SEQ ID NO: 81452 - RNA, 19 nt, Homo sapiens
  misc_RNA (1)...(19): siRNA sense strand
cuucuuccguucugggauu

SEQ ID NO: 81453 - RNA, 19 nt, Homo sapiens
  misc_RNA (1)...(19): siRNA sense strand
ggugguguuugccauugga

SEQ ID NO: 81454 - RNA, 19 nt, Homo sapiens
  misc_RNA (1)...(19): siRNA sense strand
aagaaaggucgaagauaug

SEQ ID NO: 81455 - RNA, 19 nt, Homo sapiens
  misc_RNA (1)...(19): siRNA sense strand
auaagaaaggucgaagaua

SEQ ID NO: 81456 - RNA, 19 nt, Homo sapiens
  misc_RNA (1)...(19): siRNA sense strand
ccuggugggucucuuugug

SEQ ID NO: 81457 - RNA, 19 nt, Homo sapiens
  misc_RNA (1)...(19): siRNA sense strand
aggagcggcugcuggaguu

SEQ ID NO: 81458 - RNA, 19 nt, Homo sapiens
  misc_RNA (1)...(19): siRNA sense strand
gcuguaucaaugacccuua

SEQ ID NO: 81459 - RNA, 19 nt, Homo sapiens
  misc_RNA (1)...(19): siRNA sense strand
ggacccugcucugcaaggu

SEQ ID NO: 81460 - RNA, 19 nt, Homo sapiens
  misc_RNA (1)...(19): siRNA sense strand
ggauacccgaggucaaaug

SEQ ID NO: 81461 - RNA, 19 nt, Homo sapiens
  misc_RNA (1)...(19): siRNA sense strand
aggaaagacuaugagaguu

SEQ ID NO: 81462 - RNA, 19 nt, Homo sapiens
  misc_RNA (1)...(19): siRNA sense strand
gaggagugcagccagaaag

SEQ ID NO: 81463 - RNA, 19 nt, Homo sapiens
  misc_RNA (1)...(19): siRNA sense strand
cuggauugcugaacuuugg

SEQ ID NO: 81464 - RNA, 19 nt, Homo sapiens
  misc_RNA (1)...(19): siRNA sense strand
caccuucacccucaacuuc

SEQ ID NO: 81465 - RNA, 19 nt, Homo sapiens
  misc_RNA (1)...(19): siRNA sense strand
uuggagugcuguucagugu

SEQ ID NO: 81466 - RNA, 19 nt, Homo sapiens
  misc_RNA (1)...(19): siRNA sense strand
cuaugagaguuuggauuau

SEQ ID NO: 81467 - RNA, 19 nt, Homo sapiens
  misc_RNA (1)...(19): siRNA sense strand
ggagcugaccauccuugga

SEQ ID NO: 81468 - RNA, 19 nt, Homo sapiens
  misc_RNA (1)...(19): siRNA sense strand
caagggcucacguggaaag

SEQ ID NO: 81469 - RNA, 19 nt, Homo sapiens
  misc_RNA (1)...(19): siRNA sense strand
ucaaaugcuaucugaaugg

SEQ ID NO: 81470 - RNA, 19 nt, Homo sapiens
  misc_RNA (1)...(19): siRNA sense strand
aagccuccuuguucucauu

SEQ ID NO: 81471 - RNA, 19 nt, Homo sapiens
  misc_RNA (1)...(19): siRNA sense strand
guaccuuguucagucuaga

SEQ ID NO: 81472 - RNA, 19 nt, Homo sapiens
  misc_RNA (1)...(19): siRNA sense strand
gacccuuaccuggaaguuu

SEQ ID NO: 81473 - RNA, 19 nt, Homo sapiens
  misc_RNA (1)...(19): siRNA sense strand
gggauucaguuuggaagcu

SEQ ID NO: 81474 - RNA, 19 nt, Homo sapiens
  misc_RNA (1)...(19): siRNA sense strand
guaaaggugccaggaaucg

SEQ ID NO: 81475 - RNA, 19 nt, Homo sapiens
  misc_RNA (1)...(19): siRNA sense strand
gcagcagguuccgggauac

SEQ ID NO: 81476 - RNA, 19 nt, Homo sapiens
  misc_RNA (1)...(19): siRNA sense strand
ggagucaccuucaauguua

SEQ ID NO: 81477 - RNA, 19 nt, Homo sapiens
  misc_RNA (1)...(19): siRNA sense strand
ccaacaagauugaggaauu

SEQ ID NO: 81478 - RNA, 19 nt, Homo sapiens
  misc_RNA (1)...(19): siRNA sense strand
caacaagauugaggaauuu

SEQ ID NO: 81479 - RNA, 19 nt, Homo sapiens
  misc_RNA (1)...(19): siRNA sense strand
ggcaaaggcccucaaauaa

SEQ ID NO: 81480 - RNA, 19 nt, Homo sapiens
  misc_RNA (1)...(19): siRNA sense strand
uggcaaaggcccucaaaua

SEQ ID NO: 81481 - RNA, 19 nt, Homo sapiens
  misc_RNA (1)...(19): siRNA sense strand
agaucgagcucgccuauga

SEQ ID NO: 81482 - RNA, 19 nt, Homo sapiens
  misc_RNA (1)...(19): siRNA sense strand
cagaagaaguggaugaaac

SEQ ID NO: 81483 - RNA, 19 nt, Homo sapiens
  misc_RNA (1)...(19): siRNA sense strand
ugaaagcccugaagguuuu

SEQ ID NO: 81484 - RNA, 19 nt, Homo sapiens
  misc_RNA (1)...(19): siRNA sense strand
ggaccgagacagugcagaa

SEQ ID NO: 81485 - RNA, 19 nt, Homo sapiens
  misc_RNA (1)...(19): siRNA sense strand
ugaaaccagugcugaagau

SEQ ID NO: 81486 - RNA, 19 nt, Homo sapiens
  misc_RNA (1)...(19): siRNA sense strand
gcacacagacaccaacaag

SEQ ID NO: 81487 - RNA, 19 nt, Homo sapiens
  misc_RNA (1)...(19): siRNA sense strand
caucgguacuugagcaaug

SEQ ID NO: 81488 - RNA, 19 nt, Homo sapiens
  misc_RNA (1)...(19): siRNA sense strand
gggagucaccuucaauguu

SEQ ID NO: 81489 - RNA, 19 nt, Homo sapiens
  misc_RNA (1)...(19): siRNA sense strand
ggagaucgagcucgccuau

SEQ ID NO: 81490 - RNA, 19 nt, Homo sapiens
  misc_RNA (1)...(19): siRNA sense strand
aaccagugcugaagaugaa

SEQ ID NO: 81491 - RNA, 19 nt, Homo sapiens
  misc_RNA (1)...(19): siRNA sense strand
ccagagacuguucauggua

SEQ ID NO: 81492 - RNA, 19 nt, Homo sapiens
  misc_RNA (1)...(19): siRNA sense strand
acacagacaccaacaagau

SEQ ID NO: 81493 - RNA, 19 nt, Homo sapiens
  misc_RNA (1)...(19): siRNA sense strand
gggagugcaucgguacuug

SEQ ID NO: 81494 - RNA, 19 nt, Homo sapiens
  misc_RNA (1)...(19): siRNA sense strand
ggaugaaaccagugcugaa

SEQ ID NO: 81495 - RNA, 19 nt, Homo sapiens
  misc_RNA (1)...(19): siRNA sense strand
ucaaugacaaucuggagaa

SEQ ID NO: 81496 - RNA, 19 nt, Homo sapiens
  misc_RNA (1)...(19): siRNA sense strand
gccaaaguuacacauagua

SEQ ID NO: 81497 - RNA, 19 nt, Homo sapiens
  misc_RNA (1)...(19): siRNA sense strand
cugccuacaucaagaauuc

SEQ ID NO: 81498 - RNA, 19 nt, Homo sapiens
  misc_RNA (1)...(19): siRNA sense strand
cgugaaggcuggcagugau

SEQ ID NO: 81499 - RNA, 19 nt, Homo sapiens
  misc_RNA (1)...(19): siRNA sense strand
gaugaaggugucucucaga

SEQ ID NO: 81500 - RNA, 19 nt, Homo sapiens
  misc_RNA (1)...(19): siRNA sense strand
cugaaagcccugaagguuu

SEQ ID NO: 81501 - RNA, 19 nt, Homo sapiens
  misc_RNA (1)...(19): siRNA sense strand
aaaccagugcugaagauga

SEQ ID NO: 81502 - RNA, 19 nt, Homo sapiens
  misc_RNA (1)...(19): siRNA sense strand
ccaccuguccagaugauga

SEQ ID NO: 81503 - RNA, 19 nt, Homo sapiens
  misc_RNA (1)...(19): siRNA sense strand
ggagugcaucgguacuuga

SEQ ID NO: 81504 - RNA, 19 nt, Homo sapiens
  misc_RNA (1)...(19): siRNA sense strand
caaauuuucugccuacauc

SEQ ID NO: 81505 - RNA, 19 nt, Homo sapiens
  misc_RNA (1)...(19): siRNA sense strand
ccugaaagcccugaagguu

SEQ ID NO: 81506 - RNA, 19 nt, Homo sapiens
  misc_RNA (1)...(19): siRNA sense strand
gaacaaccgcaggucgaau

SEQ ID NO: 81507 - RNA, 19 nt, Homo sapiens
  misc_RNA (1)...(19): siRNA sense strand
ccuaugagcaaguggcaaa

SEQ ID NO: 81508 - RNA, 19 nt, Homo sapiens
  misc_RNA (1)...(19): siRNA sense strand
aaccgcaggucgaauuguu

SEQ ID NO: 81509 - RNA, 19 nt, Homo sapiens
  misc_RNA (1)...(19): siRNA sense strand
gaugaaaccagugcugaag

SEQ ID NO: 81510 - RNA, 19 nt, Homo sapiens
  misc_RNA (1)...(19): siRNA sense strand
gcuuccaccuguccagaug

SEQ ID NO: 81511 - RNA, 19 nt, Homo sapiens
  misc_RNA (1)...(19): siRNA sense strand
caaacccagcacucaauga

SEQ ID NO: 81512 - RNA, 19 nt, Homo sapiens
  misc_RNA (1)...(19): siRNA sense strand
caaaguuacacauaguaca

SEQ ID NO: 81513 - RNA, 19 nt, Homo sapiens
  misc_RNA (1)...(19): siRNA sense strand
uaccaccguugacaccaaa

SEQ ID NO: 81514 - RNA, 19 nt, Homo sapiens
  misc_RNA (1)...(19): siRNA sense strand
caggugguguguaagaagu

SEQ ID NO: 81515 - RNA, 19 nt, Homo sapiens
  misc_RNA (1)...(19): siRNA sense strand
gaaaccagugcugaagaug

SEQ ID NO: 81516 - RNA, 19 nt, Homo sapiens
  misc_RNA (1)...(19): siRNA sense strand
acccagcacucaaugacaa

SEQ ID NO: 81517 - RNA, 19 nt, Homo sapiens
  misc_RNA (1)...(19): siRNA sense strand
cacagacaccaacaagauu

SEQ ID NO: 81518 - RNA, 19 nt, Homo sapiens
  misc_RNA (1)...(19): siRNA sense strand
acagacaccaacaagauug

SEQ ID NO: 81519 - RNA, 19 nt, Homo sapiens
  misc_RNA (1)...(19): siRNA sense strand
caagauugaggaauuucug

SEQ ID NO: 81520 - RNA, 19 nt, Homo sapiens
  misc_RNA (1)...(19): siRNA sense strand
ccagaagaaguggaugaaa

SEQ ID NO: 81521 - RNA, 19 nt, Homo sapiens
  misc_RNA (1)...(19): siRNA sense strand
ugccaaaguuacacauagu

SEQ ID NO: 81522 - RNA, 19 nt, Homo sapiens
  misc_RNA (1)...(19): siRNA sense strand
uugccaaaguuacacauag

SEQ ID NO: 81523 - RNA, 19 nt, Homo sapiens
  misc_RNA (1)...(19): siRNA sense strand
uuaccaccguugacaccaa

SEQ ID NO: 81524 - RNA, 19 nt, Homo sapiens
  misc_RNA (1)...(19): siRNA sense strand
ucaaacccagcacucaaug

SEQ ID NO: 81525 - RNA, 19 nt, Homo sapiens
  misc_RNA (1)...(19): siRNA sense strand
guugccaaaguuacacaua

SEQ ID NO: 81526 - RNA, 19 nt, Homo sapiens
  misc_RNA (1)...(19): siRNA sense strand
ugaaaucguuagcaccuua

SEQ ID NO: 81527 - RNA, 19 nt, Homo sapiens
  misc_RNA (1)...(19): siRNA sense strand
ggagaugccuacuaugaca

SEQ ID NO: 81528 - RNA, 19 nt, Homo sapiens
  misc_RNA (1)...(19): siRNA sense strand
gaagguaccacuccucaga

SEQ ID NO: 81529 - RNA, 19 nt, Homo sapiens
  misc_RNA (1)...(19): siRNA sense strand
ggaguuaccgugaacacua

SEQ ID NO: 81530 - RNA, 19 nt, Homo sapiens
  misc_RNA (1)...(19): siRNA sense strand
gcuacagacgcaacgauua

SEQ ID NO: 81531 - RNA, 19 nt, Homo sapiens
  misc_RNA (1)...(19): siRNA sense strand
gaguuaccgugaacacuau

SEQ ID NO: 81532 - RNA, 19 nt, Homo sapiens
  misc_RNA (1)...(19): siRNA sense strand
agaagucgcuccuggucaa

SEQ ID NO: 81533 - RNA, 19 nt, Homo sapiens
  misc_RNA (1)...(19): siRNA sense strand
aggcgcagccggacauuua

SEQ ID NO: 81534 - RNA, 19 nt, Homo sapiens
  misc_RNA (1)...(19): siRNA sense strand
aagcauaagcgacgaagaa

SEQ ID NO: 81535 - RNA, 19 nt, Homo sapiens
  misc_RNA (1)...(19): siRNA sense strand
gacacagacuaucggcauu

SEQ ID NO: 81536 - RNA, 19 nt, Homo sapiens
  misc_RNA (1)...(19): siRNA sense strand
cuacagacgcaacgauuau

SEQ ID NO: 81537 - RNA, 19 nt, Homo sapiens
  misc_RNA (1)...(19): siRNA sense strand
gagaggacagcuaccaugu

SEQ ID NO: 81538 - RNA, 19 nt, Homo sapiens
  misc_RNA (1)...(19): siRNA sense strand
cauaagcgacgaagaaguc

SEQ ID NO: 81539 - RNA, 19 nt, Homo sapiens
  misc_RNA (1)...(19): siRNA sense strand
ucucgaagcaguuaugaug

SEQ ID NO: 81540 - RNA, 19 nt, Homo sapiens
  misc_RNA (1)...(19): siRNA sense strand
ucgaagcaguuaugaugau

SEQ ID NO: 81541 - RNA, 19 nt, Homo sapiens
  misc_RNA (1)...(19): siRNA sense strand
cagacuaucggcauuccua

SEQ ID NO: 81542 - RNA, 19 nt, Homo sapiens
  misc_RNA (1)...(19): siRNA sense strand
acauuuagccgcucaucuu

SEQ ID NO: 81543 - RNA, 19 nt, Homo sapiens
  misc_RNA (1)...(19): siRNA sense strand
uaccauguccguucucgaa

SEQ ID NO: 81544 - RNA, 19 nt, Homo sapiens
  misc_RNA (1)...(19): siRNA sense strand
cgaagcaguuaugaugauc

SEQ ID NO: 81545 - RNA, 19 nt, Homo sapiens
  misc_RNA (1)...(19): siRNA sense strand
gaauaucagcgggagaaca

SEQ ID NO: 81546 - RNA, 19 nt, Homo sapiens
  misc_RNA (1)...(19): siRNA sense strand
agucgcuccuggucaagua

SEQ ID NO: 81547 - RNA, 19 nt, Homo sapiens
  misc_RNA (1)...(19): siRNA sense strand
ggggagaugccuacuauga

SEQ ID NO: 81548 - RNA, 19 nt, Homo sapiens
  misc_RNA (1)...(19): siRNA sense strand
gaaaucguuagcaccuuag

SEQ ID NO: 81549 - RNA, 19 nt, Homo sapiens
  misc_RNA (1)...(19): siRNA sense strand
cagcuaccauguccguucu

SEQ ID NO: 81550 - RNA, 19 nt, Homo sapiens
  misc_RNA (1)...(19): siRNA sense strand
acuaucggcauuccuauga

SEQ ID NO: 81551 - RNA, 19 nt, Homo sapiens
  misc_RNA (1)...(19): siRNA sense strand
gcauaagcgacgaagaagu

SEQ ID NO: 81552 - RNA, 19 nt, Homo sapiens
  misc_RNA (1)...(19): siRNA sense strand
cuacuaugacacagacuau

SEQ ID NO: 81553 - RNA, 19 nt, Homo sapiens
  misc_RNA (1)...(19): siRNA sense strand
cuaucggcauuccuaugaa

SEQ ID NO: 81554 - RNA, 19 nt, Homo sapiens
  misc_RNA (1)...(19): siRNA sense strand
gaaagacccugacaacaag

SEQ ID NO: 81555 - RNA, 19 nt, Homo sapiens
  misc_RNA (1)...(19): siRNA sense strand
uuaagaauguggagaagua

SEQ ID NO: 81556 - RNA, 19 nt, Homo sapiens
  misc_RNA (1)...(19): siRNA sense strand
gauaacaagcugacacaua

SEQ ID NO: 81557 - RNA, 19 nt, Homo sapiens
  misc_RNA (1)...(19): siRNA sense strand
ugaaaucguuagcaccuua

SEQ ID NO: 81558 - RNA, 19 nt, Homo sapiens
  misc_RNA (1)...(19): siRNA sense strand
ggaagcagcucgacuugag

SEQ ID NO: 81559 - RNA, 19 nt, Homo sapiens
  misc_RNA (1)...(19): siRNA sense strand
ucaaguuccuccaugauaa

SEQ ID NO: 81560 - RNA, 19 nt, Homo sapiens
  misc_RNA (1)...(19): siRNA sense strand
ggagaugccuacuaugaca

SEQ ID NO: 81561 - RNA, 19 nt, Homo sapiens
  misc_RNA (1)...(19): siRNA sense strand
ccacauguguaucuccuuu

SEQ ID NO: 81562 - RNA, 19 nt, Homo sapiens
  misc_RNA (1)...(19): siRNA sense strand
gaagguaccacuccucaga

SEQ ID NO: 81563 - RNA, 19 nt, Homo sapiens
  misc_RNA (1)...(19): siRNA sense strand
ggaguuaccgugaacacua

SEQ ID NO: 81564 - RNA, 19 nt, Homo sapiens
  misc_RNA (1)...(19): siRNA sense strand
acuaugagcucaccuacaa

SEQ ID NO: 81565 - RNA, 19 nt, Homo sapiens
  misc_RNA (1)...(19): siRNA sense strand
agaaagacccugacaacaa

SEQ ID NO: 81566 - RNA, 19 nt, Homo sapiens
  misc_RNA (1)...(19): siRNA sense strand
caccuucgauuuccucaaa

SEQ ID NO: 81567 - RNA, 19 nt, Homo sapiens
  misc_RNA (1)...(19): siRNA sense strand
agacaagaaagcagaaaua

SEQ ID NO: 81568 - RNA, 19 nt, Homo sapiens
  misc_RNA (1)...(19): siRNA sense strand
caccagaagucauccuuga

SEQ ID NO: 81569 - RNA, 19 nt, Homo sapiens
  misc_RNA (1)...(19): siRNA sense strand
gaucaacgugcuagagaaa

SEQ ID NO: 81570 - RNA, 19 nt, Homo sapiens
  misc_RNA (1)...(19): siRNA sense strand
gcuacagacgcaacgauua

SEQ ID NO: 81571 - RNA, 19 nt, Homo sapiens
  misc_RNA (1)...(19): siRNA sense strand
aaagcaugcuagaguauga

SEQ ID NO: 81572 - RNA, 19 nt, Homo sapiens
  misc_RNA (1)...(19): siRNA sense strand
gcucuucgaucugauugaa

SEQ ID NO: 81573 - RNA, 19 nt, Homo sapiens
  misc_RNA (1)...(19): siRNA sense strand
gagagcaucuagccaugau

SEQ ID NO: 81574 - RNA, 19 nt, Homo sapiens
  misc_RNA (1)...(19): siRNA sense strand
gaguuaccgugaacacuau

SEQ ID NO: 81575 - RNA, 19 nt, Homo sapiens
  misc_RNA (1)...(19): siRNA sense strand
gaaagacaagaaagcagaa

SEQ ID NO: 81576 - RNA, 19 nt, Homo sapiens
  misc_RNA (1)...(19): siRNA sense strand
ccuacaaccuagagaagaa

SEQ ID NO: 81577 - RNA, 19 nt, Homo sapiens
  misc_RNA (1)...(19): siRNA sense strand
caaggaagcagcucgacuu

SEQ ID NO: 81578 - RNA, 19 nt, Homo sapiens
  misc_RNA (1)...(19): siRNA sense strand
auaacaagcugacacauac

SEQ ID NO: 81579 - RNA, 19 nt, Homo sapiens
  misc_RNA (1)...(19): siRNA sense strand
agaagucgcuccuggucaa

SEQ ID NO: 81580 - RNA, 19 nt, Homo sapiens
  misc_RNA (1)...(19): siRNA sense strand
gagaucaacgugcuagaga

SEQ ID NO: 81581 - RNA, 19 nt, Homo sapiens
  misc_RNA (1)...(19): siRNA sense strand
caccagcucuucgaucuga

SEQ ID NO: 81582 - RNA, 19 nt, Homo sapiens
  misc_RNA (1)...(19): siRNA sense strand
gacaagaaagcagaaauau

SEQ ID NO: 81583 - RNA, 19 nt, Homo sapiens
  misc_RNA (1)...(19): siRNA sense strand
gcugcaucaucuuugaaua

SEQ ID NO: 81584 - RNA, 19 nt, Homo sapiens
  misc_RNA (1)...(19): siRNA sense strand
gugccaggcugucaaguuc

SEQ ID NO: 81585 - RNA, 19 nt, Homo sapiens
  misc_RNA (1)...(19): siRNA sense strand
gaccuucggccgaguugua

SEQ ID NO: 81586 - RNA, 19 nt, Homo sapiens
  misc_RNA (1)...(19): siRNA sense strand
uugaaagcaugcuagagua

SEQ ID NO: 81587 - RNA, 19 nt, Homo sapiens
  misc_RNA (1)...(19): siRNA sense strand
cagaagucauccuugaguu

SEQ ID NO: 81588 - RNA, 19 nt, Homo sapiens
  misc_RNA (1)...(19): siRNA sense strand
gaguauaggcugcaucauc

SEQ ID NO: 81589 - RNA, 19 nt, Homo sapiens
  misc_RNA (1)...(19): siRNA sense strand
ccagacccaugacaacaga

SEQ ID NO: 81590 - RNA, 19 nt, Homo sapiens
  misc_RNA (1)...(19): siRNA sense strand
aggcgcagccggacauuua

SEQ ID NO: 81591 - RNA, 19 nt, Homo sapiens
  misc_RNA (1)...(19): siRNA sense strand
gacacagacuaucggcauu

SEQ ID NO: 81592 - RNA, 19 nt, Homo sapiens
  misc_RNA (1)...(19): siRNA sense strand
gaaagcaugcuagaguaug

SEQ ID NO: 81593 - RNA, 19 nt, Homo sapiens
  misc_RNA (1)...(19): siRNA sense strand
ggccuuagcaccuucgauu

SEQ ID NO: 81594 - RNA, 19 nt, Homo sapiens
  misc_RNA (1)...(19): siRNA sense strand
aagcauaagcgacgaagaa

SEQ ID NO: 81595 - RNA, 19 nt, Homo sapiens
  misc_RNA (1)...(19): siRNA sense strand
cccugaagaucauuaagaa

SEQ ID NO: 81596 - RNA, 19 nt, Homo sapiens
  misc_RNA (1)...(19): siRNA sense strand
gagaugagcgcagugugaa

SEQ ID NO: 81597 - RNA, 19 nt, Homo sapiens
  misc_RNA (1)...(19): siRNA sense strand
gcaucaucuuugaauacua

SEQ ID NO: 81598 - RNA, 19 nt, Homo sapiens
  misc_RNA (1)...(19): siRNA sense strand
gucaaguuccuccaugaua

SEQ ID NO: 81599 - RNA, 19 nt, Homo sapiens
  misc_RNA (1)...(19): siRNA sense strand
ggauugggaugagaacaca

SEQ ID NO: 81600 - RNA, 19 nt, Homo sapiens
  misc_RNA (1)...(19): siRNA sense strand
cuacagacgcaacgauuau

SEQ ID NO: 81601 - RNA, 19 nt, Homo sapiens
  misc_RNA (1)...(19): siRNA sense strand
cgagaugagcgcaguguga

SEQ ID NO: 81602 - RNA, 19 nt, Homo sapiens
  misc_RNA (1)...(19): siRNA sense strand
gagaaagacccugacaaca

SEQ ID NO: 81603 - RNA, 19 nt, Homo sapiens
  misc_RNA (1)...(19): siRNA sense strand
cggccgaguuguacaaugu

SEQ ID NO: 81604 - RNA, 19 nt, Homo sapiens
  misc_RNA (1)...(19): siRNA sense strand
ccucaagccugaaaauauu

SEQ ID NO: 81605 - RNA, 19 nt, Homo sapiens
  misc_RNA (1)...(19): siRNA sense strand
gagaggacagcuaccaugu

SEQ ID NO: 81606 - RNA, 19 nt, Homo sapiens
  misc_RNA (1)...(19): siRNA sense strand
acauguguaucuccuuuga

SEQ ID NO: 81607 - RNA, 19 nt, Homo sapiens
  misc_RNA (1)...(19): siRNA sense strand
cauaagcgacgaagaaguc

SEQ ID NO: 81608 - RNA, 19 nt, Homo sapiens
  misc_RNA (1)...(19): siRNA sense strand
ugugauguguggaguauag

SEQ ID NO: 81609 - RNA, 19 nt, Homo sapiens
  misc_RNA (1)...(19): siRNA sense strand
gaugagcgcagugugaaga

SEQ ID NO: 81610 - RNA, 19 nt, Homo sapiens
  misc_RNA (1)...(19): siRNA sense strand
cgaguugcccugaagauca

SEQ ID NO: 81611 - RNA, 19 nt, Homo sapiens
  misc_RNA (1)...(19): siRNA sense strand
aguauaggcugcaucaucu

SEQ ID NO: 81612 - RNA, 19 nt, Homo sapiens
  misc_RNA (1)...(19): siRNA sense strand
guuugugaauucagacuau

SEQ ID NO: 81613 - RNA, 19 nt, Homo sapiens
  misc_RNA (1)...(19): siRNA sense strand
ucucgaagcaguuaugaug

SEQ ID NO: 81614 - RNA, 19 nt, Homo sapiens
  misc_RNA (1)...(19): siRNA sense strand
gaguugcccugaagaucau

SEQ ID NO: 81615 - RNA, 19 nt, Homo sapiens
  misc_RNA (1)...(19): siRNA sense strand
gcccugaagaucauuaaga

SEQ ID NO: 81616 - RNA, 19 nt, Homo sapiens
  misc_RNA (1)...(19): siRNA sense strand
gaaaaucaaugagaaagac

SEQ ID NO: 81617 - RNA, 19 nt, Homo sapiens
  misc_RNA (1)...(19): siRNA sense strand
cagacuaucggcauuccua

SEQ ID NO: 81618 - RNA, 19 nt, Homo sapiens
  misc_RNA (1)...(19): siRNA sense strand
ucgaagcaguuaugaugau

SEQ ID NO: 81619 - RNA, 19 nt, Homo sapiens
  misc_RNA (1)...(19): siRNA sense strand
caccauagcaccauugucu

SEQ ID NO: 81620 - RNA, 19 nt, Homo sapiens
  misc_RNA (1)...(19): siRNA sense strand
cacaucagcugggcgcuau

SEQ ID NO: 81621 - RNA, 19 nt, Homo sapiens
  misc_RNA (1)...(19): siRNA sense strand
ugagaaagacccugacaac

SEQ ID NO: 81622 - RNA, 19 nt, Homo sapiens
  misc_RNA (1)...(19): siRNA sense strand
acauuuagccgcucaucuu

SEQ ID NO: 81623 - RNA, 19 nt, Homo sapiens
  misc_RNA (1)...(19): siRNA sense strand
uaggcugcaucaucuuuga

SEQ ID NO: 81624 - RNA, 19 nt, Homo sapiens
  misc_RNA (1)...(19): siRNA sense strand
gaagcagcucgacuugaga

SEQ ID NO: 81625 - RNA, 19 nt, Homo sapiens
  misc_RNA (1)...(19): siRNA sense strand
ucgauuuccucaaagacaa

SEQ ID NO: 81626 - RNA, 19 nt, Homo sapiens
  misc_RNA (1)...(19): siRNA sense strand
ugaaagcaugcuagaguau

SEQ ID NO: 81627 - RNA, 19 nt, Homo sapiens
  misc_RNA (1)...(19): siRNA sense strand
uaccauguccguucucgaa

SEQ ID NO: 81628 - RNA, 19 nt, Homo sapiens
  misc_RNA (1)...(19): siRNA sense strand
cgaguuguacaauguguug

SEQ ID NO: 81629 - RNA, 19 nt, Homo sapiens
  misc_RNA (1)...(19): siRNA sense strand
uauaggcugcaucaucuuu

SEQ ID NO: 81630 - RNA, 19 nt, Homo sapiens
  misc_RNA (1)...(19): siRNA sense strand
ccagaagucauccuugagu

SEQ ID NO: 81631 - RNA, 19 nt, Homo sapiens
  misc_RNA (1)...(19): siRNA sense strand
ccucaaagacaacaacuac

SEQ ID NO: 81632 - RNA, 19 nt, Homo sapiens
  misc_RNA (1)...(19): siRNA sense strand
agaucaacgugcuagagaa

SEQ ID NO: 81633 - RNA, 19 nt, Homo sapiens
  misc_RNA (1)...(19): siRNA sense strand
gaauaucagcgggagaaca

SEQ ID NO: 81634 - RNA, 19 nt, Homo sapiens
  misc_RNA (1)...(19): siRNA sense strand
agucgcuccuggucaagua

SEQ ID NO: 81635 - RNA, 19 nt, Homo sapiens
  misc_RNA (1)...(19): siRNA sense strand
gacaacagagagcaucuag

SEQ ID NO: 81636 - RNA, 19 nt, Homo sapiens
  misc_RNA (1)...(19): siRNA sense strand
gugccaccuuugaccauga

SEQ ID NO: 81637 - RNA, 19 nt, Homo sapiens
  misc_RNA (1)...(19): siRNA sense strand
cgaagcaguuaugaugauc

SEQ ID NO: 81638 - RNA, 19 nt, Homo sapiens
  misc_RNA (1)...(19): siRNA sense strand
ugagcucaccuacaaccua

SEQ ID NO: 81639 - RNA, 19 nt, Homo sapiens
  misc_RNA (1)...(19): siRNA sense strand
uagagaagaagcgagauga

SEQ ID NO: 81640 - RNA, 19 nt, Homo sapiens
  misc_RNA (1)...(19): siRNA sense strand
gagcaccauagcaccauug

SEQ ID NO: 81641 - RNA, 19 nt, Homo sapiens
  misc_RNA (1)...(19): siRNA sense strand
cggcugaccuugggugaag

SEQ ID NO: 81642 - RNA, 19 nt, Homo sapiens
  misc_RNA (1)...(19): siRNA sense strand
gaaaucguuagcaccuuag

SEQ ID NO: 81643 - RNA, 19 nt, Homo sapiens
  misc_RNA (1)...(19): siRNA sense strand
ggggagaugccuacuauga

SEQ ID NO: 81644 - RNA, 19 nt, Homo sapiens
  misc_RNA (1)...(19): siRNA sense strand
agaagucauccuugaguug

SEQ ID NO: 81645 - RNA, 19 nt, Homo sapiens
  misc_RNA (1)...(19): siRNA sense strand
ucaccuacaaccuagagaa

SEQ ID NO: 81646 - RNA, 19 nt, Homo sapiens
  misc_RNA (1)...(19): siRNA sense strand
guuccuccaugauaacaag

SEQ ID NO: 81647 - RNA, 19 nt, Homo sapiens
  misc_RNA (1)...(19): siRNA sense strand
gcagcucgacuugagauca

SEQ ID NO: 81648 - RNA, 19 nt, Homo sapiens
  misc_RNA (1)...(19): siRNA sense strand
cagcuaccauguccguucu

SEQ ID NO: 81649 - RNA, 19 nt, Homo sapiens
  misc_RNA (1)...(19): siRNA sense strand
acuaucggcauuccuauga

SEQ ID NO: 81650 - RNA, 19 nt, Homo sapiens
  misc_RNA (1)...(19): siRNA sense strand
acaacaagaaccucugugu

SEQ ID NO: 81651 - RNA, 19 nt, Homo sapiens
  misc_RNA (1)...(19): siRNA sense strand
gcauaagcgacgaagaagu

SEQ ID NO: 81652 - RNA, 19 nt, Homo sapiens
  misc_RNA (1)...(19): siRNA sense strand
cuacuaugacacagacuau

SEQ ID NO: 81653 - RNA, 19 nt, Homo sapiens
  misc_RNA (1)...(19): siRNA sense strand
ggaacaccaccagcucuuc

SEQ ID NO: 81654 - RNA, 19 nt, Homo sapiens
  misc_RNA (1)...(19): siRNA sense strand
gagcggagcccauccuuug

SEQ ID NO: 81655 - RNA, 19 nt, Homo sapiens
  misc_RNA (1)...(19): siRNA sense strand
ggacuacuauggaccuuca

SEQ ID NO: 81656 - RNA, 19 nt, Homo sapiens
  misc_RNA (1)...(19): siRNA sense strand
gcaaggugguggagugcuu

SEQ ID NO: 81657 - RNA, 19 nt, Homo sapiens
  misc_RNA (1)...(19): siRNA sense strand
gaagaucucgguccagaag

SEQ ID NO: 81658 - RNA, 19 nt, Homo sapiens
  misc_RNA (1)...(19): siRNA sense strand
uaccugagcuaccgaugga

SEQ ID NO: 81659 - RNA, 19 nt, Homo sapiens
  misc_RNA (1)...(19): siRNA sense strand
gaagggagacugcgauacc

SEQ ID NO: 81660 - RNA, 19 nt, Homo sapiens
  misc_RNA (1)...(19): siRNA sense strand
gccgugacagcgauacaua

SEQ ID NO: 81661 - RNA, 19 nt, Homo sapiens
  misc_RNA (1)...(19): siRNA sense strand
cuauggaccuucacguucu

SEQ ID NO: 81662 - RNA, 19 nt, Homo sapiens
  misc_RNA (1)...(19): siRNA sense strand
gcccaccacugccacaaac

SEQ ID NO: 81663 - RNA, 19 nt, Homo sapiens
  misc_RNA (1)...(19): siRNA sense strand
auacauaccggugugaaga

SEQ ID NO: 81664 - RNA, 19 nt, Homo sapiens
  misc_RNA (1)...(19): siRNA sense strand
gauacauaccggugugaag

SEQ ID NO: 81665 - RNA, 19 nt, Homo sapiens
  misc_RNA (1)...(19): siRNA sense strand
gcggagcccauccuuugga

SEQ ID NO: 81666 - RNA, 19 nt, Homo sapiens
  misc_RNA (1)...(19): siRNA sense strand
ccaggaagcagaaauauuu

SEQ ID NO: 81667 - RNA, 19 nt, Homo sapiens
  misc_RNA (1)...(19): siRNA sense strand
agaauaacuuccagccuua

SEQ ID NO: 81668 - RNA, 19 nt, Homo sapiens
  misc_RNA (1)...(19): siRNA sense strand
gcaagaacaccuuugaguu

SEQ ID NO: 81669 - RNA, 19 nt, Homo sapiens
  misc_RNA (1)...(19): siRNA sense strand
gagcggagcccauccuuug

SEQ ID NO: 81670 - RNA, 19 nt, Homo sapiens
  misc_RNA (1)...(19): siRNA sense strand
ggacuacuauggaccuuca

SEQ ID NO: 81671 - RNA, 19 nt, Homo sapiens
  misc_RNA (1)...(19): siRNA sense strand
ugaggaggauguuagaauu

SEQ ID NO: 81672 - RNA, 19 nt, Homo sapiens
  misc_RNA (1)...(19): siRNA sense strand
gagaaucagcugacccaua

SEQ ID NO: 81673 - RNA, 19 nt, Homo sapiens
  misc_RNA (1)...(19): siRNA sense strand
uugaaacccucuacaauga

SEQ ID NO: 81674 - RNA, 19 nt, Homo sapiens
  misc_RNA (1)...(19): siRNA sense strand
gaggagaagucagugaaga

SEQ ID NO: 81675 - RNA, 19 nt, Homo sapiens
  misc_RNA (1)...(19): siRNA sense strand
guaccaggaagcagaaaua

SEQ ID NO: 81676 - RNA, 19 nt, Homo sapiens
  misc_RNA (1)...(19): siRNA sense strand
gcaaggugguggagugcuu

SEQ ID NO: 81677 - RNA, 19 nt, Homo sapiens
  misc_RNA (1)...(19): siRNA sense strand
ggaggauguuagaauuuga

SEQ ID NO: 81678 - RNA, 19 nt, Homo sapiens
  misc_RNA (1)...(19): siRNA sense strand
agaaucagcugacccauac

SEQ ID NO: 81679 - RNA, 19 nt, Homo sapiens
  misc_RNA (1)...(19): siRNA sense strand
gaagaucucgguccagaag

SEQ ID NO: 81680 - RNA, 19 nt, Homo sapiens
  misc_RNA (1)...(19): siRNA sense strand
gaggaggauguuagaauuu

SEQ ID NO: 81681 - RNA, 19 nt, Homo sapiens
  misc_RNA (1)...(19): siRNA sense strand
ucaaggagaaggacaaaga

SEQ ID NO: 81682 - RNA, 19 nt, Homo sapiens
  misc_RNA (1)...(19): siRNA sense strand
agaguuacaugcuccaaga

SEQ ID NO: 81683 - RNA, 19 nt, Homo sapiens
  misc_RNA (1)...(19): siRNA sense strand
gcugcauucucuuugagua

SEQ ID NO: 81684 - RNA, 19 nt, Homo sapiens
  misc_RNA (1)...(19): siRNA sense strand
gaaaucaacgugcucaaaa

SEQ ID NO: 81685 - RNA, 19 nt, Homo sapiens
  misc_RNA (1)...(19): siRNA sense strand
guuugugaauucugaguuu

SEQ ID NO: 81686 - RNA, 19 nt, Homo sapiens
  misc_RNA (1)...(19): siRNA sense strand
gagcaccacaccaccauug

SEQ ID NO: 81687 - RNA, 19 nt, Homo sapiens
  misc_RNA (1)...(19): siRNA sense strand
gccgguaugugaaggagaa

SEQ ID NO: 81688 - RNA, 19 nt, Homo sapiens
  misc_RNA (1)...(19): siRNA sense strand
caacuuccacggucacaug

SEQ ID NO: 81689 - RNA, 19 nt, Homo sapiens
  misc_RNA (1)...(19): siRNA sense strand
cgccugaggugauccuuga

SEQ ID NO: 81690 - RNA, 19 nt, Homo sapiens
  misc_RNA (1)...(19): siRNA sense strand
gaacugcaaaccucugaag

SEQ ID NO: 81691 - RNA, 19 nt, Homo sapiens
  misc_RNA (1)...(19): siRNA sense strand
gcagcuguuugaccugaug

SEQ ID NO: 81692 - RNA, 19 nt, Homo sapiens
  misc_RNA (1)...(19): siRNA sense strand
uaccugagcuaccgaugga

SEQ ID NO: 81693 - RNA, 19 nt, Homo sapiens
  misc_RNA (1)...(19): siRNA sense strand
caaggagaaggacaaagaa

SEQ ID NO: 81694 - RNA, 19 nt, Homo sapiens
  misc_RNA (1)...(19): siRNA sense strand
gcauucucuuugaguacua

SEQ ID NO: 81695 - RNA, 19 nt, Homo sapiens
  misc_RNA (1)...(19): siRNA sense strand
gcugacccauacagacuug

SEQ ID NO: 81696 - RNA, 19 nt, Homo sapiens
  misc_RNA (1)...(19): siRNA sense strand
gagaacugcaaaccucuga

SEQ ID NO: 81697 - RNA, 19 nt, Homo sapiens
  misc_RNA (1)...(19): siRNA sense strand
caagagcugugaggagaag

SEQ ID NO: 81698 - RNA, 19 nt, Homo sapiens
  misc_RNA (1)...(19): siRNA sense strand
ggacaaagaaaacaaguuc

SEQ ID NO: 81699 - RNA, 19 nt, Homo sapiens
  misc_RNA (1)...(19): siRNA sense strand
ugugacgucuggagcauug

SEQ ID NO: 81700 - RNA, 19 nt, Homo sapiens
  misc_RNA (1)...(19): siRNA sense strand
ucacaugugcaucgccuuu

SEQ ID NO: 81701 - RNA, 19 nt, Homo sapiens
  misc_RNA (1)...(19): siRNA sense strand
gggaugagaacagcucuga

SEQ ID NO: 81702 - RNA, 19 nt, Homo sapiens
  misc_RNA (1)...(19): siRNA sense strand
ggcaagaacaccuuugagu

SEQ ID NO: 81703 - RNA, 19 nt, Homo sapiens
  misc_RNA (1)...(19): siRNA sense strand
aggaggauguuagaauuug

SEQ ID NO: 81704 - RNA, 19 nt, Homo sapiens
  misc_RNA (1)...(19): siRNA sense strand
guuccugugugucuugaug

SEQ ID NO: 81705 - RNA, 19 nt, Homo sapiens
  misc_RNA (1)...(19): siRNA sense strand
gaagggagacugcgauacc

SEQ ID NO: 81706 - RNA, 19 nt, Homo sapiens
  misc_RNA (1)...(19): siRNA sense strand
gccgugacagcgauacaua

SEQ ID NO: 81707 - RNA, 19 nt, Homo sapiens
  misc_RNA (1)...(19): siRNA sense strand
acaugugcaucgccuuuga

SEQ ID NO: 81708 - RNA, 19 nt, Homo sapiens
  misc_RNA (1)...(19): siRNA sense strand
agaaaucaacgugcucaaa

SEQ ID NO: 81709 - RNA, 19 nt, Homo sapiens
  misc_RNA (1)...(19): siRNA sense strand
gugccacauuugaccauga

SEQ ID NO: 81710 - RNA, 19 nt, Homo sapiens
  misc_RNA (1)...(19): siRNA sense strand
cuauggaccuucacguucu

SEQ ID NO: 81711 - RNA, 19 nt, Homo sapiens
  misc_RNA (1)...(19): siRNA sense strand
cauccgaguggcugacuuu

SEQ ID NO: 81712 - RNA, 19 nt, Homo sapiens
  misc_RNA (1)...(19): siRNA sense strand
cugccacgcccuuagauuu

SEQ ID NO: 81713 - RNA, 19 nt, Homo sapiens
  misc_RNA (1)...(19): siRNA sense strand
gcccaucccaucacacaug

SEQ ID NO: 81714 - RNA, 19 nt, Homo sapiens
  misc_RNA (1)...(19): siRNA sense strand
uuugaaacccucuacaaug

SEQ ID NO: 81715 - RNA, 19 nt, Homo sapiens
  misc_RNA (1)...(19): siRNA sense strand
gugaggagaagucagugaa

SEQ ID NO: 81716 - RNA, 19 nt, Homo sapiens
  misc_RNA (1)...(19): siRNA sense strand
gaccugaugaggaggaugu

SEQ ID NO: 81717 - RNA, 19 nt, Homo sapiens
  misc_RNA (1)...(19): siRNA sense strand
gcccaccacugccacaaac

SEQ ID NO: 81718 - RNA, 19 nt, Homo sapiens
  misc_RNA (1)...(19): siRNA sense strand
gaaggagaacugcaaaccu

SEQ ID NO: 81719 - RNA, 19 nt, Homo sapiens
  misc_RNA (1)...(19): siRNA sense strand
gaugauggagaagauccua

SEQ ID NO: 81720 - RNA, 19 nt, Homo sapiens
  misc_RNA (1)...(19): siRNA sense strand
gcucugccacgcccuuaga

SEQ ID NO: 81721 - RNA, 19 nt, Homo sapiens
  misc_RNA (1)...(19): siRNA sense strand
gagaagucagugaagaaca

SEQ ID NO: 81722 - RNA, 19 nt, Homo sapiens
  misc_RNA (1)...(19): siRNA sense strand
ugugaauucugaguuugaa

SEQ ID NO: 81723 - RNA, 19 nt, Homo sapiens
  misc_RNA (1)...(19): siRNA sense strand
aaaacaaguuccugugugu

SEQ ID NO: 81724 - RNA, 19 nt, Homo sapiens
  misc_RNA (1)...(19): siRNA sense strand
gagcacgugcagcuguuug

SEQ ID NO: 81725 - RNA, 19 nt, Homo sapiens
  misc_RNA (1)...(19): siRNA sense strand
auacauaccggugugaaga

SEQ ID NO: 81726 - RNA, 19 nt, Homo sapiens
  misc_RNA (1)...(19): siRNA sense strand
gcugugaggagaagucagu

SEQ ID NO: 81727 - RNA, 19 nt, Homo sapiens
  misc_RNA (1)...(19): siRNA sense strand
cccaucccaucacacauga

SEQ ID NO: 81728 - RNA, 19 nt, Homo sapiens
  misc_RNA (1)...(19): siRNA sense strand
agcauuggcugcauucucu

SEQ ID NO: 81729 - RNA, 19 nt, Homo sapiens
  misc_RNA (1)...(19): siRNA sense strand
gagcauuggcugcauucuc

SEQ ID NO: 81730 - RNA, 19 nt, Homo sapiens
  misc_RNA (1)...(19): siRNA sense strand
ggagaagucagugaagaac

SEQ ID NO: 81731 - RNA, 19 nt, Homo sapiens
  misc_RNA (1)...(19): siRNA sense strand
gacccauacagacuugaaa

SEQ ID NO: 81732 - RNA, 19 nt, Homo sapiens
  misc_RNA (1)...(19): siRNA sense strand
agaagucagugaagaacac

SEQ ID NO: 81733 - RNA, 19 nt, Homo sapiens
  misc_RNA (1)...(19): siRNA sense strand
gcggagcccauccuuugga

SEQ ID NO: 81734 - RNA, 19 nt, Homo sapiens
  misc_RNA (1)...(19): siRNA sense strand
ccgcaacccaagcagauga

SEQ ID NO: 81735 - RNA, 19 nt, Homo sapiens
  misc_RNA (1)...(19): siRNA sense strand
gaagaguuacaugcuccaa

SEQ ID NO: 81736 - RNA, 19 nt, Homo sapiens
  misc_RNA (1)...(19): siRNA sense strand
gauacauaccggugugaag

SEQ ID NO: 81737 - RNA, 19 nt, Homo sapiens
  misc_RNA (1)...(19): siRNA sense strand
gcauccgaguggcugacuu

SEQ ID NO: 81738 - RNA, 19 nt, Homo sapiens
  misc_RNA (1)...(19): siRNA sense strand
gaugaggaggauguuagaa

SEQ ID NO: 81739 - RNA, 19 nt, Homo sapiens
  misc_RNA (1)...(19): siRNA sense strand
ccacagaguuugacuaugg

SEQ ID NO: 81740 - RNA, 19 nt, Homo sapiens
  misc_RNA (1)...(19): siRNA sense strand
acacagggauuauaaagau

SEQ ID NO: 81741 - RNA, 19 nt, Homo sapiens
  misc_RNA (1)...(19): siRNA sense strand
caaaugagaagaaauccaa

SEQ ID NO: 81742 - RNA, 19 nt, Homo sapiens
  misc_RNA (1)...(19): siRNA sense strand
ggaccuggcugugcaagug

SEQ ID NO: 81743 - RNA, 19 nt, Homo sapiens
  misc_RNA (1)...(19): siRNA sense strand
gagcagagcagacauuugg

SEQ ID NO: 81744 - RNA, 19 nt, Homo sapiens
  misc_RNA (1)...(19): siRNA sense strand
ggugagagguuccggaagu

SEQ ID NO: 81745 - RNA, 19 nt, Homo sapiens
  misc_RNA (1)...(19): siRNA sense strand
gaaccucuuugggcuggua

SEQ ID NO: 81746 - RNA, 19 nt, Homo sapiens
  misc_RNA (1)...(19): siRNA sense strand
gaccugcucuuccuguuca

SEQ ID NO: 81747 - RNA, 19 nt, Homo sapiens
  misc_RNA (1)...(19): siRNA sense strand
ucaccagcaucaucauuug

SEQ ID NO: 81748 - RNA, 19 nt, Homo sapiens
  misc_RNA (1)...(19): siRNA sense strand
gaccacagaguuugacuau

SEQ ID NO: 81749 - RNA, 19 nt, Homo sapiens
  misc_RNA (1)...(19): siRNA sense strand
gggcugguauugccuuugu

SEQ ID NO: 81750 - RNA, 19 nt, Homo sapiens
  misc_RNA (1)...(19): siRNA sense strand
gaccaaaugagaagaaauc

SEQ ID NO: 81751 - RNA, 19 nt, Homo sapiens
  misc_RNA (1)...(19): siRNA sense strand
aaagcuguccguuugauuu

SEQ ID NO: 81752 - RNA, 19 nt, Homo sapiens
  misc_RNA (1)...(19): siRNA sense strand
ucauuggccugguuggaaa

SEQ ID NO: 81753 - RNA, 19 nt, Homo sapiens
  misc_RNA (1)...(19): siRNA sense strand
ggugaugccauguguaaga

SEQ ID NO: 81754 - RNA, 19 nt, Homo sapiens
  misc_RNA (1)...(19): siRNA sense strand
ugacacgaccacagaguuu

SEQ ID NO: 81755 - RNA, 19 nt, Homo sapiens
  misc_RNA (1)...(19): siRNA sense strand
gugagagguuccggaagua

SEQ ID NO: 81756 - RNA, 19 nt, Homo sapiens
  misc_RNA (1)...(19): siRNA sense strand
gaucuacgccuucguuggu

SEQ ID NO: 81757 - RNA, 19 nt, Homo sapiens
  misc_RNA (1)...(19): siRNA sense strand
gagaguggaagcuguuuca

SEQ ID NO: 81758 - RNA, 19 nt, Homo sapiens
  misc_RNA (1)...(19): siRNA sense strand
acuacaaguugaaggauga

SEQ ID NO: 81759 - RNA, 19 nt, Homo sapiens
  misc_RNA (1)...(19): siRNA sense strand
cuaagacgaccaaaugaga

SEQ ID NO: 81760 - RNA, 19 nt, Homo sapiens
  misc_RNA (1)...(19): siRNA sense strand
uaagauccucucuggguuu

SEQ ID NO: 81761 - RNA, 19 nt, Homo sapiens
  misc_RNA (1)...(19): siRNA sense strand
uaagacgaccaaaugagaa

SEQ ID NO: 81762 - RNA, 19 nt, Homo sapiens
  misc_RNA (1)...(19): siRNA sense strand
gcaucuaccuccugaaccu

SEQ ID NO: 81763 - RNA, 19 nt, Homo sapiens
  misc_RNA (1)...(19): siRNA sense strand
ccucuguacuccuugguau

SEQ ID NO: 81764 - RNA, 19 nt, Homo sapiens
  misc_RNA (1)...(19): siRNA sense strand
cacgaaagccuacgagagu

SEQ ID NO: 81765 - RNA, 19 nt, Homo sapiens
  misc_RNA (1)...(19): siRNA sense strand
caugccaggcuuauacuuu

SEQ ID NO: 81766 - RNA, 19 nt, Homo sapiens
  misc_RNA (1)...(19): siRNA sense strand
aaacaugaccagcaucuac

SEQ ID NO: 81767 - RNA, 19 nt, Homo sapiens
  misc_RNA (1)...(19): siRNA sense strand
cugcuaagacgaccaaaug

SEQ ID NO: 81768 - RNA, 19 nt, Homo sapiens
  misc_RNA (1)...(19): siRNA sense strand
cacagggauuauaaagauu

SEQ ID NO: 81769 - RNA, 19 nt, Homo sapiens
  misc_RNA (1)...(19): siRNA sense strand
caaacaccacagaggacua

SEQ ID NO: 81770 - RNA, 19 nt, Homo sapiens
  misc_RNA (1)...(19): siRNA sense strand
gcuacacagggauuauaaa

SEQ ID NO: 81771 - RNA, 19 nt, Homo sapiens
  misc_RNA (1)...(19): siRNA sense strand
gcaagugacggaggugauc

SEQ ID NO: 81772 - RNA, 19 nt, Homo sapiens
  misc_RNA (1)...(19): siRNA sense strand
gugaugccauguguaagau

SEQ ID NO: 81773 - RNA, 19 nt, Homo sapiens
  misc_RNA (1)...(19): siRNA sense strand
cuacacagggauuauaaag

SEQ ID NO: 81774 - RNA, 19 nt, Homo sapiens
  misc_RNA (1)...(19): siRNA sense strand
caccugcagccuucacuuu

SEQ ID NO: 81775 - RNA, 19 nt, Homo sapiens
  misc_RNA (1)...(19): siRNA sense strand
uggaucgacuacaaguuga

SEQ ID NO: 81776 - RNA, 19 nt, Homo sapiens
  misc_RNA (1)...(19): siRNA sense strand
cugugcaccugguuaaaug

SEQ ID NO: 81777 - RNA, 19 nt, Homo sapiens
  misc_RNA (1)...(19): siRNA sense strand
ucuguacuccuugguauuu

SEQ ID NO: 81778 - RNA, 19 nt, Homo sapiens
  misc_RNA (1)...(19): siRNA sense strand
gcuaagacgaccaaaugag

SEQ ID NO: 81779 - RNA, 19 nt, Homo sapiens
  misc_RNA (1)...(19): siRNA sense strand
gcugguauugccuuuguug

SEQ ID NO: 81780 - RNA, 19 nt, Homo sapiens
  misc_RNA (1)...(19): siRNA sense strand
gcugugcaccugguuaaau

SEQ ID NO: 81781 - RNA, 19 nt, Homo sapiens
  misc_RNA (1)...(19): siRNA sense strand
cuggaucgacuacaaguug

SEQ ID NO: 81782 - RNA, 19 nt, Homo sapiens
  misc_RNA (1)...(19): siRNA sense strand
aaacaccacagaggacuau

SEQ ID NO: 81783 - RNA, 19 nt, Homo sapiens
  misc_RNA (1)...(19): siRNA sense strand
uuccaagacuuccuguuca

SEQ ID NO: 81784 - RNA, 19 nt, Homo sapiens
  misc_RNA (1)...(19): siRNA sense strand
aauccaaagcuguccguuu

SEQ ID NO: 81785 - RNA, 19 nt, Homo sapiens
  misc_RNA (1)...(19): siRNA sense strand
caucaccagcaucaucauu

SEQ ID NO: 81786 - RNA, 19 nt, Homo sapiens
  misc_RNA (1)...(19): siRNA sense strand
gauccucucuggguuuuau

SEQ ID NO: 81787 - RNA, 19 nt, Homo sapiens
  misc_RNA (1)...(19): siRNA sense strand
gugagcagagcagacauuu

SEQ ID NO: 81788 - RNA, 19 nt, Homo sapiens
  misc_RNA (1)...(19): siRNA sense strand
gacgaccaaaugagaagaa

SEQ ID NO: 81789 - RNA, 19 nt, Homo sapiens
  misc_RNA (1)...(19): siRNA sense strand
gugcaauacaagaggcuaa

SEQ ID NO: 81790 - RNA, 19 nt, Homo sapiens
  misc_RNA (1)...(19): siRNA sense strand
cgaccacagaguuugacua

SEQ ID NO: 81791 - RNA, 19 nt, Homo sapiens
  misc_RNA (1)...(19): siRNA sense strand
acacgaccacagaguuuga

SEQ ID NO: 81792 - RNA, 19 nt, Homo sapiens
  misc_RNA (1)...(19): siRNA sense strand
gagagggucagcuccacau

SEQ ID NO: 81793 - RNA, 19 nt, Homo sapiens
  misc_RNA (1)...(19): siRNA sense strand
uccugaaccuggccauuuc

SEQ ID NO: 81794 - RNA, 19 nt, Homo sapiens
  misc_RNA (1)...(19): siRNA sense strand
uuggugaugccauguguaa

SEQ ID NO: 81795 - RNA, 19 nt, Homo sapiens
  misc_RNA (1)...(19): siRNA sense strand
gaagagaacugcuguugaa

SEQ ID NO: 81796 - RNA, 19 nt, Homo sapiens
  misc_RNA (1)...(19): siRNA sense strand
gcaagaauauguauccuaa

SEQ ID NO: 81797 - RNA, 19 nt, Homo sapiens
  misc_RNA (1)...(19): siRNA sense strand
guaaugaacuauccacaua

SEQ ID NO: 81798 - RNA, 19 nt, Homo sapiens
  misc_RNA (1)...(19): siRNA sense strand
gauacagacuucacaaaua

SEQ ID NO: 81799 - RNA, 19 nt, Homo sapiens
  misc_RNA (1)...(19): siRNA sense strand
ggaaggagauucaauaagu

SEQ ID NO: 81800 - RNA, 19 nt, Homo sapiens
  misc_RNA (1)...(19): siRNA sense strand
gaagaucacuaauccaguu

SEQ ID NO: 81801 - RNA, 19 nt, Homo sapiens
  misc_RNA (1)...(19): siRNA sense strand
guaaugagcuggaugaagu

SEQ ID NO: 81802 - RNA, 19 nt, Homo sapiens
  misc_RNA (1)...(19): siRNA sense strand
agagagagcucaagagaaa

SEQ ID NO: 81803 - RNA, 19 nt, Homo sapiens
  misc_RNA (1)...(19): siRNA sense strand
agaaagagcugccaaacuu

SEQ ID NO: 81804 - RNA, 19 nt, Homo sapiens
  misc_RNA (1)...(19): siRNA sense strand
caagggaguucauggauuu

SEQ ID NO: 81805 - RNA, 19 nt, Homo sapiens
  misc_RNA (1)...(19): siRNA sense strand
ucacagauuugguucauaa

SEQ ID NO: 81806 - RNA, 19 nt, Homo sapiens
  misc_RNA (1)...(19): siRNA sense strand
ggacuaggauugugauugu

SEQ ID NO: 81807 - RNA, 19 nt, Homo sapiens
  misc_RNA (1)...(19): siRNA sense strand
gagaaagacuguacuucaa

SEQ ID NO: 81808 - RNA, 19 nt, Homo sapiens
  misc_RNA (1)...(19): siRNA sense strand
caagagaacuuuaugugau

SEQ ID NO: 81809 - RNA, 19 nt, Homo sapiens
  misc_RNA (1)...(19): siRNA sense strand
ccuaacagcuugcauuauu

SEQ ID NO: 81810 - RNA, 19 nt, Homo sapiens
  misc_RNA (1)...(19): siRNA sense strand
gaaguccuauccauuugua

SEQ ID NO: 81811 - RNA, 19 nt, Homo sapiens
  misc_RNA (1)...(19): siRNA sense strand
ggagugaaaggauuuguua

SEQ ID NO: 81812 - RNA, 19 nt, Homo sapiens
  misc_RNA (1)...(19): siRNA sense strand
ggacuugccacauauagua

SEQ ID NO: 81813 - RNA, 19 nt, Homo sapiens
  misc_RNA (1)...(19): siRNA sense strand
gaaauucgcaugaugucua

SEQ ID NO: 81814 - RNA, 19 nt, Homo sapiens
  misc_RNA (1)...(19): siRNA sense strand
uauaugccauugacuguua

SEQ ID NO: 81815 - RNA, 19 nt, Homo sapiens
  misc_RNA (1)...(19): siRNA sense strand
ggagcuaguugguauaaug

SEQ ID NO: 81816 - RNA, 19 nt, Homo sapiens
  misc_RNA (1)...(19): siRNA sense strand
gaugaaguccuauccauuu

SEQ ID NO: 81817 - RNA, 19 nt, Homo sapiens
  misc_RNA (1)...(19): siRNA sense strand
gaacauaaggccacuggaa

SEQ ID NO: 81818 - RNA, 19 nt, Homo sapiens
  misc_RNA (1)...(19): siRNA sense strand
ugaacuagguugugugaaa

SEQ ID NO: 81819 - RNA, 19 nt, Homo sapiens
  misc_RNA (1)...(19): siRNA sense strand
cauuagaacugucuuguug

SEQ ID NO: 81820 - RNA, 19 nt, Homo sapiens
  misc_RNA (1)...(19): siRNA sense strand
ugacacagauaaccggaua

SEQ ID NO: 81821 - RNA, 19 nt, Homo sapiens
  misc_RNA (1)...(19): siRNA sense strand
ccaaauaaaucagaugaga

SEQ ID NO: 81822 - RNA, 19 nt, Homo sapiens
  misc_RNA (1)...(19): siRNA sense strand
ugaagugacuauugaacua

SEQ ID NO: 81823 - RNA, 19 nt, Homo sapiens
  misc_RNA (1)...(19): siRNA sense strand
gaaauaugcauggaaauga

SEQ ID NO: 81824 - RNA, 19 nt, Homo sapiens
  misc_RNA (1)...(19): siRNA sense strand
gaaggagauucaauaagug

SEQ ID NO: 81825 - RNA, 19 nt, Homo sapiens
  misc_RNA (1)...(19): siRNA sense strand
gaacuagguugugugaaau

SEQ ID NO: 81826 - RNA, 19 nt, Homo sapiens
  misc_RNA (1)...(19): siRNA sense strand
caacagauucaaacaauga

SEQ ID NO: 81827 - RNA, 19 nt, Homo sapiens
  misc_RNA (1)...(19): siRNA sense strand
ugagaagguuugccaauga

SEQ ID NO: 81828 - RNA, 19 nt, Homo sapiens
  misc_RNA (1)...(19): siRNA sense strand
ugagaggacuuguaaugaa

SEQ ID NO: 81829 - RNA, 19 nt, Homo sapiens
  misc_RNA (1)...(19): siRNA sense strand
gaaauauccacuugagaaa

SEQ ID NO: 81830 - RNA, 19 nt, Homo sapiens
  misc_RNA (1)...(19): siRNA sense strand
gcauggaaaugaagugguu

SEQ ID NO: 81831 - RNA, 19 nt, Homo sapiens
  misc_RNA (1)...(19): siRNA sense strand
gaagaugaaauucgcauga

SEQ ID NO: 81832 - RNA, 19 nt, Homo sapiens
  misc_RNA (1)...(19): siRNA sense strand
gaacaaucgugagucuuug

SEQ ID NO: 81833 - RNA, 19 nt, Homo sapiens
  misc_RNA (1)...(19): siRNA sense strand
ucacuaauccaguuuauga

SEQ ID NO: 81834 - RNA, 19 nt, Homo sapiens
  misc_RNA (1)...(19): siRNA sense strand
gguagaccuugcaagaaua

SEQ ID NO: 81835 - RNA, 19 nt, Homo sapiens
  misc_RNA (1)...(19): siRNA sense strand
gagaagguuugccaaugaa

SEQ ID NO: 81836 - RNA, 19 nt, Homo sapiens
  misc_RNA (1)...(19): siRNA sense strand
ggaauaaagguacaaacaa

SEQ ID NO: 81837 - RNA, 19 nt, Homo sapiens
  misc_RNA (1)...(19): siRNA sense strand
gaccaaagccaucauugaa

SEQ ID NO: 81838 - RNA, 19 nt, Homo sapiens
  misc_RNA (1)...(19): siRNA sense strand
ggaacagaaucgaagauca

SEQ ID NO: 81839 - RNA, 19 nt, Homo sapiens
  misc_RNA (1)...(19): siRNA sense strand
gaaccagaauuuaaguaca

SEQ ID NO: 81840 - RNA, 19 nt, Homo sapiens
  misc_RNA (1)...(19): siRNA sense strand
gaagguuugccaaugaaua

SEQ ID NO: 81841 - RNA, 19 nt, Homo sapiens
  misc_RNA (1)...(19): siRNA sense strand
gauugucccuucucuaaau

SEQ ID NO: 81842 - RNA, 19 nt, Homo sapiens
  misc_RNA (1)...(19): siRNA sense strand
uguugaaccucauagaaua

SEQ ID NO: 81843 - RNA, 19 nt, Homo sapiens
  misc_RNA (1)...(19): siRNA sense strand
ggaaaucacaguauacaca

SEQ ID NO: 81844 - RNA, 19 nt, Homo sapiens
  misc_RNA (1)...(19): siRNA sense strand
gacuggaacuauuuacaaa

SEQ ID NO: 81845 - RNA, 19 nt, Homo sapiens
  misc_RNA (1)...(19): siRNA sense strand
gagaugaagacgagacuuu

SEQ ID NO: 81846 - RNA, 19 nt, Homo sapiens
  misc_RNA (1)...(19): siRNA sense strand
ggacagagcacugaauauc

SEQ ID NO: 81847 - RNA, 19 nt, Homo sapiens
  misc_RNA (1)...(19): siRNA sense strand
ugaaauauccacuugagaa

SEQ ID NO: 81848 - RNA, 19 nt, Homo sapiens
  misc_RNA (1)...(19): siRNA sense strand
gcaacaacuuugaccugaa

SEQ ID NO: 81849 - RNA, 19 nt, Homo sapiens
  misc_RNA (1)...(19): siRNA sense strand
ccaggaaggagauucaaua

SEQ ID NO: 81850 - RNA, 19 nt, Homo sapiens
  misc_RNA (1)...(19): siRNA sense strand
gcacaguugcuauaccuaa

SEQ ID NO: 81851 - RNA, 19 nt, Homo sapiens
  misc_RNA (1)...(19): siRNA sense strand
ggagaacaaucgugagucu

SEQ ID NO: 81852 - RNA, 19 nt, Homo sapiens
  misc_RNA (1)...(19): siRNA sense strand
ggaaauaugcauggaaaug

SEQ ID NO: 81853 - RNA, 19 nt, Homo sapiens
  misc_RNA (1)...(19): siRNA sense strand
gccaugaguuccaggauga

SEQ ID NO: 81854 - RNA, 19 nt, Homo sapiens
  misc_RNA (1)...(19): siRNA sense strand
gaucacuaauccaguuuau

SEQ ID NO: 81855 - RNA, 19 nt, Homo sapiens
  misc_RNA (1)...(19): siRNA sense strand
gcuuugaagugacuauuga

SEQ ID NO: 81856 - RNA, 19 nt, Homo sapiens
  misc_RNA (1)...(19): siRNA sense strand
ggacuggaacuauuuacaa

SEQ ID NO: 81857 - RNA, 19 nt, Homo sapiens
  misc_RNA (1)...(19): siRNA sense strand
uauaguaaaucaccagaug

SEQ ID NO: 81858 - RNA, 19 nt, Homo sapiens
  misc_RNA (1)...(19): siRNA sense strand
guucauaacacuagaauuc

SEQ ID NO: 81859 - RNA, 19 nt, Homo sapiens
  misc_RNA (1)...(19): siRNA sense strand
gaacuuacaaccuuacagu

SEQ ID NO: 81860 - RNA, 19 nt, Homo sapiens
  misc_RNA (1)...(19): siRNA sense strand
acagauaaccggauauuug

SEQ ID NO: 81861 - RNA, 19 nt, Homo sapiens
  misc_RNA (1)...(19): siRNA sense strand
ccagguguccauaacauua

SEQ ID NO: 81862 - RNA, 19 nt, Homo sapiens
  misc_RNA (1)...(19): siRNA sense strand
ggaguucauggauuuguua

SEQ ID NO: 81863 - RNA, 19 nt, Homo sapiens
  misc_RNA (1)...(19): siRNA sense strand
guuccaugcuggucacaua

SEQ ID NO: 81864 - RNA, 19 nt, Homo sapiens
  misc_RNA (1)...(19): siRNA sense strand
ccagugauccaacuacuaa

SEQ ID NO: 81865 - RNA, 19 nt, Homo sapiens
  misc_RNA (1)...(19): siRNA sense strand
gaaacaacagcaacaacuu

SEQ ID NO: 81866 - RNA, 19 nt, Homo sapiens
  misc_RNA (1)...(19): siRNA sense strand
uaaggccacuggaaucuau

SEQ ID NO: 81867 - RNA, 19 nt, Homo sapiens
  misc_RNA (1)...(19): siRNA sense strand
cagcccaguugcccaaaua

SEQ ID NO: 81868 - RNA, 19 nt, Homo sapiens
  misc_RNA (1)...(19): siRNA sense strand
gaauuucucugccugaacu

SEQ ID NO: 81869 - RNA, 19 nt, Homo sapiens
  misc_RNA (1)...(19): siRNA sense strand
ccaauaagcccaauguauc

SEQ ID NO: 81870 - RNA, 19 nt, Homo sapiens
  misc_RNA (1)...(19): siRNA sense strand
caggucaacuucacacuug

SEQ ID NO: 81871 - RNA, 19 nt, Homo sapiens
  misc_RNA (1)...(19): siRNA sense strand
aaauggagcuaguugguau

SEQ ID NO: 81872 - RNA, 19 nt, Homo sapiens
  misc_RNA (1)...(19): siRNA sense strand
caacaaauagcacuuucuu

SEQ ID NO: 81873 - RNA, 19 nt, Homo sapiens
  misc_RNA (1)...(19): siRNA sense strand
aaccucagaugaugaagua

SEQ ID NO: 81874 - RNA, 19 nt, Homo sapiens
  misc_RNA (1)...(19): siRNA sense strand
gaaagccaaucucuaaagc

SEQ ID NO: 81875 - RNA, 19 nt, Homo sapiens
  misc_RNA (1)...(19): siRNA sense strand
gaaaucacaguauacacaa

SEQ ID NO: 81876 - RNA, 19 nt, Homo sapiens
  misc_RNA (1)...(19): siRNA sense strand
guccggaaaucacaguaua

SEQ ID NO: 81877 - RNA, 19 nt, Homo sapiens
  misc_RNA (1)...(19): siRNA sense strand
gaaagacuguacuucaaaa

SEQ ID NO: 81878 - RNA, 19 nt, Homo sapiens
  misc_RNA (1)...(19): siRNA sense strand
cagaaucgaagaucacuaa

SEQ ID NO: 81879 - RNA, 19 nt, Homo sapiens
  misc_RNA (1)...(19): siRNA sense strand
guucuuuggugguuaacua

SEQ ID NO: 81880 - RNA, 19 nt, Homo sapiens
  misc_RNA (1)...(19): siRNA sense strand
aaggugguaugcaagauua

SEQ ID NO: 81881 - RNA, 19 nt, Homo sapiens
  misc_RNA (1)...(19): siRNA sense strand
uggcugguauuaaucauaa

SEQ ID NO: 81882 - RNA, 19 nt, Homo sapiens
  misc_RNA (1)...(19): siRNA sense strand
cuaacagcuugcauuauuu

SEQ ID NO: 81883 - RNA, 19 nt, Homo sapiens
  misc_RNA (1)...(19): siRNA sense strand
gggagguuauuuccaugua

SEQ ID NO: 81884 - RNA, 19 nt, Homo sapiens
  misc_RNA (1)...(19): siRNA sense strand
gaauauuccaggaggagua

SEQ ID NO: 81885 - RNA, 19 nt, Homo sapiens
  misc_RNA (1)...(19): siRNA sense strand
gagguucuuuggugguuaa

SEQ ID NO: 81886 - RNA, 19 nt, Homo sapiens
  misc_RNA (1)...(19): siRNA sense strand
ggagauucaauaaguguaa

SEQ ID NO: 81887 - RNA, 19 nt, Homo sapiens
  misc_RNA (1)...(19): siRNA sense strand
guaagaacuuuggaacaga

SEQ ID NO: 81888 - RNA, 19 nt, Homo sapiens
  misc_RNA (1)...(19): siRNA sense strand
ugaagugguuggaagagaa

SEQ ID NO: 81889 - RNA, 19 nt, Homo sapiens
  misc_RNA (1)...(19): siRNA sense strand
ccacuggaaucuauagcaa

SEQ ID NO: 81890 - RNA, 19 nt, Homo sapiens
  misc_RNA (1)...(19): siRNA sense strand
gcauuuggcaucucuuuau

SEQ ID NO: 81891 - RNA, 19 nt, Homo sapiens
  misc_RNA (1)...(19): siRNA sense strand
ggauacagacuucacaaau

SEQ ID NO: 81892 - RNA, 19 nt, Homo sapiens
  misc_RNA (1)...(19): siRNA sense strand
ucccagauguuucaaggua

SEQ ID NO: 81893 - RNA, 19 nt, Homo sapiens
  misc_RNA (1)...(19): siRNA sense strand
ggaagagaacugcuguuga

SEQ ID NO: 81894 - RNA, 19 nt, Homo sapiens
  misc_RNA (1)...(19): siRNA sense strand
gcaggacuggaacuauuua

SEQ ID NO: 81895 - RNA, 19 nt, Homo sapiens
  misc_RNA (1)...(19): siRNA sense strand
ccagguaucuacacuguua

SEQ ID NO: 81896 - RNA, 19 nt, Homo sapiens
  misc_RNA (1)...(19): siRNA sense strand
caacuucccugaucucaau

SEQ ID NO: 81897 - RNA, 19 nt, Homo sapiens
  misc_RNA (1)...(19): siRNA sense strand
gaauggugcuugaugagaa

SEQ ID NO: 81898 - RNA, 19 nt, Homo sapiens
  misc_RNA (1)...(19): siRNA sense strand
gggcggugguggccaauua

SEQ ID NO: 81899 - RNA, 19 nt, Homo sapiens
  misc_RNA (1)...(19): siRNA sense strand
ggagauuacuucccagaug

SEQ ID NO: 81900 - RNA, 19 nt, Homo sapiens
  misc_RNA (1)...(19): siRNA sense strand
gaacaugcacggcaacgaa

SEQ ID NO: 81901 - RNA, 19 nt, Homo sapiens
  misc_RNA (1)...(19): siRNA sense strand
gcaagggaaugcaagacuu

SEQ ID NO: 81902 - RNA, 19 nt, Homo sapiens
  misc_RNA (1)...(19): siRNA sense strand
aaacaagccuggguaucua

SEQ ID NO: 81903 - RNA, 19 nt, Homo sapiens
  misc_RNA (1)...(19): siRNA sense strand
ucagugggauuaaccauga

SEQ ID NO: 81904 - RNA, 19 nt, Homo sapiens
  misc_RNA (1)...(19): siRNA sense strand
gaacugcggagauuacuuc

SEQ ID NO: 81905 - RNA, 19 nt, Homo sapiens
  misc_RNA (1)...(19): siRNA sense strand
gggaagcccuaauccaguu

SEQ ID NO: 81906 - RNA, 19 nt, Homo sapiens
  misc_RNA (1)...(19): siRNA sense strand
caaauggaguggaccugaa

SEQ ID NO: 81907 - RNA, 19 nt, Homo sapiens
  misc_RNA (1)...(19): siRNA sense strand
acaauaaucucgccaaugc

SEQ ID NO: 81908 - RNA, 19 nt, Homo sapiens
  misc_RNA (1)...(19): siRNA sense strand
aaccagaggucaaguaugu

SEQ ID NO: 81909 - RNA, 19 nt, Homo sapiens
  misc_RNA (1)...(19): siRNA sense strand
ccaauuacccguaugacaa

SEQ ID NO: 81910 - RNA, 19 nt, Homo sapiens
  misc_RNA (1)...(19): siRNA sense strand
ggaaugcaagacuuuaauu

SEQ ID NO: 81911 - RNA, 19 nt, Homo sapiens
  misc_RNA (1)...(19): siRNA sense strand
agaagcaucccucaaguaa

SEQ ID NO: 81912 - RNA, 19 nt, Homo sapiens
  misc_RNA (1)...(19): siRNA sense strand
gaugcacuccuucaacuuu

SEQ ID NO: 81913 - RNA, 19 nt, Homo sapiens
  misc_RNA (1)...(19): siRNA sense strand
cauaccaacugcuuugaga

SEQ ID NO: 81914 - RNA, 19 nt, Homo sapiens
  misc_RNA (1)...(19): siRNA sense strand
ccacagcaccuggguauga

SEQ ID NO: 81915 - RNA, 19 nt, Homo sapiens
  misc_RNA (1)...(19): siRNA sense strand
agaaagaaauggagaugag

SEQ ID NO: 81916 - RNA, 19 nt, Homo sapiens
  misc_RNA (1)...(19): siRNA sense strand
gaaagaaagaaauggagau

SEQ ID NO: 81917 - RNA, 19 nt, Homo sapiens
  misc_RNA (1)...(19): siRNA sense strand
ucccugaucucaauaccua

SEQ ID NO: 81918 - RNA, 19 nt, Homo sapiens
  misc_RNA (1)...(19): siRNA sense strand
gcacggagucagagccaaa

SEQ ID NO: 81919 - RNA, 19 nt, Homo sapiens
  misc_RNA (1)...(19): siRNA sense strand
ggaaccagaggucaaguau

SEQ ID NO: 81920 - RNA, 19 nt, Homo sapiens
  misc_RNA (1)...(19): siRNA sense strand
caagggaaugcaagacuuu

SEQ ID NO: 81921 - RNA, 19 nt, Homo sapiens
  misc_RNA (1)...(19): siRNA sense strand
acgacaagcucuuccagaa

SEQ ID NO: 81922 - RNA, 19 nt, Homo sapiens
  misc_RNA (1)...(19): siRNA sense strand
caaacaagccuggguaucu

SEQ ID NO: 81923 - RNA, 19 nt, Homo sapiens
  misc_RNA (1)...(19): siRNA sense strand
gguuggaacugcggagauu

SEQ ID NO: 81924 - RNA, 19 nt, Homo sapiens
  misc_RNA (1)...(19): siRNA sense strand
aaagaagcaucccucaagu

SEQ ID NO: 81925 - RNA, 19 nt, Homo sapiens
  misc_RNA (1)...(19): siRNA sense strand
caggaacaaugcaaaugga

SEQ ID NO: 81926 - RNA, 19 nt, Homo sapiens
  misc_RNA (1)...(19): siRNA sense strand
gcaggaacaaugcaaaugg

SEQ ID NO: 81927 - RNA, 19 nt, Homo sapiens
  misc_RNA (1)...(19): siRNA sense strand
caacguugguuaacuucca

SEQ ID NO: 81928 - RNA, 19 nt, Homo sapiens
  misc_RNA (1)...(19): siRNA sense strand
uaaccaugaugucacuuca

SEQ ID NO: 81929 - RNA, 19 nt, Homo sapiens
  misc_RNA (1)...(19): siRNA sense strand
gccaaggucuacuccuaug

SEQ ID NO: 81930 - RNA, 19 nt, Homo sapiens
  misc_RNA (1)...(19): siRNA sense strand
uggccaaggucuacuccua

SEQ ID NO: 81931 - RNA, 19 nt, Homo sapiens
  misc_RNA (1)...(19): siRNA sense strand
caggugaccauggugauua

SEQ ID NO: 81932 - RNA, 19 nt, Homo sapiens
  misc_RNA (1)...(19): siRNA sense strand
gcaagacuuuaauuaucuc

SEQ ID NO: 81933 - RNA, 19 nt, Homo sapiens
  misc_RNA (1)...(19): siRNA sense strand
ggaauggugcuugaugaga

SEQ ID NO: 81934 - RNA, 19 nt, Homo sapiens
  misc_RNA (1)...(19): siRNA sense strand
ugaccauggugauuacuuc

SEQ ID NO: 81935 - RNA, 19 nt, Homo sapiens
  misc_RNA (1)...(19): siRNA sense strand
ccaccgcuaugaugaucuu

SEQ ID NO: 81936 - RNA, 19 nt, Homo sapiens
  misc_RNA (1)...(19): siRNA sense strand
gauuaaccaugaugucacu

SEQ ID NO: 81937 - RNA, 19 nt, Homo sapiens
  misc_RNA (1)...(19): siRNA sense strand
gggaguggcuggguaaucg

SEQ ID NO: 81938 - RNA, 19 nt, Homo sapiens
  misc_RNA (1)...(19): siRNA sense strand
ccagaaagaaagaaaugga

SEQ ID NO: 81939 - RNA, 19 nt, Homo sapiens
  misc_RNA (1)...(19): siRNA sense strand
ggaccugaaccgcaacuuc

SEQ ID NO: 81940 - RNA, 19 nt, Homo sapiens
  misc_RNA (1)...(19): siRNA sense strand
gaaccagaggucaaguaug

SEQ ID NO: 81941 - RNA, 19 nt, Homo sapiens
  misc_RNA (1)...(19): siRNA sense strand
aagcaucccucaaguaagc

SEQ ID NO: 81942 - RNA, 19 nt, Homo sapiens
  misc_RNA (1)...(19): siRNA sense strand
gggaaugcaagacuuuaau

SEQ ID NO: 81943 - RNA, 19 nt, Homo sapiens
  misc_RNA (1)...(19): siRNA sense strand
cuucaacuuuguucuuuca

SEQ ID NO: 81944 - RNA, 19 nt, Homo sapiens
  misc_RNA (1)...(19): siRNA sense strand
aagaagcaucccucaagua

SEQ ID NO: 81945 - RNA, 19 nt, Homo sapiens
  misc_RNA (1)...(19): siRNA sense strand
gggauuaaccaugauguca

SEQ ID NO: 81946 - RNA, 19 nt, Homo sapiens
  misc_RNA (1)...(19): siRNA sense strand
uuacaauaaucucgccaau

SEQ ID NO: 81947 - RNA, 19 nt, Homo sapiens
  misc_RNA (1)...(19): siRNA sense strand
gagaucacgcuggaacuga

SEQ ID NO: 81948 - RNA, 19 nt, Homo sapiens
  misc_RNA (1)...(19): siRNA sense strand
gguaugacccagagacagu

SEQ ID NO: 81949 - RNA, 19 nt, Homo sapiens
  misc_RNA (1)...(19): siRNA sense strand
gaaccgcaacuucccugau

SEQ ID NO: 81950 - RNA, 19 nt, Homo sapiens
  misc_RNA (1)...(19): siRNA sense strand
caagccagaaagaaagaaa

SEQ ID NO: 81951 - RNA, 19 nt, Homo sapiens
  misc_RNA (1)...(19): siRNA sense strand
cagaaggcacggagucaga

SEQ ID NO: 81952 - RNA, 19 nt, Homo sapiens
  misc_RNA (1)...(19): siRNA sense strand
agggaauggugcuugauga

SEQ ID NO: 81953 - RNA, 19 nt, Homo sapiens
  misc_RNA (1)...(19): siRNA sense strand
caauggggcuuccugguau

SEQ ID NO: 81954 - RNA, 19 nt, Homo sapiens
  misc_RNA (1)...(19): siRNA sense strand
cguaugacaaguccuuuga

SEQ ID NO: 81955 - RNA, 19 nt, Homo sapiens
  misc_RNA (1)...(19): siRNA sense strand
aagccuggguaucuaguug

SEQ ID NO: 81956 - RNA, 19 nt, Homo sapiens
  misc_RNA (1)...(19): siRNA sense strand
cuacuccuaugcacaugga

SEQ ID NO: 81957 - RNA, 19 nt, Homo sapiens
  misc_RNA (1)...(19): siRNA sense strand
gguggccaauuacccguau

SEQ ID NO: 81958 - RNA, 19 nt, Homo sapiens
  misc_RNA (1)...(19): siRNA sense strand
cuaguuggcaggaacaaug

SEQ ID NO: 81959 - RNA, 19 nt, Homo sapiens
  misc_RNA (1)...(19): siRNA sense strand
gcaacuucccugaucucaa

SEQ ID NO: 81960 - RNA, 19 nt, Homo sapiens
  misc_RNA (1)...(19): siRNA sense strand
ccgcuaugaugaucuugug

SEQ ID NO: 81961 - RNA, 19 nt, Homo sapiens
  misc_RNA (1)...(19): siRNA sense strand
ggucuacuccuaugcacau

SEQ ID NO: 81962 - RNA, 19 nt, Homo sapiens
  misc_RNA (1)...(19): siRNA sense strand
uaucuacuauaacgagaag

SEQ ID NO: 81963 - RNA, 19 nt, Homo sapiens
  misc_RNA (1)...(19): siRNA sense strand
ggacacgcgcauucacauc

SEQ ID NO: 81964 - RNA, 19 nt, Homo sapiens
  misc_RNA (1)...(19): siRNA sense strand
aaagaaagaaauggagaug

SEQ ID NO: 81965 - RNA, 19 nt, Homo sapiens
  misc_RNA (1)...(19): siRNA sense strand
acgcgggucuacagcauug

SEQ ID NO: 81966 - RNA, 19 nt, Homo sapiens
  misc_RNA (1)...(19): siRNA sense strand
gaucucaauaccuauaucu

SEQ ID NO: 81967 - RNA, 19 nt, Homo sapiens
  misc_RNA (1)...(19): siRNA sense strand
ccugaucucaauaccuaua

SEQ ID NO: 81968 - RNA, 19 nt, Homo sapiens
  misc_RNA (1)...(19): siRNA sense strand
ggccaaggucuacuccuau

SEQ ID NO: 81969 - RNA, 19 nt, Homo sapiens
  misc_RNA (1)...(19): siRNA sense strand
gcacuccuucaacuuuguu

SEQ ID NO: 81970 - RNA, 19 nt, Homo sapiens
  misc_RNA (1)...(19): siRNA sense strand
ucacgcgggucuacagcau

SEQ ID NO: 81971 - RNA, 19 nt, Homo sapiens
  misc_RNA (1)...(19): siRNA sense strand
gguuaacuuccaccucaaa

SEQ ID NO: 81972 - RNA, 19 nt, Homo sapiens
  misc_RNA (1)...(19): siRNA sense strand
aaccgcaacuucccugauc

SEQ ID NO: 81973 - RNA, 19 nt, Homo sapiens
  misc_RNA (1)...(19): siRNA sense strand
gaagcaucccucaaguaag

SEQ ID NO: 81974 - RNA, 19 nt, Homo sapiens
  misc_RNA (1)...(19): siRNA sense strand
gguaaucgggaagcccuaa

SEQ ID NO: 81975 - RNA, 19 nt, Homo sapiens
  misc_RNA (1)...(19): siRNA sense strand
ggaugcacuccuucaacuu

SEQ ID NO: 81976 - RNA, 19 nt, Homo sapiens
  misc_RNA (1)...(19): siRNA sense strand
uggaugcacuccuucaacu

SEQ ID NO: 81977 - RNA, 19 nt, Homo sapiens
  misc_RNA (1)...(19): siRNA sense strand
ccucaaguaagcccuguga

SEQ ID NO: 81978 - RNA, 19 nt, Homo sapiens
  misc_RNA (1)...(19): siRNA sense strand
ggaacugcggagauuacuu

SEQ ID NO: 81979 - RNA, 19 nt, Homo sapiens
  misc_RNA (1)...(19): siRNA sense strand
caauuacccguaugacaag

SEQ ID NO: 81980 - RNA, 19 nt, Homo sapiens
  misc_RNA (1)...(19): siRNA sense strand
gccaauuacccguaugaca

SEQ ID NO: 81981 - RNA, 19 nt, Homo sapiens
  misc_RNA (1)...(19): siRNA sense strand
uccuucaacuuuguucuuu

SEQ ID NO: 81982 - RNA, 19 nt, Homo sapiens
  misc_RNA (1)...(19): siRNA sense strand
guaugacccagagacagua

SEQ ID NO: 81983 - RNA, 19 nt, Homo sapiens
  misc_RNA (1)...(19): siRNA sense strand
caaggucuacuccuaugca
